United States Patent Application Publication US 2018/0305689 A1 - sequence listing, part 10

SEQ ID NO: 73136 - RNA, 19 nt, Artificial Sequence
  Description of Artificial Sequence: Synthetic oligonucleotide
  Sense strand starting at position 3923 of SEQ ID NO: 910
ugauuugucuguuuguuua

SEQ ID NO: 73137 - RNA, 19 nt, Artificial Sequence
  Description of Artificial Sequence: Synthetic oligonucleotide
  Antisense strand to SEQ ID NO: 73056
uaaacaaacagacaaauca

SEQ ID NO: 73138 - RNA, 19 nt, Artificial Sequence
  Description of Artificial Sequence: Synthetic oligonucleotide
  Sense strand starting at position 3941 of SEQ ID NO: 910
accuguuuauuucuuguau

SEQ ID NO: 73139 - RNA, 19 nt, Artificial Sequence
  Description of Artificial Sequence: Synthetic oligonucleotide
  Antisense strand to SEQ ID NO: 73058
auacaagaaauaaacaggu

SEQ ID NO: 73140 - RNA, 19 nt, Artificial Sequence
  Description of Artificial Sequence: Synthetic oligonucleotide
  Sense strand starting at position 3942 of SEQ ID NO: 910
ccuguuuauuucuuguauu

SEQ ID NO: 73141 - RNA, 19 nt, Artificial Sequence
  Description of Artificial Sequence: Synthetic oligonucleotide
  Antisense strand to SEQ ID NO: 73060
aauacaagaaauaaacagg

SEQ ID NO: 73142 - RNA, 19 nt, Artificial Sequence
  Description of Artificial Sequence: Synthetic oligonucleotide
  Sense strand starting at position 2 of SEQ ID NO: 911
cagcgugcucacucgucaa

SEQ ID NO: 73143 - RNA, 19 nt, Artificial Sequence
  Description of Artificial Sequence: Synthetic oligonucleotide
  Antisense strand to SEQ ID NO: 73062
uugacgagugagcacgcug

SEQ ID NO: 73144 - RNA, 19 nt, Artificial Sequence
  Description of Artificial Sequence: Synthetic oligonucleotide
  Sense strand starting at position 83 of SEQ ID NO: 911
ggcauaaaguugucaucug

SEQ ID NO: 73145 - RNA, 19 nt, Artificial Sequence
  Description of Artificial Sequence: Synthetic oligonucleotide
  Antisense strand to SEQ ID NO: 73064
cagaugacaacuuuaugcc

SEQ ID NO: 73146 - RNA, 19 nt, Artificial Sequence
  Description of Artificial Sequence: Synthetic oligonucleotide
  Sense strand starting at position 141 of SEQ ID NO: 911
gugugaauaugagucuuug

SEQ ID NO: 73147 - RNA, 19 nt, Artificial Sequence
  Description of Artificial Sequence: Synthetic oligonucleotide
  Antisense strand to SEQ ID NO: 73066
caaagacucauauucacac

SEQ ID NO: 73148 - RNA, 19 nt, Artificial Sequence
  Description of Artificial Sequence: Synthetic oligonucleotide
  Sense strand starting at position 145 of SEQ ID NO: 911
gaauaugagucuuugugaa

SEQ ID NO: 73149 - RNA, 19 nt, Artificial Sequence
  Description of Artificial Sequence: Synthetic oligonucleotide
  Antisense strand to SEQ ID NO: 73068
uucacaaagacucauauuc

SEQ ID NO: 73150 - RNA, 19 nt, Artificial Sequence
  Description of Artificial Sequence: Synthetic oligonucleotide
  Sense strand starting at position 147 of SEQ ID NO: 911
auaugagucuuugugaacc

SEQ ID NO: 73151 - RNA, 19 nt, Artificial Sequence
  Description of Artificial Sequence: Synthetic oligonucleotide
  Antisense strand to SEQ ID NO: 73070
gguucacaaagacucauau

SEQ ID NO: 73152 - RNA, 19 nt, Artificial Sequence
  Description of Artificial Sequence: Synthetic oligonucleotide
  Sense strand starting at position 288 of SEQ ID NO: 911
ucggcauugcugucuguca

SEQ ID NO: 73153 - RNA, 19 nt, Artificial Sequence
  Description of Artificial Sequence: Synthetic oligonucleotide
  Antisense strand to SEQ ID NO: 73072
ugacagacagcaaugccga

SEQ ID NO: 73154 - RNA, 19 nt, Artificial Sequence
  Description of Artificial Sequence: Synthetic oligonucleotide
  Sense strand starting at position 437 of SEQ ID NO: 911
aggcaacugguaugggaua

SEQ ID NO: 73155 - RNA, 19 nt, Artificial Sequence
  Description of Artificial Sequence: Synthetic oligonucleotide
  Antisense strand to SEQ ID NO: 73074
uaucccauaccaguugccu

SEQ ID NO: 73156 - RNA, 19 nt, Artificial Sequence
  Description of Artificial Sequence: Synthetic oligonucleotide
  Sense strand starting at position 477 of SEQ ID NO: 911
ggguccuauagacguccaa

SEQ ID NO: 73157 - RNA, 19 nt, Artificial Sequence
  Description of Artificial Sequence: Synthetic oligonucleotide
  Antisense strand to SEQ ID NO: 73076
uuggacgucuauaggaccc

SEQ ID NO: 73158 - RNA, 19 nt, Artificial Sequence
  Description of Artificial Sequence: Synthetic oligonucleotide
  Sense strand starting at position 481 of SEQ ID NO: 911
ccuauagacguccaagaug

SEQ ID NO: 73159 - RNA, 19 nt, Artificial Sequence
  Description of Artificial Sequence: Synthetic oligonucleotide
  Antisense strand to SEQ ID NO: 73078
caucuuggacgucuauagg

SEQ ID NO: 73160 - RNA, 19 nt, Artificial Sequence
  Description of Artificial Sequence: Synthetic oligonucleotide
  Sense strand starting at position 637 of SEQ ID NO: 911
ggaggaaacgucuaugcuc

SEQ ID NO: 73161 - RNA, 19 nt, Artificial Sequence
  Description of Artificial Sequence: Synthetic oligonucleotide
  Antisense strand to SEQ ID NO: 73080
gagcauagacguuuccucc

SEQ ID NO: 73162 - RNA, 19 nt, Artificial Sequence
  Description of Artificial Sequence: Synthetic oligonucleotide
  Sense strand starting at position 882 of SEQ ID NO: 911
ggcugaggucucgauccca

SEQ ID NO: 73163 - RNA, 19 nt, Artificial Sequence
  Description of Artificial Sequence: Synthetic oligonucleotide
  Antisense strand to SEQ ID NO: 73082
ugggaucgagaccucagcc

SEQ ID NO: 73164 - RNA, 19 nt, Artificial Sequence
  Description of Artificial Sequence: Synthetic oligonucleotide
  Sense strand starting at position 900 of SEQ ID NO: 911
aggcgaugugaguauguca

SEQ ID NO: 73165 - RNA, 19 nt, Artificial Sequence
  Description of Artificial Sequence: Synthetic oligonucleotide
  Antisense strand to SEQ ID NO: 73084
ugacauacucacaucgccu

SEQ ID NO: 73166 - RNA, 19 nt, Artificial Sequence
  Description of Artificial Sequence: Synthetic oligonucleotide
  Sense strand starting at position 1743 of SEQ ID NO: 911
ccuuguaaagcuuguagag

SEQ ID NO: 73167 - RNA, 19 nt, Artificial Sequence
  Description of Artificial Sequence: Synthetic oligonucleotide
  Antisense strand to SEQ ID NO: 73086
cucuacaagcuuuacaagg

SEQ ID NO: 73168 - RNA, 19 nt, Artificial Sequence
  Description of Artificial Sequence: Synthetic oligonucleotide
  Sense strand starting at position 2013 of SEQ ID NO: 911
ccguauguucuggacuaag

SEQ ID NO: 73169 - RNA, 19 nt, Artificial Sequence
  Description of Artificial Sequence: Synthetic oligonucleotide
  Antisense strand to SEQ ID NO: 73088
cuuaguccagaacauacgg

SEQ ID NO: 73170 - RNA, 19 nt, Artificial Sequence
  Description of Artificial Sequence: Synthetic oligonucleotide
  Sense strand starting at position 2059 of SEQ ID NO: 911
uguguacucccacacucaa

SEQ ID NO: 73171 - RNA, 19 nt, Artificial Sequence
  Description of Artificial Sequence: Synthetic oligonucleotide
  Antisense strand to SEQ ID NO: 73090
uugagugugggaguacaca

SEQ ID NO: 73172 - RNA, 19 nt, Artificial Sequence
  Description of Artificial Sequence: Synthetic oligonucleotide
  Sense strand starting at position 2130 of SEQ ID NO: 911
ggugauugcuaccugauca

SEQ ID NO: 73173 - RNA, 19 nt, Artificial Sequence
  Description of Artificial Sequence: Synthetic oligonucleotide
  Antisense strand to SEQ ID NO: 73092
ugaucagguagcaaucacc

SEQ ID NO: 73174 - RNA, 19 nt, Artificial Sequence
  Description of Artificial Sequence: Synthetic oligonucleotide
  Sense strand starting at position 2158 of SEQ ID NO: 911
ucuccauuuccuugugacu

SEQ ID NO: 73175 - RNA, 19 nt, Artificial Sequence
  Description of Artificial Sequence: Synthetic oligonucleotide
  Antisense strand to SEQ ID NO: 73094
agucacaaggaaauggaga

SEQ ID NO: 73176 - RNA, 19 nt, Artificial Sequence
  Description of Artificial Sequence: Synthetic oligonucleotide
  Sense strand starting at position 2164 of SEQ ID NO: 911
uuuccuugugacuaccauu

SEQ ID NO: 73177 - RNA, 19 nt, Artificial Sequence
  Description of Artificial Sequence: Synthetic oligonucleotide
  Antisense strand to SEQ ID NO: 73096
aaugguagucacaaggaaa

SEQ ID NO: 73178 - RNA, 19 nt, Artificial Sequence
  Description of Artificial Sequence: Synthetic oligonucleotide
  Sense strand starting at position 2233 of SEQ ID NO: 911
ggucauugccaacagucau

SEQ ID NO: 73179 - RNA, 19 nt, Artificial Sequence
  Description of Artificial Sequence: Synthetic oligonucleotide
  Antisense strand to SEQ ID NO: 73098
augacuguuggcaaugacc

SEQ ID NO: 73180 - RNA, 19 nt, Artificial Sequence
  Description of Artificial Sequence: Synthetic oligonucleotide
  Sense strand starting at position 2320 of SEQ ID NO: 911
ggguggugugauuaaagug

SEQ ID NO: 73181 - RNA, 19 nt, Artificial Sequence
  Description of Artificial Sequence: Synthetic oligonucleotide
  Antisense strand to SEQ ID NO: 73100
cacuuuaaucacaccaccc

SEQ ID NO: 73182 - RNA, 19 nt, Artificial Sequence
  Description of Artificial Sequence: Synthetic oligonucleotide
  Sense strand starting at position 2325 of SEQ ID NO: 911
gugugauuaaaguguuuga

SEQ ID NO: 73183 - RNA, 19 nt, Artificial Sequence
  Description of Artificial Sequence: Synthetic oligonucleotide
  Antisense strand to SEQ ID NO: 73102
ucaaacacuuuaaucacac

SEQ ID NO: 73184 - RNA, 19 nt, Artificial Sequence
  Description of Artificial Sequence: Synthetic oligonucleotide
  Sense strand starting at position 2328 of SEQ ID NO: 911
ugauuaaaguguuugagac

SEQ ID NO: 73185 - RNA, 19 nt, Artificial Sequence
  Description of Artificial Sequence: Synthetic oligonucleotide
  Antisense strand to SEQ ID NO: 73104
gucucaaacacuuuaauca

SEQ ID NO: 73186 - RNA, 19 nt, Artificial Sequence
  Description of Artificial Sequence: Synthetic oligonucleotide
  Sense strand starting at position 2329 of SEQ ID NO: 911
gauuaaaguguuugagaca

SEQ ID NO: 73187 - RNA, 19 nt, Artificial Sequence
  Description of Artificial Sequence: Synthetic oligonucleotide
  Antisense strand to SEQ ID NO: 73106
ugucucaaacacuuuaauc

SEQ ID NO: 73188 - RNA, 19 nt, Artificial Sequence
  Description of Artificial Sequence: Synthetic oligonucleotide
  Sense strand starting at position 2375 of SEQ ID NO: 911
agucuugagucauuagggu

SEQ ID NO: 73189 - RNA, 19 nt, Artificial Sequence
  Description of Artificial Sequence: Synthetic oligonucleotide
  Antisense strand to SEQ ID NO: 73108
acccuaaugacucaagacu

SEQ ID NO: 73190 - RNA, 19 nt, Artificial Sequence
  Description of Artificial Sequence: Synthetic oligonucleotide
  Sense strand starting at position 2382 of SEQ ID NO: 911
agucauuaggguugauucu

SEQ ID NO: 73191 - RNA, 19 nt, Artificial Sequence
  Description of Artificial Sequence: Synthetic oligonucleotide
  Antisense strand to SEQ ID NO: 73110
agaaucaacccuaaugacu

SEQ ID NO: 73192 - RNA, 19 nt, Artificial Sequence
  Description of Artificial Sequence: Synthetic oligonucleotide
  Sense strand starting at position 2450 of SEQ ID NO: 911
ugugauugcugauuucugu

SEQ ID NO: 73193 - RNA, 19 nt, Artificial Sequence
  Description of Artificial Sequence: Synthetic oligonucleotide
  Antisense strand to SEQ ID NO: 73112
acagaaaucagcaaucaca

SEQ ID NO: 73194 - RNA, 19 nt, Artificial Sequence
  Description of Artificial Sequence: Synthetic oligonucleotide
  Sense strand starting at position 2502 of SEQ ID NO: 911
cugucuugagcagagcuaa

SEQ ID NO: 73195 - RNA, 19 nt, Artificial Sequence
  Description of Artificial Sequence: Synthetic oligonucleotide
  Antisense strand to SEQ ID NO: 73114
uuagcucugcucaagacag

SEQ ID NO: 73196 - RNA, 19 nt, Artificial Sequence
  Description of Artificial Sequence: Synthetic oligonucleotide
  Sense strand starting at position 2532 of SEQ ID NO: 911
acuauagguccaggcuaua

SEQ ID NO: 73197 - RNA, 19 nt, Artificial Sequence
  Description of Artificial Sequence: Synthetic oligonucleotide
  Antisense strand to SEQ ID NO: 73116
uauagccuggaccuauagu

SEQ ID NO: 73198 - RNA, 19 nt, Artificial Sequence
  Description of Artificial Sequence: Synthetic oligonucleotide
  Sense strand starting at position 2567 of SEQ ID NO: 911
auaagacuguugguaucau

SEQ ID NO: 73199 - RNA, 19 nt, Artificial Sequence
  Description of Artificial Sequence: Synthetic oligonucleotide
  Antisense strand to SEQ ID NO: 73118
augauaccaacagucuuau

SEQ ID NO: 73200 - RNA, 19 nt, Artificial Sequence
  Description of Artificial Sequence: Synthetic oligonucleotide
  Sense strand starting at position 2577 of SEQ ID NO: 911
ugguaucaugagugggacu

SEQ ID NO: 73201 - RNA, 19 nt, Artificial Sequence
  Description of Artificial Sequence: Synthetic oligonucleotide
  Antisense strand to SEQ ID NO: 73120
agucccacucaugauacca

SEQ ID NO: 73202 - RNA, 19 nt, Artificial Sequence
  Description of Artificial Sequence: Synthetic oligonucleotide
  Sense strand starting at position 2578 of SEQ ID NO: 911
gguaucaugagugggacuu

SEQ ID NO: 73203 - RNA, 19 nt, Artificial Sequence
  Description of Artificial Sequence: Synthetic oligonucleotide
  Antisense strand to SEQ ID NO: 73122
aagucccacucaugauacc

SEQ ID NO: 73204 - RNA, 19 nt, Artificial Sequence
  Description of Artificial Sequence: Synthetic oligonucleotide
  Sense strand starting at position 2640 of SEQ ID NO: 911
uccucaugucaccguaaga

SEQ ID NO: 73205 - RNA, 19 nt, Artificial Sequence
  Description of Artificial Sequence: Synthetic oligonucleotide
  Antisense strand to SEQ ID NO: 73124
ucuuacggugacaugagga

SEQ ID NO: 73206 - RNA, 19 nt, Artificial Sequence
  Description of Artificial Sequence: Synthetic oligonucleotide
  Sense strand starting at position 2929 of SEQ ID NO: 911
gggugaguucuccagagca

SEQ ID NO: 73207 - RNA, 19 nt, Artificial Sequence
  Description of Artificial Sequence: Synthetic oligonucleotide
  Antisense strand to SEQ ID NO: 73126
ugcucuggagaacucaccc

SEQ ID NO: 73208 - RNA, 19 nt, Artificial Sequence
  Description of Artificial Sequence: Synthetic oligonucleotide
  Sense strand starting at position 2931 of SEQ ID NO: 911
gugaguucuccagagcacg

SEQ ID NO: 73209 - RNA, 19 nt, Artificial Sequence
  Description of Artificial Sequence: Synthetic oligonucleotide
  Antisense strand to SEQ ID NO: 73128
cgugcucuggagaacucac

SEQ ID NO: 73210 - RNA, 19 nt, Artificial Sequence
  Description of Artificial Sequence: Synthetic oligonucleotide
  Sense strand starting at position 2962 of SEQ ID NO: 911
ccgggcuucuaauuugagu

SEQ ID NO: 73211 - RNA, 19 nt, Artificial Sequence
  Description of Artificial Sequence: Synthetic oligonucleotide
  Antisense strand to SEQ ID NO: 73130
acucaaauuagaagcccgg

SEQ ID NO: 73212 - RNA, 19 nt, Artificial Sequence
  Description of Artificial Sequence: Synthetic oligonucleotide
  Sense strand starting at position 3142 of SEQ ID NO: 911
aucucuauucugggaccau

SEQ ID NO: 73213 - RNA, 19 nt, Artificial Sequence
  Description of Artificial Sequence: Synthetic oligonucleotide
  Antisense strand to SEQ ID NO: 73132
auggucccagaauagagau

SEQ ID NO: 73214 - RNA, 19 nt, Artificial Sequence
  Description of Artificial Sequence: Synthetic oligonucleotide
  Sense strand starting at position 3468 of SEQ ID NO: 911
cugaaucggccuuaugaac

SEQ ID NO: 73215 - RNA, 19 nt, Artificial Sequence
  Description of Artificial Sequence: Synthetic oligonucleotide
  Antisense strand to SEQ ID NO: 73134
guucauaaggccgauucag

SEQ ID NO: 73216 - RNA, 19 nt, Artificial Sequence
  Description of Artificial Sequence: Synthetic oligonucleotide
  Sense strand starting at position 3652 of SEQ ID NO: 911
cguuacuuaccagguaaga

SEQ ID NO: 73217 - RNA, 19 nt, Artificial Sequence
  Description of Artificial Sequence: Synthetic oligonucleotide
  Antisense strand to SEQ ID NO: 73136
ucuuaccugguaaguaacg

SEQ ID NO: 73218 - RNA, 19 nt, Artificial Sequence
  Description of Artificial Sequence: Synthetic oligonucleotide
  Sense strand starting at position 3668 of SEQ ID NO: 911
agagucagggucuggaaau

SEQ ID NO: 73219 - RNA, 19 nt, Artificial Sequence
  Description of Artificial Sequence: Synthetic oligonucleotide
  Antisense strand to SEQ ID NO: 73138
auuuccagacccugacucu

SEQ ID NO: 73220 - RNA, 19 nt, Artificial Sequence
  Description of Artificial Sequence: Synthetic oligonucleotide
  Sense strand starting at position 3773 of SEQ ID NO: 911
guaugcagaguuuagggaa

SEQ ID NO: 73221 - RNA, 19 nt, Artificial Sequence
  Description of Artificial Sequence: Synthetic oligonucleotide
  Antisense strand to SEQ ID NO: 73140
uucccuaaacucugcauac

SEQ ID NO: 73222 - RNA, 19 nt, Artificial Sequence
  Description of Artificial Sequence: Synthetic oligonucleotide
  Sense strand starting at position 22 of SEQ ID NO: 913
agaaauacuugucuguauu

SEQ ID NO: 73223 - RNA, 19 nt, Artificial Sequence
  Description of Artificial Sequence: Synthetic oligonucleotide
  Antisense strand to SEQ ID NO: 73142
aauacagacaaguauuucu

SEQ ID NO: 73224 - RNA, 19 nt, Artificial Sequence
  Description of Artificial Sequence: Synthetic oligonucleotide
  Sense strand starting at position 23 of SEQ ID NO: 913
gaaauacuugucuguauug

SEQ ID NO: 73225 - RNA, 19 nt, Artificial Sequence
  Description of Artificial Sequence: Synthetic oligonucleotide
  Antisense strand to SEQ ID NO: 73144
caauacagacaaguauuuc

SEQ ID NO: 73226 - RNA, 19 nt, Artificial Sequence
  Description of Artificial Sequence: Synthetic oligonucleotide
  Sense strand starting at position 25 of SEQ ID NO: 913
aauacuugucuguauugga

SEQ ID NO: 73227 - RNA, 19 nt, Artificial Sequence
  Description of Artificial Sequence: Synthetic oligonucleotide
  Antisense strand to SEQ ID NO: 73146
uccaauacagacaaguauu

SEQ ID NO: 73228 - RNA, 19 nt, Artificial Sequence
  Description of Artificial Sequence: Synthetic oligonucleotide
  Sense strand starting at position 258 of SEQ ID NO: 913
aaaguucgguuccucaauu

SEQ ID NO: 73229 - RNA, 19 nt, Artificial Sequence
  Description of Artificial Sequence: Synthetic oligonucleotide
  Antisense strand to SEQ ID NO: 73148
aauugaggaaccgaacuuu

SEQ ID NO: 73230 - RNA, 19 nt, Artificial Sequence
  Description of Artificial Sequence: Synthetic oligonucleotide
  Sense strand starting at position 348 of SEQ ID NO: 913
cucccaaugugguuuccaa

SEQ ID NO: 73231 - RNA, 19 nt, Artificial Sequence
  Description of Artificial Sequence: Synthetic oligonucleotide
  Antisense strand to SEQ ID NO: 73150
uuggaaaccacauugggag

SEQ ID NO: 73232 - RNA, 19 nt, Artificial Sequence
  Description of Artificial Sequence: Synthetic oligonucleotide
  Sense strand starting at position 632 of SEQ ID NO: 913
cgggaaaugcuaggaccua

SEQ ID NO: 73233 - RNA, 19 nt, Artificial Sequence
  Description of Artificial Sequence: Synthetic oligonucleotide
  Antisense strand to SEQ ID NO: 73152
uagguccuagcauuucccg

SEQ ID NO: 73234 - RNA, 19 nt, Artificial Sequence
  Description of Artificial Sequence: Synthetic oligonucleotide
  Sense strand starting at position 721 of SEQ ID NO: 913
agcuaagaaggguggcauu

SEQ ID NO: 73235 - RNA, 19 nt, Artificial Sequence
  Description of Artificial Sequence: Synthetic oligonucleotide
  Antisense strand to SEQ ID NO: 73154
aaugccacccuucuuagcu

SEQ ID NO: 73236 - RNA, 19 nt, Artificial Sequence
  Description of Artificial Sequence: Synthetic oligonucleotide
  Sense strand starting at position 731 of SEQ ID NO: 913
gguggcauuaccuguagau

SEQ ID NO: 73237 - RNA, 19 nt, Artificial Sequence
  Description of Artificial Sequence: Synthetic oligonucleotide
  Antisense strand to SEQ ID NO: 73156
aucuacagguaaugccacc

SEQ ID NO: 73238 - RNA, 19 nt, Artificial Sequence
  Description of Artificial Sequence: Synthetic oligonucleotide
  Sense strand starting at position 733 of SEQ ID NO: 913
uggcauuaccuguagauua

SEQ ID NO: 73239 - RNA, 19 nt, Artificial Sequence
  Description of Artificial Sequence: Synthetic oligonucleotide
  Antisense strand to SEQ ID NO: 73158
uaaucuacagguaaugcca

SEQ ID NO: 73240 - RNA, 19 nt, Artificial Sequence
  Description of Artificial Sequence: Synthetic oligonucleotide
  Sense strand starting at position 735 of SEQ ID NO: 913
gcauuaccuguagauuauu

SEQ ID NO: 73241 - RNA, 19 nt, Artificial Sequence
  Description of Artificial Sequence: Synthetic oligonucleotide
  Antisense strand to SEQ ID NO: 73160
aauaaucuacagguaaugc

SEQ ID NO: 73242 - RNA, 19 nt, Artificial Sequence
  Description of Artificial Sequence: Synthetic oligonucleotide
  Sense strand starting at position 809 of SEQ ID NO: 913
agcucuauuugagagaauc

SEQ ID NO: 73243 - RNA, 19 nt, Artificial Sequence
  Description of Artificial Sequence: Synthetic oligonucleotide
  Antisense strand to SEQ ID NO: 73162
gauucucucaaauagagcu

SEQ ID NO: 73244 - RNA, 19 nt, Artificial Sequence
  Description of Artificial Sequence: Synthetic oligonucleotide
  Sense strand starting at position 828 of SEQ ID NO: 913
agcacugacucagcuguaa

SEQ ID NO: 73245 - RNA, 19 nt, Artificial Sequence
  Description of Artificial Sequence: Synthetic oligonucleotide
  Antisense strand to SEQ ID NO: 73164
uuacagcugagucagugcu

SEQ ID NO: 73246 - RNA, 19 nt, Artificial Sequence
  Description of Artificial Sequence: Synthetic oligonucleotide
  Sense strand starting at position 832 of SEQ ID NO: 913
cugacucagcuguaauaaa

SEQ ID NO: 73247 - RNA, 19 nt, Artificial Sequence
  Description of Artificial Sequence: Synthetic oligonucleotide
  Antisense strand to SEQ ID NO: 73166
uuuauuacagcugagucag

SEQ ID NO: 73248 - RNA, 19 nt, Artificial Sequence
  Description of Artificial Sequence: Synthetic oligonucleotide
  Sense strand starting at position 863 of SEQ ID NO: 913
uuuguaaagcgauaccuga

SEQ ID NO: 73249 - RNA, 19 nt, Artificial Sequence
  Description of Artificial Sequence: Synthetic oligonucleotide
  Antisense strand to SEQ ID NO: 73168
ucagguaucgcuuuacaaa

SEQ ID NO: 73250 - RNA, 19 nt, Artificial Sequence
  Description of Artificial Sequence: Synthetic oligonucleotide
  Sense strand starting at position 913 of SEQ ID NO: 913
acgaaagccucuuucuuac

SEQ ID NO: 73251 - RNA, 19 nt, Artificial Sequence
  Description of Artificial Sequence: Synthetic oligonucleotide
  Antisense strand to SEQ ID NO: 73170
guaagaaagaggcuuucgu

SEQ ID NO: 73252 - RNA, 19 nt, Artificial Sequence
  Description of Artificial Sequence: Synthetic oligonucleotide
  Sense strand starting at position 1074 of SEQ ID NO: 913
auagccaaucuguggauua

SEQ ID NO: 73253 - RNA, 19 nt, Artificial Sequence
  Description of Artificial Sequence: Synthetic oligonucleotide
  Antisense strand to SEQ ID NO: 73172
uaauccacagauuggcuau

SEQ ID NO: 73254 - RNA, 19 nt, Artificial Sequence
  Description of Artificial Sequence: Synthetic oligonucleotide
  Sense strand starting at position 1079 of SEQ ID NO: 913
caaucuguggauuaaaugu

SEQ ID NO: 73255 - RNA, 19 nt, Artificial Sequence
  Description of Artificial Sequence: Synthetic oligonucleotide
  Antisense strand to SEQ ID NO: 73174
acauuuaauccacagauug

SEQ ID NO: 73256 - RNA, 19 nt, Artificial Sequence
  Description of Artificial Sequence: Synthetic oligonucleotide
  Sense strand starting at position 1085 of SEQ ID NO: 913
guggauuaaauguggacua

SEQ ID NO: 73257 - RNA, 19 nt, Artificial Sequence
  Description of Artificial Sequence: Synthetic oligonucleotide
  Antisense strand to SEQ ID NO: 73176
uaguccacauuuaauccac

SEQ ID NO: 73258 - RNA, 19 nt, Artificial Sequence
  Description of Artificial Sequence: Synthetic oligonucleotide
  Sense strand starting at position 1442 of SEQ ID NO: 913
gcacaugugucuccaacaa

SEQ ID NO: 73259 - RNA, 19 nt, Artificial Sequence
  Description of Artificial Sequence: Synthetic oligonucleotide
  Antisense strand to SEQ ID NO: 73178
uuguuggagacacaugugc

SEQ ID NO: 73260 - RNA, 19 nt, Artificial Sequence
  Description of Artificial Sequence: Synthetic oligonucleotide
  Sense strand starting at position 1472 of SEQ ID NO: 913
ucuggaaucuaggcaacau

SEQ ID NO: 73261 - RNA, 19 nt, Artificial Sequence
  Description of Artificial Sequence: Synthetic oligonucleotide
  Antisense strand to SEQ ID NO: 73180
auguugccuagauuccaga

SEQ ID NO: 73262 - RNA, 19 nt, Artificial Sequence
  Description of Artificial Sequence: Synthetic oligonucleotide
  Sense strand starting at position 1476 of SEQ ID NO: 913
gaaucuaggcaacauguua

SEQ ID NO: 73263 - RNA, 19 nt, Artificial Sequence
  Description of Artificial Sequence: Synthetic oligonucleotide
  Antisense strand to SEQ ID NO: 73182
uaacauguugccuagauuc

SEQ ID NO: 73264 - RNA, 19 nt, Artificial Sequence
  Description of Artificial Sequence: Synthetic oligonucleotide
  Sense strand starting at position 1484 of SEQ ID NO: 913
gcaacauguuagucaccaa

SEQ ID NO: 73265 - RNA, 19 nt, Artificial Sequence
  Description of Artificial Sequence: Synthetic oligonucleotide
  Antisense strand to SEQ ID NO: 73184
uuggugacuaacauguugc

SEQ ID NO: 73266 - RNA, 19 nt, Artificial Sequence
  Description of Artificial Sequence: Synthetic oligonucleotide
  Sense strand starting at position 1487 of SEQ ID NO: 913
acauguuagucaccaacuu

SEQ ID NO: 73267 - RNA, 19 nt, Artificial Sequence
  Description of Artificial Sequence: Synthetic oligonucleotide
  Antisense strand to SEQ ID NO: 73186
aaguuggugacuaacaugu

SEQ ID NO: 73268 - RNA, 19 nt, Artificial Sequence
  Description of Artificial Sequence: Synthetic oligonucleotide
  Sense strand starting at position 2632 of SEQ ID NO: 913
ccgaguguuguggauagaa

SEQ ID NO: 73269 - RNA, 19 nt, Artificial Sequence
  Description of Artificial Sequence: Synthetic oligonucleotide
  Antisense strand to SEQ ID NO: 73188
uucuauccacaacacucgg

SEQ ID NO: 73270 - RNA, 19 nt, Artificial Sequence
  Description of Artificial Sequence: Synthetic oligonucleotide
  Sense strand starting at position 2634 of SEQ ID NO: 913
gaguguuguggauagaacu

SEQ ID NO: 73271 - RNA, 19 nt, Artificial Sequence
  Description of Artificial Sequence: Synthetic oligonucleotide
  Antisense strand to SEQ ID NO: 73190
aguucuauccacaacacuc

SEQ ID NO: 73272 - RNA, 19 nt, Artificial Sequence
  Description of Artificial Sequence: Synthetic oligonucleotide
  Sense strand starting at position 2640 of SEQ ID NO: 913
uguggauagaacuguugau

SEQ ID NO: 73273 - RNA, 19 nt, Artificial Sequence
  Description of Artificial Sequence: Synthetic oligonucleotide
  Antisense strand to SEQ ID NO: 73192
aucaacaguucuauccaca

SEQ ID NO: 73274 - RNA, 19 nt, Artificial Sequence
  Description of Artificial Sequence: Synthetic oligonucleotide
  Sense strand starting at position 2649 of SEQ ID NO: 913
aacuguugaucucuuggaa

SEQ ID NO: 73275 - RNA, 19 nt, Artificial Sequence
  Description of Artificial Sequence: Synthetic oligonucleotide
  Antisense strand to SEQ ID NO: 73194
uuccaagagaucaacaguu

SEQ ID NO: 73276 - RNA, 19 nt, Artificial Sequence
  Description of Artificial Sequence: Synthetic oligonucleotide
  Sense strand starting at position 2725 of SEQ ID NO: 913
cuuucuuuccuguauauga

SEQ ID NO: 73277 - RNA, 19 nt, Artificial Sequence
  Description of Artificial Sequence: Synthetic oligonucleotide
  Antisense strand to SEQ ID NO: 73196
ucauauacaggaaagaaag

SEQ ID NO: 73278 - RNA, 19 nt, Artificial Sequence
  Description of Artificial Sequence: Synthetic oligonucleotide
  Sense strand starting at position 2778 of SEQ ID NO: 913
agcugccuucuuuagggaa

SEQ ID NO: 73279 - RNA, 19 nt, Artificial Sequence
  Description of Artificial Sequence: Synthetic oligonucleotide
  Antisense strand to SEQ ID NO: 73198
uucccuaaagaaggcagcu

SEQ ID NO: 73280 - RNA, 19 nt, Artificial Sequence
  Description of Artificial Sequence: Synthetic oligonucleotide
  Sense strand starting at position 2902 of SEQ ID NO: 913
acauuuaacgccugcugua

SEQ ID NO: 73281 - RNA, 19 nt, Artificial Sequence
  Description of Artificial Sequence: Synthetic oligonucleotide
  Antisense strand to SEQ ID NO: 73200
uacagcaggcguuaaaugu

SEQ ID NO: 73282 - RNA, 19 nt, Artificial Sequence
  Description of Artificial Sequence: Synthetic oligonucleotide
  Sense strand starting at position 2998 of SEQ ID NO: 913
ucuagugucauagguaaag

SEQ ID NO: 73283 - RNA, 19 nt, Artificial Sequence
  Description of Artificial Sequence: Synthetic oligonucleotide
  Antisense strand to SEQ ID NO: 73202
cuuuaccuaugacacuaga

SEQ ID NO: 73284 - RNA, 19 nt, Artificial Sequence
  Description of Artificial Sequence: Synthetic oligonucleotide
  Sense strand starting at position 3406 of SEQ ID NO: 913
cuuacuacaggauguaauu

SEQ ID NO: 73285 - RNA, 19 nt, Artificial Sequence
  Description of Artificial Sequence: Synthetic oligonucleotide
  Antisense strand to SEQ ID NO: 73204
aauuacauccuguaguaag

SEQ ID NO: 73286 - RNA, 19 nt, Artificial Sequence
  Description of Artificial Sequence: Synthetic oligonucleotide
  Sense strand starting at position 3656 of SEQ ID NO: 913
gagugaaauucugacauuu

SEQ ID NO: 73287 - RNA, 19 nt, Artificial Sequence
  Description of Artificial Sequence: Synthetic oligonucleotide
  Antisense strand to SEQ ID NO: 73206
aaaugucagaauuucacuc

SEQ ID NO: 73288 - RNA, 19 nt, Artificial Sequence
  Description of Artificial Sequence: Synthetic oligonucleotide
  Sense strand starting at position 3698 of SEQ ID NO: 913
ugaugauaugcugagugau

SEQ ID NO: 73289 - RNA, 19 nt, Artificial Sequence
  Description of Artificial Sequence: Synthetic oligonucleotide
  Antisense strand to SEQ ID NO: 73208
aucacucagcauaucauca

SEQ ID NO: 73290 - RNA, 19 nt, Artificial Sequence
  Description of Artificial Sequence: Synthetic oligonucleotide
  Sense strand starting at position 3700 of SEQ ID NO: 913
augauaugcugagugauau

SEQ ID NO: 73291 - RNA, 19 nt, Artificial Sequence
  Description of Artificial Sequence: Synthetic oligonucleotide
  Antisense strand to SEQ ID NO: 73210
auaucacucagcauaucau

SEQ ID NO: 73292 - RNA, 19 nt, Artificial Sequence
  Description of Artificial Sequence: Synthetic oligonucleotide
  Sense strand starting at position 3701 of SEQ ID NO: 913
ugauaugcugagugauaua

SEQ ID NO: 73293 - RNA, 19 nt, Artificial Sequence
  Description of Artificial Sequence: Synthetic oligonucleotide
  Antisense strand to SEQ ID NO: 73212
uauaucacucagcauauca

SEQ ID NO: 73294 - RNA, 19 nt, Artificial Sequence
  Description of Artificial Sequence: Synthetic oligonucleotide
  Sense strand starting at position 3711 of SEQ ID NO: 913
agugauauauaaucaguca

SEQ ID NO: 73295 - RNA, 19 nt, Artificial Sequence
  Description of Artificial Sequence: Synthetic oligonucleotide
  Antisense strand to SEQ ID NO: 73214
ugacugauuauauaucacu

SEQ ID NO: 73296 - RNA, 19 nt, Artificial Sequence
  Description of Artificial Sequence: Synthetic oligonucleotide
  Sense strand starting at position 3843 of SEQ ID NO: 913
aguuguuuaaugggugaug

SEQ ID NO: 73297 - RNA, 19 nt, Artificial Sequence
  Description of Artificial Sequence: Synthetic oligonucleotide
  Antisense strand to SEQ ID NO: 73216
caucacccauuaaacaacu

SEQ ID NO: 73298 - RNA, 19 nt, Artificial Sequence
  Description of Artificial Sequence: Synthetic oligonucleotide
  Sense strand starting at position 3845 of SEQ ID NO: 913
uuguuuaaugggugaugga

SEQ ID NO: 73299 - RNA, 19 nt, Artificial Sequence
  Description of Artificial Sequence: Synthetic oligonucleotide
  Antisense strand to SEQ ID NO: 73218
uccaucacccauuaaacaa

SEQ ID NO: 73300 - RNA, 19 nt, Artificial Sequence
  Description of Artificial Sequence: Synthetic oligonucleotide
  Sense strand starting at position 3889 of SEQ ID NO: 913
acugaaugccacugaacuu

SEQ ID NO: 73301 - RNA, 19 nt, Artificial Sequence
  Description of Artificial Sequence: Synthetic oligonucleotide
  Antisense strand to SEQ ID NO: 73220
aaguucaguggcauucagu

SEQ ID NO: 73302 - RNA, 19 nt, Artificial Sequence
  Description of Artificial Sequence: Synthetic oligonucleotide
  Sense strand starting at position 228 of SEQ ID NO: 912
cgggaaaugcuaggaccua

SEQ ID NO: 73303 - RNA, 19 nt, Artificial Sequence
  Description of Artificial Sequence: Synthetic oligonucleotide
  Antisense strand to SEQ ID NO: 73222
uagguccuagcauuucccg

SEQ ID NO: 73304 - RNA, 19 nt, Artificial Sequence
  Description of Artificial Sequence: Synthetic oligonucleotide
  Sense strand starting at position 317 of SEQ ID NO: 912
agcuaagaaggguggcauu

SEQ ID NO: 73305 - RNA, 19 nt, Artificial Sequence
  Description of Artificial Sequence: Synthetic oligonucleotide
  Antisense strand to SEQ ID NO: 73224
aaugccacccuucuuagcu

SEQ ID NO: 73306 - RNA, 19 nt, Artificial Sequence
  Description of Artificial Sequence: Synthetic oligonucleotide
  Sense strand starting at position 327 of SEQ ID NO: 912
gguggcauuaccuguagau

SEQ ID NO: 73307 - RNA, 19 nt, Artificial Sequence
  Description of Artificial Sequence: Synthetic oligonucleotide
  Antisense strand to SEQ ID NO: 73226
aucuacagguaaugccacc

SEQ ID NO: 73308 - RNA, 19 nt, Artificial Sequence
  Description of Artificial Sequence: Synthetic oligonucleotide
  Sense strand starting at position 329 of SEQ ID NO: 912
uggcauuaccuguagauua

SEQ ID NO: 73309 - RNA, 19 nt, Artificial Sequence
  Description of Artificial Sequence: Synthetic oligonucleotide
  Antisense strand to SEQ ID NO: 73228
uaaucuacagguaaugcca

SEQ ID NO: 73310 - RNA, 19 nt, Artificial Sequence
  Description of Artificial Sequence: Synthetic oligonucleotide
  Sense strand starting at position 331 of SEQ ID NO: 912
gcauuaccuguagauuauu

SEQ ID NO: 73311 - RNA, 19 nt, Artificial Sequence
  Description of Artificial Sequence: Synthetic oligonucleotide
  Antisense strand to SEQ ID NO: 73230
aauaaucuacagguaaugc

SEQ ID NO: 73312 - RNA, 19 nt, Artificial Sequence
  Description of Artificial Sequence: Synthetic oligonucleotide
  Sense strand starting at position 405 of SEQ ID NO: 912
agcucuauuugagagaauc

SEQ ID NO: 73313 - RNA, 19 nt, Artificial Sequence
  Description of Artificial Sequence: Synthetic oligonucleotide
  Antisense strand to SEQ ID NO: 73232
gauucucucaaauagagcu

SEQ ID NO: 73314 - RNA, 19 nt, Artificial Sequence
  Description of Artificial Sequence: Synthetic oligonucleotide
  Sense strand starting at position 424 of SEQ ID NO: 912
agcacugacucagcuguaa

SEQ ID NO: 73315 - RNA, 19 nt, Artificial Sequence
  Description of Artificial Sequence: Synthetic oligonucleotide
  Antisense strand to SEQ ID NO: 73234
uuacagcugagucagugcu

SEQ ID NO: 73316 - RNA, 19 nt, Artificial Sequence
  Description of Artificial Sequence: Synthetic oligonucleotide
  Sense strand starting at position 428 of SEQ ID NO: 912
cugacucagcuguaauaaa

SEQ ID NO: 73317 - RNA, 19 nt, Artificial Sequence
  Description of Artificial Sequence: Synthetic oligonucleotide
  Antisense strand to SEQ ID NO: 73236
uuuauuacagcugagucag

SEQ ID NO: 73318 - RNA, 19 nt, Artificial Sequence
  Description of Artificial Sequence: Synthetic oligonucleotide
  Sense strand starting at position 459 of SEQ ID NO: 912
uuuguaaagcgauaccuga

SEQ ID NO: 73319 - RNA, 19 nt, Artificial Sequence
  Description of Artificial Sequence: Synthetic oligonucleotide
  Antisense strand to SEQ ID NO: 73238
ucagguaucgcuuuacaaa

SEQ ID NO: 73320 - RNA, 19 nt, Artificial Sequence
  Description of Artificial Sequence: Synthetic oligonucleotide
  Sense strand starting at position 509 of SEQ ID NO: 912
acgaaagccucuuucuuac

SEQ ID NO: 73321 - RNA, 19 nt, Artificial Sequence
  Description of Artificial Sequence: Synthetic oligonucleotide
  Antisense strand to SEQ ID NO: 73240
guaagaaagaggcuuucgu

SEQ ID NO: 73322 - RNA, 19 nt, Artificial Sequence
  Description of Artificial Sequence: Synthetic oligonucleotide
  Sense strand starting at position 670 of SEQ ID NO: 912
auagccaaucuguggauua

SEQ ID NO: 73323 - RNA, 19 nt, Artificial Sequence
  Description of Artificial Sequence: Synthetic oligonucleotide
  Antisense strand to SEQ ID NO: 73242
uaauccacagauuggcuau

SEQ ID NO: 73324 - RNA, 19 nt, Artificial Sequence
  Description of Artificial Sequence: Synthetic oligonucleotide
  Sense strand starting at position 675 of SEQ ID NO: 912
caaucuguggauuaaaugu

SEQ ID NO: 73325 - RNA, 19 nt, Artificial Sequence
  Description of Artificial Sequence: Synthetic oligonucleotide
  Antisense strand to SEQ ID NO: 73244
acauuuaauccacagauug

SEQ ID NO: 73326 - RNA, 19 nt, Artificial Sequence
  Description of Artificial Sequence: Synthetic oligonucleotide
  Sense strand starting at position 681 of SEQ ID NO: 912
guggauuaaauguggacua

SEQ ID NO: 73327 - RNA, 19 nt, Artificial Sequence
  Description of Artificial Sequence: Synthetic oligonucleotide
  Antisense strand to SEQ ID NO: 73246
uaguccacauuuaauccac

SEQ ID NO: 73328 - RNA, 19 nt, Artificial Sequence
  Description of Artificial Sequence: Synthetic oligonucleotide
  Sense strand starting at position 1038 of SEQ ID NO: 912
gcacaugugucuccaacaa

SEQ ID NO: 73329 - RNA, 19 nt, Artificial Sequence
  Description of Artificial Sequence: Synthetic oligonucleotide
  Antisense strand to SEQ ID NO: 73248
uuguuggagacacaugugc

SEQ ID NO: 73330 - RNA, 19 nt, Artificial Sequence
  Description of Artificial Sequence: Synthetic oligonucleotide
  Sense strand starting at position 1068 of SEQ ID NO: 912
ucuggaaucuaggcaacau

SEQ ID NO: 73331 - RNA, 19 nt, Artificial Sequence
  Description of Artificial Sequence: Synthetic oligonucleotide
  Antisense strand to SEQ ID NO: 73250
auguugccuagauuccaga

SEQ ID NO: 73332 - RNA, 19 nt, Artificial Sequence
  Description of Artificial Sequence: Synthetic oligonucleotide
  Sense strand starting at position 1072 of SEQ ID NO: 912
gaaucuaggcaacauguua

SEQ ID NO: 73333 - RNA, 19 nt, Artificial Sequence
  Description of Artificial Sequence: Synthetic oligonucleotide
  Antisense strand to SEQ ID NO: 73252
uaacauguugccuagauuc

SEQ ID NO: 73334 - RNA, 19 nt, Artificial Sequence
  Description of Artificial Sequence: Synthetic oligonucleotide
  Sense strand starting at position 1080 of SEQ ID NO: 912
gcaacauguuagucaccaa

SEQ ID NO: 73335 - RNA, 19 nt, Artificial Sequence
  Description of Artificial Sequence: Synthetic oligonucleotide
  Antisense strand to SEQ ID NO: 73254
uuggugacuaacauguugc

SEQ ID NO: 73336 - RNA, 19 nt, Artificial Sequence
  Description of Artificial Sequence: Synthetic oligonucleotide
  Sense strand starting at position 1083 of SEQ ID NO: 912
acauguuagucaccaacuu

SEQ ID NO: 73337 - RNA, 19 nt, Artificial Sequence
  Description of Artificial Sequence: Synthetic oligonucleotide
  Antisense strand to SEQ ID NO: 73256
aaguuggugacuaacaugu

SEQ ID NO: 73338 - RNA, 19 nt, Artificial Sequence
  Description of Artificial Sequence: Synthetic oligonucleotide
  Sense strand starting at position 2228 of SEQ ID NO: 912
ccgaguguuguggauagaa

SEQ ID NO: 73339 - RNA, 19 nt, Artificial Sequence
  Description of Artificial Sequence: Synthetic oligonucleotide
  Antisense strand to SEQ ID NO: 73258
uucuauccacaacacucgg

SEQ ID NO: 73340 - RNA, 19 nt, Artificial Sequence
  Description of Artificial Sequence: Synthetic oligonucleotide
  Sense strand starting at position 2230 of SEQ ID NO: 912
gaguguuguggauagaacu

SEQ ID NO: 73341 - RNA, 19 nt, Artificial Sequence
  Description of Artificial Sequence: Synthetic oligonucleotide
  Antisense strand to SEQ ID NO: 73260
aguucuauccacaacacuc

SEQ ID NO: 73342 - RNA, 19 nt, Artificial Sequence
  Description of Artificial Sequence: Synthetic oligonucleotide
  Sense strand starting at position 2236 of SEQ ID NO: 912
uguggauagaacuguugau

SEQ ID NO: 73343 - RNA, 19 nt, Artificial Sequence
  Description of Artificial Sequence: Synthetic oligonucleotide
  Antisense strand to SEQ ID NO: 73262
aucaacaguucuauccaca

SEQ ID NO: 73344 - RNA, 19 nt, Artificial Sequence
  Description of Artificial Sequence: Synthetic oligonucleotide
  Sense strand starting at position 2245 of SEQ ID NO: 912
aacuguugaucucuuggaa

SEQ ID NO: 73345 - RNA, 19 nt, Artificial Sequence
  Description of Artificial Sequence: Synthetic oligonucleotide
  Antisense strand to SEQ ID NO: 73264
uuccaagagaucaacaguu

SEQ ID NO: 73346 - RNA, 19 nt, Artificial Sequence
  Description of Artificial Sequence: Synthetic oligonucleotide
  Sense strand starting at position 2321 of SEQ ID NO: 912
cuuucuuuccuguauauga

SEQ ID NO: 73347 - RNA, 19 nt, Artificial Sequence
  Description of Artificial Sequence: Synthetic oligonucleotide
  Antisense strand to SEQ ID NO: 73266
ucauauacaggaaagaaag

SEQ ID NO: 73348 - RNA, 19 nt, Artificial Sequence
  Description of Artificial Sequence: Synthetic oligonucleotide
  Sense strand starting at position 2374 of SEQ ID NO: 912
agcugccuucuuuagggaa

SEQ ID NO: 73349 - RNA, 19 nt, Artificial Sequence
  Description of Artificial Sequence: Synthetic oligonucleotide
  Antisense strand to SEQ ID NO: 73268
uucccuaaagaaggcagcu

SEQ ID NO: 73350 - RNA, 19 nt, Artificial Sequence
  Description of Artificial Sequence: Synthetic oligonucleotide
  Sense strand starting at position 2498 of SEQ ID NO: 912
acauuuaacgccugcugua

SEQ ID NO: 73351 - RNA, 19 nt, Artificial Sequence
  Description of Artificial Sequence: Synthetic oligonucleotide
  Antisense strand to SEQ ID NO: 73270
uacagcaggcguuaaaugu

SEQ ID NO: 73352 - RNA, 19 nt, Artificial Sequence
  Description of Artificial Sequence: Synthetic oligonucleotide
  Sense strand starting at position 2594 of SEQ ID NO: 912
ucuagugucauagguaaag

SEQ ID NO: 73353 - RNA, 19 nt, Artificial Sequence
  Description of Artificial Sequence: Synthetic oligonucleotide
  Antisense strand to SEQ ID NO: 73272
cuuuaccuaugacacuaga

SEQ ID NO: 73354 - RNA, 19 nt, Artificial Sequence
  Description of Artificial Sequence: Synthetic oligonucleotide
  Sense strand starting at position 3002 of SEQ ID NO: 912
cuuacuacaggauguaauu

SEQ ID NO: 73355 - RNA, 19 nt, Artificial Sequence
  Description of Artificial Sequence: Synthetic oligonucleotide
  Antisense strand to SEQ ID NO: 73274
aauuacauccuguaguaag

SEQ ID NO: 73356 - RNA, 19 nt, Artificial Sequence
  Description of Artificial Sequence: Synthetic oligonucleotide
  Sense strand starting at position 3252 of SEQ ID NO: 912
gagugaaauucugacauuu

SEQ ID NO: 73357 - RNA, 19 nt, Artificial Sequence
  Description of Artificial Sequence: Synthetic oligonucleotide
  Antisense strand to SEQ ID NO: 73276
aaaugucagaauuucacuc

SEQ ID NO: 73358 - RNA, 19 nt, Artificial Sequence
  Description of Artificial Sequence: Synthetic oligonucleotide
  Sense strand starting at position 3254 of SEQ ID NO: 912
gugaaauucugacauuugc

SEQ ID NO: 73359 - RNA, 19 nt, Artificial Sequence
  Description of Artificial Sequence: Synthetic oligonucleotide
  Antisense strand to SEQ ID NO: 73278
gcaaaugucagaauuucac

SEQ ID NO: 73360 - RNA, 19 nt, Artificial Sequence
  Description of Artificial Sequence: Synthetic oligonucleotide
  Sense strand starting at position 3294 of SEQ ID NO: 912
ugaugauaugcugagugau

SEQ ID NO: 73361 - RNA, 19 nt, Artificial Sequence
  Description of Artificial Sequence: Synthetic oligonucleotide
  Antisense strand to SEQ ID NO: 73280
aucacucagcauaucauca

SEQ ID NO: 73362 - RNA, 19 nt, Artificial Sequence
  Description of Artificial Sequence: Synthetic oligonucleotide
  Sense strand starting at position 3296 of SEQ ID NO: 912
augauaugcugagugauau

SEQ ID NO: 73363 - RNA, 19 nt, Artificial Sequence
  Description of Artificial Sequence: Synthetic oligonucleotide
  Antisense strand to SEQ ID NO: 73282
auaucacucagcauaucau

SEQ ID NO: 73364 - RNA, 19 nt, Artificial Sequence
  Description of Artificial Sequence: Synthetic oligonucleotide
  Sense strand starting at position 3297 of SEQ ID NO: 912
ugauaugcugagugauaua

SEQ ID NO: 73365 - RNA, 19 nt, Artificial Sequence
  Description of Artificial Sequence: Synthetic oligonucleotide
  Antisense strand to SEQ ID NO: 73284
uauaucacucagcauauca

SEQ ID NO: 73366 - RNA, 19 nt, Artificial Sequence
  Description of Artificial Sequence: Synthetic oligonucleotide
  Sense strand starting at position 3307 of SEQ ID NO: 912
agugauauauaaucaguca

SEQ ID NO: 73367 - RNA, 19 nt, Artificial Sequence
  Description of Artificial Sequence: Synthetic oligonucleotide
  Antisense strand to SEQ ID NO: 73286
ugacugauuauauaucacu

SEQ ID NO: 73368 - RNA, 19 nt, Artificial Sequence
  Description of Artificial Sequence: Synthetic oligonucleotide
  Sense strand starting at position 3439 of SEQ ID NO: 912
aguuguuuaaugggugaug

SEQ ID NO: 73369 - RNA, 19 nt, Artificial Sequence
  Description of Artificial Sequence: Synthetic oligonucleotide
  Antisense strand to SEQ ID NO: 73288
caucacccauuaaacaacu

SEQ ID NO: 73370 - RNA, 19 nt, Artificial Sequence
  Description of Artificial Sequence: Synthetic oligonucleotide
  Sense strand starting at position 3441 of SEQ ID NO: 912
uuguuuaaugggugaugga

SEQ ID NO: 73371 - RNA, 19 nt, Artificial Sequence
  Description of Artificial Sequence: Synthetic oligonucleotide
  Antisense strand to SEQ ID NO: 73290
uccaucacccauuaaacaa

SEQ ID NO: 73372 - RNA, 19 nt, Artificial Sequence
  Description of Artificial Sequence: Synthetic oligonucleotide
  Sense strand starting at position 3485 of SEQ ID NO: 912
acugaaugccacugaacuu

SEQ ID NO: 73373 - RNA, 19 nt, Artificial Sequence
  Description of Artificial Sequence: Synthetic oligonucleotide
  Antisense strand to SEQ ID NO: 73292
aaguucaguggcauucagu

SEQ ID NO: 73374 - RNA, 19 nt, Artificial Sequence
  Description of Artificial Sequence: Synthetic oligonucleotide
  Sense strand starting at position 3582 of SEQ ID NO: 912
acagcauuccuggaucuag

SEQ ID NO: 73375 - RNA, 19 nt, Artificial Sequence
  Description of Artificial Sequence: Synthetic oligonucleotide
  Antisense strand to SEQ ID NO: 73294
cuagauccaggaaugcugu

SEQ ID NO: 73376 - RNA, 19 nt, Artificial Sequence
  Description of Artificial Sequence: Synthetic oligonucleotide
  Sense strand starting at position 3696 of SEQ ID NO: 912
cuccuacucuuauuagagu

SEQ ID NO: 73377 - RNA, 19 nt, Artificial Sequence
  Description of Artificial Sequence: Synthetic oligonucleotide
  Antisense strand to SEQ ID NO: 73296
acucuaauaagaguaggag

SEQ ID NO: 73378 - RNA, 19 nt, Artificial Sequence
  Description of Artificial Sequence: Synthetic oligonucleotide
  Sense strand starting at position 3884 of SEQ ID NO: 912
guaaguccuacugaguuau

SEQ ID NO: 73379 - RNA, 19 nt, Artificial Sequence
  Description of Artificial Sequence: Synthetic oligonucleotide
  Antisense strand to SEQ ID NO: 73298
auaacucaguaggacuuac

SEQ ID NO: 73380 - RNA, 19 nt, Artificial Sequence
  Description of Artificial Sequence: Synthetic oligonucleotide
  Sense strand starting at position 3970 of SEQ ID NO: 912
cugcauaaccuuuggaagu

SEQ ID NO: 73381 - RNA, 19 nt, Artificial Sequence
  Description of Artificial Sequence: Synthetic oligonucleotide
  Antisense strand to SEQ ID NO: 73300
acuuccaaagguuaugcag

SEQ ID NO: 73382 - RNA, 19 nt, Artificial Sequence
  Description of Artificial Sequence: Synthetic oligonucleotide
  Sense strand starting at position 16 of SEQ ID NO: 914
cagggaguaguuugcaaga

SEQ ID NO: 73383 - RNA, 19 nt, Artificial Sequence
  Description of Artificial Sequence: Synthetic oligonucleotide
  Antisense strand to SEQ ID NO: 73302
ucuugcaaacuacucccug

SEQ ID NO: 73384 - RNA, 19 nt, Artificial Sequence
  Description of Artificial Sequence: Synthetic oligonucleotide
  Sense strand starting at position 18 of SEQ ID NO: 914
gggaguaguuugcaagaaa

SEQ ID NO: 73385 - RNA, 19 nt, Artificial Sequence
  Description of Artificial Sequence: Synthetic oligonucleotide
  Antisense strand to SEQ ID NO: 73304
uuucuugcaaacuacuccc

SEQ ID NO: 73386 - RNA, 19 nt, Artificial Sequence
  Description of Artificial Sequence: Synthetic oligonucleotide
  Sense strand starting at position 44 of SEQ ID NO: 914
aagugaagauguuucccau

SEQ ID NO: 73387 - RNA, 19 nt, Artificial Sequence
  Description of Artificial Sequence: Synthetic oligonucleotide
  Antisense strand to SEQ ID NO: 73306
augggaaacaucuucacuu

SEQ ID NO: 73388 - RNA, 19 nt, Artificial Sequence
  Description of Artificial Sequence: Synthetic oligonucleotide
  Sense strand starting at position 47 of SEQ ID NO: 914
ugaagauguuucccauucu

SEQ ID NO: 73389 - RNA, 19 nt, Artificial Sequence
  Description of Artificial Sequence: Synthetic oligonucleotide
  Antisense strand to SEQ ID NO: 73308
agaaugggaaacaucuuca

SEQ ID NO: 73390 - RNA, 19 nt, Artificial Sequence
  Description of Artificial Sequence: Synthetic oligonucleotide
  Sense strand starting at position 243 of SEQ ID NO: 914
gugcaaugcccagguguga

SEQ ID NO: 73391 - RNA, 19 nt, Artificial Sequence
  Description of Artificial Sequence: Synthetic oligonucleotide
  Antisense strand to SEQ ID NO: 73310
ucacaccugggcauugcac

SEQ ID NO: 73392 - RNA, 19 nt, Artificial Sequence
  Description of Artificial Sequence: Synthetic oligonucleotide
  Sense strand starting at position 247 of SEQ ID NO: 914
aaugcccaggugugaaauu

SEQ ID NO: 73393 - RNA, 19 nt, Artificial Sequence
  Description of Artificial Sequence: Synthetic oligonucleotide
  Antisense strand to SEQ ID NO: 73312
aauuucacaccugggcauu

SEQ ID NO: 73394 - RNA, 19 nt, Artificial Sequence
  Description of Artificial Sequence: Synthetic oligonucleotide
  Sense strand starting at position 259 of SEQ ID NO: 914
ugaaauugaugcucgggaa

SEQ ID NO: 73395 - RNA, 19 nt, Artificial Sequence
  Description of Artificial Sequence: Synthetic oligonucleotide
  Antisense strand to SEQ ID NO: 73314
uucccgagcaucaauuuca

SEQ ID NO: 73396 - RNA, 19 nt, Artificial Sequence
  Description of Artificial Sequence: Synthetic oligonucleotide
  Sense strand starting at position 260 of SEQ ID NO: 914
gaaauugaugcucgggaaa

SEQ ID NO: 73397 - RNA, 19 nt, Artificial Sequence
  Description of Artificial Sequence: Synthetic oligonucleotide
  Antisense strand to SEQ ID NO: 73316
uuucccgagcaucaauuuc

SEQ ID NO: 73398 - RNA, 19 nt, Artificial Sequence
  Description of Artificial Sequence: Synthetic oligonucleotide
  Sense strand starting at position 388 of SEQ ID NO: 914
ggugacagcucccagcaua

SEQ ID NO: 73399 - RNA, 19 nt, Artificial Sequence
  Description of Artificial Sequence: Synthetic oligonucleotide
  Antisense strand to SEQ ID NO: 73318
uaugcugggagcugucacc

SEQ ID NO: 73400 - RNA, 19 nt, Artificial Sequence
  Description of Artificial Sequence: Synthetic oligonucleotide
  Sense strand starting at position 433 of SEQ ID NO: 914
ccuguagagcccuggaagu

SEQ ID NO: 73401 - RNA, 19 nt, Artificial Sequence
  Description of Artificial Sequence: Synthetic oligonucleotide
  Antisense strand to SEQ ID NO: 73320
acuuccagggcucuacagg

SEQ ID NO: 73402 - RNA, 19 nt, Artificial Sequence
  Description of Artificial Sequence: Synthetic oligonucleotide
  Sense strand starting at position 647 of SEQ ID NO: 914
gguccaguuccagaacuau

SEQ ID NO: 73403 - RNA, 19 nt, Artificial Sequence
  Description of Artificial Sequence: Synthetic oligonucleotide
  Antisense strand to SEQ ID NO: 73322
auaguucuggaacuggacc

SEQ ID NO: 73404 - RNA, 19 nt, Artificial Sequence
  Description of Artificial Sequence: Synthetic oligonucleotide
  Sense strand starting at position 1726 of SEQ ID NO: 914
ggcucaggcucugguugau

SEQ ID NO: 73405 - RNA, 19 nt, Artificial Sequence
  Description of Artificial Sequence: Synthetic oligonucleotide
  Antisense strand to SEQ ID NO: 73324
aucaaccagagccugagcc

SEQ ID NO: 73406 - RNA, 19 nt, Artificial Sequence
  Description of Artificial Sequence: Synthetic oligonucleotide
  Sense strand starting at position 2355 of SEQ ID NO: 914
gguucagcgucuucucuga

SEQ ID NO: 73407 - RNA, 19 nt, Artificial Sequence
  Description of Artificial Sequence: Synthetic oligonucleotide
  Antisense strand to SEQ ID NO: 73326
ucagagaagacgcugaacc

SEQ ID NO: 73408 - RNA, 19 nt, Artificial Sequence
  Description of Artificial Sequence: Synthetic oligonucleotide
  Sense strand starting at position 2456 of SEQ ID NO: 914
agcugcuuuaucgggugaa

SEQ ID NO: 73409 - RNA, 19 nt, Artificial Sequence
  Description of Artificial Sequence: Synthetic oligonucleotide
  Antisense strand to SEQ ID NO: 73328
uucacccgauaaagcagcu

SEQ ID NO: 73410 - RNA, 19 nt, Artificial Sequence
  Description of Artificial Sequence: Synthetic oligonucleotide
  Sense strand starting at position 2457 of SEQ ID NO: 914
gcugcuuuaucgggugaag

SEQ ID NO: 73411 - RNA, 19 nt, Artificial Sequence
  Description of Artificial Sequence: Synthetic oligonucleotide
  Antisense strand to SEQ ID NO: 73330
cuucacccgauaaagcagc

SEQ ID NO: 73412 - RNA, 19 nt, Artificial Sequence
  Description of Artificial Sequence: Synthetic oligonucleotide
  Sense strand starting at position 2494 of SEQ ID NO: 914
auccgaguuccggagaaag

SEQ ID NO: 73413 - RNA, 19 nt, Artificial Sequence
  Description of Artificial Sequence: Synthetic oligonucleotide
  Antisense strand to SEQ ID NO: 73332
cuuucuccggaacucggau

SEQ ID NO: 73414 - RNA, 19 nt, Artificial Sequence
  Description of Artificial Sequence: Synthetic oligonucleotide
  Sense strand starting at position 2496 of SEQ ID NO: 914
ccgaguuccggagaaaggu

SEQ ID NO: 73415 - RNA, 19 nt, Artificial Sequence
  Description of Artificial Sequence: Synthetic oligonucleotide
  Antisense strand to SEQ ID NO: 73334
accuuucuccggaacucgg

SEQ ID NO: 73416 - RNA, 19 nt, Artificial Sequence
  Description of Artificial Sequence: Synthetic oligonucleotide
  Sense strand starting at position 2505 of SEQ ID NO: 914
ggagaaaggucgugacuug

SEQ ID NO: 73417 - RNA, 19 nt, Artificial Sequence
  Description of Artificial Sequence: Synthetic oligonucleotide
  Antisense strand to SEQ ID NO: 73336
caagucacgaccuuucucc

SEQ ID NO: 73418 - RNA, 19 nt, Artificial Sequence
  Description of Artificial Sequence: Synthetic oligonucleotide
  Sense strand starting at position 2613 of SEQ ID NO: 914
ggcggcuugccuaguuaag

SEQ ID NO: 73419 - RNA, 19 nt, Artificial Sequence
  Description of Artificial Sequence: Synthetic oligonucleotide
  Antisense strand to SEQ ID NO: 73338
cuuaacuaggcaagccgcc

SEQ ID NO: 73420 - RNA, 19 nt, Artificial Sequence
  Description of Artificial Sequence: Synthetic oligonucleotide
  Sense strand starting at position 2614 of SEQ ID NO: 914
gcggcuugccuaguuaaga

SEQ ID NO: 73421 - RNA, 19 nt, Artificial Sequence
  Description of Artificial Sequence: Synthetic oligonucleotide
  Antisense strand to SEQ ID NO: 73340
ucuuaacuaggcaagccgc

SEQ ID NO: 73422 - RNA, 19 nt, Artificial Sequence
  Description of Artificial Sequence: Synthetic oligonucleotide
  Sense strand starting at position 2615 of SEQ ID NO: 914
cggcuugccuaguuaagag

SEQ ID NO: 73423 - RNA, 19 nt, Artificial Sequence
  Description of Artificial Sequence: Synthetic oligonucleotide
  Antisense strand to SEQ ID NO: 73342
cucuuaacuaggcaagccg

SEQ ID NO: 73424 - RNA, 19 nt, Artificial Sequence
  Description of Artificial Sequence: Synthetic oligonucleotide
  Sense strand starting at position 2743 of SEQ ID NO: 914
cggguucucgcccgcaaga

SEQ ID NO: 73425 - RNA, 19 nt, Artificial Sequence
  Description of Artificial Sequence: Synthetic oligonucleotide
  Antisense strand to SEQ ID NO: 73344
ucuugcgggcgagaacccg

SEQ ID NO: 73426 - RNA, 19 nt, Artificial Sequence
  Description of Artificial Sequence: Synthetic oligonucleotide
  Sense strand starting at position 2745 of SEQ ID NO: 914
gguucucgcccgcaagaca

SEQ ID NO: 73427 - RNA, 19 nt, Artificial Sequence
  Description of Artificial Sequence: Synthetic oligonucleotide
  Antisense strand to SEQ ID NO: 73346
ugucuugcgggcgagaacc

SEQ ID NO: 73428 - RNA, 19 nt, Artificial Sequence
  Description of Artificial Sequence: Synthetic oligonucleotide
  Sense strand starting at position 3276 of SEQ ID NO: 914
ggcuuaacgcuuuaaggcu

SEQ ID NO: 73429 - RNA, 19 nt, Artificial Sequence
  Description of Artificial Sequence: Synthetic oligonucleotide
  Antisense strand to SEQ ID NO: 73348
agccuuaaagcguuaagcc

SEQ ID NO: 73430 - RNA, 19 nt, Artificial Sequence
  Description of Artificial Sequence: Synthetic oligonucleotide
  Sense strand starting at position 3282 of SEQ ID NO: 914
acgcuuuaaggcucgcuaa

SEQ ID NO: 73431 - RNA, 19 nt, Artificial Sequence
  Description of Artificial Sequence: Synthetic oligonucleotide
  Antisense strand to SEQ ID NO: 73350
uuagcgagccuuaaagcgu

SEQ ID NO: 73432 - RNA, 19 nt, Artificial Sequence
  Description of Artificial Sequence: Synthetic oligonucleotide
  Sense strand starting at position 3387 of SEQ ID NO: 914
ccuuguucuccgugguuga

SEQ ID NO: 73433 - RNA, 19 nt, Artificial Sequence
  Description of Artificial Sequence: Synthetic oligonucleotide
  Antisense strand to SEQ ID NO: 73352
ucaaccacggagaacaagg

SEQ ID NO: 73434 - RNA, 19 nt, Artificial Sequence
  Description of Artificial Sequence: Synthetic oligonucleotide
  Sense strand starting at position 3405 of SEQ ID NO: 914
aggccaguuugacuccaua

SEQ ID NO: 73435 - RNA, 19 nt, Artificial Sequence
  Description of Artificial Sequence: Synthetic oligonucleotide
  Antisense strand to SEQ ID NO: 73354
uauggagucaaacuggccu

SEQ ID NO: 73436 - RNA, 19 nt, Artificial Sequence
  Description of Artificial Sequence: Synthetic oligonucleotide
  Sense strand starting at position 3441 of SEQ ID NO: 914
uuaauuguucuuuaagagc

SEQ ID NO: 73437 - RNA, 19 nt, Artificial Sequence
  Description of Artificial Sequence: Synthetic oligonucleotide
  Antisense strand to SEQ ID NO: 73356
gcucuuaaagaacaauuaa

SEQ ID NO: 73438 - RNA, 19 nt, Artificial Sequence
  Description of Artificial Sequence: Synthetic oligonucleotide
  Sense strand starting at position 3683 of SEQ ID NO: 914
ccauuuccauugccaguua

SEQ ID NO: 73439 - RNA, 19 nt, Artificial Sequence
  Description of Artificial Sequence: Synthetic oligonucleotide
  Antisense strand to SEQ ID NO: 73358
uaacuggcaauggaaaugg

SEQ ID NO: 73440 - RNA, 19 nt, Artificial Sequence
  Description of Artificial Sequence: Synthetic oligonucleotide
  Sense strand starting at position 3727 of SEQ ID NO: 914
cuacucucccauuggguaa

SEQ ID NO: 73441 - RNA, 19 nt, Artificial Sequence
  Description of Artificial Sequence: Synthetic oligonucleotide
  Antisense strand to SEQ ID NO: 73360
uuacccaaugggagaguag

SEQ ID NO: 73442 - RNA, 19 nt, Artificial Sequence
  Description of Artificial Sequence: Synthetic oligonucleotide
  Sense strand starting at position 3813 of SEQ ID NO: 914
gaaggaguggucuggaauc

SEQ ID NO: 73443 - RNA, 19 nt, Artificial Sequence
  Description of Artificial Sequence: Synthetic oligonucleotide
  Antisense strand to SEQ ID NO: 73362
gauuccagaccacuccuuc

SEQ ID NO: 73444 - RNA, 19 nt, Artificial Sequence
  Description of Artificial Sequence: Synthetic oligonucleotide
  Sense strand starting at position 3929 of SEQ ID NO: 914
ggucccuauucuugggaag

SEQ ID NO: 73445 - RNA, 19 nt, Artificial Sequence
  Description of Artificial Sequence: Synthetic oligonucleotide
  Antisense strand to SEQ ID NO: 73364
cuucccaagaauagggacc

SEQ ID NO: 73446 - RNA, 19 nt, Artificial Sequence
  Description of Artificial Sequence: Synthetic oligonucleotide
  Sense strand starting at position 3930 of SEQ ID NO: 914
gucccuauucuugggaagu

SEQ ID NO: 73447 - RNA, 19 nt, Artificial Sequence
  Description of Artificial Sequence: Synthetic oligonucleotide
  Antisense strand to SEQ ID NO: 73366
acuucccaagaauagggac

SEQ ID NO: 73448 - RNA, 19 nt, Artificial Sequence
  Description of Artificial Sequence: Synthetic oligonucleotide
  Sense strand starting at position 3931 of SEQ ID NO: 914
ucccuauucuugggaagug

SEQ ID NO: 73449 - RNA, 19 nt, Artificial Sequence
  Description of Artificial Sequence: Synthetic oligonucleotide
  Antisense strand to SEQ ID NO: 73368
cacuucccaagaauaggga

SEQ ID NO: 73450 - RNA, 19 nt, Artificial Sequence
  Description of Artificial Sequence: Synthetic oligonucleotide
  Sense strand starting at position 3955 of SEQ ID NO: 914
gcccuuggguugaggagaa

SEQ ID NO: 73451 - RNA, 19 nt, Artificial Sequence
  Description of Artificial Sequence: Synthetic oligonucleotide
  Antisense strand to SEQ ID NO: 73370
uucuccucaacccaagggc

SEQ ID NO: 73452 - RNA, 19 nt, Artificial Sequence
  Description of Artificial Sequence: Synthetic oligonucleotide
  Sense strand starting at position 3941 of SEQ ID NO: 915
ggcaauuuguccucuaauu

SEQ ID NO: 73453 - RNA, 19 nt, Artificial Sequence
  Description of Artificial Sequence: Synthetic oligonucleotide
  Antisense strand to SEQ ID NO: 73372
aauuagaggacaaauugcc

SEQ ID NO: 73454 - RNA, 19 nt, Artificial Sequence
  Description of Artificial Sequence: Synthetic oligonucleotide
  Sense strand starting at position 3749 of SEQ ID NO: 915
agccgaguguuaagggcau

SEQ ID NO: 73455 - RNA, 19 nt, Artificial Sequence
  Description of Artificial Sequence: Synthetic oligonucleotide
  Antisense strand to SEQ ID NO: 73374
augcccuuaacacucggcu

SEQ ID NO: 73456 - RNA, 19 nt, Artificial Sequence
  Description of Artificial Sequence: Synthetic oligonucleotide
  Sense strand starting at position 3298 of SEQ ID NO: 915
agcccuguggcagaggaau

SEQ ID NO: 73457 - RNA, 19 nt, Artificial Sequence
  Description of Artificial Sequence: Synthetic oligonucleotide
  Antisense strand to SEQ ID NO: 73376
auuccucugccacagggcu

SEQ ID NO: 73458 - RNA, 19 nt, Artificial Sequence
  Description of Artificial Sequence: Synthetic oligonucleotide
  Sense strand starting at position 3253 of SEQ ID NO: 915
auugcuucugagggugaca

SEQ ID NO: 73459 - RNA, 19 nt, Artificial Sequence
  Description of Artificial Sequence: Synthetic oligonucleotide
  Antisense strand to SEQ ID NO: 73378
ugucacccucagaagcaau

SEQ ID NO: 73460 - RNA, 19 nt, Artificial Sequence
  Description of Artificial Sequence: Synthetic oligonucleotide
  Sense strand starting at position 3157 of SEQ ID NO: 915
ggaagucccuggguucaaa

SEQ ID NO: 73461 - RNA, 19 nt, Artificial Sequence
  Description of Artificial Sequence: Synthetic oligonucleotide
  Antisense strand to SEQ ID NO: 73380
uuugaacccagggacuucc

SEQ ID NO: 73462 - RNA, 19 nt, Artificial Sequence
  Description of Artificial Sequence: Synthetic oligonucleotide
  Sense strand starting at position 2962 of SEQ ID NO: 915
aggccacacuucgagagau

SEQ ID NO: 73463 - RNA, 19 nt, Artificial Sequence
  Description of Artificial Sequence: Synthetic oligonucleotide
  Antisense strand to SEQ ID NO: 73382
aucucucgaaguguggccu

SEQ ID NO: 73464 - RNA, 19 nt, Artificial Sequence
  Description of Artificial Sequence: Synthetic oligonucleotide
  Sense strand starting at position 2938 of SEQ ID NO: 915
cacugacauucugggaaga

SEQ ID NO: 73465 - RNA, 19 nt, Artificial Sequence
  Description of Artificial Sequence: Synthetic oligonucleotide
  Antisense strand to SEQ ID NO: 73384
ucuucccagaaugucagug

SEQ ID NO: 73466 - RNA, 19 nt, Artificial Sequence
  Description of Artificial Sequence: Synthetic oligonucleotide
  Sense strand starting at position 2929 of SEQ ID NO: 915
gcaggagaccacugacauu

SEQ ID NO: 73467 - RNA, 19 nt, Artificial Sequence
  Description of Artificial Sequence: Synthetic oligonucleotide
  Antisense strand to SEQ ID NO: 73386
aaugucaguggucuccugc

SEQ ID NO: 73468 - RNA, 19 nt, Artificial Sequence
  Description of Artificial Sequence: Synthetic oligonucleotide
  Sense strand starting at position 2876 of SEQ ID NO: 915
cuagaagucuacucccaug

SEQ ID NO: 73469 - RNA, 19 nt, Artificial Sequence
  Description of Artificial Sequence: Synthetic oligonucleotide
  Antisense strand to SEQ ID NO: 73388
caugggaguagacuucuag

SEQ ID NO: 73470 - RNA, 19 nt, Artificial Sequence
  Description of Artificial Sequence: Synthetic oligonucleotide
  Sense strand starting at position 2729 of SEQ ID NO: 915
uccuguguucucugacacu

SEQ ID NO: 73471 - RNA, 19 nt, Artificial Sequence
  Description of Artificial Sequence: Synthetic oligonucleotide
  Antisense strand to SEQ ID NO: 73390
agugucagagaacacagga

SEQ ID NO: 73472 - RNA, 19 nt, Artificial Sequence
  Description of Artificial Sequence: Synthetic oligonucleotide
  Sense strand starting at position 2538 of SEQ ID NO: 915
cccuaaugucgggacaaug

SEQ ID NO: 73473 - RNA, 19 nt, Artificial Sequence
  Description of Artificial Sequence: Synthetic oligonucleotide
  Antisense strand to SEQ ID NO: 73392
cauugucccgacauuaggg

SEQ ID NO: 73474 - RNA, 19 nt, Artificial Sequence
  Description of Artificial Sequence: Synthetic oligonucleotide
  Sense strand starting at position 2537 of SEQ ID NO: 915
gcccuaaugucgggacaau

SEQ ID NO: 73475 - RNA, 19 nt, Artificial Sequence
  Description of Artificial Sequence: Synthetic oligonucleotide
  Antisense strand to SEQ ID NO: 73394
auugucccgacauuagggc

SEQ ID NO: 73476 - RNA, 19 nt, Artificial Sequence
  Description of Artificial Sequence: Synthetic oligonucleotide
  Sense strand starting at position 2536 of SEQ ID NO: 915
ugcccuaaugucgggacaa

SEQ ID NO: 73477 - RNA, 19 nt, Artificial Sequence
  Description of Artificial Sequence: Synthetic oligonucleotide
  Antisense strand to SEQ ID NO: 73396
uugucccgacauuagggca

SEQ ID NO: 73478 - RNA, 19 nt, Artificial Sequence
  Description of Artificial Sequence: Synthetic oligonucleotide
  Sense strand starting at position 2526 of SEQ ID NO: 915
ccgcauuaguugcccuaau

SEQ ID NO: 73479 - RNA, 19 nt, Artificial Sequence
  Description of Artificial Sequence: Synthetic oligonucleotide
  Antisense strand to SEQ ID NO: 73398
auuagggcaacuaaugcgg

SEQ ID NO: 73480 - RNA, 19 nt, Artificial Sequence
  Description of Artificial Sequence: Synthetic oligonucleotide
  Sense strand starting at position 2043 of SEQ ID NO: 915
uagggacccucguuuacau

SEQ ID NO: 73481 - RNA, 19 nt, Artificial Sequence
  Description of Artificial Sequence: Synthetic oligonucleotide
  Antisense strand to SEQ ID NO: 73400
auguaaacgagggucccua

SEQ ID NO: 73482 - RNA, 19 nt, Artificial Sequence
  Description of Artificial Sequence: Synthetic oligonucleotide
  Sense strand starting at position 1945 of SEQ ID NO: 915
cccagaccuuucggaaguu

SEQ ID NO: 73483 - RNA, 19 nt, Artificial Sequence
  Description of Artificial Sequence: Synthetic oligonucleotide
  Antisense strand to SEQ ID NO: 73402
aacuuccgaaaggucuggg

SEQ ID NO: 73484 - RNA, 19 nt, Artificial Sequence
  Description of Artificial Sequence: Synthetic oligonucleotide
  Sense strand starting at position 1697 of SEQ ID NO: 915
ggagguugggaucguauca

SEQ ID NO: 73485 - RNA, 19 nt, Artificial Sequence
  Description of Artificial Sequence: Synthetic oligonucleotide
  Antisense strand to SEQ ID NO: 73404
ugauacgaucccaaccucc

SEQ ID NO: 73486 - RNA, 19 nt, Artificial Sequence
  Description of Artificial Sequence: Synthetic oligonucleotide
  Sense strand starting at position 1651 of SEQ ID NO: 915
cgaccauggaaaggucuau

SEQ ID NO: 73487 - RNA, 19 nt, Artificial Sequence
  Description of Artificial Sequence: Synthetic oligonucleotide
  Antisense strand to SEQ ID NO: 73406
auagaccuuuccauggucg

SEQ ID NO: 73488 - RNA, 19 nt, Artificial Sequence
  Description of Artificial Sequence: Synthetic oligonucleotide
  Sense strand starting at position 1491 of SEQ ID NO: 915
uuuauuuggccuugugcau

SEQ ID NO: 73489 - RNA, 19 nt, Artificial Sequence
  Description of Artificial Sequence: Synthetic oligonucleotide
  Antisense strand to SEQ ID NO: 73408
augcacaaggccaaauaaa

SEQ ID NO: 73490 - RNA, 19 nt, Artificial Sequence
  Description of Artificial Sequence: Synthetic oligonucleotide
  Sense strand starting at position 1466 of SEQ ID NO: 915
ucaagcgguccuugaggua

SEQ ID NO: 73491 - RNA, 19 nt, Artificial Sequence
  Description of Artificial Sequence: Synthetic oligonucleotide
  Antisense strand to SEQ ID NO: 73410
uaccucaaggaccgcuuga

SEQ ID NO: 73492 - RNA, 19 nt, Artificial Sequence
  Description of Artificial Sequence: Synthetic oligonucleotide
  Sense strand starting at position 1228 of SEQ ID NO: 915
gaggaagcguguugaggaa

SEQ ID NO: 73493 - RNA, 19 nt, Artificial Sequence
  Description of Artificial Sequence: Synthetic oligonucleotide
  Antisense strand to SEQ ID NO: 73412
uuccucaacacgcuuccuc

SEQ ID NO: 73494 - RNA, 19 nt, Artificial Sequence
  Description of Artificial Sequence: Synthetic oligonucleotide
  Sense strand starting at position 225 of SEQ ID NO: 915
cgcuuugugccggugggaa

SEQ ID NO: 73495 - RNA, 19 nt, Artificial Sequence
  Description of Artificial Sequence: Synthetic oligonucleotide
  Antisense strand to SEQ ID NO: 73414
uucccaccggcacaaagcg

SEQ ID NO: 73496 - RNA, 19 nt, Artificial Sequence
  Description of Artificial Sequence: Synthetic oligonucleotide
  Sense strand starting at position 224 of SEQ ID NO: 915
gcgcuuugugccgguggga

SEQ ID NO: 73497 - RNA, 19 nt, Artificial Sequence
  Description of Artificial Sequence: Synthetic oligonucleotide
  Antisense strand to SEQ ID NO: 73416
ucccaccggcacaaagcgc

SEQ ID NO: 73498 - RNA, 19 nt, Artificial Sequence
  Description of Artificial Sequence: Synthetic oligonucleotide
  Sense strand starting at position 146 of SEQ ID NO: 915
gaaggagguccuuggaagu

SEQ ID NO: 73499 - RNA, 19 nt, Artificial Sequence
  Description of Artificial Sequence: Synthetic oligonucleotide
  Antisense strand to SEQ ID NO: 73418
acuuccaaggaccuccuuc

SEQ ID NO: 73500 - RNA, 19 nt, Artificial Sequence
  Description of Artificial Sequence: Synthetic oligonucleotide
  Sense strand starting at position 1934 of SEQ ID NO: 916
caggccguuucccuauuua

SEQ ID NO: 73501 - RNA, 19 nt, Artificial Sequence
  Description of Artificial Sequence: Synthetic oligonucleotide
  Antisense strand to SEQ ID NO: 73420
uaaauagggaaacggccug

SEQ ID NO: 73502 - RNA, 19 nt, Artificial Sequence
  Description of Artificial Sequence: Synthetic oligonucleotide
  Sense strand starting at position 2446 of SEQ ID NO: 916
cuccgaguuugauccgaca

SEQ ID NO: 73503 - RNA, 19 nt, Artificial Sequence
  Description of Artificial Sequence: Synthetic oligonucleotide
  Antisense strand to SEQ ID NO: 73422
ugucggaucaaacucggag

SEQ ID NO: 73504 - RNA, 19 nt, Artificial Sequence
  Description of Artificial Sequence: Synthetic oligonucleotide
  Sense strand starting at position 2836 of SEQ ID NO: 916
ggccacuguuaauauaacu

SEQ ID NO: 73505 - RNA, 19 nt, Artificial Sequence
  Description of Artificial Sequence: Synthetic oligonucleotide
  Antisense strand to SEQ ID NO: 73424
aguuauauuaacaguggcc

SEQ ID NO: 73506 - RNA, 19 nt, Artificial Sequence
  Description of Artificial Sequence: Synthetic oligonucleotide
  Sense strand starting at position 3081 of SEQ ID NO: 916
ucagcagucacguaagaga

SEQ ID NO: 73507 - RNA, 19 nt, Artificial Sequence
  Description of Artificial Sequence: Synthetic oligonucleotide
  Antisense strand to SEQ ID NO: 73426
ucucuuacgugacugcuga

SEQ ID NO: 73508 - RNA, 19 nt, Artificial Sequence
  Description of Artificial Sequence: Synthetic oligonucleotide
  Sense strand starting at position 3090 of SEQ ID NO: 916
acguaagagaaccgaauua

SEQ ID NO: 73509 - RNA, 19 nt, Artificial Sequence
  Description of Artificial Sequence: Synthetic oligonucleotide
  Antisense strand to SEQ ID NO: 73428
uaauucgguucucuuacgu

SEQ ID NO: 73510 - RNA, 19 nt, Artificial Sequence
  Description of Artificial Sequence: Synthetic oligonucleotide
  Sense strand starting at position 3389 of SEQ ID NO: 916
gguuucugugcggaagcuu

SEQ ID NO: 73511 - RNA, 19 nt, Artificial Sequence
  Description of Artificial Sequence: Synthetic oligonucleotide
  Antisense strand to SEQ ID NO: 73430
aagcuuccgcacagaaacc

SEQ ID NO: 73512 - RNA, 19 nt, Artificial Sequence
  Description of Artificial Sequence: Synthetic oligonucleotide
  Sense strand starting at position 435 of SEQ ID NO: 916
cgggaagauucugggcacu

SEQ ID NO: 73513 - RNA, 19 nt, Artificial Sequence
  Description of Artificial Sequence: Synthetic oligonucleotide
  Antisense strand to SEQ ID NO: 73432
agugcccagaaucuucccg

SEQ ID NO: 73514 - RNA, 19 nt, Artificial Sequence
  Description of Artificial Sequence: Synthetic oligonucleotide
  Sense strand starting at position 437 of SEQ ID NO: 916
ggaagauucugggcacuca

SEQ ID NO: 73515 - RNA, 19 nt, Artificial Sequence
  Description of Artificial Sequence: Synthetic oligonucleotide
  Antisense strand to SEQ ID NO: 73434
ugagugcccagaaucuucc

SEQ ID NO: 73516 - RNA, 19 nt, Artificial Sequence
  Description of Artificial Sequence: Synthetic oligonucleotide
  Sense strand starting at position 780 of SEQ ID NO: 916
ugacgcagacucuggaaua

SEQ ID NO: 73517 - RNA, 19 nt, Artificial Sequence
  Description of Artificial Sequence: Synthetic oligonucleotide
  Antisense strand to SEQ ID NO: 73436
uauuccagagucugcguca

SEQ ID NO: 73518 - RNA, 19 nt, Artificial Sequence
  Description of Artificial Sequence: Synthetic oligonucleotide
  Sense strand starting at position 781 of SEQ ID NO: 916
gacgcagacucuggaauaa

SEQ ID NO: 73519 - RNA, 19 nt, Artificial Sequence
  Description of Artificial Sequence: Synthetic oligonucleotide
  Antisense strand to SEQ ID NO: 73438
uuauuccagagucugcguc

SEQ ID NO: 73520 - RNA, 19 nt, Artificial Sequence
  Description of Artificial Sequence: Synthetic oligonucleotide
  Sense strand starting at position 814 of SEQ ID NO: 916
cugcuacagucucggcaaa

SEQ ID NO: 73521 - RNA, 19 nt, Artificial Sequence
  Description of Artificial Sequence: Synthetic oligonucleotide
  Antisense strand to SEQ ID NO: 73440
uuugccgagacuguagcag

SEQ ID NO: 73522 - RNA, 19 nt, Artificial Sequence
  Description of Artificial Sequence: Synthetic oligonucleotide
  Sense strand starting at position 1381 of SEQ ID NO: 916
gcaggugucucacggucau

SEQ ID NO: 73523 - RNA, 19 nt, Artificial Sequence
  Description of Artificial Sequence: Synthetic oligonucleotide
  Antisense strand to SEQ ID NO: 73442
augaccgugagacaccugc

SEQ ID NO: 73524 - RNA, 19 nt, Artificial Sequence
  Description of Artificial Sequence: Synthetic oligonucleotide
  Sense strand starting at position 1558 of SEQ ID NO: 916
gagcgaggcucucguuaau

SEQ ID NO: 73525 - RNA, 19 nt, Artificial Sequence
  Description of Artificial Sequence: Synthetic oligonucleotide
  Antisense strand to SEQ ID NO: 73444
auuaacgagagccucgcuc

SEQ ID NO: 73526 - RNA, 19 nt, Artificial Sequence
  Description of Artificial Sequence: Synthetic oligonucleotide
  Sense strand starting at position 329 of SEQ ID NO: 917
cccuguucuuccggagcaa

SEQ ID NO: 73527 - RNA, 19 nt, Artificial Sequence
  Description of Artificial Sequence: Synthetic oligonucleotide
  Antisense strand to SEQ ID NO: 73446
uugcuccggaagaacaggg

SEQ ID NO: 73528 - RNA, 19 nt, Artificial Sequence
  Description of Artificial Sequence: Synthetic oligonucleotide
  Sense strand starting at position 549 of SEQ ID NO: 917
guggcuuccacgugacuga

SEQ ID NO: 73529 - RNA, 19 nt, Artificial Sequence
  Description of Artificial Sequence: Synthetic oligonucleotide
  Antisense strand to SEQ ID NO: 73448
ucagucacguggaagccac

SEQ ID NO: 73530 - RNA, 19 nt, Artificial Sequence
  Description of Artificial Sequence: Synthetic oligonucleotide
  Sense strand starting at position 556 of SEQ ID NO: 917
ccacgugacugagaguuca

SEQ ID NO: 73531 - RNA, 19 nt, Artificial Sequence
  Description of Artificial Sequence: Synthetic oligonucleotide
  Antisense strand to SEQ ID NO: 73450
ugaacucucagucacgugg

SEQ ID NO: 73532 - RNA, 19 nt, Artificial Sequence
  Description of Artificial Sequence: Synthetic oligonucleotide
  Sense strand starting at position 620 of SEQ ID NO: 917
ggaauccuuuaaggaucau

SEQ ID NO: 73533 - RNA, 19 nt, Artificial Sequence
  Description of Artificial Sequence: Synthetic oligonucleotide
  Antisense strand to SEQ ID NO: 73452
augauccuuaaaggauucc

SEQ ID NO: 73534 - RNA, 19 nt, Artificial Sequence
  Description of Artificial Sequence: Synthetic oligonucleotide
  Sense strand starting at position 750 of SEQ ID NO: 917
ggugaucacuguuuccuau

SEQ ID NO: 73535 - RNA, 19 nt, Artificial Sequence
  Description of Artificial Sequence: Synthetic oligonucleotide
  Antisense strand to SEQ ID NO: 73454
auaggaaacagugaucacc

SEQ ID NO: 73536 - RNA, 19 nt, Artificial Sequence
  Description of Artificial Sequence: Synthetic oligonucleotide
  Sense strand starting at position 752 of SEQ ID NO: 917
ugaucacuguuuccuauga

SEQ ID NO: 73537 - RNA, 19 nt, Artificial Sequence
  Description of Artificial Sequence: Synthetic oligonucleotide
  Antisense strand to SEQ ID NO: 73456
ucauaggaaacagugauca

SEQ ID NO: 73538 - RNA, 19 nt, Artificial Sequence
  Description of Artificial Sequence: Synthetic oligonucleotide
  Sense strand starting at position 756 of SEQ ID NO: 917
cacuguuuccuaugaggau

SEQ ID NO: 73539 - RNA, 19 nt, Artificial Sequence
  Description of Artificial Sequence: Synthetic oligonucleotide
  Antisense strand to SEQ ID NO: 73458
auccucauaggaaacagug

SEQ ID NO: 73540 - RNA, 19 nt, Artificial Sequence
  Description of Artificial Sequence: Synthetic oligonucleotide
  Sense strand starting at position 757 of SEQ ID NO: 917
acuguuuccuaugaggaua

SEQ ID NO: 73541 - RNA, 19 nt, Artificial Sequence
  Description of Artificial Sequence: Synthetic oligonucleotide
  Antisense strand to SEQ ID NO: 73460
uauccucauaggaaacagu

SEQ ID NO: 73542 - RNA, 19 nt, Artificial Sequence
  Description of Artificial Sequence: Synthetic oligonucleotide
  Sense strand starting at position 759 of SEQ ID NO: 917
uguuuccuaugaggauaca

SEQ ID NO: 73543 - RNA, 19 nt, Artificial Sequence
  Description of Artificial Sequence: Synthetic oligonucleotide
  Antisense strand to SEQ ID NO: 73462
uguauccucauaggaaaca

SEQ ID NO: 73544 - RNA, 19 nt, Artificial Sequence
  Description of Artificial Sequence: Synthetic oligonucleotide
  Sense strand starting at position 860 of SEQ ID NO: 917
ugaagaaaguccucuacag

SEQ ID NO: 73545 - RNA, 19 nt, Artificial Sequence
  Description of Artificial Sequence: Synthetic oligonucleotide
  Antisense strand to SEQ ID NO: 73464
cuguagaggacuuucuuca

SEQ ID NO: 73546 - RNA, 19 nt, Artificial Sequence
  Description of Artificial Sequence: Synthetic oligonucleotide
  Sense strand starting at position 949 of SEQ ID NO: 917
agaagucacuugcuuaaau

SEQ ID NO: 73547 - RNA, 19 nt, Artificial Sequence
  Description of Artificial Sequence: Synthetic oligonucleotide
  Antisense strand to SEQ ID NO: 73466
auuuaagcaagugacuucu

SEQ ID NO: 73548 - RNA, 19 nt, Artificial Sequence
  Description of Artificial Sequence: Synthetic oligonucleotide
  Sense strand starting at position 950 of SEQ ID NO: 917
gaagucacuugcuuaaaug

SEQ ID NO: 73549 - RNA, 19 nt, Artificial Sequence
  Description of Artificial Sequence: Synthetic oligonucleotide
  Antisense strand to SEQ ID NO: 73468
cauuuaagcaagugacuuc

SEQ ID NO: 73550 - RNA, 19 nt, Artificial Sequence
  Description of Artificial Sequence: Synthetic oligonucleotide
  Sense strand starting at position 990 of SEQ ID NO: 917
gggucagacacuuggcaga

SEQ ID NO: 73551 - RNA, 19 nt, Artificial Sequence
  Description of Artificial Sequence: Synthetic oligonucleotide
  Antisense strand to SEQ ID NO: 73470
ucugccaagugucugaccc

SEQ ID NO: 73552 - RNA, 19 nt, Artificial Sequence
  Description of Artificial Sequence: Synthetic oligonucleotide
  Sense strand starting at position 1013 of SEQ ID NO: 917
gggcccugauuguccuaaa

SEQ ID NO: 73553 - RNA, 19 nt, Artificial Sequence
  Description of Artificial Sequence: Synthetic oligonucleotide
  Antisense strand to SEQ ID NO: 73472
uuuaggacaaucagggccc

SEQ ID NO: 73554 - RNA, 19 nt, Artificial Sequence
  Description of Artificial Sequence: Synthetic oligonucleotide
  Sense strand starting at position 1095 of SEQ ID NO: 917
gccagagccuuccggagaa

SEQ ID NO: 73555 - RNA, 19 nt, Artificial Sequence
  Description of Artificial Sequence: Synthetic oligonucleotide
  Antisense strand to SEQ ID NO: 73474
uucuccggaaggcucuggc

SEQ ID NO: 73556 - RNA, 19 nt, Artificial Sequence
  Description of Artificial Sequence: Synthetic oligonucleotide
  Sense strand starting at position 1445 of SEQ ID NO: 917
acgaguagccuucgcugua

SEQ ID NO: 73557 - RNA, 19 nt, Artificial Sequence
  Description of Artificial Sequence: Synthetic oligonucleotide
  Antisense strand to SEQ ID NO: 73476
uacagcgaaggcuacucgu

SEQ ID NO: 73558 - RNA, 19 nt, Artificial Sequence
  Description of Artificial Sequence: Synthetic oligonucleotide
  Sense strand starting at position 1709 of SEQ ID NO: 917
gcucgaugcugcuguugau

SEQ ID NO: 73559 - RNA, 19 nt, Artificial Sequence
  Description of Artificial Sequence: Synthetic oligonucleotide
  Antisense strand to SEQ ID NO: 73478
aucaacagcagcaucgagc

SEQ ID NO: 73560 - RNA, 19 nt, Artificial Sequence
  Description of Artificial Sequence: Synthetic oligonucleotide
  Sense strand starting at position 1847 of SEQ ID NO: 917
gggcgagucugguacuuac

SEQ ID NO: 73561 - RNA, 19 nt, Artificial Sequence
  Description of Artificial Sequence: Synthetic oligonucleotide
  Antisense strand to SEQ ID NO: 73480
guaaguaccagacucgccc

SEQ ID NO: 73562 - RNA, 19 nt, Artificial Sequence
  Description of Artificial Sequence: Synthetic oligonucleotide
  Sense strand starting at position 2142 of SEQ ID NO: 917
cccauuagcgcacgcuaaa

SEQ ID NO: 73563 - RNA, 19 nt, Artificial Sequence
  Description of Artificial Sequence: Synthetic oligonucleotide
  Antisense strand to SEQ ID NO: 73482
uuuagcgugcgcuaauggg

SEQ ID NO: 73564 - RNA, 19 nt, Artificial Sequence
  Description of Artificial Sequence: Synthetic oligonucleotide
  Sense strand starting at position 2143 of SEQ ID NO: 917
ccauuagcgcacgcuaaau

SEQ ID NO: 73565 - RNA, 19 nt, Artificial Sequence
  Description of Artificial Sequence: Synthetic oligonucleotide
  Antisense strand to SEQ ID NO: 73484
auuuagcgugcgcuaaugg

SEQ ID NO: 73566 - RNA, 19 nt, Artificial Sequence
  Description of Artificial Sequence: Synthetic oligonucleotide
  Sense strand starting at position 2153 of SEQ ID NO: 917
acgcuaaauugccugugaa

SEQ ID NO: 73567 - RNA, 19 nt, Artificial Sequence
  Description of Artificial Sequence: Synthetic oligonucleotide
  Antisense strand to SEQ ID NO: 73486
uucacaggcaauuuagcgu

SEQ ID NO: 73568 - RNA, 19 nt, Artificial Sequence
  Description of Artificial Sequence: Synthetic oligonucleotide
  Sense strand starting at position 2154 of SEQ ID NO: 917
cgcuaaauugccugugaau

SEQ ID NO: 73569 - RNA, 19 nt, Artificial Sequence
  Description of Artificial Sequence: Synthetic oligonucleotide
  Antisense strand to SEQ ID NO: 73488
auucacaggcaauuuagcg

SEQ ID NO: 73570 - RNA, 19 nt, Artificial Sequence
  Description of Artificial Sequence: Synthetic oligonucleotide
  Sense strand starting at position 2156 of SEQ ID NO: 917
cuaaauugccugugaauug

SEQ ID NO: 73571 - RNA, 19 nt, Artificial Sequence
  Description of Artificial Sequence: Synthetic oligonucleotide
  Antisense strand to SEQ ID NO: 73490
caauucacaggcaauuuag

SEQ ID NO: 73572 - RNA, 19 nt, Artificial Sequence
  Description of Artificial Sequence: Synthetic oligonucleotide
  Sense strand starting at position 2556 of SEQ ID NO: 917
aguccuacgugccuauauu

SEQ ID NO: 73573 - RNA, 19 nt, Artificial Sequence
  Description of Artificial Sequence: Synthetic oligonucleotide
  Antisense strand to SEQ ID NO: 73492
aauauaggcacguaggacu

SEQ ID NO: 73574 - RNA, 19 nt, Artificial Sequence
  Description of Artificial Sequence: Synthetic oligonucleotide
  Sense strand starting at position 2557 of SEQ ID NO: 917
guccuacgugccuauauua

SEQ ID NO: 73575 - RNA, 19 nt, Artificial Sequence
  Description of Artificial Sequence: Synthetic oligonucleotide
  Antisense strand to SEQ ID NO: 73494
uaauauaggcacguaggac

SEQ ID NO: 73576 - RNA, 19 nt, Artificial Sequence
  Description of Artificial Sequence: Synthetic oligonucleotide
  Sense strand starting at position 2922 of SEQ ID NO: 917
acuguuuaugcaugccaca

SEQ ID NO: 73577 - RNA, 19 nt, Artificial Sequence
  Description of Artificial Sequence: Synthetic oligonucleotide
  Antisense strand to SEQ ID NO: 73496
uguggcaugcauaaacagu

SEQ ID NO: 73578 - RNA, 19 nt, Artificial Sequence
  Description of Artificial Sequence: Synthetic oligonucleotide
  Sense strand starting at position 2980 of SEQ ID NO: 917
gcuugcuuuccucuggcau

SEQ ID NO: 73579 - RNA, 19 nt, Artificial Sequence
  Description of Artificial Sequence: Synthetic oligonucleotide
  Antisense strand to SEQ ID NO: 73498
augccagaggaaagcaagc

SEQ ID NO: 73580 - RNA, 19 nt, Artificial Sequence
  Description of Artificial Sequence: Synthetic oligonucleotide
  Sense strand starting at position 2981 of SEQ ID NO: 917
cuugcuuuccucuggcauu

SEQ ID NO: 73581 - RNA, 19 nt, Artificial Sequence
  Description of Artificial Sequence: Synthetic oligonucleotide
  Antisense strand to SEQ ID NO: 73500
aaugccagaggaaagcaag

SEQ ID NO: 73582 - RNA, 19 nt, Artificial Sequence
  Description of Artificial Sequence: Synthetic oligonucleotide
  Sense strand starting at position 2982 of SEQ ID NO: 917
uugcuuuccucuggcauuu

SEQ ID NO: 73583 - RNA, 19 nt, Artificial Sequence
  Description of Artificial Sequence: Synthetic oligonucleotide
  Antisense strand to SEQ ID NO: 73502
aaaugccagaggaaagcaa

SEQ ID NO: 73584 - RNA, 19 nt, Artificial Sequence
  Description of Artificial Sequence: Synthetic oligonucleotide
  Sense strand starting at position 3217 of SEQ ID NO: 917
cggucacaguuccucaaau

SEQ ID NO: 73585 - RNA, 19 nt, Artificial Sequence
  Description of Artificial Sequence: Synthetic oligonucleotide
  Antisense strand to SEQ ID NO: 73504
auuugaggaacugugaccg

SEQ ID NO: 73586 - RNA, 19 nt, Artificial Sequence
  Description of Artificial Sequence: Synthetic oligonucleotide
  Sense strand starting at position 3230 of SEQ ID NO: 917
ucaaaugcucugcagcaga

SEQ ID NO: 73587 - RNA, 19 nt, Artificial Sequence
  Description of Artificial Sequence: Synthetic oligonucleotide
  Antisense strand to SEQ ID NO: 73506
ucugcugcagagcauuuga

SEQ ID NO: 73588 - RNA, 19 nt, Artificial Sequence
  Description of Artificial Sequence: Synthetic oligonucleotide
  Sense strand starting at position 3598 of SEQ ID NO: 917
gccggacaccauugugaag

SEQ ID NO: 73589 - RNA, 19 nt, Artificial Sequence
  Description of Artificial Sequence: Synthetic oligonucleotide
  Antisense strand to SEQ ID NO: 73508
cuucacaaugguguccggc

SEQ ID NO: 73590 - RNA, 19 nt, Artificial Sequence
  Description of Artificial Sequence: Synthetic oligonucleotide
  Sense strand starting at position 3639 of SEQ ID NO: 917
gcagaaacaucaggugacu

SEQ ID NO: 73591 - RNA, 19 nt, Artificial Sequence
  Description of Artificial Sequence: Synthetic oligonucleotide
  Antisense strand to SEQ ID NO: 73510
agucaccugauguuucugc

SEQ ID NO: 73592 - RNA, 19 nt, Artificial Sequence
  Description of Artificial Sequence: Synthetic oligonucleotide
  Sense strand starting at position 3964 of SEQ ID NO: 917
ggaucugguuguguucagu

SEQ ID NO: 73593 - RNA, 19 nt, Artificial Sequence
  Description of Artificial Sequence: Synthetic oligonucleotide
  Antisense strand to SEQ ID NO: 73512
acugaacacaaccagaucc

SEQ ID NO: 73594 - RNA, 19 nt, Artificial Sequence
  Description of Artificial Sequence: Synthetic oligonucleotide
  Sense strand starting at position 3970 of SEQ ID NO: 917
gguuguguucaguggagcu

SEQ ID NO: 73595 - RNA, 19 nt, Artificial Sequence
  Description of Artificial Sequence: Synthetic oligonucleotide
  Antisense strand to SEQ ID NO: 73514
agcuccacugaacacaacc

SEQ ID NO: 73596 - RNA, 19 nt, Artificial Sequence
  Description of Artificial Sequence: Synthetic oligonucleotide
  Sense strand starting at position 3972 of SEQ ID NO: 917
uuguguucaguggagcuau

SEQ ID NO: 73597 - RNA, 19 nt, Artificial Sequence
  Description of Artificial Sequence: Synthetic oligonucleotide
  Antisense strand to SEQ ID NO: 73516
auagcuccacugaacacaa

SEQ ID NO: 73598 - RNA, 19 nt, Artificial Sequence
  Description of Artificial Sequence: Synthetic oligonucleotide
  Sense strand starting at position 3983 of SEQ ID NO: 917
ggagcuauuucgcagcuga

SEQ ID NO: 73599 - RNA, 19 nt, Artificial Sequence
  Description of Artificial Sequence: Synthetic oligonucleotide
  Antisense strand to SEQ ID NO: 73518
ucagcugcgaaauagcucc

SEQ ID NO: 73600 - RNA, 19 nt, Artificial Sequence
  Description of Artificial Sequence: Synthetic oligonucleotide
  Sense strand starting at position 27 of SEQ ID NO: 918
uaggaaaugcuguauguau

SEQ ID NO: 73601 - RNA, 19 nt, Artificial Sequence
  Description of Artificial Sequence: Synthetic oligonucleotide
  Antisense strand to SEQ ID NO: 73520
auacauacagcauuuccua

SEQ ID NO: 73602 - RNA, 19 nt, Artificial Sequence
  Description of Artificial Sequence: Synthetic oligonucleotide
  Sense strand starting at position 29 of SEQ ID NO: 918
ggaaaugcuguauguauag

SEQ ID NO: 73603 - RNA, 19 nt, Artificial Sequence
  Description of Artificial Sequence: Synthetic oligonucleotide
  Antisense strand to SEQ ID NO: 73522
cuauacauacagcauuucc

SEQ ID NO: 73604 - RNA, 19 nt, Artificial Sequence
  Description of Artificial Sequence: Synthetic oligonucleotide
  Sense strand starting at position 124 of SEQ ID NO: 918
ugccaucuuugauuaagag

SEQ ID NO: 73605 - RNA, 19 nt, Artificial Sequence
  Description of Artificial Sequence: Synthetic oligonucleotide
  Antisense strand to SEQ ID NO: 73524
cucuuaaucaaagauggca

SEQ ID NO: 73606 - RNA, 19 nt, Artificial Sequence
  Description of Artificial Sequence: Synthetic oligonucleotide
  Sense strand starting at position 125 of SEQ ID NO: 918
gccaucuuugauuaagagu

SEQ ID NO: 73607 - RNA, 19 nt, Artificial Sequence
  Description of Artificial Sequence: Synthetic oligonucleotide
  Antisense strand to SEQ ID NO: 73526
acucuuaaucaaagauggc

SEQ ID NO: 73608 - RNA, 19 nt, Artificial Sequence
  Description of Artificial Sequence: Synthetic oligonucleotide
  Sense strand starting at position 134 of SEQ ID NO: 918
gauuaagagugaccucucu

SEQ ID NO: 73609 - RNA, 19 nt, Artificial Sequence
  Description of Artificial Sequence: Synthetic oligonucleotide
  Antisense strand to SEQ ID NO: 73528
agagaggucacucuuaauc

SEQ ID NO: 73610 - RNA, 19 nt, Artificial Sequence
  Description of Artificial Sequence: Synthetic oligonucleotide
  Sense strand starting at position 258 of SEQ ID NO: 918
agaagccagcucugaucaa

SEQ ID NO: 73611 - RNA, 19 nt, Artificial Sequence
  Description of Artificial Sequence: Synthetic oligonucleotide
  Antisense strand to SEQ ID NO: 73530
uugaucagagcuggcuucu

SEQ ID NO: 73612 - RNA, 19 nt, Artificial Sequence
  Description of Artificial Sequence: Synthetic oligonucleotide
  Sense strand starting at position 262 of SEQ ID NO: 918
gccagcucugaucaaccua

SEQ ID NO: 73613 - RNA, 19 nt, Artificial Sequence
  Description of Artificial Sequence: Synthetic oligonucleotide
  Antisense strand to SEQ ID NO: 73532
uagguugaucagagcuggc

SEQ ID NO: 73614 - RNA, 19 nt, Artificial Sequence
  Description of Artificial Sequence: Synthetic oligonucleotide
  Sense strand starting at position 300 of SEQ ID NO: 918
gugccucugaucuaugaag

SEQ ID NO: 73615 - RNA, 19 nt, Artificial Sequence
  Description of Artificial Sequence: Synthetic oligonucleotide
  Antisense strand to SEQ ID NO: 73534
cuucauagaucagaggcac

SEQ ID NO: 73616 - RNA, 19 nt, Artificial Sequence
  Description of Artificial Sequence: Synthetic oligonucleotide
  Sense strand starting at position 302 of SEQ ID NO: 918
gccucugaucuaugaagac

SEQ ID NO: 73617 - RNA, 19 nt, Artificial Sequence
  Description of Artificial Sequence: Synthetic oligonucleotide
  Antisense strand to SEQ ID NO: 73536
gucuucauagaucagaggc

SEQ ID NO: 73618 - RNA, 19 nt, Artificial Sequence
  Description of Artificial Sequence: Synthetic oligonucleotide
  Sense strand starting at position 460 of SEQ ID NO: 918
guugcauagcgaguugugu

SEQ ID NO: 73619 - RNA, 19 nt, Artificial Sequence
  Description of Artificial Sequence: Synthetic oligonucleotide
  Antisense strand to SEQ ID NO: 73538
acacaacucgcuaugcaac

SEQ ID NO: 73620 - RNA, 19 nt, Artificial Sequence
  Description of Artificial Sequence: Synthetic oligonucleotide
  Sense strand starting at position 813 of SEQ ID NO: 918
cuccaauucuguucuagag

SEQ ID NO: 73621 - RNA, 19 nt, Artificial Sequence
  Description of Artificial Sequence: Synthetic oligonucleotide
  Antisense strand to SEQ ID NO: 73540
cucuagaacagaauuggag

SEQ ID NO: 73622 - RNA, 19 nt, Artificial Sequence
  Description of Artificial Sequence: Synthetic oligonucleotide
  Sense strand starting at position 817 of SEQ ID NO: 918
aauucuguucuagagaguc

SEQ ID NO: 73623 - RNA, 19 nt, Artificial Sequence
  Description of Artificial Sequence: Synthetic oligonucleotide
  Antisense strand to SEQ ID NO: 73542
gacucucuagaacagaauu

SEQ ID NO: 73624 - RNA, 19 nt, Artificial Sequence
  Description of Artificial Sequence: Synthetic oligonucleotide
  Sense strand starting at position 823 of SEQ ID NO: 918
guucuagagagucaagucu

SEQ ID NO: 73625 - RNA, 19 nt, Artificial Sequence
  Description of Artificial Sequence: Synthetic oligonucleotide
  Antisense strand to SEQ ID NO: 73544
agacuugacucucuagaac

SEQ ID NO: 73626 - RNA, 19 nt, Artificial Sequence
  Description of Artificial Sequence: Synthetic oligonucleotide
  Sense strand starting at position 1056 of SEQ ID NO: 918
uaggcaugugcugugcuaa

SEQ ID NO: 73627 - RNA, 19 nt, Artificial Sequence
  Description of Artificial Sequence: Synthetic oligonucleotide
  Antisense strand to SEQ ID NO: 73546
uuagcacagcacaugccua

SEQ ID NO: 73628 - RNA, 19 nt, Artificial Sequence
  Description of Artificial Sequence: Synthetic oligonucleotide
  Sense strand starting at position 1116 of SEQ ID NO: 918
ccaugaaguugguucuauu

SEQ ID NO: 73629 - RNA, 19 nt, Artificial Sequence
  Description of Artificial Sequence: Synthetic oligonucleotide
  Antisense strand to SEQ ID NO: 73548
aauagaaccaacuucaugg

SEQ ID NO: 73630 - RNA, 19 nt, Artificial Sequence
  Description of Artificial Sequence: Synthetic oligonucleotide
  Sense strand starting at position 1512 of SEQ ID NO: 918
guaccaucagucuaugaga

SEQ ID NO: 73631 - RNA, 19 nt, Artificial Sequence
  Description of Artificial Sequence: Synthetic oligonucleotide
  Antisense strand to SEQ ID NO: 73550
ucucauagacugaugguac

SEQ ID NO: 73632 - RNA, 19 nt, Artificial Sequence
  Description of Artificial Sequence: Synthetic oligonucleotide
  Sense strand starting at position 1514 of SEQ ID NO: 918
accaucagucuaugagagu

SEQ ID NO: 73633 - RNA, 19 nt, Artificial Sequence
  Description of Artificial Sequence: Synthetic oligonucleotide
  Antisense strand to SEQ ID NO: 73552
acucucauagacugauggu

SEQ ID NO: 73634 - RNA, 19 nt, Artificial Sequence
  Description of Artificial Sequence: Synthetic oligonucleotide
  Sense strand starting at position 1533 of SEQ ID NO: 918
uuucuaagaucuccaggga

SEQ ID NO: 73635 - RNA, 19 nt, Artificial Sequence
  Description of Artificial Sequence: Synthetic oligonucleotide
  Antisense strand to SEQ ID NO: 73554
ucccuggagaucuuagaaa

SEQ ID NO: 73636 - RNA, 19 nt, Artificial Sequence
  Description of Artificial Sequence: Synthetic oligonucleotide
  Sense strand starting at position 2332 of SEQ ID NO: 918
gggauuccgcaagggucaa

SEQ ID NO: 73637 - RNA, 19 nt, Artificial Sequence
  Description of Artificial Sequence: Synthetic oligonucleotide
  Antisense strand to SEQ ID NO: 73556
uugacccuugcggaauccc

SEQ ID NO: 73638 - RNA, 19 nt, Artificial Sequence
  Description of Artificial Sequence: Synthetic oligonucleotide
  Sense strand starting at position 2391 of SEQ ID NO: 918
acacaucaaguuugucgaa

SEQ ID NO: 73639 - RNA, 19 nt, Artificial Sequence
  Description of Artificial Sequence: Synthetic oligonucleotide
  Antisense strand to SEQ ID NO: 73558
uucgacaaacuugaugugu

SEQ ID NO: 73640 - RNA, 19 nt, Artificial Sequence
  Description of Artificial Sequence: Synthetic oligonucleotide
  Sense strand starting at position 2429 of SEQ ID NO: 918
gccugauccucagcaagaa

SEQ ID NO: 73641 - RNA, 19 nt, Artificial Sequence
  Description of Artificial Sequence: Synthetic oligonucleotide
  Antisense strand to SEQ ID NO: 73560
uucuugcugaggaucaggc

SEQ ID NO: 73642 - RNA, 19 nt, Artificial Sequence
  Description of Artificial Sequence: Synthetic oligonucleotide
  Sense strand starting at position 2472 of SEQ ID NO: 918
gcccaaagcaaguggaaua

SEQ ID NO: 73643 - RNA, 19 nt, Artificial Sequence
  Description of Artificial Sequence: Synthetic oligonucleotide
  Antisense strand to SEQ ID NO: 73562
uauuccacuugcuuugggc

SEQ ID NO: 73644 - RNA, 19 nt, Artificial Sequence
  Description of Artificial Sequence: Synthetic oligonucleotide
  Sense strand starting at position 2900 of SEQ ID NO: 918
cgcccaguaccucagagaa

SEQ ID NO: 73645 - RNA, 19 nt, Artificial Sequence
  Description of Artificial Sequence: Synthetic oligonucleotide
  Antisense strand to SEQ ID NO: 73564
uucucugagguacugggcg

SEQ ID NO: 73646 - RNA, 19 nt, Artificial Sequence
  Description of Artificial Sequence: Synthetic oligonucleotide
  Sense strand starting at position 2963 of SEQ ID NO: 918
uggacuucuugggcaggga

SEQ ID NO: 73647 - RNA, 19 nt, Artificial Sequence
  Description of Artificial Sequence: Synthetic oligonucleotide
  Antisense strand to SEQ ID NO: 73566
ucccugcccaagaagucca

SEQ ID NO: 73648 - RNA, 19 nt, Artificial Sequence
  Description of Artificial Sequence: Synthetic oligonucleotide
  Sense strand starting at position 2966 of SEQ ID NO: 918
acuucuugggcagggaaga

SEQ ID NO: 73649 - RNA, 19 nt, Artificial Sequence
  Description of Artificial Sequence: Synthetic oligonucleotide
  Antisense strand to SEQ ID NO: 73568
ucuucccugcccaagaagu

SEQ ID NO: 73650 - RNA, 19 nt, Artificial Sequence
  Description of Artificial Sequence: Synthetic oligonucleotide
  Sense strand starting at position 3014 of SEQ ID NO: 918
uuagauaugagaggucuuu

SEQ ID NO: 73651 - RNA, 19 nt, Artificial Sequence
  Description of Artificial Sequence: Synthetic oligonucleotide
  Antisense strand to SEQ ID NO: 73570
aaagaccucucauaucuaa

SEQ ID NO: 73652 - RNA, 19 nt, Artificial Sequence
  Description of Artificial Sequence: Synthetic oligonucleotide
  Sense strand starting at position 3086 of SEQ ID NO: 918
ggagaaucggguuggucau

SEQ ID NO: 73653 - RNA, 19 nt, Artificial Sequence
  Description of Artificial Sequence: Synthetic oligonucleotide
  Antisense strand to SEQ ID NO: 73572
augaccaacccgauucucc

SEQ ID NO: 73654 - RNA, 19 nt, Artificial Sequence
  Description of Artificial Sequence: Synthetic oligonucleotide
  Sense strand starting at position 3100 of SEQ ID NO: 918
gucaucugagaauaacugu

SEQ ID NO: 73655 - RNA, 19 nt, Artificial Sequence
  Description of Artificial Sequence: Synthetic oligonucleotide
  Antisense strand to SEQ ID NO: 73574
acaguuauucucagaugac

SEQ ID NO: 73656 - RNA, 19 nt, Artificial Sequence
  Description of Artificial Sequence: Synthetic oligonucleotide
  Sense strand starting at position 3437 of SEQ ID NO: 918
uuaugcauucccuggaaag

SEQ ID NO: 73657 - RNA, 19 nt, Artificial Sequence
  Description of Artificial Sequence: Synthetic oligonucleotide
  Antisense strand to SEQ ID NO: 73576
cuuuccagggaaugcauaa

SEQ ID NO: 73658 - RNA, 19 nt, Artificial Sequence
  Description of Artificial Sequence: Synthetic oligonucleotide
  Sense strand starting at position 3491 of SEQ ID NO: 918
guguaauuggcugagauag

SEQ ID NO: 73659 - RNA, 19 nt, Artificial Sequence
  Description of Artificial Sequence: Synthetic oligonucleotide
  Antisense strand to SEQ ID NO: 73578
cuaucucagccaauuacac

SEQ ID NO: 73660 - RNA, 19 nt, Artificial Sequence
  Description of Artificial Sequence: Synthetic oligonucleotide
  Sense strand starting at position 3562 of SEQ ID NO: 918
ggacguuucaugugagaug

SEQ ID NO: 73661 - RNA, 19 nt, Artificial Sequence
  Description of Artificial Sequence: Synthetic oligonucleotide
  Antisense strand to SEQ ID NO: 73580
caucucacaugaaacgucc

SEQ ID NO: 73662 - RNA, 19 nt, Artificial Sequence
  Description of Artificial Sequence: Synthetic oligonucleotide
  Sense strand starting at position 3573 of SEQ ID NO: 918
gugagaugucuuggaucau

SEQ ID NO: 73663 - RNA, 19 nt, Artificial Sequence
  Description of Artificial Sequence: Synthetic oligonucleotide
  Antisense strand to SEQ ID NO: 73582
augauccaagacaucucac

SEQ ID NO: 73664 - RNA, 19 nt, Artificial Sequence
  Description of Artificial Sequence: Synthetic oligonucleotide
  Sense strand starting at position 3636 of SEQ ID NO: 918
agaggucucagcuggauau

SEQ ID NO: 73665 - RNA, 19 nt, Artificial Sequence
  Description of Artificial Sequence: Synthetic oligonucleotide
  Antisense strand to SEQ ID NO: 73584
auauccagcugagaccucu

SEQ ID NO: 73666 - RNA, 19 nt, Artificial Sequence
  Description of Artificial Sequence: Synthetic oligonucleotide
  Sense strand starting at position 3637 of SEQ ID NO: 918
gaggucucagcuggauauu

SEQ ID NO: 73667 - RNA, 19 nt, Artificial Sequence
  Description of Artificial Sequence: Synthetic oligonucleotide
  Antisense strand to SEQ ID NO: 73586
aauauccagcugagaccuc

SEQ ID NO: 73668 - RNA, 19 nt, Artificial Sequence
  Description of Artificial Sequence: Synthetic oligonucleotide
  Sense strand starting at position 3638 of SEQ ID NO: 918
aggucucagcuggauauua

SEQ ID NO: 73669 - RNA, 19 nt, Artificial Sequence
  Description of Artificial Sequence: Synthetic oligonucleotide
  Antisense strand to SEQ ID NO: 73588
uaauauccagcugagaccu

SEQ ID NO: 73670 - RNA, 19 nt, Artificial Sequence
  Description of Artificial Sequence: Synthetic oligonucleotide
  Sense strand starting at position 3640 of SEQ ID NO: 918
gucucagcuggauauuaaa

SEQ ID NO: 73671 - RNA, 19 nt, Artificial Sequence
  Description of Artificial Sequence: Synthetic oligonucleotide
  Antisense strand to SEQ ID NO: 73590
uuuaauauccagcugagac

SEQ ID NO: 73672 - RNA, 19 nt, Artificial Sequence
  Description of Artificial Sequence: Synthetic oligonucleotide
  Sense strand starting at position 3643 of SEQ ID NO: 918
ucagcuggauauuaaauuu

SEQ ID NO: 73673 - RNA, 19 nt, Artificial Sequence
  Description of Artificial Sequence: Synthetic oligonucleotide
  Antisense strand to SEQ ID NO: 73592
aaauuuaauauccagcuga

SEQ ID NO: 73674 - RNA, 19 nt, Artificial Sequence
  Description of Artificial Sequence: Synthetic oligonucleotide
  Sense strand starting at position 3651 of SEQ ID NO: 918
auauuaaauuuggacguca

SEQ ID NO: 73675 - RNA, 19 nt, Artificial Sequence
  Description of Artificial Sequence: Synthetic oligonucleotide
  Antisense strand to SEQ ID NO: 73594
ugacguccaaauuuaauau

SEQ ID NO: 73676 - RNA, 19 nt, Artificial Sequence
  Description of Artificial Sequence: Synthetic oligonucleotide
  Sense strand starting at position 3659 of SEQ ID NO: 918
uuuggacgucauuagguaa

SEQ ID NO: 73677 - RNA, 19 nt, Artificial Sequence
  Description of Artificial Sequence: Synthetic oligonucleotide
  Antisense strand to SEQ ID NO: 73596
uuaccuaaugacguccaaa

SEQ ID NO: 73678 - RNA, 19 nt, Artificial Sequence
  Description of Artificial Sequence: Synthetic oligonucleotide
  Sense strand starting at position 3663 of SEQ ID NO: 918
gacgucauuagguaauuga

SEQ ID NO: 73679 - RNA, 19 nt, Artificial Sequence
  Description of Artificial Sequence: Synthetic oligonucleotide
  Antisense strand to SEQ ID NO: 73598
ucaauuaccuaaugacguc

SEQ ID NO: 73680 - RNA, 19 nt, Artificial Sequence
  Description of Artificial Sequence: Synthetic oligonucleotide
  Sense strand starting at position 93 of SEQ ID NO: 919
guguguaagccugccacau

SEQ ID NO: 73681 - RNA, 19 nt, Artificial Sequence
  Description of Artificial Sequence: Synthetic oligonucleotide
  Antisense strand to SEQ ID NO: 73600
auguggcaggcuuacacac

SEQ ID NO: 73682 - RNA, 19 nt, Artificial Sequence
  Description of Artificial Sequence: Synthetic oligonucleotide
  Sense strand starting at position 337 of SEQ ID NO: 919
gagugagagugcuuagagu

SEQ ID NO: 73683 - RNA, 19 nt, Artificial Sequence
  Description of Artificial Sequence: Synthetic oligonucleotide
  Antisense strand to SEQ ID NO: 73602
acucuaagcacucucacuc

SEQ ID NO: 73684 - RNA, 19 nt, Artificial Sequence
  Description of Artificial Sequence: Synthetic oligonucleotide
  Sense strand starting at position 555 of SEQ ID NO: 919
gauaauguggagugaaucu

SEQ ID NO: 73685 - RNA, 19 nt, Artificial Sequence
  Description of Artificial Sequence: Synthetic oligonucleotide
  Antisense strand to SEQ ID NO: 73604
agauucacuccacauuauc

SEQ ID NO: 73686 - RNA, 19 nt, Artificial Sequence
  Description of Artificial Sequence: Synthetic oligonucleotide
  Sense strand starting at position 741 of SEQ ID NO: 919
ggcagaguccacuguauug

SEQ ID NO: 73687 - RNA, 19 nt, Artificial Sequence
  Description of Artificial Sequence: Synthetic oligonucleotide
  Antisense strand to SEQ ID NO: 73606
caauacaguggacucugcc

SEQ ID NO: 73688 - RNA, 19 nt, Artificial Sequence
  Description of Artificial Sequence: Synthetic oligonucleotide
  Sense strand starting at position 786 of SEQ ID NO: 919
guaugucaaagauggagga

SEQ ID NO: 73689 - RNA, 19 nt, Artificial Sequence
  Description of Artificial Sequence: Synthetic oligonucleotide
  Antisense strand to SEQ ID NO: 73608
uccuccaucuuugacauac

SEQ ID NO: 73690 - RNA, 19 nt, Artificial Sequence
  Description of Artificial Sequence: Synthetic oligonucleotide
  Sense strand starting at position 912 of SEQ ID NO: 919
ggagaugcccucuaggagu

SEQ ID NO: 73691 - RNA, 19 nt, Artificial Sequence
  Description of Artificial Sequence: Synthetic oligonucleotide
  Antisense strand to SEQ ID NO: 73610
acuccuagagggcaucucc

SEQ ID NO: 73692 - RNA, 19 nt, Artificial Sequence
  Description of Artificial Sequence: Synthetic oligonucleotide
  Sense strand starting at position 968 of SEQ ID NO: 919
aaggauuaaggguggcaua

SEQ ID NO: 73693 - RNA, 19 nt, Artificial Sequence
  Description of Artificial Sequence: Synthetic oligonucleotide
  Antisense strand to SEQ ID NO: 73612
uaugccacccuuaauccuu

SEQ ID NO: 73694 - RNA, 19 nt, Artificial Sequence
  Description of Artificial Sequence: Synthetic oligonucleotide
  Sense strand starting at position 986 of SEQ ID NO: 919
acccaucccgucuagaaua

SEQ ID NO: 73695 - RNA, 19 nt, Artificial Sequence
  Description of Artificial Sequence: Synthetic oligonucleotide
  Antisense strand to SEQ ID NO: 73614
uauucuagacgggaugggu

SEQ ID NO: 73696 - RNA, 19 nt, Artificial Sequence
  Description of Artificial Sequence: Synthetic oligonucleotide
  Sense strand starting at position 1132 of SEQ ID NO: 919
agucaacaguucuuguauu

SEQ ID NO: 73697 - RNA, 19 nt, Artificial Sequence
  Description of Artificial Sequence: Synthetic oligonucleotide
  Antisense strand to SEQ ID NO: 73616
aauacaagaacuguugacu

SEQ ID NO: 73698 - RNA, 19 nt, Artificial Sequence
  Description of Artificial Sequence: Synthetic oligonucleotide
  Sense strand starting at position 1260 of SEQ ID NO: 919
ccuaucuuauggguaagga

SEQ ID NO: 73699 - RNA, 19 nt, Artificial Sequence
  Description of Artificial Sequence: Synthetic oligonucleotide
  Antisense strand to SEQ ID NO: 73618
uccuuacccauaagauagg

SEQ ID NO: 73700 - RNA, 19 nt, Artificial Sequence
  Description of Artificial Sequence: Synthetic oligonucleotide
  Sense strand starting at position 1371 of SEQ ID NO: 919
uuggaaucucaaugugaag

SEQ ID NO: 73701 - RNA, 19 nt, Artificial Sequence
  Description of Artificial Sequence: Synthetic oligonucleotide
  Antisense strand to SEQ ID NO: 73620
cuucacauugagauuccaa

SEQ ID NO: 73702 - RNA, 19 nt, Artificial Sequence
  Description of Artificial Sequence: Synthetic oligonucleotide
  Sense strand starting at position 1377 of SEQ ID NO: 919
ucucaaugugaagggcauu

SEQ ID NO: 73703 - RNA, 19 nt, Artificial Sequence
  Description of Artificial Sequence: Synthetic oligonucleotide
  Antisense strand to SEQ ID NO: 73622
aaugcccuucacauugaga

SEQ ID NO: 73704 - RNA, 19 nt, Artificial Sequence
  Description of Artificial Sequence: Synthetic oligonucleotide
  Sense strand starting at position 1418 of SEQ ID NO: 919
ggguaucagugacucauca

SEQ ID NO: 73705 - RNA, 19 nt, Artificial Sequence
  Description of Artificial Sequence: Synthetic oligonucleotide
  Antisense strand to SEQ ID NO: 73624
ugaugagucacugauaccc

SEQ ID NO: 73706 - RNA, 19 nt, Artificial Sequence
  Description of Artificial Sequence: Synthetic oligonucleotide
  Sense strand starting at position 1442 of SEQ ID NO: 919
ggucauauuuggccuuggu

SEQ ID NO: 73707 - RNA, 19 nt, Artificial Sequence
  Description of Artificial Sequence: Synthetic oligonucleotide
  Antisense strand to SEQ ID NO: 73626
accaaggccaaauaugacc

SEQ ID NO: 73708 - RNA, 19 nt, Artificial Sequence
  Description of Artificial Sequence: Synthetic oligonucleotide
  Sense strand starting at position 1682 of SEQ ID NO: 919
ccaaguagguguuuguaau

SEQ ID NO: 73709 - RNA, 19 nt, Artificial Sequence
  Description of Artificial Sequence: Synthetic oligonucleotide
  Antisense strand to SEQ ID NO: 73628
auuacaaacaccuacuugg

SEQ ID NO: 73710 - RNA, 19 nt, Artificial Sequence
  Description of Artificial Sequence: Synthetic oligonucleotide
  Sense strand starting at position 1756 of SEQ ID NO: 919
uugacuuacuguuuccaga

SEQ ID NO: 73711 - RNA, 19 nt, Artificial Sequence
  Description of Artificial Sequence: Synthetic oligonucleotide
  Antisense strand to SEQ ID NO: 73630
ucuggaaacaguaagucaa

SEQ ID NO: 73712 - RNA, 19 nt, Artificial Sequence
  Description of Artificial Sequence: Synthetic oligonucleotide
  Sense strand starting at position 1766 of SEQ ID NO: 919
guuuccagaggucaaacau

SEQ ID NO: 73713 - RNA, 19 nt, Artificial Sequence
  Description of Artificial Sequence: Synthetic oligonucleotide
  Antisense strand to SEQ ID NO: 73632
auguuugaccucuggaaac

SEQ ID NO: 73714 - RNA, 19 nt, Artificial Sequence
  Description of Artificial Sequence: Synthetic oligonucleotide
  Sense strand starting at position 1935 of SEQ ID NO: 919
gaguauauggcuggccaga

SEQ ID NO: 73715 - RNA, 19 nt, Artificial Sequence
  Description of Artificial Sequence: Synthetic oligonucleotide
  Antisense strand to SEQ ID NO: 73634
ucuggccagccauauacuc

SEQ ID NO: 73716 - RNA, 19 nt, Artificial Sequence
  Description of Artificial Sequence: Synthetic oligonucleotide
  Sense strand starting at position 2075 of SEQ ID NO: 919
guuagaggauuagaaagaa

SEQ ID NO: 73717 - RNA, 19 nt, Artificial Sequence
  Description of Artificial Sequence: Synthetic oligonucleotide
  Antisense strand to SEQ ID NO: 73636
uucuuucuaauccucuaac

SEQ ID NO: 73718 - RNA, 19 nt, Artificial Sequence
  Description of Artificial Sequence: Synthetic oligonucleotide
  Sense strand starting at position 2096 of SEQ ID NO: 919
uggaguauugagugccaag

SEQ ID NO: 73719 - RNA, 19 nt, Artificial Sequence
  Description of Artificial Sequence: Synthetic oligonucleotide
  Antisense strand to SEQ ID NO: 73638
cuuggcacucaauacucca

SEQ ID NO: 73720 - RNA, 19 nt, Artificial Sequence
  Description of Artificial Sequence: Synthetic oligonucleotide
  Sense strand starting at position 2128 of SEQ ID NO: 919
agagaaauaugacagacaa

SEQ ID NO: 73721 - RNA, 19 nt, Artificial Sequence
  Description of Artificial Sequence: Synthetic oligonucleotide
  Antisense strand to SEQ ID NO: 73640
uugucugucauauuucucu

SEQ ID NO: 73722 - RNA, 19 nt, Artificial Sequence
  Description of Artificial Sequence: Synthetic oligonucleotide
  Sense strand starting at position 2288 of SEQ ID NO: 919
cccugcuaugcugaauauu

SEQ ID NO: 73723 - RNA, 19 nt, Artificial Sequence
  Description of Artificial Sequence: Synthetic oligonucleotide
  Antisense strand to SEQ ID NO: 73642
aauauucagcauagcaggg

SEQ ID NO: 73724 - RNA, 19 nt, Artificial Sequence
  Description of Artificial Sequence: Synthetic oligonucleotide
  Sense strand starting at position 2291 of SEQ ID NO: 919
ugcuaugcugaauauuaca

SEQ ID NO: 73725 - RNA, 19 nt, Artificial Sequence
  Description of Artificial Sequence: Synthetic oligonucleotide
  Antisense strand to SEQ ID NO: 73644
uguaauauucagcauagca

SEQ ID NO: 73726 - RNA, 19 nt, Artificial Sequence
  Description of Artificial Sequence: Synthetic oligonucleotide
  Sense strand starting at position 2307 of SEQ ID NO: 919
acauuuagguucuacagau

SEQ ID NO: 73727 - RNA, 19 nt, Artificial Sequence
  Description of Artificial Sequence: Synthetic oligonucleotide
  Antisense strand to SEQ ID NO: 73646
aucuguagaaccuaaaugu

SEQ ID NO: 73728 - RNA, 19 nt, Artificial Sequence
  Description of Artificial Sequence: Synthetic oligonucleotide
  Sense strand starting at position 2334 of SEQ ID NO: 919
ggagguagcugacuuugaa

SEQ ID NO: 73729 - RNA, 19 nt, Artificial Sequence
  Description of Artificial Sequence: Synthetic oligonucleotide
  Antisense strand to SEQ ID NO: 73648
uucaaagucagcuaccucc

SEQ ID NO: 73730 - RNA, 19 nt, Artificial Sequence
  Description of Artificial Sequence: Synthetic oligonucleotide
  Sense strand starting at position 2337 of SEQ ID NO: 919
gguagcugacuuugaauaa

SEQ ID NO: 73731 - RNA, 19 nt, Artificial Sequence
  Description of Artificial Sequence: Synthetic oligonucleotide
  Antisense strand to SEQ ID NO: 73650
uuauucaaagucagcuacc

SEQ ID NO: 73732 - RNA, 19 nt, Artificial Sequence
  Description of Artificial Sequence: Synthetic oligonucleotide
  Sense strand starting at position 2388 of SEQ ID NO: 919
ccuaucuuugcagaguauu

SEQ ID NO: 73733 - RNA, 19 nt, Artificial Sequence
  Description of Artificial Sequence: Synthetic oligonucleotide
  Antisense strand to SEQ ID NO: 73652
aauacucugcaaagauagg

SEQ ID NO: 73734 - RNA, 19 nt, Artificial Sequence
  Description of Artificial Sequence: Synthetic oligonucleotide
  Sense strand starting at position 2422 of SEQ ID NO: 919
aagccagcuguccagagaa

SEQ ID NO: 73735 - RNA, 19 nt, Artificial Sequence
  Description of Artificial Sequence: Synthetic oligonucleotide
  Antisense strand to SEQ ID NO: 73654
uucucuggacagcuggcuu

SEQ ID NO: 73736 - RNA, 19 nt, Artificial Sequence
  Description of Artificial Sequence: Synthetic oligonucleotide
  Sense strand starting at position 2424 of SEQ ID NO: 919
gccagcuguccagagaaga

SEQ ID NO: 73737 - RNA, 19 nt, Artificial Sequence
  Description of Artificial Sequence: Synthetic oligonucleotide
  Antisense strand to SEQ ID NO: 73656
ucuucucuggacagcuggc

SEQ ID NO: 73738 - RNA, 19 nt, Artificial Sequence
  Description of Artificial Sequence: Synthetic oligonucleotide
  Sense strand starting at position 2438 of SEQ ID NO: 919
gaagaaaucugagcuguga

SEQ ID NO: 73739 - RNA, 19 nt, Artificial Sequence
  Description of Artificial Sequence: Synthetic oligonucleotide
  Antisense strand to SEQ ID NO: 73658
ucacagcucagauuucuuc

SEQ ID NO: 73740 - RNA, 19 nt, Artificial Sequence
  Description of Artificial Sequence: Synthetic oligonucleotide
  Sense strand starting at position 2440 of SEQ ID NO: 919
agaaaucugagcugugagu

SEQ ID NO: 73741 - RNA, 19 nt, Artificial Sequence
  Description of Artificial Sequence: Synthetic oligonucleotide
  Antisense strand to SEQ ID NO: 73660
acucacagcucagauuucu

SEQ ID NO: 73742 - RNA, 19 nt, Artificial Sequence
  Description of Artificial Sequence: Synthetic oligonucleotide
  Sense strand starting at position 2451 of SEQ ID NO: 919
cugugaguugcuuaggaug

SEQ ID NO: 73743 - RNA, 19 nt, Artificial Sequence
  Description of Artificial Sequence: Synthetic oligonucleotide
  Antisense strand to SEQ ID NO: 73662
cauccuaagcaacucacag

SEQ ID NO: 73744 - RNA, 19 nt, Artificial Sequence
  Description of Artificial Sequence: Synthetic oligonucleotide
  Sense strand starting at position 2465 of SEQ ID NO: 919
ggaugaggguuuguucagu

SEQ ID NO: 73745 - RNA, 19 nt, Artificial Sequence
  Description of Artificial Sequence: Synthetic oligonucleotide
  Antisense strand to SEQ ID NO: 73664
acugaacaaacccucaucc

SEQ ID NO: 73746 - RNA, 19 nt, Artificial Sequence
  Description of Artificial Sequence: Synthetic oligonucleotide
  Sense strand starting at position 2601 of SEQ ID NO: 919
ccgauuugcuuggagagaa

SEQ ID NO: 73747 - RNA, 19 nt, Artificial Sequence
  Description of Artificial Sequence: Synthetic oligonucleotide
  Antisense strand to SEQ ID NO: 73666
uucucuccaagcaaaucgg

SEQ ID NO: 73748 - RNA, 19 nt, Artificial Sequence
  Description of Artificial Sequence: Synthetic oligonucleotide
  Sense strand starting at position 3037 of SEQ ID NO: 919
cuaugauaacgccauugca

SEQ ID NO: 73749 - RNA, 19 nt, Artificial Sequence
  Description of Artificial Sequence: Synthetic oligonucleotide
  Antisense strand to SEQ ID NO: 73668
ugcaauggcguuaucauag

SEQ ID NO: 73750 - RNA, 19 nt, Artificial Sequence
  Description of Artificial Sequence: Synthetic oligonucleotide
  Sense strand starting at position 3151 of SEQ ID NO: 919
cagccauagguauaucuga

SEQ ID NO: 73751 - RNA, 19 nt, Artificial Sequence
  Description of Artificial Sequence: Synthetic oligonucleotide
  Antisense strand to SEQ ID NO: 73670
ucagauauaccuauggcug

SEQ ID NO: 73752 - RNA, 19 nt, Artificial Sequence
  Description of Artificial Sequence: Synthetic oligonucleotide
  Sense strand starting at position 3221 of SEQ ID NO: 919
caaauacggucacuguauu

SEQ ID NO: 73753 - RNA, 19 nt, Artificial Sequence
  Description of Artificial Sequence: Synthetic oligonucleotide
  Antisense strand to SEQ ID NO: 73672
aauacagugaccguauuug

SEQ ID NO: 73754 - RNA, 19 nt, Artificial Sequence
  Description of Artificial Sequence: Synthetic oligonucleotide
  Sense strand starting at position 3222 of SEQ ID NO: 919
aaauacggucacuguauua

SEQ ID NO: 73755 - RNA, 19 nt, Artificial Sequence
  Description of Artificial Sequence: Synthetic oligonucleotide
  Antisense strand to SEQ ID NO: 73674
uaauacagugaccguauuu

SEQ ID NO: 73756 - RNA, 19 nt, Artificial Sequence
  Description of Artificial Sequence: Synthetic oligonucleotide
  Sense strand starting at position 3269 of SEQ ID NO: 919
ggcauauaucuauaucugu

SEQ ID NO: 73757 - RNA, 19 nt, Artificial Sequence
  Description of Artificial Sequence: Synthetic oligonucleotide
  Antisense strand to SEQ ID NO: 73676
acagauauagauauaugcc

SEQ ID NO: 73758 - RNA, 19 nt, Artificial Sequence
  Description of Artificial Sequence: Synthetic oligonucleotide
  Sense strand starting at position 3886 of SEQ ID NO: 919
auagcacucuucucaggua

SEQ ID NO: 73759 - RNA, 19 nt, Artificial Sequence
  Description of Artificial Sequence: Synthetic oligonucleotide
  Antisense strand to SEQ ID NO: 73678
uaccugagaagagugcuau

SEQ ID NO: 73760 - RNA, 19 nt, Artificial Sequence
  Description of Artificial Sequence: Synthetic oligonucleotide
  Sense strand starting at position 103 of SEQ ID NO: 920
cuaguucuagcauacaaga

SEQ ID NO: 73761 - RNA, 19 nt, Artificial Sequence
  Description of Artificial Sequence: Synthetic oligonucleotide
  Antisense strand to SEQ ID NO: 73680
ucuuguaugcuagaacuag

SEQ ID NO: 73762 - RNA, 19 nt, Artificial Sequence
  Description of Artificial Sequence: Synthetic oligonucleotide
  Sense strand starting at position 120 of SEQ ID NO: 920
gaauauaacuuguuugggu

SEQ ID NO: 73763 - RNA, 19 nt, Artificial Sequence
  Description of Artificial Sequence: Synthetic oligonucleotide
  Antisense strand to SEQ ID NO: 73682
acccaaacaaguuauauuc

SEQ ID NO: 73764 - RNA, 19 nt, Artificial Sequence
  Description of Artificial Sequence: Synthetic oligonucleotide
  Sense strand starting at position 121 of SEQ ID NO: 920
aauauaacuuguuuggguu

SEQ ID NO: 73765 - RNA, 19 nt, Artificial Sequence
  Description of Artificial Sequence: Synthetic oligonucleotide
  Antisense strand to SEQ ID NO: 73684
aacccaaacaaguuauauu

SEQ ID NO: 73766 - RNA, 19 nt, Artificial Sequence
  Description of Artificial Sequence: Synthetic oligonucleotide
  Sense strand starting at position 289 of SEQ ID NO: 920
uuauguuucucccuuuaga

SEQ ID NO: 73767 - RNA, 19 nt, Artificial Sequence
  Description of Artificial Sequence: Synthetic oligonucleotide
  Antisense strand to SEQ ID NO: 73686
ucuaaagggagaaacauaa

SEQ ID NO: 73768 - RNA, 19 nt, Artificial Sequence
  Description of Artificial Sequence: Synthetic oligonucleotide
  Sense strand starting at position 327 of SEQ ID NO: 920
ucauuaauguguuccaaua

SEQ ID NO: 73769 - RNA, 19 nt, Artificial Sequence
  Description of Artificial Sequence: Synthetic oligonucleotide
  Antisense strand to SEQ ID NO: 73688
uauuggaacacauuaauga

SEQ ID NO: 73770 - RNA, 19 nt, Artificial Sequence
  Description of Artificial Sequence: Synthetic oligonucleotide
  Sense strand starting at position 381 of SEQ ID NO: 920
auaagaaugcauuguggaa

SEQ ID NO: 73771 - RNA, 19 nt, Artificial Sequence
  Description of Artificial Sequence: Synthetic oligonucleotide
  Antisense strand to SEQ ID NO: 73690
uuccacaaugcauucuuau

SEQ ID NO: 73772 - RNA, 19 nt, Artificial Sequence
  Description of Artificial Sequence: Synthetic oligonucleotide
  Sense strand starting at position 399 of SEQ ID NO: 920
auaaaugcauuagcaagaa

SEQ ID NO: 73773 - RNA, 19 nt, Artificial Sequence
  Description of Artificial Sequence: Synthetic oligonucleotide
  Antisense strand to SEQ ID NO: 73692
uucuugcuaaugcauuuau

SEQ ID NO: 73774 - RNA, 19 nt, Artificial Sequence
  Description of Artificial Sequence: Synthetic oligonucleotide
  Sense strand starting at position 690 of SEQ ID NO: 920
auuaaaguucuagguuuag

SEQ ID NO: 73775 - RNA, 19 nt, Artificial Sequence
  Description of Artificial Sequence: Synthetic oligonucleotide
  Antisense strand to SEQ ID NO: 73694
cuaaaccuagaacuuuaau

SEQ ID NO: 73776 - RNA, 19 nt, Artificial Sequence
  Description of Artificial Sequence: Synthetic oligonucleotide
  Sense strand starting at position 819 of SEQ ID NO: 920
gugucugcucugcuauaau

SEQ ID NO: 73777 - RNA, 19 nt, Artificial Sequence
  Description of Artificial Sequence: Synthetic oligonucleotide
  Antisense strand to SEQ ID NO: 73696
auuauagcagagcagacac

SEQ ID NO: 73778 - RNA, 19 nt, Artificial Sequence
  Description of Artificial Sequence: Synthetic oligonucleotide
  Sense strand starting at position 1177 of SEQ ID NO: 920
gaccaacauuuacgggaau

SEQ ID NO: 73779 - RNA, 19 nt, Artificial Sequence
  Description of Artificial Sequence: Synthetic oligonucleotide
  Antisense strand to SEQ ID NO: 73698
auucccguaaauguugguc

SEQ ID NO: 73780 - RNA, 19 nt, Artificial Sequence
  Description of Artificial Sequence: Synthetic oligonucleotide
  Sense strand starting at position 1178 of SEQ ID NO: 920
accaacauuuacgggaaua

SEQ ID NO: 73781 - RNA, 19 nt, Artificial Sequence
  Description of Artificial Sequence: Synthetic oligonucleotide
  Antisense strand to SEQ ID NO: 73700
uauucccguaaauguuggu

SEQ ID NO: 73782 - RNA, 19 nt, Artificial Sequence
  Description of Artificial Sequence: Synthetic oligonucleotide
  Sense strand starting at position 1191 of SEQ ID NO: 920
ggaauaaccgaccgucaca

SEQ ID NO: 73783 - RNA, 19 nt, Artificial Sequence
  Description of Artificial Sequence: Synthetic oligonucleotide
  Antisense strand to SEQ ID NO: 73702
ugugacggucgguuauucc

SEQ ID NO: 73784 - RNA, 19 nt, Artificial Sequence
  Description of Artificial Sequence: Synthetic oligonucleotide
  Sense strand starting at position 1283 of SEQ ID NO: 920
ggaccauacaauugucgga

SEQ ID NO: 73785 - RNA, 19 nt, Artificial Sequence
  Description of Artificial Sequence: Synthetic oligonucleotide
  Antisense strand to SEQ ID NO: 73704
uccgacaauuguauggucc

SEQ ID NO: 73786 - RNA, 19 nt, Artificial Sequence
  Description of Artificial Sequence: Synthetic oligonucleotide
  Sense strand starting at position 1386 of SEQ ID NO: 920
aaauaacagcucuguggau

SEQ ID NO: 73787 - RNA, 19 nt, Artificial Sequence
  Description of Artificial Sequence: Synthetic oligonucleotide
  Antisense strand to SEQ ID NO: 73706
auccacagagcuguuauuu

SEQ ID NO: 73788 - RNA, 19 nt, Artificial Sequence
  Description of Artificial Sequence: Synthetic oligonucleotide
  Sense strand starting at position 1387 of SEQ ID NO: 920
aauaacagcucuguggauu

SEQ ID NO: 73789 - RNA, 19 nt, Artificial Sequence
  Description of Artificial Sequence: Synthetic oligonucleotide
  Antisense strand to SEQ ID NO: 73708
aauccacagagcuguuauu

SEQ ID NO: 73790 - RNA, 19 nt, Artificial Sequence
  Description of Artificial Sequence: Synthetic oligonucleotide
  Sense strand starting at position 1400 of SEQ ID NO: 920
uggauuuccuaaggagaau

SEQ ID NO: 73791 - RNA, 19 nt, Artificial Sequence
  Description of Artificial Sequence: Synthetic oligonucleotide
  Antisense strand to SEQ ID NO: 73710
auucuccuuaggaaaucca

SEQ ID NO: 73792 - RNA, 19 nt, Artificial Sequence
  Description of Artificial Sequence: Synthetic oligonucleotide
  Sense strand starting at position 1710 of SEQ ID NO: 920
accgcuuucugacuggaaa

SEQ ID NO: 73793 - RNA, 19 nt, Artificial Sequence
  Description of Artificial Sequence: Synthetic oligonucleotide
  Antisense strand to SEQ ID NO: 73712
uuuccagucagaaagcggu

SEQ ID NO: 73794 - RNA, 19 nt, Artificial Sequence
  Description of Artificial Sequence: Synthetic oligonucleotide
  Sense strand starting at position 1712 of SEQ ID NO: 920
cgcuuucugacuggaaaug

SEQ ID NO: 73795 - RNA, 19 nt, Artificial Sequence
  Description of Artificial Sequence: Synthetic oligonucleotide
  Antisense strand to SEQ ID NO: 73714
cauuuccagucagaaagcg

SEQ ID NO: 73796 - RNA, 19 nt, Artificial Sequence
  Description of Artificial Sequence: Synthetic oligonucleotide
  Sense strand starting at position 1811 of SEQ ID NO: 920
ggcagacggcucuagagau

SEQ ID NO: 73797 - RNA, 19 nt, Artificial Sequence
  Description of Artificial Sequence: Synthetic oligonucleotide
  Antisense strand to SEQ ID NO: 73716
aucucuagagccgucugcc

SEQ ID NO: 73798 - RNA, 19 nt, Artificial Sequence
  Description of Artificial Sequence: Synthetic oligonucleotide
  Sense strand starting at position 2066 of SEQ ID NO: 920
gaaaguuuauaacugguuu

SEQ ID NO: 73799 - RNA, 19 nt, Artificial Sequence
  Description of Artificial Sequence: Synthetic oligonucleotide
  Antisense strand to SEQ ID NO: 73718
aaaccaguuauaaacuuuc

SEQ ID NO: 73800 - RNA, 19 nt, Artificial Sequence
  Description of Artificial Sequence: Synthetic oligonucleotide
  Sense strand starting at position 2132 of SEQ ID NO: 920
cuccuaauccuggguucua

SEQ ID NO: 73801 - RNA, 19 nt, Artificial Sequence
  Description of Artificial Sequence: Synthetic oligonucleotide
  Antisense strand to SEQ ID NO: 73720
uagaacccaggauuaggag

SEQ ID NO: 73802 - RNA, 19 nt, Artificial Sequence
  Description of Artificial Sequence: Synthetic oligonucleotide
  Sense strand starting at position 2133 of SEQ ID NO: 920
uccuaauccuggguucuaa

SEQ ID NO: 73803 - RNA, 19 nt, Artificial Sequence
  Description of Artificial Sequence: Synthetic oligonucleotide
  Antisense strand to SEQ ID NO: 73722
uuagaacccaggauuagga

SEQ ID NO: 73804 - RNA, 19 nt, Artificial Sequence
  Description of Artificial Sequence: Synthetic oligonucleotide
  Sense strand starting at position 2145 of SEQ ID NO: 920
guucuaagggucuacuaaa

SEQ ID NO: 73805 - RNA, 19 nt, Artificial Sequence
  Description of Artificial Sequence: Synthetic oligonucleotide
  Antisense strand to SEQ ID NO: 73724
uuuaguagacccuuagaac

SEQ ID NO: 73806 - RNA, 19 nt, Artificial Sequence
  Description of Artificial Sequence: Synthetic oligonucleotide
  Sense strand starting at position 2339 of SEQ ID NO: 920
ucaugaggucgguauuacu

SEQ ID NO: 73807 - RNA, 19 nt, Artificial Sequence
  Description of Artificial Sequence: Synthetic oligonucleotide
  Antisense strand to SEQ ID NO: 73726
aguaauaccgaccucauga

SEQ ID NO: 73808 - RNA, 19 nt, Artificial Sequence
  Description of Artificial Sequence: Synthetic oligonucleotide
  Sense strand starting at position 2427 of SEQ ID NO: 920
guguuuagccaacaugaau

SEQ ID NO: 73809 - RNA, 19 nt, Artificial Sequence
  Description of Artificial Sequence: Synthetic oligonucleotide
  Antisense strand to SEQ ID NO: 73728
auucauguuggcuaaacac

SEQ ID NO: 73810 - RNA, 19 nt, Artificial Sequence
  Description of Artificial Sequence: Synthetic oligonucleotide
  Sense strand starting at position 2469 of SEQ ID NO: 920
guucuuaggcuguaaacau

SEQ ID NO: 73811 - RNA, 19 nt, Artificial Sequence
  Description of Artificial Sequence: Synthetic oligonucleotide
  Antisense strand to SEQ ID NO: 73730
auguuuacagccuaagaac

SEQ ID NO: 73812 - RNA, 19 nt, Artificial Sequence
  Description of Artificial Sequence: Synthetic oligonucleotide
  Sense strand starting at position 2520 of SEQ ID NO: 920
uuagaauuguccucugaag

SEQ ID NO: 73813 - RNA, 19 nt, Artificial Sequence
  Description of Artificial Sequence: Synthetic oligonucleotide
  Antisense strand to SEQ ID NO: 73732
cuucagaggacaauucuaa

SEQ ID NO: 73814 - RNA, 19 nt, Artificial Sequence
  Description of Artificial Sequence: Synthetic oligonucleotide
  Sense strand starting at position 2522 of SEQ ID NO: 920
agaauuguccucugaagau

SEQ ID NO: 73815 - RNA, 19 nt, Artificial Sequence
  Description of Artificial Sequence: Synthetic oligonucleotide
  Antisense strand to SEQ ID NO: 73734
aucuucagaggacaauucu

SEQ ID NO: 73816 - RNA, 19 nt, Artificial Sequence
  Description of Artificial Sequence: Synthetic oligonucleotide
  Sense strand starting at position 2798 of SEQ ID NO: 920
ugcugcaaggguuaaauaa

SEQ ID NO: 73817 - RNA, 19 nt, Artificial Sequence
  Description of Artificial Sequence: Synthetic oligonucleotide
  Antisense strand to SEQ ID NO: 73736
uuauuuaacccuugcagca

SEQ ID NO: 73818 - RNA, 19 nt, Artificial Sequence
  Description of Artificial Sequence: Synthetic oligonucleotide
  Sense strand starting at position 2843 of SEQ ID NO: 920
acaguaaaugcucaugaau

SEQ ID NO: 73819 - RNA, 19 nt, Artificial Sequence
  Description of Artificial Sequence: Synthetic oligonucleotide
  Antisense strand to SEQ ID NO: 73738
auucaugagcauuuacugu

SEQ ID NO: 73820 - RNA, 19 nt, Artificial Sequence
  Description of Artificial Sequence: Synthetic oligonucleotide
  Sense strand starting at position 2846 of SEQ ID NO: 920
guaaaugcucaugaauauu

SEQ ID NO: 73821 - RNA, 19 nt, Artificial Sequence
  Description of Artificial Sequence: Synthetic oligonucleotide
  Antisense strand to SEQ ID NO: 73740
aauauucaugagcauuuac

SEQ ID NO: 73822 - RNA, 19 nt, Artificial Sequence
  Description of Artificial Sequence: Synthetic oligonucleotide
  Sense strand starting at position 3035 of SEQ ID NO: 920
agaggaaaguuacuuucca

SEQ ID NO: 73823 - RNA, 19 nt, Artificial Sequence
  Description of Artificial Sequence: Synthetic oligonucleotide
  Antisense strand to SEQ ID NO: 73742
uggaaaguaacuuuccucu

SEQ ID NO: 73824 - RNA, 19 nt, Artificial Sequence
  Description of Artificial Sequence: Synthetic oligonucleotide
  Sense strand starting at position 3036 of SEQ ID NO: 920
gaggaaaguuacuuuccau

SEQ ID NO: 73825 - RNA, 19 nt, Artificial Sequence
  Description of Artificial Sequence: Synthetic oligonucleotide
  Antisense strand to SEQ ID NO: 73744
auggaaaguaacuuuccuc

SEQ ID NO: 73826 - RNA, 19 nt, Artificial Sequence
  Description of Artificial Sequence: Synthetic oligonucleotide
  Sense strand starting at position 3104 of SEQ ID NO: 920
ccucaauguguugaaauuc

SEQ ID NO: 73827 - RNA, 19 nt, Artificial Sequence
  Description of Artificial Sequence: Synthetic oligonucleotide
  Antisense strand to SEQ ID NO: 73746
gaauuucaacacauugagg

SEQ ID NO: 73828 - RNA, 19 nt, Artificial Sequence
  Description of Artificial Sequence: Synthetic oligonucleotide
  Sense strand starting at position 3429 of SEQ ID NO: 920
uaagauaggguuugaguga

SEQ ID NO: 73829 - RNA, 19 nt, Artificial Sequence
  Description of Artificial Sequence: Synthetic oligonucleotide
  Antisense strand to SEQ ID NO: 73748
ucacucaaacccuaucuua

SEQ ID NO: 73830 - RNA, 19 nt, Artificial Sequence
  Description of Artificial Sequence: Synthetic oligonucleotide
  Sense strand starting at position 3438 of SEQ ID NO: 920
guuugagugauagaauugu

SEQ ID NO: 73831 - RNA, 19 nt, Artificial Sequence
  Description of Artificial Sequence: Synthetic oligonucleotide
  Antisense strand to SEQ ID NO: 73750
acaauucuaucacucaaac

SEQ ID NO: 73832 - RNA, 19 nt, Artificial Sequence
  Description of Artificial Sequence: Synthetic oligonucleotide
  Sense strand starting at position 3579 of SEQ ID NO: 920
guggaaucuauagagccuu

SEQ ID NO: 73833 - RNA, 19 nt, Artificial Sequence
  Description of Artificial Sequence: Synthetic oligonucleotide
  Antisense strand to SEQ ID NO: 73752
aaggcucuauagauuccac

SEQ ID NO: 73834 - RNA, 19 nt, Artificial Sequence
  Description of Artificial Sequence: Synthetic oligonucleotide
  Sense strand starting at position 3653 of SEQ ID NO: 920
gccucaggacagugauaaa

SEQ ID NO: 73835 - RNA, 19 nt, Artificial Sequence
  Description of Artificial Sequence: Synthetic oligonucleotide
  Antisense strand to SEQ ID NO: 73754
uuuaucacuguccugaggc

SEQ ID NO: 73836 - RNA, 19 nt, Artificial Sequence
  Description of Artificial Sequence: Synthetic oligonucleotide
  Sense strand starting at position 3881 of SEQ ID NO: 920
cuaccucacuucucaguga

SEQ ID NO: 73837 - RNA, 19 nt, Artificial Sequence
  Description of Artificial Sequence: Synthetic oligonucleotide
  Antisense strand to SEQ ID NO: 73756
ucacugagaagugagguag

SEQ ID NO: 73838 - RNA, 19 nt, Artificial Sequence
  Description of Artificial Sequence: Synthetic oligonucleotide
  Sense strand starting at position 3892 of SEQ ID NO: 920
cucagugaaacuggugaaa

SEQ ID NO: 73839 - RNA, 19 nt, Artificial Sequence
  Description of Artificial Sequence: Synthetic oligonucleotide
  Antisense strand to SEQ ID NO: 73758
uuucaccaguuucacugag

SEQ ID NO: 73840 - RNA, 19 nt, Artificial Sequence
  Description of Artificial Sequence: Synthetic oligonucleotide
  Sense strand starting at position 3638 of SEQ ID NO: 922
gcaagaaauuugcaaagug

SEQ ID NO: 73841 - RNA, 19 nt, Artificial Sequence
  Description of Artificial Sequence: Synthetic oligonucleotide
  Antisense strand to SEQ ID NO: 73760
cacuuugcaaauuucuugc

SEQ ID NO: 73842 - RNA, 19 nt, Artificial Sequence
  Description of Artificial Sequence: Synthetic oligonucleotide
  Sense strand starting at position 3627 of SEQ ID NO: 922
cugggauauuugcaagaaa

SEQ ID NO: 73843 - RNA, 19 nt, Artificial Sequence
  Description of Artificial Sequence: Synthetic oligonucleotide
  Antisense strand to SEQ ID NO: 73762
uuucuugcaaauaucccag

SEQ ID NO: 73844 - RNA, 19 nt, Artificial Sequence
  Description of Artificial Sequence: Synthetic oligonucleotide
  Sense strand starting at position 3619 of SEQ ID NO: 922
gcaauagacugggauauuu

SEQ ID NO: 73845 - RNA, 19 nt, Artificial Sequence
  Description of Artificial Sequence: Synthetic oligonucleotide
  Antisense strand to SEQ ID NO: 73764
aaauaucccagucuauugc

SEQ ID NO: 73846 - RNA, 19 nt, Artificial Sequence
  Description of Artificial Sequence: Synthetic oligonucleotide
  Sense strand starting at position 3618 of SEQ ID NO: 922
agcaauagacugggauauu

SEQ ID NO: 73847 - RNA, 19 nt, Artificial Sequence
  Description of Artificial Sequence: Synthetic oligonucleotide
  Antisense strand to SEQ ID NO: 73766
aauaucccagucuauugcu

SEQ ID NO: 73848 - RNA, 19 nt, Artificial Sequence
  Description of Artificial Sequence: Synthetic oligonucleotide
  Sense strand starting at position 3327 of SEQ ID NO: 922
guauguauuagagacaguc

SEQ ID NO: 73849 - RNA, 19 nt, Artificial Sequence
  Description of Artificial Sequence: Synthetic oligonucleotide
  Antisense strand to SEQ ID NO: 73768
gacugucucuaauacauac

SEQ ID NO: 73850 - RNA, 19 nt, Artificial Sequence
  Description of Artificial Sequence: Synthetic oligonucleotide
  Sense strand starting at position 3323 of SEQ ID NO: 922
auauguauguauuagagac

SEQ ID NO: 73851 - RNA, 19 nt, Artificial Sequence
  Description of Artificial Sequence: Synthetic oligonucleotide
  Antisense strand to SEQ ID NO: 73770
gucucuaauacauacauau

SEQ ID NO: 73852 - RNA, 19 nt, Artificial Sequence
  Description of Artificial Sequence: Synthetic oligonucleotide
  Sense strand starting at position 2868 of SEQ ID NO: 922
gugaguagauaacuugaau

SEQ ID NO: 73853 - RNA, 19 nt, Artificial Sequence
  Description of Artificial Sequence: Synthetic oligonucleotide
  Antisense strand to SEQ ID NO: 73772
auucaaguuaucuacucac

SEQ ID NO: 73854 - RNA, 19 nt, Artificial Sequence
  Description of Artificial Sequence: Synthetic oligonucleotide
  Sense strand starting at position 2861 of SEQ ID NO: 922
ggucgaggugaguagauaa

SEQ ID NO: 73855 - RNA, 19 nt, Artificial Sequence
  Description of Artificial Sequence: Synthetic oligonucleotide
  Antisense strand to SEQ ID NO: 73774
uuaucuacucaccucgacc

SEQ ID NO: 73856 - RNA, 19 nt, Artificial Sequence
  Description of Artificial Sequence: Synthetic oligonucleotide
  Sense strand starting at position 2860 of SEQ ID NO: 922
aggucgaggugaguagaua

SEQ ID NO: 73857 - RNA, 19 nt, Artificial Sequence
  Description of Artificial Sequence: Synthetic oligonucleotide
  Antisense strand to SEQ ID NO: 73776
uaucuacucaccucgaccu

SEQ ID NO: 73858 - RNA, 19 nt, Artificial Sequence
  Description of Artificial Sequence: Synthetic oligonucleotide
  Sense strand starting at position 2753 of SEQ ID NO: 922
ggugaacaauauguaacuu

SEQ ID NO: 73859 - RNA, 19 nt, Artificial Sequence
  Description of Artificial Sequence: Synthetic oligonucleotide
  Antisense strand to SEQ ID NO: 73778
aaguuacauauuguucacc

SEQ ID NO: 73860 - RNA, 19 nt, Artificial Sequence
  Description of Artificial Sequence: Synthetic oligonucleotide
  Sense strand starting at position 2350 of SEQ ID NO: 922
gaugguguucaguaagcag

SEQ ID NO: 73861 - RNA, 19 nt, Artificial Sequence
  Description of Artificial Sequence: Synthetic oligonucleotide
  Antisense strand to SEQ ID NO: 73780
cugcuuacugaacaccauc

SEQ ID NO: 73862 - RNA, 19 nt, Artificial Sequence
  Description of Artificial Sequence: Synthetic oligonucleotide
  Sense strand starting at position 2346 of SEQ ID NO: 922
acuggaugguguucaguaa

SEQ ID NO: 73863 - RNA, 19 nt, Artificial Sequence
  Description of Artificial Sequence: Synthetic oligonucleotide
  Antisense strand to SEQ ID NO: 73782
uuacugaacaccauccagu

SEQ ID NO: 73864 - RNA, 19 nt, Artificial Sequence
  Description of Artificial Sequence: Synthetic oligonucleotide
  Sense strand starting at position 2273 of SEQ ID NO: 922
guaugaacucuccaagagc

SEQ ID NO: 73865 - RNA, 19 nt, Artificial Sequence
  Description of Artificial Sequence: Synthetic oligonucleotide
  Antisense strand to SEQ ID NO: 73784
gcucuuggagaguucauac

SEQ ID NO: 73866 - RNA, 19 nt, Artificial Sequence
  Description of Artificial Sequence: Synthetic oligonucleotide
  Sense strand starting at position 2219 of SEQ ID NO: 922
uguaauggucgagaggauu

SEQ ID NO: 73867 - RNA, 19 nt, Artificial Sequence
  Description of Artificial Sequence: Synthetic oligonucleotide
  Antisense strand to SEQ ID NO: 73786
aauccucucgaccauuaca

SEQ ID NO: 73868 - RNA, 19 nt, Artificial Sequence
  Description of Artificial Sequence: Synthetic oligonucleotide
  Sense strand starting at position 2218 of SEQ ID NO: 922
uuguaauggucgagaggau

SEQ ID NO: 73869 - RNA, 19 nt, Artificial Sequence
  Description of Artificial Sequence: Synthetic oligonucleotide
  Antisense strand to SEQ ID NO: 73788
auccucucgaccauuacaa

SEQ ID NO: 73870 - RNA, 19 nt, Artificial Sequence
  Description of Artificial Sequence: Synthetic oligonucleotide
  Sense strand starting at position 2217 of SEQ ID NO: 922
auuguaauggucgagagga

SEQ ID NO: 73871 - RNA, 19 nt, Artificial Sequence
  Description of Artificial Sequence: Synthetic oligonucleotide
  Antisense strand to SEQ ID NO: 73790
uccucucgaccauuacaau

SEQ ID NO: 73872 - RNA, 19 nt, Artificial Sequence
  Description of Artificial Sequence: Synthetic oligonucleotide
  Sense strand starting at position 2207 of SEQ ID NO: 922
ucuagcagucauuguaaug

SEQ ID NO: 73873 - RNA, 19 nt, Artificial Sequence
  Description of Artificial Sequence: Synthetic oligonucleotide
  Antisense strand to SEQ ID NO: 73792
cauuacaaugacugcuaga

SEQ ID NO: 73874 - RNA, 19 nt, Artificial Sequence
  Description of Artificial Sequence: Synthetic oligonucleotide
  Sense strand starting at position 2147 of SEQ ID NO: 922
gguggauaacucugcccua

SEQ ID NO: 73875 - RNA, 19 nt, Artificial Sequence
  Description of Artificial Sequence: Synthetic oligonucleotide
  Antisense strand to SEQ ID NO: 73794
uagggcagaguuauccacc

SEQ ID NO: 73876 - RNA, 19 nt, Artificial Sequence
  Description of Artificial Sequence: Synthetic oligonucleotide
  Sense strand starting at position 2023 of SEQ ID NO: 922
agacuuaucucagcagaau

SEQ ID NO: 73877 - RNA, 19 nt, Artificial Sequence
  Description of Artificial Sequence: Synthetic oligonucleotide
  Antisense strand to SEQ ID NO: 73796
auucugcugagauaagucu

SEQ ID NO: 73878 - RNA, 19 nt, Artificial Sequence
  Description of Artificial Sequence: Synthetic oligonucleotide
  Sense strand starting at position 2021 of SEQ ID NO: 922
ccagacuuaucucagcaga

SEQ ID NO: 73879 - RNA, 19 nt, Artificial Sequence
  Description of Artificial Sequence: Synthetic oligonucleotide
  Antisense strand to SEQ ID NO: 73798
ucugcugagauaagucugg

SEQ ID NO: 73880 - RNA, 19 nt, Artificial Sequence
  Description of Artificial Sequence: Synthetic oligonucleotide
  Sense strand starting at position 2010 of SEQ ID NO: 922
gccagaguucuccagacuu

SEQ ID NO: 73881 - RNA, 19 nt, Artificial Sequence
  Description of Artificial Sequence: Synthetic oligonucleotide
  Antisense strand to SEQ ID NO: 73800
aagucuggagaacucuggc

SEQ ID NO: 73882 - RNA, 19 nt, Artificial Sequence
  Description of Artificial Sequence: Synthetic oligonucleotide
  Sense strand starting at position 1844 of SEQ ID NO: 922
cuuuaugaauuguaaagca

SEQ ID NO: 73883 - RNA, 19 nt, Artificial Sequence
  Description of Artificial Sequence: Synthetic oligonucleotide
  Antisense strand to SEQ ID NO: 73802
ugcuuuacaauucauaaag

SEQ ID NO: 73884 - RNA, 19 nt, Artificial Sequence
  Description of Artificial Sequence: Synthetic oligonucleotide
  Sense strand starting at position 1812 of SEQ ID NO: 922
uguaaauuagagugaagau

SEQ ID NO: 73885 - RNA, 19 nt, Artificial Sequence
  Description of Artificial Sequence: Synthetic oligonucleotide
  Antisense strand to SEQ ID NO: 73804
aucuucacucuaauuuaca

SEQ ID NO: 73886 - RNA, 19 nt, Artificial Sequence
  Description of Artificial Sequence: Synthetic oligonucleotide
  Sense strand starting at position 1732 of SEQ ID NO: 922
gggcuuacugugugaacuu

SEQ ID NO: 73887 - RNA, 19 nt, Artificial Sequence
  Description of Artificial Sequence: Synthetic oligonucleotide
  Antisense strand to SEQ ID NO: 73806
aaguucacacaguaagccc

SEQ ID NO: 73888 - RNA, 19 nt, Artificial Sequence
  Description of Artificial Sequence: Synthetic oligonucleotide
  Sense strand starting at position 1731 of SEQ ID NO: 922
agggcuuacugugugaacu

SEQ ID NO: 73889 - RNA, 19 nt, Artificial Sequence
  Description of Artificial Sequence: Synthetic oligonucleotide
  Antisense strand to SEQ ID NO: 73808
aguucacacaguaagcccu

SEQ ID NO: 73890 - RNA, 19 nt, Artificial Sequence
  Description of Artificial Sequence: Synthetic oligonucleotide
  Sense strand starting at position 1730 of SEQ ID NO: 922
gagggcuuacugugugaac

SEQ ID NO: 73891 - RNA, 19 nt, Artificial Sequence
  Description of Artificial Sequence: Synthetic oligonucleotide
  Antisense strand to SEQ ID NO: 73810
guucacacaguaagcccuc

SEQ ID NO: 73892 - RNA, 19 nt, Artificial Sequence
  Description of Artificial Sequence: Synthetic oligonucleotide
  Sense strand starting at position 1629 of SEQ ID NO: 922
ccgucauuccaacaccagu

SEQ ID NO: 73893 - RNA, 19 nt, Artificial Sequence
  Description of Artificial Sequence: Synthetic oligonucleotide
  Antisense strand to SEQ ID NO: 73812
acugguguuggaaugacgg

SEQ ID NO: 73894 - RNA, 19 nt, Artificial Sequence
  Description of Artificial Sequence: Synthetic oligonucleotide
  Sense strand starting at position 1601 of SEQ ID NO: 922
guggaagucaccugaaacu

SEQ ID NO: 73895 - RNA, 19 nt, Artificial Sequence
  Description of Artificial Sequence: Synthetic oligonucleotide
  Antisense strand to SEQ ID NO: 73814
aguuucaggugacuuccac

SEQ ID NO: 73896 - RNA, 19 nt, Artificial Sequence
  Description of Artificial Sequence: Synthetic oligonucleotide
  Sense strand starting at position 1587 of SEQ ID NO: 922
aaguuaauugcagagugga

SEQ ID NO: 73897 - RNA, 19 nt, Artificial Sequence
  Description of Artificial Sequence: Synthetic oligonucleotide
  Antisense strand to SEQ ID NO: 73816
uccacucugcaauuaacuu

SEQ ID NO: 73898 - RNA, 19 nt, Artificial Sequence
  Description of Artificial Sequence: Synthetic oligonucleotide
  Sense strand starting at position 1509 of SEQ ID NO: 922
ggcuguugguucccacuga

SEQ ID NO: 73899 - RNA, 19 nt, Artificial Sequence
  Description of Artificial Sequence: Synthetic oligonucleotide
  Antisense strand to SEQ ID NO: 73818
ucagugggaaccaacagcc

SEQ ID NO: 73900 - RNA, 19 nt, Artificial Sequence
  Description of Artificial Sequence: Synthetic oligonucleotide
  Sense strand starting at position 768 of SEQ ID NO: 922
acuuuagagucccuggagu

SEQ ID NO: 73901 - RNA, 19 nt, Artificial Sequence
  Description of Artificial Sequence: Synthetic oligonucleotide
  Antisense strand to SEQ ID NO: 73820
acuccagggacucuaaagu

SEQ ID NO: 73902 - RNA, 19 nt, Artificial Sequence
  Description of Artificial Sequence: Synthetic oligonucleotide
  Sense strand starting at position 757 of SEQ ID NO: 922
ggaagucucuaacuuuaga

SEQ ID NO: 73903 - RNA, 19 nt, Artificial Sequence
  Description of Artificial Sequence: Synthetic oligonucleotide
  Antisense strand to SEQ ID NO: 73822
ucuaaaguuagagacuucc

SEQ ID NO: 73904 - RNA, 19 nt, Artificial Sequence
  Description of Artificial Sequence: Synthetic oligonucleotide
  Sense strand starting at position 704 of SEQ ID NO: 922
agguuagacucagaacaga

SEQ ID NO: 73905 - RNA, 19 nt, Artificial Sequence
  Description of Artificial Sequence: Synthetic oligonucleotide
  Antisense strand to SEQ ID NO: 73824
ucuguucugagucuaaccu

SEQ ID NO: 73906 - RNA, 19 nt, Artificial Sequence
  Description of Artificial Sequence: Synthetic oligonucleotide
  Sense strand starting at position 659 of SEQ ID NO: 922
gaggauuagcgggaggguu

SEQ ID NO: 73907 - RNA, 19 nt, Artificial Sequence
  Description of Artificial Sequence: Synthetic oligonucleotide
  Antisense strand to SEQ ID NO: 73826
aacccucccgcuaauccuc

SEQ ID NO: 73908 - RNA, 19 nt, Artificial Sequence
  Description of Artificial Sequence: Synthetic oligonucleotide
  Sense strand starting at position 647 of SEQ ID NO: 922
aguaccucuggugaggauu

SEQ ID NO: 73909 - RNA, 19 nt, Artificial Sequence
  Description of Artificial Sequence: Synthetic oligonucleotide
  Antisense strand to SEQ ID NO: 73828
aauccucaccagagguacu

SEQ ID NO: 73910 - RNA, 19 nt, Artificial Sequence
  Description of Artificial Sequence: Synthetic oligonucleotide
  Sense strand starting at position 632 of SEQ ID NO: 922
caaugcuacccguaaagua

SEQ ID NO: 73911 - RNA, 19 nt, Artificial Sequence
  Description of Artificial Sequence: Synthetic oligonucleotide
  Antisense strand to SEQ ID NO: 73830
uacuuuacggguagcauug

SEQ ID NO: 73912 - RNA, 19 nt, Artificial Sequence
  Description of Artificial Sequence: Synthetic oligonucleotide
  Sense strand starting at position 528 of SEQ ID NO: 922
gucucacucccacguaaug

SEQ ID NO: 73913 - RNA, 19 nt, Artificial Sequence
  Description of Artificial Sequence: Synthetic oligonucleotide
  Antisense strand to SEQ ID NO: 73832
cauuacgugggagugagac

SEQ ID NO: 73914 - RNA, 19 nt, Artificial Sequence
  Description of Artificial Sequence: Synthetic oligonucleotide
  Sense strand starting at position 186 of SEQ ID NO: 922
uagcucugagaaugaauga

SEQ ID NO: 73915 - RNA, 19 nt, Artificial Sequence
  Description of Artificial Sequence: Synthetic oligonucleotide
  Antisense strand to SEQ ID NO: 73834
ucauucauucucagagcua

SEQ ID NO: 73916 - RNA, 19 nt, Artificial Sequence
  Description of Artificial Sequence: Synthetic oligonucleotide
  Sense strand starting at position 174 of SEQ ID NO: 922
gaaauagguccuuagcucu

SEQ ID NO: 73917 - RNA, 19 nt, Artificial Sequence
  Description of Artificial Sequence: Synthetic oligonucleotide
  Antisense strand to SEQ ID NO: 73836
agagcuaaggaccuauuuc

SEQ ID NO: 73918 - RNA, 19 nt, Artificial Sequence
  Description of Artificial Sequence: Synthetic oligonucleotide
  Sense strand starting at position 173 of SEQ ID NO: 922
ugaaauagguccuuagcuc

SEQ ID NO: 73919 - RNA, 19 nt, Artificial Sequence
  Description of Artificial Sequence: Synthetic oligonucleotide
  Antisense strand to SEQ ID NO: 73838
gagcuaaggaccuauuuca

SEQ ID NO: 73920 - RNA, 19 nt, Artificial Sequence
  Description of Artificial Sequence: Synthetic oligonucleotide
  Sense strand starting at position 3912 of SEQ ID NO: 921
gugaguagauaacuugaau

SEQ ID NO: 73921 - RNA, 19 nt, Artificial Sequence
  Description of Artificial Sequence: Synthetic oligonucleotide
  Antisense strand to SEQ ID NO: 73840
auucaaguuaucuacucac

SEQ ID NO: 73922 - RNA, 19 nt, Artificial Sequence
  Description of Artificial Sequence: Synthetic oligonucleotide
  Sense strand starting at position 3905 of SEQ ID NO: 921
ggucgaggugaguagauaa

SEQ ID NO: 73923 - RNA, 19 nt, Artificial Sequence
  Description of Artificial Sequence: Synthetic oligonucleotide
  Antisense strand to SEQ ID NO: 73842
uuaucuacucaccucgacc

SEQ ID NO: 73924 - RNA, 19 nt, Artificial Sequence
  Description of Artificial Sequence: Synthetic oligonucleotide
  Sense strand starting at position 3904 of SEQ ID NO: 921
aggucgaggugaguagaua

SEQ ID NO: 73925 - RNA, 19 nt, Artificial Sequence
  Description of Artificial Sequence: Synthetic oligonucleotide
  Antisense strand to SEQ ID NO: 73844
uaucuacucaccucgaccu

SEQ ID NO: 73926 - RNA, 19 nt, Artificial Sequence
  Description of Artificial Sequence: Synthetic oligonucleotide
  Sense strand starting at position 3797 of SEQ ID NO: 921
ggugaacaauauguaacuu

SEQ ID NO: 73927 - RNA, 19 nt, Artificial Sequence
  Description of Artificial Sequence: Synthetic oligonucleotide
  Antisense strand to SEQ ID NO: 73846
aaguuacauauuguucacc

SEQ ID NO: 73928 - RNA, 19 nt, Artificial Sequence
  Description of Artificial Sequence: Synthetic oligonucleotide
  Sense strand starting at position 3394 of SEQ ID NO: 921
gaugguguucaguaagcag

SEQ ID NO: 73929 - RNA, 19 nt, Artificial Sequence
  Description of Artificial Sequence: Synthetic oligonucleotide
  Antisense strand to SEQ ID NO: 73848
cugcuuacugaacaccauc

SEQ ID NO: 73930 - RNA, 19 nt, Artificial Sequence
  Description of Artificial Sequence: Synthetic oligonucleotide
  Sense strand starting at position 3390 of SEQ ID NO: 921
acuggaugguguucaguaa

SEQ ID NO: 73931 - RNA, 19 nt, Artificial Sequence
  Description of Artificial Sequence: Synthetic oligonucleotide
  Antisense strand to SEQ ID NO: 73850
uuacugaacaccauccagu

SEQ ID NO: 73932 - RNA, 19 nt, Artificial Sequence
  Description of Artificial Sequence: Synthetic oligonucleotide
  Sense strand starting at position 3317 of SEQ ID NO: 921
guaugaacucuccaagagc

SEQ ID NO: 73933 - RNA, 19 nt, Artificial Sequence
  Description of Artificial Sequence: Synthetic oligonucleotide
  Antisense strand to SEQ ID NO: 73852
gcucuuggagaguucauac

SEQ ID NO: 73934 - RNA, 19 nt, Artificial Sequence
  Description of Artificial Sequence: Synthetic oligonucleotide
  Sense strand starting at position 3263 of SEQ ID NO: 921
uguaauggucgagaggauu

SEQ ID NO: 73935 - RNA, 19 nt, Artificial Sequence
  Description of Artificial Sequence: Synthetic oligonucleotide
  Antisense strand to SEQ ID NO: 73854
aauccucucgaccauuaca

SEQ ID NO: 73936 - RNA, 19 nt, Artificial Sequence
  Description of Artificial Sequence: Synthetic oligonucleotide
  Sense strand starting at position 3262 of SEQ ID NO: 921
uuguaauggucgagaggau

SEQ ID NO: 73937 - RNA, 19 nt, Artificial Sequence
  Description of Artificial Sequence: Synthetic oligonucleotide
  Antisense strand to SEQ ID NO: 73856
auccucucgaccauuacaa

SEQ ID NO: 73938 - RNA, 19 nt, Artificial Sequence
  Description of Artificial Sequence: Synthetic oligonucleotide
  Sense strand starting at position 3261 of SEQ ID NO: 921
auuguaauggucgagagga

SEQ ID NO: 73939 - RNA, 19 nt, Artificial Sequence
  Description of Artificial Sequence: Synthetic oligonucleotide
  Antisense strand to SEQ ID NO: 73858
uccucucgaccauuacaau

SEQ ID NO: 73940 - RNA, 19 nt, Artificial Sequence
  Description of Artificial Sequence: Synthetic oligonucleotide
  Sense strand starting at position 3251 of SEQ ID NO: 921
ucuagcagucauuguaaug

SEQ ID NO: 73941 - RNA, 19 nt, Artificial Sequence
  Description of Artificial Sequence: Synthetic oligonucleotide
  Antisense strand to SEQ ID NO: 73860
cauuacaaugacugcuaga

SEQ ID NO: 73942 - RNA, 19 nt, Artificial Sequence
  Description of Artificial Sequence: Synthetic oligonucleotide
  Sense strand starting at position 3191 of SEQ ID NO: 921
gguggauaacucugcccua

SEQ ID NO: 73943 - RNA, 19 nt, Artificial Sequence
  Description of Artificial Sequence: Synthetic oligonucleotide
  Antisense strand to SEQ ID NO: 73862
uagggcagaguuauccacc

SEQ ID NO: 73944 - RNA, 19 nt, Artificial Sequence
  Description of Artificial Sequence: Synthetic oligonucleotide
  Sense strand starting at position 3067 of SEQ ID NO: 921
agacuuaucucagcagaau

SEQ ID NO: 73945 - RNA, 19 nt, Artificial Sequence
  Description of Artificial Sequence: Synthetic oligonucleotide
  Antisense strand to SEQ ID NO: 73864
auucugcugagauaagucu

SEQ ID NO: 73946 - RNA, 19 nt, Artificial Sequence
  Description of Artificial Sequence: Synthetic oligonucleotide
  Sense strand starting at position 3054 of SEQ ID NO: 921
gccagaguucuccagacuu

SEQ ID NO: 73947 - RNA, 19 nt, Artificial Sequence
  Description of Artificial Sequence: Synthetic oligonucleotide
  Antisense strand to SEQ ID NO: 73866
aagucuggagaacucuggc

SEQ ID NO: 73948 - RNA, 19 nt, Artificial Sequence
  Description of Artificial Sequence: Synthetic oligonucleotide
  Sense strand starting at position 2856 of SEQ ID NO: 921
uguaaauuagagugaagau

SEQ ID NO: 73949 - RNA, 19 nt, Artificial Sequence
  Description of Artificial Sequence: Synthetic oligonucleotide
  Antisense strand to SEQ ID NO: 73868
aucuucacucuaauuuaca

SEQ ID NO: 73950 - RNA, 19 nt, Artificial Sequence
  Description of Artificial Sequence: Synthetic oligonucleotide
  Sense strand starting at position 2776 of SEQ ID NO: 921
gggcuuacugugugaacuu

SEQ ID NO: 73951 - RNA, 19 nt, Artificial Sequence
  Description of Artificial Sequence: Synthetic oligonucleotide
  Antisense strand to SEQ ID NO: 73870
aaguucacacaguaagccc

SEQ ID NO: 73952 - RNA, 19 nt, Artificial Sequence
  Description of Artificial Sequence: Synthetic oligonucleotide
  Sense strand starting at position 2775 of SEQ ID NO: 921
agggcuuacugugugaacu

SEQ ID NO: 73953 - RNA, 19 nt, Artificial Sequence
  Description of Artificial Sequence: Synthetic oligonucleotide
  Antisense strand to SEQ ID NO: 73872
aguucacacaguaagcccu

SEQ ID NO: 73954 - RNA, 19 nt, Artificial Sequence
  Description of Artificial Sequence: Synthetic oligonucleotide
  Sense strand starting at position 2774 of SEQ ID NO: 921
gagggcuuacugugugaac

SEQ ID NO: 73955 - RNA, 19 nt, Artificial Sequence
  Description of Artificial Sequence: Synthetic oligonucleotide
  Antisense strand to SEQ ID NO: 73874
guucacacaguaagcccuc

SEQ ID NO: 73956 - RNA, 19 nt, Artificial Sequence
  Description of Artificial Sequence: Synthetic oligonucleotide
  Sense strand starting at position 2673 of SEQ ID NO: 921
ccgucauuccaacaccagu

SEQ ID NO: 73957 - RNA, 19 nt, Artificial Sequence
  Description of Artificial Sequence: Synthetic oligonucleotide
  Antisense strand to SEQ ID NO: 73876
acugguguuggaaugacgg

SEQ ID NO: 73958 - RNA, 19 nt, Artificial Sequence
  Description of Artificial Sequence: Synthetic oligonucleotide
  Sense strand starting at position 2645 of SEQ ID NO: 921
guggaagucaccugaaacu

SEQ ID NO: 73959 - RNA, 19 nt, Artificial Sequence
  Description of Artificial Sequence: Synthetic oligonucleotide
  Antisense strand to SEQ ID NO: 73878
aguuucaggugacuuccac

SEQ ID NO: 73960 - RNA, 19 nt, Artificial Sequence
  Description of Artificial Sequence: Synthetic oligonucleotide
  Sense strand starting at position 2631 of SEQ ID NO: 921
aaguuaauugcagagugga

SEQ ID NO: 73961 - RNA, 19 nt, Artificial Sequence
  Description of Artificial Sequence: Synthetic oligonucleotide
  Antisense strand to SEQ ID NO: 73880
uccacucugcaauuaacuu

SEQ ID NO: 73962 - RNA, 19 nt, Artificial Sequence
  Description of Artificial Sequence: Synthetic oligonucleotide
  Sense strand starting at position 1812 of SEQ ID NO: 921
acuuuagagucccuggagu

SEQ ID NO: 73963 - RNA, 19 nt, Artificial Sequence
  Description of Artificial Sequence: Synthetic oligonucleotide
  Antisense strand to SEQ ID NO: 73882
acuccagggacucuaaagu

SEQ ID NO: 73964 - RNA, 19 nt, Artificial Sequence
  Description of Artificial Sequence: Synthetic oligonucleotide
  Sense strand starting at position 1801 of SEQ ID NO: 921
ggaagucucuaacuuuaga

SEQ ID NO: 73965 - RNA, 19 nt, Artificial Sequence
  Description of Artificial Sequence: Synthetic oligonucleotide
  Antisense strand to SEQ ID NO: 73884
ucuaaaguuagagacuucc

SEQ ID NO: 73966 - RNA, 19 nt, Artificial Sequence
  Description of Artificial Sequence: Synthetic oligonucleotide
  Sense strand starting at position 1748 of SEQ ID NO: 921
agguuagacucagaacaga

SEQ ID NO: 73967 - RNA, 19 nt, Artificial Sequence
  Description of Artificial Sequence: Synthetic oligonucleotide
  Antisense strand to SEQ ID NO: 73886
ucuguucugagucuaaccu

SEQ ID NO: 73968 - RNA, 19 nt, Artificial Sequence
  Description of Artificial Sequence: Synthetic oligonucleotide
  Sense strand starting at position 1703 of SEQ ID NO: 921
gaggauuagcgggaggguu

SEQ ID NO: 73969 - RNA, 19 nt, Artificial Sequence
  Description of Artificial Sequence: Synthetic oligonucleotide
  Antisense strand to SEQ ID NO: 73888
aacccucccgcuaauccuc

SEQ ID NO: 73970 - RNA, 19 nt, Artificial Sequence
  Description of Artificial Sequence: Synthetic oligonucleotide
  Sense strand starting at position 1691 of SEQ ID NO: 921
aguaccucuggugaggauu

SEQ ID NO: 73971 - RNA, 19 nt, Artificial Sequence
  Description of Artificial Sequence: Synthetic oligonucleotide
  Antisense strand to SEQ ID NO: 73890
aauccucaccagagguacu

SEQ ID NO: 73972 - RNA, 19 nt, Artificial Sequence
  Description of Artificial Sequence: Synthetic oligonucleotide
  Sense strand starting at position 1676 of SEQ ID NO: 921
caaugcuacccguaaagua

SEQ ID NO: 73973 - RNA, 19 nt, Artificial Sequence
  Description of Artificial Sequence: Synthetic oligonucleotide
  Antisense strand to SEQ ID NO: 73892
uacuuuacggguagcauug

SEQ ID NO: 73974 - RNA, 19 nt, Artificial Sequence
  Description of Artificial Sequence: Synthetic oligonucleotide
  Sense strand starting at position 1230 of SEQ ID NO: 921
uagcucugagaaugaauga

SEQ ID NO: 73975 - RNA, 19 nt, Artificial Sequence
  Description of Artificial Sequence: Synthetic oligonucleotide
  Antisense strand to SEQ ID NO: 73894
ucauucauucucagagcua

SEQ ID NO: 73976 - RNA, 19 nt, Artificial Sequence
  Description of Artificial Sequence: Synthetic oligonucleotide
  Sense strand starting at position 1218 of SEQ ID NO: 921
gaaauagguccuuagcucu

SEQ ID NO: 73977 - RNA, 19 nt, Artificial Sequence
  Description of Artificial Sequence: Synthetic oligonucleotide
  Antisense strand to SEQ ID NO: 73896
agagcuaaggaccuauuuc

SEQ ID NO: 73978 - RNA, 19 nt, Artificial Sequence
  Description of Artificial Sequence: Synthetic oligonucleotide
  Sense strand starting at position 1217 of SEQ ID NO: 921
ugaaauagguccuuagcuc

SEQ ID NO: 73979 - RNA, 19 nt, Artificial Sequence
  Description of Artificial Sequence: Synthetic oligonucleotide
  Antisense strand to SEQ ID NO: 73898
gagcuaaggaccuauuuca

SEQ ID NO: 73980 - RNA, 19 nt, Artificial Sequence
  Description of Artificial Sequence: Synthetic oligonucleotide
  Sense strand starting at position 839 of SEQ ID NO: 921
ggcccugacauguacuagu

SEQ ID NO: 73981 - RNA, 19 nt, Artificial Sequence
  Description of Artificial Sequence: Synthetic oligonucleotide
  Antisense strand to SEQ ID NO: 73900
acuaguacaugucagggcc

SEQ ID NO: 73982 - RNA, 19 nt, Artificial Sequence
  Description of Artificial Sequence: Synthetic oligonucleotide
  Sense strand starting at position 715 of SEQ ID NO: 921
ggcugcucccuccaaagaa

SEQ ID NO: 73983 - RNA, 19 nt, Artificial Sequence
  Description of Artificial Sequence: Synthetic oligonucleotide
  Antisense strand to SEQ ID NO: 73902
uucuuuggagggagcagcc

SEQ ID NO: 73984 - RNA, 19 nt, Artificial Sequence
  Description of Artificial Sequence: Synthetic oligonucleotide
  Sense strand starting at position 664 of SEQ ID NO: 921
uccugaugcuaccuacaga

SEQ ID NO: 73985 - RNA, 19 nt, Artificial Sequence
  Description of Artificial Sequence: Synthetic oligonucleotide
  Antisense strand to SEQ ID NO: 73904
ucuguagguagcaucagga

SEQ ID NO: 73986 - RNA, 19 nt, Artificial Sequence
  Description of Artificial Sequence: Synthetic oligonucleotide
  Sense strand starting at position 489 of SEQ ID NO: 921
gugcuugaauuaucccaac

SEQ ID NO: 73987 - RNA, 19 nt, Artificial Sequence
  Description of Artificial Sequence: Synthetic oligonucleotide
  Antisense strand to SEQ ID NO: 73906
guugggauaauucaagcac

SEQ ID NO: 73988 - RNA, 19 nt, Artificial Sequence
  Description of Artificial Sequence: Synthetic oligonucleotide
  Sense strand starting at position 483 of SEQ ID NO: 921
uguaacgugcuugaauuau

SEQ ID NO: 73989 - RNA, 19 nt, Artificial Sequence
  Description of Artificial Sequence: Synthetic oligonucleotide
  Antisense strand to SEQ ID NO: 73908
auaauucaagcacguuaca

SEQ ID NO: 73990 - RNA, 19 nt, Artificial Sequence
  Description of Artificial Sequence: Synthetic oligonucleotide
  Sense strand starting at position 320 of SEQ ID NO: 921
gccagauguggugucgcau

SEQ ID NO: 73991 - RNA, 19 nt, Artificial Sequence
  Description of Artificial Sequence: Synthetic oligonucleotide
  Antisense strand to SEQ ID NO: 73910
augcgacaccacaucuggc

SEQ ID NO: 73992 - RNA, 19 nt, Artificial Sequence
  Description of Artificial Sequence: Synthetic oligonucleotide
  Sense strand starting at position 243 of SEQ ID NO: 921
ggaguucgagcucaggaau

SEQ ID NO: 73993 - RNA, 19 nt, Artificial Sequence
  Description of Artificial Sequence: Synthetic oligonucleotide
  Antisense strand to SEQ ID NO: 73912
auuccugagcucgaacucc

SEQ ID NO: 73994 - RNA, 19 nt, Artificial Sequence
  Description of Artificial Sequence: Synthetic oligonucleotide
  Sense strand starting at position 100 of SEQ ID NO: 921
acucuauggugaguuguau

SEQ ID NO: 73995 - RNA, 19 nt, Artificial Sequence
  Description of Artificial Sequence: Synthetic oligonucleotide
  Antisense strand to SEQ ID NO: 73914
auacaacucaccauagagu

SEQ ID NO: 73996 - RNA, 19 nt, Artificial Sequence
  Description of Artificial Sequence: Synthetic oligonucleotide
  Sense strand starting at position 18 of SEQ ID NO: 921
gggugucaaugucuaccaa

SEQ ID NO: 73997 - RNA, 19 nt, Artificial Sequence
  Description of Artificial Sequence: Synthetic oligonucleotide
  Antisense strand to SEQ ID NO: 73916
uugguagacauugacaccc

SEQ ID NO: 73998 - RNA, 19 nt, Artificial Sequence
  Description of Artificial Sequence: Synthetic oligonucleotide
  Sense strand starting at position 9 of SEQ ID NO: 921
acacacuuugggugucaau

SEQ ID NO: 73999 - RNA, 19 nt, Artificial Sequence
  Description of Artificial Sequence: Synthetic oligonucleotide
  Antisense strand to SEQ ID NO: 73918
auugacacccaaagugugu

SEQ ID NO: 74000 - RNA, 19 nt, Artificial Sequence
  Description of Artificial Sequence: Synthetic oligonucleotide
  Sense strand starting at position 3981 of SEQ ID NO: 923
guauguauuagagacaguc

SEQ ID NO: 74001 - RNA, 19 nt, Artificial Sequence
  Description of Artificial Sequence: Synthetic oligonucleotide
  Antisense strand to SEQ ID NO: 73920
gacugucucuaauacauac

SEQ ID NO: 74002 - RNA, 19 nt, Artificial Sequence
  Description of Artificial Sequence: Synthetic oligonucleotide
  Sense strand starting at position 3522 of SEQ ID NO: 923
gugaguagauaacuugaau

SEQ ID NO: 74003 - RNA, 19 nt, Artificial Sequence
  Description of Artificial Sequence: Synthetic oligonucleotide
  Antisense strand to SEQ ID NO: 73922
auucaaguuaucuacucac

SEQ ID NO: 74004 - RNA, 19 nt, Artificial Sequence
  Description of Artificial Sequence: Synthetic oligonucleotide
  Sense strand starting at position 3515 of SEQ ID NO: 923
ggucgaggugaguagauaa

SEQ ID NO: 74005 - RNA, 19 nt, Artificial Sequence
  Description of Artificial Sequence: Synthetic oligonucleotide
  Antisense strand to SEQ ID NO: 73924
uuaucuacucaccucgacc

SEQ ID NO: 74006 - RNA, 19 nt, Artificial Sequence
  Description of Artificial Sequence: Synthetic oligonucleotide
  Sense strand starting at position 3514 of SEQ ID NO: 923
aggucgaggugaguagaua

SEQ ID NO: 74007 - RNA, 19 nt, Artificial Sequence
  Description of Artificial Sequence: Synthetic oligonucleotide
  Antisense strand to SEQ ID NO: 73926
uaucuacucaccucgaccu

SEQ ID NO: 74008 - RNA, 19 nt, Artificial Sequence
  Description of Artificial Sequence: Synthetic oligonucleotide
  Sense strand starting at position 3407 of SEQ ID NO: 923
ggugaacaauauguaacuu

SEQ ID NO: 74009 - RNA, 19 nt, Artificial Sequence
  Description of Artificial Sequence: Synthetic oligonucleotide
  Antisense strand to SEQ ID NO: 73928
aaguuacauauuguucacc

SEQ ID NO: 74010 - RNA, 19 nt, Artificial Sequence
  Description of Artificial Sequence: Synthetic oligonucleotide
  Sense strand starting at position 3004 of SEQ ID NO: 923
gaugguguucaguaagcag

SEQ ID NO: 74011 - RNA, 19 nt, Artificial Sequence
  Description of Artificial Sequence: Synthetic oligonucleotide
  Antisense strand to SEQ ID NO: 73930
cugcuuacugaacaccauc

SEQ ID NO: 74012 - RNA, 19 nt, Artificial Sequence
  Description of Artificial Sequence: Synthetic oligonucleotide
  Sense strand starting at position 3000 of SEQ ID NO: 923
acuggaugguguucaguaa

SEQ ID NO: 74013 - RNA, 19 nt, Artificial Sequence
  Description of Artificial Sequence: Synthetic oligonucleotide
  Antisense strand to SEQ ID NO: 73932
uuacugaacaccauccagu

SEQ ID NO: 74014 - RNA, 19 nt, Artificial Sequence
  Description of Artificial Sequence: Synthetic oligonucleotide
  Sense strand starting at position 2927 of SEQ ID NO: 923
guaugaacucuccaagagc

SEQ ID NO: 74015 - RNA, 19 nt, Artificial Sequence
  Description of Artificial Sequence: Synthetic oligonucleotide
  Antisense strand to SEQ ID NO: 73934
gcucuuggagaguucauac

SEQ ID NO: 74016 - RNA, 19 nt, Artificial Sequence
  Description of Artificial Sequence: Synthetic oligonucleotide
  Sense strand starting at position 2873 of SEQ ID NO: 923
uguaauggucgagaggauu

SEQ ID NO: 74017 - RNA, 19 nt, Artificial Sequence
  Description of Artificial Sequence: Synthetic oligonucleotide
  Antisense strand to SEQ ID NO: 73936
aauccucucgaccauuaca

SEQ ID NO: 74018 - RNA, 19 nt, Artificial Sequence
  Description of Artificial Sequence: Synthetic oligonucleotide
  Sense strand starting at position 2872 of SEQ ID NO: 923
uuguaauggucgagaggau

SEQ ID NO: 74019 - RNA, 19 nt, Artificial Sequence
  Description of Artificial Sequence: Synthetic oligonucleotide
  Antisense strand to SEQ ID NO: 73938
auccucucgaccauuacaa

SEQ ID NO: 74020 - RNA, 19 nt, Artificial Sequence
  Description of Artificial Sequence: Synthetic oligonucleotide
  Sense strand starting at position 2871 of SEQ ID NO: 923
auuguaauggucgagagga

SEQ ID NO: 74021 - RNA, 19 nt, Artificial Sequence
  Description of Artificial Sequence: Synthetic oligonucleotide
  Antisense strand to SEQ ID NO: 73940
uccucucgaccauuacaau

SEQ ID NO: 74022 - RNA, 19 nt, Artificial Sequence
  Description of Artificial Sequence: Synthetic oligonucleotide
  Sense strand starting at position 2861 of SEQ ID NO: 923
ucuagcagucauuguaaug

SEQ ID NO: 74023 - RNA, 19 nt, Artificial Sequence
  Description of Artificial Sequence: Synthetic oligonucleotide
  Antisense strand to SEQ ID NO: 73942
cauuacaaugacugcuaga

SEQ ID NO: 74024 - RNA, 19 nt, Artificial Sequence
  Description of Artificial Sequence: Synthetic oligonucleotide
  Sense strand starting at position 2801 of SEQ ID NO: 923
gguggauaacucugcccua

SEQ ID NO: 74025 - RNA, 19 nt, Artificial Sequence
  Description of Artificial Sequence: Synthetic oligonucleotide
  Antisense strand to SEQ ID NO: 73944
uagggcagaguuauccacc

SEQ ID NO: 74026 - RNA, 19 nt, Artificial Sequence
  Description of Artificial Sequence: Synthetic oligonucleotide
  Sense strand starting at position 2677 of SEQ ID NO: 923
agacuuaucucagcagaau

SEQ ID NO: 74027 - RNA, 19 nt, Artificial Sequence
  Description of Artificial Sequence: Synthetic oligonucleotide
  Antisense strand to SEQ ID NO: 73946
auucugcugagauaagucu

SEQ ID NO: 74028 - RNA, 19 nt, Artificial Sequence
  Description of Artificial Sequence: Synthetic oligonucleotide
  Sense strand starting at position 2664 of SEQ ID NO: 923
gccagaguucuccagacuu

SEQ ID NO: 74029 - RNA, 19 nt, Artificial Sequence
  Description of Artificial Sequence: Synthetic oligonucleotide
  Antisense strand to SEQ ID NO: 73948
aagucuggagaacucuggc

SEQ ID NO: 74030 - RNA, 19 nt, Artificial Sequence
  Description of Artificial Sequence: Synthetic oligonucleotide
  Sense strand starting at position 2466 of SEQ ID NO: 923
uguaaauuagagugaagau

SEQ ID NO: 74031 - RNA, 19 nt, Artificial Sequence
  Description of Artificial Sequence: Synthetic oligonucleotide
  Antisense strand to SEQ ID NO: 73950
aucuucacucuaauuuaca

SEQ ID NO: 74032 - RNA, 19 nt, Artificial Sequence
  Description of Artificial Sequence: Synthetic oligonucleotide
  Sense strand starting at position 2386 of SEQ ID NO: 923
gggcuuacugugugaacuu

SEQ ID NO: 74033 - RNA, 19 nt, Artificial Sequence
  Description of Artificial Sequence: Synthetic oligonucleotide
  Antisense strand to SEQ ID NO: 73952
aaguucacacaguaagccc

SEQ ID NO: 74034 - RNA, 19 nt, Artificial Sequence
  Description of Artificial Sequence: Synthetic oligonucleotide
  Sense strand starting at position 2385 of SEQ ID NO: 923
agggcuuacugugugaacu

SEQ ID NO: 74035 - RNA, 19 nt, Artificial Sequence
  Description of Artificial Sequence: Synthetic oligonucleotide
  Antisense strand to SEQ ID NO: 73954
aguucacacaguaagcccu

SEQ ID NO: 74036 - RNA, 19 nt, Artificial Sequence
  Description of Artificial Sequence: Synthetic oligonucleotide
  Sense strand starting at position 2384 of SEQ ID NO: 923
gagggcuuacugugugaac

SEQ ID NO: 74037 - RNA, 19 nt, Artificial Sequence
  Description of Artificial Sequence: Synthetic oligonucleotide
  Antisense strand to SEQ ID NO: 73956
guucacacaguaagcccuc

SEQ ID NO: 74038 - RNA, 19 nt, Artificial Sequence
  Description of Artificial Sequence: Synthetic oligonucleotide
  Sense strand starting at position 2283 of SEQ ID NO: 923
ccgucauuccaacaccagu

SEQ ID NO: 74039 - RNA, 19 nt, Artificial Sequence
  Description of Artificial Sequence: Synthetic oligonucleotide
  Antisense strand to SEQ ID NO: 73958
acugguguuggaaugacgg

SEQ ID NO: 74040 - RNA, 19 nt, Artificial Sequence
  Description of Artificial Sequence: Synthetic oligonucleotide
  Sense strand starting at position 2255 of SEQ ID NO: 923
guggaagucaccugaaacu

SEQ ID NO: 74041 - RNA, 19 nt, Artificial Sequence
  Description of Artificial Sequence: Synthetic oligonucleotide
  Antisense strand to SEQ ID NO: 73960
aguuucaggugacuuccac

SEQ ID NO: 74042 - RNA, 19 nt, Artificial Sequence
  Description of Artificial Sequence: Synthetic oligonucleotide
  Sense strand starting at position 2241 of SEQ ID NO: 923
aaguuaauugcagagugga

SEQ ID NO: 74043 - RNA, 19 nt, Artificial Sequence
  Description of Artificial Sequence: Synthetic oligonucleotide
  Antisense strand to SEQ ID NO: 73962
uccacucugcaauuaacuu

SEQ ID NO: 74044 - RNA, 19 nt, Artificial Sequence
  Description of Artificial Sequence: Synthetic oligonucleotide
  Sense strand starting at position 2163 of SEQ ID NO: 923
ggcuguugguucccacuga

SEQ ID NO: 74045 - RNA, 19 nt, Artificial Sequence
  Description of Artificial Sequence: Synthetic oligonucleotide
  Antisense strand to SEQ ID NO: 73964
ucagugggaaccaacagcc

SEQ ID NO: 74046 - RNA, 19 nt, Artificial Sequence
  Description of Artificial Sequence: Synthetic oligonucleotide
  Sense strand starting at position 1422 of SEQ ID NO: 923
acuuuagagucccuggagu

SEQ ID NO: 74047 - RNA, 19 nt, Artificial Sequence
  Description of Artificial Sequence: Synthetic oligonucleotide
  Antisense strand to SEQ ID NO: 73966
acuccagggacucuaaagu

SEQ ID NO: 74048 - RNA, 19 nt, Artificial Sequence
  Description of Artificial Sequence: Synthetic oligonucleotide
  Sense strand starting at position 1411 of SEQ ID NO: 923
ggaagucucuaacuuuaga

SEQ ID NO: 74049 - RNA, 19 nt, Artificial Sequence
  Description of Artificial Sequence: Synthetic oligonucleotide
  Antisense strand to SEQ ID NO: 73968
ucuaaaguuagagacuucc

SEQ ID NO: 74050 - RNA, 19 nt, Artificial Sequence
  Description of Artificial Sequence: Synthetic oligonucleotide
  Sense strand starting at position 1358 of SEQ ID NO: 923
agguuagacucagaacaga

SEQ ID NO: 74051 - RNA, 19 nt, Artificial Sequence
  Description of Artificial Sequence: Synthetic oligonucleotide
  Antisense strand to SEQ ID NO: 73970
ucuguucugagucuaaccu

SEQ ID NO: 74052 - RNA, 19 nt, Artificial Sequence
  Description of Artificial Sequence: Synthetic oligonucleotide
  Sense strand starting at position 1313 of SEQ ID NO: 923
gaggauuagcgggaggguu

SEQ ID NO: 74053 - RNA, 19 nt, Artificial Sequence
  Description of Artificial Sequence: Synthetic oligonucleotide
  Antisense strand to SEQ ID NO: 73972
aacccucccgcuaauccuc

SEQ ID NO: 74054 - RNA, 19 nt, Artificial Sequence
  Description of Artificial Sequence: Synthetic oligonucleotide
  Sense strand starting at position 1301 of SEQ ID NO: 923
aguaccucuggugaggauu

SEQ ID NO: 74055 - RNA, 19 nt, Artificial Sequence
  Description of Artificial Sequence: Synthetic oligonucleotide
  Antisense strand to SEQ ID NO: 73974
aauccucaccagagguacu

SEQ ID NO: 74056 - RNA, 19 nt, Artificial Sequence
  Description of Artificial Sequence: Synthetic oligonucleotide
  Sense strand starting at position 1286 of SEQ ID NO: 923
caaugcuacccguaaagua

SEQ ID NO: 74057 - RNA, 19 nt, Artificial Sequence
  Description of Artificial Sequence: Synthetic oligonucleotide
  Antisense strand to SEQ ID NO: 73976
uacuuuacggguagcauug

SEQ ID NO: 74058 - RNA, 19 nt, Artificial Sequence
  Description of Artificial Sequence: Synthetic oligonucleotide
  Sense strand starting at position 1182 of SEQ ID NO: 923
gucucacucccacguaaug

SEQ ID NO: 74059 - RNA, 19 nt, Artificial Sequence
  Description of Artificial Sequence: Synthetic oligonucleotide
  Antisense strand to SEQ ID NO: 73978
cauuacgugggagugagac

SEQ ID NO: 74060 - RNA, 19 nt, Artificial Sequence
  Description of Artificial Sequence: Synthetic oligonucleotide
  Sense strand starting at position 840 of SEQ ID NO: 923
uagcucugagaaugaauga

SEQ ID NO: 74061 - RNA, 19 nt, Artificial Sequence
  Description of Artificial Sequence: Synthetic oligonucleotide
  Antisense strand to SEQ ID NO: 73980
ucauucauucucagagcua

SEQ ID NO: 74062 - RNA, 19 nt, Artificial Sequence
  Description of Artificial Sequence: Synthetic oligonucleotide
  Sense strand starting at position 828 of SEQ ID NO: 923
gaaauagguccuuagcucu

SEQ ID NO: 74063 - RNA, 19 nt, Artificial Sequence
  Description of Artificial Sequence: Synthetic oligonucleotide
  Antisense strand to SEQ ID NO: 73982
agagcuaaggaccuauuuc

SEQ ID NO: 74064 - RNA, 19 nt, Artificial Sequence
  Description of Artificial Sequence: Synthetic oligonucleotide
  Sense strand starting at position 827 of SEQ ID NO: 923
ugaaauagguccuuagcuc

SEQ ID NO: 74065 - RNA, 19 nt, Artificial Sequence
  Description of Artificial Sequence: Synthetic oligonucleotide
  Antisense strand to SEQ ID NO: 73984
gagcuaaggaccuauuuca

SEQ ID NO: 74066 - RNA, 19 nt, Artificial Sequence
  Description of Artificial Sequence: Synthetic oligonucleotide
  Sense strand starting at position 449 of SEQ ID NO: 923
ggcccugacauguacuagu

SEQ ID NO: 74067 - RNA, 19 nt, Artificial Sequence
  Description of Artificial Sequence: Synthetic oligonucleotide
  Antisense strand to SEQ ID NO: 73986
acuaguacaugucagggcc

SEQ ID NO: 74068 - RNA, 19 nt, Artificial Sequence
  Description of Artificial Sequence: Synthetic oligonucleotide
  Sense strand starting at position 325 of SEQ ID NO: 923
ggcugcucccuccaaagaa

SEQ ID NO: 74069 - RNA, 19 nt, Artificial Sequence
  Description of Artificial Sequence: Synthetic oligonucleotide
  Antisense strand to SEQ ID NO: 73988
uucuuuggagggagcagcc

SEQ ID NO: 74070 - RNA, 19 nt, Artificial Sequence
  Description of Artificial Sequence: Synthetic oligonucleotide
  Sense strand starting at position 274 of SEQ ID NO: 923
uccugaugcuaccuacaga

SEQ ID NO: 74071 - RNA, 19 nt, Artificial Sequence
  Description of Artificial Sequence: Synthetic oligonucleotide
  Antisense strand to SEQ ID NO: 73990
ucuguagguagcaucagga

SEQ ID NO: 74072 - RNA, 19 nt, Artificial Sequence
  Description of Artificial Sequence: Synthetic oligonucleotide
  Sense strand starting at position 266 of SEQ ID NO: 923
ucgcaaguuccugaugcua

SEQ ID NO: 74073 - RNA, 19 nt, Artificial Sequence
  Description of Artificial Sequence: Synthetic oligonucleotide
  Antisense strand to SEQ ID NO: 73992
uagcaucaggaacuugcga

SEQ ID NO: 74074 - RNA, 19 nt, Artificial Sequence
  Description of Artificial Sequence: Synthetic oligonucleotide
  Sense strand starting at position 99 of SEQ ID NO: 923
gugcuugaauuaucccaac

SEQ ID NO: 74075 - RNA, 19 nt, Artificial Sequence
  Description of Artificial Sequence: Synthetic oligonucleotide
  Antisense strand to SEQ ID NO: 73994
guugggauaauucaagcac

SEQ ID NO: 74076 - RNA, 19 nt, Artificial Sequence
  Description of Artificial Sequence: Synthetic oligonucleotide
  Sense strand starting at position 93 of SEQ ID NO: 923
uguaacgugcuugaauuau

SEQ ID NO: 74077 - RNA, 19 nt, Artificial Sequence
  Description of Artificial Sequence: Synthetic oligonucleotide
  Antisense strand to SEQ ID NO: 73996
auaauucaagcacguuaca

SEQ ID NO: 74078 - RNA, 19 nt, Artificial Sequence
  Description of Artificial Sequence: Synthetic oligonucleotide
  Sense strand starting at position 92 of SEQ ID NO: 923
auguaacgugcuugaauua

SEQ ID NO: 74079 - RNA, 19 nt, Artificial Sequence
  Description of Artificial Sequence: Synthetic oligonucleotide
  Antisense strand to SEQ ID NO: 73998
uaauucaagcacguuacau

SEQ ID NO: 74080 - RNA, 19 nt, Artificial Sequence
  Description of Artificial Sequence: Synthetic oligonucleotide
  Sense strand starting at position 22 of SEQ ID NO: 924
ucucuacauugauugggau

SEQ ID NO: 74081 - RNA, 19 nt, Artificial Sequence
  Description of Artificial Sequence: Synthetic oligonucleotide
  Antisense strand to SEQ ID NO: 74000
aucccaaucaauguagaga

SEQ ID NO: 74082 - RNA, 19 nt, Artificial Sequence
  Description of Artificial Sequence: Synthetic oligonucleotide
  Sense strand starting at position 28 of SEQ ID NO: 924
cauugauugggaugcagca

SEQ ID NO: 74083 - RNA, 19 nt, Artificial Sequence
  Description of Artificial Sequence: Synthetic oligonucleotide
  Antisense strand to SEQ ID NO: 74002
ugcugcaucccaaucaaug

SEQ ID NO: 74084 - RNA, 19 nt, Artificial Sequence
  Description of Artificial Sequence: Synthetic oligonucleotide
  Sense strand starting at position 123 of SEQ ID NO: 924
gccagugcugcuguaacua

SEQ ID NO: 74085 - RNA, 19 nt, Artificial Sequence
  Description of Artificial Sequence: Synthetic oligonucleotide
  Antisense strand to SEQ ID NO: 74004
uaguuacagcagcacuggc

SEQ ID NO: 74086 - RNA, 19 nt, Artificial Sequence
  Description of Artificial Sequence: Synthetic oligonucleotide
  Sense strand starting at position 220 of SEQ ID NO: 924
uuggguaagucaucuaaac

SEQ ID NO: 74087 - RNA, 19 nt, Artificial Sequence
  Description of Artificial Sequence: Synthetic oligonucleotide
  Antisense strand to SEQ ID NO: 74006
guuuagaugacuuacccaa

SEQ ID NO: 74088 - RNA, 19 nt, Artificial Sequence
  Description of Artificial Sequence: Synthetic oligonucleotide
  Sense strand starting at position 241 of SEQ ID NO: 924
uugagcccucaucaguaaa

SEQ ID NO: 74089 - RNA, 19 nt, Artificial Sequence
  Description of Artificial Sequence: Synthetic oligonucleotide
  Antisense strand to SEQ ID NO: 74008
uuuacugaugagggcucaa

SEQ ID NO: 74090 - RNA, 19 nt, Artificial Sequence
  Description of Artificial Sequence: Synthetic oligonucleotide
  Sense strand starting at position 282 of SEQ ID NO: 924
gcagaaucauugcugggua

SEQ ID NO: 74091 - RNA, 19 nt, Artificial Sequence
  Description of Artificial Sequence: Synthetic oligonucleotide
  Antisense strand to SEQ ID NO: 74010
uacccagcaaugauucugc

SEQ ID NO: 74092 - RNA, 19 nt, Artificial Sequence
  Description of Artificial Sequence: Synthetic oligonucleotide
  Sense strand starting at position 284 of SEQ ID NO: 924
agaaucauugcuggguaca

SEQ ID NO: 74093 - RNA, 19 nt, Artificial Sequence
  Description of Artificial Sequence: Synthetic oligonucleotide
  Antisense strand to SEQ ID NO: 74012
uguacccagcaaugauucu

SEQ ID NO: 74094 - RNA, 19 nt, Artificial Sequence
  Description of Artificial Sequence: Synthetic oligonucleotide
  Sense strand starting at position 285 of SEQ ID NO: 924
gaaucauugcuggguacac

SEQ ID NO: 74095 - RNA, 19 nt, Artificial Sequence
  Description of Artificial Sequence: Synthetic oligonucleotide
  Antisense strand to SEQ ID NO: 74014
guguacccagcaaugauuc

SEQ ID NO: 74096 - RNA, 19 nt, Artificial Sequence
  Description of Artificial Sequence: Synthetic oligonucleotide
  Sense strand starting at position 286 of SEQ ID NO: 924
aaucauugcuggguacaca

SEQ ID NO: 74097 - RNA, 19 nt, Artificial Sequence
  Description of Artificial Sequence: Synthetic oligonucleotide
  Antisense strand to SEQ ID NO: 74016
uguguacccagcaaugauu

SEQ ID NO: 74098 - RNA, 19 nt, Artificial Sequence
  Description of Artificial Sequence: Synthetic oligonucleotide
  Sense strand starting at position 360 of SEQ ID NO: 924
uaggacuguuuggcugaaa

SEQ ID NO: 74099 - RNA, 19 nt, Artificial Sequence
  Description of Artificial Sequence: Synthetic oligonucleotide
  Antisense strand to SEQ ID NO: 74018
uuucagccaaacaguccua

SEQ ID NO: 74100 - RNA, 19 nt, Artificial Sequence
  Description of Artificial Sequence: Synthetic oligonucleotide
  Sense strand starting at position 361 of SEQ ID NO: 924
aggacuguuuggcugaaau

SEQ ID NO: 74101 - RNA, 19 nt, Artificial Sequence
  Description of Artificial Sequence: Synthetic oligonucleotide
  Antisense strand to SEQ ID NO: 74020
auuucagccaaacaguccu

SEQ ID NO: 74102 - RNA, 19 nt, Artificial Sequence
  Description of Artificial Sequence: Synthetic oligonucleotide
  Sense strand starting at position 363 of SEQ ID NO: 924
gacuguuuggcugaaauug

SEQ ID NO: 74103 - RNA, 19 nt, Artificial Sequence
  Description of Artificial Sequence: Synthetic oligonucleotide
  Antisense strand to SEQ ID NO: 74022
caauuucagccaaacaguc

SEQ ID NO: 74104 - RNA, 19 nt, Artificial Sequence
  Description of Artificial Sequence: Synthetic oligonucleotide
  Sense strand starting at position 371 of SEQ ID NO: 924
ggcugaaauuguucuuauu

SEQ ID NO: 74105 - RNA, 19 nt, Artificial Sequence
  Description of Artificial Sequence: Synthetic oligonucleotide
  Antisense strand to SEQ ID NO: 74024
aauaagaacaauuucagcc

SEQ ID NO: 74106 - RNA, 19 nt, Artificial Sequence
  Description of Artificial Sequence: Synthetic oligonucleotide
  Sense strand starting at position 501 of SEQ ID NO: 924
uucucagugcugcuuguaa

SEQ ID NO: 74107 - RNA, 19 nt, Artificial Sequence
  Description of Artificial Sequence: Synthetic oligonucleotide
  Antisense strand to SEQ ID NO: 74026
uuacaagcagcacugagaa

SEQ ID NO: 74108 - RNA, 19 nt, Artificial Sequence
  Description of Artificial Sequence: Synthetic oligonucleotide
  Sense strand starting at position 549 of SEQ ID NO: 924
uagaguuaauucuccagga

SEQ ID NO: 74109 - RNA, 19 nt, Artificial Sequence
  Description of Artificial Sequence: Synthetic oligonucleotide
  Antisense strand to SEQ ID NO: 74028
uccuggagaauuaacucua

SEQ ID NO: 74110 - RNA, 19 nt, Artificial Sequence
  Description of Artificial Sequence: Synthetic oligonucleotide
  Sense strand starting at position 550 of SEQ ID NO: 924
agaguuaauucuccaggaa

SEQ ID NO: 74111 - RNA, 19 nt, Artificial Sequence
  Description of Artificial Sequence: Synthetic oligonucleotide
  Antisense strand to SEQ ID NO: 74030
uuccuggagaauuaacucu

SEQ ID NO: 74112 - RNA, 19 nt, Artificial Sequence
  Description of Artificial Sequence: Synthetic oligonucleotide
  Sense strand starting at position 553 of SEQ ID NO: 924
guuaauucuccaggaaaca

SEQ ID NO: 74113 - RNA, 19 nt, Artificial Sequence
  Description of Artificial Sequence: Synthetic oligonucleotide
  Antisense strand to SEQ ID NO: 74032
uguuuccuggagaauuaac

SEQ ID NO: 74114 - RNA, 19 nt, Artificial Sequence
  Description of Artificial Sequence: Synthetic oligonucleotide
  Sense strand starting at position 646 of SEQ ID NO: 924
cuguaauucucuccuggac

SEQ ID NO: 74115 - RNA, 19 nt, Artificial Sequence
  Description of Artificial Sequence: Synthetic oligonucleotide
  Antisense strand to SEQ ID NO: 74034
guccaggagagaauuacag

SEQ ID NO: 74116 - RNA, 19 nt, Artificial Sequence
  Description of Artificial Sequence: Synthetic oligonucleotide
  Sense strand starting at position 749 of SEQ ID NO: 924
ugaacagaugccuguggau

SEQ ID NO: 74117 - RNA, 19 nt, Artificial Sequence
  Description of Artificial Sequence: Synthetic oligonucleotide
  Antisense strand to SEQ ID NO: 74036
auccacaggcaucuguuca

SEQ ID NO: 74118 - RNA, 19 nt, Artificial Sequence
  Description of Artificial Sequence: Synthetic oligonucleotide
  Sense strand starting at position 751 of SEQ ID NO: 924
aacagaugccuguggauag

SEQ ID NO: 74119 - RNA, 19 nt, Artificial Sequence
  Description of Artificial Sequence: Synthetic oligonucleotide
  Antisense strand to SEQ ID NO: 74038
cuauccacaggcaucuguu

SEQ ID NO: 74120 - RNA, 19 nt, Artificial Sequence
  Description of Artificial Sequence: Synthetic oligonucleotide
  Sense strand starting at position 770 of SEQ ID NO: 924
ccaagucauugugcugaca

SEQ ID NO: 74121 - RNA, 19 nt, Artificial Sequence
  Description of Artificial Sequence: Synthetic oligonucleotide
  Antisense strand to SEQ ID NO: 74040
ugucagcacaaugacuugg

SEQ ID NO: 74122 - RNA, 19 nt, Artificial Sequence
  Description of Artificial Sequence: Synthetic oligonucleotide
  Sense strand starting at position 1040 of SEQ ID NO: 924
agcagaaacucugugaguc

SEQ ID NO: 74123 - RNA, 19 nt, Artificial Sequence
  Description of Artificial Sequence: Synthetic oligonucleotide
  Antisense strand to SEQ ID NO: 74042
gacucacagaguuucugcu

SEQ ID NO: 74124 - RNA, 19 nt, Artificial Sequence
  Description of Artificial Sequence: Synthetic oligonucleotide
  Sense strand starting at position 1041 of SEQ ID NO: 924
gcagaaacucugugaguca

SEQ ID NO: 74125 - RNA, 19 nt, Artificial Sequence
  Description of Artificial Sequence: Synthetic oligonucleotide
  Antisense strand to SEQ ID NO: 74044
ugacucacagaguuucugc

SEQ ID NO: 74126 - RNA, 19 nt, Artificial Sequence
  Description of Artificial Sequence: Synthetic oligonucleotide
  Sense strand starting at position 1161 of SEQ ID NO: 924
cagagaugcccuggcacaa

SEQ ID NO: 74127 - RNA, 19 nt, Artificial Sequence
  Description of Artificial Sequence: Synthetic oligonucleotide
  Antisense strand to SEQ ID NO: 74046
uugugccagggcaucucug

SEQ ID NO: 74128 - RNA, 19 nt, Artificial Sequence
  Description of Artificial Sequence: Synthetic oligonucleotide
  Sense strand starting at position 1228 of SEQ ID NO: 924
cccuuaacgcgcucgguaa

SEQ ID NO: 74129 - RNA, 19 nt, Artificial Sequence
  Description of Artificial Sequence: Synthetic oligonucleotide
  Antisense strand to SEQ ID NO: 74048
uuaccgagcgcguuaaggg

SEQ ID NO: 74130 - RNA, 19 nt, Artificial Sequence
  Description of Artificial Sequence: Synthetic oligonucleotide
  Sense strand starting at position 1242 of SEQ ID NO: 924
gguaaauuccacggguuua

SEQ ID NO: 74131 - RNA, 19 nt, Artificial Sequence
  Description of Artificial Sequence: Synthetic oligonucleotide
  Antisense strand to SEQ ID NO: 74050
uaaacccguggaauuuacc

SEQ ID NO: 74132 - RNA, 19 nt, Artificial Sequence
  Description of Artificial Sequence: Synthetic oligonucleotide
  Sense strand starting at position 1243 of SEQ ID NO: 924
guaaauuccacggguuuaa

SEQ ID NO: 74133 - RNA, 19 nt, Artificial Sequence
  Description of Artificial Sequence: Synthetic oligonucleotide
  Antisense strand to SEQ ID NO: 74052
uuaaacccguggaauuuac

SEQ ID NO: 74134 - RNA, 19 nt, Artificial Sequence
  Description of Artificial Sequence: Synthetic oligonucleotide
  Sense strand starting at position 1358 of SEQ ID NO: 924
ggaagagugucccucucau

SEQ ID NO: 74135 - RNA, 19 nt, Artificial Sequence
  Description of Artificial Sequence: Synthetic oligonucleotide
  Antisense strand to SEQ ID NO: 74054
augagagggacacucuucc

SEQ ID NO: 74136 - RNA, 19 nt, Artificial Sequence
  Description of Artificial Sequence: Synthetic oligonucleotide
  Sense strand starting at position 1469 of SEQ ID NO: 924
gucagugugcguguccaaa

SEQ ID NO: 74137 - RNA, 19 nt, Artificial Sequence
  Description of Artificial Sequence: Synthetic oligonucleotide
  Antisense strand to SEQ ID NO: 74056
uuuggacacgcacacugac

SEQ ID NO: 74138 - RNA, 19 nt, Artificial Sequence
  Description of Artificial Sequence: Synthetic oligonucleotide
  Sense strand starting at position 1624 of SEQ ID NO: 924
ggcaaaggaugucuuuaau

SEQ ID NO: 74139 - RNA, 19 nt, Artificial Sequence
  Description of Artificial Sequence: Synthetic oligonucleotide
  Antisense strand to SEQ ID NO: 74058
auuaaagacauccuuugcc

SEQ ID NO: 74140 - RNA, 19 nt, Artificial Sequence
  Description of Artificial Sequence: Synthetic oligonucleotide
  Sense strand starting at position 1681 of SEQ ID NO: 924
auuccaugaugucccagua

SEQ ID NO: 74141 - RNA, 19 nt, Artificial Sequence
  Description of Artificial Sequence: Synthetic oligonucleotide
  Antisense strand to SEQ ID NO: 74060
uacugggacaucauggaau

SEQ ID NO: 74142 - RNA, 19 nt, Artificial Sequence
  Description of Artificial Sequence: Synthetic oligonucleotide
  Sense strand starting at position 1717 of SEQ ID NO: 924
gguccuugugcugaucaca

SEQ ID NO: 74143 - RNA, 19 nt, Artificial Sequence
  Description of Artificial Sequence: Synthetic oligonucleotide
  Antisense strand to SEQ ID NO: 74062
ugugaucagcacaaggacc

SEQ ID NO: 74144 - RNA, 19 nt, Artificial Sequence
  Description of Artificial Sequence: Synthetic oligonucleotide
  Sense strand starting at position 2413 of SEQ ID NO: 924
agcguuucuacagugcuga

SEQ ID NO: 74145 - RNA, 19 nt, Artificial Sequence
  Description of Artificial Sequence: Synthetic oligonucleotide
  Antisense strand to SEQ ID NO: 74064
ucagcacuguagaaacgcu

SEQ ID NO: 74146 - RNA, 19 nt, Artificial Sequence
  Description of Artificial Sequence: Synthetic oligonucleotide
  Sense strand starting at position 2487 of SEQ ID NO: 924
uguauagcuccugggaucu

SEQ ID NO: 74147 - RNA, 19 nt, Artificial Sequence
  Description of Artificial Sequence: Synthetic oligonucleotide
  Antisense strand to SEQ ID NO: 74066
agaucccaggagcuauaca

SEQ ID NO: 74148 - RNA, 19 nt, Artificial Sequence
  Description of Artificial Sequence: Synthetic oligonucleotide
  Sense strand starting at position 2499 of SEQ ID NO: 924
gggaucuggcaagguguau

SEQ ID NO: 74149 - RNA, 19 nt, Artificial Sequence
  Description of Artificial Sequence: Synthetic oligonucleotide
  Antisense strand to SEQ ID NO: 74068
auacaccuugccagauccc

SEQ ID NO: 74150 - RNA, 19 nt, Artificial Sequence
  Description of Artificial Sequence: Synthetic oligonucleotide
  Sense strand starting at position 2511 of SEQ ID NO: 924
gguguauauuuggaagggu

SEQ ID NO: 74151 - RNA, 19 nt, Artificial Sequence
  Description of Artificial Sequence: Synthetic oligonucleotide
  Antisense strand to SEQ ID NO: 74070
acccuuccaaauauacacc

SEQ ID NO: 74152 - RNA, 19 nt, Artificial Sequence
  Description of Artificial Sequence: Synthetic oligonucleotide
  Sense strand starting at position 3057 of SEQ ID NO: 924
gggcucuguuccucauuga

SEQ ID NO: 74153 - RNA, 19 nt, Artificial Sequence
  Description of Artificial Sequence: Synthetic oligonucleotide
  Antisense strand to SEQ ID NO: 74072
ucaaugaggaacagagccc

SEQ ID NO: 74154 - RNA, 19 nt, Artificial Sequence
  Description of Artificial Sequence: Synthetic oligonucleotide
  Sense strand starting at position 3058 of SEQ ID NO: 924
ggcucuguuccucauugau

SEQ ID NO: 74155 - RNA, 19 nt, Artificial Sequence
  Description of Artificial Sequence: Synthetic oligonucleotide
  Antisense strand to SEQ ID NO: 74074
aucaaugaggaacagagcc

SEQ ID NO: 74156 - RNA, 19 nt, Artificial Sequence
  Description of Artificial Sequence: Synthetic oligonucleotide
  Sense strand starting at position 3331 of SEQ ID NO: 924
acaauuuccucaggaagca

SEQ ID NO: 74157 - RNA, 19 nt, Artificial Sequence
  Description of Artificial Sequence: Synthetic oligonucleotide
  Antisense strand to SEQ ID NO: 74076
ugcuuccugaggaaauugu

SEQ ID NO: 74158 - RNA, 19 nt, Artificial Sequence
  Description of Artificial Sequence: Synthetic oligonucleotide
  Sense strand starting at position 3411 of SEQ ID NO: 924
cuuaguauauguucccaca

SEQ ID NO: 74159 - RNA, 19 nt, Artificial Sequence
  Description of Artificial Sequence: Synthetic oligonucleotide
  Antisense strand to SEQ ID NO: 74078
ugugggaacauauacuaag

SEQ ID NO: 74160 - RNA, 19 nt, Artificial Sequence
  Description of Artificial Sequence: Synthetic oligonucleotide
  Sense strand starting at position 3897 of SEQ ID NO: 925
auuucucuuggcuguauaa

SEQ ID NO: 74161 - RNA, 19 nt, Artificial Sequence
  Description of Artificial Sequence: Synthetic oligonucleotide
  Antisense strand to SEQ ID NO: 74080
uuauacagccaagagaaau

SEQ ID NO: 74162 - RNA, 19 nt, Artificial Sequence
  Description of Artificial Sequence: Synthetic oligonucleotide
  Sense strand starting at position 3896 of SEQ ID NO: 925
gauuucucuuggcuguaua

SEQ ID NO: 74163 - RNA, 19 nt, Artificial Sequence
  Description of Artificial Sequence: Synthetic oligonucleotide
  Antisense strand to SEQ ID NO: 74082
uauacagccaagagaaauc

SEQ ID NO: 74164 - RNA, 19 nt, Artificial Sequence
  Description of Artificial Sequence: Synthetic oligonucleotide
  Sense strand starting at position 3895 of SEQ ID NO: 925
agauuucucuuggcuguau

SEQ ID NO: 74165 - RNA, 19 nt, Artificial Sequence
  Description of Artificial Sequence: Synthetic oligonucleotide
  Antisense strand to SEQ ID NO: 74084
auacagccaagagaaaucu

SEQ ID NO: 74166 - RNA, 19 nt, Artificial Sequence
  Description of Artificial Sequence: Synthetic oligonucleotide
  Sense strand starting at position 3822 of SEQ ID NO: 925
gugaaauaagcucacuuaa

SEQ ID NO: 74167 - RNA, 19 nt, Artificial Sequence
  Description of Artificial Sequence: Synthetic oligonucleotide
  Antisense strand to SEQ ID NO: 74086
uuaagugagcuuauuucac

SEQ ID NO: 74168 - RNA, 19 nt, Artificial Sequence
  Description of Artificial Sequence: Synthetic oligonucleotide
  Sense strand starting at position 3715 of SEQ ID NO: 925
auuguugaucgcucugcua

SEQ ID NO: 74169 - RNA, 19 nt, Artificial Sequence
  Description of Artificial Sequence: Synthetic oligonucleotide
  Antisense strand to SEQ ID NO: 74088
uagcagagcgaucaacaau

SEQ ID NO: 74170 - RNA, 19 nt, Artificial Sequence
  Description of Artificial Sequence: Synthetic oligonucleotide
  Sense strand starting at position 3607 of SEQ ID NO: 925
augugacugaguugacuuu

SEQ ID NO: 74171 - RNA, 19 nt, Artificial Sequence
  Description of Artificial Sequence: Synthetic oligonucleotide
  Antisense strand to SEQ ID NO: 74090
aaagucaacucagucacau

SEQ ID NO: 74172 - RNA, 19 nt, Artificial Sequence
  Description of Artificial Sequence: Synthetic oligonucleotide
  Sense strand starting at position 3605 of SEQ ID NO: 925
uaaugugacugaguugacu

SEQ ID NO: 74173 - RNA, 19 nt, Artificial Sequence
  Description of Artificial Sequence: Synthetic oligonucleotide
  Antisense strand to SEQ ID NO: 74092
agucaacucagucacauua

SEQ ID NO: 74174 - RNA, 19 nt, Artificial Sequence
  Description of Artificial Sequence: Synthetic oligonucleotide
  Sense strand starting at position 3602 of SEQ ID NO: 925
aaauaaugugacugaguug

SEQ ID NO: 74175 - RNA, 19 nt, Artificial Sequence
  Description of Artificial Sequence: Synthetic oligonucleotide
  Antisense strand to SEQ ID NO: 74094
caacucagucacauuauuu

SEQ ID NO: 74176 - RNA, 19 nt, Artificial Sequence
  Description of Artificial Sequence: Synthetic oligonucleotide
  Sense strand starting at position 3490 of SEQ ID NO: 925
ucuugaugacugugacuaa

SEQ ID NO: 74177 - RNA, 19 nt, Artificial Sequence
  Description of Artificial Sequence: Synthetic oligonucleotide
  Antisense strand to SEQ ID NO: 74096
uuagucacagucaucaaga

SEQ ID NO: 74178 - RNA, 19 nt, Artificial Sequence
  Description of Artificial Sequence: Synthetic oligonucleotide
  Sense strand starting at position 3488 of SEQ ID NO: 925
caucuugaugacugugacu

SEQ ID NO: 74179 - RNA, 19 nt, Artificial Sequence
  Description of Artificial Sequence: Synthetic oligonucleotide
  Antisense strand to SEQ ID NO: 74098
agucacagucaucaagaug

SEQ ID NO: 74180 - RNA, 19 nt, Artificial Sequence
  Description of Artificial Sequence: Synthetic oligonucleotide
  Sense strand starting at position 3482 of SEQ ID NO: 925
augucucaucuugaugacu

SEQ ID NO: 74181 - RNA, 19 nt, Artificial Sequence
  Description of Artificial Sequence: Synthetic oligonucleotide
  Antisense strand to SEQ ID NO: 74100
agucaucaagaugagacau

SEQ ID NO: 74182 - RNA, 19 nt, Artificial Sequence
  Description of Artificial Sequence: Synthetic oligonucleotide
  Sense strand starting at position 3461 of SEQ ID NO: 925
aguagauaauugcuaauag

SEQ ID NO: 74183 - RNA, 19 nt, Artificial Sequence
  Description of Artificial Sequence: Synthetic oligonucleotide
  Antisense strand to SEQ ID NO: 74102
cuauuagcaauuaucuacu

SEQ ID NO: 74184 - RNA, 19 nt, Artificial Sequence
  Description of Artificial Sequence: Synthetic oligonucleotide
  Sense strand starting at position 3403 of SEQ ID NO: 925
gugacuucucaacagccga

SEQ ID NO: 74185 - RNA, 19 nt, Artificial Sequence
  Description of Artificial Sequence: Synthetic oligonucleotide
  Antisense strand to SEQ ID NO: 74104
ucggcuguugagaagucac

SEQ ID NO: 74186 - RNA, 19 nt, Artificial Sequence
  Description of Artificial Sequence: Synthetic oligonucleotide
  Sense strand starting at position 3328 of SEQ ID NO: 925
guaaacuuagaauguuaga

SEQ ID NO: 74187 - RNA, 19 nt, Artificial Sequence
  Description of Artificial Sequence: Synthetic oligonucleotide
  Antisense strand to SEQ ID NO: 74106
ucuaacauucuaaguuuac

SEQ ID NO: 74188 - RNA, 19 nt, Artificial Sequence
  Description of Artificial Sequence: Synthetic oligonucleotide
  Sense strand starting at position 3162 of SEQ ID NO: 925
ggagcuauauaucuuuauu

SEQ ID NO: 74189 - RNA, 19 nt, Artificial Sequence
  Description of Artificial Sequence: Synthetic oligonucleotide
  Antisense strand to SEQ ID NO: 74108
aauaaagauauauagcucc

SEQ ID NO: 74190 - RNA, 19 nt, Artificial Sequence
  Description of Artificial Sequence: Synthetic oligonucleotide
  Sense strand starting at position 3101 of SEQ ID NO: 925
ucuggacugucagaaauuu

SEQ ID NO: 74191 - RNA, 19 nt, Artificial Sequence
  Description of Artificial Sequence: Synthetic oligonucleotide
  Antisense strand to SEQ ID NO: 74110
aaauuucugacaguccaga

SEQ ID NO: 74192 - RNA, 19 nt, Artificial Sequence
  Description of Artificial Sequence: Synthetic oligonucleotide
  Sense strand starting at position 3096 of SEQ ID NO: 925
cugauucuggacugucaga

SEQ ID NO: 74193 - RNA, 19 nt, Artificial Sequence
  Description of Artificial Sequence: Synthetic oligonucleotide
  Antisense strand to SEQ ID NO: 74112
ucugacaguccagaaucag

SEQ ID NO: 74194 - RNA, 19 nt, Artificial Sequence
  Description of Artificial Sequence: Synthetic oligonucleotide
  Sense strand starting at position 2965 of SEQ ID NO: 925
augaucgacucaguaauag

SEQ ID NO: 74195 - RNA, 19 nt, Artificial Sequence
  Description of Artificial Sequence: Synthetic oligonucleotide
  Antisense strand to SEQ ID NO: 74114
cuauuacugagucgaucau

SEQ ID NO: 74196 - RNA, 19 nt, Artificial Sequence
  Description of Artificial Sequence: Synthetic oligonucleotide
  Sense strand starting at position 2958 of SEQ ID NO: 925
guaaaucaugaucgacuca

SEQ ID NO: 74197 - RNA, 19 nt, Artificial Sequence
  Description of Artificial Sequence: Synthetic oligonucleotide
  Antisense strand to SEQ ID NO: 74116
ugagucgaucaugauuuac

SEQ ID NO: 74198 - RNA, 19 nt, Artificial Sequence
  Description of Artificial Sequence: Synthetic oligonucleotide
  Sense strand starting at position 2957 of SEQ ID NO: 925
gguaaaucaugaucgacuc

SEQ ID NO: 74199 - RNA, 19 nt, Artificial Sequence
  Description of Artificial Sequence: Synthetic oligonucleotide
  Antisense strand to SEQ ID NO: 74118
gagucgaucaugauuuacc

SEQ ID NO: 74200 - RNA, 19 nt, Artificial Sequence
  Description of Artificial Sequence: Synthetic oligonucleotide
  Sense strand starting at position 2955 of SEQ ID NO: 925
ucgguaaaucaugaucgac

SEQ ID NO: 74201 - RNA, 19 nt, Artificial Sequence
  Description of Artificial Sequence: Synthetic oligonucleotide
  Antisense strand to SEQ ID NO: 74120
gucgaucaugauuuaccga

SEQ ID NO: 74202 - RNA, 19 nt, Artificial Sequence
  Description of Artificial Sequence: Synthetic oligonucleotide
  Sense strand starting at position 2822 of SEQ ID NO: 925
agauaaucacggugaggag

SEQ ID NO: 74203 - RNA, 19 nt, Artificial Sequence
  Description of Artificial Sequence: Synthetic oligonucleotide
  Antisense strand to SEQ ID NO: 74122
cuccucaccgugauuaucu

SEQ ID NO: 74204 - RNA, 19 nt, Artificial Sequence
  Description of Artificial Sequence: Synthetic oligonucleotide
  Sense strand starting at position 2778 of SEQ ID NO: 925
aggagacucuccucucuca

SEQ ID NO: 74205 - RNA, 19 nt, Artificial Sequence
  Description of Artificial Sequence: Synthetic oligonucleotide
  Antisense strand to SEQ ID NO: 74124
ugagagaggagagucuccu

SEQ ID NO: 74206 - RNA, 19 nt, Artificial Sequence
  Description of Artificial Sequence: Synthetic oligonucleotide
  Sense strand starting at position 2750 of SEQ ID NO: 925
gcacgagugcgucuucaag

SEQ ID NO: 74207 - RNA, 19 nt, Artificial Sequence
  Description of Artificial Sequence: Synthetic oligonucleotide
  Antisense strand to SEQ ID NO: 74126
cuugaagacgcacucgugc

SEQ ID NO: 74208 - RNA, 19 nt, Artificial Sequence
  Description of Artificial Sequence: Synthetic oligonucleotide
  Sense strand starting at position 2410 of SEQ ID NO: 925
gggagaagauccgcucacu

SEQ ID NO: 74209 - RNA, 19 nt, Artificial Sequence
  Description of Artificial Sequence: Synthetic oligonucleotide
  Antisense strand to SEQ ID NO: 74128
agugagcggaucuucuccc

SEQ ID NO: 74210 - RNA, 19 nt, Artificial Sequence
  Description of Artificial Sequence: Synthetic oligonucleotide
  Sense strand starting at position 2072 of SEQ ID NO: 925
gggagcucucgcgagagga

SEQ ID NO: 74211 - RNA, 19 nt, Artificial Sequence
  Description of Artificial Sequence: Synthetic oligonucleotide
  Antisense strand to SEQ ID NO: 74130
uccucucgcgagagcuccc

SEQ ID NO: 74212 - RNA, 19 nt, Artificial Sequence
  Description of Artificial Sequence: Synthetic oligonucleotide
  Sense strand starting at position 1436 of SEQ ID NO: 925
ugacaucugcccgaaauuc

SEQ ID NO: 74213 - RNA, 19 nt, Artificial Sequence
  Description of Artificial Sequence: Synthetic oligonucleotide
  Antisense strand to SEQ ID NO: 74132
gaauuucgggcagauguca

SEQ ID NO: 74214 - RNA, 19 nt, Artificial Sequence
  Description of Artificial Sequence: Synthetic oligonucleotide
  Sense strand starting at position 1215 of SEQ ID NO: 925
gaguuaaaugggugaagau

SEQ ID NO: 74215 - RNA, 19 nt, Artificial Sequence
  Description of Artificial Sequence: Synthetic oligonucleotide
  Antisense strand to SEQ ID NO: 74134
aucuucacccauuuaacuc

SEQ ID NO: 74216 - RNA, 19 nt, Artificial Sequence
  Description of Artificial Sequence: Synthetic oligonucleotide
  Sense strand starting at position 1211 of SEQ ID NO: 925
uggagaguuaaauggguga

SEQ ID NO: 74217 - RNA, 19 nt, Artificial Sequence
  Description of Artificial Sequence: Synthetic oligonucleotide
  Antisense strand to SEQ ID NO: 74136
ucacccauuuaacucucca

SEQ ID NO: 74218 - RNA, 19 nt, Artificial Sequence
  Description of Artificial Sequence: Synthetic oligonucleotide
  Sense strand starting at position 826 of SEQ ID NO: 925
augaguuagcaguaguaua

SEQ ID NO: 74219 - RNA, 19 nt, Artificial Sequence
  Description of Artificial Sequence: Synthetic oligonucleotide
  Antisense strand to SEQ ID NO: 74138
uauacuacugcuaacucau

SEQ ID NO: 74220 - RNA, 19 nt, Artificial Sequence
  Description of Artificial Sequence: Synthetic oligonucleotide
  Sense strand starting at position 812 of SEQ ID NO: 925
guuuguuugcggagaugag

SEQ ID NO: 74221 - RNA, 19 nt, Artificial Sequence
  Description of Artificial Sequence: Synthetic oligonucleotide
  Antisense strand to SEQ ID NO: 74140
cucaucuccgcaaacaaac

SEQ ID NO: 74222 - RNA, 19 nt, Artificial Sequence
  Description of Artificial Sequence: Synthetic oligonucleotide
  Sense strand starting at position 728 of SEQ ID NO: 925
acagauuuaucugaacaga

SEQ ID NO: 74223 - RNA, 19 nt, Artificial Sequence
  Description of Artificial Sequence: Synthetic oligonucleotide
  Antisense strand to SEQ ID NO: 74142
ucuguucagauaaaucugu

SEQ ID NO: 74224 - RNA, 19 nt, Artificial Sequence
  Description of Artificial Sequence: Synthetic oligonucleotide
  Sense strand starting at position 654 of SEQ ID NO: 925
ugaacuguugauuggguaa

SEQ ID NO: 74225 - RNA, 19 nt, Artificial Sequence
  Description of Artificial Sequence: Synthetic oligonucleotide
  Antisense strand to SEQ ID NO: 74144
uuacccaaucaacaguuca

SEQ ID NO: 74226 - RNA, 19 nt, Artificial Sequence
  Description of Artificial Sequence: Synthetic oligonucleotide
  Sense strand starting at position 583 of SEQ ID NO: 925
gcuauuguggaagaagcaa

SEQ ID NO: 74227 - RNA, 19 nt, Artificial Sequence
  Description of Artificial Sequence: Synthetic oligonucleotide
  Antisense strand to SEQ ID NO: 74146
uugcuucuuccacaauagc

SEQ ID NO: 74228 - RNA, 19 nt, Artificial Sequence
  Description of Artificial Sequence: Synthetic oligonucleotide
  Sense strand starting at position 485 of SEQ ID NO: 925
uuaacugucaagugaggau

SEQ ID NO: 74229 - RNA, 19 nt, Artificial Sequence
  Description of Artificial Sequence: Synthetic oligonucleotide
  Antisense strand to SEQ ID NO: 74148
auccucacuugacaguuaa

SEQ ID NO: 74230 - RNA, 19 nt, Artificial Sequence
  Description of Artificial Sequence: Synthetic oligonucleotide
  Sense strand starting at position 463 of SEQ ID NO: 925
ugaaguauugggcaaguuu

SEQ ID NO: 74231 - RNA, 19 nt, Artificial Sequence
  Description of Artificial Sequence: Synthetic oligonucleotide
  Antisense strand to SEQ ID NO: 74150
aaacuugcccaauacuuca

SEQ ID NO: 74232 - RNA, 19 nt, Artificial Sequence
  Description of Artificial Sequence: Synthetic oligonucleotide
  Sense strand starting at position 451 of SEQ ID NO: 925
acauucuagcauugaagua

SEQ ID NO: 74233 - RNA, 19 nt, Artificial Sequence
  Description of Artificial Sequence: Synthetic oligonucleotide
  Antisense strand to SEQ ID NO: 74152
uacuucaaugcuagaaugu

SEQ ID NO: 74234 - RNA, 19 nt, Artificial Sequence
  Description of Artificial Sequence: Synthetic oligonucleotide
  Sense strand starting at position 21 of SEQ ID NO: 925
aggugauugcauuaugcua

SEQ ID NO: 74235 - RNA, 19 nt, Artificial Sequence
  Description of Artificial Sequence: Synthetic oligonucleotide
  Antisense strand to SEQ ID NO: 74154
uagcauaaugcaaucaccu

SEQ ID NO: 74236 - RNA, 19 nt, Artificial Sequence
  Description of Artificial Sequence: Synthetic oligonucleotide
  Sense strand starting at position 16 of SEQ ID NO: 925
uauaaaggugauugcauua

SEQ ID NO: 74237 - RNA, 19 nt, Artificial Sequence
  Description of Artificial Sequence: Synthetic oligonucleotide
  Antisense strand to SEQ ID NO: 74156
uaaugcaaucaccuuuaua

SEQ ID NO: 74238 - RNA, 19 nt, Artificial Sequence
  Description of Artificial Sequence: Synthetic oligonucleotide
  Sense strand starting at position 15 of SEQ ID NO: 925
cuauaaaggugauugcauu

SEQ ID NO: 74239 - RNA, 19 nt, Artificial Sequence
  Description of Artificial Sequence: Synthetic oligonucleotide
  Antisense strand to SEQ ID NO: 74158
aaugcaaucaccuuuauag

SEQ ID NO: 74240 - RNA, 19 nt, Artificial Sequence
  Description of Artificial Sequence: Synthetic oligonucleotide
  Sense strand starting at position 3526 of SEQ ID NO: 926
guaugaguucuuuguacug

SEQ ID NO: 74241 - RNA, 19 nt, Artificial Sequence
  Description of Artificial Sequence: Synthetic oligonucleotide
  Antisense strand to SEQ ID NO: 74160
caguacaaagaacucauac

SEQ ID NO: 74242 - RNA, 19 nt, Artificial Sequence
  Description of Artificial Sequence: Synthetic oligonucleotide
  Sense strand starting at position 3524 of SEQ ID NO: 926
auguaugaguucuuuguac

SEQ ID NO: 74243 - RNA, 19 nt, Artificial Sequence
  Description of Artificial Sequence: Synthetic oligonucleotide
  Antisense strand to SEQ ID NO: 74162
guacaaagaacucauacau

SEQ ID NO: 74244 - RNA, 19 nt, Artificial Sequence
  Description of Artificial Sequence: Synthetic oligonucleotide
  Sense strand starting at position 3520 of SEQ ID NO: 926
augaauguaugaguucuuu

SEQ ID NO: 74245 - RNA, 19 nt, Artificial Sequence
  Description of Artificial Sequence: Synthetic oligonucleotide
  Antisense strand to SEQ ID NO: 74164
aaagaacucauacauucau

SEQ ID NO: 74246 - RNA, 19 nt, Artificial Sequence
  Description of Artificial Sequence: Synthetic oligonucleotide
  Sense strand starting at position 3440 of SEQ ID NO: 926
gguguaagccacuaagcuu

SEQ ID NO: 74247 - RNA, 19 nt, Artificial Sequence
  Description of Artificial Sequence: Synthetic oligonucleotide
  Antisense strand to SEQ ID NO: 74166
aagcuuaguggcuuacacc

SEQ ID NO: 74248 - RNA, 19 nt, Artificial Sequence
  Description of Artificial Sequence: Synthetic oligonucleotide
  Sense strand starting at position 3414 of SEQ ID NO: 926
gaaacaguguaagaugaaa

SEQ ID NO: 74249 - RNA, 19 nt, Artificial Sequence
  Description of Artificial Sequence: Synthetic oligonucleotide
  Antisense strand to SEQ ID NO: 74168
uuucaucuuacacuguuuc

SEQ ID NO: 74250 - RNA, 19 nt, Artificial Sequence
  Description of Artificial Sequence: Synthetic oligonucleotide
  Sense strand starting at position 3293 of SEQ ID NO: 926
cggagugagucacuuugga

SEQ ID NO: 74251 - RNA, 19 nt, Artificial Sequence
  Description of Artificial Sequence: Synthetic oligonucleotide
  Antisense strand to SEQ ID NO: 74170
uccaaagugacucacuccg

SEQ ID NO: 74252 - RNA, 19 nt, Artificial Sequence
  Description of Artificial Sequence: Synthetic oligonucleotide
  Sense strand starting at position 3251 of SEQ ID NO: 926
ccaguuguccaggaacugu

SEQ ID NO: 74253 - RNA, 19 nt, Artificial Sequence
  Description of Artificial Sequence: Synthetic oligonucleotide
  Antisense strand to SEQ ID NO: 74172
acaguuccuggacaacugg

SEQ ID NO: 74254 - RNA, 19 nt, Artificial Sequence
  Description of Artificial Sequence: Synthetic oligonucleotide
  Sense strand starting at position 3247 of SEQ ID NO: 926
agauccaguuguccaggaa

SEQ ID NO: 74255 - RNA, 19 nt, Artificial Sequence
  Description of Artificial Sequence: Synthetic oligonucleotide
  Antisense strand to SEQ ID NO: 74174
uuccuggacaacuggaucu

SEQ ID NO: 74256 - RNA, 19 nt, Artificial Sequence
  Description of Artificial Sequence: Synthetic oligonucleotide
  Sense strand starting at position 3244 of SEQ ID NO: 926
gagagauccaguuguccag

SEQ ID NO: 74257 - RNA, 19 nt, Artificial Sequence
  Description of Artificial Sequence: Synthetic oligonucleotide
  Antisense strand to SEQ ID NO: 74176
cuggacaacuggaucucuc

SEQ ID NO: 74258 - RNA, 19 nt, Artificial Sequence
  Description of Artificial Sequence: Synthetic oligonucleotide
  Sense strand starting at position 3019 of SEQ ID NO: 926
ugauauuccucccuggaag

SEQ ID NO: 74259 - RNA, 19 nt, Artificial Sequence
  Description of Artificial Sequence: Synthetic oligonucleotide
  Antisense strand to SEQ ID NO: 74178
cuuccagggaggaauauca

SEQ ID NO: 74260 - RNA, 19 nt, Artificial Sequence
  Description of Artificial Sequence: Synthetic oligonucleotide
  Sense strand starting at position 2990 of SEQ ID NO: 926
guaguucuaagauauguuc

SEQ ID NO: 74261 - RNA, 19 nt, Artificial Sequence
  Description of Artificial Sequence: Synthetic oligonucleotide
  Antisense strand to SEQ ID NO: 74180
gaacauaucuuagaacuac

SEQ ID NO: 74262 - RNA, 19 nt, Artificial Sequence
  Description of Artificial Sequence: Synthetic oligonucleotide
  Sense strand starting at position 2982 of SEQ ID NO: 926
uagguaugguaguucuaag

SEQ ID NO: 74263 - RNA, 19 nt, Artificial Sequence
  Description of Artificial Sequence: Synthetic oligonucleotide
  Antisense strand to SEQ ID NO: 74182
cuuagaacuaccauaccua

SEQ ID NO: 74264 - RNA, 19 nt, Artificial Sequence
  Description of Artificial Sequence: Synthetic oligonucleotide
  Sense strand starting at position 2902 of SEQ ID NO: 926
uaacauguauguguaugua

SEQ ID NO: 74265 - RNA, 19 nt, Artificial Sequence
  Description of Artificial Sequence: Synthetic oligonucleotide
  Antisense strand to SEQ ID NO: 74184
uacauacacauacauguua

SEQ ID NO: 74266 - RNA, 19 nt, Artificial Sequence
  Description of Artificial Sequence: Synthetic oligonucleotide
  Sense strand starting at position 2899 of SEQ ID NO: 926
gaguaacauguauguguau

SEQ ID NO: 74267 - RNA, 19 nt, Artificial Sequence
  Description of Artificial Sequence: Synthetic oligonucleotide
  Antisense strand to SEQ ID NO: 74186
auacacauacauguuacuc

SEQ ID NO: 74268 - RNA, 19 nt, Artificial Sequence
  Description of Artificial Sequence: Synthetic oligonucleotide
  Sense strand starting at position 2897 of SEQ ID NO: 926
gggaguaacauguaugugu

SEQ ID NO: 74269 - RNA, 19 nt, Artificial Sequence
  Description of Artificial Sequence: Synthetic oligonucleotide
  Antisense strand to SEQ ID NO: 74188
acacauacauguuacuccc

SEQ ID NO: 74270 - RNA, 19 nt, Artificial Sequence
  Description of Artificial Sequence: Synthetic oligonucleotide
  Sense strand starting at position 2895 of SEQ ID NO: 926
uagggaguaacauguaugu

SEQ ID NO: 74271 - RNA, 19 nt, Artificial Sequence
  Description of Artificial Sequence: Synthetic oligonucleotide
  Antisense strand to SEQ ID NO: 74190
acauacauguuacucccua

SEQ ID NO: 74272 - RNA, 19 nt, Artificial Sequence
  Description of Artificial Sequence: Synthetic oligonucleotide
  Sense strand starting at position 2807 of SEQ ID NO: 926
uaccguguuguauaauaga

SEQ ID NO: 74273 - RNA, 19 nt, Artificial Sequence
  Description of Artificial Sequence: Synthetic oligonucleotide
  Antisense strand to SEQ ID NO: 74192
ucuauuauacaacacggua

SEQ ID NO: 74274 - RNA, 19 nt, Artificial Sequence
  Description of Artificial Sequence: Synthetic oligonucleotide
  Sense strand starting at position 2513 of SEQ ID NO: 926
uggguaacuuaagagauaa

SEQ ID NO: 74275 - RNA, 19 nt, Artificial Sequence
  Description of Artificial Sequence: Synthetic oligonucleotide
  Antisense strand to SEQ ID NO: 74194
uuaucucuuaaguuaccca

SEQ ID NO: 74276 - RNA, 19 nt, Artificial Sequence
  Description of Artificial Sequence: Synthetic oligonucleotide
  Sense strand starting at position 2508 of SEQ ID NO: 926
aguaauggguaacuuaaga

SEQ ID NO: 74277 - RNA, 19 nt, Artificial Sequence
  Description of Artificial Sequence: Synthetic oligonucleotide
  Antisense strand to SEQ ID NO: 74196
ucuuaaguuacccauuacu

SEQ ID NO: 74278 - RNA, 19 nt, Artificial Sequence
  Description of Artificial Sequence: Synthetic oligonucleotide
  Sense strand starting at position 2505 of SEQ ID NO: 926
guaaguaauggguaacuua

SEQ ID NO: 74279 - RNA, 19 nt, Artificial Sequence
  Description of Artificial Sequence: Synthetic oligonucleotide
  Antisense strand to SEQ ID NO: 74198
uaaguuacccauuacuuac

SEQ ID NO: 74280 - RNA, 19 nt, Artificial Sequence
  Description of Artificial Sequence: Synthetic oligonucleotide
  Sense strand starting at position 2503 of SEQ ID NO: 926
ccguaaguaauggguaacu

SEQ ID NO: 74281 - RNA, 19 nt, Artificial Sequence
  Description of Artificial Sequence: Synthetic oligonucleotide
  Antisense strand to SEQ ID NO: 74200
aguuacccauuacuuacgg

SEQ ID NO: 74282 - RNA, 19 nt, Artificial Sequence
  Description of Artificial Sequence: Synthetic oligonucleotide
  Sense strand starting at position 2147 of SEQ ID NO: 926
cgucacaaucgugcgauca

SEQ ID NO: 74283 - RNA, 19 nt, Artificial Sequence
  Description of Artificial Sequence: Synthetic oligonucleotide
  Antisense strand to SEQ ID NO: 74202
ugaucgcacgauugugacg

SEQ ID NO: 74284 - RNA, 19 nt, Artificial Sequence
  Description of Artificial Sequence: Synthetic oligonucleotide
  Sense strand starting at position 1218 of SEQ ID NO: 926
ggccaugacugauucuaau

SEQ ID NO: 74285 - RNA, 19 nt, Artificial Sequence
  Description of Artificial Sequence: Synthetic oligonucleotide
  Antisense strand to SEQ ID NO: 74204
auuagaaucagucauggcc

SEQ ID NO: 74286 - RNA, 19 nt, Artificial Sequence
  Description of Artificial Sequence: Synthetic oligonucleotide
  Sense strand starting at position 1212 of SEQ ID NO: 926
uccuuaggccaugacugau

SEQ ID NO: 74287 - RNA, 19 nt, Artificial Sequence
  Description of Artificial Sequence: Synthetic oligonucleotide
  Antisense strand to SEQ ID NO: 74206
aucagucauggccuaagga

SEQ ID NO: 74288 - RNA, 19 nt, Artificial Sequence
  Description of Artificial Sequence: Synthetic oligonucleotide
  Sense strand starting at position 1211 of SEQ ID NO: 926
auccuuaggccaugacuga

SEQ ID NO: 74289 - RNA, 19 nt, Artificial Sequence
  Description of Artificial Sequence: Synthetic oligonucleotide
  Antisense strand to SEQ ID NO: 74208
ucagucauggccuaaggau

SEQ ID NO: 74290 - RNA, 19 nt, Artificial Sequence
  Description of Artificial Sequence: Synthetic oligonucleotide
  Sense strand starting at position 1146 of SEQ ID NO: 926
guuuacugugaugacaacu

SEQ ID NO: 74291 - RNA, 19 nt, Artificial Sequence
  Description of Artificial Sequence: Synthetic oligonucleotide
  Antisense strand to SEQ ID NO: 74210
aguugucaucacaguaaac

SEQ ID NO: 74292 - RNA, 19 nt, Artificial Sequence
  Description of Artificial Sequence: Synthetic oligonucleotide
  Sense strand starting at position 1142 of SEQ ID NO: 926
uaaaguuuacugugaugac

SEQ ID NO: 74293 - RNA, 19 nt, Artificial Sequence
  Description of Artificial Sequence: Synthetic oligonucleotide
  Antisense strand to SEQ ID NO: 74212
gucaucacaguaaacuuua

SEQ ID NO: 74294 - RNA, 19 nt, Artificial Sequence
  Description of Artificial Sequence: Synthetic oligonucleotide
  Sense strand starting at position 1139 of SEQ ID NO: 926
gcauaaaguuuacugugau

SEQ ID NO: 74295 - RNA, 19 nt, Artificial Sequence
  Description of Artificial Sequence: Synthetic oligonucleotide
  Antisense strand to SEQ ID NO: 74214
aucacaguaaacuuuaugc

SEQ ID NO: 74296 - RNA, 19 nt, Artificial Sequence
  Description of Artificial Sequence: Synthetic oligonucleotide
  Sense strand starting at position 1055 of SEQ ID NO: 926
ggagaaauguuagcauaaa

SEQ ID NO: 74297 - RNA, 19 nt, Artificial Sequence
  Description of Artificial Sequence: Synthetic oligonucleotide
  Antisense strand to SEQ ID NO: 74216
uuuaugcuaacauuucucc

SEQ ID NO: 74298 - RNA, 19 nt, Artificial Sequence
  Description of Artificial Sequence: Synthetic oligonucleotide
  Sense strand starting at position 1044 of SEQ ID NO: 926
aguguagcaacggagaaau

SEQ ID NO: 74299 - RNA, 19 nt, Artificial Sequence
  Description of Artificial Sequence: Synthetic oligonucleotide
  Antisense strand to SEQ ID NO: 74218
auuucuccguugcuacacu

SEQ ID NO: 74300 - RNA, 19 nt, Artificial Sequence
  Description of Artificial Sequence: Synthetic oligonucleotide
  Sense strand starting at position 1043 of SEQ ID NO: 926
caguguagcaacggagaaa

SEQ ID NO: 74301 - RNA, 19 nt, Artificial Sequence
  Description of Artificial Sequence: Synthetic oligonucleotide
  Antisense strand to SEQ ID NO: 74220
uuucuccguugcuacacug

SEQ ID NO: 74302 - RNA, 19 nt, Artificial Sequence
  Description of Artificial Sequence: Synthetic oligonucleotide
  Sense strand starting at position 903 of SEQ ID NO: 926
guugaucgcggcuccaaua

SEQ ID NO: 74303 - RNA, 19 nt, Artificial Sequence
  Description of Artificial Sequence: Synthetic oligonucleotide
  Antisense strand to SEQ ID NO: 74222
uauuggagccgcgaucaac

SEQ ID NO: 74304 - RNA, 19 nt, Artificial Sequence
  Description of Artificial Sequence: Synthetic oligonucleotide
  Sense strand starting at position 902 of SEQ ID NO: 926
aguugaucgcggcuccaau

SEQ ID NO: 74305 - RNA, 19 nt, Artificial Sequence
  Description of Artificial Sequence: Synthetic oligonucleotide
  Antisense strand to SEQ ID NO: 74224
auuggagccgcgaucaacu

SEQ ID NO: 74306 - RNA, 19 nt, Artificial Sequence
  Description of Artificial Sequence: Synthetic oligonucleotide
  Sense strand starting at position 852 of SEQ ID NO: 926
ucagcaaauccucaauggu

SEQ ID NO: 74307 - RNA, 19 nt, Artificial Sequence
  Description of Artificial Sequence: Synthetic oligonucleotide
  Antisense strand to SEQ ID NO: 74226
accauugaggauuugcuga

SEQ ID NO: 74308 - RNA, 19 nt, Artificial Sequence
  Description of Artificial Sequence: Synthetic oligonucleotide
  Sense strand starting at position 757 of SEQ ID NO: 926
gucauuacauaugucucaa

SEQ ID NO: 74309 - RNA, 19 nt, Artificial Sequence
  Description of Artificial Sequence: Synthetic oligonucleotide
  Antisense strand to SEQ ID NO: 74228
uugagacauauguaaugac

SEQ ID NO: 74310 - RNA, 19 nt, Artificial Sequence
  Description of Artificial Sequence: Synthetic oligonucleotide
  Sense strand starting at position 401 of SEQ ID NO: 926
aaaggaagcuguguuucuu

SEQ ID NO: 74311 - RNA, 19 nt, Artificial Sequence
  Description of Artificial Sequence: Synthetic oligonucleotide
  Antisense strand to SEQ ID NO: 74230
aagaaacacagcuuccuuu

SEQ ID NO: 74312 - RNA, 19 nt, Artificial Sequence
  Description of Artificial Sequence: Synthetic oligonucleotide
  Sense strand starting at position 333 of SEQ ID NO: 926
aagcaucugcuguaaagca

SEQ ID NO: 74313 - RNA, 19 nt, Artificial Sequence
  Description of Artificial Sequence: Synthetic oligonucleotide
  Antisense strand to SEQ ID NO: 74232
ugcuuuacagcagaugcuu

SEQ ID NO: 74314 - RNA, 19 nt, Artificial Sequence
  Description of Artificial Sequence: Synthetic oligonucleotide
  Sense strand starting at position 269 of SEQ ID NO: 926
ccuuaauaauaggacaaga

SEQ ID NO: 74315 - RNA, 19 nt, Artificial Sequence
  Description of Artificial Sequence: Synthetic oligonucleotide
  Antisense strand to SEQ ID NO: 74234
ucuuguccuauuauuaagg

SEQ ID NO: 74316 - RNA, 19 nt, Artificial Sequence
  Description of Artificial Sequence: Synthetic oligonucleotide
  Sense strand starting at position 241 of SEQ ID NO: 926
cccaaagcaggcuaagaau

SEQ ID NO: 74317 - RNA, 19 nt, Artificial Sequence
  Description of Artificial Sequence: Synthetic oligonucleotide
  Antisense strand to SEQ ID NO: 74236
auucuuagccugcuuuggg

SEQ ID NO: 74318 - RNA, 19 nt, Artificial Sequence
  Description of Artificial Sequence: Synthetic oligonucleotide
  Sense strand starting at position 206 of SEQ ID NO: 926
aaaccuauugcuggugcaa

SEQ ID NO: 74319 - RNA, 19 nt, Artificial Sequence
  Description of Artificial Sequence: Synthetic oligonucleotide
  Antisense strand to SEQ ID NO: 74238
uugcaccagcaauagguuu

SEQ ID NO: 74320 - RNA, 19 nt, Artificial Sequence
  Description of Artificial Sequence: Synthetic oligonucleotide
  Sense strand starting at position 3716 of SEQ ID NO: 927
ugugcuaggcacuauauaa

SEQ ID NO: 74321 - RNA, 19 nt, Artificial Sequence
  Description of Artificial Sequence: Synthetic oligonucleotide
  Antisense strand to SEQ ID NO: 74240
uuauauagugccuagcaca

SEQ ID NO: 74322 - RNA, 19 nt, Artificial Sequence
  Description of Artificial Sequence: Synthetic oligonucleotide
  Sense strand starting at position 3617 of SEQ ID NO: 927
agaagaacaucagaaguga

SEQ ID NO: 74323 - RNA, 19 nt, Artificial Sequence
  Description of Artificial Sequence: Synthetic oligonucleotide
  Antisense strand to SEQ ID NO: 74242
ucacuucugauguucuucu

SEQ ID NO: 74324 - RNA, 19 nt, Artificial Sequence
  Description of Artificial Sequence: Synthetic oligonucleotide
  Sense strand starting at position 3526 of SEQ ID NO: 927
ugaauaaagcauggucuuu

SEQ ID NO: 74325 - RNA, 19 nt, Artificial Sequence
  Description of Artificial Sequence: Synthetic oligonucleotide
  Antisense strand to SEQ ID NO: 74244
aaagaccaugcuuuauuca

SEQ ID NO: 74326 - RNA, 19 nt, Artificial Sequence
  Description of Artificial Sequence: Synthetic oligonucleotide
  Sense strand starting at position 3525 of SEQ ID NO: 927
gugaauaaagcauggucuu

SEQ ID NO: 74327 - RNA, 19 nt, Artificial Sequence
  Description of Artificial Sequence: Synthetic oligonucleotide
  Antisense strand to SEQ ID NO: 74246
aagaccaugcuuuauucac

SEQ ID NO: 74328 - RNA, 19 nt, Artificial Sequence
  Description of Artificial Sequence: Synthetic oligonucleotide
  Sense strand starting at position 3501 of SEQ ID NO: 927
cugggucagguaugaauga

SEQ ID NO: 74329 - RNA, 19 nt, Artificial Sequence
  Description of Artificial Sequence: Synthetic oligonucleotide
  Antisense strand to SEQ ID NO: 74248
ucauucauaccugacccag

SEQ ID NO: 74330 - RNA, 19 nt, Artificial Sequence
  Description of Artificial Sequence: Synthetic oligonucleotide
  Sense strand starting at position 3470 of SEQ ID NO: 927
gccugcucugugcuauaca

SEQ ID NO: 74331 - RNA, 19 nt, Artificial Sequence
  Description of Artificial Sequence: Synthetic oligonucleotide
  Antisense strand to SEQ ID NO: 74250
uguauagcacagagcaggc

SEQ ID NO: 74332 - RNA, 19 nt, Artificial Sequence
  Description of Artificial Sequence: Synthetic oligonucleotide
  Sense strand starting at position 3254 of SEQ ID NO: 927
ucgggaaccuuugcugauu

SEQ ID NO: 74333 - RNA, 19 nt, Artificial Sequence
  Description of Artificial Sequence: Synthetic oligonucleotide
  Antisense strand to SEQ ID NO: 74252
aaucagcaaagguucccga

SEQ ID NO: 74334 - RNA, 19 nt, Artificial Sequence
  Description of Artificial Sequence: Synthetic oligonucleotide
  Sense strand starting at position 3096 of SEQ ID NO: 927
accuguggucuggguagaa

SEQ ID NO: 74335 - RNA, 19 nt, Artificial Sequence
  Description of Artificial Sequence: Synthetic oligonucleotide
  Antisense strand to SEQ ID NO: 74254
uucuacccagaccacaggu

SEQ ID NO: 74336 - RNA, 19 nt, Artificial Sequence
  Description of Artificial Sequence: Synthetic oligonucleotide
  Sense strand starting at position 2701 of SEQ ID NO: 927
ggcaguuguggcuaagaca

SEQ ID NO: 74337 - RNA, 19 nt, Artificial Sequence
  Description of Artificial Sequence: Synthetic oligonucleotide
  Antisense strand to SEQ ID NO: 74256
ugucuuagccacaacugcc

SEQ ID NO: 74338 - RNA, 19 nt, Artificial Sequence
  Description of Artificial Sequence: Synthetic oligonucleotide
  Sense strand starting at position 2679 of SEQ ID NO: 927
gcauauacucugugaggag

SEQ ID NO: 74339 - RNA, 19 nt, Artificial Sequence
  Description of Artificial Sequence: Synthetic oligonucleotide
  Antisense strand to SEQ ID NO: 74258
cuccucacagaguauaugc

SEQ ID NO: 74340 - RNA, 19 nt, Artificial Sequence
  Description of Artificial Sequence: Synthetic oligonucleotide
  Sense strand starting at position 2678 of SEQ ID NO: 927
ugcauauacucugugagga

SEQ ID NO: 74341 - RNA, 19 nt, Artificial Sequence
  Description of Artificial Sequence: Synthetic oligonucleotide
  Antisense strand to SEQ ID NO: 74260
uccucacagaguauaugca

SEQ ID NO: 74342 - RNA, 19 nt, Artificial Sequence
  Description of Artificial Sequence: Synthetic oligonucleotide
  Sense strand starting at position 2665 of SEQ ID NO: 927
caccaucgguauuugcaua

SEQ ID NO: 74343 - RNA, 19 nt, Artificial Sequence
  Description of Artificial Sequence: Synthetic oligonucleotide
  Antisense strand to SEQ ID NO: 74262
uaugcaaauaccgauggug

SEQ ID NO: 74344 - RNA, 19 nt, Artificial Sequence
  Description of Artificial Sequence: Synthetic oligonucleotide
  Sense strand starting at position 2637 of SEQ ID NO: 927
aucugagcucuagaaagug

SEQ ID NO: 74345 - RNA, 19 nt, Artificial Sequence
  Description of Artificial Sequence: Synthetic oligonucleotide
  Antisense strand to SEQ ID NO: 74264
cacuuucuagagcucagau

SEQ ID NO: 74346 - RNA, 19 nt, Artificial Sequence
  Description of Artificial Sequence: Synthetic oligonucleotide
  Sense strand starting at position 2517 of SEQ ID NO: 927
uaggacuuccgauguaucu

SEQ ID NO: 74347 - RNA, 19 nt, Artificial Sequence
  Description of Artificial Sequence: Synthetic oligonucleotide
  Antisense strand to SEQ ID NO: 74266
agauacaucggaaguccua

SEQ ID NO: 74348 - RNA, 19 nt, Artificial Sequence
  Description of Artificial Sequence: Synthetic oligonucleotide
  Sense strand starting at position 2504 of SEQ ID NO: 927
ucaagagauucuguaggac

SEQ ID NO: 74349 - RNA, 19 nt, Artificial Sequence
  Description of Artificial Sequence: Synthetic oligonucleotide
  Antisense strand to SEQ ID NO: 74268
guccuacagaaucucuuga

SEQ ID NO: 74350 - RNA, 19 nt, Artificial Sequence
  Description of Artificial Sequence: Synthetic oligonucleotide
  Sense strand starting at position 2315 of SEQ ID NO: 927
agagaauagcuguacucug

SEQ ID NO: 74351 - RNA, 19 nt, Artificial Sequence
  Description of Artificial Sequence: Synthetic oligonucleotide
  Antisense strand to SEQ ID NO: 74270
cagaguacagcuauucucu

SEQ ID NO: 74352 - RNA, 19 nt, Artificial Sequence
  Description of Artificial Sequence: Synthetic oligonucleotide
  Sense strand starting at position 2289 of SEQ ID NO: 927
ggaaccuguguuuacauua

SEQ ID NO: 74353 - RNA, 19 nt, Artificial Sequence
  Description of Artificial Sequence: Synthetic oligonucleotide
  Antisense strand to SEQ ID NO: 74272
uaauguaaacacagguucc

SEQ ID NO: 74354 - RNA, 19 nt, Artificial Sequence
  Description of Artificial Sequence: Synthetic oligonucleotide
  Sense strand starting at position 2288 of SEQ ID NO: 927
gggaaccuguguuuacauu

SEQ ID NO: 74355 - RNA, 19 nt, Artificial Sequence
  Description of Artificial Sequence: Synthetic oligonucleotide
  Antisense strand to SEQ ID NO: 74274
aauguaaacacagguuccc

SEQ ID NO: 74356 - RNA, 19 nt, Artificial Sequence
  Description of Artificial Sequence: Synthetic oligonucleotide
  Sense strand starting at position 2286 of SEQ ID NO: 927
gugggaaccuguguuuaca

SEQ ID NO: 74357 - RNA, 19 nt, Artificial Sequence
  Description of Artificial Sequence: Synthetic oligonucleotide
  Antisense strand to SEQ ID NO: 74276
uguaaacacagguucccac

SEQ ID NO: 74358 - RNA, 19 nt, Artificial Sequence
  Description of Artificial Sequence: Synthetic oligonucleotide
  Sense strand starting at position 2235 of SEQ ID NO: 927
gaagucucccuguacguca

SEQ ID NO: 74359 - RNA, 19 nt, Artificial Sequence
  Description of Artificial Sequence: Synthetic oligonucleotide
  Antisense strand to SEQ ID NO: 74278
ugacguacagggagacuuc

SEQ ID NO: 74360 - RNA, 19 nt, Artificial Sequence
  Description of Artificial Sequence: Synthetic oligonucleotide
  Sense strand starting at position 2223 of SEQ ID NO: 927
guaccauaucuggaagucu

SEQ ID NO: 74361 - RNA, 19 nt, Artificial Sequence
  Description of Artificial Sequence: Synthetic oligonucleotide
  Antisense strand to SEQ ID NO: 74280
agacuuccagauaugguac

SEQ ID NO: 74362 - RNA, 19 nt, Artificial Sequence
  Description of Artificial Sequence: Synthetic oligonucleotide
  Sense strand starting at position 2221 of SEQ ID NO: 927
guguaccauaucuggaagu

SEQ ID NO: 74363 - RNA, 19 nt, Artificial Sequence
  Description of Artificial Sequence: Synthetic oligonucleotide
  Antisense strand to SEQ ID NO: 74282
acuuccagauaugguacac

SEQ ID NO: 74364 - RNA, 19 nt, Artificial Sequence
  Description of Artificial Sequence: Synthetic oligonucleotide
  Sense strand starting at position 2212 of SEQ ID NO: 927
gugacaucuguguaccaua

SEQ ID NO: 74365 - RNA, 19 nt, Artificial Sequence
  Description of Artificial Sequence: Synthetic oligonucleotide
  Antisense strand to SEQ ID NO: 74284
uaugguacacagaugucac

SEQ ID NO: 74366 - RNA, 19 nt, Artificial Sequence
  Description of Artificial Sequence: Synthetic oligonucleotide
  Sense strand starting at position 2211 of SEQ ID NO: 927
ugugacaucuguguaccau

SEQ ID NO: 74367 - RNA, 19 nt, Artificial Sequence
  Description of Artificial Sequence: Synthetic oligonucleotide
  Antisense strand to SEQ ID NO: 74286
augguacacagaugucaca

SEQ ID NO: 74368 - RNA, 19 nt, Artificial Sequence
  Description of Artificial Sequence: Synthetic oligonucleotide
  Sense strand starting at position 2210 of SEQ ID NO: 927
augugacaucuguguacca

SEQ ID NO: 74369 - RNA, 19 nt, Artificial Sequence
  Description of Artificial Sequence: Synthetic oligonucleotide
  Antisense strand to SEQ ID NO: 74288
ugguacacagaugucacau

SEQ ID NO: 74370 - RNA, 19 nt, Artificial Sequence
  Description of Artificial Sequence: Synthetic oligonucleotide
  Sense strand starting at position 2181 of SEQ ID NO: 927
uuucguugccgucuagaga

SEQ ID NO: 74371 - RNA, 19 nt, Artificial Sequence
  Description of Artificial Sequence: Synthetic oligonucleotide
  Antisense strand to SEQ ID NO: 74290
ucucuagacggcaacgaaa

SEQ ID NO: 74372 - RNA, 19 nt, Artificial Sequence
  Description of Artificial Sequence: Synthetic oligonucleotide
  Sense strand starting at position 2164 of SEQ ID NO: 927
cagguuaggcuuuaauguu

SEQ ID NO: 74373 - RNA, 19 nt, Artificial Sequence
  Description of Artificial Sequence: Synthetic oligonucleotide
  Antisense strand to SEQ ID NO: 74292
aacauuaaagccuaaccug

SEQ ID NO: 74374 - RNA, 19 nt, Artificial Sequence
  Description of Artificial Sequence: Synthetic oligonucleotide
  Sense strand starting at position 2064 of SEQ ID NO: 927
gugacaucaccacaguuua

SEQ ID NO: 74375 - RNA, 19 nt, Artificial Sequence
  Description of Artificial Sequence: Synthetic oligonucleotide
  Antisense strand to SEQ ID NO: 74294
uaaacuguggugaugucac

SEQ ID NO: 74376 - RNA, 19 nt, Artificial Sequence
  Description of Artificial Sequence: Synthetic oligonucleotide
  Sense strand starting at position 2062 of SEQ ID NO: 927
gugugacaucaccacaguu

SEQ ID NO: 74377 - RNA, 19 nt, Artificial Sequence
  Description of Artificial Sequence: Synthetic oligonucleotide
  Antisense strand to SEQ ID NO: 74296
aacuguggugaugucacac

SEQ ID NO: 74378 - RNA, 19 nt, Artificial Sequence
  Description of Artificial Sequence: Synthetic oligonucleotide
  Sense strand starting at position 1992 of SEQ ID NO: 927
cagacucugcggugauuua

SEQ ID NO: 74379 - RNA, 19 nt, Artificial Sequence
  Description of Artificial Sequence: Synthetic oligonucleotide
  Antisense strand to SEQ ID NO: 74298
uaaaucaccgcagagucug

SEQ ID NO: 74380 - RNA, 19 nt, Artificial Sequence
  Description of Artificial Sequence: Synthetic oligonucleotide
  Sense strand starting at position 850 of SEQ ID NO: 927
cuagaucucccuuguacag

SEQ ID NO: 74381 - RNA, 19 nt, Artificial Sequence
  Description of Artificial Sequence: Synthetic oligonucleotide
  Antisense strand to SEQ ID NO: 74300
cuguacaagggagaucuag

SEQ ID NO: 74382 - RNA, 19 nt, Artificial Sequence
  Description of Artificial Sequence: Synthetic oligonucleotide
  Sense strand starting at position 839 of SEQ ID NO: 927
gggccagaccucuagaucu

SEQ ID NO: 74383 - RNA, 19 nt, Artificial Sequence
  Description of Artificial Sequence: Synthetic oligonucleotide
  Antisense strand to SEQ ID NO: 74302
agaucuagaggucuggccc

SEQ ID NO: 74384 - RNA, 19 nt, Artificial Sequence
  Description of Artificial Sequence: Synthetic oligonucleotide
  Sense strand starting at position 797 of SEQ ID NO: 927
uaacgaaagcuuugaaagu

SEQ ID NO: 74385 - RNA, 19 nt, Artificial Sequence
  Description of Artificial Sequence: Synthetic oligonucleotide
  Antisense strand to SEQ ID NO: 74304
acuuucaaagcuuucguua

SEQ ID NO: 74386 - RNA, 19 nt, Artificial Sequence
  Description of Artificial Sequence: Synthetic oligonucleotide
  Sense strand starting at position 483 of SEQ ID NO: 927
cagaaucagugauuaagua

SEQ ID NO: 74387 - RNA, 19 nt, Artificial Sequence
  Description of Artificial Sequence: Synthetic oligonucleotide
  Antisense strand to SEQ ID NO: 74306
uacuuaaucacugauucug

SEQ ID NO: 74388 - RNA, 19 nt, Artificial Sequence
  Description of Artificial Sequence: Synthetic oligonucleotide
  Sense strand starting at position 418 of SEQ ID NO: 927
cccaaagugucacuaauag

SEQ ID NO: 74389 - RNA, 19 nt, Artificial Sequence
  Description of Artificial Sequence: Synthetic oligonucleotide
  Antisense strand to SEQ ID NO: 74308
cuauuagugacacuuuggg

SEQ ID NO: 74390 - RNA, 19 nt, Artificial Sequence
  Description of Artificial Sequence: Synthetic oligonucleotide
  Sense strand starting at position 373 of SEQ ID NO: 927
gagucuauagcugaaagua

SEQ ID NO: 74391 - RNA, 19 nt, Artificial Sequence
  Description of Artificial Sequence: Synthetic oligonucleotide
  Antisense strand to SEQ ID NO: 74310
uacuuucagcuauagacuc

SEQ ID NO: 74392 - RNA, 19 nt, Artificial Sequence
  Description of Artificial Sequence: Synthetic oligonucleotide
  Sense strand starting at position 372 of SEQ ID NO: 927
agagucuauagcugaaagu

SEQ ID NO: 74393 - RNA, 19 nt, Artificial Sequence
  Description of Artificial Sequence: Synthetic oligonucleotide
  Antisense strand to SEQ ID NO: 74312
acuuucagcuauagacucu

SEQ ID NO: 74394 - RNA, 19 nt, Artificial Sequence
  Description of Artificial Sequence: Synthetic oligonucleotide
  Sense strand starting at position 371 of SEQ ID NO: 927
gagagucuauagcugaaag

SEQ ID NO: 74395 - RNA, 19 nt, Artificial Sequence
  Description of Artificial Sequence: Synthetic oligonucleotide
  Antisense strand to SEQ ID NO: 74314
cuuucagcuauagacucuc

SEQ ID NO: 74396 - RNA, 19 nt, Artificial Sequence
  Description of Artificial Sequence: Synthetic oligonucleotide
  Sense strand starting at position 256 of SEQ ID NO: 927
guagguuugcugagggcau

SEQ ID NO: 74397 - RNA, 19 nt, Artificial Sequence
  Description of Artificial Sequence: Synthetic oligonucleotide
  Antisense strand to SEQ ID NO: 74316
augcccucagcaaaccuac

SEQ ID NO: 74398 - RNA, 19 nt, Artificial Sequence
  Description of Artificial Sequence: Synthetic oligonucleotide
  Sense strand starting at position 33 of SEQ ID NO: 927
acagaacccugagauaauu

SEQ ID NO: 74399 - RNA, 19 nt, Artificial Sequence
  Description of Artificial Sequence: Synthetic oligonucleotide
  Antisense strand to SEQ ID NO: 74318
aauuaucucaggguucugu

SEQ ID NO: 74400 - RNA, 19 nt, Artificial Sequence
  Description of Artificial Sequence: Synthetic oligonucleotide
  Sense strand starting at position 3932 of SEQ ID NO: 929
agcccuggucaauaaauaa

SEQ ID NO: 74401 - RNA, 19 nt, Artificial Sequence
  Description of Artificial Sequence: Synthetic oligonucleotide
  Antisense strand to SEQ ID NO: 74320
uuauuuauugaccagggcu

SEQ ID NO: 74402 - RNA, 19 nt, Artificial Sequence
  Description of Artificial Sequence: Synthetic oligonucleotide
  Sense strand starting at position 3527 of SEQ ID NO: 929
augagagcuuucugaauuu

SEQ ID NO: 74403 - RNA, 19 nt, Artificial Sequence
  Description of Artificial Sequence: Synthetic oligonucleotide
  Antisense strand to SEQ ID NO: 74322
aaauucagaaagcucucau

SEQ ID NO: 74404 - RNA, 19 nt, Artificial Sequence
  Description of Artificial Sequence: Synthetic oligonucleotide
  Sense strand starting at position 3422 of SEQ ID NO: 929
auacuaaguuggcuaaaua

SEQ ID NO: 74405 - RNA, 19 nt, Artificial Sequence
  Description of Artificial Sequence: Synthetic oligonucleotide
  Antisense strand to SEQ ID NO: 74324
uauuuagccaacuuaguau

SEQ ID NO: 74406 - RNA, 19 nt, Artificial Sequence
  Description of Artificial Sequence: Synthetic oligonucleotide
  Sense strand starting at position 3411 of SEQ ID NO: 929
auggaacagucauacuaag

SEQ ID NO: 74407 - RNA, 19 nt, Artificial Sequence
  Description of Artificial Sequence: Synthetic oligonucleotide
  Antisense strand to SEQ ID NO: 74326
cuuaguaugacuguuccau

SEQ ID NO: 74408 - RNA, 19 nt, Artificial Sequence
  Description of Artificial Sequence: Synthetic oligonucleotide
  Sense strand starting at position 3366 of SEQ ID NO: 929
ggcagugcacuauaaucaa

SEQ ID NO: 74409 - RNA, 19 nt, Artificial Sequence
  Description of Artificial Sequence: Synthetic oligonucleotide
  Antisense strand to SEQ ID NO: 74328
uugauuauagugcacugcc

SEQ ID NO: 74410 - RNA, 19 nt, Artificial Sequence
  Description of Artificial Sequence: Synthetic oligonucleotide
  Sense strand starting at position 3344 of SEQ ID NO: 929
uaauaaucccaguggaguu

SEQ ID NO: 74411 - RNA, 19 nt, Artificial Sequence
  Description of Artificial Sequence: Synthetic oligonucleotide
  Antisense strand to SEQ ID NO: 74330
aacuccacugggauuauua

SEQ ID NO: 74412 - RNA, 19 nt, Artificial Sequence
  Description of Artificial Sequence: Synthetic oligonucleotide
  Sense strand starting at position 3341 of SEQ ID NO: 929
auauaauaaucccagugga

SEQ ID NO: 74413 - RNA, 19 nt, Artificial Sequence
  Description of Artificial Sequence: Synthetic oligonucleotide
  Antisense strand to SEQ ID NO: 74332
uccacugggauuauuauau

SEQ ID NO: 74414 - RNA, 19 nt, Artificial Sequence
  Description of Artificial Sequence: Synthetic oligonucleotide
  Sense strand starting at position 2617 of SEQ ID NO: 929
uuauaauagcuccgaguaa

SEQ ID NO: 74415 - RNA, 19 nt, Artificial Sequence
  Description of Artificial Sequence: Synthetic oligonucleotide
  Antisense strand to SEQ ID NO: 74334
uuacucggagcuauuauaa

SEQ ID NO: 74416 - RNA, 19 nt, Artificial Sequence
  Description of Artificial Sequence: Synthetic oligonucleotide
  Sense strand starting at position 2455 of SEQ ID NO: 929
cuccuaaaguuugucuauu

SEQ ID NO: 74417 - RNA, 19 nt, Artificial Sequence
  Description of Artificial Sequence: Synthetic oligonucleotide
  Antisense strand to SEQ ID NO: 74336
aauagacaaacuuuaggag

SEQ ID NO: 74418 - RNA, 19 nt, Artificial Sequence
  Description of Artificial Sequence: Synthetic oligonucleotide
  Sense strand starting at position 2454 of SEQ ID NO: 929
ucuccuaaaguuugucuau

SEQ ID NO: 74419 - RNA, 19 nt, Artificial Sequence
  Description of Artificial Sequence: Synthetic oligonucleotide
  Antisense strand to SEQ ID NO: 74338
auagacaaacuuuaggaga

SEQ ID NO: 74420 - RNA, 19 nt, Artificial Sequence
  Description of Artificial Sequence: Synthetic oligonucleotide
  Sense strand starting at position 2424 of SEQ ID NO: 929
cggaccaauuccuuaggaa

SEQ ID NO: 74421 - RNA, 19 nt, Artificial Sequence
  Description of Artificial Sequence: Synthetic oligonucleotide
  Antisense strand to SEQ ID NO: 74340
uuccuaaggaauugguccg

SEQ ID NO: 74422 - RNA, 19 nt, Artificial Sequence
  Description of Artificial Sequence: Synthetic oligonucleotide
  Sense strand starting at position 1936 of SEQ ID NO: 929
guguacuuacuguguacca

SEQ ID NO: 74423 - RNA, 19 nt, Artificial Sequence
  Description of Artificial Sequence: Synthetic oligonucleotide
  Antisense strand to SEQ ID NO: 74342
ugguacacaguaaguacac

SEQ ID NO: 74424 - RNA, 19 nt, Artificial Sequence
  Description of Artificial Sequence: Synthetic oligonucleotide
  Sense strand starting at position 1836 of SEQ ID NO: 929
guuacaguaagcugugaca

SEQ ID NO: 74425 - RNA, 19 nt, Artificial Sequence
  Description of Artificial Sequence: Synthetic oligonucleotide
  Antisense strand to SEQ ID NO: 74344
ugucacagcuuacuguaac

SEQ ID NO: 74426 - RNA, 19 nt, Artificial Sequence
  Description of Artificial Sequence: Synthetic oligonucleotide
  Sense strand starting at position 1826 of SEQ ID NO: 929
ggagcuagagguuacagua

SEQ ID NO: 74427 - RNA, 19 nt, Artificial Sequence
  Description of Artificial Sequence: Synthetic oligonucleotide
  Antisense strand to SEQ ID NO: 74346
uacuguaaccucuagcucc

SEQ ID NO: 74428 - RNA, 19 nt, Artificial Sequence
  Description of Artificial Sequence: Synthetic oligonucleotide
  Sense strand starting at position 1577 of SEQ ID NO: 929
aaguguauuuacggacaag

SEQ ID NO: 74429 - RNA, 19 nt, Artificial Sequence
  Description of Artificial Sequence: Synthetic oligonucleotide
  Antisense strand to SEQ ID NO: 74348
cuuguccguaaauacacuu

SEQ ID NO: 74430 - RNA, 19 nt, Artificial Sequence
  Description of Artificial Sequence: Synthetic oligonucleotide
  Sense strand starting at position 1557 of SEQ ID NO: 929
cauuguaaaugacaaggua

SEQ ID NO: 74431 - RNA, 19 nt, Artificial Sequence
  Description of Artificial Sequence: Synthetic oligonucleotide
  Antisense strand to SEQ ID NO: 74350
uaccuugucauuuacaaug

SEQ ID NO: 74432 - RNA, 19 nt, Artificial Sequence
  Description of Artificial Sequence: Synthetic oligonucleotide
  Sense strand starting at position 1548 of SEQ ID NO: 929
ccaugcagacauuguaaau

SEQ ID NO: 74433 - RNA, 19 nt, Artificial Sequence
  Description of Artificial Sequence: Synthetic oligonucleotide
  Antisense strand to SEQ ID NO: 74352
auuuacaaugucugcaugg

SEQ ID NO: 74434 - RNA, 19 nt, Artificial Sequence
  Description of Artificial Sequence: Synthetic oligonucleotide
  Sense strand starting at position 875 of SEQ ID NO: 929
ucagcuguggauugaacau

SEQ ID NO: 74435 - RNA, 19 nt, Artificial Sequence
  Description of Artificial Sequence: Synthetic oligonucleotide
  Antisense strand to SEQ ID NO: 74354
auguucaauccacagcuga

SEQ ID NO: 74436 - RNA, 19 nt, Artificial Sequence
  Description of Artificial Sequence: Synthetic oligonucleotide
  Sense strand starting at position 872 of SEQ ID NO: 929
cuaucagcuguggauugaa

SEQ ID NO: 74437 - RNA, 19 nt, Artificial Sequence
  Description of Artificial Sequence: Synthetic oligonucleotide
  Antisense strand to SEQ ID NO: 74356
uucaauccacagcugauag

SEQ ID NO: 74438 - RNA, 19 nt, Artificial Sequence
  Description of Artificial Sequence: Synthetic oligonucleotide
  Sense strand starting at position 832 of SEQ ID NO: 929
aguucuaucgcuuaauggu

SEQ ID NO: 74439 - RNA, 19 nt, Artificial Sequence
  Description of Artificial Sequence: Synthetic oligonucleotide
  Antisense strand to SEQ ID NO: 74358
accauuaagcgauagaacu

SEQ ID NO: 74440 - RNA, 19 nt, Artificial Sequence
  Description of Artificial Sequence: Synthetic oligonucleotide
  Sense strand starting at position 830 of SEQ ID NO: 929
cuaguucuaucgcuuaaug

SEQ ID NO: 74441 - RNA, 19 nt, Artificial Sequence
  Description of Artificial Sequence: Synthetic oligonucleotide
  Antisense strand to SEQ ID NO: 74360
cauuaagcgauagaacuag

SEQ ID NO: 74442 - RNA, 19 nt, Artificial Sequence
  Description of Artificial Sequence: Synthetic oligonucleotide
  Sense strand starting at position 822 of SEQ ID NO: 929
auaugucucuaguucuauc

SEQ ID NO: 74443 - RNA, 19 nt, Artificial Sequence
  Description of Artificial Sequence: Synthetic oligonucleotide
  Antisense strand to SEQ ID NO: 74362
gauagaacuagagacauau

SEQ ID NO: 74444 - RNA, 19 nt, Artificial Sequence
  Description of Artificial Sequence: Synthetic oligonucleotide
  Sense strand starting at position 819 of SEQ ID NO: 929
acuauaugucucuaguucu

SEQ ID NO: 74445 - RNA, 19 nt, Artificial Sequence
  Description of Artificial Sequence: Synthetic oligonucleotide
  Antisense strand to SEQ ID NO: 74364
agaacuagagacauauagu

SEQ ID NO: 74446 - RNA, 19 nt, Artificial Sequence
  Description of Artificial Sequence: Synthetic oligonucleotide
  Sense strand starting at position 747 of SEQ ID NO: 929
uccugaaugugggcaguua

SEQ ID NO: 74447 - RNA, 19 nt, Artificial Sequence
  Description of Artificial Sequence: Synthetic oligonucleotide
  Antisense strand to SEQ ID NO: 74366
uaacugcccacauucagga

SEQ ID NO: 74448 - RNA, 19 nt, Artificial Sequence
  Description of Artificial Sequence: Synthetic oligonucleotide
  Sense strand starting at position 672 of SEQ ID NO: 929
ucagauauuucugaaccug

SEQ ID NO: 74449 - RNA, 19 nt, Artificial Sequence
  Description of Artificial Sequence: Synthetic oligonucleotide
  Antisense strand to SEQ ID NO: 74368
cagguucagaaauaucuga

SEQ ID NO: 74450 - RNA, 19 nt, Artificial Sequence
  Description of Artificial Sequence: Synthetic oligonucleotide
  Sense strand starting at position 650 of SEQ ID NO: 929
gucacaggguuagucaaau

SEQ ID NO: 74451 - RNA, 19 nt, Artificial Sequence
  Description of Artificial Sequence: Synthetic oligonucleotide
  Antisense strand to SEQ ID NO: 74370
auuugacuaacccugugac

SEQ ID NO: 74452 - RNA, 19 nt, Artificial Sequence
  Description of Artificial Sequence: Synthetic oligonucleotide
  Sense strand starting at position 544 of SEQ ID NO: 929
ccuaaagaaugucagguaa

SEQ ID NO: 74453 - RNA, 19 nt, Artificial Sequence
  Description of Artificial Sequence: Synthetic oligonucleotide
  Antisense strand to SEQ ID NO: 74372
uuaccugacauucuuuagg

SEQ ID NO: 74454 - RNA, 19 nt, Artificial Sequence
  Description of Artificial Sequence: Synthetic oligonucleotide
  Sense strand starting at position 480 of SEQ ID NO: 929
ugaccuugauaucuagcua

SEQ ID NO: 74455 - RNA, 19 nt, Artificial Sequence
  Description of Artificial Sequence: Synthetic oligonucleotide
  Antisense strand to SEQ ID NO: 74374
uagcuagauaucaagguca

SEQ ID NO: 74456 - RNA, 19 nt, Artificial Sequence
  Description of Artificial Sequence: Synthetic oligonucleotide
  Sense strand starting at position 468 of SEQ ID NO: 929
aguggagagaugugaccuu

SEQ ID NO: 74457 - RNA, 19 nt, Artificial Sequence
  Description of Artificial Sequence: Synthetic oligonucleotide
  Antisense strand to SEQ ID NO: 74376
aaggucacaucucuccacu

SEQ ID NO: 74458 - RNA, 19 nt, Artificial Sequence
  Description of Artificial Sequence: Synthetic oligonucleotide
  Sense strand starting at position 398 of SEQ ID NO: 929
agacaaguguggucaccuu

SEQ ID NO: 74459 - RNA, 19 nt, Artificial Sequence
  Description of Artificial Sequence: Synthetic oligonucleotide
  Antisense strand to SEQ ID NO: 74378
aaggugaccacacuugucu

SEQ ID NO: 74460 - RNA, 19 nt, Artificial Sequence
  Description of Artificial Sequence: Synthetic oligonucleotide
  Sense strand starting at position 343 of SEQ ID NO: 929
auuccaucuguauguuauu

SEQ ID NO: 74461 - RNA, 19 nt, Artificial Sequence
  Description of Artificial Sequence: Synthetic oligonucleotide
  Antisense strand to SEQ ID NO: 74380
aauaacauacagauggaau

SEQ ID NO: 74462 - RNA, 19 nt, Artificial Sequence
  Description of Artificial Sequence: Synthetic oligonucleotide
  Sense strand starting at position 209 of SEQ ID NO: 929
cugaaacuuuccguacuca

SEQ ID NO: 74463 - RNA, 19 nt, Artificial Sequence
  Description of Artificial Sequence: Synthetic oligonucleotide
  Antisense strand to SEQ ID NO: 74382
ugaguacggaaaguuucag

SEQ ID NO: 74464 - RNA, 19 nt, Artificial Sequence
  Description of Artificial Sequence: Synthetic oligonucleotide
  Sense strand starting at position 207 of SEQ ID NO: 929
uucugaaacuuuccguacu

SEQ ID NO: 74465 - RNA, 19 nt, Artificial Sequence
  Description of Artificial Sequence: Synthetic oligonucleotide
  Antisense strand to SEQ ID NO: 74384
aguacggaaaguuucagaa

SEQ ID NO: 74466 - RNA, 19 nt, Artificial Sequence
  Description of Artificial Sequence: Synthetic oligonucleotide
  Sense strand starting at position 197 of SEQ ID NO: 929
augucugacuuucugaaac

SEQ ID NO: 74467 - RNA, 19 nt, Artificial Sequence
  Description of Artificial Sequence: Synthetic oligonucleotide
  Antisense strand to SEQ ID NO: 74386
guuucagaaagucagacau

SEQ ID NO: 74468 - RNA, 19 nt, Artificial Sequence
  Description of Artificial Sequence: Synthetic oligonucleotide
  Sense strand starting at position 171 of SEQ ID NO: 929
acagaagugucucugauua

SEQ ID NO: 74469 - RNA, 19 nt, Artificial Sequence
  Description of Artificial Sequence: Synthetic oligonucleotide
  Antisense strand to SEQ ID NO: 74388
uaaucagagacacuucugu

SEQ ID NO: 74470 - RNA, 19 nt, Artificial Sequence
  Description of Artificial Sequence: Synthetic oligonucleotide
  Sense strand starting at position 91 of SEQ ID NO: 929
guggaauauuaaugcauuu

SEQ ID NO: 74471 - RNA, 19 nt, Artificial Sequence
  Description of Artificial Sequence: Synthetic oligonucleotide
  Antisense strand to SEQ ID NO: 74390
aaaugcauuaauauuccac

SEQ ID NO: 74472 - RNA, 19 nt, Artificial Sequence
  Description of Artificial Sequence: Synthetic oligonucleotide
  Sense strand starting at position 81 of SEQ ID NO: 929
uuacuacaugguggaauau

SEQ ID NO: 74473 - RNA, 19 nt, Artificial Sequence
  Description of Artificial Sequence: Synthetic oligonucleotide
  Antisense strand to SEQ ID NO: 74392
auauuccaccauguaguaa

SEQ ID NO: 74474 - RNA, 19 nt, Artificial Sequence
  Description of Artificial Sequence: Synthetic oligonucleotide
  Sense strand starting at position 54 of SEQ ID NO: 929
auacuugguuaggauuuaa

SEQ ID NO: 74475 - RNA, 19 nt, Artificial Sequence
  Description of Artificial Sequence: Synthetic oligonucleotide
  Antisense strand to SEQ ID NO: 74394
uuaaauccuaaccaaguau

SEQ ID NO: 74476 - RNA, 19 nt, Artificial Sequence
  Description of Artificial Sequence: Synthetic oligonucleotide
  Sense strand starting at position 53 of SEQ ID NO: 929
uauacuugguuaggauuua

SEQ ID NO: 74477 - RNA, 19 nt, Artificial Sequence
  Description of Artificial Sequence: Synthetic oligonucleotide
  Antisense strand to SEQ ID NO: 74396
uaaauccuaaccaaguaua

SEQ ID NO: 74478 - RNA, 19 nt, Artificial Sequence
  Description of Artificial Sequence: Synthetic oligonucleotide
  Sense strand starting at position 50 of SEQ ID NO: 929
aaauauacuugguuaggau

SEQ ID NO: 74479 - RNA, 19 nt, Artificial Sequence
  Description of Artificial Sequence: Synthetic oligonucleotide
  Antisense strand to SEQ ID NO: 74398
auccuaaccaaguauauuu

SEQ ID NO: 74480 - RNA, 19 nt, Artificial Sequence
  Description of Artificial Sequence: Synthetic oligonucleotide
  Sense strand starting at position 3943 of SEQ ID NO: 928
aaagguaggucacagagaa

SEQ ID NO: 74481 - RNA, 19 nt, Artificial Sequence
  Description of Artificial Sequence: Synthetic oligonucleotide
  Antisense strand to SEQ ID NO: 74400
uucucugugaccuaccuuu

SEQ ID NO: 74482 - RNA, 19 nt, Artificial Sequence
  Description of Artificial Sequence: Synthetic oligonucleotide
  Sense strand starting at position 3758 of SEQ ID NO: 928
uacuccuagugagcagaau

SEQ ID NO: 74483 - RNA, 19 nt, Artificial Sequence
  Description of Artificial Sequence: Synthetic oligonucleotide
  Antisense strand to SEQ ID NO: 74402
auucugcucacuaggagua

SEQ ID NO: 74484 - RNA, 19 nt, Artificial Sequence
  Description of Artificial Sequence: Synthetic oligonucleotide
  Sense strand starting at position 3673 of SEQ ID NO: 928
guuugacaggcgcauuaau

SEQ ID NO: 74485 - RNA, 19 nt, Artificial Sequence
  Description of Artificial Sequence: Synthetic oligonucleotide
  Antisense strand to SEQ ID NO: 74404
auuaaugcgccugucaaac

SEQ ID NO: 74486 - RNA, 19 nt, Artificial Sequence
  Description of Artificial Sequence: Synthetic oligonucleotide
  Sense strand starting at position 3591 of SEQ ID NO: 928
uggcuagaggcacauauua

SEQ ID NO: 74487 - RNA, 19 nt, Artificial Sequence
  Description of Artificial Sequence: Synthetic oligonucleotide
  Antisense strand to SEQ ID NO: 74406
uaauaugugccucuagcca

SEQ ID NO: 74488 - RNA, 19 nt, Artificial Sequence
  Description of Artificial Sequence: Synthetic oligonucleotide
  Sense strand starting at position 2888 of SEQ ID NO: 928
gugauaugugcuuauuguu

SEQ ID NO: 74489 - RNA, 19 nt, Artificial Sequence
  Description of Artificial Sequence: Synthetic oligonucleotide
  Antisense strand to SEQ ID NO: 74408
aacaauaagcacauaucac

SEQ ID NO: 74490 - RNA, 19 nt, Artificial Sequence
  Description of Artificial Sequence: Synthetic oligonucleotide
  Sense strand starting at position 2887 of SEQ ID NO: 928
agugauaugugcuuauugu

SEQ ID NO: 74491 - RNA, 19 nt, Artificial Sequence
  Description of Artificial Sequence: Synthetic oligonucleotide
  Antisense strand to SEQ ID NO: 74410
acaauaagcacauaucacu

SEQ ID NO: 74492 - RNA, 19 nt, Artificial Sequence
  Description of Artificial Sequence: Synthetic oligonucleotide
  Sense strand starting at position 2855 of SEQ ID NO: 928
acagaauacccagguuucu

SEQ ID NO: 74493 - RNA, 19 nt, Artificial Sequence
  Description of Artificial Sequence: Synthetic oligonucleotide
  Antisense strand to SEQ ID NO: 74412
agaaaccuggguauucugu

SEQ ID NO: 74494 - RNA, 19 nt, Artificial Sequence
  Description of Artificial Sequence: Synthetic oligonucleotide
  Sense strand starting at position 2813 of SEQ ID NO: 928
agaucuuuccgugaagaac

SEQ ID NO: 74495 - RNA, 19 nt, Artificial Sequence
  Description of Artificial Sequence: Synthetic oligonucleotide
  Antisense strand to SEQ ID NO: 74414
guucuucacggaaagaucu

SEQ ID NO: 74496 - RNA, 19 nt, Artificial Sequence
  Description of Artificial Sequence: Synthetic oligonucleotide
  Sense strand starting at position 2812 of SEQ ID NO: 928
cagaucuuuccgugaagaa

SEQ ID NO: 74497 - RNA, 19 nt, Artificial Sequence
  Description of Artificial Sequence: Synthetic oligonucleotide
  Antisense strand to SEQ ID NO: 74416
uucuucacggaaagaucug

SEQ ID NO: 74498 - RNA, 19 nt, Artificial Sequence
  Description of Artificial Sequence: Synthetic oligonucleotide
  Sense strand starting at position 2811 of SEQ ID NO: 928
acagaucuuuccgugaaga

SEQ ID NO: 74499 - RNA, 19 nt, Artificial Sequence
  Description of Artificial Sequence: Synthetic oligonucleotide
  Antisense strand to SEQ ID NO: 74418
ucuucacggaaagaucugu

SEQ ID NO: 74500 - RNA, 19 nt, Artificial Sequence
  Description of Artificial Sequence: Synthetic oligonucleotide
  Sense strand starting at position 2717 of SEQ ID NO: 928
cuuacaagucauggaauua

SEQ ID NO: 74501 - RNA, 19 nt, Artificial Sequence
  Description of Artificial Sequence: Synthetic oligonucleotide
  Antisense strand to SEQ ID NO: 74420
uaauuccaugacuuguaag

SEQ ID NO: 74502 - RNA, 19 nt, Artificial Sequence
  Description of Artificial Sequence: Synthetic oligonucleotide
  Sense strand starting at position 2672 of SEQ ID NO: 928
gcucuuaggcacuggauca

SEQ ID NO: 74503 - RNA, 19 nt, Artificial Sequence
  Description of Artificial Sequence: Synthetic oligonucleotide
  Antisense strand to SEQ ID NO: 74422
ugauccagugccuaagagc

SEQ ID NO: 74504 - RNA, 19 nt, Artificial Sequence
  Description of Artificial Sequence: Synthetic oligonucleotide
  Sense strand starting at position 2646 of SEQ ID NO: 928
ccaagcuauuuggauccaa

SEQ ID NO: 74505 - RNA, 19 nt, Artificial Sequence
  Description of Artificial Sequence: Synthetic oligonucleotide
  Antisense strand to SEQ ID NO: 74424
uuggauccaaauagcuugg

SEQ ID NO: 74506 - RNA, 19 nt, Artificial Sequence
  Description of Artificial Sequence: Synthetic oligonucleotide
  Sense strand starting at position 2557 of SEQ ID NO: 928
auaaguugcaaugaguuga

SEQ ID NO: 74507 - RNA, 19 nt, Artificial Sequence
  Description of Artificial Sequence: Synthetic oligonucleotide
  Antisense strand to SEQ ID NO: 74426
ucaacucauugcaacuuau

SEQ ID NO: 74508 - RNA, 19 nt, Artificial Sequence
  Description of Artificial Sequence: Synthetic oligonucleotide
  Sense strand starting at position 2285 of SEQ ID NO: 928
gcacuaagagguuaaagua

SEQ ID NO: 74509 - RNA, 19 nt, Artificial Sequence
  Description of Artificial Sequence: Synthetic oligonucleotide
  Antisense strand to SEQ ID NO: 74428
uacuuuaaccucuuagugc

SEQ ID NO: 74510 - RNA, 19 nt, Artificial Sequence
  Description of Artificial Sequence: Synthetic oligonucleotide
  Sense strand starting at position 2282 of SEQ ID NO: 928
cuggcacuaagagguuaaa

SEQ ID NO: 74511 - RNA, 19 nt, Artificial Sequence
  Description of Artificial Sequence: Synthetic oligonucleotide
  Antisense strand to SEQ ID NO: 74430
uuuaaccucuuagugccag

SEQ ID NO: 74512 - RNA, 19 nt, Artificial Sequence
  Description of Artificial Sequence: Synthetic oligonucleotide
  Sense strand starting at position 2232 of SEQ ID NO: 928
guuagauucuaugcaauaa

SEQ ID NO: 74513 - RNA, 19 nt, Artificial Sequence
  Description of Artificial Sequence: Synthetic oligonucleotide
  Antisense strand to SEQ ID NO: 74432
uuauugcauagaaucuaac

SEQ ID NO: 74514 - RNA, 19 nt, Artificial Sequence
  Description of Artificial Sequence: Synthetic oligonucleotide
  Sense strand starting at position 2143 of SEQ ID NO: 928
cuuacaaaugaugguauau

SEQ ID NO: 74515 - RNA, 19 nt, Artificial Sequence
  Description of Artificial Sequence: Synthetic oligonucleotide
  Antisense strand to SEQ ID NO: 74434
auauaccaucauuuguaag

SEQ ID NO: 74516 - RNA, 19 nt, Artificial Sequence
  Description of Artificial Sequence: Synthetic oligonucleotide
  Sense strand starting at position 2135 of SEQ ID NO: 928
agaagauucuuacaaauga

SEQ ID NO: 74517 - RNA, 19 nt, Artificial Sequence
  Description of Artificial Sequence: Synthetic oligonucleotide
  Antisense strand to SEQ ID NO: 74436
ucauuuguaagaaucuucu

SEQ ID NO: 74518 - RNA, 19 nt, Artificial Sequence
  Description of Artificial Sequence: Synthetic oligonucleotide
  Sense strand starting at position 2124 of SEQ ID NO: 928
cucugaaauuaagaagauu

SEQ ID NO: 74519 - RNA, 19 nt, Artificial Sequence
  Description of Artificial Sequence: Synthetic oligonucleotide
  Antisense strand to SEQ ID NO: 74438
aaucuucuuaauuucagag

SEQ ID NO: 74520 - RNA, 19 nt, Artificial Sequence
  Description of Artificial Sequence: Synthetic oligonucleotide
  Sense strand starting at position 1845 of SEQ ID NO: 928
aguacauacucaucuaugu

SEQ ID NO: 74521 - RNA, 19 nt, Artificial Sequence
  Description of Artificial Sequence: Synthetic oligonucleotide
  Antisense strand to SEQ ID NO: 74440
acauagaugaguauguacu

SEQ ID NO: 74522 - RNA, 19 nt, Artificial Sequence
  Description of Artificial Sequence: Synthetic oligonucleotide
  Sense strand starting at position 1795 of SEQ ID NO: 928
ggcuccagaauugaguaua

SEQ ID NO: 74523 - RNA, 19 nt, Artificial Sequence
  Description of Artificial Sequence: Synthetic oligonucleotide
  Antisense strand to SEQ ID NO: 74442
uauacucaauucuggagcc

SEQ ID NO: 74524 - RNA, 19 nt, Artificial Sequence
  Description of Artificial Sequence: Synthetic oligonucleotide
  Sense strand starting at position 1785 of SEQ ID NO: 928
ccugcaaucuggcuccaga

SEQ ID NO: 74525 - RNA, 19 nt, Artificial Sequence
  Description of Artificial Sequence: Synthetic oligonucleotide
  Antisense strand to SEQ ID NO: 74444
ucuggagccagauugcagg

SEQ ID NO: 74526 - RNA, 19 nt, Artificial Sequence
  Description of Artificial Sequence: Synthetic oligonucleotide
  Sense strand starting at position 1731 of SEQ ID NO: 928
aaguuauuggccuagaguc

SEQ ID NO: 74527 - RNA, 19 nt, Artificial Sequence
  Description of Artificial Sequence: Synthetic oligonucleotide
  Antisense strand to SEQ ID NO: 74446
gacucuaggccaauaacuu

SEQ ID NO: 74528 - RNA, 19 nt, Artificial Sequence
  Description of Artificial Sequence: Synthetic oligonucleotide
  Sense strand starting at position 1729 of SEQ ID NO: 928
uuaaguuauuggccuagag

SEQ ID NO: 74529 - RNA, 19 nt, Artificial Sequence
  Description of Artificial Sequence: Synthetic oligonucleotide
  Antisense strand to SEQ ID NO: 74448
cucuaggccaauaacuuaa

SEQ ID NO: 74530 - RNA, 19 nt, Artificial Sequence
  Description of Artificial Sequence: Synthetic oligonucleotide
  Sense strand starting at position 1587 of SEQ ID NO: 928
caguccaagugagaaauaa

SEQ ID NO: 74531 - RNA, 19 nt, Artificial Sequence
  Description of Artificial Sequence: Synthetic oligonucleotide
  Antisense strand to SEQ ID NO: 74450
uuauuucucacuuggacug

SEQ ID NO: 74532 - RNA, 19 nt, Artificial Sequence
  Description of Artificial Sequence: Synthetic oligonucleotide
  Sense strand starting at position 1580 of SEQ ID NO: 928
ucauuaacaguccaaguga

SEQ ID NO: 74533 - RNA, 19 nt, Artificial Sequence
  Description of Artificial Sequence: Synthetic oligonucleotide
  Antisense strand to SEQ ID NO: 74452
ucacuuggacuguuaauga

SEQ ID NO: 74534 - RNA, 19 nt, Artificial Sequence
  Description of Artificial Sequence: Synthetic oligonucleotide
  Sense strand starting at position 1501 of SEQ ID NO: 928
guagguguuagauauaaua

SEQ ID NO: 74535 - RNA, 19 nt, Artificial Sequence
  Description of Artificial Sequence: Synthetic oligonucleotide
  Antisense strand to SEQ ID NO: 74454
uauuauaucuaacaccuac

SEQ ID NO: 74536 - RNA, 19 nt, Artificial Sequence
  Description of Artificial Sequence: Synthetic oligonucleotide
  Sense strand starting at position 1492 of SEQ ID NO: 928
uaaauacuaguagguguua

SEQ ID NO: 74537 - RNA, 19 nt, Artificial Sequence
  Description of Artificial Sequence: Synthetic oligonucleotide
  Antisense strand to SEQ ID NO: 74456
uaacaccuacuaguauuua

SEQ ID NO: 74538 - RNA, 19 nt, Artificial Sequence
  Description of Artificial Sequence: Synthetic oligonucleotide
  Sense strand starting at position 1357 of SEQ ID NO: 928
gguauauuacuugaucucu

SEQ ID NO: 74539 - RNA, 19 nt, Artificial Sequence
  Description of Artificial Sequence: Synthetic oligonucleotide
  Antisense strand to SEQ ID NO: 74458
agagaucaaguaauauacc

SEQ ID NO: 74540 - RNA, 19 nt, Artificial Sequence
  Description of Artificial Sequence: Synthetic oligonucleotide
  Sense strand starting at position 1354 of SEQ ID NO: 928
gcagguauauuacuugauc

SEQ ID NO: 74541 - RNA, 19 nt, Artificial Sequence
  Description of Artificial Sequence: Synthetic oligonucleotide
  Antisense strand to SEQ ID NO: 74460
gaucaaguaauauaccugc

SEQ ID NO: 74542 - RNA, 19 nt, Artificial Sequence
  Description of Artificial Sequence: Synthetic oligonucleotide
  Sense strand starting at position 1345 of SEQ ID NO: 928
uuaauagcugcagguauau

SEQ ID NO: 74543 - RNA, 19 nt, Artificial Sequence
  Description of Artificial Sequence: Synthetic oligonucleotide
  Antisense strand to SEQ ID NO: 74462
auauaccugcagcuauuaa

SEQ ID NO: 74544 - RNA, 19 nt, Artificial Sequence
  Description of Artificial Sequence: Synthetic oligonucleotide
  Sense strand starting at position 1272 of SEQ ID NO: 928
ucugaagagacaugguguu

SEQ ID NO: 74545 - RNA, 19 nt, Artificial Sequence
  Description of Artificial Sequence: Synthetic oligonucleotide
  Antisense strand to SEQ ID NO: 74464
aacaccaugucucuucaga

SEQ ID NO: 74546 - RNA, 19 nt, Artificial Sequence
  Description of Artificial Sequence: Synthetic oligonucleotide
  Sense strand starting at position 1200 of SEQ ID NO: 928
agcccuggucaauaaauaa

SEQ ID NO: 74547 - RNA, 19 nt, Artificial Sequence
  Description of Artificial Sequence: Synthetic oligonucleotide
  Antisense strand to SEQ ID NO: 74466
uuauuuauugaccagggcu

SEQ ID NO: 74548 - RNA, 19 nt, Artificial Sequence
  Description of Artificial Sequence: Synthetic oligonucleotide
  Sense strand starting at position 795 of SEQ ID NO: 928
augagagcuuucugaauuu

SEQ ID NO: 74549 - RNA, 19 nt, Artificial Sequence
  Description of Artificial Sequence: Synthetic oligonucleotide
  Antisense strand to SEQ ID NO: 74468
aaauucagaaagcucucau

SEQ ID NO: 74550 - RNA, 19 nt, Artificial Sequence
  Description of Artificial Sequence: Synthetic oligonucleotide
  Sense strand starting at position 690 of SEQ ID NO: 928
auacuaaguuggcuaaaua

SEQ ID NO: 74551 - RNA, 19 nt, Artificial Sequence
  Description of Artificial Sequence: Synthetic oligonucleotide
  Antisense strand to SEQ ID NO: 74470
uauuuagccaacuuaguau

SEQ ID NO: 74552 - RNA, 19 nt, Artificial Sequence
  Description of Artificial Sequence: Synthetic oligonucleotide
  Sense strand starting at position 679 of SEQ ID NO: 928
auggaacagucauacuaag

SEQ ID NO: 74553 - RNA, 19 nt, Artificial Sequence
  Description of Artificial Sequence: Synthetic oligonucleotide
  Antisense strand to SEQ ID NO: 74472
cuuaguaugacuguuccau

SEQ ID NO: 74554 - RNA, 19 nt, Artificial Sequence
  Description of Artificial Sequence: Synthetic oligonucleotide
  Sense strand starting at position 634 of SEQ ID NO: 928
ggcagugcacuauaaucaa

SEQ ID NO: 74555 - RNA, 19 nt, Artificial Sequence
  Description of Artificial Sequence: Synthetic oligonucleotide
  Antisense strand to SEQ ID NO: 74474
uugauuauagugcacugcc

SEQ ID NO: 74556 - RNA, 19 nt, Artificial Sequence
  Description of Artificial Sequence: Synthetic oligonucleotide
  Sense strand starting at position 612 of SEQ ID NO: 928
uaauaaucccaguggaguu

SEQ ID NO: 74557 - RNA, 19 nt, Artificial Sequence
  Description of Artificial Sequence: Synthetic oligonucleotide
  Antisense strand to SEQ ID NO: 74476
aacuccacugggauuauua

SEQ ID NO: 74558 - RNA, 19 nt, Artificial Sequence
  Description of Artificial Sequence: Synthetic oligonucleotide
  Sense strand starting at position 609 of SEQ ID NO: 928
auauaauaaucccagugga

SEQ ID NO: 74559 - RNA, 19 nt, Artificial Sequence
  Description of Artificial Sequence: Synthetic oligonucleotide
  Antisense strand to SEQ ID NO: 74478
uccacugggauuauuauau

SEQ ID NO: 74560 - RNA, 19 nt, Artificial Sequence
  Description of Artificial Sequence: Synthetic oligonucleotide
  Sense strand starting at position 380 of SEQ ID NO: 930
gcgagcagucugcuuagua

SEQ ID NO: 74561 - RNA, 19 nt, Artificial Sequence
  Description of Artificial Sequence: Synthetic oligonucleotide
  Antisense strand to SEQ ID NO: 74480
uacuaagcagacugcucgc

SEQ ID NO: 74562 - RNA, 19 nt, Artificial Sequence
  Description of Artificial Sequence: Synthetic oligonucleotide
  Sense strand starting at position 499 of SEQ ID NO: 930
cccgauugggcggaacaau

SEQ ID NO: 74563 - RNA, 19 nt, Artificial Sequence
  Description of Artificial Sequence: Synthetic oligonucleotide
  Antisense strand to SEQ ID NO: 74482
auuguuccgcccaaucggg

SEQ ID NO: 74564 - RNA, 19 nt, Artificial Sequence
  Description of Artificial Sequence: Synthetic oligonucleotide
  Sense strand starting at position 643 of SEQ ID NO: 930
gaaguuucgcaagcuuguu

SEQ ID NO: 74565 - RNA, 19 nt, Artificial Sequence
  Description of Artificial Sequence: Synthetic oligonucleotide
  Antisense strand to SEQ ID NO: 74484
aacaagcuugcgaaacuuc

SEQ ID NO: 74566 - RNA, 19 nt, Artificial Sequence
  Description of Artificial Sequence: Synthetic oligonucleotide
  Sense strand starting at position 1428 of SEQ ID NO: 930
gagaguggccagcauuaac

SEQ ID NO: 74567 - RNA, 19 nt, Artificial Sequence
  Description of Artificial Sequence: Synthetic oligonucleotide
  Antisense strand to SEQ ID NO: 74486
guuaaugcuggccacucuc

SEQ ID NO: 74568 - RNA, 19 nt, Artificial Sequence
  Description of Artificial Sequence: Synthetic oligonucleotide
  Sense strand starting at position 1942 of SEQ ID NO: 930
agacaugacagcgauagua

SEQ ID NO: 74569 - RNA, 19 nt, Artificial Sequence
  Description of Artificial Sequence: Synthetic oligonucleotide
  Antisense strand to SEQ ID NO: 74488
uacuaucgcugucaugucu

SEQ ID NO: 74570 - RNA, 19 nt, Artificial Sequence
  Description of Artificial Sequence: Synthetic oligonucleotide
  Sense strand starting at position 1954 of SEQ ID NO: 930
gauaguagucaccgagaga

SEQ ID NO: 74571 - RNA, 19 nt, Artificial Sequence
  Description of Artificial Sequence: Synthetic oligonucleotide
  Antisense strand to SEQ ID NO: 74490
ucucucggugacuacuauc

SEQ ID NO: 74572 - RNA, 19 nt, Artificial Sequence
  Description of Artificial Sequence: Synthetic oligonucleotide
  Sense strand starting at position 2058 of SEQ ID NO: 930
cuuugauuggcucaagcaa

SEQ ID NO: 74573 - RNA, 19 nt, Artificial Sequence
  Description of Artificial Sequence: Synthetic oligonucleotide
  Antisense strand to SEQ ID NO: 74492
uugcuugagccaaucaaag

SEQ ID NO: 74574 - RNA, 19 nt, Artificial Sequence
  Description of Artificial Sequence: Synthetic oligonucleotide
  Sense strand starting at position 2084 of SEQ ID NO: 930
cccgauagccaauaggaua

SEQ ID NO: 74575 - RNA, 19 nt, Artificial Sequence
  Description of Artificial Sequence: Synthetic oligonucleotide
  Antisense strand to SEQ ID NO: 74494
uauccuauuggcuaucggg

SEQ ID NO: 74576 - RNA, 19 nt, Artificial Sequence
  Description of Artificial Sequence: Synthetic oligonucleotide
  Sense strand starting at position 2096 of SEQ ID NO: 930
uaggauagcucagccagaa

SEQ ID NO: 74577 - RNA, 19 nt, Artificial Sequence
  Description of Artificial Sequence: Synthetic oligonucleotide
  Antisense strand to SEQ ID NO: 74496
uucuggcugagcuauccua

SEQ ID NO: 74578 - RNA, 19 nt, Artificial Sequence
  Description of Artificial Sequence: Synthetic oligonucleotide
  Sense strand starting at position 2862 of SEQ ID NO: 930
agaggaauauaagauaaag

SEQ ID NO: 74579 - RNA, 19 nt, Artificial Sequence
  Description of Artificial Sequence: Synthetic oligonucleotide
  Antisense strand to SEQ ID NO: 74498
cuuuaucuuauauuccucu

SEQ ID NO: 74580 - RNA, 19 nt, Artificial Sequence
  Description of Artificial Sequence: Synthetic oligonucleotide
  Sense strand starting at position 2920 of SEQ ID NO: 930
cagggucaugugcacauaa

SEQ ID NO: 74581 - RNA, 19 nt, Artificial Sequence
  Description of Artificial Sequence: Synthetic oligonucleotide
  Antisense strand to SEQ ID NO: 74500
uuaugugcacaugacccug

SEQ ID NO: 74582 - RNA, 19 nt, Artificial Sequence
  Description of Artificial Sequence: Synthetic oligonucleotide
  Sense strand starting at position 2969 of SEQ ID NO: 930
acgggugcggucaauguaa

SEQ ID NO: 74583 - RNA, 19 nt, Artificial Sequence
  Description of Artificial Sequence: Synthetic oligonucleotide
  Antisense strand to SEQ ID NO: 74502
uuacauugaccgcacccgu

SEQ ID NO: 74584 - RNA, 19 nt, Artificial Sequence
  Description of Artificial Sequence: Synthetic oligonucleotide
  Sense strand starting at position 3233 of SEQ ID NO: 930
guuaaaugccaucagaauu

SEQ ID NO: 74585 - RNA, 19 nt, Artificial Sequence
  Description of Artificial Sequence: Synthetic oligonucleotide
  Antisense strand to SEQ ID NO: 74504
aauucugauggcauuuaac

SEQ ID NO: 74586 - RNA, 19 nt, Artificial Sequence
  Description of Artificial Sequence: Synthetic oligonucleotide
  Sense strand starting at position 3267 of SEQ ID NO: 930
ugcugucauggauaguaaa

SEQ ID NO: 74587 - RNA, 19 nt, Artificial Sequence
  Description of Artificial Sequence: Synthetic oligonucleotide
  Antisense strand to SEQ ID NO: 74506
uuuacuauccaugacagca

SEQ ID NO: 74588 - RNA, 19 nt, Artificial Sequence
  Description of Artificial Sequence: Synthetic oligonucleotide
  Sense strand starting at position 3571 of SEQ ID NO: 930
gacacaacaccaggugauu

SEQ ID NO: 74589 - RNA, 19 nt, Artificial Sequence
  Description of Artificial Sequence: Synthetic oligonucleotide
  Antisense strand to SEQ ID NO: 74508
aaucaccugguguuguguc

SEQ ID NO: 74590 - RNA, 19 nt, Artificial Sequence
  Description of Artificial Sequence: Synthetic oligonucleotide
  Sense strand starting at position 3596 of SEQ ID NO: 930
uuugguaaccacugacauu

SEQ ID NO: 74591 - RNA, 19 nt, Artificial Sequence
  Description of Artificial Sequence: Synthetic oligonucleotide
  Antisense strand to SEQ ID NO: 74510
aaugucagugguuaccaaa

SEQ ID NO: 74592 - RNA, 19 nt, Artificial Sequence
  Description of Artificial Sequence: Synthetic oligonucleotide
  Sense strand starting at position 3627 of SEQ ID NO: 930
ugccauauuccuuaguaag

SEQ ID NO: 74593 - RNA, 19 nt, Artificial Sequence
  Description of Artificial Sequence: Synthetic oligonucleotide
  Antisense strand to SEQ ID NO: 74512
cuuacuaaggaauauggca

SEQ ID NO: 74594 - RNA, 19 nt, Artificial Sequence
  Description of Artificial Sequence: Synthetic oligonucleotide
  Sense strand starting at position 3639 of SEQ ID NO: 930
uaguaagaaccuggucaca

SEQ ID NO: 74595 - RNA, 19 nt, Artificial Sequence
  Description of Artificial Sequence: Synthetic oligonucleotide
  Antisense strand to SEQ ID NO: 74514
ugugaccagguucuuacua

SEQ ID NO: 74596 - RNA, 19 nt, Artificial Sequence
  Description of Artificial Sequence: Synthetic oligonucleotide
  Sense strand starting at position 3641 of SEQ ID NO: 930
guaagaaccuggucacaau

SEQ ID NO: 74597 - RNA, 19 nt, Artificial Sequence
  Description of Artificial Sequence: Synthetic oligonucleotide
  Antisense strand to SEQ ID NO: 74516
auugugaccagguucuuac

SEQ ID NO: 74598 - RNA, 19 nt, Artificial Sequence
  Description of Artificial Sequence: Synthetic oligonucleotide
  Sense strand starting at position 3790 of SEQ ID NO: 931
cugggugauggugauauau

SEQ ID NO: 74599 - RNA, 19 nt, Artificial Sequence
  Description of Artificial Sequence: Synthetic oligonucleotide
  Antisense strand to SEQ ID NO: 74518
auauaucaccaucacccag

SEQ ID NO: 74600 - RNA, 19 nt, Artificial Sequence
  Description of Artificial Sequence: Synthetic oligonucleotide
  Sense strand starting at position 3766 of SEQ ID NO: 931
guuccauuauuuguguuaa

SEQ ID NO: 74601 - RNA, 19 nt, Artificial Sequence
  Description of Artificial Sequence: Synthetic oligonucleotide
  Antisense strand to SEQ ID NO: 74520
uuaacacaaauaauggaac

SEQ ID NO: 74602 - RNA, 19 nt, Artificial Sequence
  Description of Artificial Sequence: Synthetic oligonucleotide
  Sense strand starting at position 3765 of SEQ ID NO: 931
gguuccauuauuuguguua

SEQ ID NO: 74603 - RNA, 19 nt, Artificial Sequence
  Description of Artificial Sequence: Synthetic oligonucleotide
  Antisense strand to SEQ ID NO: 74522
uaacacaaauaauggaacc

SEQ ID NO: 74604 - RNA, 19 nt, Artificial Sequence
  Description of Artificial Sequence: Synthetic oligonucleotide
  Sense strand starting at position 3727 of SEQ ID NO: 931
ucagcauuacuugaaguua

SEQ ID NO: 74605 - RNA, 19 nt, Artificial Sequence
  Description of Artificial Sequence: Synthetic oligonucleotide
  Antisense strand to SEQ ID NO: 74524
uaacuucaaguaaugcuga

SEQ ID NO: 74606 - RNA, 19 nt, Artificial Sequence
  Description of Artificial Sequence: Synthetic oligonucleotide
  Sense strand starting at position 3428 of SEQ ID NO: 931
ggguuuguuccauacaaua

SEQ ID NO: 74607 - RNA, 19 nt, Artificial Sequence
  Description of Artificial Sequence: Synthetic oligonucleotide
  Antisense strand to SEQ ID NO: 74526
uauuguauggaacaaaccc

SEQ ID NO: 74608 - RNA, 19 nt, Artificial Sequence
  Description of Artificial Sequence: Synthetic oligonucleotide
  Sense strand starting at position 3312 of SEQ ID NO: 931
aguuaacaccgauaaccuu

SEQ ID NO: 74609 - RNA, 19 nt, Artificial Sequence
  Description of Artificial Sequence: Synthetic oligonucleotide
  Antisense strand to SEQ ID NO: 74528
aagguuaucgguguuaacu

SEQ ID NO: 74610 - RNA, 19 nt, Artificial Sequence
  Description of Artificial Sequence: Synthetic oligonucleotide
  Sense strand starting at position 3309 of SEQ ID NO: 931
aggaguuaacaccgauaac

SEQ ID NO: 74611 - RNA, 19 nt, Artificial Sequence
  Description of Artificial Sequence: Synthetic oligonucleotide
  Antisense strand to SEQ ID NO: 74530
guuaucgguguuaacuccu

SEQ ID NO: 74612 - RNA, 19 nt, Artificial Sequence
  Description of Artificial Sequence: Synthetic oligonucleotide
  Sense strand starting at position 3269 of SEQ ID NO: 931
auuccuuaaggagguagau

SEQ ID NO: 74613 - RNA, 19 nt, Artificial Sequence
  Description of Artificial Sequence: Synthetic oligonucleotide
  Antisense strand to SEQ ID NO: 74532
aucuaccuccuuaaggaau

SEQ ID NO: 74614 - RNA, 19 nt, Artificial Sequence
  Description of Artificial Sequence: Synthetic oligonucleotide
  Sense strand starting at position 3153 of SEQ ID NO: 931
cucucagauguguacuuaa

SEQ ID NO: 74615 - RNA, 19 nt, Artificial Sequence
  Description of Artificial Sequence: Synthetic oligonucleotide
  Antisense strand to SEQ ID NO: 74534
uuaaguacacaucugagag

SEQ ID NO: 74616 - RNA, 19 nt, Artificial Sequence
  Description of Artificial Sequence: Synthetic oligonucleotide
  Sense strand starting at position 3082 of SEQ ID NO: 931
uguguauaugaacaaaggu

SEQ ID NO: 74617 - RNA, 19 nt, Artificial Sequence
  Description of Artificial Sequence: Synthetic oligonucleotide
  Antisense strand to SEQ ID NO: 74536
accuuuguucauauacaca

SEQ ID NO: 74618 - RNA, 19 nt, Artificial Sequence
  Description of Artificial Sequence: Synthetic oligonucleotide
  Sense strand starting at position 3076 of SEQ ID NO: 931
ucaaauuguguauaugaac

SEQ ID NO: 74619 - RNA, 19 nt, Artificial Sequence
  Description of Artificial Sequence: Synthetic oligonucleotide
  Antisense strand to SEQ ID NO: 74538
guucauauacacaauuuga

SEQ ID NO: 74620 - RNA, 19 nt, Artificial Sequence
  Description of Artificial Sequence: Synthetic oligonucleotide
  Sense strand starting at position 3073 of SEQ ID NO: 931
agaucaaauuguguauaug

SEQ ID NO: 74621 - RNA, 19 nt, Artificial Sequence
  Description of Artificial Sequence: Synthetic oligonucleotide
  Antisense strand to SEQ ID NO: 74540
cauauacacaauuugaucu

SEQ ID NO: 74622 - RNA, 19 nt, Artificial Sequence
  Description of Artificial Sequence: Synthetic oligonucleotide
  Sense strand starting at position 3026 of SEQ ID NO: 931
uuguuuccuguugagaaac

SEQ ID NO: 74623 - RNA, 19 nt, Artificial Sequence
  Description of Artificial Sequence: Synthetic oligonucleotide
  Antisense strand to SEQ ID NO: 74542
guuucucaacaggaaacaa

SEQ ID NO: 74624 - RNA, 19 nt, Artificial Sequence
  Description of Artificial Sequence: Synthetic oligonucleotide
  Sense strand starting at position 2887 of SEQ ID NO: 931
uaggcauugcuauaaguaa

SEQ ID NO: 74625 - RNA, 19 nt, Artificial Sequence
  Description of Artificial Sequence: Synthetic oligonucleotide
  Antisense strand to SEQ ID NO: 74544
uuacuuauagcaaugccua

SEQ ID NO: 74626 - RNA, 19 nt, Artificial Sequence
  Description of Artificial Sequence: Synthetic oligonucleotide
  Sense strand starting at position 2791 of SEQ ID NO: 931
uguguugucagucccaguu

SEQ ID NO: 74627 - RNA, 19 nt, Artificial Sequence
  Description of Artificial Sequence: Synthetic oligonucleotide
  Antisense strand to SEQ ID NO: 74546
aacugggacugacaacaca

SEQ ID NO: 74628 - RNA, 19 nt, Artificial Sequence
  Description of Artificial Sequence: Synthetic oligonucleotide
  Sense strand starting at position 2790 of SEQ ID NO: 931
uuguguugucagucccagu

SEQ ID NO: 74629 - RNA, 19 nt, Artificial Sequence
  Description of Artificial Sequence: Synthetic oligonucleotide
  Antisense strand to SEQ ID NO: 74548
acugggacugacaacacaa

SEQ ID NO: 74630 - RNA, 19 nt, Artificial Sequence
  Description of Artificial Sequence: Synthetic oligonucleotide
  Sense strand starting at position 2097 of SEQ ID NO: 931
uaggauagcucagccagaa

SEQ ID NO: 74631 - RNA, 19 nt, Artificial Sequence
  Description of Artificial Sequence: Synthetic oligonucleotide
  Antisense strand to SEQ ID NO: 74550
uucuggcugagcuauccua

SEQ ID NO: 74632 - RNA, 19 nt, Artificial Sequence
  Description of Artificial Sequence: Synthetic oligonucleotide
  Sense strand starting at position 2085 of SEQ ID NO: 931
cccgauagccaauaggaua

SEQ ID NO: 74633 - RNA, 19 nt, Artificial Sequence
  Description of Artificial Sequence: Synthetic oligonucleotide
  Antisense strand to SEQ ID NO: 74552
uauccuauuggcuaucggg

SEQ ID NO: 74634 - RNA, 19 nt, Artificial Sequence
  Description of Artificial Sequence: Synthetic oligonucleotide
  Sense strand starting at position 1429 of SEQ ID NO: 931
gagaguggccagcauuaac

SEQ ID NO: 74635 - RNA, 19 nt, Artificial Sequence
  Description of Artificial Sequence: Synthetic oligonucleotide
  Antisense strand to SEQ ID NO: 74554
guuaaugcuggccacucuc

SEQ ID NO: 74636 - RNA, 19 nt, Artificial Sequence
  Description of Artificial Sequence: Synthetic oligonucleotide
  Sense strand starting at position 644 of SEQ ID NO: 931
gaaguuucgcaagcuuguu

SEQ ID NO: 74637 - RNA, 19 nt, Artificial Sequence
  Description of Artificial Sequence: Synthetic oligonucleotide
  Antisense strand to SEQ ID NO: 74556
aacaagcuugcgaaacuuc

SEQ ID NO: 74638 - RNA, 19 nt, Artificial Sequence
  Description of Artificial Sequence: Synthetic oligonucleotide
  Sense strand starting at position 500 of SEQ ID NO: 931
cccgauugggcggaacaau

SEQ ID NO: 74639 - RNA, 19 nt, Artificial Sequence
  Description of Artificial Sequence: Synthetic oligonucleotide
  Antisense strand to SEQ ID NO: 74558
auuguuccgcccaaucggg

SEQ ID NO: 74640 - RNA, 19 nt, Artificial Sequence
  Description of Artificial Sequence: Synthetic oligonucleotide
  Sense strand starting at position 380 of SEQ ID NO: 930
gcgagcagucugcuuagua

SEQ ID NO: 74641 - RNA, 19 nt, Artificial Sequence
  Description of Artificial Sequence: Synthetic oligonucleotide
  Antisense strand to SEQ ID NO: 74560
uacuaagcagacugcucgc

SEQ ID NO: 74642 - RNA, 19 nt, Artificial Sequence
  Description of Artificial Sequence: Synthetic oligonucleotide
  Sense strand starting at position 499 of SEQ ID NO: 930
cccgauugggcggaacaau

SEQ ID NO: 74643 - RNA, 19 nt, Artificial Sequence
  Description of Artificial Sequence: Synthetic oligonucleotide
  Antisense strand to SEQ ID NO: 74562
auuguuccgcccaaucggg

SEQ ID NO: 74644 - RNA, 19 nt, Artificial Sequence
  Description of Artificial Sequence: Synthetic oligonucleotide
  Sense strand starting at position 643 of SEQ ID NO: 930
gaaguuucgcaagcuuguu

SEQ ID NO: 74645 - RNA, 19 nt, Artificial Sequence
  Description of Artificial Sequence: Synthetic oligonucleotide
  Antisense strand to SEQ ID NO: 74564
aacaagcuugcgaaacuuc

SEQ ID NO: 74646 - RNA, 19 nt, Artificial Sequence
  Description of Artificial Sequence: Synthetic oligonucleotide
  Sense strand starting at position 1428 of SEQ ID NO: 930
gagaguggccagcauuaac

SEQ ID NO: 74647 - RNA, 19 nt, Artificial Sequence
  Description of Artificial Sequence: Synthetic oligonucleotide
  Antisense strand to SEQ ID NO: 74566
guuaaugcuggccacucuc

SEQ ID NO: 74648 - RNA, 19 nt, Artificial Sequence
  Description of Artificial Sequence: Synthetic oligonucleotide
  Sense strand starting at position 1942 of SEQ ID NO: 930
agacaugacagcgauagua

SEQ ID NO: 74649 - RNA, 19 nt, Artificial Sequence
  Description of Artificial Sequence: Synthetic oligonucleotide
  Antisense strand to SEQ ID NO: 74568
uacuaucgcugucaugucu

SEQ ID NO: 74650 - RNA, 19 nt, Artificial Sequence
  Description of Artificial Sequence: Synthetic oligonucleotide
  Sense strand starting at position 1954 of SEQ ID NO: 930
gauaguagucaccgagaga

SEQ ID NO: 74651 - RNA, 19 nt, Artificial Sequence
  Description of Artificial Sequence: Synthetic oligonucleotide
  Antisense strand to SEQ ID NO: 74570
ucucucggugacuacuauc

SEQ ID NO: 74652 - RNA, 19 nt, Artificial Sequence
  Description of Artificial Sequence: Synthetic oligonucleotide
  Sense strand starting at position 2058 of SEQ ID NO: 930
cuuugauuggcucaagcaa

SEQ ID NO: 74653 - RNA, 19 nt, Artificial Sequence
  Description of Artificial Sequence: Synthetic oligonucleotide
  Antisense strand to SEQ ID NO: 74572
uugcuugagccaaucaaag

SEQ ID NO: 74654 - RNA, 19 nt, Artificial Sequence
  Description of Artificial Sequence: Synthetic oligonucleotide
  Sense strand starting at position 2084 of SEQ ID NO: 930
cccgauagccaauaggaua

SEQ ID NO: 74655 - RNA, 19 nt, Artificial Sequence
  Description of Artificial Sequence: Synthetic oligonucleotide
  Antisense strand to SEQ ID NO: 74574
uauccuauuggcuaucggg

SEQ ID NO: 74656 - RNA, 19 nt, Artificial Sequence
  Description of Artificial Sequence: Synthetic oligonucleotide
  Sense strand starting at position 2096 of SEQ ID NO: 930
uaggauagcucagccagaa

SEQ ID NO: 74657 - RNA, 19 nt, Artificial Sequence
  Description of Artificial Sequence: Synthetic oligonucleotide
  Antisense strand to SEQ ID NO: 74576
uucuggcugagcuauccua

SEQ ID NO: 74658 - RNA, 19 nt, Artificial Sequence
  Description of Artificial Sequence: Synthetic oligonucleotide
  Sense strand starting at position 2862 of SEQ ID NO: 930
agaggaauauaagauaaag

SEQ ID NO: 74659 - RNA, 19 nt, Artificial Sequence
  Description of Artificial Sequence: Synthetic oligonucleotide
  Antisense strand to SEQ ID NO: 74578
cuuuaucuuauauuccucu

SEQ ID NO: 74660 - RNA, 19 nt, Artificial Sequence
  Description of Artificial Sequence: Synthetic oligonucleotide
  Sense strand starting at position 2920 of SEQ ID NO: 930
cagggucaugugcacauaa

SEQ ID NO: 74661 - RNA, 19 nt, Artificial Sequence
  Description of Artificial Sequence: Synthetic oligonucleotide
  Antisense strand to SEQ ID NO: 74580
uuaugugcacaugacccug

SEQ ID NO: 74662 - RNA, 19 nt, Artificial Sequence
  Description of Artificial Sequence: Synthetic oligonucleotide
  Sense strand starting at position 2969 of SEQ ID NO: 930
acgggugcggucaauguaa

SEQ ID NO: 74663 - RNA, 19 nt, Artificial Sequence
  Description of Artificial Sequence: Synthetic oligonucleotide
  Antisense strand to SEQ ID NO: 74582
uuacauugaccgcacccgu

SEQ ID NO: 74664 - RNA, 19 nt, Artificial Sequence
  Description of Artificial Sequence: Synthetic oligonucleotide
  Sense strand starting at position 3233 of SEQ ID NO: 930
guuaaaugccaucagaauu

SEQ ID NO: 74665 - RNA, 19 nt, Artificial Sequence
  Description of Artificial Sequence: Synthetic oligonucleotide
  Antisense strand to SEQ ID NO: 74584
aauucugauggcauuuaac

SEQ ID NO: 74666 - RNA, 19 nt, Artificial Sequence
  Description of Artificial Sequence: Synthetic oligonucleotide
  Sense strand starting at position 3267 of SEQ ID NO: 930
ugcugucauggauaguaaa

SEQ ID NO: 74667 - RNA, 19 nt, Artificial Sequence
  Description of Artificial Sequence: Synthetic oligonucleotide
  Antisense strand to SEQ ID NO: 74586
uuuacuauccaugacagca

SEQ ID NO: 74668 - RNA, 19 nt, Artificial Sequence
  Description of Artificial Sequence: Synthetic oligonucleotide
  Sense strand starting at position 3571 of SEQ ID NO: 930
gacacaacaccaggugauu

SEQ ID NO: 74669 - RNA, 19 nt, Artificial Sequence
  Description of Artificial Sequence: Synthetic oligonucleotide
  Antisense strand to SEQ ID NO: 74588
aaucaccugguguuguguc

SEQ ID NO: 74670 - RNA, 19 nt, Artificial Sequence
  Description of Artificial Sequence: Synthetic oligonucleotide
  Sense strand starting at position 3596 of SEQ ID NO: 930
uuugguaaccacugacauu

SEQ ID NO: 74671 - RNA, 19 nt, Artificial Sequence
  Description of Artificial Sequence: Synthetic oligonucleotide
  Antisense strand to SEQ ID NO: 74590
aaugucagugguuaccaaa

SEQ ID NO: 74672 - RNA, 19 nt, Artificial Sequence
  Description of Artificial Sequence: Synthetic oligonucleotide
  Sense strand starting at position 3627 of SEQ ID NO: 930
ugccauauuccuuaguaag

SEQ ID NO: 74673 - RNA, 19 nt, Artificial Sequence
  Description of Artificial Sequence: Synthetic oligonucleotide
  Antisense strand to SEQ ID NO: 74592
cuuacuaaggaauauggca

SEQ ID NO: 74674 - RNA, 19 nt, Artificial Sequence
  Description of Artificial Sequence: Synthetic oligonucleotide
  Sense strand starting at position 3639 of SEQ ID NO: 930
uaguaagaaccuggucaca

SEQ ID NO: 74675 - RNA, 19 nt, Artificial Sequence
  Description of Artificial Sequence: Synthetic oligonucleotide
  Antisense strand to SEQ ID NO: 74594
ugugaccagguucuuacua

SEQ ID NO: 74676 - RNA, 19 nt, Artificial Sequence
  Description of Artificial Sequence: Synthetic oligonucleotide
  Sense strand starting at position 3641 of SEQ ID NO: 930
guaagaaccuggucacaau

SEQ ID NO: 74677 - RNA, 19 nt, Artificial Sequence
  Description of Artificial Sequence: Synthetic oligonucleotide
  Antisense strand to SEQ ID NO: 74596
auugugaccagguucuuac

SEQ ID NO: 74678 - RNA, 19 nt, Artificial Sequence
  Description of Artificial Sequence: Synthetic oligonucleotide
  Sense strand starting at position 3790 of SEQ ID NO: 931
cugggugauggugauauau

SEQ ID NO: 74679 - RNA, 19 nt, Artificial Sequence
  Description of Artificial Sequence: Synthetic oligonucleotide
  Antisense strand to SEQ ID NO: 74598
auauaucaccaucacccag

SEQ ID NO: 74680 - RNA, 19 nt, Artificial Sequence
  Description of Artificial Sequence: Synthetic oligonucleotide
  Sense strand starting at position 3766 of SEQ ID NO: 931
guuccauuauuuguguuaa

SEQ ID NO: 74681 - RNA, 19 nt, Artificial Sequence
  Description of Artificial Sequence: Synthetic oligonucleotide
  Antisense strand to SEQ ID NO: 74600
uuaacacaaauaauggaac

SEQ ID NO: 74682 - RNA, 19 nt, Artificial Sequence
  Description of Artificial Sequence: Synthetic oligonucleotide
  Sense strand starting at position 3765 of SEQ ID NO: 931
gguuccauuauuuguguua

SEQ ID NO: 74683 - RNA, 19 nt, Artificial Sequence
  Description of Artificial Sequence: Synthetic oligonucleotide
  Antisense strand to SEQ ID NO: 74602
uaacacaaauaauggaacc

SEQ ID NO: 74684 - RNA, 19 nt, Artificial Sequence
  Description of Artificial Sequence: Synthetic oligonucleotide
  Sense strand starting at position 3727 of SEQ ID NO: 931
ucagcauuacuugaaguua

SEQ ID NO: 74685 - RNA, 19 nt, Artificial Sequence
  Description of Artificial Sequence: Synthetic oligonucleotide
  Antisense strand to SEQ ID NO: 74604
uaacuucaaguaaugcuga

SEQ ID NO: 74686 - RNA, 19 nt, Artificial Sequence
  Description of Artificial Sequence: Synthetic oligonucleotide
  Sense strand starting at position 3428 of SEQ ID NO: 931
ggguuuguuccauacaaua

SEQ ID NO: 74687 - RNA, 19 nt, Artificial Sequence
  Description of Artificial Sequence: Synthetic oligonucleotide
  Antisense strand to SEQ ID NO: 74606
uauuguauggaacaaaccc

SEQ ID NO: 74688 - RNA, 19 nt, Artificial Sequence
  Description of Artificial Sequence: Synthetic oligonucleotide
  Sense strand starting at position 3312 of SEQ ID NO: 931
aguuaacaccgauaaccuu

SEQ ID NO: 74689 - RNA, 19 nt, Artificial Sequence
  Description of Artificial Sequence: Synthetic oligonucleotide
  Antisense strand to SEQ ID NO: 74608
aagguuaucgguguuaacu

SEQ ID NO: 74690 - RNA, 19 nt, Artificial Sequence
  Description of Artificial Sequence: Synthetic oligonucleotide
  Sense strand starting at position 3309 of SEQ ID NO: 931
aggaguuaacaccgauaac

SEQ ID NO: 74691 - RNA, 19 nt, Artificial Sequence
  Description of Artificial Sequence: Synthetic oligonucleotide
  Antisense strand to SEQ ID NO: 74610
guuaucgguguuaacuccu

SEQ ID NO: 74692 - RNA, 19 nt, Artificial Sequence
  Description of Artificial Sequence: Synthetic oligonucleotide
  Sense strand starting at position 3269 of SEQ ID NO: 931
auuccuuaaggagguagau

SEQ ID NO: 74693 - RNA, 19 nt, Artificial Sequence
  Description of Artificial Sequence: Synthetic oligonucleotide
  Antisense strand to SEQ ID NO: 74612
aucuaccuccuuaaggaau

SEQ ID NO: 74694 - RNA, 19 nt, Artificial Sequence
  Description of Artificial Sequence: Synthetic oligonucleotide
  Sense strand starting at position 3153 of SEQ ID NO: 931
cucucagauguguacuuaa

SEQ ID NO: 74695 - RNA, 19 nt, Artificial Sequence
  Description of Artificial Sequence: Synthetic oligonucleotide
  Antisense strand to SEQ ID NO: 74614
uuaaguacacaucugagag

SEQ ID NO: 74696 - RNA, 19 nt, Artificial Sequence
  Description of Artificial Sequence: Synthetic oligonucleotide
  Sense strand starting at position 3082 of SEQ ID NO: 931
uguguauaugaacaaaggu

SEQ ID NO: 74697 - RNA, 19 nt, Artificial Sequence
  Description of Artificial Sequence: Synthetic oligonucleotide
  Antisense strand to SEQ ID NO: 74616
accuuuguucauauacaca

SEQ ID NO: 74698 - RNA, 19 nt, Artificial Sequence
  Description of Artificial Sequence: Synthetic oligonucleotide
  Sense strand starting at position 3076 of SEQ ID NO: 931
ucaaauuguguauaugaac

SEQ ID NO: 74699 - RNA, 19 nt, Artificial Sequence
  Description of Artificial Sequence: Synthetic oligonucleotide
  Antisense strand to SEQ ID NO: 74618
guucauauacacaauuuga

SEQ ID NO: 74700 - RNA, 19 nt, Artificial Sequence
  Description of Artificial Sequence: Synthetic oligonucleotide
  Sense strand starting at position 3073 of SEQ ID NO: 931
agaucaaauuguguauaug

SEQ ID NO: 74701 - RNA, 19 nt, Artificial Sequence
  Description of Artificial Sequence: Synthetic oligonucleotide
  Antisense strand to SEQ ID NO: 74620
cauauacacaauuugaucu

SEQ ID NO: 74702 - RNA, 19 nt, Artificial Sequence
  Description of Artificial Sequence: Synthetic oligonucleotide
  Sense strand starting at position 3026 of SEQ ID NO: 931
uuguuuccuguugagaaac

SEQ ID NO: 74703 - RNA, 19 nt, Artificial Sequence
  Description of Artificial Sequence: Synthetic oligonucleotide
  Antisense strand to SEQ ID NO: 74622
guuucucaacaggaaacaa

SEQ ID NO: 74704 - RNA, 19 nt, Artificial Sequence
  Description of Artificial Sequence: Synthetic oligonucleotide
  Sense strand starting at position 2887 of SEQ ID NO: 931
uaggcauugcuauaaguaa

SEQ ID NO: 74705 - RNA, 19 nt, Artificial Sequence
  Description of Artificial Sequence: Synthetic oligonucleotide
  Antisense strand to SEQ ID NO: 74624
uuacuuauagcaaugccua

SEQ ID NO: 74706 - RNA, 19 nt, Artificial Sequence
  Description of Artificial Sequence: Synthetic oligonucleotide
  Sense strand starting at position 2791 of SEQ ID NO: 931
uguguugucagucccaguu

SEQ ID NO: 74707 - RNA, 19 nt, Artificial Sequence
  Description of Artificial Sequence: Synthetic oligonucleotide
  Antisense strand to SEQ ID NO: 74626
aacugggacugacaacaca

SEQ ID NO: 74708 - RNA, 19 nt, Artificial Sequence
  Description of Artificial Sequence: Synthetic oligonucleotide
  Sense strand starting at position 2790 of SEQ ID NO: 931
uuguguugucagucccagu

SEQ ID NO: 74709 - RNA, 19 nt, Artificial Sequence
  Description of Artificial Sequence: Synthetic oligonucleotide
  Antisense strand to SEQ ID NO: 74628
acugggacugacaacacaa

SEQ ID NO: 74710 - RNA, 19 nt, Artificial Sequence
  Description of Artificial Sequence: Synthetic oligonucleotide
  Sense strand starting at position 2097 of SEQ ID NO: 931
uaggauagcucagccagaa

SEQ ID NO: 74711 - RNA, 19 nt, Artificial Sequence
  Description of Artificial Sequence: Synthetic oligonucleotide
  Antisense strand to SEQ ID NO: 74630
uucuggcugagcuauccua

SEQ ID NO: 74712 - RNA, 19 nt, Artificial Sequence
  Description of Artificial Sequence: Synthetic oligonucleotide
  Sense strand starting at position 2085 of SEQ ID NO: 931
cccgauagccaauaggaua

SEQ ID NO: 74713 - RNA, 19 nt, Artificial Sequence
  Description of Artificial Sequence: Synthetic oligonucleotide
  Antisense strand to SEQ ID NO: 74632
uauccuauuggcuaucggg

SEQ ID NO: 74714 - RNA, 19 nt, Artificial Sequence
  Description of Artificial Sequence: Synthetic oligonucleotide
  Sense strand starting at position 1429 of SEQ ID NO: 931
gagaguggccagcauuaac

SEQ ID NO: 74715 - RNA, 19 nt, Artificial Sequence
  Description of Artificial Sequence: Synthetic oligonucleotide
  Antisense strand to SEQ ID NO: 74634
guuaaugcuggccacucuc

SEQ ID NO: 74716 - RNA, 19 nt, Artificial Sequence
  Description of Artificial Sequence: Synthetic oligonucleotide
  Sense strand starting at position 644 of SEQ ID NO: 931
gaaguuucgcaagcuuguu

SEQ ID NO: 74717 - RNA, 19 nt, Artificial Sequence
  Description of Artificial Sequence: Synthetic oligonucleotide
  Antisense strand to SEQ ID NO: 74636
aacaagcuugcgaaacuuc

SEQ ID NO: 74718 - RNA, 19 nt, Artificial Sequence
  Description of Artificial Sequence: Synthetic oligonucleotide
  Sense strand starting at position 500 of SEQ ID NO: 931
cccgauugggcggaacaau

SEQ ID NO: 74719 - RNA, 19 nt, Artificial Sequence
  Description of Artificial Sequence: Synthetic oligonucleotide
  Antisense strand to SEQ ID NO: 74638
auuguuccgcccaaucggg

SEQ ID NO: 74720 - RNA, 19 nt, Artificial Sequence
  Description of Artificial Sequence: Synthetic oligonucleotide
  Sense strand starting at position 44 of SEQ ID NO: 932
ccaacagccuaauugagaa

SEQ ID NO: 74721 - RNA, 19 nt, Artificial Sequence
  Description of Artificial Sequence: Synthetic oligonucleotide
  Antisense strand to SEQ ID NO: 74640
uucucaauuaggcuguugg

SEQ ID NO: 74722 - RNA, 19 nt, Artificial Sequence
  Description of Artificial Sequence: Synthetic oligonucleotide
  Sense strand starting at position 713 of SEQ ID NO: 932
cgguucaggcaugguaaga

SEQ ID NO: 74723 - RNA, 19 nt, Artificial Sequence
  Description of Artificial Sequence: Synthetic oligonucleotide
  Antisense strand to SEQ ID NO: 74642
ucuuaccaugccugaaccg

SEQ ID NO: 74724 - RNA, 19 nt, Artificial Sequence
  Description of Artificial Sequence: Synthetic oligonucleotide
  Sense strand starting at position 809 of SEQ ID NO: 932
aaauuagggcuccgaaagu

SEQ ID NO: 74725 - RNA, 19 nt, Artificial Sequence
  Description of Artificial Sequence: Synthetic oligonucleotide
  Antisense strand to SEQ ID NO: 74644
acuuucggagcccuaauuu

SEQ ID NO: 74726 - RNA, 19 nt, Artificial Sequence
  Description of Artificial Sequence: Synthetic oligonucleotide
  Sense strand starting at position 888 of SEQ ID NO: 932
accgacucuugacuugauu

SEQ ID NO: 74727 - RNA, 19 nt, Artificial Sequence
  Description of Artificial Sequence: Synthetic oligonucleotide
  Antisense strand to SEQ ID NO: 74646
aaucaagucaagagucggu

SEQ ID NO: 74728 - RNA, 19 nt, Artificial Sequence
  Description of Artificial Sequence: Synthetic oligonucleotide
  Sense strand starting at position 910 of SEQ ID NO: 932
cgguucugaagccauauua

SEQ ID NO: 74729 - RNA, 19 nt, Artificial Sequence
  Description of Artificial Sequence: Synthetic oligonucleotide
  Antisense strand to SEQ ID NO: 74648
uaauauggcuucagaaccg

SEQ ID NO: 74730 - RNA, 19 nt, Artificial Sequence
  Description of Artificial Sequence: Synthetic oligonucleotide
  Sense strand starting at position 1033 of SEQ ID NO: 932
gucuguguuuaaccuugau

SEQ ID NO: 74731 - RNA, 19 nt, Artificial Sequence
  Description of Artificial Sequence: Synthetic oligonucleotide
  Antisense strand to SEQ ID NO: 74650
aucaagguuaaacacagac

SEQ ID NO: 74732 - RNA, 19 nt, Artificial Sequence
  Description of Artificial Sequence: Synthetic oligonucleotide
  Sense strand starting at position 1036 of SEQ ID NO: 932
uguguuuaaccuugauuuc

SEQ ID NO: 74733 - RNA, 19 nt, Artificial Sequence
  Description of Artificial Sequence: Synthetic oligonucleotide
  Antisense strand to SEQ ID NO: 74652
gaaaucaagguuaaacaca

SEQ ID NO: 74734 - RNA, 19 nt, Artificial Sequence
  Description of Artificial Sequence: Synthetic oligonucleotide
  Sense strand starting at position 1516 of SEQ ID NO: 932
augcgcuauuucgugauca

SEQ ID NO: 74735 - RNA, 19 nt, Artificial Sequence
  Description of Artificial Sequence: Synthetic oligonucleotide
  Antisense strand to SEQ ID NO: 74654
ugaucacgaaauagcgcau

SEQ ID NO: 74736 - RNA, 19 nt, Artificial Sequence
  Description of Artificial Sequence: Synthetic oligonucleotide
  Sense strand starting at position 1518 of SEQ ID NO: 932
gcgcuauuucgugaucagc

SEQ ID NO: 74737 - RNA, 19 nt, Artificial Sequence
  Description of Artificial Sequence: Synthetic oligonucleotide
  Antisense strand to SEQ ID NO: 74656
gcugaucacgaaauagcgc

SEQ ID NO: 74738 - RNA, 19 nt, Artificial Sequence
  Description of Artificial Sequence: Synthetic oligonucleotide
  Sense strand starting at position 1547 of SEQ ID NO: 932
acacuuugguggcucuuaa

SEQ ID NO: 74739 - RNA, 19 nt, Artificial Sequence
  Description of Artificial Sequence: Synthetic oligonucleotide
  Antisense strand to SEQ ID NO: 74658
uuaagagccaccaaagugu

SEQ ID NO: 74740 - RNA, 19 nt, Artificial Sequence
  Description of Artificial Sequence: Synthetic oligonucleotide
  Sense strand starting at position 1652 of SEQ ID NO: 932
acaggacagccuggauauu

SEQ ID NO: 74741 - RNA, 19 nt, Artificial Sequence
  Description of Artificial Sequence: Synthetic oligonucleotide
  Antisense strand to SEQ ID NO: 74660
aauauccaggcuguccugu

SEQ ID NO: 74742 - RNA, 19 nt, Artificial Sequence
  Description of Artificial Sequence: Synthetic oligonucleotide
  Sense strand starting at position 1713 of SEQ ID NO: 932
cuuguugagcucuucguca

SEQ ID NO: 74743 - RNA, 19 nt, Artificial Sequence
  Description of Artificial Sequence: Synthetic oligonucleotide
  Antisense strand to SEQ ID NO: 74662
ugacgaagagcucaacaag

SEQ ID NO: 74744 - RNA, 19 nt, Artificial Sequence
  Description of Artificial Sequence: Synthetic oligonucleotide
  Sense strand starting at position 1807 of SEQ ID NO: 932
uccagaauuuccgcgguca

SEQ ID NO: 74745 - RNA, 19 nt, Artificial Sequence
  Description of Artificial Sequence: Synthetic oligonucleotide
  Antisense strand to SEQ ID NO: 74664
ugaccgcggaaauucugga

SEQ ID NO: 74746 - RNA, 19 nt, Artificial Sequence
  Description of Artificial Sequence: Synthetic oligonucleotide
  Sense strand starting at position 1808 of SEQ ID NO: 932
ccagaauuuccgcggucag

SEQ ID NO: 74747 - RNA, 19 nt, Artificial Sequence
  Description of Artificial Sequence: Synthetic oligonucleotide
  Antisense strand to SEQ ID NO: 74666
cugaccgcggaaauucugg

SEQ ID NO: 74748 - RNA, 19 nt, Artificial Sequence
  Description of Artificial Sequence: Synthetic oligonucleotide
  Sense strand starting at position 2065 of SEQ ID NO: 932
ugauguaauuuauaagagc

SEQ ID NO: 74749 - RNA, 19 nt, Artificial Sequence
  Description of Artificial Sequence: Synthetic oligonucleotide
  Antisense strand to SEQ ID NO: 74668
gcucuuauaaauuacauca

SEQ ID NO: 74750 - RNA, 19 nt, Artificial Sequence
  Description of Artificial Sequence: Synthetic oligonucleotide
  Sense strand starting at position 2101 of SEQ ID NO: 932
ggaagucguuugauuggcu

SEQ ID NO: 74751 - RNA, 19 nt, Artificial Sequence
  Description of Artificial Sequence: Synthetic oligonucleotide
  Antisense strand to SEQ ID NO: 74670
agccaaucaaacgacuucc

SEQ ID NO: 74752 - RNA, 19 nt, Artificial Sequence
  Description of Artificial Sequence: Synthetic oligonucleotide
  Sense strand starting at position 2102 of SEQ ID NO: 932
gaagucguuugauuggcua

SEQ ID NO: 74753 - RNA, 19 nt, Artificial Sequence
  Description of Artificial Sequence: Synthetic oligonucleotide
  Antisense strand to SEQ ID NO: 74672
uagccaaucaaacgacuuc

SEQ ID NO: 74754 - RNA, 19 nt, Artificial Sequence
  Description of Artificial Sequence: Synthetic oligonucleotide
  Sense strand starting at position 2104 of SEQ ID NO: 932
agucguuugauuggcuaaa

SEQ ID NO: 74755 - RNA, 19 nt, Artificial Sequence
  Description of Artificial Sequence: Synthetic oligonucleotide
  Antisense strand to SEQ ID NO: 74674
uuuagccaaucaaacgacu

SEQ ID NO: 74756 - RNA, 19 nt, Artificial Sequence
  Description of Artificial Sequence: Synthetic oligonucleotide
  Sense strand starting at position 2224 of SEQ ID NO: 932
cgcugagagccacauuaaa

SEQ ID NO: 74757 - RNA, 19 nt, Artificial Sequence
  Description of Artificial Sequence: Synthetic oligonucleotide
  Antisense strand to SEQ ID NO: 74676
uuuaauguggcucucagcg

SEQ ID NO: 74758 - RNA, 19 nt, Artificial Sequence
  Description of Artificial Sequence: Synthetic oligonucleotide
  Sense strand starting at position 2256 of SEQ ID NO: 932
augccaggaucuuuaaaga

SEQ ID NO: 74759 - RNA, 19 nt, Artificial Sequence
  Description of Artificial Sequence: Synthetic oligonucleotide
  Antisense strand to SEQ ID NO: 74678
ucuuuaaagauccuggcau

SEQ ID NO: 74760 - RNA, 19 nt, Artificial Sequence
  Description of Artificial Sequence: Synthetic oligonucleotide
  Sense strand starting at position 2355 of SEQ ID NO: 932
uuaguuuacagccgggaaa

SEQ ID NO: 74761 - RNA, 19 nt, Artificial Sequence
  Description of Artificial Sequence: Synthetic oligonucleotide
  Antisense strand to SEQ ID NO: 74680
uuucccggcuguaaacuaa

SEQ ID NO: 74762 - RNA, 19 nt, Artificial Sequence
  Description of Artificial Sequence: Synthetic oligonucleotide
  Sense strand starting at position 2356 of SEQ ID NO: 932
uaguuuacagccgggaaau

SEQ ID NO: 74763 - RNA, 19 nt, Artificial Sequence
  Description of Artificial Sequence: Synthetic oligonucleotide
  Antisense strand to SEQ ID NO: 74682
auuucccggcuguaaacua

SEQ ID NO: 74764 - RNA, 19 nt, Artificial Sequence
  Description of Artificial Sequence: Synthetic oligonucleotide
  Sense strand starting at position 2357 of SEQ ID NO: 932
aguuuacagccgggaaauc

SEQ ID NO: 74765 - RNA, 19 nt, Artificial Sequence
  Description of Artificial Sequence: Synthetic oligonucleotide
  Antisense strand to SEQ ID NO: 74684
gauuucccggcuguaaacu

SEQ ID NO: 74766 - RNA, 19 nt, Artificial Sequence
  Description of Artificial Sequence: Synthetic oligonucleotide
  Sense strand starting at position 2444 of SEQ ID NO: 932
ggauucugaagccgaugau

SEQ ID NO: 74767 - RNA, 19 nt, Artificial Sequence
  Description of Artificial Sequence: Synthetic oligonucleotide
  Antisense strand to SEQ ID NO: 74686
aucaucggcuucagaaucc

SEQ ID NO: 74768 - RNA, 19 nt, Artificial Sequence
  Description of Artificial Sequence: Synthetic oligonucleotide
  Sense strand starting at position 2630 of SEQ ID NO: 932
uccgguuugaccgaggcua

SEQ ID NO: 74769 - RNA, 19 nt, Artificial Sequence
  Description of Artificial Sequence: Synthetic oligonucleotide
  Antisense strand to SEQ ID NO: 74688
uagccucggucaaaccgga

SEQ ID NO: 74770 - RNA, 19 nt, Artificial Sequence
  Description of Artificial Sequence: Synthetic oligonucleotide
  Sense strand starting at position 2632 of SEQ ID NO: 932
cgguuugaccgaggcuaga

SEQ ID NO: 74771 - RNA, 19 nt, Artificial Sequence
  Description of Artificial Sequence: Synthetic oligonucleotide
  Antisense strand to SEQ ID NO: 74690
ucuagccucggucaaaccg

SEQ ID NO: 74772 - RNA, 19 nt, Artificial Sequence
  Description of Artificial Sequence: Synthetic oligonucleotide
  Sense strand starting at position 2834 of SEQ ID NO: 932
acuuaucccgaagagucuu

SEQ ID NO: 74773 - RNA, 19 nt, Artificial Sequence
  Description of Artificial Sequence: Synthetic oligonucleotide
  Antisense strand to SEQ ID NO: 74692
aagacucuucgggauaagu

SEQ ID NO: 74774 - RNA, 19 nt, Artificial Sequence
  Description of Artificial Sequence: Synthetic oligonucleotide
  Sense strand starting at position 2909 of SEQ ID NO: 932
augccuaacugcuuacaga

SEQ ID NO: 74775 - RNA, 19 nt, Artificial Sequence
  Description of Artificial Sequence: Synthetic oligonucleotide
  Antisense strand to SEQ ID NO: 74694
ucuguaagcaguuaggcau

SEQ ID NO: 74776 - RNA, 19 nt, Artificial Sequence
  Description of Artificial Sequence: Synthetic oligonucleotide
  Sense strand starting at position 3032 of SEQ ID NO: 932
ccugaaaugcaccagcaua

SEQ ID NO: 74777 - RNA, 19 nt, Artificial Sequence
  Description of Artificial Sequence: Synthetic oligonucleotide
  Antisense strand to SEQ ID NO: 74696
uaugcuggugcauuucagg

SEQ ID NO: 74778 - RNA, 19 nt, Artificial Sequence
  Description of Artificial Sequence: Synthetic oligonucleotide
  Sense strand starting at position 3066 of SEQ ID NO: 932
gccgaaaucuacucuacuc

SEQ ID NO: 74779 - RNA, 19 nt, Artificial Sequence
  Description of Artificial Sequence: Synthetic oligonucleotide
  Antisense strand to SEQ ID NO: 74698
gaguagaguagauuucggc

SEQ ID NO: 74780 - RNA, 19 nt, Artificial Sequence
  Description of Artificial Sequence: Synthetic oligonucleotide
  Sense strand starting at position 3387 of SEQ ID NO: 932
cuuaguaucccuuaagguc

SEQ ID NO: 74781 - RNA, 19 nt, Artificial Sequence
  Description of Artificial Sequence: Synthetic oligonucleotide
  Antisense strand to SEQ ID NO: 74700
gaccuuaagggauacuaag

SEQ ID NO: 74782 - RNA, 19 nt, Artificial Sequence
  Description of Artificial Sequence: Synthetic oligonucleotide
  Sense strand starting at position 3461 of SEQ ID NO: 932
ggcggaauuuccucuguca

SEQ ID NO: 74783 - RNA, 19 nt, Artificial Sequence
  Description of Artificial Sequence: Synthetic oligonucleotide
  Antisense strand to SEQ ID NO: 74702
ugacagaggaaauuccgcc

SEQ ID NO: 74784 - RNA, 19 nt, Artificial Sequence
  Description of Artificial Sequence: Synthetic oligonucleotide
  Sense strand starting at position 3664 of SEQ ID NO: 932
uaauguugaccagggugau

SEQ ID NO: 74785 - RNA, 19 nt, Artificial Sequence
  Description of Artificial Sequence: Synthetic oligonucleotide
  Antisense strand to SEQ ID NO: 74704
aucacccuggucaacauua

SEQ ID NO: 74786 - RNA, 19 nt, Artificial Sequence
  Description of Artificial Sequence: Synthetic oligonucleotide
  Sense strand starting at position 3695 of SEQ ID NO: 932
accucaaaucucgaauguu

SEQ ID NO: 74787 - RNA, 19 nt, Artificial Sequence
  Description of Artificial Sequence: Synthetic oligonucleotide
  Antisense strand to SEQ ID NO: 74706
aacauucgagauuugaggu

SEQ ID NO: 74788 - RNA, 19 nt, Artificial Sequence
  Description of Artificial Sequence: Synthetic oligonucleotide
  Sense strand starting at position 3884 of SEQ ID NO: 932
auuuauuggaugugugcua

SEQ ID NO: 74789 - RNA, 19 nt, Artificial Sequence
  Description of Artificial Sequence: Synthetic oligonucleotide
  Antisense strand to SEQ ID NO: 74708
uagcacacauccaauaaau

SEQ ID NO: 74790 - RNA, 19 nt, Artificial Sequence
  Description of Artificial Sequence: Synthetic oligonucleotide
  Sense strand starting at position 3905 of SEQ ID NO: 932
gggccauggguguauagau

SEQ ID NO: 74791 - RNA, 19 nt, Artificial Sequence
  Description of Artificial Sequence: Synthetic oligonucleotide
  Antisense strand to SEQ ID NO: 74710
aucuauacacccauggccc

SEQ ID NO: 74792 - RNA, 19 nt, Artificial Sequence
  Description of Artificial Sequence: Synthetic oligonucleotide
  Sense strand starting at position 3914 of SEQ ID NO: 932
guguauagauaauugaaag

SEQ ID NO: 74793 - RNA, 19 nt, Artificial Sequence
  Description of Artificial Sequence: Synthetic oligonucleotide
  Antisense strand to SEQ ID NO: 74712
cuuucaauuaucuauacac

SEQ ID NO: 74794 - RNA, 19 nt, Artificial Sequence
  Description of Artificial Sequence: Synthetic oligonucleotide
  Sense strand starting at position 3937 of SEQ ID NO: 932
acaaacaagucugugauga

SEQ ID NO: 74795 - RNA, 19 nt, Artificial Sequence
  Description of Artificial Sequence: Synthetic oligonucleotide
  Antisense strand to SEQ ID NO: 74714
ucaucacagacuuguuugu

SEQ ID NO: 74796 - RNA, 19 nt, Artificial Sequence
  Description of Artificial Sequence: Synthetic oligonucleotide
  Sense strand starting at position 3938 of SEQ ID NO: 932
caaacaagucugugaugaa

SEQ ID NO: 74797 - RNA, 19 nt, Artificial Sequence
  Description of Artificial Sequence: Synthetic oligonucleotide
  Antisense strand to SEQ ID NO: 74716
uucaucacagacuuguuug

SEQ ID NO: 74798 - RNA, 19 nt, Artificial Sequence
  Description of Artificial Sequence: Synthetic oligonucleotide
  Sense strand starting at position 3980 of SEQ ID NO: 932
ucuggugaacucugagagu

SEQ ID NO: 74799 - RNA, 19 nt, Artificial Sequence
  Description of Artificial Sequence: Synthetic oligonucleotide
  Antisense strand to SEQ ID NO: 74718
acucucagaguucaccaga

SEQ ID NO: 74800 - RNA, 19 nt, Artificial Sequence
  Description of Artificial Sequence: Synthetic oligonucleotide
  Sense strand starting at position 3930 of SEQ ID NO: 933
ggagguggcaaugguagau

SEQ ID NO: 74801 - RNA, 19 nt, Artificial Sequence
  Description of Artificial Sequence: Synthetic oligonucleotide
  Antisense strand to SEQ ID NO: 74720
aucuaccauugccaccucc

SEQ ID NO: 74802 - RNA, 19 nt, Artificial Sequence
  Description of Artificial Sequence: Synthetic oligonucleotide
  Sense strand starting at position 3832 of SEQ ID NO: 933
ggaaauguucuuggagcua

SEQ ID NO: 74803 - RNA, 19 nt, Artificial Sequence
  Description of Artificial Sequence: Synthetic oligonucleotide
  Antisense strand to SEQ ID NO: 74722
uagcuccaagaacauuucc

SEQ ID NO: 74804 - RNA, 19 nt, Artificial Sequence
  Description of Artificial Sequence: Synthetic oligonucleotide
  Sense strand starting at position 3800 of SEQ ID NO: 933
ccauuagauguaugugaag

SEQ ID NO: 74805 - RNA, 19 nt, Artificial Sequence
  Description of Artificial Sequence: Synthetic oligonucleotide
  Antisense strand to SEQ ID NO: 74724
cuucacauacaucuaaugg

SEQ ID NO: 74806 - RNA, 19 nt, Artificial Sequence
  Description of Artificial Sequence: Synthetic oligonucleotide
  Sense strand starting at position 3720 of SEQ ID NO: 933
ucuaauauuguuggguuaa

SEQ ID NO: 74807 - RNA, 19 nt, Artificial Sequence
  Description of Artificial Sequence: Synthetic oligonucleotide
  Antisense strand to SEQ ID NO: 74726
uuaacccaacaauauuaga

SEQ ID NO: 74808 - RNA, 19 nt, Artificial Sequence
  Description of Artificial Sequence: Synthetic oligonucleotide
  Sense strand starting at position 3718 of SEQ ID NO: 933
gaucuaauauuguuggguu

SEQ ID NO: 74809 - RNA, 19 nt, Artificial Sequence
  Description of Artificial Sequence: Synthetic oligonucleotide
  Antisense strand to SEQ ID NO: 74728
aacccaacaauauuagauc

SEQ ID NO: 74810 - RNA, 19 nt, Artificial Sequence
  Description of Artificial Sequence: Synthetic oligonucleotide
  Sense strand starting at position 3701 of SEQ ID NO: 933
cuuaaauacuacguauuga

SEQ ID NO: 74811 - RNA, 19 nt, Artificial Sequence
  Description of Artificial Sequence: Synthetic oligonucleotide
  Antisense strand to SEQ ID NO: 74730
ucaauacguaguauuuaag

SEQ ID NO: 74812 - RNA, 19 nt, Artificial Sequence
  Description of Artificial Sequence: Synthetic oligonucleotide
  Sense strand starting at position 3632 of SEQ ID NO: 933
uucucaagcccuugacaga

SEQ ID NO: 74813 - RNA, 19 nt, Artificial Sequence
  Description of Artificial Sequence: Synthetic oligonucleotide
  Antisense strand to SEQ ID NO: 74732
ucugucaagggcuugagaa

SEQ ID NO: 74814 - RNA, 19 nt, Artificial Sequence
  Description of Artificial Sequence: Synthetic oligonucleotide
  Sense strand starting at position 3557 of SEQ ID NO: 933
auacuugccugucucauuu

SEQ ID NO: 74815 - RNA, 19 nt, Artificial Sequence
  Description of Artificial Sequence: Synthetic oligonucleotide
  Antisense strand to SEQ ID NO: 74734
aaaugagacaggcaaguau

SEQ ID NO: 74816 - RNA, 19 nt, Artificial Sequence
  Description of Artificial Sequence: Synthetic oligonucleotide
  Sense strand starting at position 3478 of SEQ ID NO: 933
aggcacuuaccauguagau

SEQ ID NO: 74817 - RNA, 19 nt, Artificial Sequence
  Description of Artificial Sequence: Synthetic oligonucleotide
  Antisense strand to SEQ ID NO: 74736
aucuacaugguaagugccu

SEQ ID NO: 74818 - RNA, 19 nt, Artificial Sequence
  Description of Artificial Sequence: Synthetic oligonucleotide
  Sense strand starting at position 3427 of SEQ ID NO: 933
auuuaauggucugugcuuu

SEQ ID NO: 74819 - RNA, 19 nt, Artificial Sequence
  Description of Artificial Sequence: Synthetic oligonucleotide
  Antisense strand to SEQ ID NO: 74738
aaagcacagaccauuaaau

SEQ ID NO: 74820 - RNA, 19 nt, Artificial Sequence
  Description of Artificial Sequence: Synthetic oligonucleotide
  Sense strand starting at position 3426 of SEQ ID NO: 933
cauuuaauggucugugcuu

SEQ ID NO: 74821 - RNA, 19 nt, Artificial Sequence
  Description of Artificial Sequence: Synthetic oligonucleotide
  Antisense strand to SEQ ID NO: 74740
aagcacagaccauuaaaug

SEQ ID NO: 74822 - RNA, 19 nt, Artificial Sequence
  Description of Artificial Sequence: Synthetic oligonucleotide
  Sense strand starting at position 3305 of SEQ ID NO: 933
uccugauugggcgacaaga

SEQ ID NO: 74823 - RNA, 19 nt, Artificial Sequence
  Description of Artificial Sequence: Synthetic oligonucleotide
  Antisense strand to SEQ ID NO: 74742
ucuugucgcccaaucagga

SEQ ID NO: 74824 - RNA, 19 nt, Artificial Sequence
  Description of Artificial Sequence: Synthetic oligonucleotide
  Sense strand starting at position 3216 of SEQ ID NO: 933
accaguucugccgugcgau

SEQ ID NO: 74825 - RNA, 19 nt, Artificial Sequence
  Description of Artificial Sequence: Synthetic oligonucleotide
  Antisense strand to SEQ ID NO: 74744
aucgcacggcagaacuggu

SEQ ID NO: 74826 - RNA, 19 nt, Artificial Sequence
  Description of Artificial Sequence: Synthetic oligonucleotide
  Sense strand starting at position 3169 of SEQ ID NO: 933
gacagcucuguaugacuga

SEQ ID NO: 74827 - RNA, 19 nt, Artificial Sequence
  Description of Artificial Sequence: Synthetic oligonucleotide
  Antisense strand to SEQ ID NO: 74746
ucagucauacagagcuguc

SEQ ID NO: 74828 - RNA, 19 nt, Artificial Sequence
  Description of Artificial Sequence: Synthetic oligonucleotide
  Sense strand starting at position 3167 of SEQ ID NO: 933
gugacagcucuguaugacu

SEQ ID NO: 74829 - RNA, 19 nt, Artificial Sequence
  Description of Artificial Sequence: Synthetic oligonucleotide
  Antisense strand to SEQ ID NO: 74748
agucauacagagcugucac

SEQ ID NO: 74830 - RNA, 19 nt, Artificial Sequence
  Description of Artificial Sequence: Synthetic oligonucleotide
  Sense strand starting at position 3163 of SEQ ID NO: 933
cugcgugacagcucuguau

SEQ ID NO: 74831 - RNA, 19 nt, Artificial Sequence
  Description of Artificial Sequence: Synthetic oligonucleotide
  Antisense strand to SEQ ID NO: 74750
auacagagcugucacgcag

SEQ ID NO: 74832 - RNA, 19 nt, Artificial Sequence
  Description of Artificial Sequence: Synthetic oligonucleotide
  Sense strand starting at position 3100 of SEQ ID NO: 933
ggcugaguucggcugucau

SEQ ID NO: 74833 - RNA, 19 nt, Artificial Sequence
  Description of Artificial Sequence: Synthetic oligonucleotide
  Antisense strand to SEQ ID NO: 74752
augacagccgaacucagcc

SEQ ID NO: 74834 - RNA, 19 nt, Artificial Sequence
  Description of Artificial Sequence: Synthetic oligonucleotide
  Sense strand starting at position 2868 of SEQ ID NO: 933
ggucaugggaaauggcaua

SEQ ID NO: 74835 - RNA, 19 nt, Artificial Sequence
  Description of Artificial Sequence: Synthetic oligonucleotide
  Antisense strand to SEQ ID NO: 74754
uaugccauuucccaugacc

SEQ ID NO: 74836 - RNA, 19 nt, Artificial Sequence
  Description of Artificial Sequence: Synthetic oligonucleotide
  Sense strand starting at position 2862 of SEQ ID NO: 933
ugugaaggucaugggaaau

SEQ ID NO: 74837 - RNA, 19 nt, Artificial Sequence
  Description of Artificial Sequence: Synthetic oligonucleotide
  Antisense strand to SEQ ID NO: 74756
auuucccaugaccuucaca

SEQ ID NO: 74838 - RNA, 19 nt, Artificial Sequence
  Description of Artificial Sequence: Synthetic oligonucleotide
  Sense strand starting at position 2251 of SEQ ID NO: 933
ugcauaaggugguuauaaa

SEQ ID NO: 74839 - RNA, 19 nt, Artificial Sequence
  Description of Artificial Sequence: Synthetic oligonucleotide
  Antisense strand to SEQ ID NO: 74758
uuuauaaccaccuuaugca

SEQ ID NO: 74840 - RNA, 19 nt, Artificial Sequence
  Description of Artificial Sequence: Synthetic oligonucleotide
  Sense strand starting at position 2150 of SEQ ID NO: 933
ggccaaucaagucaagagu

SEQ ID NO: 74841 - RNA, 19 nt, Artificial Sequence
  Description of Artificial Sequence: Synthetic oligonucleotide
  Antisense strand to SEQ ID NO: 74760
acucuugacuugauuggcc

SEQ ID NO: 74842 - RNA, 19 nt, Artificial Sequence
  Description of Artificial Sequence: Synthetic oligonucleotide
  Sense strand starting at position 1560 of SEQ ID NO: 933
aaacuuggguggcucuaaa

SEQ ID NO: 74843 - RNA, 19 nt, Artificial Sequence
  Description of Artificial Sequence: Synthetic oligonucleotide
  Antisense strand to SEQ ID NO: 74762
uuuagagccacccaaguuu

SEQ ID NO: 74844 - RNA, 19 nt, Artificial Sequence
  Description of Artificial Sequence: Synthetic oligonucleotide
  Sense strand starting at position 1401 of SEQ ID NO: 933
uguccuguugcccaagaaa

SEQ ID NO: 74845 - RNA, 19 nt, Artificial Sequence
  Description of Artificial Sequence: Synthetic oligonucleotide
  Antisense strand to SEQ ID NO: 74764
uuucuugggcaacaggaca

SEQ ID NO: 74846 - RNA, 19 nt, Artificial Sequence
  Description of Artificial Sequence: Synthetic oligonucleotide
  Sense strand starting at position 1332 of SEQ ID NO: 933
cgaagagcucaacaaguua

SEQ ID NO: 74847 - RNA, 19 nt, Artificial Sequence
  Description of Artificial Sequence: Synthetic oligonucleotide
  Antisense strand to SEQ ID NO: 74766
uaacuuguugagcucuucg

SEQ ID NO: 74848 - RNA, 19 nt, Artificial Sequence
  Description of Artificial Sequence: Synthetic oligonucleotide
  Sense strand starting at position 1311 of SEQ ID NO: 933
gcaacuagccgugaggaau

SEQ ID NO: 74849 - RNA, 19 nt, Artificial Sequence
  Description of Artificial Sequence: Synthetic oligonucleotide
  Antisense strand to SEQ ID NO: 74768
auuccucacggcuaguugc

SEQ ID NO: 74850 - RNA, 19 nt, Artificial Sequence
  Description of Artificial Sequence: Synthetic oligonucleotide
  Sense strand starting at position 832 of SEQ ID NO: 933
cagcgauugguagauacuu

SEQ ID NO: 74851 - RNA, 19 nt, Artificial Sequence
  Description of Artificial Sequence: Synthetic oligonucleotide
  Antisense strand to SEQ ID NO: 74770
aaguaucuaccaaucgcug

SEQ ID NO: 74852 - RNA, 19 nt, Artificial Sequence
  Description of Artificial Sequence: Synthetic oligonucleotide
  Sense strand starting at position 684 of SEQ ID NO: 933
ggauuucccggcuguaaac

SEQ ID NO: 74853 - RNA, 19 nt, Artificial Sequence
  Description of Artificial Sequence: Synthetic oligonucleotide
  Antisense strand to SEQ ID NO: 74772
guuuacagccgggaaaucc

SEQ ID NO: 74854 - RNA, 19 nt, Artificial Sequence
  Description of Artificial Sequence: Synthetic oligonucleotide
  Sense strand starting at position 681 of SEQ ID NO: 933
uugggauuucccggcugua

SEQ ID NO: 74855 - RNA, 19 nt, Artificial Sequence
  Description of Artificial Sequence: Synthetic oligonucleotide
  Antisense strand to SEQ ID NO: 74774
uacagccgggaaaucccaa

SEQ ID NO: 74856 - RNA, 19 nt, Artificial Sequence
  Description of Artificial Sequence: Synthetic oligonucleotide
  Sense strand starting at position 635 of SEQ ID NO: 933
uaacucuccgucuaaggau

SEQ ID NO: 74857 - RNA, 19 nt, Artificial Sequence
  Description of Artificial Sequence: Synthetic oligonucleotide
  Antisense strand to SEQ ID NO: 74776
auccuuagacggagaguua

SEQ ID NO: 74858 - RNA, 19 nt, Artificial Sequence
  Description of Artificial Sequence: Synthetic oligonucleotide
  Sense strand starting at position 618 of SEQ ID NO: 933
cuacucuuucgugagagua

SEQ ID NO: 74859 - RNA, 19 nt, Artificial Sequence
  Description of Artificial Sequence: Synthetic oligonucleotide
  Antisense strand to SEQ ID NO: 74778
uacucucacgaaagaguag

SEQ ID NO: 74860 - RNA, 19 nt, Artificial Sequence
  Description of Artificial Sequence: Synthetic oligonucleotide
  Sense strand starting at position 210 of SEQ ID NO: 933
gacucuucgggauaaguga

SEQ ID NO: 74861 - RNA, 19 nt, Artificial Sequence
  Description of Artificial Sequence: Synthetic oligonucleotide
  Antisense strand to SEQ ID NO: 74780
ucacuuaucccgaagaguc

SEQ ID NO: 74862 - RNA, 19 nt, Artificial Sequence
  Description of Artificial Sequence: Synthetic oligonucleotide
  Sense strand starting at position 204 of SEQ ID NO: 933
ggguaagacucuucgggau

SEQ ID NO: 74863 - RNA, 19 nt, Artificial Sequence
  Description of Artificial Sequence: Synthetic oligonucleotide
  Antisense strand to SEQ ID NO: 74782
aucccgaagagucuuaccc

SEQ ID NO: 74864 - RNA, 19 nt, Artificial Sequence
  Description of Artificial Sequence: Synthetic oligonucleotide
  Sense strand starting at position 193 of SEQ ID NO: 933
agcauauaaauggguaaga

SEQ ID NO: 74865 - RNA, 19 nt, Artificial Sequence
  Description of Artificial Sequence: Synthetic oligonucleotide
  Antisense strand to SEQ ID NO: 74784
ucuuacccauuuauaugcu

SEQ ID NO: 74866 - RNA, 19 nt, Artificial Sequence
  Description of Artificial Sequence: Synthetic oligonucleotide
  Sense strand starting at position 168 of SEQ ID NO: 933
gaaacaaauuuggacguua

SEQ ID NO: 74867 - RNA, 19 nt, Artificial Sequence
  Description of Artificial Sequence: Synthetic oligonucleotide
  Antisense strand to SEQ ID NO: 74786
uaacguccaaauuuguuuc

SEQ ID NO: 74868 - RNA, 19 nt, Artificial Sequence
  Description of Artificial Sequence: Synthetic oligonucleotide
  Sense strand starting at position 125 of SEQ ID NO: 933
ugaaguauucuguaagcag

SEQ ID NO: 74869 - RNA, 19 nt, Artificial Sequence
  Description of Artificial Sequence: Synthetic oligonucleotide
  Antisense strand to SEQ ID NO: 74788
cugcuuacagaauacuuca

SEQ ID NO: 74870 - RNA, 19 nt, Artificial Sequence
  Description of Artificial Sequence: Synthetic oligonucleotide
  Sense strand starting at position 113 of SEQ ID NO: 933
ggauaaguagguugaagua

SEQ ID NO: 74871 - RNA, 19 nt, Artificial Sequence
  Description of Artificial Sequence: Synthetic oligonucleotide
  Antisense strand to SEQ ID NO: 74790
uacuucaaccuacuuaucc

SEQ ID NO: 74872 - RNA, 19 nt, Artificial Sequence
  Description of Artificial Sequence: Synthetic oligonucleotide
  Sense strand starting at position 110 of SEQ ID NO: 933
uugggauaaguagguugaa

SEQ ID NO: 74873 - RNA, 19 nt, Artificial Sequence
  Description of Artificial Sequence: Synthetic oligonucleotide
  Antisense strand to SEQ ID NO: 74792
uucaaccuacuuaucccaa

SEQ ID NO: 74874 - RNA, 19 nt, Artificial Sequence
  Description of Artificial Sequence: Synthetic oligonucleotide
  Sense strand starting at position 84 of SEQ ID NO: 933
gguagaguuugaguuugag

SEQ ID NO: 74875 - RNA, 19 nt, Artificial Sequence
  Description of Artificial Sequence: Synthetic oligonucleotide
  Antisense strand to SEQ ID NO: 74794
cucaaacucaaacucuacc

SEQ ID NO: 74876 - RNA, 19 nt, Artificial Sequence
  Description of Artificial Sequence: Synthetic oligonucleotide
  Sense strand starting at position 59 of SEQ ID NO: 933
augaguucgcguucggaua

SEQ ID NO: 74877 - RNA, 19 nt, Artificial Sequence
  Description of Artificial Sequence: Synthetic oligonucleotide
  Antisense strand to SEQ ID NO: 74796
uauccgaacgcgaacucau

SEQ ID NO: 74878 - RNA, 19 nt, Artificial Sequence
  Description of Artificial Sequence: Synthetic oligonucleotide
  Sense strand starting at position 57 of SEQ ID NO: 933
guaugaguucgcguucgga

SEQ ID NO: 74879 - RNA, 19 nt, Artificial Sequence
  Description of Artificial Sequence: Synthetic oligonucleotide
  Antisense strand to SEQ ID NO: 74798
uccgaacgcgaacucauac

SEQ ID NO: 74880 - RNA, 19 nt, Artificial Sequence
  Description of Artificial Sequence: Synthetic oligonucleotide
  Sense strand starting at position 40 of SEQ ID NO: 934
gcaauuguccugcaucuga

SEQ ID NO: 74881 - RNA, 19 nt, Artificial Sequence
  Description of Artificial Sequence: Synthetic oligonucleotide
  Antisense strand to SEQ ID NO: 74800
ucagaugcaggacaauugc

SEQ ID NO: 74882 - RNA, 19 nt, Artificial Sequence
  Description of Artificial Sequence: Synthetic oligonucleotide
  Sense strand starting at position 132 of SEQ ID NO: 934
ggagauuaacucuguaguc

SEQ ID NO: 74883 - RNA, 19 nt, Artificial Sequence
  Description of Artificial Sequence: Synthetic oligonucleotide
  Antisense strand to SEQ ID NO: 74802
gacuacagaguuaaucucc

SEQ ID NO: 74884 - RNA, 19 nt, Artificial Sequence
  Description of Artificial Sequence: Synthetic oligonucleotide
  Sense strand starting at position 184 of SEQ ID NO: 934
ugaggugguaaguguaaau

SEQ ID NO: 74885 - RNA, 19 nt, Artificial Sequence
  Description of Artificial Sequence: Synthetic oligonucleotide
  Antisense strand to SEQ ID NO: 74804
auuuacacuuaccaccuca

SEQ ID NO: 74886 - RNA, 19 nt, Artificial Sequence
  Description of Artificial Sequence: Synthetic oligonucleotide
  Sense strand starting at position 267 of SEQ ID NO: 934
ggcucuuuccagugaccaa

SEQ ID NO: 74887 - RNA, 19 nt, Artificial Sequence
  Description of Artificial Sequence: Synthetic oligonucleotide
  Antisense strand to SEQ ID NO: 74806
uuggucacuggaaagagcc

SEQ ID NO: 74888 - RNA, 19 nt, Artificial Sequence
  Description of Artificial Sequence: Synthetic oligonucleotide
  Sense strand starting at position 286 of SEQ ID NO: 934
cacgcugaauuugaugaaa

SEQ ID NO: 74889 - RNA, 19 nt, Artificial Sequence
  Description of Artificial Sequence: Synthetic oligonucleotide
  Antisense strand to SEQ ID NO: 74808
uuucaucaaauucagcgug

SEQ ID NO: 74890 - RNA, 19 nt, Artificial Sequence
  Description of Artificial Sequence: Synthetic oligonucleotide
  Sense strand starting at position 306 of SEQ ID NO: 934
uccauaagagguuaugcua

SEQ ID NO: 74891 - RNA, 19 nt, Artificial Sequence
  Description of Artificial Sequence: Synthetic oligonucleotide
  Antisense strand to SEQ ID NO: 74810
uagcauaaccucuuaugga

SEQ ID NO: 74892 - RNA, 19 nt, Artificial Sequence
  Description of Artificial Sequence: Synthetic oligonucleotide
  Sense strand starting at position 309 of SEQ ID NO: 934
auaagagguuaugcuaaac

SEQ ID NO: 74893 - RNA, 19 nt, Artificial Sequence
  Description of Artificial Sequence: Synthetic oligonucleotide
  Antisense strand to SEQ ID NO: 74812
guuuagcauaaccucuuau

SEQ ID NO: 74894 - RNA, 19 nt, Artificial Sequence
  Description of Artificial Sequence: Synthetic oligonucleotide
  Sense strand starting at position 332 of SEQ ID NO: 934
aagcauaaggguggaucua

SEQ ID NO: 74895 - RNA, 19 nt, Artificial Sequence
  Description of Artificial Sequence: Synthetic oligonucleotide
  Antisense strand to SEQ ID NO: 74814
uagauccacccuuaugcuu

SEQ ID NO: 74896 - RNA, 19 nt, Artificial Sequence
  Description of Artificial Sequence: Synthetic oligonucleotide
  Sense strand starting at position 407 of SEQ ID NO: 934
guugcacugaggugacuaa

SEQ ID NO: 74897 - RNA, 19 nt, Artificial Sequence
  Description of Artificial Sequence: Synthetic oligonucleotide
  Antisense strand to SEQ ID NO: 74816
uuagucaccucagugcaac

SEQ ID NO: 74898 - RNA, 19 nt, Artificial Sequence
  Description of Artificial Sequence: Synthetic oligonucleotide
  Sense strand starting at position 570 of SEQ ID NO: 934
uuagaucaauacguaguau

SEQ ID NO: 74899 - RNA, 19 nt, Artificial Sequence
  Description of Artificial Sequence: Synthetic oligonucleotide
  Antisense strand to SEQ ID NO: 74818
auacuacguauugaucuaa

SEQ ID NO: 74900 - RNA, 19 nt, Artificial Sequence
  Description of Artificial Sequence: Synthetic oligonucleotide
  Sense strand starting at position 581 of SEQ ID NO: 934
cguaguauuuaagugucca

SEQ ID NO: 74901 - RNA, 19 nt, Artificial Sequence
  Description of Artificial Sequence: Synthetic oligonucleotide
  Antisense strand to SEQ ID NO: 74820
uggacacuuaaauacuacg

SEQ ID NO: 74902 - RNA, 19 nt, Artificial Sequence
  Description of Artificial Sequence: Synthetic oligonucleotide
  Sense strand starting at position 582 of SEQ ID NO: 934
guaguauuuaaguguccau

SEQ ID NO: 74903 - RNA, 19 nt, Artificial Sequence
  Description of Artificial Sequence: Synthetic oligonucleotide
  Antisense strand to SEQ ID NO: 74822
auggacacuuaaauacuac

SEQ ID NO: 74904 - RNA, 19 nt, Artificial Sequence
  Description of Artificial Sequence: Synthetic oligonucleotide
  Sense strand starting at position 598 of SEQ ID NO: 934
cauaaugugccaggcugaa

SEQ ID NO: 74905 - RNA, 19 nt, Artificial Sequence
  Description of Artificial Sequence: Synthetic oligonucleotide
  Antisense strand to SEQ ID NO: 74824
uucagccuggcacauuaug

SEQ ID NO: 74906 - RNA, 19 nt, Artificial Sequence
  Description of Artificial Sequence: Synthetic oligonucleotide
  Sense strand starting at position 645 of SEQ ID NO: 934
cugucaagggcuugagaau

SEQ ID NO: 74907 - RNA, 19 nt, Artificial Sequence
  Description of Artificial Sequence: Synthetic oligonucleotide
  Antisense strand to SEQ ID NO: 74826
auucucaagcccuugacag

SEQ ID NO: 74908 - RNA, 19 nt, Artificial Sequence
  Description of Artificial Sequence: Synthetic oligonucleotide
  Sense strand starting at position 744 of SEQ ID NO: 934
cgcgaauuccugaguggau

SEQ ID NO: 74909 - RNA, 19 nt, Artificial Sequence
  Description of Artificial Sequence: Synthetic oligonucleotide
  Antisense strand to SEQ ID NO: 74828
auccacucaggaauucgcg

SEQ ID NO: 74910 - RNA, 19 nt, Artificial Sequence
  Description of Artificial Sequence: Synthetic oligonucleotide
  Sense strand starting at position 745 of SEQ ID NO: 934
gcgaauuccugaguggaug

SEQ ID NO: 74911 - RNA, 19 nt, Artificial Sequence
  Description of Artificial Sequence: Synthetic oligonucleotide
  Antisense strand to SEQ ID NO: 74830
cauccacucaggaauucgc

SEQ ID NO: 74912 - RNA, 19 nt, Artificial Sequence
  Description of Artificial Sequence: Synthetic oligonucleotide
  Sense strand starting at position 746 of SEQ ID NO: 934
cgaauuccugaguggauga

SEQ ID NO: 74913 - RNA, 19 nt, Artificial Sequence
  Description of Artificial Sequence: Synthetic oligonucleotide
  Antisense strand to SEQ ID NO: 74832
ucauccacucaggaauucg

SEQ ID NO: 74914 - RNA, 19 nt, Artificial Sequence
  Description of Artificial Sequence: Synthetic oligonucleotide
  Sense strand starting at position 770 of SEQ ID NO: 934
gucucugagaggugacuuu

SEQ ID NO: 74915 - RNA, 19 nt, Artificial Sequence
  Description of Artificial Sequence: Synthetic oligonucleotide
  Antisense strand to SEQ ID NO: 74834
aaagucaccucucagagac

SEQ ID NO: 74916 - RNA, 19 nt, Artificial Sequence
  Description of Artificial Sequence: Synthetic oligonucleotide
  Sense strand starting at position 793 of SEQ ID NO: 934
cccguaucuacaugguaag

SEQ ID NO: 74917 - RNA, 19 nt, Artificial Sequence
  Description of Artificial Sequence: Synthetic oligonucleotide
  Antisense strand to SEQ ID NO: 74836
cuuaccauguagauacggg

SEQ ID NO: 74918 - RNA, 19 nt, Artificial Sequence
  Description of Artificial Sequence: Synthetic oligonucleotide
  Sense strand starting at position 1152 of SEQ ID NO: 934
aauuguguccuggaguucu

SEQ ID NO: 74919 - RNA, 19 nt, Artificial Sequence
  Description of Artificial Sequence: Synthetic oligonucleotide
  Antisense strand to SEQ ID NO: 74838
agaacuccaggacacaauu

SEQ ID NO: 74920 - RNA, 19 nt, Artificial Sequence
  Description of Artificial Sequence: Synthetic oligonucleotide
  Sense strand starting at position 1278 of SEQ ID NO: 934
ccaacagccuaauugagaa

SEQ ID NO: 74921 - RNA, 19 nt, Artificial Sequence
  Description of Artificial Sequence: Synthetic oligonucleotide
  Antisense strand to SEQ ID NO: 74840
uucucaauuaggcuguugg

SEQ ID NO: 74922 - RNA, 19 nt, Artificial Sequence
  Description of Artificial Sequence: Synthetic oligonucleotide
  Sense strand starting at position 2043 of SEQ ID NO: 934
aaauuagggcuccgaaagu

SEQ ID NO: 74923 - RNA, 19 nt, Artificial Sequence
  Description of Artificial Sequence: Synthetic oligonucleotide
  Antisense strand to SEQ ID NO: 74842
acuuucggagcccuaauuu

SEQ ID NO: 74924 - RNA, 19 nt, Artificial Sequence
  Description of Artificial Sequence: Synthetic oligonucleotide
  Sense strand starting at position 2122 of SEQ ID NO: 934
accgacucuugacuugauu

SEQ ID NO: 74925 - RNA, 19 nt, Artificial Sequence
  Description of Artificial Sequence: Synthetic oligonucleotide
  Antisense strand to SEQ ID NO: 74844
aaucaagucaagagucggu

SEQ ID NO: 74926 - RNA, 19 nt, Artificial Sequence
  Description of Artificial Sequence: Synthetic oligonucleotide
  Sense strand starting at position 2144 of SEQ ID NO: 934
cgguucugaagccauauua

SEQ ID NO: 74927 - RNA, 19 nt, Artificial Sequence
  Description of Artificial Sequence: Synthetic oligonucleotide
  Antisense strand to SEQ ID NO: 74846
uaauauggcuucagaaccg

SEQ ID NO: 74928 - RNA, 19 nt, Artificial Sequence
  Description of Artificial Sequence: Synthetic oligonucleotide
  Sense strand starting at position 2270 of SEQ ID NO: 934
uguguuuaaccuugauuuc

SEQ ID NO: 74929 - RNA, 19 nt, Artificial Sequence
  Description of Artificial Sequence: Synthetic oligonucleotide
  Antisense strand to SEQ ID NO: 74848
gaaaucaagguuaaacaca

SEQ ID NO: 74930 - RNA, 19 nt, Artificial Sequence
  Description of Artificial Sequence: Synthetic oligonucleotide
  Sense strand starting at position 2750 of SEQ ID NO: 934
augcgcuauuucgugauca

SEQ ID NO: 74931 - RNA, 19 nt, Artificial Sequence
  Description of Artificial Sequence: Synthetic oligonucleotide
  Antisense strand to SEQ ID NO: 74850
ugaucacgaaauagcgcau

SEQ ID NO: 74932 - RNA, 19 nt, Artificial Sequence
  Description of Artificial Sequence: Synthetic oligonucleotide
  Sense strand starting at position 2752 of SEQ ID NO: 934
gcgcuauuucgugaucagc

SEQ ID NO: 74933 - RNA, 19 nt, Artificial Sequence
  Description of Artificial Sequence: Synthetic oligonucleotide
  Antisense strand to SEQ ID NO: 74852
gcugaucacgaaauagcgc

SEQ ID NO: 74934 - RNA, 19 nt, Artificial Sequence
  Description of Artificial Sequence: Synthetic oligonucleotide
  Sense strand starting at position 2781 of SEQ ID NO: 934
acacuuugguggcucuuaa

SEQ ID NO: 74935 - RNA, 19 nt, Artificial Sequence
  Description of Artificial Sequence: Synthetic oligonucleotide
  Antisense strand to SEQ ID NO: 74854
uuaagagccaccaaagugu

SEQ ID NO: 74936 - RNA, 19 nt, Artificial Sequence
  Description of Artificial Sequence: Synthetic oligonucleotide
  Sense strand starting at position 2886 of SEQ ID NO: 934
acaggacagccuggauauu

SEQ ID NO: 74937 - RNA, 19 nt, Artificial Sequence
  Description of Artificial Sequence: Synthetic oligonucleotide
  Antisense strand to SEQ ID NO: 74856
aauauccaggcuguccugu

SEQ ID NO: 74938 - RNA, 19 nt, Artificial Sequence
  Description of Artificial Sequence: Synthetic oligonucleotide
  Sense strand starting at position 2947 of SEQ ID NO: 934
cuuguugagcucuucguca

SEQ ID NO: 74939 - RNA, 19 nt, Artificial Sequence
  Description of Artificial Sequence: Synthetic oligonucleotide
  Antisense strand to SEQ ID NO: 74858
ugacgaagagcucaacaag

SEQ ID NO: 74940 - RNA, 19 nt, Artificial Sequence
  Description of Artificial Sequence: Synthetic oligonucleotide
  Sense strand starting at position 3041 of SEQ ID NO: 934
uccagaauuuccgcgguca

SEQ ID NO: 74941 - RNA, 19 nt, Artificial Sequence
  Description of Artificial Sequence: Synthetic oligonucleotide
  Antisense strand to SEQ ID NO: 74860
ugaccgcggaaauucugga

SEQ ID NO: 74942 - RNA, 19 nt, Artificial Sequence
  Description of Artificial Sequence: Synthetic oligonucleotide
  Sense strand starting at position 3042 of SEQ ID NO: 934
ccagaauuuccgcggucag

SEQ ID NO: 74943 - RNA, 19 nt, Artificial Sequence
  Description of Artificial Sequence: Synthetic oligonucleotide
  Antisense strand to SEQ ID NO: 74862
cugaccgcggaaauucugg

SEQ ID NO: 74944 - RNA, 19 nt, Artificial Sequence
  Description of Artificial Sequence: Synthetic oligonucleotide
  Sense strand starting at position 3299 of SEQ ID NO: 934
ugauguaauuuauaagagc

SEQ ID NO: 74945 - RNA, 19 nt, Artificial Sequence
  Description of Artificial Sequence: Synthetic oligonucleotide
  Antisense strand to SEQ ID NO: 74864
gcucuuauaaauuacauca

SEQ ID NO: 74946 - RNA, 19 nt, Artificial Sequence
  Description of Artificial Sequence: Synthetic oligonucleotide
  Sense strand starting at position 3335 of SEQ ID NO: 934
ggaagucguuugauuggcu

SEQ ID NO: 74947 - RNA, 19 nt, Artificial Sequence
  Description of Artificial Sequence: Synthetic oligonucleotide
  Antisense strand to SEQ ID NO: 74866
agccaaucaaacgacuucc

SEQ ID NO: 74948 - RNA, 19 nt, Artificial Sequence
  Description of Artificial Sequence: Synthetic oligonucleotide
  Sense strand starting at position 3458 of SEQ ID NO: 934
cgcugagagccacauuaaa

SEQ ID NO: 74949 - RNA, 19 nt, Artificial Sequence
  Description of Artificial Sequence: Synthetic oligonucleotide
  Antisense strand to SEQ ID NO: 74868
uuuaauguggcucucagcg

SEQ ID NO: 74950 - RNA, 19 nt, Artificial Sequence
  Description of Artificial Sequence: Synthetic oligonucleotide
  Sense strand starting at position 3490 of SEQ ID NO: 934
augccaggaucuuuaaaga

SEQ ID NO: 74951 - RNA, 19 nt, Artificial Sequence
  Description of Artificial Sequence: Synthetic oligonucleotide
  Antisense strand to SEQ ID NO: 74870
ucuuuaaagauccuggcau

SEQ ID NO: 74952 - RNA, 19 nt, Artificial Sequence
  Description of Artificial Sequence: Synthetic oligonucleotide
  Sense strand starting at position 3589 of SEQ ID NO: 934
uuaguuuacagccgggaaa

SEQ ID NO: 74953 - RNA, 19 nt, Artificial Sequence
  Description of Artificial Sequence: Synthetic oligonucleotide
  Antisense strand to SEQ ID NO: 74872
uuucccggcuguaaacuaa

SEQ ID NO: 74954 - RNA, 19 nt, Artificial Sequence
  Description of Artificial Sequence: Synthetic oligonucleotide
  Sense strand starting at position 3590 of SEQ ID NO: 934
uaguuuacagccgggaaau

SEQ ID NO: 74955 - RNA, 19 nt, Artificial Sequence
  Description of Artificial Sequence: Synthetic oligonucleotide
  Antisense strand to SEQ ID NO: 74874
auuucccggcuguaaacua

SEQ ID NO: 74956 - RNA, 19 nt, Artificial Sequence
  Description of Artificial Sequence: Synthetic oligonucleotide
  Sense strand starting at position 3591 of SEQ ID NO: 934
aguuuacagccgggaaauc

SEQ ID NO: 74957 - RNA, 19 nt, Artificial Sequence
  Description of Artificial Sequence: Synthetic oligonucleotide
  Antisense strand to SEQ ID NO: 74876
gauuucccggcuguaaacu

SEQ ID NO: 74958 - RNA, 19 nt, Artificial Sequence
  Description of Artificial Sequence: Synthetic oligonucleotide
  Sense strand starting at position 3678 of SEQ ID NO: 934
ggauucugaagccgaugau

SEQ ID NO: 74959 - RNA, 19 nt, Artificial Sequence
  Description of Artificial Sequence: Synthetic oligonucleotide
  Antisense strand to SEQ ID NO: 74878
aucaucggcuucagaaucc

SEQ ID NO: 74960 - RNA, 19 nt, Artificial Sequence
  Description of Artificial Sequence: Synthetic oligonucleotide
  Sense strand starting at position 372 of SEQ ID NO: 935
ucaggacaucugugacaca

SEQ ID NO: 74961 - RNA, 19 nt, Artificial Sequence
  Description of Artificial Sequence: Synthetic oligonucleotide
  Antisense strand to SEQ ID NO: 74880
ugugucacagauguccuga

SEQ ID NO: 74962 - RNA, 19 nt, Artificial Sequence
  Description of Artificial Sequence: Synthetic oligonucleotide
  Sense strand starting at position 373 of SEQ ID NO: 935
caggacaucugugacacaa

SEQ ID NO: 74963 - RNA, 19 nt, Artificial Sequence
  Description of Artificial Sequence: Synthetic oligonucleotide
  Antisense strand to SEQ ID NO: 74882
uugugucacagauguccug

SEQ ID NO: 74964 - RNA, 19 nt, Artificial Sequence
  Description of Artificial Sequence: Synthetic oligonucleotide
  Sense strand starting at position 375 of SEQ ID NO: 935
ggacaucugugacacaaag

SEQ ID NO: 74965 - RNA, 19 nt, Artificial Sequence
  Description of Artificial Sequence: Synthetic oligonucleotide
  Antisense strand to SEQ ID NO: 74884
cuuugugucacagaugucc

SEQ ID NO: 74966 - RNA, 19 nt, Artificial Sequence
  Description of Artificial Sequence: Synthetic oligonucleotide
  Sense strand starting at position 700 of SEQ ID NO: 935
ggguuaaggaaacguuuga

SEQ ID NO: 74967 - RNA, 19 nt, Artificial Sequence
  Description of Artificial Sequence: Synthetic oligonucleotide
  Antisense strand to SEQ ID NO: 74886
ucaaacguuuccuuaaccc

SEQ ID NO: 74968 - RNA, 19 nt, Artificial Sequence
  Description of Artificial Sequence: Synthetic oligonucleotide
  Sense strand starting at position 704 of SEQ ID NO: 935
uaaggaaacguuugacuga

SEQ ID NO: 74969 - RNA, 19 nt, Artificial Sequence
  Description of Artificial Sequence: Synthetic oligonucleotide
  Antisense strand to SEQ ID NO: 74888
ucagucaaacguuuccuua

SEQ ID NO: 74970 - RNA, 19 nt, Artificial Sequence
  Description of Artificial Sequence: Synthetic oligonucleotide
  Sense strand starting at position 705 of SEQ ID NO: 935
aaggaaacguuugacugaa

SEQ ID NO: 74971 - RNA, 19 nt, Artificial Sequence
  Description of Artificial Sequence: Synthetic oligonucleotide
  Antisense strand to SEQ ID NO: 74890
uucagucaaacguuuccuu

SEQ ID NO: 74972 - RNA, 19 nt, Artificial Sequence
  Description of Artificial Sequence: Synthetic oligonucleotide
  Sense strand starting at position 707 of SEQ ID NO: 935
ggaaacguuugacugaaga

SEQ ID NO: 74973 - RNA, 19 nt, Artificial Sequence
  Description of Artificial Sequence: Synthetic oligonucleotide
  Antisense strand to SEQ ID NO: 74892
ucuucagucaaacguuucc

SEQ ID NO: 74974 - RNA, 19 nt, Artificial Sequence
  Description of Artificial Sequence: Synthetic oligonucleotide
  Sense strand starting at position 1302 of SEQ ID NO: 935
agucaaaccuuucgaaucu

SEQ ID NO: 74975 - RNA, 19 nt, Artificial Sequence
  Description of Artificial Sequence: Synthetic oligonucleotide
  Antisense strand to SEQ ID NO: 74894
agauucgaaagguuugacu

SEQ ID NO: 74976 - RNA, 19 nt, Artificial Sequence
  Description of Artificial Sequence: Synthetic oligonucleotide
  Sense strand starting at position 1311 of SEQ ID NO: 935
uuucgaaucucguagcaca

SEQ ID NO: 74977 - RNA, 19 nt, Artificial Sequence
  Description of Artificial Sequence: Synthetic oligonucleotide
  Antisense strand to SEQ ID NO: 74896
ugugcuacgagauucgaaa

SEQ ID NO: 74978 - RNA, 19 nt, Artificial Sequence
  Description of Artificial Sequence: Synthetic oligonucleotide
  Sense strand starting at position 1314 of SEQ ID NO: 935
cgaaucucguagcacagau

SEQ ID NO: 74979 - RNA, 19 nt, Artificial Sequence
  Description of Artificial Sequence: Synthetic oligonucleotide
  Antisense strand to SEQ ID NO: 74898
aucugugcuacgagauucg

SEQ ID NO: 74980 - RNA, 19 nt, Artificial Sequence
  Description of Artificial Sequence: Synthetic oligonucleotide
  Sense strand starting at position 2169 of SEQ ID NO: 935
uuguuauccuaucagaaug

SEQ ID NO: 74981 - RNA, 19 nt, Artificial Sequence
  Description of Artificial Sequence: Synthetic oligonucleotide
  Antisense strand to SEQ ID NO: 74900
cauucugauaggauaacaa

SEQ ID NO: 74982 - RNA, 19 nt, Artificial Sequence
  Description of Artificial Sequence: Synthetic oligonucleotide
  Sense strand starting at position 3306 of SEQ ID NO: 935
caugcugucucauugauag

SEQ ID NO: 74983 - RNA, 19 nt, Artificial Sequence
  Description of Artificial Sequence: Synthetic oligonucleotide
  Antisense strand to SEQ ID NO: 74902
cuaucaaugagacagcaug

SEQ ID NO: 74984 - RNA, 19 nt, Artificial Sequence
  Description of Artificial Sequence: Synthetic oligonucleotide
  Sense strand starting at position 3308 of SEQ ID NO: 935
ugcugucucauugauagga

SEQ ID NO: 74985 - RNA, 19 nt, Artificial Sequence
  Description of Artificial Sequence: Synthetic oligonucleotide
  Antisense strand to SEQ ID NO: 74904
uccuaucaaugagacagca

SEQ ID NO: 74986 - RNA, 19 nt, Artificial Sequence
  Description of Artificial Sequence: Synthetic oligonucleotide
  Sense strand starting at position 3310 of SEQ ID NO: 935
cugucucauugauaggaga

SEQ ID NO: 74987 - RNA, 19 nt, Artificial Sequence
  Description of Artificial Sequence: Synthetic oligonucleotide
  Antisense strand to SEQ ID NO: 74906
ucuccuaucaaugagacag

SEQ ID NO: 74988 - RNA, 19 nt, Artificial Sequence
  Description of Artificial Sequence: Synthetic oligonucleotide
  Sense strand starting at position 230 of SEQ ID NO: 937
agaggcaugcucuagaaau

SEQ ID NO: 74989 - RNA, 19 nt, Artificial Sequence
  Description of Artificial Sequence: Synthetic oligonucleotide
  Antisense strand to SEQ ID NO: 74908
auuucuagagcaugccucu

SEQ ID NO: 74990 - RNA, 19 nt, Artificial Sequence
  Description of Artificial Sequence: Synthetic oligonucleotide
  Sense strand starting at position 232 of SEQ ID NO: 937
aggcaugcucuagaaauug

SEQ ID NO: 74991 - RNA, 19 nt, Artificial Sequence
  Description of Artificial Sequence: Synthetic oligonucleotide
  Antisense strand to SEQ ID NO: 74910
caauuucuagagcaugccu

SEQ ID NO: 74992 - RNA, 19 nt, Artificial Sequence
  Description of Artificial Sequence: Synthetic oligonucleotide
  Sense strand starting at position 424 of SEQ ID NO: 937
accugucaacugugaugaa

SEQ ID NO: 74993 - RNA, 19 nt, Artificial Sequence
  Description of Artificial Sequence: Synthetic oligonucleotide
  Antisense strand to SEQ ID NO: 74912
uucaucacaguugacaggu

SEQ ID NO: 74994 - RNA, 19 nt, Artificial Sequence
  Description of Artificial Sequence: Synthetic oligonucleotide
  Sense strand starting at position 469 of SEQ ID NO: 937
ucuucugaggugcaaauaa

SEQ ID NO: 74995 - RNA, 19 nt, Artificial Sequence
  Description of Artificial Sequence: Synthetic oligonucleotide
  Antisense strand to SEQ ID NO: 74914
uuauuugcaccucagaaga

SEQ ID NO: 74996 - RNA, 19 nt, Artificial Sequence
  Description of Artificial Sequence: Synthetic oligonucleotide
  Sense strand starting at position 528 of SEQ ID NO: 937
guaucuggccguguguaga

SEQ ID NO: 74997 - RNA, 19 nt, Artificial Sequence
  Description of Artificial Sequence: Synthetic oligonucleotide
  Antisense strand to SEQ ID NO: 74916
ucuacacacggccagauac

SEQ ID NO: 74998 - RNA, 19 nt, Artificial Sequence
  Description of Artificial Sequence: Synthetic oligonucleotide
  Sense strand starting at position 704 of SEQ ID NO: 937
ucuacugucuucccaagga

SEQ ID NO: 74999 - RNA, 19 nt, Artificial Sequence
  Description of Artificial Sequence: Synthetic oligonucleotide
  Antisense strand to SEQ ID NO: 74918
uccuugggaagacaguaga

SEQ ID NO: 75000 - RNA, 19 nt, Artificial Sequence
  Description of Artificial Sequence: Synthetic oligonucleotide
  Sense strand starting at position 876 of SEQ ID NO: 937
cagggaacggcucgauaaa

SEQ ID NO: 75001 - RNA, 19 nt, Artificial Sequence
  Description of Artificial Sequence: Synthetic oligonucleotide
  Antisense strand to SEQ ID NO: 74920
uuuaucgagccguucccug

SEQ ID NO: 75002 - RNA, 19 nt, Artificial Sequence
  Description of Artificial Sequence: Synthetic oligonucleotide
  Sense strand starting at position 1060 of SEQ ID NO: 937
guggucauuucccucccua

SEQ ID NO: 75003 - RNA, 19 nt, Artificial Sequence
  Description of Artificial Sequence: Synthetic oligonucleotide
  Antisense strand to SEQ ID NO: 74922
uagggagggaaaugaccac

SEQ ID NO: 75004 - RNA, 19 nt, Artificial Sequence
  Description of Artificial Sequence: Synthetic oligonucleotide
  Sense strand starting at position 1589 of SEQ ID NO: 937
ggauguccuugggcauaau

SEQ ID NO: 75005 - RNA, 19 nt, Artificial Sequence
  Description of Artificial Sequence: Synthetic oligonucleotide
  Antisense strand to SEQ ID NO: 74924
auuaugcccaaggacaucc

SEQ ID NO: 75006 - RNA, 19 nt, Artificial Sequence
  Description of Artificial Sequence: Synthetic oligonucleotide
  Sense strand starting at position 1938 of SEQ ID NO: 937
gcgagcagucugcuuagua

SEQ ID NO: 75007 - RNA, 19 nt, Artificial Sequence
  Description of Artificial Sequence: Synthetic oligonucleotide
  Antisense strand to SEQ ID NO: 74926
uacuaagcagacugcucgc

SEQ ID NO: 75008 - RNA, 19 nt, Artificial Sequence
  Description of Artificial Sequence: Synthetic oligonucleotide
  Sense strand starting at position 2026 of SEQ ID NO: 937
gccgcagccgucuuuauaa

SEQ ID NO: 75009 - RNA, 19 nt, Artificial Sequence
  Description of Artificial Sequence: Synthetic oligonucleotide
  Antisense strand to SEQ ID NO: 74928
uuauaaagacggcugcggc

SEQ ID NO: 75010 - RNA, 19 nt, Artificial Sequence
  Description of Artificial Sequence: Synthetic oligonucleotide
  Sense strand starting at position 2057 of SEQ ID NO: 937
cccgauugggcggaacaau

SEQ ID NO: 75011 - RNA, 19 nt, Artificial Sequence
  Description of Artificial Sequence: Synthetic oligonucleotide
  Antisense strand to SEQ ID NO: 74930
auuguuccgcccaaucggg

SEQ ID NO: 75012 - RNA, 19 nt, Artificial Sequence
  Description of Artificial Sequence: Synthetic oligonucleotide
  Sense strand starting at position 2143 of SEQ ID NO: 937
ugggcagauuccucccuaa

SEQ ID NO: 75013 - RNA, 19 nt, Artificial Sequence
  Description of Artificial Sequence: Synthetic oligonucleotide
  Antisense strand to SEQ ID NO: 74932
uuagggaggaaucugccca

SEQ ID NO: 75014 - RNA, 19 nt, Artificial Sequence
  Description of Artificial Sequence: Synthetic oligonucleotide
  Sense strand starting at position 2201 of SEQ ID NO: 937
gaaguuucgcaagcuuguu

SEQ ID NO: 75015 - RNA, 19 nt, Artificial Sequence
  Description of Artificial Sequence: Synthetic oligonucleotide
  Antisense strand to SEQ ID NO: 74934
aacaagcuugcgaaacuuc

SEQ ID NO: 75016 - RNA, 19 nt, Artificial Sequence
  Description of Artificial Sequence: Synthetic oligonucleotide
  Sense strand starting at position 2854 of SEQ ID NO: 937
uuacgugcuccagauggaa

SEQ ID NO: 75017 - RNA, 19 nt, Artificial Sequence
  Description of Artificial Sequence: Synthetic oligonucleotide
  Antisense strand to SEQ ID NO: 74936
uuccaucuggagcacguaa

SEQ ID NO: 75018 - RNA, 19 nt, Artificial Sequence
  Description of Artificial Sequence: Synthetic oligonucleotide
  Sense strand starting at position 2986 of SEQ ID NO: 937
gagaguggccagcauuaac

SEQ ID NO: 75019 - RNA, 19 nt, Artificial Sequence
  Description of Artificial Sequence: Synthetic oligonucleotide
  Antisense strand to SEQ ID NO: 74938
guuaaugcuggccacucuc

SEQ ID NO: 75020 - RNA, 19 nt, Artificial Sequence
  Description of Artificial Sequence: Synthetic oligonucleotide
  Sense strand starting at position 3499 of SEQ ID NO: 937
cagacaugacagcgauagu

SEQ ID NO: 75021 - RNA, 19 nt, Artificial Sequence
  Description of Artificial Sequence: Synthetic oligonucleotide
  Antisense strand to SEQ ID NO: 74940
acuaucgcugucaugucug

SEQ ID NO: 75022 - RNA, 19 nt, Artificial Sequence
  Description of Artificial Sequence: Synthetic oligonucleotide
  Sense strand starting at position 3500 of SEQ ID NO: 937
agacaugacagcgauagua

SEQ ID NO: 75023 - RNA, 19 nt, Artificial Sequence
  Description of Artificial Sequence: Synthetic oligonucleotide
  Antisense strand to SEQ ID NO: 74942
uacuaucgcugucaugucu

SEQ ID NO: 75024 - RNA, 19 nt, Artificial Sequence
  Description of Artificial Sequence: Synthetic oligonucleotide
  Sense strand starting at position 3502 of SEQ ID NO: 937
acaugacagcgauaguagu

SEQ ID NO: 75025 - RNA, 19 nt, Artificial Sequence
  Description of Artificial Sequence: Synthetic oligonucleotide
  Antisense strand to SEQ ID NO: 74944
acuacuaucgcugucaugu

SEQ ID NO: 75026 - RNA, 19 nt, Artificial Sequence
  Description of Artificial Sequence: Synthetic oligonucleotide
  Sense strand starting at position 3512 of SEQ ID NO: 937
gauaguagucaccgagaga

SEQ ID NO: 75027 - RNA, 19 nt, Artificial Sequence
  Description of Artificial Sequence: Synthetic oligonucleotide
  Antisense strand to SEQ ID NO: 74946
ucucucggugacuacuauc

SEQ ID NO: 75028 - RNA, 19 nt, Artificial Sequence
  Description of Artificial Sequence: Synthetic oligonucleotide
  Sense strand starting at position 3616 of SEQ ID NO: 937
cuuugauuggcucaagcaa

SEQ ID NO: 75029 - RNA, 19 nt, Artificial Sequence
  Description of Artificial Sequence: Synthetic oligonucleotide
  Antisense strand to SEQ ID NO: 74948
uugcuugagccaaucaaag

SEQ ID NO: 75030 - RNA, 19 nt, Artificial Sequence
  Description of Artificial Sequence: Synthetic oligonucleotide
  Sense strand starting at position 3642 of SEQ ID NO: 937
cccgauagccaauaggaua

SEQ ID NO: 75031 - RNA, 19 nt, Artificial Sequence
  Description of Artificial Sequence: Synthetic oligonucleotide
  Antisense strand to SEQ ID NO: 74950
uauccuauuggcuaucggg

SEQ ID NO: 75032 - RNA, 19 nt, Artificial Sequence
  Description of Artificial Sequence: Synthetic oligonucleotide
  Sense strand starting at position 3654 of SEQ ID NO: 937
uaggauagcucagccagaa

SEQ ID NO: 75033 - RNA, 19 nt, Artificial Sequence
  Description of Artificial Sequence: Synthetic oligonucleotide
  Antisense strand to SEQ ID NO: 74952
uucuggcugagcuauccua

SEQ ID NO: 75034 - RNA, 19 nt, Artificial Sequence
  Description of Artificial Sequence: Synthetic oligonucleotide
  Sense strand starting at position 3655 of SEQ ID NO: 936
uaggauagcucagccagaa

SEQ ID NO: 75035 - RNA, 19 nt, Artificial Sequence
  Description of Artificial Sequence: Synthetic oligonucleotide
  Antisense strand to SEQ ID NO: 74954
uucuggcugagcuauccua

SEQ ID NO: 75036 - RNA, 19 nt, Artificial Sequence
  Description of Artificial Sequence: Synthetic oligonucleotide
  Sense strand starting at position 3643 of SEQ ID NO: 936
cccgauagccaauaggaua

SEQ ID NO: 75037 - RNA, 19 nt, Artificial Sequence
  Description of Artificial Sequence: Synthetic oligonucleotide
  Antisense strand to SEQ ID NO: 74956
uauccuauuggcuaucggg

SEQ ID NO: 75038 - RNA, 19 nt, Artificial Sequence
  Description of Artificial Sequence: Synthetic oligonucleotide
  Sense strand starting at position 3617 of SEQ ID NO: 936
cuuugauuggcucaagcaa

SEQ ID NO: 75039 - RNA, 19 nt, Artificial Sequence
  Description of Artificial Sequence: Synthetic oligonucleotide
  Antisense strand to SEQ ID NO: 74958
uugcuugagccaaucaaag

SEQ ID NO: 75040 - RNA, 19 nt, Artificial Sequence
  Description of Artificial Sequence: Synthetic oligonucleotide
  Sense strand starting at position 2987 of SEQ ID NO: 936
gagaguggccagcauuaac

SEQ ID NO: 75041 - RNA, 19 nt, Artificial Sequence
  Description of Artificial Sequence: Synthetic oligonucleotide
  Antisense strand to SEQ ID NO: 74960
guuaaugcuggccacucuc

SEQ ID NO: 75042 - RNA, 19 nt, Artificial Sequence
  Description of Artificial Sequence: Synthetic oligonucleotide
  Sense strand starting at position 2855 of SEQ ID NO: 936
uuacgugcuccagauggaa

SEQ ID NO: 75043 - RNA, 19 nt, Artificial Sequence
  Description of Artificial Sequence: Synthetic oligonucleotide
  Antisense strand to SEQ ID NO: 74962
uuccaucuggagcacguaa

SEQ ID NO: 75044 - RNA, 19 nt, Artificial Sequence
  Description of Artificial Sequence: Synthetic oligonucleotide
  Sense strand starting at position 2202 of SEQ ID NO: 936
gaaguuucgcaagcuuguu

SEQ ID NO: 75045 - RNA, 19 nt, Artificial Sequence
  Description of Artificial Sequence: Synthetic oligonucleotide
  Antisense strand to SEQ ID NO: 74964
aacaagcuugcgaaacuuc

SEQ ID NO: 75046 - RNA, 19 nt, Artificial Sequence
  Description of Artificial Sequence: Synthetic oligonucleotide
  Sense strand starting at position 2144 of SEQ ID NO: 936
ugggcagauuccucccuaa

SEQ ID NO: 75047 - RNA, 19 nt, Artificial Sequence
  Description of Artificial Sequence: Synthetic oligonucleotide
  Antisense strand to SEQ ID NO: 74966
uuagggaggaaucugccca

SEQ ID NO: 75048 - RNA, 19 nt, Artificial Sequence
  Description of Artificial Sequence: Synthetic oligonucleotide
  Sense strand starting at position 2058 of SEQ ID NO: 936
cccgauugggcggaacaau

SEQ ID NO: 75049 - RNA, 19 nt, Artificial Sequence
  Description of Artificial Sequence: Synthetic oligonucleotide
  Antisense strand to SEQ ID NO: 74968
auuguuccgcccaaucggg

SEQ ID NO: 75050 - RNA, 19 nt, Artificial Sequence
  Description of Artificial Sequence: Synthetic oligonucleotide
  Sense strand starting at position 2027 of SEQ ID NO: 936
gccgcagccgucuuuauaa

SEQ ID NO: 75051 - RNA, 19 nt, Artificial Sequence
  Description of Artificial Sequence: Synthetic oligonucleotide
  Antisense strand to SEQ ID NO: 74970
uuauaaagacggcugcggc

SEQ ID NO: 75052 - RNA, 19 nt, Artificial Sequence
  Description of Artificial Sequence: Synthetic oligonucleotide
  Sense strand starting at position 1061 of SEQ ID NO: 936
guggucauuucccucccua

SEQ ID NO: 75053 - RNA, 19 nt, Artificial Sequence
  Description of Artificial Sequence: Synthetic oligonucleotide
  Antisense strand to SEQ ID NO: 74972
uagggagggaaaugaccac

SEQ ID NO: 75054 - RNA, 19 nt, Artificial Sequence
  Description of Artificial Sequence: Synthetic oligonucleotide
  Sense strand starting at position 877 of SEQ ID NO: 936
cagggaacggcucgauaaa

SEQ ID NO: 75055 - RNA, 19 nt, Artificial Sequence
  Description of Artificial Sequence: Synthetic oligonucleotide
  Antisense strand to SEQ ID NO: 74974
uuuaucgagccguucccug

SEQ ID NO: 75056 - RNA, 19 nt, Artificial Sequence
  Description of Artificial Sequence: Synthetic oligonucleotide
  Sense strand starting at position 705 of SEQ ID NO: 936
ucuacugucuucccaagga

SEQ ID NO: 75057 - RNA, 19 nt, Artificial Sequence
  Description of Artificial Sequence: Synthetic oligonucleotide
  Antisense strand to SEQ ID NO: 74976
uccuugggaagacaguaga

SEQ ID NO: 75058 - RNA, 19 nt, Artificial Sequence
  Description of Artificial Sequence: Synthetic oligonucleotide
  Sense strand starting at position 529 of SEQ ID NO: 936
guaucuggccguguguaga

SEQ ID NO: 75059 - RNA, 19 nt, Artificial Sequence
  Description of Artificial Sequence: Synthetic oligonucleotide
  Antisense strand to SEQ ID NO: 74978
ucuacacacggccagauac

SEQ ID NO: 75060 - RNA, 19 nt, Artificial Sequence
  Description of Artificial Sequence: Synthetic oligonucleotide
  Sense strand starting at position 470 of SEQ ID NO: 936
ucuucugaggugcaaauaa

SEQ ID NO: 75061 - RNA, 19 nt, Artificial Sequence
  Description of Artificial Sequence: Synthetic oligonucleotide
  Antisense strand to SEQ ID NO: 74980
uuauuugcaccucagaaga

SEQ ID NO: 75062 - RNA, 19 nt, Artificial Sequence
  Description of Artificial Sequence: Synthetic oligonucleotide
  Sense strand starting at position 425 of SEQ ID NO: 936
accugucaacugugaugaa

SEQ ID NO: 75063 - RNA, 19 nt, Artificial Sequence
  Description of Artificial Sequence: Synthetic oligonucleotide
  Antisense strand to SEQ ID NO: 74982
uucaucacaguugacaggu

SEQ ID NO: 75064 - RNA, 19 nt, Artificial Sequence
  Description of Artificial Sequence: Synthetic oligonucleotide
  Sense strand starting at position 233 of SEQ ID NO: 936
aggcaugcucuagaaauug

SEQ ID NO: 75065 - RNA, 19 nt, Artificial Sequence
  Description of Artificial Sequence: Synthetic oligonucleotide
  Antisense strand to SEQ ID NO: 74984
caauuucuagagcaugccu

SEQ ID NO: 75066 - RNA, 19 nt, Artificial Sequence
  Description of Artificial Sequence: Synthetic oligonucleotide
  Sense strand starting at position 231 of SEQ ID NO: 936
agaggcaugcucuagaaau

SEQ ID NO: 75067 - RNA, 19 nt, Artificial Sequence
  Description of Artificial Sequence: Synthetic oligonucleotide
  Antisense strand to SEQ ID NO: 74986
auuucuagagcaugccucu

SEQ ID NO: 75068 - RNA, 19 nt, Artificial Sequence
  Description of Artificial Sequence: Synthetic oligonucleotide
  Sense strand starting at position 230 of SEQ ID NO: 937
agaggcaugcucuagaaau

SEQ ID NO: 75069 - RNA, 19 nt, Artificial Sequence
  Description of Artificial Sequence: Synthetic oligonucleotide
  Antisense strand to SEQ ID NO: 74988
auuucuagagcaugccucu

SEQ ID NO: 75070 - RNA, 19 nt, Artificial Sequence
  Description of Artificial Sequence: Synthetic oligonucleotide
  Sense strand starting at position 232 of SEQ ID NO: 937
aggcaugcucuagaaauug

SEQ ID NO: 75071 - RNA, 19 nt, Artificial Sequence
  Description of Artificial Sequence: Synthetic oligonucleotide
  Antisense strand to SEQ ID NO: 74990
caauuucuagagcaugccu

SEQ ID NO: 75072 - RNA, 19 nt, Artificial Sequence
  Description of Artificial Sequence: Synthetic oligonucleotide
  Sense strand starting at position 424 of SEQ ID NO: 937
accugucaacugugaugaa

SEQ ID NO: 75073 - RNA, 19 nt, Artificial Sequence
  Description of Artificial Sequence: Synthetic oligonucleotide
  Antisense strand to SEQ ID NO: 74992
uucaucacaguugacaggu

SEQ ID NO: 75074 - RNA, 19 nt, Artificial Sequence
  Description of Artificial Sequence: Synthetic oligonucleotide
  Sense strand starting at position 469 of SEQ ID NO: 937
ucuucugaggugcaaauaa

SEQ ID NO: 75075 - RNA, 19 nt, Artificial Sequence
  Description of Artificial Sequence: Synthetic oligonucleotide
  Antisense strand to SEQ ID NO: 74994
uuauuugcaccucagaaga

SEQ ID NO: 75076 - RNA, 19 nt, Artificial Sequence
  Description of Artificial Sequence: Synthetic oligonucleotide
  Sense strand starting at position 528 of SEQ ID NO: 937
guaucuggccguguguaga

SEQ ID NO: 75077 - RNA, 19 nt, Artificial Sequence
  Description of Artificial Sequence: Synthetic oligonucleotide
  Antisense strand to SEQ ID NO: 74996
ucuacacacggccagauac

SEQ ID NO: 75078 - RNA, 19 nt, Artificial Sequence
  Description of Artificial Sequence: Synthetic oligonucleotide
  Sense strand starting at position 704 of SEQ ID NO: 937
ucuacugucuucccaagga

SEQ ID NO: 75079 - RNA, 19 nt, Artificial Sequence
  Description of Artificial Sequence: Synthetic oligonucleotide
  Antisense strand to SEQ ID NO: 74998
uccuugggaagacaguaga

SEQ ID NO: 75080 - RNA, 19 nt, Artificial Sequence
  Description of Artificial Sequence: Synthetic oligonucleotide
  Sense strand starting at position 876 of SEQ ID NO: 937
cagggaacggcucgauaaa

SEQ ID NO: 75081 - RNA, 19 nt, Artificial Sequence
  Description of Artificial Sequence: Synthetic oligonucleotide
  Antisense strand to SEQ ID NO: 75000
uuuaucgagccguucccug

SEQ ID NO: 75082 - RNA, 19 nt, Artificial Sequence
  Description of Artificial Sequence: Synthetic oligonucleotide
  Sense strand starting at position 1060 of SEQ ID NO: 937
guggucauuucccucccua

SEQ ID NO: 75083 - RNA, 19 nt, Artificial Sequence
  Description of Artificial Sequence: Synthetic oligonucleotide
  Antisense strand to SEQ ID NO: 75002
uagggagggaaaugaccac

SEQ ID NO: 75084 - RNA, 19 nt, Artificial Sequence
  Description of Artificial Sequence: Synthetic oligonucleotide
  Sense strand starting at position 1589 of SEQ ID NO: 937
ggauguccuugggcauaau

SEQ ID NO: 75085 - RNA, 19 nt, Artificial Sequence
  Description of Artificial Sequence: Synthetic oligonucleotide
  Antisense strand to SEQ ID NO: 75004
auuaugcccaaggacaucc

SEQ ID NO: 75086 - RNA, 19 nt, Artificial Sequence
  Description of Artificial Sequence: Synthetic oligonucleotide
  Sense strand starting at position 1938 of SEQ ID NO: 937
gcgagcagucugcuuagua

SEQ ID NO: 75087 - RNA, 19 nt, Artificial Sequence
  Description of Artificial Sequence: Synthetic oligonucleotide
  Antisense strand to SEQ ID NO: 75006
uacuaagcagacugcucgc

SEQ ID NO: 75088 - RNA, 19 nt, Artificial Sequence
  Description of Artificial Sequence: Synthetic oligonucleotide
  Sense strand starting at position 2026 of SEQ ID NO: 937
gccgcagccgucuuuauaa

SEQ ID NO: 75089 - RNA, 19 nt, Artificial Sequence
  Description of Artificial Sequence: Synthetic oligonucleotide
  Antisense strand to SEQ ID NO: 75008
uuauaaagacggcugcggc

SEQ ID NO: 75090 - RNA, 19 nt, Artificial Sequence
  Description of Artificial Sequence: Synthetic oligonucleotide
  Sense strand starting at position 2057 of SEQ ID NO: 937
cccgauugggcggaacaau

SEQ ID NO: 75091 - RNA, 19 nt, Artificial Sequence
  Description of Artificial Sequence: Synthetic oligonucleotide
  Antisense strand to SEQ ID NO: 75010
auuguuccgcccaaucggg

SEQ ID NO: 75092 - RNA, 19 nt, Artificial Sequence
  Description of Artificial Sequence: Synthetic oligonucleotide
  Sense strand starting at position 2143 of SEQ ID NO: 937
ugggcagauuccucccuaa

SEQ ID NO: 75093 - RNA, 19 nt, Artificial Sequence
  Description of Artificial Sequence: Synthetic oligonucleotide
  Antisense strand to SEQ ID NO: 75012
uuagggaggaaucugccca

SEQ ID NO: 75094 - RNA, 19 nt, Artificial Sequence
  Description of Artificial Sequence: Synthetic oligonucleotide
  Sense strand starting at position 2201 of SEQ ID NO: 937
gaaguuucgcaagcuuguu

SEQ ID NO: 75095 - RNA, 19 nt, Artificial Sequence
  Description of Artificial Sequence: Synthetic oligonucleotide
  Antisense strand to SEQ ID NO: 75014
aacaagcuugcgaaacuuc

SEQ ID NO: 75096 - RNA, 19 nt, Artificial Sequence
  Description of Artificial Sequence: Synthetic oligonucleotide
  Sense strand starting at position 2854 of SEQ ID NO: 937
uuacgugcuccagauggaa

SEQ ID NO: 75097 - RNA, 19 nt, Artificial Sequence
  Description of Artificial Sequence: Synthetic oligonucleotide
  Antisense strand to SEQ ID NO: 75016
uuccaucuggagcacguaa

SEQ ID NO: 75098 - RNA, 19 nt, Artificial Sequence
  Description of Artificial Sequence: Synthetic oligonucleotide
  Sense strand starting at position 2986 of SEQ ID NO: 937
gagaguggccagcauuaac

SEQ ID NO: 75099 - RNA, 19 nt, Artificial Sequence
  Description of Artificial Sequence: Synthetic oligonucleotide
  Antisense strand to SEQ ID NO: 75018
guuaaugcuggccacucuc

SEQ ID NO: 75100 - RNA, 19 nt, Artificial Sequence
  Description of Artificial Sequence: Synthetic oligonucleotide
  Sense strand starting at position 3499 of SEQ ID NO: 937
cagacaugacagcgauagu

SEQ ID NO: 75101 - RNA, 19 nt, Artificial Sequence
  Description of Artificial Sequence: Synthetic oligonucleotide
  Antisense strand to SEQ ID NO: 75020
acuaucgcugucaugucug

SEQ ID NO: 75102 - RNA, 19 nt, Artificial Sequence
  Description of Artificial Sequence: Synthetic oligonucleotide
  Sense strand starting at position 3500 of SEQ ID NO: 937
agacaugacagcgauagua

SEQ ID NO: 75103 - RNA, 19 nt, Artificial Sequence
  Description of Artificial Sequence: Synthetic oligonucleotide
  Antisense strand to SEQ ID NO: 75022
uacuaucgcugucaugucu

SEQ ID NO: 75104 - RNA, 19 nt, Artificial Sequence
  Description of Artificial Sequence: Synthetic oligonucleotide
  Sense strand starting at position 3502 of SEQ ID NO: 937
acaugacagcgauaguagu

SEQ ID NO: 75105 - RNA, 19 nt, Artificial Sequence
  Description of Artificial Sequence: Synthetic oligonucleotide
  Antisense strand to SEQ ID NO: 75024
acuacuaucgcugucaugu

SEQ ID NO: 75106 - RNA, 19 nt, Artificial Sequence
  Description of Artificial Sequence: Synthetic oligonucleotide
  Sense strand starting at position 3512 of SEQ ID NO: 937
gauaguagucaccgagaga

SEQ ID NO: 75107 - RNA, 19 nt, Artificial Sequence
  Description of Artificial Sequence: Synthetic oligonucleotide
  Antisense strand to SEQ ID NO: 75026
ucucucggugacuacuauc

SEQ ID NO: 75108 - RNA, 19 nt, Artificial Sequence
  Description of Artificial Sequence: Synthetic oligonucleotide
  Sense strand starting at position 3616 of SEQ ID NO: 937
cuuugauuggcucaagcaa

SEQ ID NO: 75109 - RNA, 19 nt, Artificial Sequence
  Description of Artificial Sequence: Synthetic oligonucleotide
  Antisense strand to SEQ ID NO: 75028
uugcuugagccaaucaaag

SEQ ID NO: 75110 - RNA, 19 nt, Artificial Sequence
  Description of Artificial Sequence: Synthetic oligonucleotide
  Sense strand starting at position 3642 of SEQ ID NO: 937
cccgauagccaauaggaua

SEQ ID NO: 75111 - RNA, 19 nt, Artificial Sequence
  Description of Artificial Sequence: Synthetic oligonucleotide
  Antisense strand to SEQ ID NO: 75030
uauccuauuggcuaucggg

SEQ ID NO: 75112 - RNA, 19 nt, Artificial Sequence
  Description of Artificial Sequence: Synthetic oligonucleotide
  Sense strand starting at position 3654 of SEQ ID NO: 937
uaggauagcucagccagaa

SEQ ID NO: 75113 - RNA, 19 nt, Artificial Sequence
  Description of Artificial Sequence: Synthetic oligonucleotide
  Antisense strand to SEQ ID NO: 75032
uucuggcugagcuauccua

SEQ ID NO: 75114 - RNA, 19 nt, Artificial Sequence
  Description of Artificial Sequence: Synthetic oligonucleotide
  Sense strand starting at position 3655 of SEQ ID NO: 936
uaggauagcucagccagaa

SEQ ID NO: 75115 - RNA, 19 nt, Artificial Sequence
  Description of Artificial Sequence: Synthetic oligonucleotide
  Antisense strand to SEQ ID NO: 75034
uucuggcugagcuauccua

SEQ ID NO: 75116 - RNA, 19 nt, Artificial Sequence
  Description of Artificial Sequence: Synthetic oligonucleotide
  Sense strand starting at position 3643 of SEQ ID NO: 936
cccgauagccaauaggaua

SEQ ID NO: 75117 - RNA, 19 nt, Artificial Sequence
  Description of Artificial Sequence: Synthetic oligonucleotide
  Antisense strand to SEQ ID NO: 75036
uauccuauuggcuaucggg

SEQ ID NO: 75118 - RNA, 19 nt, Artificial Sequence
  Description of Artificial Sequence: Synthetic oligonucleotide
  Sense strand starting at position 3617 of SEQ ID NO: 936
cuuugauuggcucaagcaa

SEQ ID NO: 75119 - RNA, 19 nt, Artificial Sequence
  Description of Artificial Sequence: Synthetic oligonucleotide
  Antisense strand to SEQ ID NO: 75038
uugcuugagccaaucaaag

SEQ ID NO: 75120 - RNA, 19 nt, Artificial Sequence
  Description of Artificial Sequence: Synthetic oligonucleotide
  Sense strand starting at position 2987 of SEQ ID NO: 936
gagaguggccagcauuaac

SEQ ID NO: 75121 - RNA, 19 nt, Artificial Sequence
  Description of Artificial Sequence: Synthetic oligonucleotide
  Antisense strand to SEQ ID NO: 75040
guuaaugcuggccacucuc

SEQ ID NO: 75122 - RNA, 19 nt, Artificial Sequence
  Description of Artificial Sequence: Synthetic oligonucleotide
  Sense strand starting at position 2855 of SEQ ID NO: 936
uuacgugcuccagauggaa

SEQ ID NO: 75123 - RNA, 19 nt, Artificial Sequence
  Description of Artificial Sequence: Synthetic oligonucleotide
  Antisense strand to SEQ ID NO: 75042
uuccaucuggagcacguaa

SEQ ID NO: 75124 - RNA, 19 nt, Artificial Sequence
  Description of Artificial Sequence: Synthetic oligonucleotide
  Sense strand starting at position 2202 of SEQ ID NO: 936
gaaguuucgcaagcuuguu

SEQ ID NO: 75125 - RNA, 19 nt, Artificial Sequence
  Description of Artificial Sequence: Synthetic oligonucleotide
  Antisense strand to SEQ ID NO: 75044
aacaagcuugcgaaacuuc

SEQ ID NO: 75126 - RNA, 19 nt, Artificial Sequence
  Description of Artificial Sequence: Synthetic oligonucleotide
  Sense strand starting at position 2144 of SEQ ID NO: 936
ugggcagauuccucccuaa

SEQ ID NO: 75127 - RNA, 19 nt, Artificial Sequence
  Description of Artificial Sequence: Synthetic oligonucleotide
  Antisense strand to SEQ ID NO: 75046
uuagggaggaaucugccca

SEQ ID NO: 75128 - RNA, 19 nt, Artificial Sequence
  Description of Artificial Sequence: Synthetic oligonucleotide
  Sense strand starting at position 2058 of SEQ ID NO: 936
cccgauugggcggaacaau

SEQ ID NO: 75129 - RNA, 19 nt, Artificial Sequence
  Description of Artificial Sequence: Synthetic oligonucleotide
  Antisense strand to SEQ ID NO: 75048
auuguuccgcccaaucggg

SEQ ID NO: 75130 - RNA, 19 nt, Artificial Sequence
  Description of Artificial Sequence: Synthetic oligonucleotide
  Sense strand starting at position 2027 of SEQ ID NO: 936
gccgcagccgucuuuauaa

SEQ ID NO: 75131 - RNA, 19 nt, Artificial Sequence
  Description of Artificial Sequence: Synthetic oligonucleotide
  Antisense strand to SEQ ID NO: 75050
uuauaaagacggcugcggc

SEQ ID NO: 75132 - RNA, 19 nt, Artificial Sequence
  Description of Artificial Sequence: Synthetic oligonucleotide
  Sense strand starting at position 1061 of SEQ ID NO: 936
guggucauuucccucccua

SEQ ID NO: 75133 - RNA, 19 nt, Artificial Sequence
  Description of Artificial Sequence: Synthetic oligonucleotide
  Antisense strand to SEQ ID NO: 75052
uagggagggaaaugaccac

SEQ ID NO: 75134 - RNA, 19 nt, Artificial Sequence
  Description of Artificial Sequence: Synthetic oligonucleotide
  Sense strand starting at position 877 of SEQ ID NO: 936
cagggaacggcucgauaaa

SEQ ID NO: 75135 - RNA, 19 nt, Artificial Sequence
  Description of Artificial Sequence: Synthetic oligonucleotide
  Antisense strand to SEQ ID NO: 75054
uuuaucgagccguucccug

SEQ ID NO: 75136 - RNA, 19 nt, Artificial Sequence
  Description of Artificial Sequence: Synthetic oligonucleotide
  Sense strand starting at position 705 of SEQ ID NO: 936
ucuacugucuucccaagga

SEQ ID NO: 75137 - RNA, 19 nt, Artificial Sequence
  Description of Artificial Sequence: Synthetic oligonucleotide
  Antisense strand to SEQ ID NO: 75056
uccuugggaagacaguaga

SEQ ID NO: 75138 - RNA, 19 nt, Artificial Sequence
  Description of Artificial Sequence: Synthetic oligonucleotide
  Sense strand starting at position 529 of SEQ ID NO: 936
guaucuggccguguguaga

SEQ ID NO: 75139 - RNA, 19 nt, Artificial Sequence
  Description of Artificial Sequence: Synthetic oligonucleotide
  Antisense strand to SEQ ID NO: 75058
ucuacacacggccagauac

SEQ ID NO: 75140 - RNA, 19 nt, Artificial Sequence
  Description of Artificial Sequence: Synthetic oligonucleotide
  Sense strand starting at position 470 of SEQ ID NO: 936
ucuucugaggugcaaauaa

SEQ ID NO: 75141 - RNA, 19 nt, Artificial Sequence
  Description of Artificial Sequence: Synthetic oligonucleotide
  Antisense strand to SEQ ID NO: 75060
uuauuugcaccucagaaga

SEQ ID NO: 75142 - RNA, 19 nt, Artificial Sequence
  Description of Artificial Sequence: Synthetic oligonucleotide
  Sense strand starting at position 425 of SEQ ID NO: 936
accugucaacugugaugaa

SEQ ID NO: 75143 - RNA, 19 nt, Artificial Sequence
  Description of Artificial Sequence: Synthetic oligonucleotide
  Antisense strand to SEQ ID NO: 75062
uucaucacaguugacaggu

SEQ ID NO: 75144 - RNA, 19 nt, Artificial Sequence
  Description of Artificial Sequence: Synthetic oligonucleotide
  Sense strand starting at position 233 of SEQ ID NO: 936
aggcaugcucuagaaauug

SEQ ID NO: 75145 - RNA, 19 nt, Artificial Sequence
  Description of Artificial Sequence: Synthetic oligonucleotide
  Antisense strand to SEQ ID NO: 75064
caauuucuagagcaugccu

SEQ ID NO: 75146 - RNA, 19 nt, Artificial Sequence
  Description of Artificial Sequence: Synthetic oligonucleotide
  Sense strand starting at position 231 of SEQ ID NO: 936
agaggcaugcucuagaaau

SEQ ID NO: 75147 - RNA, 19 nt, Artificial Sequence
  Description of Artificial Sequence: Synthetic oligonucleotide
  Antisense strand to SEQ ID NO: 75066
auuucuagagcaugccucu

SEQ ID NO: 75148 - RNA, 19 nt, Artificial Sequence
  Description of Artificial Sequence: Synthetic oligonucleotide
  Sense strand starting at position 3 of SEQ ID NO: 938
uuucgaaucucguagcaca

SEQ ID NO: 75149 - RNA, 19 nt, Artificial Sequence
  Description of Artificial Sequence: Synthetic oligonucleotide
  Antisense strand to SEQ ID NO: 75068
ugugcuacgagauucgaaa

SEQ ID NO: 75150 - RNA, 19 nt, Artificial Sequence
  Description of Artificial Sequence: Synthetic oligonucleotide
  Sense strand starting at position 6 of SEQ ID NO: 938
cgaaucucguagcacagau

SEQ ID NO: 75151 - RNA, 19 nt, Artificial Sequence
  Description of Artificial Sequence: Synthetic oligonucleotide
  Antisense strand to SEQ ID NO: 75070
aucugugcuacgagauucg

SEQ ID NO: 75152 - RNA, 19 nt, Artificial Sequence
  Description of Artificial Sequence: Synthetic oligonucleotide
  Sense strand starting at position 861 of SEQ ID NO: 938
uuguuauccuaucagaaug

SEQ ID NO: 75153 - RNA, 19 nt, Artificial Sequence
  Description of Artificial Sequence: Synthetic oligonucleotide
  Antisense strand to SEQ ID NO: 75072
cauucugauaggauaacaa

SEQ ID NO: 75154 - RNA, 19 nt, Artificial Sequence
  Description of Artificial Sequence: Synthetic oligonucleotide
  Sense strand starting at position 1998 of SEQ ID NO: 938
caugcugucucauugauag

SEQ ID NO: 75155 - RNA, 19 nt, Artificial Sequence
  Description of Artificial Sequence: Synthetic oligonucleotide
  Antisense strand to SEQ ID NO: 75074
cuaucaaugagacagcaug

SEQ ID NO: 75156 - RNA, 19 nt, Artificial Sequence
  Description of Artificial Sequence: Synthetic oligonucleotide
  Sense strand starting at position 2000 of SEQ ID NO: 938
ugcugucucauugauagga

SEQ ID NO: 75157 - RNA, 19 nt, Artificial Sequence
  Description of Artificial Sequence: Synthetic oligonucleotide
  Antisense strand to SEQ ID NO: 75076
uccuaucaaugagacagca

SEQ ID NO: 75158 - RNA, 19 nt, Artificial Sequence
  Description of Artificial Sequence: Synthetic oligonucleotide
  Sense strand starting at position 2002 of SEQ ID NO: 938
cugucucauugauaggaga

SEQ ID NO: 75159 - RNA, 19 nt, Artificial Sequence
  Description of Artificial Sequence: Synthetic oligonucleotide
  Antisense strand to SEQ ID NO: 75078
ucuccuaucaaugagacag

SEQ ID NO: 75160 - RNA, 19 nt, Artificial Sequence
  Description of Artificial Sequence: Synthetic oligonucleotide
  Sense strand starting at position 3390 of SEQ ID NO: 938
ugaaauagauguuacucuu

SEQ ID NO: 75161 - RNA, 19 nt, Artificial Sequence
  Description of Artificial Sequence: Synthetic oligonucleotide
  Antisense strand to SEQ ID NO: 75080
aagaguaacaucuauuuca

SEQ ID NO: 75162 - RNA, 19 nt, Artificial Sequence
  Description of Artificial Sequence: Synthetic oligonucleotide
  Sense strand starting at position 3396 of SEQ ID NO: 938
agauguuacucuucucacu

SEQ ID NO: 75163 - RNA, 19 nt, Artificial Sequence
  Description of Artificial Sequence: Synthetic oligonucleotide
  Antisense strand to SEQ ID NO: 75082
agugagaagaguaacaucu

SEQ ID NO: 75164 - RNA, 19 nt, Artificial Sequence
  Description of Artificial Sequence: Synthetic oligonucleotide
  Sense strand starting at position 3279 of SEQ ID NO: 940
cugguuucugcugaaagaa

SEQ ID NO: 75165 - RNA, 19 nt, Artificial Sequence
  Description of Artificial Sequence: Synthetic oligonucleotide
  Antisense strand to SEQ ID NO: 75084
uucuuucagcagaaaccag

SEQ ID NO: 75166 - RNA, 19 nt, Artificial Sequence
  Description of Artificial Sequence: Synthetic oligonucleotide
  Sense strand starting at position 3243 of SEQ ID NO: 940
cagggcucucuguaggaga

SEQ ID NO: 75167 - RNA, 19 nt, Artificial Sequence
  Description of Artificial Sequence: Synthetic oligonucleotide
  Antisense strand to SEQ ID NO: 75086
ucuccuacagagagcccug

SEQ ID NO: 75168 - RNA, 19 nt, Artificial Sequence
  Description of Artificial Sequence: Synthetic oligonucleotide
  Sense strand starting at position 3077 of SEQ ID NO: 940
ggauuuagugcccagcugu

SEQ ID NO: 75169 - RNA, 19 nt, Artificial Sequence
  Description of Artificial Sequence: Synthetic oligonucleotide
  Antisense strand to SEQ ID NO: 75088
acagcugggcacuaaaucc

SEQ ID NO: 75170 - RNA, 19 nt, Artificial Sequence
  Description of Artificial Sequence: Synthetic oligonucleotide
  Sense strand starting at position 2996 of SEQ ID NO: 940
gccugcuacauagagaaga

SEQ ID NO: 75171 - RNA, 19 nt, Artificial Sequence
  Description of Artificial Sequence: Synthetic oligonucleotide
  Antisense strand to SEQ ID NO: 75090
ucuucucuauguagcaggc

SEQ ID NO: 75172 - RNA, 19 nt, Artificial Sequence
  Description of Artificial Sequence: Synthetic oligonucleotide
  Sense strand starting at position 2593 of SEQ ID NO: 940
gaauucuggcccugggaaa

SEQ ID NO: 75173 - RNA, 19 nt, Artificial Sequence
  Description of Artificial Sequence: Synthetic oligonucleotide
  Antisense strand to SEQ ID NO: 75092
uuucccagggccagaauuc

SEQ ID NO: 75174 - RNA, 19 nt, Artificial Sequence
  Description of Artificial Sequence: Synthetic oligonucleotide
  Sense strand starting at position 1582 of SEQ ID NO: 940
uguccaacuccucagauga

SEQ ID NO: 75175 - RNA, 19 nt, Artificial Sequence
  Description of Artificial Sequence: Synthetic oligonucleotide
  Antisense strand to SEQ ID NO: 75094
ucaucugaggaguuggaca

SEQ ID NO: 75176 - RNA, 19 nt, Artificial Sequence
  Description of Artificial Sequence: Synthetic oligonucleotide
  Sense strand starting at position 1564 of SEQ ID NO: 940
gcacuuuacgcagucaagu

SEQ ID NO: 75177 - RNA, 19 nt, Artificial Sequence
  Description of Artificial Sequence: Synthetic oligonucleotide
  Antisense strand to SEQ ID NO: 75096
acuugacugcguaaagugc

SEQ ID NO: 75178 - RNA, 19 nt, Artificial Sequence
  Description of Artificial Sequence: Synthetic oligonucleotide
  Sense strand starting at position 1351 of SEQ ID NO: 940
ugcucaaaccuagagcauu

SEQ ID NO: 75179 - RNA, 19 nt, Artificial Sequence
  Description of Artificial Sequence: Synthetic oligonucleotide
  Antisense strand to SEQ ID NO: 75098
aaugcucuagguuugagca

SEQ ID NO: 75180 - RNA, 19 nt, Artificial Sequence
  Description of Artificial Sequence: Synthetic oligonucleotide
  Sense strand starting at position 1160 of SEQ ID NO: 940
ccggcaucucuagaaugaa

SEQ ID NO: 75181 - RNA, 19 nt, Artificial Sequence
  Description of Artificial Sequence: Synthetic oligonucleotide
  Antisense strand to SEQ ID NO: 75100
uucauucuagagaugccgg

SEQ ID NO: 75182 - RNA, 19 nt, Artificial Sequence
  Description of Artificial Sequence: Synthetic oligonucleotide
  Sense strand starting at position 1093 of SEQ ID NO: 940
uuauguagagggugaaaug

SEQ ID NO: 75183 - RNA, 19 nt, Artificial Sequence
  Description of Artificial Sequence: Synthetic oligonucleotide
  Antisense strand to SEQ ID NO: 75102
cauuucacccucuacauaa

SEQ ID NO: 75184 - RNA, 19 nt, Artificial Sequence
  Description of Artificial Sequence: Synthetic oligonucleotide
  Sense strand starting at position 1091 of SEQ ID NO: 940
uguuauguagagggugaaa

SEQ ID NO: 75185 - RNA, 19 nt, Artificial Sequence
  Description of Artificial Sequence: Synthetic oligonucleotide
  Antisense strand to SEQ ID NO: 75104
uuucacccucuacauaaca

SEQ ID NO: 75186 - RNA, 19 nt, Artificial Sequence
  Description of Artificial Sequence: Synthetic oligonucleotide
  Sense strand starting at position 980 of SEQ ID NO: 940
gcagauaacuugcuagaaa

SEQ ID NO: 75187 - RNA, 19 nt, Artificial Sequence
  Description of Artificial Sequence: Synthetic oligonucleotide
  Antisense strand to SEQ ID NO: 75106
uuucuagcaaguuaucugc

SEQ ID NO: 75188 - RNA, 19 nt, Artificial Sequence
  Description of Artificial Sequence: Synthetic oligonucleotide
  Sense strand starting at position 914 of SEQ ID NO: 940
auagguccuugauuaaauu

SEQ ID NO: 75189 - RNA, 19 nt, Artificial Sequence
  Description of Artificial Sequence: Synthetic oligonucleotide
  Antisense strand to SEQ ID NO: 75108
aauuuaaucaaggaccuau

SEQ ID NO: 75190 - RNA, 19 nt, Artificial Sequence
  Description of Artificial Sequence: Synthetic oligonucleotide
  Sense strand starting at position 911 of SEQ ID NO: 940
cucauagguccuugauuaa

SEQ ID NO: 75191 - RNA, 19 nt, Artificial Sequence
  Description of Artificial Sequence: Synthetic oligonucleotide
  Antisense strand to SEQ ID NO: 75110
uuaaucaaggaccuaugag

SEQ ID NO: 75192 - RNA, 19 nt, Artificial Sequence
  Description of Artificial Sequence: Synthetic oligonucleotide
  Sense strand starting at position 870 of SEQ ID NO: 940
gcauuuguauccuugcaau

SEQ ID NO: 75193 - RNA, 19 nt, Artificial Sequence
  Description of Artificial Sequence: Synthetic oligonucleotide
  Antisense strand to SEQ ID NO: 75112
auugcaaggauacaaaugc

SEQ ID NO: 75194 - RNA, 19 nt, Artificial Sequence
  Description of Artificial Sequence: Synthetic oligonucleotide
  Sense strand starting at position 768 of SEQ ID NO: 940
ggcccuaagagguagaagu

SEQ ID NO: 75195 - RNA, 19 nt, Artificial Sequence
  Description of Artificial Sequence: Synthetic oligonucleotide
  Antisense strand to SEQ ID NO: 75114
acuucuaccucuuagggcc

SEQ ID NO: 75196 - RNA, 19 nt, Artificial Sequence
  Description of Artificial Sequence: Synthetic oligonucleotide
  Sense strand starting at position 225 of SEQ ID NO: 940
ggauuuaugucgucuauau

SEQ ID NO: 75197 - RNA, 19 nt, Artificial Sequence
  Description of Artificial Sequence: Synthetic oligonucleotide
  Antisense strand to SEQ ID NO: 75116
auauagacgacauaaaucc

SEQ ID NO: 75198 - RNA, 19 nt, Artificial Sequence
  Description of Artificial Sequence: Synthetic oligonucleotide
  Sense strand starting at position 210 of SEQ ID NO: 940
aaauguguacaguauggau

SEQ ID NO: 75199 - RNA, 19 nt, Artificial Sequence
  Description of Artificial Sequence: Synthetic oligonucleotide
  Antisense strand to SEQ ID NO: 75118
auccauacuguacacauuu

SEQ ID NO: 75200 - RNA, 19 nt, Artificial Sequence
  Description of Artificial Sequence: Synthetic oligonucleotide
  Sense strand starting at position 194 of SEQ ID NO: 940
uggacuguuuauucuuaaa

SEQ ID NO: 75201 - RNA, 19 nt, Artificial Sequence
  Description of Artificial Sequence: Synthetic oligonucleotide
  Antisense strand to SEQ ID NO: 75120
uuuaagaauaaacagucca

SEQ ID NO: 75202 - RNA, 19 nt, Artificial Sequence
  Description of Artificial Sequence: Synthetic oligonucleotide
  Sense strand starting at position 158 of SEQ ID NO: 940
uucucagcagauugaauau

SEQ ID NO: 75203 - RNA, 19 nt, Artificial Sequence
  Description of Artificial Sequence: Synthetic oligonucleotide
  Antisense strand to SEQ ID NO: 75122
auauucaaucugcugagaa

SEQ ID NO: 75204 - RNA, 19 nt, Artificial Sequence
  Description of Artificial Sequence: Synthetic oligonucleotide
  Sense strand starting at position 157 of SEQ ID NO: 939
uucucagcagauugaauau

SEQ ID NO: 75205 - RNA, 19 nt, Artificial Sequence
  Description of Artificial Sequence: Synthetic oligonucleotide
  Antisense strand to SEQ ID NO: 75124
auauucaaucugcugagaa

SEQ ID NO: 75206 - RNA, 19 nt, Artificial Sequence
  Description of Artificial Sequence: Synthetic oligonucleotide
  Sense strand starting at position 193 of SEQ ID NO: 939
uggacuguuuauucuuaaa

SEQ ID NO: 75207 - RNA, 19 nt, Artificial Sequence
  Description of Artificial Sequence: Synthetic oligonucleotide
  Antisense strand to SEQ ID NO: 75126
uuuaagaauaaacagucca

SEQ ID NO: 75208 - RNA, 19 nt, Artificial Sequence
  Description of Artificial Sequence: Synthetic oligonucleotide
  Sense strand starting at position 209 of SEQ ID NO: 939
aaauguguacaguauggau

SEQ ID NO: 75209 - RNA, 19 nt, Artificial Sequence
  Description of Artificial Sequence: Synthetic oligonucleotide
  Antisense strand to SEQ ID NO: 75128
auccauacuguacacauuu

SEQ ID NO: 75210 - RNA, 19 nt, Artificial Sequence
  Description of Artificial Sequence: Synthetic oligonucleotide
  Sense strand starting at position 224 of SEQ ID NO: 939
ggauuuaugucgucuauau

SEQ ID NO: 75211 - RNA, 19 nt, Artificial Sequence
  Description of Artificial Sequence: Synthetic oligonucleotide
  Antisense strand to SEQ ID NO: 75130
auauagacgacauaaaucc

SEQ ID NO: 75212 - RNA, 19 nt, Artificial Sequence
  Description of Artificial Sequence: Synthetic oligonucleotide
  Sense strand starting at position 767 of SEQ ID NO: 939
ggcccuaagagguagaagu

SEQ ID NO: 75213 - RNA, 19 nt, Artificial Sequence
  Description of Artificial Sequence: Synthetic oligonucleotide
  Antisense strand to SEQ ID NO: 75132
acuucuaccucuuagggcc

SEQ ID NO: 75214 - RNA, 19 nt, Artificial Sequence
  Description of Artificial Sequence: Synthetic oligonucleotide
  Sense strand starting at position 869 of SEQ ID NO: 939
gcauuuguauccuugcaau

SEQ ID NO: 75215 - RNA, 19 nt, Artificial Sequence
  Description of Artificial Sequence: Synthetic oligonucleotide
  Antisense strand to SEQ ID NO: 75134
auugcaaggauacaaaugc

SEQ ID NO: 75216 - RNA, 19 nt, Artificial Sequence
  Description of Artificial Sequence: Synthetic oligonucleotide
  Sense strand starting at position 910 of SEQ ID NO: 939
cucauagguccuugauuaa

SEQ ID NO: 75217 - RNA, 19 nt, Artificial Sequence
  Description of Artificial Sequence: Synthetic oligonucleotide
  Antisense strand to SEQ ID NO: 75136
uuaaucaaggaccuaugag

SEQ ID NO: 75218 - RNA, 19 nt, Artificial Sequence
  Description of Artificial Sequence: Synthetic oligonucleotide
  Sense strand starting at position 913 of SEQ ID NO: 939
auagguccuugauuaaauu

SEQ ID NO: 75219 - RNA, 19 nt, Artificial Sequence
  Description of Artificial Sequence: Synthetic oligonucleotide
  Antisense strand to SEQ ID NO: 75138
aauuuaaucaaggaccuau

SEQ ID NO: 75220 - RNA, 19 nt, Artificial Sequence
  Description of Artificial Sequence: Synthetic oligonucleotide
  Sense strand starting at position 979 of SEQ ID NO: 939
gcagauaacuugcuagaaa

SEQ ID NO: 75221 - RNA, 19 nt, Artificial Sequence
  Description of Artificial Sequence: Synthetic oligonucleotide
  Antisense strand to SEQ ID NO: 75140
uuucuagcaaguuaucugc

SEQ ID NO: 75222 - RNA, 19 nt, Artificial Sequence
  Description of Artificial Sequence: Synthetic oligonucleotide
  Sense strand starting at position 1090 of SEQ ID NO: 939
uguuauguagagggugaaa

SEQ ID NO: 75223 - RNA, 19 nt, Artificial Sequence
  Description of Artificial Sequence: Synthetic oligonucleotide
  Antisense strand to SEQ ID NO: 75142
uuucacccucuacauaaca

SEQ ID NO: 75224 - RNA, 19 nt, Artificial Sequence
  Description of Artificial Sequence: Synthetic oligonucleotide
  Sense strand starting at position 1092 of SEQ ID NO: 939
uuauguagagggugaaaug

SEQ ID NO: 75225 - RNA, 19 nt, Artificial Sequence
  Description of Artificial Sequence: Synthetic oligonucleotide
  Antisense strand to SEQ ID NO: 75144
cauuucacccucuacauaa

SEQ ID NO: 75226 - RNA, 19 nt, Artificial Sequence
  Description of Artificial Sequence: Synthetic oligonucleotide
  Sense strand starting at position 1159 of SEQ ID NO: 939
ccggcaucucuagaaugaa

SEQ ID NO: 75227 - RNA, 19 nt, Artificial Sequence
  Description of Artificial Sequence: Synthetic oligonucleotide
  Antisense strand to SEQ ID NO: 75146
uucauucuagagaugccgg

SEQ ID NO: 75228 - RNA, 19 nt, Artificial Sequence
  Description of Artificial Sequence: Synthetic oligonucleotide
  Sense strand starting at position 1350 of SEQ ID NO: 939
ugcucaaaccuagagcauu

SEQ ID NO: 75229 - RNA, 19 nt, Artificial Sequence
  Description of Artificial Sequence: Synthetic oligonucleotide
  Antisense strand to SEQ ID NO: 75148
aaugcucuagguuugagca

SEQ ID NO: 75230 - RNA, 19 nt, Artificial Sequence
  Description of Artificial Sequence: Synthetic oligonucleotide
  Sense strand starting at position 1563 of SEQ ID NO: 939
gcacuuuacgcagucaagu

SEQ ID NO: 75231 - RNA, 19 nt, Artificial Sequence
  Description of Artificial Sequence: Synthetic oligonucleotide
  Antisense strand to SEQ ID NO: 75150
acuugacugcguaaagugc

SEQ ID NO: 75232 - RNA, 19 nt, Artificial Sequence
  Description of Artificial Sequence: Synthetic oligonucleotide
  Sense strand starting at position 1581 of SEQ ID NO: 939
uguccaacuccucagauga

SEQ ID NO: 75233 - RNA, 19 nt, Artificial Sequence
  Description of Artificial Sequence: Synthetic oligonucleotide
  Antisense strand to SEQ ID NO: 75152
ucaucugaggaguuggaca

SEQ ID NO: 75234 - RNA, 19 nt, Artificial Sequence
  Description of Artificial Sequence: Synthetic oligonucleotide
  Sense strand starting at position 1816 of SEQ ID NO: 939
cguaaaugaggccagagau

SEQ ID NO: 75235 - RNA, 19 nt, Artificial Sequence
  Description of Artificial Sequence: Synthetic oligonucleotide
  Antisense strand to SEQ ID NO: 75154
aucucuggccucauuuacg

SEQ ID NO: 75236 - RNA, 19 nt, Artificial Sequence
  Description of Artificial Sequence: Synthetic oligonucleotide
  Sense strand starting at position 2993 of SEQ ID NO: 939
gggccugcuacauagagaa

SEQ ID NO: 75237 - RNA, 19 nt, Artificial Sequence
  Description of Artificial Sequence: Synthetic oligonucleotide
  Antisense strand to SEQ ID NO: 75156
uucucuauguagcaggccc

SEQ ID NO: 75238 - RNA, 19 nt, Artificial Sequence
  Description of Artificial Sequence: Synthetic oligonucleotide
  Sense strand starting at position 2995 of SEQ ID NO: 939
gccugcuacauagagaaga

SEQ ID NO: 75239 - RNA, 19 nt, Artificial Sequence
  Description of Artificial Sequence: Synthetic oligonucleotide
  Antisense strand to SEQ ID NO: 75158
ucuucucuauguagcaggc

SEQ ID NO: 75240 - RNA, 19 nt, Artificial Sequence
  Description of Artificial Sequence: Synthetic oligonucleotide
  Sense strand starting at position 3076 of SEQ ID NO: 939
ggauuuagugcccagcugu

SEQ ID NO: 75241 - RNA, 19 nt, Artificial Sequence
  Description of Artificial Sequence: Synthetic oligonucleotide
  Antisense strand to SEQ ID NO: 75160
acagcugggcacuaaaucc

SEQ ID NO: 75242 - RNA, 19 nt, Artificial Sequence
  Description of Artificial Sequence: Synthetic oligonucleotide
  Sense strand starting at position 3242 of SEQ ID NO: 939
cagggcucucuguaggaga

SEQ ID NO: 75243 - RNA, 19 nt, Artificial Sequence
  Description of Artificial Sequence: Synthetic oligonucleotide
  Antisense strand to SEQ ID NO: 75162
ucuccuacagagagcccug

SEQ ID NO: 75244 - RNA, 19 nt, Artificial Sequence
  Description of Artificial Sequence: Synthetic oligonucleotide
  Sense strand starting at position 3279 of SEQ ID NO: 940
cugguuucugcugaaagaa

SEQ ID NO: 75245 - RNA, 19 nt, Artificial Sequence
  Description of Artificial Sequence: Synthetic oligonucleotide
  Antisense strand to SEQ ID NO: 75164
uucuuucagcagaaaccag

SEQ ID NO: 75246 - RNA, 19 nt, Artificial Sequence
  Description of Artificial Sequence: Synthetic oligonucleotide
  Sense strand starting at position 3243 of SEQ ID NO: 940
cagggcucucuguaggaga

SEQ ID NO: 75247 - RNA, 19 nt, Artificial Sequence
  Description of Artificial Sequence: Synthetic oligonucleotide
  Antisense strand to SEQ ID NO: 75166
ucuccuacagagagcccug

SEQ ID NO: 75248 - RNA, 19 nt, Artificial Sequence
  Description of Artificial Sequence: Synthetic oligonucleotide
  Sense strand starting at position 3077 of SEQ ID NO: 940
ggauuuagugcccagcugu

SEQ ID NO: 75249 - RNA, 19 nt, Artificial Sequence
  Description of Artificial Sequence: Synthetic oligonucleotide
  Antisense strand to SEQ ID NO: 75168
acagcugggcacuaaaucc

SEQ ID NO: 75250 - RNA, 19 nt, Artificial Sequence
  Description of Artificial Sequence: Synthetic oligonucleotide
  Sense strand starting at position 2996 of SEQ ID NO: 940
gccugcuacauagagaaga

SEQ ID NO: 75251 - RNA, 19 nt, Artificial Sequence
  Description of Artificial Sequence: Synthetic oligonucleotide
  Antisense strand to SEQ ID NO: 75170
ucuucucuauguagcaggc

SEQ ID NO: 75252 - RNA, 19 nt, Artificial Sequence
  Description of Artificial Sequence: Synthetic oligonucleotide
  Sense strand starting at position 2593 of SEQ ID NO: 940
gaauucuggcccugggaaa

SEQ ID NO: 75253 - RNA, 19 nt, Artificial Sequence
  Description of Artificial Sequence: Synthetic oligonucleotide
  Antisense strand to SEQ ID NO: 75172
uuucccagggccagaauuc

SEQ ID NO: 75254 - RNA, 19 nt, Artificial Sequence
  Description of Artificial Sequence: Synthetic oligonucleotide
  Sense strand starting at position 1582 of SEQ ID NO: 940
uguccaacuccucagauga

SEQ ID NO: 75255 - RNA, 19 nt, Artificial Sequence
  Description of Artificial Sequence: Synthetic oligonucleotide
  Antisense strand to SEQ ID NO: 75174
ucaucugaggaguuggaca

SEQ ID NO: 75256 - RNA, 19 nt, Artificial Sequence
  Description of Artificial Sequence: Synthetic oligonucleotide
  Sense strand starting at position 1564 of SEQ ID NO: 940
gcacuuuacgcagucaagu

SEQ ID NO: 75257 - RNA, 19 nt, Artificial Sequence
  Description of Artificial Sequence: Synthetic oligonucleotide
  Antisense strand to SEQ ID NO: 75176
acuugacugcguaaagugc

SEQ ID NO: 75258 - RNA, 19 nt, Artificial Sequence
  Description of Artificial Sequence: Synthetic oligonucleotide
  Sense strand starting at position 1351 of SEQ ID NO: 940
ugcucaaaccuagagcauu

SEQ ID NO: 75259 - RNA, 19 nt, Artificial Sequence
  Description of Artificial Sequence: Synthetic oligonucleotide
  Antisense strand to SEQ ID NO: 75178
aaugcucuagguuugagca

SEQ ID NO: 75260 - RNA, 19 nt, Artificial Sequence
  Description of Artificial Sequence: Synthetic oligonucleotide
  Sense strand starting at position 1160 of SEQ ID NO: 940
ccggcaucucuagaaugaa

SEQ ID NO: 75261 - RNA, 19 nt, Artificial Sequence
  Description of Artificial Sequence: Synthetic oligonucleotide
  Antisense strand to SEQ ID NO: 75180
uucauucuagagaugccgg

SEQ ID NO: 75262 - RNA, 19 nt, Artificial Sequence
  Description of Artificial Sequence: Synthetic oligonucleotide
  Sense strand starting at position 1093 of SEQ ID NO: 940
uuauguagagggugaaaug

SEQ ID NO: 75263 - RNA, 19 nt, Artificial Sequence
  Description of Artificial Sequence: Synthetic oligonucleotide
  Antisense strand to SEQ ID NO: 75182
cauuucacccucuacauaa

SEQ ID NO: 75264 - RNA, 19 nt, Artificial Sequence
  Description of Artificial Sequence: Synthetic oligonucleotide
  Sense strand starting at position 1091 of SEQ ID NO: 940
uguuauguagagggugaaa

SEQ ID NO: 75265 - RNA, 19 nt, Artificial Sequence
  Description of Artificial Sequence: Synthetic oligonucleotide
  Antisense strand to SEQ ID NO: 75184
uuucacccucuacauaaca

SEQ ID NO: 75266 - RNA, 19 nt, Artificial Sequence
  Description of Artificial Sequence: Synthetic oligonucleotide
  Sense strand starting at position 980 of SEQ ID NO: 940
gcagauaacuugcuagaaa

SEQ ID NO: 75267 - RNA, 19 nt, Artificial Sequence
  Description of Artificial Sequence: Synthetic oligonucleotide
  Antisense strand to SEQ ID NO: 75186
uuucuagcaaguuaucugc

SEQ ID NO: 75268 - RNA, 19 nt, Artificial Sequence
  Description of Artificial Sequence: Synthetic oligonucleotide
  Sense strand starting at position 914 of SEQ ID NO: 940
auagguccuugauuaaauu

SEQ ID NO: 75269 - RNA, 19 nt, Artificial Sequence
  Description of Artificial Sequence: Synthetic oligonucleotide
  Antisense strand to SEQ ID NO: 75188
aauuuaaucaaggaccuau

SEQ ID NO: 75270 - RNA, 19 nt, Artificial Sequence
  Description of Artificial Sequence: Synthetic oligonucleotide
  Sense strand starting at position 911 of SEQ ID NO: 940
cucauagguccuugauuaa

SEQ ID NO: 75271 - RNA, 19 nt, Artificial Sequence
  Description of Artificial Sequence: Synthetic oligonucleotide
  Antisense strand to SEQ ID NO: 75190
uuaaucaaggaccuaugag

SEQ ID NO: 75272 - RNA, 19 nt, Artificial Sequence
  Description of Artificial Sequence: Synthetic oligonucleotide
  Sense strand starting at position 870 of SEQ ID NO: 940
gcauuuguauccuugcaau

SEQ ID NO: 75273 - RNA, 19 nt, Artificial Sequence
  Description of Artificial Sequence: Synthetic oligonucleotide
  Antisense strand to SEQ ID NO: 75192
auugcaaggauacaaaugc

SEQ ID NO: 75274 - RNA, 19 nt, Artificial Sequence
  Description of Artificial Sequence: Synthetic oligonucleotide
  Sense strand starting at position 768 of SEQ ID NO: 940
ggcccuaagagguagaagu

SEQ ID NO: 75275 - RNA, 19 nt, Artificial Sequence
  Description of Artificial Sequence: Synthetic oligonucleotide
  Antisense strand to SEQ ID NO: 75194
acuucuaccucuuagggcc

SEQ ID NO: 75276 - RNA, 19 nt, Artificial Sequence
  Description of Artificial Sequence: Synthetic oligonucleotide
  Sense strand starting at position 225 of SEQ ID NO: 940
ggauuuaugucgucuauau

SEQ ID NO: 75277 - RNA, 19 nt, Artificial Sequence
  Description of Artificial Sequence: Synthetic oligonucleotide
  Antisense strand to SEQ ID NO: 75196
auauagacgacauaaaucc

SEQ ID NO: 75278 - RNA, 19 nt, Artificial Sequence
  Description of Artificial Sequence: Synthetic oligonucleotide
  Sense strand starting at position 210 of SEQ ID NO: 940
aaauguguacaguauggau

SEQ ID NO: 75279 - RNA, 19 nt, Artificial Sequence
  Description of Artificial Sequence: Synthetic oligonucleotide
  Antisense strand to SEQ ID NO: 75198
auccauacuguacacauuu

SEQ ID NO: 75280 - RNA, 19 nt, Artificial Sequence
  Description of Artificial Sequence: Synthetic oligonucleotide
  Sense strand starting at position 194 of SEQ ID NO: 940
uggacuguuuauucuuaaa

SEQ ID NO: 75281 - RNA, 19 nt, Artificial Sequence
  Description of Artificial Sequence: Synthetic oligonucleotide
  Antisense strand to SEQ ID NO: 75200
uuuaagaauaaacagucca

SEQ ID NO: 75282 - RNA, 19 nt, Artificial Sequence
  Description of Artificial Sequence: Synthetic oligonucleotide
  Sense strand starting at position 158 of SEQ ID NO: 940
uucucagcagauugaauau

SEQ ID NO: 75283 - RNA, 19 nt, Artificial Sequence
  Description of Artificial Sequence: Synthetic oligonucleotide
  Antisense strand to SEQ ID NO: 75202
auauucaaucugcugagaa

SEQ ID NO: 75284 - RNA, 19 nt, Artificial Sequence
  Description of Artificial Sequence: Synthetic oligonucleotide
  Sense strand starting at position 157 of SEQ ID NO: 939
uucucagcagauugaauau

SEQ ID NO: 75285 - RNA, 19 nt, Artificial Sequence
  Description of Artificial Sequence: Synthetic oligonucleotide
  Antisense strand to SEQ ID NO: 75204
auauucaaucugcugagaa

SEQ ID NO: 75286 - RNA, 19 nt, Artificial Sequence
  Description of Artificial Sequence: Synthetic oligonucleotide
  Sense strand starting at position 193 of SEQ ID NO: 939
uggacuguuuauucuuaaa

SEQ ID NO: 75287 - RNA, 19 nt, Artificial Sequence
  Description of Artificial Sequence: Synthetic oligonucleotide
  Antisense strand to SEQ ID NO: 75206
uuuaagaauaaacagucca

SEQ ID NO: 75288 - RNA, 19 nt, Artificial Sequence
  Description of Artificial Sequence: Synthetic oligonucleotide
  Sense strand starting at position 209 of SEQ ID NO: 939
aaauguguacaguauggau

SEQ ID NO: 75289 - RNA, 19 nt, Artificial Sequence
  Description of Artificial Sequence: Synthetic oligonucleotide
  Antisense strand to SEQ ID NO: 75208
auccauacuguacacauuu

SEQ ID NO: 75290 - RNA, 19 nt, Artificial Sequence
  Description of Artificial Sequence: Synthetic oligonucleotide
  Sense strand starting at position 224 of SEQ ID NO: 939
ggauuuaugucgucuauau

SEQ ID NO: 75291 - RNA, 19 nt, Artificial Sequence
  Description of Artificial Sequence: Synthetic oligonucleotide
  Antisense strand to SEQ ID NO: 75210
auauagacgacauaaaucc

SEQ ID NO: 75292 - RNA, 19 nt, Artificial Sequence
  Description of Artificial Sequence: Synthetic oligonucleotide
  Sense strand starting at position 767 of SEQ ID NO: 939
ggcccuaagagguagaagu

SEQ ID NO: 75293 - RNA, 19 nt, Artificial Sequence
  Description of Artificial Sequence: Synthetic oligonucleotide
  Antisense strand to SEQ ID NO: 75212
acuucuaccucuuagggcc

SEQ ID NO: 75294 - RNA, 19 nt, Artificial Sequence
  Description of Artificial Sequence: Synthetic oligonucleotide
  Sense strand starting at position 869 of SEQ ID NO: 939
gcauuuguauccuugcaau

SEQ ID NO: 75295 - RNA, 19 nt, Artificial Sequence
  Description of Artificial Sequence: Synthetic oligonucleotide
  Antisense strand to SEQ ID NO: 75214
auugcaaggauacaaaugc

SEQ ID NO: 75296 - RNA, 19 nt, Artificial Sequence
  Description of Artificial Sequence: Synthetic oligonucleotide
  Sense strand starting at position 910 of SEQ ID NO: 939
cucauagguccuugauuaa

SEQ ID NO: 75297 - RNA, 19 nt, Artificial Sequence
  Description of Artificial Sequence: Synthetic oligonucleotide
  Antisense strand to SEQ ID NO: 75216
uuaaucaaggaccuaugag

SEQ ID NO: 75298 - RNA, 19 nt, Artificial Sequence
  Description of Artificial Sequence: Synthetic oligonucleotide
  Sense strand starting at position 913 of SEQ ID NO: 939
auagguccuugauuaaauu

SEQ ID NO: 75299 - RNA, 19 nt, Artificial Sequence
  Description of Artificial Sequence: Synthetic oligonucleotide
  Antisense strand to SEQ ID NO: 75218
aauuuaaucaaggaccuau

SEQ ID NO: 75300 - RNA, 19 nt, Artificial Sequence
  Description of Artificial Sequence: Synthetic oligonucleotide
  Sense strand starting at position 979 of SEQ ID NO: 939
gcagauaacuugcuagaaa

SEQ ID NO: 75301 - RNA, 19 nt, Artificial Sequence
  Description of Artificial Sequence: Synthetic oligonucleotide
  Antisense strand to SEQ ID NO: 75220
uuucuagcaaguuaucugc

SEQ ID NO: 75302 - RNA, 19 nt, Artificial Sequence
  Description of Artificial Sequence: Synthetic oligonucleotide
  Sense strand starting at position 1090 of SEQ ID NO: 939
uguuauguagagggugaaa

SEQ ID NO: 75303 - RNA, 19 nt, Artificial Sequence
  Description of Artificial Sequence: Synthetic oligonucleotide
  Antisense strand to SEQ ID NO: 75222
uuucacccucuacauaaca

SEQ ID NO: 75304 - RNA, 19 nt, Artificial Sequence
  Description of Artificial Sequence: Synthetic oligonucleotide
  Sense strand starting at position 1092 of SEQ ID NO: 939
uuauguagagggugaaaug

SEQ ID NO: 75305 - RNA, 19 nt, Artificial Sequence
  Description of Artificial Sequence: Synthetic oligonucleotide
  Antisense strand to SEQ ID NO: 75224
cauuucacccucuacauaa

SEQ ID NO: 75306 - RNA, 19 nt, Artificial Sequence
  Description of Artificial Sequence: Synthetic oligonucleotide
  Sense strand starting at position 1159 of SEQ ID NO: 939
ccggcaucucuagaaugaa

SEQ ID NO: 75307 - RNA, 19 nt, Artificial Sequence
  Description of Artificial Sequence: Synthetic oligonucleotide
  Antisense strand to SEQ ID NO: 75226
uucauucuagagaugccgg

SEQ ID NO: 75308 - RNA, 19 nt, Artificial Sequence
  Description of Artificial Sequence: Synthetic oligonucleotide
  Sense strand starting at position 1350 of SEQ ID NO: 939
ugcucaaaccuagagcauu

SEQ ID NO: 75309 - RNA, 19 nt, Artificial Sequence
  Description of Artificial Sequence: Synthetic oligonucleotide
  Antisense strand to SEQ ID NO: 75228
aaugcucuagguuugagca

SEQ ID NO: 75310 - RNA, 19 nt, Artificial Sequence
  Description of Artificial Sequence: Synthetic oligonucleotide
  Sense strand starting at position 1563 of SEQ ID NO: 939
gcacuuuacgcagucaagu

SEQ ID NO: 75311 - RNA, 19 nt, Artificial Sequence
  Description of Artificial Sequence: Synthetic oligonucleotide
  Antisense strand to SEQ ID NO: 75230
acuugacugcguaaagugc

SEQ ID NO: 75312 - RNA, 19 nt, Artificial Sequence
  Description of Artificial Sequence: Synthetic oligonucleotide
  Sense strand starting at position 1581 of SEQ ID NO: 939
uguccaacuccucagauga

SEQ ID NO: 75313 - RNA, 19 nt, Artificial Sequence
  Description of Artificial Sequence: Synthetic oligonucleotide
  Antisense strand to SEQ ID NO: 75232
ucaucugaggaguuggaca

SEQ ID NO: 75314 - RNA, 19 nt, Artificial Sequence
  Description of Artificial Sequence: Synthetic oligonucleotide
  Sense strand starting at position 1816 of SEQ ID NO: 939
cguaaaugaggccagagau

SEQ ID NO: 75315 - RNA, 19 nt, Artificial Sequence
  Description of Artificial Sequence: Synthetic oligonucleotide
  Antisense strand to SEQ ID NO: 75234
aucucuggccucauuuacg

SEQ ID NO: 75316 - RNA, 19 nt, Artificial Sequence
  Description of Artificial Sequence: Synthetic oligonucleotide
  Sense strand starting at position 2993 of SEQ ID NO: 939
gggccugcuacauagagaa

SEQ ID NO: 75317 - RNA, 19 nt, Artificial Sequence
  Description of Artificial Sequence: Synthetic oligonucleotide
  Antisense strand to SEQ ID NO: 75236
uucucuauguagcaggccc

SEQ ID NO: 75318 - RNA, 19 nt, Artificial Sequence
  Description of Artificial Sequence: Synthetic oligonucleotide
  Sense strand starting at position 2995 of SEQ ID NO: 939
gccugcuacauagagaaga

SEQ ID NO: 75319 - RNA, 19 nt, Artificial Sequence
  Description of Artificial Sequence: Synthetic oligonucleotide
  Antisense strand to SEQ ID NO: 75238
ucuucucuauguagcaggc

SEQ ID NO: 75320 - RNA, 19 nt, Artificial Sequence
  Description of Artificial Sequence: Synthetic oligonucleotide
  Sense strand starting at position 3076 of SEQ ID NO: 939
ggauuuagugcccagcugu

SEQ ID NO: 75321 - RNA, 19 nt, Artificial Sequence
  Description of Artificial Sequence: Synthetic oligonucleotide
  Antisense strand to SEQ ID NO: 75240
acagcugggcacuaaaucc

SEQ ID NO: 75322 - RNA, 19 nt, Artificial Sequence
  Description of Artificial Sequence: Synthetic oligonucleotide
  Sense strand starting at position 3242 of SEQ ID NO: 939
cagggcucucuguaggaga

SEQ ID NO: 75323 - RNA, 19 nt, Artificial Sequence
  Description of Artificial Sequence: Synthetic oligonucleotide
  Antisense strand to SEQ ID NO: 75242
ucuccuacagagagcccug

SEQ ID NO: 75324 - RNA, 19 nt, Artificial Sequence
  Description of Artificial Sequence: Synthetic oligonucleotide
  Sense strand starting at position 36 of SEQ ID NO: 941
uggccaguccuugcaguuu

SEQ ID NO: 75325 - RNA, 19 nt, Artificial Sequence
  Description of Artificial Sequence: Synthetic oligonucleotide
  Antisense strand to SEQ ID NO: 75244
aaacugcaaggacuggcca

SEQ ID NO: 75326 - RNA, 19 nt, Artificial Sequence
  Description of Artificial Sequence: Synthetic oligonucleotide
  Sense strand starting at position 79 of SEQ ID NO: 941
cgugauacacacugugaau

SEQ ID NO: 75327 - RNA, 19 nt, Artificial Sequence
  Description of Artificial Sequence: Synthetic oligonucleotide
  Antisense strand to SEQ ID NO: 75246
auucacaguguguaucacg

SEQ ID NO: 75328 - RNA, 19 nt, Artificial Sequence
  Description of Artificial Sequence: Synthetic oligonucleotide
  Sense strand starting at position 81 of SEQ ID NO: 941
ugauacacacugugaauau

SEQ ID NO: 75329 - RNA, 19 nt, Artificial Sequence
  Description of Artificial Sequence: Synthetic oligonucleotide
  Antisense strand to SEQ ID NO: 75248
auauucacaguguguauca

SEQ ID NO: 75330 - RNA, 19 nt, Artificial Sequence
  Description of Artificial Sequence: Synthetic oligonucleotide
  Sense strand starting at position 105 of SEQ ID NO: 941
uguuuagauccacacuguu

SEQ ID NO: 75331 - RNA, 19 nt, Artificial Sequence
  Description of Artificial Sequence: Synthetic oligonucleotide
  Antisense strand to SEQ ID NO: 75250
aacaguguggaucuaaaca

SEQ ID NO: 75332 - RNA, 19 nt, Artificial Sequence
  Description of Artificial Sequence: Synthetic oligonucleotide
  Sense strand starting at position 124 of SEQ ID NO: 941
ggagcagcugcuuaccaau

SEQ ID NO: 75333 - RNA, 19 nt, Artificial Sequence
  Description of Artificial Sequence: Synthetic oligonucleotide
  Antisense strand to SEQ ID NO: 75252
auugguaagcagcugcucc

SEQ ID NO: 75334 - RNA, 19 nt, Artificial Sequence
  Description of Artificial Sequence: Synthetic oligonucleotide
  Sense strand starting at position 190 of SEQ ID NO: 941
gcagauuugugguuagcug

SEQ ID NO: 75335 - RNA, 19 nt, Artificial Sequence
  Description of Artificial Sequence: Synthetic oligonucleotide
  Antisense strand to SEQ ID NO: 75254
cagcuaaccacaaaucugc

SEQ ID NO: 75336 - RNA, 19 nt, Artificial Sequence
  Description of Artificial Sequence: Synthetic oligonucleotide
  Sense strand starting at position 560 of SEQ ID NO: 941
agggauuaucguggauuaa

SEQ ID NO: 75337 - RNA, 19 nt, Artificial Sequence
  Description of Artificial Sequence: Synthetic oligonucleotide
  Antisense strand to SEQ ID NO: 75256
uuaauccacgauaaucccu

SEQ ID NO: 75338 - RNA, 19 nt, Artificial Sequence
  Description of Artificial Sequence: Synthetic oligonucleotide
  Sense strand starting at position 564 of SEQ ID NO: 941
auuaucguggauuaaauca

SEQ ID NO: 75339 - RNA, 19 nt, Artificial Sequence
  Description of Artificial Sequence: Synthetic oligonucleotide
  Antisense strand to SEQ ID NO: 75258
ugauuuaauccacgauaau

SEQ ID NO: 75340 - RNA, 19 nt, Artificial Sequence
  Description of Artificial Sequence: Synthetic oligonucleotide
  Sense strand starting at position 631 of SEQ ID NO: 941
aguuaauuugccuggaggu

SEQ ID NO: 75341 - RNA, 19 nt, Artificial Sequence
  Description of Artificial Sequence: Synthetic oligonucleotide
  Antisense strand to SEQ ID NO: 75260
accuccaggcaaauuaacu

SEQ ID NO: 75342 - RNA, 19 nt, Artificial Sequence
  Description of Artificial Sequence: Synthetic oligonucleotide
  Sense strand starting at position 632 of SEQ ID NO: 941
guuaauuugccuggagguc

SEQ ID NO: 75343 - RNA, 19 nt, Artificial Sequence
  Description of Artificial Sequence: Synthetic oligonucleotide
  Antisense strand to SEQ ID NO: 75262
gaccuccaggcaaauuaac

SEQ ID NO: 75344 - RNA, 19 nt, Artificial Sequence
  Description of Artificial Sequence: Synthetic oligonucleotide
  Sense strand starting at position 709 of SEQ ID NO: 941
uccuaaaguccacauguau

SEQ ID NO: 75345 - RNA, 19 nt, Artificial Sequence
  Description of Artificial Sequence: Synthetic oligonucleotide
  Antisense strand to SEQ ID NO: 75264
auacauguggacuuuagga

SEQ ID NO: 75346 - RNA, 19 nt, Artificial Sequence
  Description of Artificial Sequence: Synthetic oligonucleotide
  Sense strand starting at position 1042 of SEQ ID NO: 941
uggagcucacauuguuaaa

SEQ ID NO: 75347 - RNA, 19 nt, Artificial Sequence
  Description of Artificial Sequence: Synthetic oligonucleotide
  Antisense strand to SEQ ID NO: 75266
uuuaacaaugugagcucca

SEQ ID NO: 75348 - RNA, 19 nt, Artificial Sequence
  Description of Artificial Sequence: Synthetic oligonucleotide
  Sense strand starting at position 1108 of SEQ ID NO: 941
agugcaaacuacuuagaga

SEQ ID NO: 75349 - RNA, 19 nt, Artificial Sequence
  Description of Artificial Sequence: Synthetic oligonucleotide
  Antisense strand to SEQ ID NO: 75268
ucucuaaguaguuugcacu

SEQ ID NO: 75350 - RNA, 19 nt, Artificial Sequence
  Description of Artificial Sequence: Synthetic oligonucleotide
  Sense strand starting at position 1166 of SEQ ID NO: 941
ugcauucuguacuugauga

SEQ ID NO: 75351 - RNA, 19 nt, Artificial Sequence
  Description of Artificial Sequence: Synthetic oligonucleotide
  Antisense strand to SEQ ID NO: 75270
ucaucaaguacagaaugca

SEQ ID NO: 75352 - RNA, 19 nt, Artificial Sequence
  Description of Artificial Sequence: Synthetic oligonucleotide
  Sense strand starting at position 1189 of SEQ ID NO: 941
acgggaaccuugcuagagu

SEQ ID NO: 75353 - RNA, 19 nt, Artificial Sequence
  Description of Artificial Sequence: Synthetic oligonucleotide
  Antisense strand to SEQ ID NO: 75272
acucuagcaagguucccgu

SEQ ID NO: 75354 - RNA, 19 nt, Artificial Sequence
  Description of Artificial Sequence: Synthetic oligonucleotide
  Sense strand starting at position 1192 of SEQ ID NO: 941
ggaaccuugcuagagucaa

SEQ ID NO: 75355 - RNA, 19 nt, Artificial Sequence
  Description of Artificial Sequence: Synthetic oligonucleotide
  Antisense strand to SEQ ID NO: 75274
uugacucuagcaagguucc

SEQ ID NO: 75356 - RNA, 19 nt, Artificial Sequence
  Description of Artificial Sequence: Synthetic oligonucleotide
  Sense strand starting at position 1196 of SEQ ID NO: 941
ccuugcuagagucaagaga

SEQ ID NO: 75357 - RNA, 19 nt, Artificial Sequence
  Description of Artificial Sequence: Synthetic oligonucleotide
  Antisense strand to SEQ ID NO: 75276
ucucuugacucuagcaagg

SEQ ID NO: 75358 - RNA, 19 nt, Artificial Sequence
  Description of Artificial Sequence: Synthetic oligonucleotide
  Sense strand starting at position 1211 of SEQ ID NO: 941
gagaacuugucacuaguaa

SEQ ID NO: 75359 - RNA, 19 nt, Artificial Sequence
  Description of Artificial Sequence: Synthetic oligonucleotide
  Antisense strand to SEQ ID NO: 75278
uuacuagugacaaguucuc

SEQ ID NO: 75360 - RNA, 19 nt, Artificial Sequence
  Description of Artificial Sequence: Synthetic oligonucleotide
  Sense strand starting at position 1212 of SEQ ID NO: 941
agaacuugucacuaguaau

SEQ ID NO: 75361 - RNA, 19 nt, Artificial Sequence
  Description of Artificial Sequence: Synthetic oligonucleotide
  Antisense strand to SEQ ID NO: 75280
auuacuagugacaaguucu

SEQ ID NO: 75362 - RNA, 19 nt, Artificial Sequence
  Description of Artificial Sequence: Synthetic oligonucleotide
  Sense strand starting at position 1218 of SEQ ID NO: 941
ugucacuaguaauuaugaa

SEQ ID NO: 75363 - RNA, 19 nt, Artificial Sequence
  Description of Artificial Sequence: Synthetic oligonucleotide
  Antisense strand to SEQ ID NO: 75282
uucauaauuacuagugaca

SEQ ID NO: 75364 - RNA, 19 nt, Artificial Sequence
  Description of Artificial Sequence: Synthetic oligonucleotide
  Sense strand starting at position 1245 of SEQ ID NO: 941
uacggugagcguuauuaaa

SEQ ID NO: 75365 - RNA, 19 nt, Artificial Sequence
  Description of Artificial Sequence: Synthetic oligonucleotide
  Antisense strand to SEQ ID NO: 75284
uuuaauaacgcucaccgua

SEQ ID NO: 75366 - RNA, 19 nt, Artificial Sequence
  Description of Artificial Sequence: Synthetic oligonucleotide
  Sense strand starting at position 1766 of SEQ ID NO: 941
ccaggaucucggcagucaa

SEQ ID NO: 75367 - RNA, 19 nt, Artificial Sequence
  Description of Artificial Sequence: Synthetic oligonucleotide
  Antisense strand to SEQ ID NO: 75286
uugacugccgagauccugg

SEQ ID NO: 75368 - RNA, 19 nt, Artificial Sequence
  Description of Artificial Sequence: Synthetic oligonucleotide
  Sense strand starting at position 2025 of SEQ ID NO: 941
gccagcgagcccuuaugua

SEQ ID NO: 75369 - RNA, 19 nt, Artificial Sequence
  Description of Artificial Sequence: Synthetic oligonucleotide
  Antisense strand to SEQ ID NO: 75288
uacauaagggcucgcuggc

SEQ ID NO: 75370 - RNA, 19 nt, Artificial Sequence
  Description of Artificial Sequence: Synthetic oligonucleotide
  Sense strand starting at position 2032 of SEQ ID NO: 941
agcccuuauguaugguaca

SEQ ID NO: 75371 - RNA, 19 nt, Artificial Sequence
  Description of Artificial Sequence: Synthetic oligonucleotide
  Antisense strand to SEQ ID NO: 75290
uguaccauacauaagggcu

SEQ ID NO: 75372 - RNA, 19 nt, Artificial Sequence
  Description of Artificial Sequence: Synthetic oligonucleotide
  Sense strand starting at position 2118 of SEQ ID NO: 941
uccuaauuugcguauuccu

SEQ ID NO: 75373 - RNA, 19 nt, Artificial Sequence
  Description of Artificial Sequence: Synthetic oligonucleotide
  Antisense strand to SEQ ID NO: 75292
aggaauacgcaaauuagga

SEQ ID NO: 75374 - RNA, 19 nt, Artificial Sequence
  Description of Artificial Sequence: Synthetic oligonucleotide
  Sense strand starting at position 2179 of SEQ ID NO: 941
ugagcaaauccugagccuu

SEQ ID NO: 75375 - RNA, 19 nt, Artificial Sequence
  Description of Artificial Sequence: Synthetic oligonucleotide
  Antisense strand to SEQ ID NO: 75294
aaggcucaggauuugcuca

SEQ ID NO: 75376 - RNA, 19 nt, Artificial Sequence
  Description of Artificial Sequence: Synthetic oligonucleotide
  Sense strand starting at position 2731 of SEQ ID NO: 941
aggguuauguaaccuaaug

SEQ ID NO: 75377 - RNA, 19 nt, Artificial Sequence
  Description of Artificial Sequence: Synthetic oligonucleotide
  Antisense strand to SEQ ID NO: 75296
cauuagguuacauaacccu

SEQ ID NO: 75378 - RNA, 19 nt, Artificial Sequence
  Description of Artificial Sequence: Synthetic oligonucleotide
  Sense strand starting at position 2733 of SEQ ID NO: 941
gguuauguaaccuaaugug

SEQ ID NO: 75379 - RNA, 19 nt, Artificial Sequence
  Description of Artificial Sequence: Synthetic oligonucleotide
  Antisense strand to SEQ ID NO: 75298
cacauuagguuacauaacc

SEQ ID NO: 75380 - RNA, 19 nt, Artificial Sequence
  Description of Artificial Sequence: Synthetic oligonucleotide
  Sense strand starting at position 2877 of SEQ ID NO: 941
guagaaacugcucagguga

SEQ ID NO: 75381 - RNA, 19 nt, Artificial Sequence
  Description of Artificial Sequence: Synthetic oligonucleotide
  Antisense strand to SEQ ID NO: 75300
ucaccugagcaguuucuac

SEQ ID NO: 75382 - RNA, 19 nt, Artificial Sequence
  Description of Artificial Sequence: Synthetic oligonucleotide
  Sense strand starting at position 2891 of SEQ ID NO: 941
ggugauguagcucaguaau

SEQ ID NO: 75383 - RNA, 19 nt, Artificial Sequence
  Description of Artificial Sequence: Synthetic oligonucleotide
  Antisense strand to SEQ ID NO: 75302
auuacugagcuacaucacc

SEQ ID NO: 75384 - RNA, 19 nt, Artificial Sequence
  Description of Artificial Sequence: Synthetic oligonucleotide
  Sense strand starting at position 2894 of SEQ ID NO: 941
gauguagcucaguaauguu

SEQ ID NO: 75385 - RNA, 19 nt, Artificial Sequence
  Description of Artificial Sequence: Synthetic oligonucleotide
  Antisense strand to SEQ ID NO: 75304
aacauuacugagcuacauc

SEQ ID NO: 75386 - RNA, 19 nt, Artificial Sequence
  Description of Artificial Sequence: Synthetic oligonucleotide
  Sense strand starting at position 2960 of SEQ ID NO: 941
cuauuaacucacgacgaga

SEQ ID NO: 75387 - RNA, 19 nt, Artificial Sequence
  Description of Artificial Sequence: Synthetic oligonucleotide
  Antisense strand to SEQ ID NO: 75306
ucucgucgugaguuaauag

SEQ ID NO: 75388 - RNA, 19 nt, Artificial Sequence
  Description of Artificial Sequence: Synthetic oligonucleotide
  Sense strand starting at position 2962 of SEQ ID NO: 941
auuaacucacgacgagauu

SEQ ID NO: 75389 - RNA, 19 nt, Artificial Sequence
  Description of Artificial Sequence: Synthetic oligonucleotide
  Antisense strand to SEQ ID NO: 75308
aaucucgucgugaguuaau

SEQ ID NO: 75390 - RNA, 19 nt, Artificial Sequence
  Description of Artificial Sequence: Synthetic oligonucleotide
  Sense strand starting at position 3325 of SEQ ID NO: 941
ggugcauuccuggauguug

SEQ ID NO: 75391 - RNA, 19 nt, Artificial Sequence
  Description of Artificial Sequence: Synthetic oligonucleotide
  Antisense strand to SEQ ID NO: 75310
caacauccaggaaugcacc

SEQ ID NO: 75392 - RNA, 19 nt, Artificial Sequence
  Description of Artificial Sequence: Synthetic oligonucleotide
  Sense strand starting at position 3616 of SEQ ID NO: 941
aacauuccgggaggauauu

SEQ ID NO: 75393 - RNA, 19 nt, Artificial Sequence
  Description of Artificial Sequence: Synthetic oligonucleotide
  Antisense strand to SEQ ID NO: 75312
aauauccucccggaauguu

SEQ ID NO: 75394 - RNA, 19 nt, Artificial Sequence
  Description of Artificial Sequence: Synthetic oligonucleotide
  Sense strand starting at position 3662 of SEQ ID NO: 941
auguuugauaccgaaucga

SEQ ID NO: 75395 - RNA, 19 nt, Artificial Sequence
  Description of Artificial Sequence: Synthetic oligonucleotide
  Antisense strand to SEQ ID NO: 75314
ucgauucgguaucaaacau

SEQ ID NO: 75396 - RNA, 19 nt, Artificial Sequence
  Description of Artificial Sequence: Synthetic oligonucleotide
  Sense strand starting at position 3782 of SEQ ID NO: 941
ggguuaauuuaggaggaaa

SEQ ID NO: 75397 - RNA, 19 nt, Artificial Sequence
  Description of Artificial Sequence: Synthetic oligonucleotide
  Antisense strand to SEQ ID NO: 75316
uuuccuccuaaauuaaccc

SEQ ID NO: 75398 - RNA, 19 nt, Artificial Sequence
  Description of Artificial Sequence: Synthetic oligonucleotide
  Sense strand starting at position 3863 of SEQ ID NO: 941
ggcguuagcaacgcagaau

SEQ ID NO: 75399 - RNA, 19 nt, Artificial Sequence
  Description of Artificial Sequence: Synthetic oligonucleotide
  Antisense strand to SEQ ID NO: 75318
auucugcguugcuaacgcc

SEQ ID NO: 75400 - RNA, 19 nt, Artificial Sequence
  Description of Artificial Sequence: Synthetic oligonucleotide
  Sense strand starting at position 3941 of SEQ ID NO: 941
gaaagcucuuuggcacgaa

SEQ ID NO: 75401 - RNA, 19 nt, Artificial Sequence
  Description of Artificial Sequence: Synthetic oligonucleotide
  Antisense strand to SEQ ID NO: 75320
uucgugccaaagagcuuuc

SEQ ID NO: 75402 - RNA, 19 nt, Artificial Sequence
  Description of Artificial Sequence: Synthetic oligonucleotide
  Sense strand starting at position 3945 of SEQ ID NO: 941
gcucuuuggcacgaagagu

SEQ ID NO: 75403 - RNA, 19 nt, Artificial Sequence
  Description of Artificial Sequence: Synthetic oligonucleotide
  Antisense strand to SEQ ID NO: 75322
acucuucgugccaaagagc

SEQ ID NO: 75404 - RNA, 19 nt, Artificial Sequence
  Description of Artificial Sequence: Synthetic oligonucleotide
  Sense strand starting at position 3826 of SEQ ID NO: 942
gcuaguauuuaguuaauug

SEQ ID NO: 75405 - RNA, 19 nt, Artificial Sequence
  Description of Artificial Sequence: Synthetic oligonucleotide
  Antisense strand to SEQ ID NO: 75324
caauuaacuaaauacuagc

SEQ ID NO: 75406 - RNA, 19 nt, Artificial Sequence
  Description of Artificial Sequence: Synthetic oligonucleotide
  Sense strand starting at position 3822 of SEQ ID NO: 942
aagugcuaguauuuaguua

SEQ ID NO: 75407 - RNA, 19 nt, Artificial Sequence
  Description of Artificial Sequence: Synthetic oligonucleotide
  Antisense strand to SEQ ID NO: 75326
uaacuaaauacuagcacuu

SEQ ID NO: 75408 - RNA, 19 nt, Artificial Sequence
  Description of Artificial Sequence: Synthetic oligonucleotide
  Sense strand starting at position 3737 of SEQ ID NO: 942
uguuguuaucuguacaguu

SEQ ID NO: 75409 - RNA, 19 nt, Artificial Sequence
  Description of Artificial Sequence: Synthetic oligonucleotide
  Antisense strand to SEQ ID NO: 75328
aacuguacagauaacaaca

SEQ ID NO: 75410 - RNA, 19 nt, Artificial Sequence
  Description of Artificial Sequence: Synthetic oligonucleotide
  Sense strand starting at position 3723 of SEQ ID NO: 942
aaguguuauucuucuguug

SEQ ID NO: 75411 - RNA, 19 nt, Artificial Sequence
  Description of Artificial Sequence: Synthetic oligonucleotide
  Antisense strand to SEQ ID NO: 75330
caacagaagaauaacacuu

SEQ ID NO: 75412 - RNA, 19 nt, Artificial Sequence
  Description of Artificial Sequence: Synthetic oligonucleotide
  Sense strand starting at position 3617 of SEQ ID NO: 942
cugaaauggcuguguuaau

SEQ ID NO: 75413 - RNA, 19 nt, Artificial Sequence
  Description of Artificial Sequence: Synthetic oligonucleotide
  Antisense strand to SEQ ID NO: 75332
auuaacacagccauuucag

SEQ ID NO: 75414 - RNA, 19 nt, Artificial Sequence
  Description of Artificial Sequence: Synthetic oligonucleotide
  Sense strand starting at position 3615 of SEQ ID NO: 942
aacugaaauggcuguguua

SEQ ID NO: 75415 - RNA, 19 nt, Artificial Sequence
  Description of Artificial Sequence: Synthetic oligonucleotide
  Antisense strand to SEQ ID NO: 75334
uaacacagccauuucaguu

SEQ ID NO: 75416 - RNA, 19 nt, Artificial Sequence
  Description of Artificial Sequence: Synthetic oligonucleotide
  Sense strand starting at position 3545 of SEQ ID NO: 942
aacgguuuguaacuacauu

SEQ ID NO: 75417 - RNA, 19 nt, Artificial Sequence
  Description of Artificial Sequence: Synthetic oligonucleotide
  Antisense strand to SEQ ID NO: 75336
aauguaguuacaaaccguu

SEQ ID NO: 75418 - RNA, 19 nt, Artificial Sequence
  Description of Artificial Sequence: Synthetic oligonucleotide
  Sense strand starting at position 3541 of SEQ ID NO: 942
aaauaacgguuuguaacua

SEQ ID NO: 75419 - RNA, 19 nt, Artificial Sequence
  Description of Artificial Sequence: Synthetic oligonucleotide
  Antisense strand to SEQ ID NO: 75338
uaguuacaaaccguuauuu

SEQ ID NO: 75420 - RNA, 19 nt, Artificial Sequence
  Description of Artificial Sequence: Synthetic oligonucleotide
  Sense strand starting at position 3517 of SEQ ID NO: 942
ugaugauacauguggacuu

SEQ ID NO: 75421 - RNA, 19 nt, Artificial Sequence
  Description of Artificial Sequence: Synthetic oligonucleotide
  Antisense strand to SEQ ID NO: 75340
aaguccacauguaucauca

SEQ ID NO: 75422 - RNA, 19 nt, Artificial Sequence
  Description of Artificial Sequence: Synthetic oligonucleotide
  Sense strand starting at position 3511 of SEQ ID NO: 942
gaugaaugaugauacaugu

SEQ ID NO: 75423 - RNA, 19 nt, Artificial Sequence
  Description of Artificial Sequence: Synthetic oligonucleotide
  Antisense strand to SEQ ID NO: 75342
acauguaucaucauucauc

SEQ ID NO: 75424 - RNA, 19 nt, Artificial Sequence
  Description of Artificial Sequence: Synthetic oligonucleotide
  Sense strand starting at position 3490 of SEQ ID NO: 942
aaaugaguauuguuagaac

SEQ ID NO: 75425 - RNA, 19 nt, Artificial Sequence
  Description of Artificial Sequence: Synthetic oligonucleotide
  Antisense strand to SEQ ID NO: 75344
guucuaacaauacucauuu

SEQ ID NO: 75426 - RNA, 19 nt, Artificial Sequence
  Description of Artificial Sequence: Synthetic oligonucleotide
  Sense strand starting at position 3366 of SEQ ID NO: 942
uuaauucggguuggucaaa

SEQ ID NO: 75427 - RNA, 19 nt, Artificial Sequence
  Description of Artificial Sequence: Synthetic oligonucleotide
  Antisense strand to SEQ ID NO: 75346
uuugaccaacccgaauuaa

SEQ ID NO: 75428 - RNA, 19 nt, Artificial Sequence
  Description of Artificial Sequence: Synthetic oligonucleotide
  Sense strand starting at position 3365 of SEQ ID NO: 942
uuuaauucggguuggucaa

SEQ ID NO: 75429 - RNA, 19 nt, Artificial Sequence
  Description of Artificial Sequence: Synthetic oligonucleotide
  Antisense strand to SEQ ID NO: 75348
uugaccaacccgaauuaaa

SEQ ID NO: 75430 - RNA, 19 nt, Artificial Sequence
  Description of Artificial Sequence: Synthetic oligonucleotide
  Sense strand starting at position 3294 of SEQ ID NO: 942
ugcugaaagguauaaaccu

SEQ ID NO: 75431 - RNA, 19 nt, Artificial Sequence
  Description of Artificial Sequence: Synthetic oligonucleotide
  Antisense strand to SEQ ID NO: 75350
agguuuauaccuuucagca

SEQ ID NO: 75432 - RNA, 19 nt, Artificial Sequence
  Description of Artificial Sequence: Synthetic oligonucleotide
  Sense strand starting at position 3226 of SEQ ID NO: 942
uuauuuggcugggaauucu

SEQ ID NO: 75433 - RNA, 19 nt, Artificial Sequence
  Description of Artificial Sequence: Synthetic oligonucleotide
  Antisense strand to SEQ ID NO: 75352
agaauucccagccaaauaa

SEQ ID NO: 75434 - RNA, 19 nt, Artificial Sequence
  Description of Artificial Sequence: Synthetic oligonucleotide
  Sense strand starting at position 3194 of SEQ ID NO: 942
caaugugagcuccaccagu

SEQ ID NO: 75435 - RNA, 19 nt, Artificial Sequence
  Description of Artificial Sequence: Synthetic oligonucleotide
  Antisense strand to SEQ ID NO: 75354
acugguggagcucacauug

SEQ ID NO: 75436 - RNA, 19 nt, Artificial Sequence
  Description of Artificial Sequence: Synthetic oligonucleotide
  Sense strand starting at position 3061 of SEQ ID NO: 942
guggucaucaaguacagaa

SEQ ID NO: 75437 - RNA, 19 nt, Artificial Sequence
  Description of Artificial Sequence: Synthetic oligonucleotide
  Antisense strand to SEQ ID NO: 75356
uucuguacuugaugaccac

SEQ ID NO: 75438 - RNA, 19 nt, Artificial Sequence
  Description of Artificial Sequence: Synthetic oligonucleotide
  Sense strand starting at position 3026 of SEQ ID NO: 942
gugacaaguucucuugacu

SEQ ID NO: 75439 - RNA, 19 nt, Artificial Sequence
  Description of Artificial Sequence: Synthetic oligonucleotide
  Antisense strand to SEQ ID NO: 75358
agucaagagaacuugucac

SEQ ID NO: 75440 - RNA, 19 nt, Artificial Sequence
  Description of Artificial Sequence: Synthetic oligonucleotide
  Sense strand starting at position 2986 of SEQ ID NO: 942
uuuaauaacgcucaccgua

SEQ ID NO: 75441 - RNA, 19 nt, Artificial Sequence
  Description of Artificial Sequence: Synthetic oligonucleotide
  Antisense strand to SEQ ID NO: 75360
uacggugagcguuauuaaa

SEQ ID NO: 75442 - RNA, 19 nt, Artificial Sequence
  Description of Artificial Sequence: Synthetic oligonucleotide
  Sense strand starting at position 2869 of SEQ ID NO: 942
gacugauugggcugcauac

SEQ ID NO: 75443 - RNA, 19 nt, Artificial Sequence
  Description of Artificial Sequence: Synthetic oligonucleotide
  Antisense strand to SEQ ID NO: 75362
guaugcagcccaaucaguc

SEQ ID NO: 75444 - RNA, 19 nt, Artificial Sequence
  Description of Artificial Sequence: Synthetic oligonucleotide
  Sense strand starting at position 2275 of SEQ ID NO: 942
uuuccuugacucggaaaug

SEQ ID NO: 75445 - RNA, 19 nt, Artificial Sequence
  Description of Artificial Sequence: Synthetic oligonucleotide
  Antisense strand to SEQ ID NO: 75364
cauuuccgagucaaggaaa

SEQ ID NO: 75446 - RNA, 19 nt, Artificial Sequence
  Description of Artificial Sequence: Synthetic oligonucleotide
  Sense strand starting at position 2189 of SEQ ID NO: 942
agccuaccucuguaccaua

SEQ ID NO: 75447 - RNA, 19 nt, Artificial Sequence
  Description of Artificial Sequence: Synthetic oligonucleotide
  Antisense strand to SEQ ID NO: 75366
uaugguacagagguaggcu

SEQ ID NO: 75448 - RNA, 19 nt, Artificial Sequence
  Description of Artificial Sequence: Synthetic oligonucleotide
  Sense strand starting at position 2096 of SEQ ID NO: 942
uacgucaucgcugggaaag

SEQ ID NO: 75449 - RNA, 19 nt, Artificial Sequence
  Description of Artificial Sequence: Synthetic oligonucleotide
  Antisense strand to SEQ ID NO: 75368
cuuucccagcgaugacgua

SEQ ID NO: 75450 - RNA, 19 nt, Artificial Sequence
  Description of Artificial Sequence: Synthetic oligonucleotide
  Sense strand starting at position 2095 of SEQ ID NO: 942
cuacgucaucgcugggaaa

SEQ ID NO: 75451 - RNA, 19 nt, Artificial Sequence
  Description of Artificial Sequence: Synthetic oligonucleotide
  Antisense strand to SEQ ID NO: 75370
uuucccagcgaugacguag

SEQ ID NO: 75452 - RNA, 19 nt, Artificial Sequence
  Description of Artificial Sequence: Synthetic oligonucleotide
  Sense strand starting at position 2079 of SEQ ID NO: 942
uggaucaaacguuguucua

SEQ ID NO: 75453 - RNA, 19 nt, Artificial Sequence
  Description of Artificial Sequence: Synthetic oligonucleotide
  Antisense strand to SEQ ID NO: 75372
uagaacaacguuugaucca

SEQ ID NO: 75454 - RNA, 19 nt, Artificial Sequence
  Description of Artificial Sequence: Synthetic oligonucleotide
  Sense strand starting at position 2072 of SEQ ID NO: 942
uucugauuggaucaaacgu

SEQ ID NO: 75455 - RNA, 19 nt, Artificial Sequence
  Description of Artificial Sequence: Synthetic oligonucleotide
  Antisense strand to SEQ ID NO: 75374
acguuugauccaaucagaa

SEQ ID NO: 75456 - RNA, 19 nt, Artificial Sequence
  Description of Artificial Sequence: Synthetic oligonucleotide
  Sense strand starting at position 2067 of SEQ ID NO: 942
cucacuucugauuggauca

SEQ ID NO: 75457 - RNA, 19 nt, Artificial Sequence
  Description of Artificial Sequence: Synthetic oligonucleotide
  Antisense strand to SEQ ID NO: 75376
ugauccaaucagaagugag

SEQ ID NO: 75458 - RNA, 19 nt, Artificial Sequence
  Description of Artificial Sequence: Synthetic oligonucleotide
  Sense strand starting at position 2066 of SEQ ID NO: 942
gcucacuucugauuggauc

SEQ ID NO: 75459 - RNA, 19 nt, Artificial Sequence
  Description of Artificial Sequence: Synthetic oligonucleotide
  Antisense strand to SEQ ID NO: 75378
gauccaaucagaagugagc

SEQ ID NO: 75460 - RNA, 19 nt, Artificial Sequence
  Description of Artificial Sequence: Synthetic oligonucleotide
  Sense strand starting at position 1528 of SEQ ID NO: 942
ucgaaacccuuucuugauc

SEQ ID NO: 75461 - RNA, 19 nt, Artificial Sequence
  Description of Artificial Sequence: Synthetic oligonucleotide
  Antisense strand to SEQ ID NO: 75380
gaucaagaaaggguuucga

SEQ ID NO: 75462 - RNA, 19 nt, Artificial Sequence
  Description of Artificial Sequence: Synthetic oligonucleotide
  Sense strand starting at position 1494 of SEQ ID NO: 942
gagacacauuagguuacau

SEQ ID NO: 75463 - RNA, 19 nt, Artificial Sequence
  Description of Artificial Sequence: Synthetic oligonucleotide
  Antisense strand to SEQ ID NO: 75382
auguaaccuaaugugucuc

SEQ ID NO: 75464 - RNA, 19 nt, Artificial Sequence
  Description of Artificial Sequence: Synthetic oligonucleotide
  Sense strand starting at position 1348 of SEQ ID NO: 942
gcuacaucaccugagcagu

SEQ ID NO: 75465 - RNA, 19 nt, Artificial Sequence
  Description of Artificial Sequence: Synthetic oligonucleotide
  Antisense strand to SEQ ID NO: 75384
acugcucaggugauguagc

SEQ ID NO: 75466 - RNA, 19 nt, Artificial Sequence
  Description of Artificial Sequence: Synthetic oligonucleotide
  Sense strand starting at position 1268 of SEQ ID NO: 942
aaaucucgucgugaguuaa

SEQ ID NO: 75467 - RNA, 19 nt, Artificial Sequence
  Description of Artificial Sequence: Synthetic oligonucleotide
  Antisense strand to SEQ ID NO: 75386
uuaacucacgacgagauuu

SEQ ID NO: 75468 - RNA, 19 nt, Artificial Sequence
  Description of Artificial Sequence: Synthetic oligonucleotide
  Sense strand starting at position 1265 of SEQ ID NO: 942
aagaaaucucgucgugagu

SEQ ID NO: 75469 - RNA, 19 nt, Artificial Sequence
  Description of Artificial Sequence: Synthetic oligonucleotide
  Antisense strand to SEQ ID NO: 75388
acucacgacgagauuucuu

SEQ ID NO: 75470 - RNA, 19 nt, Artificial Sequence
  Description of Artificial Sequence: Synthetic oligonucleotide
  Sense strand starting at position 1264 of SEQ ID NO: 942
aaagaaaucucgucgugag

SEQ ID NO: 75471 - RNA, 19 nt, Artificial Sequence
  Description of Artificial Sequence: Synthetic oligonucleotide
  Antisense strand to SEQ ID NO: 75390
cucacgacgagauuucuuu

SEQ ID NO: 75472 - RNA, 19 nt, Artificial Sequence
  Description of Artificial Sequence: Synthetic oligonucleotide
  Sense strand starting at position 1211 of SEQ ID NO: 942
gagcgagacuucuucuaga

SEQ ID NO: 75473 - RNA, 19 nt, Artificial Sequence
  Description of Artificial Sequence: Synthetic oligonucleotide
  Antisense strand to SEQ ID NO: 75392
ucuagaagaagucucgcuc

SEQ ID NO: 75474 - RNA, 19 nt, Artificial Sequence
  Description of Artificial Sequence: Synthetic oligonucleotide
  Sense strand starting at position 615 of SEQ ID NO: 942
aauauccucccggaauguu

SEQ ID NO: 75475 - RNA, 19 nt, Artificial Sequence
  Description of Artificial Sequence: Synthetic oligonucleotide
  Antisense strand to SEQ ID NO: 75394
aacauuccgggaggauauu

SEQ ID NO: 75476 - RNA, 19 nt, Artificial Sequence
  Description of Artificial Sequence: Synthetic oligonucleotide
  Sense strand starting at position 614 of SEQ ID NO: 942
aaauauccucccggaaugu

SEQ ID NO: 75477 - RNA, 19 nt, Artificial Sequence
  Description of Artificial Sequence: Synthetic oligonucleotide
  Antisense strand to SEQ ID NO: 75396
acauuccgggaggauauuu

SEQ ID NO: 75478 - RNA, 19 nt, Artificial Sequence
  Description of Artificial Sequence: Synthetic oligonucleotide
  Sense strand starting at position 484 of SEQ ID NO: 942
ucccauaaggguuaaaguu

SEQ ID NO: 75479 - RNA, 19 nt, Artificial Sequence
  Description of Artificial Sequence: Synthetic oligonucleotide
  Antisense strand to SEQ ID NO: 75398
aacuuuaacccuuauggga

SEQ ID NO: 75480 - RNA, 19 nt, Artificial Sequence
  Description of Artificial Sequence: Synthetic oligonucleotide
  Sense strand starting at position 169 of SEQ ID NO: 942
cgcucaguacuucgaauuu

SEQ ID NO: 75481 - RNA, 19 nt, Artificial Sequence
  Description of Artificial Sequence: Synthetic oligonucleotide
  Antisense strand to SEQ ID NO: 75400
aaauucgaaguacugagcg

SEQ ID NO: 75482 - RNA, 19 nt, Artificial Sequence
  Description of Artificial Sequence: Synthetic oligonucleotide
  Sense strand starting at position 167 of SEQ ID NO: 942
aacgcucaguacuucgaau

SEQ ID NO: 75483 - RNA, 19 nt, Artificial Sequence
  Description of Artificial Sequence: Synthetic oligonucleotide
  Antisense strand to SEQ ID NO: 75402
auucgaaguacugagcguu

SEQ ID NO: 75484 - RNA, 19 nt, Artificial Sequence
  Description of Artificial Sequence: Synthetic oligonucleotide
  Sense strand starting at position 95 of SEQ ID NO: 943
acauaagucuacuauugga

SEQ ID NO: 75485 - RNA, 19 nt, Artificial Sequence
  Description of Artificial Sequence: Synthetic oligonucleotide
  Antisense strand to SEQ ID NO: 75404
uccaauaguagacuuaugu

SEQ ID NO: 75486 - RNA, 19 nt, Artificial Sequence
  Description of Artificial Sequence: Synthetic oligonucleotide
  Sense strand starting at position 248 of SEQ ID NO: 943
gucugcgacugcucaguaa

SEQ ID NO: 75487 - RNA, 19 nt, Artificial Sequence
  Description of Artificial Sequence: Synthetic oligonucleotide
  Antisense strand to SEQ ID NO: 75406
uuacugagcagucgcagac

SEQ ID NO: 75488 - RNA, 19 nt, Artificial Sequence
  Description of Artificial Sequence: Synthetic oligonucleotide
  Sense strand starting at position 251 of SEQ ID NO: 943
ugcgacugcucaguaaacu

SEQ ID NO: 75489 - RNA, 19 nt, Artificial Sequence
  Description of Artificial Sequence: Synthetic oligonucleotide
  Antisense strand to SEQ ID NO: 75408
aguuuacugagcagucgca

SEQ ID NO: 75490 - RNA, 19 nt, Artificial Sequence
  Description of Artificial Sequence: Synthetic oligonucleotide
  Sense strand starting at position 252 of SEQ ID NO: 943
gcgacugcucaguaaacug

SEQ ID NO: 75491 - RNA, 19 nt, Artificial Sequence
  Description of Artificial Sequence: Synthetic oligonucleotide
  Antisense strand to SEQ ID NO: 75410
caguuuacugagcagucgc

SEQ ID NO: 75492 - RNA, 19 nt, Artificial Sequence
  Description of Artificial Sequence: Synthetic oligonucleotide
  Sense strand starting at position 283 of SEQ ID NO: 943
gagugcccucuuugaacuu

SEQ ID NO: 75493 - RNA, 19 nt, Artificial Sequence
  Description of Artificial Sequence: Synthetic oligonucleotide
  Antisense strand to SEQ ID NO: 75412
aaguucaaagagggcacuc

SEQ ID NO: 75494 - RNA, 19 nt, Artificial Sequence
  Description of Artificial Sequence: Synthetic oligonucleotide
  Sense strand starting at position 451 of SEQ ID NO: 943
augggagauuggguauguu

SEQ ID NO: 75495 - RNA, 19 nt, Artificial Sequence
  Description of Artificial Sequence: Synthetic oligonucleotide
  Antisense strand to SEQ ID NO: 75414
aacauacccaaucucccau

SEQ ID NO: 75496 - RNA, 19 nt, Artificial Sequence
  Description of Artificial Sequence: Synthetic oligonucleotide
  Sense strand starting at position 454 of SEQ ID NO: 943
ggagauuggguauguuaac

SEQ ID NO: 75497 - RNA, 19 nt, Artificial Sequence
  Description of Artificial Sequence: Synthetic oligonucleotide
  Antisense strand to SEQ ID NO: 75416
guuaacauacccaaucucc

SEQ ID NO: 75498 - RNA, 19 nt, Artificial Sequence
  Description of Artificial Sequence: Synthetic oligonucleotide
  Sense strand starting at position 455 of SEQ ID NO: 943
gagauuggguauguuaaca

SEQ ID NO: 75499 - RNA, 19 nt, Artificial Sequence
  Description of Artificial Sequence: Synthetic oligonucleotide
  Antisense strand to SEQ ID NO: 75418
uguuaacauacccaaucuc

SEQ ID NO: 75500 - RNA, 19 nt, Artificial Sequence
  Description of Artificial Sequence: Synthetic oligonucleotide
  Sense strand starting at position 485 of SEQ ID NO: 943
auggacuucuaacccgaga

SEQ ID NO: 75501 - RNA, 19 nt, Artificial Sequence
  Description of Artificial Sequence: Synthetic oligonucleotide
  Antisense strand to SEQ ID NO: 75420
ucucggguuagaaguccau

SEQ ID NO: 75502 - RNA, 19 nt, Artificial Sequence
  Description of Artificial Sequence: Synthetic oligonucleotide
  Sense strand starting at position 487 of SEQ ID NO: 943
ggacuucuaacccgagaug

SEQ ID NO: 75503 - RNA, 19 nt, Artificial Sequence
  Description of Artificial Sequence: Synthetic oligonucleotide
  Antisense strand to SEQ ID NO: 75422
caucucggguuagaagucc

SEQ ID NO: 75504 - RNA, 19 nt, Artificial Sequence
  Description of Artificial Sequence: Synthetic oligonucleotide
  Sense strand starting at position 519 of SEQ ID NO: 943
gcuacauaugugugcacau

SEQ ID NO: 75505 - RNA, 19 nt, Artificial Sequence
  Description of Artificial Sequence: Synthetic oligonucleotide
  Antisense strand to SEQ ID NO: 75424
augugcacacauauguagc

SEQ ID NO: 75506 - RNA, 19 nt, Artificial Sequence
  Description of Artificial Sequence: Synthetic oligonucleotide
  Sense strand starting at position 573 of SEQ ID NO: 943
cuucuaaccuaaugggaga

SEQ ID NO: 75507 - RNA, 19 nt, Artificial Sequence
  Description of Artificial Sequence: Synthetic oligonucleotide
  Antisense strand to SEQ ID NO: 75426
ucucccauuagguuagaag

SEQ ID NO: 75508 - RNA, 19 nt, Artificial Sequence
  Description of Artificial Sequence: Synthetic oligonucleotide
  Sense strand starting at position 951 of SEQ ID NO: 943
gcugcuaugcuggugaagu

SEQ ID NO: 75509 - RNA, 19 nt, Artificial Sequence
  Description of Artificial Sequence: Synthetic oligonucleotide
  Antisense strand to SEQ ID NO: 75428
acuucaccagcauagcagc

SEQ ID NO: 75510 - RNA, 19 nt, Artificial Sequence
  Description of Artificial Sequence: Synthetic oligonucleotide
  Sense strand starting at position 1184 of SEQ ID NO: 943
uguagauaggcugaguuga

SEQ ID NO: 75511 - RNA, 19 nt, Artificial Sequence
  Description of Artificial Sequence: Synthetic oligonucleotide
  Antisense strand to SEQ ID NO: 75430
ucaacucagccuaucuaca

SEQ ID NO: 75512 - RNA, 19 nt, Artificial Sequence
  Description of Artificial Sequence: Synthetic oligonucleotide
  Sense strand starting at position 1186 of SEQ ID NO: 943
uagauaggcugaguugaca

SEQ ID NO: 75513 - RNA, 19 nt, Artificial Sequence
  Description of Artificial Sequence: Synthetic oligonucleotide
  Antisense strand to SEQ ID NO: 75432
ugucaacucagccuaucua

SEQ ID NO: 75514 - RNA, 19 nt, Artificial Sequence
  Description of Artificial Sequence: Synthetic oligonucleotide
  Sense strand starting at position 1362 of SEQ ID NO: 943
gagguaacgcgugugagua

SEQ ID NO: 75515 - RNA, 19 nt, Artificial Sequence
  Description of Artificial Sequence: Synthetic oligonucleotide
  Antisense strand to SEQ ID NO: 75434
uacucacacgcguuaccuc

SEQ ID NO: 75516 - RNA, 19 nt, Artificial Sequence
  Description of Artificial Sequence: Synthetic oligonucleotide
  Sense strand starting at position 1374 of SEQ ID NO: 943
gugaguagcuggccuccua

SEQ ID NO: 75517 - RNA, 19 nt, Artificial Sequence
  Description of Artificial Sequence: Synthetic oligonucleotide
  Antisense strand to SEQ ID NO: 75436
uaggaggccagcuacucac

SEQ ID NO: 75518 - RNA, 19 nt, Artificial Sequence
  Description of Artificial Sequence: Synthetic oligonucleotide
  Sense strand starting at position 1485 of SEQ ID NO: 943
ccaagagacuagcuugcua

SEQ ID NO: 75519 - RNA, 19 nt, Artificial Sequence
  Description of Artificial Sequence: Synthetic oligonucleotide
  Antisense strand to SEQ ID NO: 75438
uagcaagcuagucucuugg

SEQ ID NO: 75520 - RNA, 19 nt, Artificial Sequence
  Description of Artificial Sequence: Synthetic oligonucleotide
  Sense strand starting at position 1637 of SEQ ID NO: 943
gcaugauggugacccguuu

SEQ ID NO: 75521 - RNA, 19 nt, Artificial Sequence
  Description of Artificial Sequence: Synthetic oligonucleotide
  Antisense strand to SEQ ID NO: 75440
aaacgggucaccaucaugc

SEQ ID NO: 75522 - RNA, 19 nt, Artificial Sequence
  Description of Artificial Sequence: Synthetic oligonucleotide
  Sense strand starting at position 1648 of SEQ ID NO: 943
acccguuuggcauggauga

SEQ ID NO: 75523 - RNA, 19 nt, Artificial Sequence
  Description of Artificial Sequence: Synthetic oligonucleotide
  Antisense strand to SEQ ID NO: 75442
ucauccaugccaaacgggu

SEQ ID NO: 75524 - RNA, 19 nt, Artificial Sequence
  Description of Artificial Sequence: Synthetic oligonucleotide
  Sense strand starting at position 1650 of SEQ ID NO: 943
ccguuuggcauggaugaca

SEQ ID NO: 75525 - RNA, 19 nt, Artificial Sequence
  Description of Artificial Sequence: Synthetic oligonucleotide
  Antisense strand to SEQ ID NO: 75444
ugucauccaugccaaacgg

SEQ ID NO: 75526 - RNA, 19 nt, Artificial Sequence
  Description of Artificial Sequence: Synthetic oligonucleotide
  Sense strand starting at position 1748 of SEQ ID NO: 943
agcgcaggucggucuuaaa

SEQ ID NO: 75527 - RNA, 19 nt, Artificial Sequence
  Description of Artificial Sequence: Synthetic oligonucleotide
  Antisense strand to SEQ ID NO: 75446
uuuaagaccgaccugcgcu

SEQ ID NO: 75528 - RNA, 19 nt, Artificial Sequence
  Description of Artificial Sequence: Synthetic oligonucleotide
  Sense strand starting at position 1760 of SEQ ID NO: 943
ucuuaaaguccugagcgau

SEQ ID NO: 75529 - RNA, 19 nt, Artificial Sequence
  Description of Artificial Sequence: Synthetic oligonucleotide
  Antisense strand to SEQ ID NO: 75448
aucgcucaggacuuuaaga

SEQ ID NO: 75530 - RNA, 19 nt, Artificial Sequence
  Description of Artificial Sequence: Synthetic oligonucleotide
  Sense strand starting at position 1986 of SEQ ID NO: 943
cuugguucgggccaugaau

SEQ ID NO: 75531 - RNA, 19 nt, Artificial Sequence
  Description of Artificial Sequence: Synthetic oligonucleotide
  Antisense strand to SEQ ID NO: 75450
auucauggcccgaaccaag

SEQ ID NO: 75532 - RNA, 19 nt, Artificial Sequence
  Description of Artificial Sequence: Synthetic oligonucleotide
  Sense strand starting at position 1994 of SEQ ID NO: 943
gggccaugaauccgaaacu

SEQ ID NO: 75533 - RNA, 19 nt, Artificial Sequence
  Description of Artificial Sequence: Synthetic oligonucleotide
  Antisense strand to SEQ ID NO: 75452
aguuucggauucauggccc

SEQ ID NO: 75534 - RNA, 19 nt, Artificial Sequence
  Description of Artificial Sequence: Synthetic oligonucleotide
  Sense strand starting at position 2148 of SEQ ID NO: 943
gggcgccucucccuuauau

SEQ ID NO: 75535 - RNA, 19 nt, Artificial Sequence
  Description of Artificial Sequence: Synthetic oligonucleotide
  Antisense strand to SEQ ID NO: 75454
auauaagggagaggcgccc

SEQ ID NO: 75536 - RNA, 19 nt, Artificial Sequence
  Description of Artificial Sequence: Synthetic oligonucleotide
  Sense strand starting at position 2202 of SEQ ID NO: 943
cagcauugugaaggguuga

SEQ ID NO: 75537 - RNA, 19 nt, Artificial Sequence
  Description of Artificial Sequence: Synthetic oligonucleotide
  Antisense strand to SEQ ID NO: 75456
ucaacccuucacaaugcug

SEQ ID NO: 75538 - RNA, 19 nt, Artificial Sequence
  Description of Artificial Sequence: Synthetic oligonucleotide
  Sense strand starting at position 2203 of SEQ ID NO: 943
agcauugugaaggguugau

SEQ ID NO: 75539 - RNA, 19 nt, Artificial Sequence
  Description of Artificial Sequence: Synthetic oligonucleotide
  Antisense strand to SEQ ID NO: 75458
aucaacccuucacaaugcu

SEQ ID NO: 75540 - RNA, 19 nt, Artificial Sequence
  Description of Artificial Sequence: Synthetic oligonucleotide
  Sense strand starting at position 3013 of SEQ ID NO: 943
gugacaaagcucugggaug

SEQ ID NO: 75541 - RNA, 19 nt, Artificial Sequence
  Description of Artificial Sequence: Synthetic oligonucleotide
  Antisense strand to SEQ ID NO: 75460
caucccagagcuuugucac

SEQ ID NO: 75542 - RNA, 19 nt, Artificial Sequence
  Description of Artificial Sequence: Synthetic oligonucleotide
  Sense strand starting at position 3034 of SEQ ID NO: 943
gccagaguuaaaggaaucu

SEQ ID NO: 75543 - RNA, 19 nt, Artificial Sequence
  Description of Artificial Sequence: Synthetic oligonucleotide
  Antisense strand to SEQ ID NO: 75462
agauuccuuuaacucuggc

SEQ ID NO: 75544 - RNA, 19 nt, Artificial Sequence
  Description of Artificial Sequence: Synthetic oligonucleotide
  Sense strand starting at position 3085 of SEQ ID NO: 943
accuguacggcuuagauga

SEQ ID NO: 75545 - RNA, 19 nt, Artificial Sequence
  Description of Artificial Sequence: Synthetic oligonucleotide
  Antisense strand to SEQ ID NO: 75464
ucaucuaagccguacaggu

SEQ ID NO: 75546 - RNA, 19 nt, Artificial Sequence
  Description of Artificial Sequence: Synthetic oligonucleotide
  Sense strand starting at position 3201 of SEQ ID NO: 943
ggaagaucauucugaauuu

SEQ ID NO: 75547 - RNA, 19 nt, Artificial Sequence
  Description of Artificial Sequence: Synthetic oligonucleotide
  Antisense strand to SEQ ID NO: 75466
aaauucagaaugaucuucc

SEQ ID NO: 75548 - RNA, 19 nt, Artificial Sequence
  Description of Artificial Sequence: Synthetic oligonucleotide
  Sense strand starting at position 3262 of SEQ ID NO: 943
agauguucuccuuauagua

SEQ ID NO: 75549 - RNA, 19 nt, Artificial Sequence
  Description of Artificial Sequence: Synthetic oligonucleotide
  Antisense strand to SEQ ID NO: 75468
uacuauaaggagaacaucu

SEQ ID NO: 75550 - RNA, 19 nt, Artificial Sequence
  Description of Artificial Sequence: Synthetic oligonucleotide
  Sense strand starting at position 3286 of SEQ ID NO: 943
aagggaacguucuuaucau

SEQ ID NO: 75551 - RNA, 19 nt, Artificial Sequence
  Description of Artificial Sequence: Synthetic oligonucleotide
  Antisense strand to SEQ ID NO: 75470
augauaagaacguucccuu

SEQ ID NO: 75552 - RNA, 19 nt, Artificial Sequence
  Description of Artificial Sequence: Synthetic oligonucleotide
  Sense strand starting at position 3292 of SEQ ID NO: 943
acguucuuaucaucaagga

SEQ ID NO: 75553 - RNA, 19 nt, Artificial Sequence
  Description of Artificial Sequence: Synthetic oligonucleotide
  Antisense strand to SEQ ID NO: 75472
uccuugaugauaagaacgu

SEQ ID NO: 75554 - RNA, 19 nt, Artificial Sequence
  Description of Artificial Sequence: Synthetic oligonucleotide
  Sense strand starting at position 3417 of SEQ ID NO: 943
ggugucacccucugaauag

SEQ ID NO: 75555 - RNA, 19 nt, Artificial Sequence
  Description of Artificial Sequence: Synthetic oligonucleotide
  Antisense strand to SEQ ID NO: 75474
cuauucagagggugacacc

SEQ ID NO: 75556 - RNA, 19 nt, Artificial Sequence
  Description of Artificial Sequence: Synthetic oligonucleotide
  Sense strand starting at position 3444 of SEQ ID NO: 943
ccuccuuuagggugaguuu

SEQ ID NO: 75557 - RNA, 19 nt, Artificial Sequence
  Description of Artificial Sequence: Synthetic oligonucleotide
  Antisense strand to SEQ ID NO: 75476
aaacucacccuaaaggagg

SEQ ID NO: 75558 - RNA, 19 nt, Artificial Sequence
  Description of Artificial Sequence: Synthetic oligonucleotide
  Sense strand starting at position 3467 of SEQ ID NO: 943
ucuguugguucccugaaga

SEQ ID NO: 75559 - RNA, 19 nt, Artificial Sequence
  Description of Artificial Sequence: Synthetic oligonucleotide
  Antisense strand to SEQ ID NO: 75478
ucuucagggaaccaacaga

SEQ ID NO: 75560 - RNA, 19 nt, Artificial Sequence
  Description of Artificial Sequence: Synthetic oligonucleotide
  Sense strand starting at position 3550 of SEQ ID NO: 943
cccugugaccucugcacau

SEQ ID NO: 75561 - RNA, 19 nt, Artificial Sequence
  Description of Artificial Sequence: Synthetic oligonucleotide
  Antisense strand to SEQ ID NO: 75480
augugcagaggucacaggg

SEQ ID NO: 75562 - RNA, 19 nt, Artificial Sequence
  Description of Artificial Sequence: Synthetic oligonucleotide
  Sense strand starting at position 3554 of SEQ ID NO: 943
gugaccucugcacauacau

SEQ ID NO: 75563 - RNA, 19 nt, Artificial Sequence
  Description of Artificial Sequence: Synthetic oligonucleotide
  Antisense strand to SEQ ID NO: 75482
auguaugugcagaggucac

SEQ ID NO: 75564 - RNA, 19 nt, Artificial Sequence
  Description of Artificial Sequence: Synthetic oligonucleotide
  Sense strand starting at position 237 of SEQ ID NO: 944
agcaauuacuggcugaaag

SEQ ID NO: 75565 - RNA, 19 nt, Artificial Sequence
  Description of Artificial Sequence: Synthetic oligonucleotide
  Antisense strand to SEQ ID NO: 75484
cuuucagccaguaauugcu

SEQ ID NO: 75566 - RNA, 19 nt, Artificial Sequence
  Description of Artificial Sequence: Synthetic oligonucleotide
  Sense strand starting at position 238 of SEQ ID NO: 944
gcaauuacuggcugaaaga

SEQ ID NO: 75567 - RNA, 19 nt, Artificial Sequence
  Description of Artificial Sequence: Synthetic oligonucleotide
  Antisense strand to SEQ ID NO: 75486
ucuuucagccaguaauugc

SEQ ID NO: 75568 - RNA, 19 nt, Artificial Sequence
  Description of Artificial Sequence: Synthetic oligonucleotide
  Sense strand starting at position 260 of SEQ ID NO: 944
acaggagggucuucagauc

SEQ ID NO: 75569 - RNA, 19 nt, Artificial Sequence
  Description of Artificial Sequence: Synthetic oligonucleotide
  Antisense strand to SEQ ID NO: 75488
gaucugaagacccuccugu

SEQ ID NO: 75570 - RNA, 19 nt, Artificial Sequence
  Description of Artificial Sequence: Synthetic oligonucleotide
  Sense strand starting at position 326 of SEQ ID NO: 944
aucacugaccuguauucuu

SEQ ID NO: 75571 - RNA, 19 nt, Artificial Sequence
  Description of Artificial Sequence: Synthetic oligonucleotide
  Antisense strand to SEQ ID NO: 75490
aagaauacaggucagugau

SEQ ID NO: 75572 - RNA, 19 nt, Artificial Sequence
  Description of Artificial Sequence: Synthetic oligonucleotide
  Sense strand starting at position 499 of SEQ ID NO: 944
acgucugaucauuacauaa

SEQ ID NO: 75573 - RNA, 19 nt, Artificial Sequence
  Description of Artificial Sequence: Synthetic oligonucleotide
  Antisense strand to SEQ ID NO: 75492
uuauguaaugaucagacgu

SEQ ID NO: 75574 - RNA, 19 nt, Artificial Sequence
  Description of Artificial Sequence: Synthetic oligonucleotide
  Sense strand starting at position 537 of SEQ ID NO: 944
agaacacugccaugcagau

SEQ ID NO: 75575 - RNA, 19 nt, Artificial Sequence
  Description of Artificial Sequence: Synthetic oligonucleotide
  Antisense strand to SEQ ID NO: 75494
aucugcauggcaguguucu

SEQ ID NO: 75576 - RNA, 19 nt, Artificial Sequence
  Description of Artificial Sequence: Synthetic oligonucleotide
  Sense strand starting at position 801 of SEQ ID NO: 944
agggccuagccacagaaau

SEQ ID NO: 75577 - RNA, 19 nt, Artificial Sequence
  Description of Artificial Sequence: Synthetic oligonucleotide
  Antisense strand to SEQ ID NO: 75496
auuucuguggcuaggcccu

SEQ ID NO: 75578 - RNA, 19 nt, Artificial Sequence
  Description of Artificial Sequence: Synthetic oligonucleotide
  Sense strand starting at position 1051 of SEQ ID NO: 944
aggaguuugguuuggguuu

SEQ ID NO: 75579 - RNA, 19 nt, Artificial Sequence
  Description of Artificial Sequence: Synthetic oligonucleotide
  Antisense strand to SEQ ID NO: 75498
aaacccaaaccaaacuccu

SEQ ID NO: 75580 - RNA, 19 nt, Artificial Sequence
  Description of Artificial Sequence: Synthetic oligonucleotide
  Sense strand starting at position 1558 of SEQ ID NO: 944
cggacaccuugccuaagaa

SEQ ID NO: 75581 - RNA, 19 nt, Artificial Sequence
  Description of Artificial Sequence: Synthetic oligonucleotide
  Antisense strand to SEQ ID NO: 75500
uucuuaggcaagguguccg

SEQ ID NO: 75582 - RNA, 19 nt, Artificial Sequence
  Description of Artificial Sequence: Synthetic oligonucleotide
  Sense strand starting at position 1669 of SEQ ID NO: 944
gaauccauccgccgaauaa

SEQ ID NO: 75583 - RNA, 19 nt, Artificial Sequence
  Description of Artificial Sequence: Synthetic oligonucleotide
  Antisense strand to SEQ ID NO: 75502
uuauucggcggauggauuc

SEQ ID NO: 75584 - RNA, 19 nt, Artificial Sequence
  Description of Artificial Sequence: Synthetic oligonucleotide
  Sense strand starting at position 1897 of SEQ ID NO: 944
gcaugcaugcguguuugua

SEQ ID NO: 75585 - RNA, 19 nt, Artificial Sequence
  Description of Artificial Sequence: Synthetic oligonucleotide
  Antisense strand to SEQ ID NO: 75504
uacaaacacgcaugcaugc

SEQ ID NO: 75586 - RNA, 19 nt, Artificial Sequence
  Description of Artificial Sequence: Synthetic oligonucleotide
  Sense strand starting at position 1898 of SEQ ID NO: 944
caugcaugcguguuuguau

SEQ ID NO: 75587 - RNA, 19 nt, Artificial Sequence
  Description of Artificial Sequence: Synthetic oligonucleotide
  Antisense strand to SEQ ID NO: 75506
auacaaacacgcaugcaug

SEQ ID NO: 75588 - RNA, 19 nt, Artificial Sequence
  Description of Artificial Sequence: Synthetic oligonucleotide
  Sense strand starting at position 1906 of SEQ ID NO: 944
cguguuuguauacacacau

SEQ ID NO: 75589 - RNA, 19 nt, Artificial Sequence
  Description of Artificial Sequence: Synthetic oligonucleotide
  Antisense strand to SEQ ID NO: 75508
auguguguauacaaacacg

SEQ ID NO: 75590 - RNA, 19 nt, Artificial Sequence
  Description of Artificial Sequence: Synthetic oligonucleotide
  Sense strand starting at position 1931 of SEQ ID NO: 944
acggaauagccauguacau

SEQ ID NO: 75591 - RNA, 19 nt, Artificial Sequence
  Description of Artificial Sequence: Synthetic oligonucleotide
  Antisense strand to SEQ ID NO: 75510
auguacauggcuauuccgu

SEQ ID NO: 75592 - RNA, 19 nt, Artificial Sequence
  Description of Artificial Sequence: Synthetic oligonucleotide
  Sense strand starting at position 1933 of SEQ ID NO: 944
ggaauagccauguacauug

SEQ ID NO: 75593 - RNA, 19 nt, Artificial Sequence
  Description of Artificial Sequence: Synthetic oligonucleotide
  Antisense strand to SEQ ID NO: 75512
caauguacauggcuauucc

SEQ ID NO: 75594 - RNA, 19 nt, Artificial Sequence
  Description of Artificial Sequence: Synthetic oligonucleotide
  Sense strand starting at position 2019 of SEQ ID NO: 944
agauccacccucuguuauu

SEQ ID NO: 75595 - RNA, 19 nt, Artificial Sequence
  Description of Artificial Sequence: Synthetic oligonucleotide
  Antisense strand to SEQ ID NO: 75514
aauaacagaggguggaucu

SEQ ID NO: 75596 - RNA, 19 nt, Artificial Sequence
  Description of Artificial Sequence: Synthetic oligonucleotide
  Sense strand starting at position 2489 of SEQ ID NO: 944
augagcuucucaguacuaa

SEQ ID NO: 75597 - RNA, 19 nt, Artificial Sequence
  Description of Artificial Sequence: Synthetic oligonucleotide
  Antisense strand to SEQ ID NO: 75516
uuaguacugagaagcucau

SEQ ID NO: 75598 - RNA, 19 nt, Artificial Sequence
  Description of Artificial Sequence: Synthetic oligonucleotide
  Sense strand starting at position 2490 of SEQ ID NO: 944
ugagcuucucaguacuaau

SEQ ID NO: 75599 - RNA, 19 nt, Artificial Sequence
  Description of Artificial Sequence: Synthetic oligonucleotide
  Antisense strand to SEQ ID NO: 75518
auuaguacugagaagcuca

SEQ ID NO: 75600 - RNA, 19 nt, Artificial Sequence
  Description of Artificial Sequence: Synthetic oligonucleotide
  Sense strand starting at position 2502 of SEQ ID NO: 944
uacuaauuggcacguuaug

SEQ ID NO: 75601 - RNA, 19 nt, Artificial Sequence
  Description of Artificial Sequence: Synthetic oligonucleotide
  Antisense strand to SEQ ID NO: 75520
cauaacgugccaauuagua

SEQ ID NO: 75602 - RNA, 19 nt, Artificial Sequence
  Description of Artificial Sequence: Synthetic oligonucleotide
  Sense strand starting at position 2575 of SEQ ID NO: 944
agggcacucuugucagcaa

SEQ ID NO: 75603 - RNA, 19 nt, Artificial Sequence
  Description of Artificial Sequence: Synthetic oligonucleotide
  Antisense strand to SEQ ID NO: 75522
uugcugacaagagugcccu

SEQ ID NO: 75604 - RNA, 19 nt, Artificial Sequence
  Description of Artificial Sequence: Synthetic oligonucleotide
  Sense strand starting at position 2734 of SEQ ID NO: 944
gguccauguccacaaauca

SEQ ID NO: 75605 - RNA, 19 nt, Artificial Sequence
  Description of Artificial Sequence: Synthetic oligonucleotide
  Antisense strand to SEQ ID NO: 75524
ugauuuguggacauggacc

SEQ ID NO: 75606 - RNA, 19 nt, Artificial Sequence
  Description of Artificial Sequence: Synthetic oligonucleotide
  Sense strand starting at position 2802 of SEQ ID NO: 944
aucgcauuccaagacauac

SEQ ID NO: 75607 - RNA, 19 nt, Artificial Sequence
  Description of Artificial Sequence: Synthetic oligonucleotide
  Antisense strand to SEQ ID NO: 75526
guaugucuuggaaugcgau

SEQ ID NO: 75608 - RNA, 19 nt, Artificial Sequence
  Description of Artificial Sequence: Synthetic oligonucleotide
  Sense strand starting at position 2856 of SEQ ID NO: 944
ccugaaccuuaguuagagu

SEQ ID NO: 75609 - RNA, 19 nt, Artificial Sequence
  Description of Artificial Sequence: Synthetic oligonucleotide
  Antisense strand to SEQ ID NO: 75528
acucuaacuaagguucagg

SEQ ID NO: 75610 - RNA, 19 nt, Artificial Sequence
  Description of Artificial Sequence: Synthetic oligonucleotide
  Sense strand starting at position 2865 of SEQ ID NO: 944
uaguuagagucuuuacgau

SEQ ID NO: 75611 - RNA, 19 nt, Artificial Sequence
  Description of Artificial Sequence: Synthetic oligonucleotide
  Antisense strand to SEQ ID NO: 75530
aucguaaagacucuaacua

SEQ ID NO: 75612 - RNA, 19 nt, Artificial Sequence
  Description of Artificial Sequence: Synthetic oligonucleotide
  Sense strand starting at position 3094 of SEQ ID NO: 944
agagguagcgcugagaaga

SEQ ID NO: 75613 - RNA, 19 nt, Artificial Sequence
  Description of Artificial Sequence: Synthetic oligonucleotide
  Antisense strand to SEQ ID NO: 75532
ucuucucagcgcuaccucu

SEQ ID NO: 75614 - RNA, 19 nt, Artificial Sequence
  Description of Artificial Sequence: Synthetic oligonucleotide
  Sense strand starting at position 3127 of SEQ ID NO: 944
ccuugcucacguguguuaa

SEQ ID NO: 75615 - RNA, 19 nt, Artificial Sequence
  Description of Artificial Sequence: Synthetic oligonucleotide
  Antisense strand to SEQ ID NO: 75534
uuaacacacgugagcaagg

SEQ ID NO: 75616 - RNA, 19 nt, Artificial Sequence
  Description of Artificial Sequence: Synthetic oligonucleotide
  Sense strand starting at position 3137 of SEQ ID NO: 944
guguguuaagaaggcaaau

SEQ ID NO: 75617 - RNA, 19 nt, Artificial Sequence
  Description of Artificial Sequence: Synthetic oligonucleotide
  Antisense strand to SEQ ID NO: 75536
auuugccuucuuaacacac

SEQ ID NO: 75618 - RNA, 19 nt, Artificial Sequence
  Description of Artificial Sequence: Synthetic oligonucleotide
  Sense strand starting at position 3139 of SEQ ID NO: 944
guguuaagaaggcaaaugu

SEQ ID NO: 75619 - RNA, 19 nt, Artificial Sequence
  Description of Artificial Sequence: Synthetic oligonucleotide
  Antisense strand to SEQ ID NO: 75538
acauuugccuucuuaacac

SEQ ID NO: 75620 - RNA, 19 nt, Artificial Sequence
  Description of Artificial Sequence: Synthetic oligonucleotide
  Sense strand starting at position 3148 of SEQ ID NO: 944
aggcaaaugucuuugacag

SEQ ID NO: 75621 - RNA, 19 nt, Artificial Sequence
  Description of Artificial Sequence: Synthetic oligonucleotide
  Antisense strand to SEQ ID NO: 75540
cugucaaagacauuugccu

SEQ ID NO: 75622 - RNA, 19 nt, Artificial Sequence
  Description of Artificial Sequence: Synthetic oligonucleotide
  Sense strand starting at position 3149 of SEQ ID NO: 944
ggcaaaugucuuugacagu

SEQ ID NO: 75623 - RNA, 19 nt, Artificial Sequence
  Description of Artificial Sequence: Synthetic oligonucleotide
  Antisense strand to SEQ ID NO: 75542
acugucaaagacauuugcc

SEQ ID NO: 75624 - RNA, 19 nt, Artificial Sequence
  Description of Artificial Sequence: Synthetic oligonucleotide
  Sense strand starting at position 3467 of SEQ ID NO: 944
augugucaucgcccaagca

SEQ ID NO: 75625 - RNA, 19 nt, Artificial Sequence
  Description of Artificial Sequence: Synthetic oligonucleotide
  Antisense strand to SEQ ID NO: 75544
ugcuugggcgaugacacau

SEQ ID NO: 75626 - RNA, 19 nt, Artificial Sequence
  Description of Artificial Sequence: Synthetic oligonucleotide
  Sense strand starting at position 3522 of SEQ ID NO: 944
ccggaaaugucaccagcca

SEQ ID NO: 75627 - RNA, 19 nt, Artificial Sequence
  Description of Artificial Sequence: Synthetic oligonucleotide
  Antisense strand to SEQ ID NO: 75546
uggcuggugacauuuccgg

SEQ ID NO: 75628 - RNA, 19 nt, Artificial Sequence
  Description of Artificial Sequence: Synthetic oligonucleotide
  Sense strand starting at position 3585 of SEQ ID NO: 944
ccaggaggcucugugacaa

SEQ ID NO: 75629 - RNA, 19 nt, Artificial Sequence
  Description of Artificial Sequence: Synthetic oligonucleotide
  Antisense strand to SEQ ID NO: 75548
uugucacagagccuccugg

SEQ ID NO: 75630 - RNA, 19 nt, Artificial Sequence
  Description of Artificial Sequence: Synthetic oligonucleotide
  Sense strand starting at position 3713 of SEQ ID NO: 944
gaaggagucucagugacau

SEQ ID NO: 75631 - RNA, 19 nt, Artificial Sequence
  Description of Artificial Sequence: Synthetic oligonucleotide
  Antisense strand to SEQ ID NO: 75550
augucacugagacuccuuc

SEQ ID NO: 75632 - RNA, 19 nt, Artificial Sequence
  Description of Artificial Sequence: Synthetic oligonucleotide
  Sense strand starting at position 3715 of SEQ ID NO: 944
aggagucucagugacauuc

SEQ ID NO: 75633 - RNA, 19 nt, Artificial Sequence
  Description of Artificial Sequence: Synthetic oligonucleotide
  Antisense strand to SEQ ID NO: 75552
gaaugucacugagacuccu

SEQ ID NO: 75634 - RNA, 19 nt, Artificial Sequence
  Description of Artificial Sequence: Synthetic oligonucleotide
  Sense strand starting at position 3739 of SEQ ID NO: 944
uucccagcauguuugagaa

SEQ ID NO: 75635 - RNA, 19 nt, Artificial Sequence
  Description of Artificial Sequence: Synthetic oligonucleotide
  Antisense strand to SEQ ID NO: 75554
uucucaaacaugcugggaa

SEQ ID NO: 75636 - RNA, 19 nt, Artificial Sequence
  Description of Artificial Sequence: Synthetic oligonucleotide
  Sense strand starting at position 3842 of SEQ ID NO: 944
aucaguaagacugggugaa

SEQ ID NO: 75637 - RNA, 19 nt, Artificial Sequence
  Description of Artificial Sequence: Synthetic oligonucleotide
  Antisense strand to SEQ ID NO: 75556
uucacccagucuuacugau

SEQ ID NO: 75638 - RNA, 19 nt, Artificial Sequence
  Description of Artificial Sequence: Synthetic oligonucleotide
  Sense strand starting at position 3843 of SEQ ID NO: 944
ucaguaagacugggugaaa

SEQ ID NO: 75639 - RNA, 19 nt, Artificial Sequence
  Description of Artificial Sequence: Synthetic oligonucleotide
  Antisense strand to SEQ ID NO: 75558
uuucacccagucuuacuga

SEQ ID NO: 75640 - RNA, 19 nt, Artificial Sequence
  Description of Artificial Sequence: Synthetic oligonucleotide
  Sense strand starting at position 3903 of SEQ ID NO: 944
gagaguuuacuagaugcug

SEQ ID NO: 75641 - RNA, 19 nt, Artificial Sequence
  Description of Artificial Sequence: Synthetic oligonucleotide
  Antisense strand to SEQ ID NO: 75560
cagcaucuaguaaacucuc

SEQ ID NO: 75642 - RNA, 19 nt, Artificial Sequence
  Description of Artificial Sequence: Synthetic oligonucleotide
  Sense strand starting at position 3972 of SEQ ID NO: 944
agggcuguccgauaauuca

SEQ ID NO: 75643 - RNA, 19 nt, Artificial Sequence
  Description of Artificial Sequence: Synthetic oligonucleotide
  Antisense strand to SEQ ID NO: 75562
ugaauuaucggacagcccu

SEQ ID NO: 75644 - RNA, 19 nt, Artificial Sequence
  Description of Artificial Sequence: Synthetic oligonucleotide
  Sense strand starting at position 3842 of SEQ ID NO: 945
aacucacgguugugaaaga

SEQ ID NO: 75645 - RNA, 19 nt, Artificial Sequence
  Description of Artificial Sequence: Synthetic oligonucleotide
  Antisense strand to SEQ ID NO: 75564
ucuuucacaaccgugaguu

SEQ ID NO: 75646 - RNA, 19 nt, Artificial Sequence
  Description of Artificial Sequence: Synthetic oligonucleotide
  Sense strand starting at position 3840 of SEQ ID NO: 945
caaacucacgguugugaaa

SEQ ID NO: 75647 - RNA, 19 nt, Artificial Sequence
  Description of Artificial Sequence: Synthetic oligonucleotide
  Antisense strand to SEQ ID NO: 75566
uuucacaaccgugaguuug

SEQ ID NO: 75648 - RNA, 19 nt, Artificial Sequence
  Description of Artificial Sequence: Synthetic oligonucleotide
  Sense strand starting at position 3794 of SEQ ID NO: 945
uugcguuucuaauuugacu

SEQ ID NO: 75649 - RNA, 19 nt, Artificial Sequence
  Description of Artificial Sequence: Synthetic oligonucleotide
  Antisense strand to SEQ ID NO: 75568
agucaaauuagaaacgcaa

SEQ ID NO: 75650 - RNA, 19 nt, Artificial Sequence
  Description of Artificial Sequence: Synthetic oligonucleotide
  Sense strand starting at position 3790 of SEQ ID NO: 945
uugauugcguuucuaauuu

SEQ ID NO: 75651 - RNA, 19 nt, Artificial Sequence
  Description of Artificial Sequence: Synthetic oligonucleotide
  Antisense strand to SEQ ID NO: 75570
aaauuagaaacgcaaucaa

SEQ ID NO: 75652 - RNA, 19 nt, Artificial Sequence
  Description of Artificial Sequence: Synthetic oligonucleotide
  Sense strand starting at position 3786 of SEQ ID NO: 945
caguuugauugcguuucua

SEQ ID NO: 75653 - RNA, 19 nt, Artificial Sequence
  Description of Artificial Sequence: Synthetic oligonucleotide
  Antisense strand to SEQ ID NO: 75572
uagaaacgcaaucaaacug

SEQ ID NO: 75654 - RNA, 19 nt, Artificial Sequence
  Description of Artificial Sequence: Synthetic oligonucleotide
  Sense strand starting at position 3623 of SEQ ID NO: 945
gggcgagagacguauuaag

SEQ ID NO: 75655 - RNA, 19 nt, Artificial Sequence
  Description of Artificial Sequence: Synthetic oligonucleotide
  Antisense strand to SEQ ID NO: 75574
cuuaauacgucucucgccc

SEQ ID NO: 75656 - RNA, 19 nt, Artificial Sequence
  Description of Artificial Sequence: Synthetic oligonucleotide
  Sense strand starting at position 3594 of SEQ ID NO: 945
guguguuuggcugaaggua

SEQ ID NO: 75657 - RNA, 19 nt, Artificial Sequence
  Description of Artificial Sequence: Synthetic oligonucleotide
  Antisense strand to SEQ ID NO: 75576
uaccuucagccaaacacac

SEQ ID NO: 75658 - RNA, 19 nt, Artificial Sequence
  Description of Artificial Sequence: Synthetic oligonucleotide
  Sense strand starting at position 3593 of SEQ ID NO: 945
gguguguuuggcugaaggu

SEQ ID NO: 75659 - RNA, 19 nt, Artificial Sequence
  Description of Artificial Sequence: Synthetic oligonucleotide
  Antisense strand to SEQ ID NO: 75578
accuucagccaaacacacc

SEQ ID NO: 75660 - RNA, 19 nt, Artificial Sequence
  Description of Artificial Sequence: Synthetic oligonucleotide
  Sense strand starting at position 3590 of SEQ ID NO: 945
auggguguguuuggcugaa

SEQ ID NO: 75661 - RNA, 19 nt, Artificial Sequence
  Description of Artificial Sequence: Synthetic oligonucleotide
  Antisense strand to SEQ ID NO: 75580
uucagccaaacacacccau

SEQ ID NO: 75662 - RNA, 19 nt, Artificial Sequence
  Description of Artificial Sequence: Synthetic oligonucleotide
  Sense strand starting at position 3569 of SEQ ID NO: 945
aggugcuauuuccagagau

SEQ ID NO: 75663 - RNA, 19 nt, Artificial Sequence
  Description of Artificial Sequence: Synthetic oligonucleotide
  Antisense strand to SEQ ID NO: 75582
aucucuggaaauagcaccu

SEQ ID NO: 75664 - RNA, 19 nt, Artificial Sequence
  Description of Artificial Sequence: Synthetic oligonucleotide
  Sense strand starting at position 3560 of SEQ ID NO: 945
ccaggagagaggugcuauu

SEQ ID NO: 75665 - RNA, 19 nt, Artificial Sequence
  Description of Artificial Sequence: Synthetic oligonucleotide
  Antisense strand to SEQ ID NO: 75584
aauagcaccucucuccugg

SEQ ID NO: 75666 - RNA, 19 nt, Artificial Sequence
  Description of Artificial Sequence: Synthetic oligonucleotide
  Sense strand starting at position 3301 of SEQ ID NO: 945
gugaacuugccaugccuau

SEQ ID NO: 75667 - RNA, 19 nt, Artificial Sequence
  Description of Artificial Sequence: Synthetic oligonucleotide
  Antisense strand to SEQ ID NO: 75586
auaggcauggcaaguucac

SEQ ID NO: 75668 - RNA, 19 nt, Artificial Sequence
  Description of Artificial Sequence: Synthetic oligonucleotide
  Sense strand starting at position 3231 of SEQ ID NO: 945
cagggauucugugacauuu

SEQ ID NO: 75669 - RNA, 19 nt, Artificial Sequence
  Description of Artificial Sequence: Synthetic oligonucleotide
  Antisense strand to SEQ ID NO: 75588
aaaugucacagaaucccug

SEQ ID NO: 75670 - RNA, 19 nt, Artificial Sequence
  Description of Artificial Sequence: Synthetic oligonucleotide
  Sense strand starting at position 3202 of SEQ ID NO: 945
uuucgauugcccuaauaag

SEQ ID NO: 75671 - RNA, 19 nt, Artificial Sequence
  Description of Artificial Sequence: Synthetic oligonucleotide
  Antisense strand to SEQ ID NO: 75590
cuuauuagggcaaucgaaa

SEQ ID NO: 75672 - RNA, 19 nt, Artificial Sequence
  Description of Artificial Sequence: Synthetic oligonucleotide
  Sense strand starting at position 3031 of SEQ ID NO: 945
gugcaacaucgacauaucu

SEQ ID NO: 75673 - RNA, 19 nt, Artificial Sequence
  Description of Artificial Sequence: Synthetic oligonucleotide
  Antisense strand to SEQ ID NO: 75592
agauaugucgauguugcac

SEQ ID NO: 75674 - RNA, 19 nt, Artificial Sequence
  Description of Artificial Sequence: Synthetic oligonucleotide
  Sense strand starting at position 2995 of SEQ ID NO: 945
gucuuuagaacgcagggua

SEQ ID NO: 75675 - RNA, 19 nt, Artificial Sequence
  Description of Artificial Sequence: Synthetic oligonucleotide
  Antisense strand to SEQ ID NO: 75594
uacccugcguucuaaagac

SEQ ID NO: 75676 - RNA, 19 nt, Artificial Sequence
  Description of Artificial Sequence: Synthetic oligonucleotide
  Sense strand starting at position 2987 of SEQ ID NO: 945
ugccuugggucuuuagaac

SEQ ID NO: 75677 - RNA, 19 nt, Artificial Sequence
  Description of Artificial Sequence: Synthetic oligonucleotide
  Antisense strand to SEQ ID NO: 75596
guucuaaagacccaaggca

SEQ ID NO: 75678 - RNA, 19 nt, Artificial Sequence
  Description of Artificial Sequence: Synthetic oligonucleotide
  Sense strand starting at position 2673 of SEQ ID NO: 945
gacggauggcuccaaacgu

SEQ ID NO: 75679 - RNA, 19 nt, Artificial Sequence
  Description of Artificial Sequence: Synthetic oligonucleotide
  Antisense strand to SEQ ID NO: 75598
acguuuggagccauccguc

SEQ ID NO: 75680 - RNA, 19 nt, Artificial Sequence
  Description of Artificial Sequence: Synthetic oligonucleotide
  Sense strand starting at position 2637 of SEQ ID NO: 945
ugacaaauugaacgaguga

SEQ ID NO: 75681 - RNA, 19 nt, Artificial Sequence
  Description of Artificial Sequence: Synthetic oligonucleotide
  Antisense strand to SEQ ID NO: 75600
ucacucguucaauuuguca

SEQ ID NO: 75682 - RNA, 19 nt, Artificial Sequence
  Description of Artificial Sequence: Synthetic oligonucleotide
  Sense strand starting at position 2625 of SEQ ID NO: 945
gcugucacacagugacaaa

SEQ ID NO: 75683 - RNA, 19 nt, Artificial Sequence
  Description of Artificial Sequence: Synthetic oligonucleotide
  Antisense strand to SEQ ID NO: 75602
uuugucacugugugacagc

SEQ ID NO: 75684 - RNA, 19 nt, Artificial Sequence
  Description of Artificial Sequence: Synthetic oligonucleotide
  Sense strand starting at position 2511 of SEQ ID NO: 945
aaauguugccgcccugagu

SEQ ID NO: 75685 - RNA, 19 nt, Artificial Sequence
  Description of Artificial Sequence: Synthetic oligonucleotide
  Antisense strand to SEQ ID NO: 75604
acucagggcggcaacauuu

SEQ ID NO: 75686 - RNA, 19 nt, Artificial Sequence
  Description of Artificial Sequence: Synthetic oligonucleotide
  Sense strand starting at position 2365 of SEQ ID NO: 945
ucuuuagggcucugcaaag

SEQ ID NO: 75687 - RNA, 19 nt, Artificial Sequence
  Description of Artificial Sequence: Synthetic oligonucleotide
  Antisense strand to SEQ ID NO: 75606
cuuugcagagcccuaaaga

SEQ ID NO: 75688 - RNA, 19 nt, Artificial Sequence
  Description of Artificial Sequence: Synthetic oligonucleotide
  Sense strand starting at position 2352 of SEQ ID NO: 945
acgguaaucucacucuuua

SEQ ID NO: 75689 - RNA, 19 nt, Artificial Sequence
  Description of Artificial Sequence: Synthetic oligonucleotide
  Antisense strand to SEQ ID NO: 75608
uaaagagugagauuaccgu

SEQ ID NO: 75690 - RNA, 19 nt, Artificial Sequence
  Description of Artificial Sequence: Synthetic oligonucleotide
  Sense strand starting at position 2287 of SEQ ID NO: 945
gguugaucacaggagcuuu

SEQ ID NO: 75691 - RNA, 19 nt, Artificial Sequence
  Description of Artificial Sequence: Synthetic oligonucleotide
  Antisense strand to SEQ ID NO: 75610
aaagcuccugugaucaacc

SEQ ID NO: 75692 - RNA, 19 nt, Artificial Sequence
  Description of Artificial Sequence: Synthetic oligonucleotide
  Sense strand starting at position 2234 of SEQ ID NO: 945
ggcucugacucucuucuaa

SEQ ID NO: 75693 - RNA, 19 nt, Artificial Sequence
  Description of Artificial Sequence: Synthetic oligonucleotide
  Antisense strand to SEQ ID NO: 75612
uuagaagagagucagagcc

SEQ ID NO: 75694 - RNA, 19 nt, Artificial Sequence
  Description of Artificial Sequence: Synthetic oligonucleotide
  Sense strand starting at position 2055 of SEQ ID NO: 945
ggucauccucgugaccaau

SEQ ID NO: 75695 - RNA, 19 nt, Artificial Sequence
  Description of Artificial Sequence: Synthetic oligonucleotide
  Antisense strand to SEQ ID NO: 75614
auuggucacgaggaugacc

SEQ ID NO: 75696 - RNA, 19 nt, Artificial Sequence
  Description of Artificial Sequence: Synthetic oligonucleotide
  Sense strand starting at position 2054 of SEQ ID NO: 945
uggucauccucgugaccaa

SEQ ID NO: 75697 - RNA, 19 nt, Artificial Sequence
  Description of Artificial Sequence: Synthetic oligonucleotide
  Antisense strand to SEQ ID NO: 75616
uuggucacgaggaugacca

SEQ ID NO: 75698 - RNA, 19 nt, Artificial Sequence
  Description of Artificial Sequence: Synthetic oligonucleotide
  Sense strand starting at position 739 of SEQ ID NO: 945
uaaagaaucccuggaguca

SEQ ID NO: 75699 - RNA, 19 nt, Artificial Sequence
  Description of Artificial Sequence: Synthetic oligonucleotide
  Antisense strand to SEQ ID NO: 75618
ugacuccagggauucuuua

SEQ ID NO: 75700 - RNA, 19 nt, Artificial Sequence
  Description of Artificial Sequence: Synthetic oligonucleotide
  Sense strand starting at position 737 of SEQ ID NO: 945
uuuaaagaaucccuggagu

SEQ ID NO: 75701 - RNA, 19 nt, Artificial Sequence
  Description of Artificial Sequence: Synthetic oligonucleotide
  Antisense strand to SEQ ID NO: 75620
acuccagggauucuuuaaa

SEQ ID NO: 75702 - RNA, 19 nt, Artificial Sequence
  Description of Artificial Sequence: Synthetic oligonucleotide
  Sense strand starting at position 719 of SEQ ID NO: 945
uugauucuaagacguguuu

SEQ ID NO: 75703 - RNA, 19 nt, Artificial Sequence
  Description of Artificial Sequence: Synthetic oligonucleotide
  Antisense strand to SEQ ID NO: 75622
aaacacgucuuagaaucaa

SEQ ID NO: 75704 - RNA, 19 nt, Artificial Sequence
  Description of Artificial Sequence: Synthetic oligonucleotide
  Sense strand starting at position 717 of SEQ ID NO: 945
uauugauucuaagacgugu

SEQ ID NO: 75705 - RNA, 19 nt, Artificial Sequence
  Description of Artificial Sequence: Synthetic oligonucleotide
  Antisense strand to SEQ ID NO: 75624
acacgucuuagaaucaaua

SEQ ID NO: 75706 - RNA, 19 nt, Artificial Sequence
  Description of Artificial Sequence: Synthetic oligonucleotide
  Sense strand starting at position 676 of SEQ ID NO: 945
aagucauguuagcagauaa

SEQ ID NO: 75707 - RNA, 19 nt, Artificial Sequence
  Description of Artificial Sequence: Synthetic oligonucleotide
  Antisense strand to SEQ ID NO: 75626
uuaucugcuaacaugacuu

SEQ ID NO: 75708 - RNA, 19 nt, Artificial Sequence
  Description of Artificial Sequence: Synthetic oligonucleotide
  Sense strand starting at position 675 of SEQ ID NO: 945
aaagucauguuagcagaua

SEQ ID NO: 75709 - RNA, 19 nt, Artificial Sequence
  Description of Artificial Sequence: Synthetic oligonucleotide
  Antisense strand to SEQ ID NO: 75628
uaucugcuaacaugacuuu

SEQ ID NO: 75710 - RNA, 19 nt, Artificial Sequence
  Description of Artificial Sequence: Synthetic oligonucleotide
  Sense strand starting at position 598 of SEQ ID NO: 945
gugcgaaaguguuucccaa

SEQ ID NO: 75711 - RNA, 19 nt, Artificial Sequence
  Description of Artificial Sequence: Synthetic oligonucleotide
  Antisense strand to SEQ ID NO: 75630
uugggaaacacuuucgcac

SEQ ID NO: 75712 - RNA, 19 nt, Artificial Sequence
  Description of Artificial Sequence: Synthetic oligonucleotide
  Sense strand starting at position 589 of SEQ ID NO: 945
aucagauaagugcgaaagu

SEQ ID NO: 75713 - RNA, 19 nt, Artificial Sequence
  Description of Artificial Sequence: Synthetic oligonucleotide
  Antisense strand to SEQ ID NO: 75632
acuuucgcacuuaucugau

SEQ ID NO: 75714 - RNA, 19 nt, Artificial Sequence
  Description of Artificial Sequence: Synthetic oligonucleotide
  Sense strand starting at position 556 of SEQ ID NO: 945
auuuacauuuccuggguga

SEQ ID NO: 75715 - RNA, 19 nt, Artificial Sequence
  Description of Artificial Sequence: Synthetic oligonucleotide
  Antisense strand to SEQ ID NO: 75634
ucacccaggaaauguaaau

SEQ ID NO: 75716 - RNA, 19 nt, Artificial Sequence
  Description of Artificial Sequence: Synthetic oligonucleotide
  Sense strand starting at position 467 of SEQ ID NO: 945
ucacgugucuuccaagaac

SEQ ID NO: 75717 - RNA, 19 nt, Artificial Sequence
  Description of Artificial Sequence: Synthetic oligonucleotide
  Antisense strand to SEQ ID NO: 75636
guucuuggaagacacguga

SEQ ID NO: 75718 - RNA, 19 nt, Artificial Sequence
  Description of Artificial Sequence: Synthetic oligonucleotide
  Sense strand starting at position 415 of SEQ ID NO: 945
gcauguauauaguaaguaa

SEQ ID NO: 75719 - RNA, 19 nt, Artificial Sequence
  Description of Artificial Sequence: Synthetic oligonucleotide
  Antisense strand to SEQ ID NO: 75638
uuacuuacuauauacaugc

SEQ ID NO: 75720 - RNA, 19 nt, Artificial Sequence
  Description of Artificial Sequence: Synthetic oligonucleotide
  Sense strand starting at position 406 of SEQ ID NO: 945
cguccauaugcauguauau

SEQ ID NO: 75721 - RNA, 19 nt, Artificial Sequence
  Description of Artificial Sequence: Synthetic oligonucleotide
  Antisense strand to SEQ ID NO: 75640
auauacaugcauauggacg

SEQ ID NO: 75722 - RNA, 19 nt, Artificial Sequence
  Description of Artificial Sequence: Synthetic oligonucleotide
  Sense strand starting at position 1 of SEQ ID NO: 945
uaggcaguacucuggaguu

SEQ ID NO: 75723 - RNA, 19 nt, Artificial Sequence
  Description of Artificial Sequence: Synthetic oligonucleotide
  Antisense strand to SEQ ID NO: 75642
aacuccagaguacugccua

SEQ ID NO: 75724 - RNA, 19 nt, Artificial Sequence
  Description of Artificial Sequence: Synthetic oligonucleotide
  Sense strand starting at position 3943 of SEQ ID NO: 946
uuguguauuucuucuugca

SEQ ID NO: 75725 - RNA, 19 nt, Artificial Sequence
  Description of Artificial Sequence: Synthetic oligonucleotide
  Antisense strand to SEQ ID NO: 75644
ugcaagaagaaauacacaa

SEQ ID NO: 75726 - RNA, 19 nt, Artificial Sequence
  Description of Artificial Sequence: Synthetic oligonucleotide
  Sense strand starting at position 3833 of SEQ ID NO: 946
ggucaaguuguuuaauaau

SEQ ID NO: 75727 - RNA, 19 nt, Artificial Sequence
  Description of Artificial Sequence: Synthetic oligonucleotide
  Antisense strand to SEQ ID NO: 75646
auuauuaaacaacuugacc

SEQ ID NO: 75728 - RNA, 19 nt, Artificial Sequence
  Description of Artificial Sequence: Synthetic oligonucleotide
  Sense strand starting at position 3832 of SEQ ID NO: 946
aggucaaguuguuuaauaa

SEQ ID NO: 75729 - RNA, 19 nt, Artificial Sequence
  Description of Artificial Sequence: Synthetic oligonucleotide
  Antisense strand to SEQ ID NO: 75648
uuauuaaacaacuugaccu

SEQ ID NO: 75730 - RNA, 19 nt, Artificial Sequence
  Description of Artificial Sequence: Synthetic oligonucleotide
  Sense strand starting at position 3715 of SEQ ID NO: 946
ucagcuguaaaugggaaua

SEQ ID NO: 75731 - RNA, 19 nt, Artificial Sequence
  Description of Artificial Sequence: Synthetic oligonucleotide
  Antisense strand to SEQ ID NO: 75650
uauucccauuuacagcuga

SEQ ID NO: 75732 - RNA, 19 nt, Artificial Sequence
  Description of Artificial Sequence: Synthetic oligonucleotide
  Sense strand starting at position 3628 of SEQ ID NO: 946
cagauacccuggguugaaa

SEQ ID NO: 75733 - RNA, 19 nt, Artificial Sequence
  Description of Artificial Sequence: Synthetic oligonucleotide
  Antisense strand to SEQ ID NO: 75652
uuucaacccaggguaucug

SEQ ID NO: 75734 - RNA, 19 nt, Artificial Sequence
  Description of Artificial Sequence: Synthetic oligonucleotide
  Sense strand starting at position 3627 of SEQ ID NO: 946
ucagauacccuggguugaa

SEQ ID NO: 75735 - RNA, 19 nt, Artificial Sequence
  Description of Artificial Sequence: Synthetic oligonucleotide
  Antisense strand to SEQ ID NO: 75654
uucaacccaggguaucuga

SEQ ID NO: 75736 - RNA, 19 nt, Artificial Sequence
  Description of Artificial Sequence: Synthetic oligonucleotide
  Sense strand starting at position 3626 of SEQ ID NO: 946
gucagauacccuggguuga

SEQ ID NO: 75737 - RNA, 19 nt, Artificial Sequence
  Description of Artificial Sequence: Synthetic oligonucleotide
  Antisense strand to SEQ ID NO: 75656
ucaacccaggguaucugac

SEQ ID NO: 75738 - RNA, 19 nt, Artificial Sequence
  Description of Artificial Sequence: Synthetic oligonucleotide
  Sense strand starting at position 3616 of SEQ ID NO: 946
agaguucugggucagauac

SEQ ID NO: 75739 - RNA, 19 nt, Artificial Sequence
  Description of Artificial Sequence: Synthetic oligonucleotide
  Antisense strand to SEQ ID NO: 75658
guaucugacccagaacucu

SEQ ID NO: 75740 - RNA, 19 nt, Artificial Sequence
  Description of Artificial Sequence: Synthetic oligonucleotide
  Sense strand starting at position 3613 of SEQ ID NO: 946
uuaagaguucugggucaga

SEQ ID NO: 75741 - RNA, 19 nt, Artificial Sequence
  Description of Artificial Sequence: Synthetic oligonucleotide
  Antisense strand to SEQ ID NO: 75660
ucugacccagaacucuuaa

SEQ ID NO: 75742 - RNA, 19 nt, Artificial Sequence
  Description of Artificial Sequence: Synthetic oligonucleotide
  Sense strand starting at position 3602 of SEQ ID NO: 946
gagccuagugauuaagagu

SEQ ID NO: 75743 - RNA, 19 nt, Artificial Sequence
  Description of Artificial Sequence: Synthetic oligonucleotide
  Antisense strand to SEQ ID NO: 75662
acucuuaaucacuaggcuc

SEQ ID NO: 75744 - RNA, 19 nt, Artificial Sequence
  Description of Artificial Sequence: Synthetic oligonucleotide
  Sense strand starting at position 3558 of SEQ ID NO: 946
gucuuagagaccugagcua

SEQ ID NO: 75745 - RNA, 19 nt, Artificial Sequence
  Description of Artificial Sequence: Synthetic oligonucleotide
  Antisense strand to SEQ ID NO: 75664
uagcucaggucucuaagac

SEQ ID NO: 75746 - RNA, 19 nt, Artificial Sequence
  Description of Artificial Sequence: Synthetic oligonucleotide
  Sense strand starting at position 3521 of SEQ ID NO: 946
ccauuccguuguuuauuua

SEQ ID NO: 75747 - RNA, 19 nt, Artificial Sequence
  Description of Artificial Sequence: Synthetic oligonucleotide
  Antisense strand to SEQ ID NO: 75666
uaaauaaacaacggaaugg

SEQ ID NO: 75748 - RNA, 19 nt, Artificial Sequence
  Description of Artificial Sequence: Synthetic oligonucleotide
  Sense strand starting at position 3497 of SEQ ID NO: 946
uuuagagaaugcuauuuga

SEQ ID NO: 75749 - RNA, 19 nt, Artificial Sequence
  Description of Artificial Sequence: Synthetic oligonucleotide
  Antisense strand to SEQ ID NO: 75668
ucaaauagcauucucuaaa

SEQ ID NO: 75750 - RNA, 19 nt, Artificial Sequence
  Description of Artificial Sequence: Synthetic oligonucleotide
  Sense strand starting at position 3390 of SEQ ID NO: 946
aguuuaugauaccuauaag

SEQ ID NO: 75751 - RNA, 19 nt, Artificial Sequence
  Description of Artificial Sequence: Synthetic oligonucleotide
  Antisense strand to SEQ ID NO: 75670
cuuauagguaucauaaacu

SEQ ID NO: 75752 - RNA, 19 nt, Artificial Sequence
  Description of Artificial Sequence: Synthetic oligonucleotide
  Sense strand starting at position 3300 of SEQ ID NO: 946
ggagaugcagccugaggaa

SEQ ID NO: 75753 - RNA, 19 nt, Artificial Sequence
  Description of Artificial Sequence: Synthetic oligonucleotide
  Antisense strand to SEQ ID NO: 75672
uuccucaggcugcaucucc

SEQ ID NO: 75754 - RNA, 19 nt, Artificial Sequence
  Description of Artificial Sequence: Synthetic oligonucleotide
  Sense strand starting at position 3214 of SEQ ID NO: 946
aguuguuguccagauccca

SEQ ID NO: 75755 - RNA, 19 nt, Artificial Sequence
  Description of Artificial Sequence: Synthetic oligonucleotide
  Antisense strand to SEQ ID NO: 75674
ugggaucuggacaacaacu

SEQ ID NO: 75756 - RNA, 19 nt, Artificial Sequence
  Description of Artificial Sequence: Synthetic oligonucleotide
  Sense strand starting at position 3192 of SEQ ID NO: 946
cgcauuuccuuccuggaaa

SEQ ID NO: 75757 - RNA, 19 nt, Artificial Sequence
  Description of Artificial Sequence: Synthetic oligonucleotide
  Antisense strand to SEQ ID NO: 75676
uuuccaggaaggaaaugcg

SEQ ID NO: 75758 - RNA, 19 nt, Artificial Sequence
  Description of Artificial Sequence: Synthetic oligonucleotide
  Sense strand starting at position 3086 of SEQ ID NO: 946
cguguugugauugcuauau

SEQ ID NO: 75759 - RNA, 19 nt, Artificial Sequence
  Description of Artificial Sequence: Synthetic oligonucleotide
  Antisense strand to SEQ ID NO: 75678
auauagcaaucacaacacg

SEQ ID NO: 75760 - RNA, 19 nt, Artificial Sequence
  Description of Artificial Sequence: Synthetic oligonucleotide
  Sense strand starting at position 2923 of SEQ ID NO: 946
agcauaguaaggcagaaua

SEQ ID NO: 75761 - RNA, 19 nt, Artificial Sequence
  Description of Artificial Sequence: Synthetic oligonucleotide
  Antisense strand to SEQ ID NO: 75680
uauucugccuuacuaugcu

SEQ ID NO: 75762 - RNA, 19 nt, Artificial Sequence
  Description of Artificial Sequence: Synthetic oligonucleotide
  Sense strand starting at position 2891 of SEQ ID NO: 946
cacauuugcugagcaguuu

SEQ ID NO: 75763 - RNA, 19 nt, Artificial Sequence
  Description of Artificial Sequence: Synthetic oligonucleotide
  Antisense strand to SEQ ID NO: 75682
aaacugcucagcaaaugug

SEQ ID NO: 75764 - RNA, 19 nt, Artificial Sequence
  Description of Artificial Sequence: Synthetic oligonucleotide
  Sense strand starting at position 2741 of SEQ ID NO: 946
gguagucacuaacuguaga

SEQ ID NO: 75765 - RNA, 19 nt, Artificial Sequence
  Description of Artificial Sequence: Synthetic oligonucleotide
  Antisense strand to SEQ ID NO: 75684
ucuacaguuagugacuacc

SEQ ID NO: 75766 - RNA, 19 nt, Artificial Sequence
  Description of Artificial Sequence: Synthetic oligonucleotide
  Sense strand starting at position 2738 of SEQ ID NO: 946
cuagguagucacuaacugu

SEQ ID NO: 75767 - RNA, 19 nt, Artificial Sequence
  Description of Artificial Sequence: Synthetic oligonucleotide
  Antisense strand to SEQ ID NO: 75686
acaguuagugacuaccuag

SEQ ID NO: 75768 - RNA, 19 nt, Artificial Sequence
  Description of Artificial Sequence: Synthetic oligonucleotide
  Sense strand starting at position 2734 of SEQ ID NO: 946
agaacuagguagucacuaa

SEQ ID NO: 75769 - RNA, 19 nt, Artificial Sequence
  Description of Artificial Sequence: Synthetic oligonucleotide
  Antisense strand to SEQ ID NO: 75688
uuagugacuaccuaguucu

SEQ ID NO: 75770 - RNA, 19 nt, Artificial Sequence
  Description of Artificial Sequence: Synthetic oligonucleotide
  Sense strand starting at position 2627 of SEQ ID NO: 946
uuugaucuccucugagacu

SEQ ID NO: 75771 - RNA, 19 nt, Artificial Sequence
  Description of Artificial Sequence: Synthetic oligonucleotide
  Antisense strand to SEQ ID NO: 75690
agucucagaggagaucaaa

SEQ ID NO: 75772 - RNA, 19 nt, Artificial Sequence
  Description of Artificial Sequence: Synthetic oligonucleotide
  Sense strand starting at position 1362 of SEQ ID NO: 946
aguaauucuuuguuacaac

SEQ ID NO: 75773 - RNA, 19 nt, Artificial Sequence
  Description of Artificial Sequence: Synthetic oligonucleotide
  Antisense strand to SEQ ID NO: 75692
guuguaacaaagaauuacu

SEQ ID NO: 75774 - RNA, 19 nt, Artificial Sequence
  Description of Artificial Sequence: Synthetic oligonucleotide
  Sense strand starting at position 1329 of SEQ ID NO: 946
guagguaucaaugagcaaa

SEQ ID NO: 75775 - RNA, 19 nt, Artificial Sequence
  Description of Artificial Sequence: Synthetic oligonucleotide
  Antisense strand to SEQ ID NO: 75694
uuugcucauugauaccuac

SEQ ID NO: 75776 - RNA, 19 nt, Artificial Sequence
  Description of Artificial Sequence: Synthetic oligonucleotide
  Sense strand starting at position 1321 of SEQ ID NO: 946
agacuuaaguagguaucaa

SEQ ID NO: 75777 - RNA, 19 nt, Artificial Sequence
  Description of Artificial Sequence: Synthetic oligonucleotide
  Antisense strand to SEQ ID NO: 75696
uugauaccuacuuaagucu

SEQ ID NO: 75778 - RNA, 19 nt, Artificial Sequence
  Description of Artificial Sequence: Synthetic oligonucleotide
  Sense strand starting at position 1320 of SEQ ID NO: 946
gagacuuaaguagguauca

SEQ ID NO: 75779 - RNA, 19 nt, Artificial Sequence
  Description of Artificial Sequence: Synthetic oligonucleotide
  Antisense strand to SEQ ID NO: 75698
ugauaccuacuuaagucuc

SEQ ID NO: 75780 - RNA, 19 nt, Artificial Sequence
  Description of Artificial Sequence: Synthetic oligonucleotide
  Sense strand starting at position 1282 of SEQ ID NO: 946
aguacaaguucccuaaaca

SEQ ID NO: 75781 - RNA, 19 nt, Artificial Sequence
  Description of Artificial Sequence: Synthetic oligonucleotide
  Antisense strand to SEQ ID NO: 75700
uguuuagggaacuuguacu

SEQ ID NO: 75782 - RNA, 19 nt, Artificial Sequence
  Description of Artificial Sequence: Synthetic oligonucleotide
  Sense strand starting at position 1193 of SEQ ID NO: 946
aucuaagugaguuaaguga

SEQ ID NO: 75783 - RNA, 19 nt, Artificial Sequence
  Description of Artificial Sequence: Synthetic oligonucleotide
  Antisense strand to SEQ ID NO: 75702
ucacuuaacucacuuagau

SEQ ID NO: 75784 - RNA, 19 nt, Artificial Sequence
  Description of Artificial Sequence: Synthetic oligonucleotide
  Sense strand starting at position 1191 of SEQ ID NO: 946
aaaucuaagugaguuaagu

SEQ ID NO: 75785 - RNA, 19 nt, Artificial Sequence
  Description of Artificial Sequence: Synthetic oligonucleotide
  Antisense strand to SEQ ID NO: 75704
acuuaacucacuuagauuu

SEQ ID NO: 75786 - RNA, 19 nt, Artificial Sequence
  Description of Artificial Sequence: Synthetic oligonucleotide
  Sense strand starting at position 1082 of SEQ ID NO: 946
gagaguuacccucagagug

SEQ ID NO: 75787 - RNA, 19 nt, Artificial Sequence
  Description of Artificial Sequence: Synthetic oligonucleotide
  Antisense strand to SEQ ID NO: 75706
cacucugaggguaacucuc

SEQ ID NO: 75788 - RNA, 19 nt, Artificial Sequence
  Description of Artificial Sequence: Synthetic oligonucleotide
  Sense strand starting at position 974 of SEQ ID NO: 946
agaaaugauugguuucucu

SEQ ID NO: 75789 - RNA, 19 nt, Artificial Sequence
  Description of Artificial Sequence: Synthetic oligonucleotide
  Antisense strand to SEQ ID NO: 75708
agagaaaccaaucauuucu

SEQ ID NO: 75790 - RNA, 19 nt, Artificial Sequence
  Description of Artificial Sequence: Synthetic oligonucleotide
  Sense strand starting at position 923 of SEQ ID NO: 946
cugugaaccuaucuaauga

SEQ ID NO: 75791 - RNA, 19 nt, Artificial Sequence
  Description of Artificial Sequence: Synthetic oligonucleotide
  Antisense strand to SEQ ID NO: 75710
ucauuagauagguucacag

SEQ ID NO: 75792 - RNA, 19 nt, Artificial Sequence
  Description of Artificial Sequence: Synthetic oligonucleotide
  Sense strand starting at position 880 of SEQ ID NO: 946
gcaauucuaccgcaggaga

SEQ ID NO: 75793 - RNA, 19 nt, Artificial Sequence
  Description of Artificial Sequence: Synthetic oligonucleotide
  Antisense strand to SEQ ID NO: 75712
ucuccugcgguagaauugc

SEQ ID NO: 75794 - RNA, 19 nt, Artificial Sequence
  Description of Artificial Sequence: Synthetic oligonucleotide
  Sense strand starting at position 529 of SEQ ID NO: 946
aguucuucuagugaaggga

SEQ ID NO: 75795 - RNA, 19 nt, Artificial Sequence
  Description of Artificial Sequence: Synthetic oligonucleotide
  Antisense strand to SEQ ID NO: 75714
ucccuucacuagaagaacu

SEQ ID NO: 75796 - RNA, 19 nt, Artificial Sequence
  Description of Artificial Sequence: Synthetic oligonucleotide
  Sense strand starting at position 485 of SEQ ID NO: 946
ucagauugccgauaucaca

SEQ ID NO: 75797 - RNA, 19 nt, Artificial Sequence
  Description of Artificial Sequence: Synthetic oligonucleotide
  Antisense strand to SEQ ID NO: 75716
ugugauaucggcaaucuga

SEQ ID NO: 75798 - RNA, 19 nt, Artificial Sequence
  Description of Artificial Sequence: Synthetic oligonucleotide
  Sense strand starting at position 361 of SEQ ID NO: 946
ccgagaguucuauauaucu

SEQ ID NO: 75799 - RNA, 19 nt, Artificial Sequence
  Description of Artificial Sequence: Synthetic oligonucleotide
  Antisense strand to SEQ ID NO: 75718
agauauauagaacucucgg

SEQ ID NO: 75800 - RNA, 19 nt, Artificial Sequence
  Description of Artificial Sequence: Synthetic oligonucleotide
  Sense strand starting at position 222 of SEQ ID NO: 946
auguuuaaccaauguagaa

SEQ ID NO: 75801 - RNA, 19 nt, Artificial Sequence
  Description of Artificial Sequence: Synthetic oligonucleotide
  Antisense strand to SEQ ID NO: 75720
uucuacauugguuaaacau

SEQ ID NO: 75802 - RNA, 19 nt, Artificial Sequence
  Description of Artificial Sequence: Synthetic oligonucleotide
  Sense strand starting at position 68 of SEQ ID NO: 946
uacucaagguauuccgaaa

SEQ ID NO: 75803 - RNA, 19 nt, Artificial Sequence
  Description of Artificial Sequence: Synthetic oligonucleotide
  Antisense strand to SEQ ID NO: 75722
uuucggaauaccuugagua

SEQ ID NO: 75804 - RNA, 19 nt, Artificial Sequence
  Description of Artificial Sequence: Synthetic oligonucleotide
  Sense strand starting at position 3918 of SEQ ID NO: 947
gguacaucaucucuggaag

SEQ ID NO: 75805 - RNA, 19 nt, Artificial Sequence
  Description of Artificial Sequence: Synthetic oligonucleotide
  Antisense strand to SEQ ID NO: 75724
cuuccagagaugauguacc

SEQ ID NO: 75806 - RNA, 19 nt, Artificial Sequence
  Description of Artificial Sequence: Synthetic oligonucleotide
  Sense strand starting at position 3770 of SEQ ID NO: 947
cuuggaucgcuacauagua

SEQ ID NO: 75807 - RNA, 19 nt, Artificial Sequence
  Description of Artificial Sequence: Synthetic oligonucleotide
  Antisense strand to SEQ ID NO: 75726
uacuauguagcgauccaag

SEQ ID NO: 75808 - RNA, 19 nt, Artificial Sequence
  Description of Artificial Sequence: Synthetic oligonucleotide
  Sense strand starting at position 3741 of SEQ ID NO: 947
gugguaguccagggaauca

SEQ ID NO: 75809 - RNA, 19 nt, Artificial Sequence
  Description of Artificial Sequence: Synthetic oligonucleotide
  Antisense strand to SEQ ID NO: 75728
ugauucccuggacuaccac

SEQ ID NO: 75810 - RNA, 19 nt, Artificial Sequence
  Description of Artificial Sequence: Synthetic oligonucleotide
  Sense strand starting at position 3740 of SEQ ID NO: 947
ggugguaguccagggaauc

SEQ ID NO: 75811 - RNA, 19 nt, Artificial Sequence
  Description of Artificial Sequence: Synthetic oligonucleotide
  Antisense strand to SEQ ID NO: 75730
gauucccuggacuaccacc

SEQ ID NO: 75812 - RNA, 19 nt, Artificial Sequence
  Description of Artificial Sequence: Synthetic oligonucleotide
  Sense strand starting at position 3720 of SEQ ID NO: 947
ggaugugucccaggaagga

SEQ ID NO: 75813 - RNA, 19 nt, Artificial Sequence
  Description of Artificial Sequence: Synthetic oligonucleotide
  Antisense strand to SEQ ID NO: 75732
uccuuccugggacacaucc

SEQ ID NO: 75814 - RNA, 19 nt, Artificial Sequence
  Description of Artificial Sequence: Synthetic oligonucleotide
  Sense strand starting at position 3707 of SEQ ID NO: 947
guguuugagggauggaugu

SEQ ID NO: 75815 - RNA, 19 nt, Artificial Sequence
  Description of Artificial Sequence: Synthetic oligonucleotide
  Antisense strand to SEQ ID NO: 75734
acauccaucccucaaacac

SEQ ID NO: 75816 - RNA, 19 nt, Artificial Sequence
  Description of Artificial Sequence: Synthetic oligonucleotide
  Sense strand starting at position 3696 of SEQ ID NO: 947
agugaugaacaguguuuga

SEQ ID NO: 75817 - RNA, 19 nt, Artificial Sequence
  Description of Artificial Sequence: Synthetic oligonucleotide
  Antisense strand to SEQ ID NO: 75736
ucaaacacuguucaucacu

SEQ ID NO: 75818 - RNA, 19 nt, Artificial Sequence
  Description of Artificial Sequence: Synthetic oligonucleotide
  Sense strand starting at position 3686 of SEQ ID NO: 947
uuugauggccagugaugaa

SEQ ID NO: 75819 - RNA, 19 nt, Artificial Sequence
  Description of Artificial Sequence: Synthetic oligonucleotide
  Antisense strand to SEQ ID NO: 75738
uucaucacuggccaucaaa

SEQ ID NO: 75820 - RNA, 19 nt, Artificial Sequence
  Description of Artificial Sequence: Synthetic oligonucleotide
  Sense strand starting at position 3446 of SEQ ID NO: 947
agacacauuugagggugaa

SEQ ID NO: 75821 - RNA, 19 nt, Artificial Sequence
  Description of Artificial Sequence: Synthetic oligonucleotide
  Antisense strand to SEQ ID NO: 75740
uucacccucaaaugugucu

SEQ ID NO: 75822 - RNA, 19 nt, Artificial Sequence
  Description of Artificial Sequence: Synthetic oligonucleotide
  Sense strand starting at position 3429 of SEQ ID NO: 947
gcuuguguuaaugaagaag

SEQ ID NO: 75823 - RNA, 19 nt, Artificial Sequence
  Description of Artificial Sequence: Synthetic oligonucleotide
  Antisense strand to SEQ ID NO: 75742
cuucuucauuaacacaagc

SEQ ID NO: 75824 - RNA, 19 nt, Artificial Sequence
  Description of Artificial Sequence: Synthetic oligonucleotide
  Sense strand starting at position 3323 of SEQ ID NO: 947
cccuuaaauguacaguuau

SEQ ID NO: 75825 - RNA, 19 nt, Artificial Sequence
  Description of Artificial Sequence: Synthetic oligonucleotide
  Antisense strand to SEQ ID NO: 75744
auaacuguacauuuaaggg

SEQ ID NO: 75826 - RNA, 19 nt, Artificial Sequence
  Description of Artificial Sequence: Synthetic oligonucleotide
  Sense strand starting at position 3017 of SEQ ID NO: 947
ucacauggccuuuguaaga

SEQ ID NO: 75827 - RNA, 19 nt, Artificial Sequence
  Description of Artificial Sequence: Synthetic oligonucleotide
  Antisense strand to SEQ ID NO: 75746
ucuuacaaaggccauguga

SEQ ID NO: 75828 - RNA, 19 nt, Artificial Sequence
  Description of Artificial Sequence: Synthetic oligonucleotide
  Sense strand starting at position 2998 of SEQ ID NO: 947
ucaggugggccugauagaa

SEQ ID NO: 75829 - RNA, 19 nt, Artificial Sequence
  Description of Artificial Sequence: Synthetic oligonucleotide
  Antisense strand to SEQ ID NO: 75748
uucuaucaggcccaccuga

SEQ ID NO: 75830 - RNA, 19 nt, Artificial Sequence
  Description of Artificial Sequence: Synthetic oligonucleotide
  Sense strand starting at position 2954 of SEQ ID NO: 947
agauuacucuaaggauuua

SEQ ID NO: 75831 - RNA, 19 nt, Artificial Sequence
  Description of Artificial Sequence: Synthetic oligonucleotide
  Antisense strand to SEQ ID NO: 75750
uaaauccuuagaguaaucu

SEQ ID NO: 75832 - RNA, 19 nt, Artificial Sequence
  Description of Artificial Sequence: Synthetic oligonucleotide
  Sense strand starting at position 2917 of SEQ ID NO: 947
auuuguuccuuacuuggua

SEQ ID NO: 75833 - RNA, 19 nt, Artificial Sequence
  Description of Artificial Sequence: Synthetic oligonucleotide
  Antisense strand to SEQ ID NO: 75752
uaccaaguaaggaacaaau

SEQ ID NO: 75834 - RNA, 19 nt, Artificial Sequence
  Description of Artificial Sequence: Synthetic oligonucleotide
  Sense strand starting at position 2913 of SEQ ID NO: 947
gugaauuuguuccuuacuu

SEQ ID NO: 75835 - RNA, 19 nt, Artificial Sequence
  Description of Artificial Sequence: Synthetic oligonucleotide
  Antisense strand to SEQ ID NO: 75754
aaguaaggaacaaauucac

SEQ ID NO: 75836 - RNA, 19 nt, Artificial Sequence
  Description of Artificial Sequence: Synthetic oligonucleotide
  Sense strand starting at position 2911 of SEQ ID NO: 947
cugugaauuuguuccuuac

SEQ ID NO: 75837 - RNA, 19 nt, Artificial Sequence
  Description of Artificial Sequence: Synthetic oligonucleotide
  Antisense strand to SEQ ID NO: 75756
guaaggaacaaauucacag

SEQ ID NO: 75838 - RNA, 19 nt, Artificial Sequence
  Description of Artificial Sequence: Synthetic oligonucleotide
  Sense strand starting at position 2855 of SEQ ID NO: 947
cugcaaguggcagaagaau

SEQ ID NO: 75839 - RNA, 19 nt, Artificial Sequence
  Description of Artificial Sequence: Synthetic oligonucleotide
  Antisense strand to SEQ ID NO: 75758
auucuucugccacuugcag

SEQ ID NO: 75840 - RNA, 19 nt, Artificial Sequence
  Description of Artificial Sequence: Synthetic oligonucleotide
  Sense strand starting at position 2762 of SEQ ID NO: 947
ugucaaaugcuuugaaacu

SEQ ID NO: 75841 - RNA, 19 nt, Artificial Sequence
  Description of Artificial Sequence: Synthetic oligonucleotide
  Antisense strand to SEQ ID NO: 75760
aguuucaaagcauuugaca

SEQ ID NO: 75842 - RNA, 19 nt, Artificial Sequence
  Description of Artificial Sequence: Synthetic oligonucleotide
  Sense strand starting at position 2734 of SEQ ID NO: 947
gcaaacauaccuggcauaa

SEQ ID NO: 75843 - RNA, 19 nt, Artificial Sequence
  Description of Artificial Sequence: Synthetic oligonucleotide
  Antisense strand to SEQ ID NO: 75762
uuaugccagguauguuugc

SEQ ID NO: 75844 - RNA, 19 nt, Artificial Sequence
  Description of Artificial Sequence: Synthetic oligonucleotide
  Sense strand starting at position 2650 of SEQ ID NO: 947
gucaaaguaucucucagau

SEQ ID NO: 75845 - RNA, 19 nt, Artificial Sequence
  Description of Artificial Sequence: Synthetic oligonucleotide
  Antisense strand to SEQ ID NO: 75764
aucugagagauacuuugac

SEQ ID NO: 75846 - RNA, 19 nt, Artificial Sequence
  Description of Artificial Sequence: Synthetic oligonucleotide
  Sense strand starting at position 2406 of SEQ ID NO: 947
augcaugacccaggguuau

SEQ ID NO: 75847 - RNA, 19 nt, Artificial Sequence
  Description of Artificial Sequence: Synthetic oligonucleotide
  Antisense strand to SEQ ID NO: 75766
auaacccugggucaugcau

SEQ ID NO: 75848 - RNA, 19 nt, Artificial Sequence
  Description of Artificial Sequence: Synthetic oligonucleotide
  Sense strand starting at position 2369 of SEQ ID NO: 947
uuaauaguacuguaccauu

SEQ ID NO: 75849 - RNA, 19 nt, Artificial Sequence
  Description of Artificial Sequence: Synthetic oligonucleotide
  Antisense strand to SEQ ID NO: 75768
aaugguacaguacuauuaa

SEQ ID NO: 75850 - RNA, 19 nt, Artificial Sequence
  Description of Artificial Sequence: Synthetic oligonucleotide
  Sense strand starting at position 2293 of SEQ ID NO: 947
gacugaauccugugacaga

SEQ ID NO: 75851 - RNA, 19 nt, Artificial Sequence
  Description of Artificial Sequence: Synthetic oligonucleotide
  Antisense strand to SEQ ID NO: 75770
ucugucacaggauucaguc

SEQ ID NO: 75852 - RNA, 19 nt, Artificial Sequence
  Description of Artificial Sequence: Synthetic oligonucleotide
  Sense strand starting at position 2276 of SEQ ID NO: 947
ugcaaugagagaugcuaga

SEQ ID NO: 75853 - RNA, 19 nt, Artificial Sequence
  Description of Artificial Sequence: Synthetic oligonucleotide
  Antisense strand to SEQ ID NO: 75772
ucuagcaucucucauugca

SEQ ID NO: 75854 - RNA, 19 nt, Artificial Sequence
  Description of Artificial Sequence: Synthetic oligonucleotide
  Sense strand starting at position 2014 of SEQ ID NO: 947
cgaaguaagcaucaucaau

SEQ ID NO: 75855 - RNA, 19 nt, Artificial Sequence
  Description of Artificial Sequence: Synthetic oligonucleotide
  Antisense strand to SEQ ID NO: 75774
auugaugaugcuuacuucg

SEQ ID NO: 75856 - RNA, 19 nt, Artificial Sequence
  Description of Artificial Sequence: Synthetic oligonucleotide
  Sense strand starting at position 2002 of SEQ ID NO: 947
uaaccaagugaucgaagua

SEQ ID NO: 75857 - RNA, 19 nt, Artificial Sequence
  Description of Artificial Sequence: Synthetic oligonucleotide
  Antisense strand to SEQ ID NO: 75776
uacuucgaucacuugguua

SEQ ID NO: 75858 - RNA, 19 nt, Artificial Sequence
  Description of Artificial Sequence: Synthetic oligonucleotide
  Sense strand starting at position 1534 of SEQ ID NO: 947
uguagucaccuuuacuuua

SEQ ID NO: 75859 - RNA, 19 nt, Artificial Sequence
  Description of Artificial Sequence: Synthetic oligonucleotide
  Antisense strand to SEQ ID NO: 75778
uaaaguaaaggugacuaca

SEQ ID NO: 75860 - RNA, 19 nt, Artificial Sequence
  Description of Artificial Sequence: Synthetic oligonucleotide
  Sense strand starting at position 1296 of SEQ ID NO: 947
ucaugacucguuuacauac

SEQ ID NO: 75861 - RNA, 19 nt, Artificial Sequence
  Description of Artificial Sequence: Synthetic oligonucleotide
  Antisense strand to SEQ ID NO: 75780
guauguaaacgagucauga

SEQ ID NO: 75862 - RNA, 19 nt, Artificial Sequence
  Description of Artificial Sequence: Synthetic oligonucleotide
  Sense strand starting at position 1266 of SEQ ID NO: 947
ugcagucugcaauaagaaa

SEQ ID NO: 75863 - RNA, 19 nt, Artificial Sequence
  Description of Artificial Sequence: Synthetic oligonucleotide
  Antisense strand to SEQ ID NO: 75782
uuucuuauugcagacugca

SEQ ID NO: 75864 - RNA, 19 nt, Artificial Sequence
  Description of Artificial Sequence: Synthetic oligonucleotide
  Sense strand starting at position 1113 of SEQ ID NO: 947
ccucgaaaguaaccauaga

SEQ ID NO: 75865 - RNA, 19 nt, Artificial Sequence
  Description of Artificial Sequence: Synthetic oligonucleotide
  Antisense strand to SEQ ID NO: 75784
ucuaugguuacuuucgagg

SEQ ID NO: 75866 - RNA, 19 nt, Artificial Sequence
  Description of Artificial Sequence: Synthetic oligonucleotide
  Sense strand starting at position 1105 of SEQ ID NO: 947
ccacuauaccucgaaagua

SEQ ID NO: 75867 - RNA, 19 nt, Artificial Sequence
  Description of Artificial Sequence: Synthetic oligonucleotide
  Antisense strand to SEQ ID NO: 75786
uacuuucgagguauagugg

SEQ ID NO: 75868 - RNA, 19 nt, Artificial Sequence
  Description of Artificial Sequence: Synthetic oligonucleotide
  Sense strand starting at position 1054 of SEQ ID NO: 947
uaugauaggcuuggugaac

SEQ ID NO: 75869 - RNA, 19 nt, Artificial Sequence
  Description of Artificial Sequence: Synthetic oligonucleotide
  Antisense strand to SEQ ID NO: 75788
guucaccaagccuaucaua

SEQ ID NO: 75870 - RNA, 19 nt, Artificial Sequence
  Description of Artificial Sequence: Synthetic oligonucleotide
  Sense strand starting at position 1053 of SEQ ID NO: 947
auaugauaggcuuggugaa

SEQ ID NO: 75871 - RNA, 19 nt, Artificial Sequence
  Description of Artificial Sequence: Synthetic oligonucleotide
  Antisense strand to SEQ ID NO: 75790
uucaccaagccuaucauau

SEQ ID NO: 75872 - RNA, 19 nt, Artificial Sequence
  Description of Artificial Sequence: Synthetic oligonucleotide
  Sense strand starting at position 858 of SEQ ID NO: 947
uaggcaucaguuuaauaga

SEQ ID NO: 75873 - RNA, 19 nt, Artificial Sequence
  Description of Artificial Sequence: Synthetic oligonucleotide
  Antisense strand to SEQ ID NO: 75792
ucuauuaaacugaugccua

SEQ ID NO: 75874 - RNA, 19 nt, Artificial Sequence
  Description of Artificial Sequence: Synthetic oligonucleotide
  Sense strand starting at position 853 of SEQ ID NO: 947
ccauguaggcaucaguuua

SEQ ID NO: 75875 - RNA, 19 nt, Artificial Sequence
  Description of Artificial Sequence: Synthetic oligonucleotide
  Antisense strand to SEQ ID NO: 75794
uaaacugaugccuacaugg

SEQ ID NO: 75876 - RNA, 19 nt, Artificial Sequence
  Description of Artificial Sequence: Synthetic oligonucleotide
  Sense strand starting at position 642 of SEQ ID NO: 947
agguguccucucuaaauga

SEQ ID NO: 75877 - RNA, 19 nt, Artificial Sequence
  Description of Artificial Sequence: Synthetic oligonucleotide
  Antisense strand to SEQ ID NO: 75796
ucauuuagagaggacaccu

SEQ ID NO: 75878 - RNA, 19 nt, Artificial Sequence
  Description of Artificial Sequence: Synthetic oligonucleotide
  Sense strand starting at position 625 of SEQ ID NO: 947
ggucacugguccucauaag

SEQ ID NO: 75879 - RNA, 19 nt, Artificial Sequence
  Description of Artificial Sequence: Synthetic oligonucleotide
  Antisense strand to SEQ ID NO: 75798
cuuaugaggaccagugacc

SEQ ID NO: 75880 - RNA, 19 nt, Artificial Sequence
  Description of Artificial Sequence: Synthetic oligonucleotide
  Sense strand starting at position 459 of SEQ ID NO: 947
cuguaugagccacaucaga

SEQ ID NO: 75881 - RNA, 19 nt, Artificial Sequence
  Description of Artificial Sequence: Synthetic oligonucleotide
  Antisense strand to SEQ ID NO: 75800
ucugauguggcucauacag

SEQ ID NO: 75882 - RNA, 19 nt, Artificial Sequence
  Description of Artificial Sequence: Synthetic oligonucleotide
  Sense strand starting at position 200 of SEQ ID NO: 947
aauagcuaucgggaagcua

SEQ ID NO: 75883 - RNA, 19 nt, Artificial Sequence
  Description of Artificial Sequence: Synthetic oligonucleotide
  Antisense strand to SEQ ID NO: 75802
uagcuucccgauagcuauu

SEQ ID NO: 75884 - RNA, 19 nt, Artificial Sequence
  Description of Artificial Sequence: Synthetic oligonucleotide
  Sense strand starting at position 191 of SEQ ID NO: 948
gugagccauuuacauauua

SEQ ID NO: 75885 - RNA, 19 nt, Artificial Sequence
  Description of Artificial Sequence: Synthetic oligonucleotide
  Antisense strand to SEQ ID NO: 75804
uaauauguaaauggcucac

SEQ ID NO: 75886 - RNA, 19 nt, Artificial Sequence
  Description of Artificial Sequence: Synthetic oligonucleotide
  Sense strand starting at position 457 of SEQ ID NO: 948
uaaguaaucuucccgaggu

SEQ ID NO: 75887 - RNA, 19 nt, Artificial Sequence
  Description of Artificial Sequence: Synthetic oligonucleotide
  Antisense strand to SEQ ID NO: 75806
accucgggaagauuacuua

SEQ ID NO: 75888 - RNA, 19 nt, Artificial Sequence
  Description of Artificial Sequence: Synthetic oligonucleotide
  Sense strand starting at position 459 of SEQ ID NO: 948
aguaaucuucccgagguga

SEQ ID NO: 75889 - RNA, 19 nt, Artificial Sequence
  Description of Artificial Sequence: Synthetic oligonucleotide
  Antisense strand to SEQ ID NO: 75808
ucaccucgggaagauuacu

SEQ ID NO: 75890 - RNA, 19 nt, Artificial Sequence
  Description of Artificial Sequence: Synthetic oligonucleotide
  Sense strand starting at position 461 of SEQ ID NO: 948
uaaucuucccgaggugaca

SEQ ID NO: 75891 - RNA, 19 nt, Artificial Sequence
  Description of Artificial Sequence: Synthetic oligonucleotide
  Antisense strand to SEQ ID NO: 75810
ugucaccucgggaagauua

SEQ ID NO: 75892 - RNA, 19 nt, Artificial Sequence
  Description of Artificial Sequence: Synthetic oligonucleotide
  Sense strand starting at position 610 of SEQ ID NO: 948
ucccguuccuccucuguaa

SEQ ID NO: 75893 - RNA, 19 nt, Artificial Sequence
  Description of Artificial Sequence: Synthetic oligonucleotide
  Antisense strand to SEQ ID NO: 75812
uuacagaggaggaacggga

SEQ ID NO: 75894 - RNA, 19 nt, Artificial Sequence
  Description of Artificial Sequence: Synthetic oligonucleotide
  Sense strand starting at position 614 of SEQ ID NO: 948
guuccuccucuguaaagcu

SEQ ID NO: 75895 - RNA, 19 nt, Artificial Sequence
  Description of Artificial Sequence: Synthetic oligonucleotide
  Antisense strand to SEQ ID NO: 75814
agcuuuacagaggaggaac

SEQ ID NO: 75896 - RNA, 19 nt, Artificial Sequence
  Description of Artificial Sequence: Synthetic oligonucleotide
  Sense strand starting at position 623 of SEQ ID NO: 948
cuguaaagcucugcucaga

SEQ ID NO: 75897 - RNA, 19 nt, Artificial Sequence
  Description of Artificial Sequence: Synthetic oligonucleotide
  Antisense strand to SEQ ID NO: 75816
ucugagcagagcuuuacag

SEQ ID NO: 75898 - RNA, 19 nt, Artificial Sequence
  Description of Artificial Sequence: Synthetic oligonucleotide
  Sense strand starting at position 678 of SEQ ID NO: 948
uguccugagguauggugua

SEQ ID NO: 75899 - RNA, 19 nt, Artificial Sequence
  Description of Artificial Sequence: Synthetic oligonucleotide
  Antisense strand to SEQ ID NO: 75818
uacaccauaccucaggaca

SEQ ID NO: 75900 - RNA, 19 nt, Artificial Sequence
  Description of Artificial Sequence: Synthetic oligonucleotide
  Sense strand starting at position 903 of SEQ ID NO: 948
gggccaucucauuacacca

SEQ ID NO: 75901 - RNA, 19 nt, Artificial Sequence
  Description of Artificial Sequence: Synthetic oligonucleotide
  Antisense strand to SEQ ID NO: 75820
ugguguaaugagauggccc

SEQ ID NO: 75902 - RNA, 19 nt, Artificial Sequence
  Description of Artificial Sequence: Synthetic oligonucleotide
  Sense strand starting at position 1135 of SEQ ID NO: 948
accgacugaucacuuauua

SEQ ID NO: 75903 - RNA, 19 nt, Artificial Sequence
  Description of Artificial Sequence: Synthetic oligonucleotide
  Antisense strand to SEQ ID NO: 75822
uaauaagugaucagucggu

SEQ ID NO: 75904 - RNA, 19 nt, Artificial Sequence
  Description of Artificial Sequence: Synthetic oligonucleotide
  Sense strand starting at position 1169 of SEQ ID NO: 948
ccagauguguuacuuacau

SEQ ID NO: 75905 - RNA, 19 nt, Artificial Sequence
  Description of Artificial Sequence: Synthetic oligonucleotide
  Antisense strand to SEQ ID NO: 75824
auguaaguaacacaucugg

SEQ ID NO: 75906 - RNA, 19 nt, Artificial Sequence
  Description of Artificial Sequence: Synthetic oligonucleotide
  Sense strand starting at position 1213 of SEQ ID NO: 948
aagggaauguuguccguuu

SEQ ID NO: 75907 - RNA, 19 nt, Artificial Sequence
  Description of Artificial Sequence: Synthetic oligonucleotide
  Antisense strand to SEQ ID NO: 75826
aaacggacaacauucccuu

SEQ ID NO: 75908 - RNA, 19 nt, Artificial Sequence
  Description of Artificial Sequence: Synthetic oligonucleotide
  Sense strand starting at position 1236 of SEQ ID NO: 948
gacgaaagagcugagguuu

SEQ ID NO: 75909 - RNA, 19 nt, Artificial Sequence
  Description of Artificial Sequence: Synthetic oligonucleotide
  Antisense strand to SEQ ID NO: 75828
aaaccucagcucuuucguc

SEQ ID NO: 75910 - RNA, 19 nt, Artificial Sequence
  Description of Artificial Sequence: Synthetic oligonucleotide
  Sense strand starting at position 1266 of SEQ ID NO: 948
auaacuaugucauuaaguc

SEQ ID NO: 75911 - RNA, 19 nt, Artificial Sequence
  Description of Artificial Sequence: Synthetic oligonucleotide
  Antisense strand to SEQ ID NO: 75830
gacuuaaugacauaguuau

SEQ ID NO: 75912 - RNA, 19 nt, Artificial Sequence
  Description of Artificial Sequence: Synthetic oligonucleotide
  Sense strand starting at position 1270 of SEQ ID NO: 948
cuaugucauuaagucuaga

SEQ ID NO: 75913 - RNA, 19 nt, Artificial Sequence
  Description of Artificial Sequence: Synthetic oligonucleotide
  Antisense strand to SEQ ID NO: 75832
ucuagacuuaaugacauag

SEQ ID NO: 75914 - RNA, 19 nt, Artificial Sequence
  Description of Artificial Sequence: Synthetic oligonucleotide
  Sense strand starting at position 1418 of SEQ ID NO: 948
gugcaauuccaagggaauc

SEQ ID NO: 75915 - RNA, 19 nt, Artificial Sequence
  Description of Artificial Sequence: Synthetic oligonucleotide
  Antisense strand to SEQ ID NO: 75834
gauucccuuggaauugcac

SEQ ID NO: 75916 - RNA, 19 nt, Artificial Sequence
  Description of Artificial Sequence: Synthetic oligonucleotide
  Sense strand starting at position 1437 of SEQ ID NO: 948
acagcuuggcuccaaucaa

SEQ ID NO: 75917 - RNA, 19 nt, Artificial Sequence
  Description of Artificial Sequence: Synthetic oligonucleotide
  Antisense strand to SEQ ID NO: 75836
uugauuggagccaagcugu

SEQ ID NO: 75918 - RNA, 19 nt, Artificial Sequence
  Description of Artificial Sequence: Synthetic oligonucleotide
  Sense strand starting at position 1536 of SEQ ID NO: 948
auggaagcguguucuugau

SEQ ID NO: 75919 - RNA, 19 nt, Artificial Sequence
  Description of Artificial Sequence: Synthetic oligonucleotide
  Antisense strand to SEQ ID NO: 75838
aucaagaacacgcuuccau

SEQ ID NO: 75920 - RNA, 19 nt, Artificial Sequence
  Description of Artificial Sequence: Synthetic oligonucleotide
  Sense strand starting at position 1538 of SEQ ID NO: 948
ggaagcguguucuugauuu

SEQ ID NO: 75921 - RNA, 19 nt, Artificial Sequence
  Description of Artificial Sequence: Synthetic oligonucleotide
  Antisense strand to SEQ ID NO: 75840
aaaucaagaacacgcuucc

SEQ ID NO: 75922 - RNA, 19 nt, Artificial Sequence
  Description of Artificial Sequence: Synthetic oligonucleotide
  Sense strand starting at position 1566 of SEQ ID NO: 948
aagaguuggagaggucuga

SEQ ID NO: 75923 - RNA, 19 nt, Artificial Sequence
  Description of Artificial Sequence: Synthetic oligonucleotide
  Antisense strand to SEQ ID NO: 75842
ucagaccucuccaacucuu

SEQ ID NO: 75924 - RNA, 19 nt, Artificial Sequence
  Description of Artificial Sequence: Synthetic oligonucleotide
  Sense strand starting at position 1570 of SEQ ID NO: 948
guuggagaggucugaaguu

SEQ ID NO: 75925 - RNA, 19 nt, Artificial Sequence
  Description of Artificial Sequence: Synthetic oligonucleotide
  Antisense strand to SEQ ID NO: 75844
aacuucagaccucuccaac

SEQ ID NO: 75926 - RNA, 19 nt, Artificial Sequence
  Description of Artificial Sequence: Synthetic oligonucleotide
  Sense strand starting at position 1606 of SEQ ID NO: 948
gggccagggucaucggaaa

SEQ ID NO: 75927 - RNA, 19 nt, Artificial Sequence
  Description of Artificial Sequence: Synthetic oligonucleotide
  Antisense strand to SEQ ID NO: 75846
uuuccgaugacccuggccc

SEQ ID NO: 75928 - RNA, 19 nt, Artificial Sequence
  Description of Artificial Sequence: Synthetic oligonucleotide
  Sense strand starting at position 1797 of SEQ ID NO: 948
cggccucgccucuaagaga

SEQ ID NO: 75929 - RNA, 19 nt, Artificial Sequence
  Description of Artificial Sequence: Synthetic oligonucleotide
  Antisense strand to SEQ ID NO: 75848
ucucuuagaggcgaggccg

SEQ ID NO: 75930 - RNA, 19 nt, Artificial Sequence
  Description of Artificial Sequence: Synthetic oligonucleotide
  Sense strand starting at position 1950 of SEQ ID NO: 948
cugccaucuuggcccagaa

SEQ ID NO: 75931 - RNA, 19 nt, Artificial Sequence
  Description of Artificial Sequence: Synthetic oligonucleotide
  Antisense strand to SEQ ID NO: 75850
uucugggccaagauggcag

SEQ ID NO: 75932 - RNA, 19 nt, Artificial Sequence
  Description of Artificial Sequence: Synthetic oligonucleotide
  Sense strand starting at position 2512 of SEQ ID NO: 948
guggcuucuuguguuuaga

SEQ ID NO: 75933 - RNA, 19 nt, Artificial Sequence
  Description of Artificial Sequence: Synthetic oligonucleotide
  Antisense strand to SEQ ID NO: 75852
ucuaaacacaagaagccac

SEQ ID NO: 75934 - RNA, 19 nt, Artificial Sequence
  Description of Artificial Sequence: Synthetic oligonucleotide
  Sense strand starting at position 2514 of SEQ ID NO: 948
ggcuucuuguguuuagagu

SEQ ID NO: 75935 - RNA, 19 nt, Artificial Sequence
  Description of Artificial Sequence: Synthetic oligonucleotide
  Antisense strand to SEQ ID NO: 75854
acucuaaacacaagaagcc

SEQ ID NO: 75936 - RNA, 19 nt, Artificial Sequence
  Description of Artificial Sequence: Synthetic oligonucleotide
  Sense strand starting at position 2520 of SEQ ID NO: 948
uuguguuuagaguguggga

SEQ ID NO: 75937 - RNA, 19 nt, Artificial Sequence
  Description of Artificial Sequence: Synthetic oligonucleotide
  Antisense strand to SEQ ID NO: 75856
ucccacacucuaaacacaa

SEQ ID NO: 75938 - RNA, 19 nt, Artificial Sequence
  Description of Artificial Sequence: Synthetic oligonucleotide
  Sense strand starting at position 2546 of SEQ ID NO: 948
ggagacacauauuaauagu

SEQ ID NO: 75939 - RNA, 19 nt, Artificial Sequence
  Description of Artificial Sequence: Synthetic oligonucleotide
  Antisense strand to SEQ ID NO: 75858
acuauuaauaugugucucc

SEQ ID NO: 75940 - RNA, 19 nt, Artificial Sequence
  Description of Artificial Sequence: Synthetic oligonucleotide
  Sense strand starting at position 2572 of SEQ ID NO: 948
acaguugugucauuucuaa

SEQ ID NO: 75941 - RNA, 19 nt, Artificial Sequence
  Description of Artificial Sequence: Synthetic oligonucleotide
  Antisense strand to SEQ ID NO: 75860
uuagaaaugacacaacugu

SEQ ID NO: 75942 - RNA, 19 nt, Artificial Sequence
  Description of Artificial Sequence: Synthetic oligonucleotide
  Sense strand starting at position 2576 of SEQ ID NO: 948
uugugucauuucuaacuug

SEQ ID NO: 75943 - RNA, 19 nt, Artificial Sequence
  Description of Artificial Sequence: Synthetic oligonucleotide
  Antisense strand to SEQ ID NO: 75862
caaguuagaaaugacacaa

SEQ ID NO: 75944 - RNA, 19 nt, Artificial Sequence
  Description of Artificial Sequence: Synthetic oligonucleotide
  Sense strand starting at position 2609 of SEQ ID NO: 948
acgauuugcuacucacugu

SEQ ID NO: 75945 - RNA, 19 nt, Artificial Sequence
  Description of Artificial Sequence: Synthetic oligonucleotide
  Antisense strand to SEQ ID NO: 75864
acagugaguagcaaaucgu

SEQ ID NO: 75946 - RNA, 19 nt, Artificial Sequence
  Description of Artificial Sequence: Synthetic oligonucleotide
  Sense strand starting at position 2631 of SEQ ID NO: 948
gaguucuuagcacggauua

SEQ ID NO: 75947 - RNA, 19 nt, Artificial Sequence
  Description of Artificial Sequence: Synthetic oligonucleotide
  Antisense strand to SEQ ID NO: 75866
uaauccgugcuaagaacuc

SEQ ID NO: 75948 - RNA, 19 nt, Artificial Sequence
  Description of Artificial Sequence: Synthetic oligonucleotide
  Sense strand starting at position 2632 of SEQ ID NO: 948
aguucuuagcacggauuaa

SEQ ID NO: 75949 - RNA, 19 nt, Artificial Sequence
  Description of Artificial Sequence: Synthetic oligonucleotide
  Antisense strand to SEQ ID NO: 75868
uuaauccgugcuaagaacu

SEQ ID NO: 75950 - RNA, 19 nt, Artificial Sequence
  Description of Artificial Sequence: Synthetic oligonucleotide
  Sense strand starting at position 2633 of SEQ ID NO: 948
guucuuagcacggauuaac

SEQ ID NO: 75951 - RNA, 19 nt, Artificial Sequence
  Description of Artificial Sequence: Synthetic oligonucleotide
  Antisense strand to SEQ ID NO: 75870
guuaauccgugcuaagaac

SEQ ID NO: 75952 - RNA, 19 nt, Artificial Sequence
  Description of Artificial Sequence: Synthetic oligonucleotide
  Sense strand starting at position 2755 of SEQ ID NO: 948
guacuuucugaagggcuga

SEQ ID NO: 75953 - RNA, 19 nt, Artificial Sequence
  Description of Artificial Sequence: Synthetic oligonucleotide
  Antisense strand to SEQ ID NO: 75872
ucagcccuucagaaaguac

SEQ ID NO: 75954 - RNA, 19 nt, Artificial Sequence
  Description of Artificial Sequence: Synthetic oligonucleotide
  Sense strand starting at position 2823 of SEQ ID NO: 948
gacgguguagcauucgcaa

SEQ ID NO: 75955 - RNA, 19 nt, Artificial Sequence
  Description of Artificial Sequence: Synthetic oligonucleotide
  Antisense strand to SEQ ID NO: 75874
uugcgaaugcuacaccguc

SEQ ID NO: 75956 - RNA, 19 nt, Artificial Sequence
  Description of Artificial Sequence: Synthetic oligonucleotide
  Sense strand starting at position 3228 of SEQ ID NO: 948
cccacuaauuggucacagu

SEQ ID NO: 75957 - RNA, 19 nt, Artificial Sequence
  Description of Artificial Sequence: Synthetic oligonucleotide
  Antisense strand to SEQ ID NO: 75876
acugugaccaauuaguggg

SEQ ID NO: 75958 - RNA, 19 nt, Artificial Sequence
  Description of Artificial Sequence: Synthetic oligonucleotide
  Sense strand starting at position 3229 of SEQ ID NO: 948
ccacuaauuggucacagua

SEQ ID NO: 75959 - RNA, 19 nt, Artificial Sequence
  Description of Artificial Sequence: Synthetic oligonucleotide
  Antisense strand to SEQ ID NO: 75878
uacugugaccaauuagugg

SEQ ID NO: 75960 - RNA, 19 nt, Artificial Sequence
  Description of Artificial Sequence: Synthetic oligonucleotide
  Sense strand starting at position 3237 of SEQ ID NO: 948
uggucacaguaucaauuua

SEQ ID NO: 75961 - RNA, 19 nt, Artificial Sequence
  Description of Artificial Sequence: Synthetic oligonucleotide
  Antisense strand to SEQ ID NO: 75880
uaaauugauacugugacca

SEQ ID NO: 75962 - RNA, 19 nt, Artificial Sequence
  Description of Artificial Sequence: Synthetic oligonucleotide
  Sense strand starting at position 3786 of SEQ ID NO: 948
agaccacucuggccaauaa

SEQ ID NO: 75963 - RNA, 19 nt, Artificial Sequence
  Description of Artificial Sequence: Synthetic oligonucleotide
  Antisense strand to SEQ ID NO: 75882
uuauuggccagaguggucu

SEQ ID NO: 75964 - RNA, 19 nt, Artificial Sequence
  Description of Artificial Sequence: Synthetic oligonucleotide
  Sense strand starting at position 164 of SEQ ID NO: 949
aggguuugugaggguugaa

SEQ ID NO: 75965 - RNA, 19 nt, Artificial Sequence
  Description of Artificial Sequence: Synthetic oligonucleotide
  Antisense strand to SEQ ID NO: 75884
uucaacccucacaaacccu

SEQ ID NO: 75966 - RNA, 19 nt, Artificial Sequence
  Description of Artificial Sequence: Synthetic oligonucleotide
  Sense strand starting at position 167 of SEQ ID NO: 949
guuugugaggguugaacaa

SEQ ID NO: 75967 - RNA, 19 nt, Artificial Sequence
  Description of Artificial Sequence: Synthetic oligonucleotide
  Antisense strand to SEQ ID NO: 75886
uuguucaacccucacaaac

SEQ ID NO: 75968 - RNA, 19 nt, Artificial Sequence
  Description of Artificial Sequence: Synthetic oligonucleotide
  Sense strand starting at position 237 of SEQ ID NO: 949
cagugugaggaaugauaag

SEQ ID NO: 75969 - RNA, 19 nt, Artificial Sequence
  Description of Artificial Sequence: Synthetic oligonucleotide
  Antisense strand to SEQ ID NO: 75888
cuuaucauuccucacacug

SEQ ID NO: 75970 - RNA, 19 nt, Artificial Sequence
  Description of Artificial Sequence: Synthetic oligonucleotide
  Sense strand starting at position 369 of SEQ ID NO: 949
agaagcuucguggaagaga

SEQ ID NO: 75971 - RNA, 19 nt, Artificial Sequence
  Description of Artificial Sequence: Synthetic oligonucleotide
  Antisense strand to SEQ ID NO: 75890
ucucuuccacgaagcuucu

SEQ ID NO: 75972 - RNA, 19 nt, Artificial Sequence
  Description of Artificial Sequence: Synthetic oligonucleotide
  Sense strand starting at position 419 of SEQ ID NO: 949
gacuucugccagugaagaa

SEQ ID NO: 75973 - RNA, 19 nt, Artificial Sequence
  Description of Artificial Sequence: Synthetic oligonucleotide
  Antisense strand to SEQ ID NO: 75892
uucuucacuggcagaaguc

SEQ ID NO: 75974 - RNA, 19 nt, Artificial Sequence
  Description of Artificial Sequence: Synthetic oligonucleotide
  Sense strand starting at position 498 of SEQ ID NO: 949
uggagaugcagguguauag

SEQ ID NO: 75975 - RNA, 19 nt, Artificial Sequence
  Description of Artificial Sequence: Synthetic oligonucleotide
  Antisense strand to SEQ ID NO: 75894
cuauacaccugcaucucca

SEQ ID NO: 75976 - RNA, 19 nt, Artificial Sequence
  Description of Artificial Sequence: Synthetic oligonucleotide
  Sense strand starting at position 712 of SEQ ID NO: 949
gcauaaugggauuaacugu

SEQ ID NO: 75977 - RNA, 19 nt, Artificial Sequence
  Description of Artificial Sequence: Synthetic oligonucleotide
  Antisense strand to SEQ ID NO: 75896
acaguuaaucccauuaugc

SEQ ID NO: 75978 - RNA, 19 nt, Artificial Sequence
  Description of Artificial Sequence: Synthetic oligonucleotide
  Sense strand starting at position 718 of SEQ ID NO: 949
ugggauuaacugugaauau

SEQ ID NO: 75979 - RNA, 19 nt, Artificial Sequence
  Description of Artificial Sequence: Synthetic oligonucleotide
  Antisense strand to SEQ ID NO: 75898
auauucacaguuaauccca

SEQ ID NO: 75980 - RNA, 19 nt, Artificial Sequence
  Description of Artificial Sequence: Synthetic oligonucleotide
  Sense strand starting at position 758 of SEQ ID NO: 949
auuccaagaguuugaacca

SEQ ID NO: 75981 - RNA, 19 nt, Artificial Sequence
  Description of Artificial Sequence: Synthetic oligonucleotide
  Antisense strand to SEQ ID NO: 75900
ugguucaaacucuuggaau

SEQ ID NO: 75982 - RNA, 19 nt, Artificial Sequence
  Description of Artificial Sequence: Synthetic oligonucleotide
  Sense strand starting at position 795 of SEQ ID NO: 949
ggaggauugauguaugucu

SEQ ID NO: 75983 - RNA, 19 nt, Artificial Sequence
  Description of Artificial Sequence: Synthetic oligonucleotide
  Antisense strand to SEQ ID NO: 75902
agacauacaucaauccucc

SEQ ID NO: 75984 - RNA, 19 nt, Artificial Sequence
  Description of Artificial Sequence: Synthetic oligonucleotide
  Sense strand starting at position 888 of SEQ ID NO: 949
guuaaauccugagcuggga

SEQ ID NO: 75985 - RNA, 19 nt, Artificial Sequence
  Description of Artificial Sequence: Synthetic oligonucleotide
  Antisense strand to SEQ ID NO: 75904
ucccagcucaggauuuaac

SEQ ID NO: 75986 - RNA, 19 nt, Artificial Sequence
  Description of Artificial Sequence: Synthetic oligonucleotide
  Sense strand starting at position 892 of SEQ ID NO: 949
aauccugagcugggacauu

SEQ ID NO: 75987 - RNA, 19 nt, Artificial Sequence
  Description of Artificial Sequence: Synthetic oligonucleotide
  Antisense strand to SEQ ID NO: 75906
aaugucccagcucaggauu

SEQ ID NO: 75988 - RNA, 19 nt, Artificial Sequence
  Description of Artificial Sequence: Synthetic oligonucleotide
  Sense strand starting at position 1285 of SEQ ID NO: 949
gugcauguucuucuugcaa

SEQ ID NO: 75989 - RNA, 19 nt, Artificial Sequence
  Description of Artificial Sequence: Synthetic oligonucleotide
  Antisense strand to SEQ ID NO: 75908
uugcaagaagaacaugcac

SEQ ID NO: 75990 - RNA, 19 nt, Artificial Sequence
  Description of Artificial Sequence: Synthetic oligonucleotide
  Sense strand starting at position 1411 of SEQ ID NO: 949
gugauauaaagucacuggu

SEQ ID NO: 75991 - RNA, 19 nt, Artificial Sequence
  Description of Artificial Sequence: Synthetic oligonucleotide
  Antisense strand to SEQ ID NO: 75910
accagugacuuuauaucac

SEQ ID NO: 75992 - RNA, 19 nt, Artificial Sequence
  Description of Artificial Sequence: Synthetic oligonucleotide
  Sense strand starting at position 1413 of SEQ ID NO: 949
gauauaaagucacugguuu

SEQ ID NO: 75993 - RNA, 19 nt, Artificial Sequence
  Description of Artificial Sequence: Synthetic oligonucleotide
  Antisense strand to SEQ ID NO: 75912
aaaccagugacuuuauauc

SEQ ID NO: 75994 - RNA, 19 nt, Artificial Sequence
  Description of Artificial Sequence: Synthetic oligonucleotide
  Sense strand starting at position 1632 of SEQ ID NO: 949
aagggauugucuguuuaga

SEQ ID NO: 75995 - RNA, 19 nt, Artificial Sequence
  Description of Artificial Sequence: Synthetic oligonucleotide
  Antisense strand to SEQ ID NO: 75914
ucuaaacagacaaucccuu

SEQ ID NO: 75996 - RNA, 19 nt, Artificial Sequence
  Description of Artificial Sequence: Synthetic oligonucleotide
  Sense strand starting at position 1634 of SEQ ID NO: 949
gggauugucuguuuagaga

SEQ ID NO: 75997 - RNA, 19 nt, Artificial Sequence
  Description of Artificial Sequence: Synthetic oligonucleotide
  Antisense strand to SEQ ID NO: 75916
ucucuaaacagacaauccc

SEQ ID NO: 75998 - RNA, 19 nt, Artificial Sequence
  Description of Artificial Sequence: Synthetic oligonucleotide
  Sense strand starting at position 1641 of SEQ ID NO: 949
ucuguuuagagaugaggua

SEQ ID NO: 75999 - RNA, 19 nt, Artificial Sequence
  Description of Artificial Sequence: Synthetic oligonucleotide
  Antisense strand to SEQ ID NO: 75918
uaccucaucucuaaacaga

SEQ ID NO: 76000 - RNA, 19 nt, Artificial Sequence
  Description of Artificial Sequence: Synthetic oligonucleotide
  Sense strand starting at position 1862 of SEQ ID NO: 949
cgcucuugucaguugcaga

SEQ ID NO: 76001 - RNA, 19 nt, Artificial Sequence
  Description of Artificial Sequence: Synthetic oligonucleotide
  Antisense strand to SEQ ID NO: 75920
ucugcaacugacaagagcg

SEQ ID NO: 76002 - RNA, 19 nt, Artificial Sequence
  Description of Artificial Sequence: Synthetic oligonucleotide
  Sense strand starting at position 2554 of SEQ ID NO: 949
auuuccaagugggaugaaa

SEQ ID NO: 76003 - RNA, 19 nt, Artificial Sequence
  Description of Artificial Sequence: Synthetic oligonucleotide
  Antisense strand to SEQ ID NO: 75922
uuucaucccacuuggaaau

SEQ ID NO: 76004 - RNA, 19 nt, Artificial Sequence
  Description of Artificial Sequence: Synthetic oligonucleotide
  Sense strand starting at position 2556 of SEQ ID NO: 949
uuccaagugggaugaaauu

SEQ ID NO: 76005 - RNA, 19 nt, Artificial Sequence
  Description of Artificial Sequence: Synthetic oligonucleotide
  Antisense strand to SEQ ID NO: 75924
aauuucaucccacuuggaa

SEQ ID NO: 76006 - RNA, 19 nt, Artificial Sequence
  Description of Artificial Sequence: Synthetic oligonucleotide
  Sense strand starting at position 2562 of SEQ ID NO: 949
gugggaugaaauuaguguu

SEQ ID NO: 76007 - RNA, 19 nt, Artificial Sequence
  Description of Artificial Sequence: Synthetic oligonucleotide
  Antisense strand to SEQ ID NO: 75926
aacacuaauuucaucccac

SEQ ID NO: 76008 - RNA, 19 nt, Artificial Sequence
  Description of Artificial Sequence: Synthetic oligonucleotide
  Sense strand starting at position 2598 of SEQ ID NO: 949
gccucaaagaggugacagu

SEQ ID NO: 76009 - RNA, 19 nt, Artificial Sequence
  Description of Artificial Sequence: Synthetic oligonucleotide
  Antisense strand to SEQ ID NO: 75928
acugucaccucuuugaggc

SEQ ID NO: 76010 - RNA, 19 nt, Artificial Sequence
  Description of Artificial Sequence: Synthetic oligonucleotide
  Sense strand starting at position 2638 of SEQ ID NO: 949
aggaaagguuuacuuuaua

SEQ ID NO: 76011 - RNA, 19 nt, Artificial Sequence
  Description of Artificial Sequence: Synthetic oligonucleotide
  Antisense strand to SEQ ID NO: 75930
uauaaaguaaaccuuuccu

SEQ ID NO: 76012 - RNA, 19 nt, Artificial Sequence
  Description of Artificial Sequence: Synthetic oligonucleotide
  Sense strand starting at position 2659 of SEQ ID NO: 949
ugaggucagaguuauguau

SEQ ID NO: 76013 - RNA, 19 nt, Artificial Sequence
  Description of Artificial Sequence: Synthetic oligonucleotide
  Antisense strand to SEQ ID NO: 75932
auacauaacucugaccuca

SEQ ID NO: 76014 - RNA, 19 nt, Artificial Sequence
  Description of Artificial Sequence: Synthetic oligonucleotide
  Sense strand starting at position 2663 of SEQ ID NO: 949
gucagaguuauguauaaag

SEQ ID NO: 76015 - RNA, 19 nt, Artificial Sequence
  Description of Artificial Sequence: Synthetic oligonucleotide
  Antisense strand to SEQ ID NO: 75934
cuuuauacauaacucugac

SEQ ID NO: 76016 - RNA, 19 nt, Artificial Sequence
  Description of Artificial Sequence: Synthetic oligonucleotide
  Sense strand starting at position 2959 of SEQ ID NO: 949
gcuggagugguuccugcuu

SEQ ID NO: 76017 - RNA, 19 nt, Artificial Sequence
  Description of Artificial Sequence: Synthetic oligonucleotide
  Antisense strand to SEQ ID NO: 75936
aagcaggaaccacuccagc

SEQ ID NO: 76018 - RNA, 19 nt, Artificial Sequence
  Description of Artificial Sequence: Synthetic oligonucleotide
  Sense strand starting at position 2971 of SEQ ID NO: 949
ccugcuuuaggaggauaua

SEQ ID NO: 76019 - RNA, 19 nt, Artificial Sequence
  Description of Artificial Sequence: Synthetic oligonucleotide
  Antisense strand to SEQ ID NO: 75938
uauauccuccuaaagcagg

SEQ ID NO: 76020 - RNA, 19 nt, Artificial Sequence
  Description of Artificial Sequence: Synthetic oligonucleotide
  Sense strand starting at position 2974 of SEQ ID NO: 949
gcuuuaggaggauauaguu

SEQ ID NO: 76021 - RNA, 19 nt, Artificial Sequence
  Description of Artificial Sequence: Synthetic oligonucleotide
  Antisense strand to SEQ ID NO: 75940
aacuauauccuccuaaagc

SEQ ID NO: 76022 - RNA, 19 nt, Artificial Sequence
  Description of Artificial Sequence: Synthetic oligonucleotide
  Sense strand starting at position 2980 of SEQ ID NO: 949
ggaggauauaguugacuuc

SEQ ID NO: 76023 - RNA, 19 nt, Artificial Sequence
  Description of Artificial Sequence: Synthetic oligonucleotide
  Antisense strand to SEQ ID NO: 75942
gaagucaacuauauccucc

SEQ ID NO: 76024 - RNA, 19 nt, Artificial Sequence
  Description of Artificial Sequence: Synthetic oligonucleotide
  Sense strand starting at position 3040 of SEQ ID NO: 949
ccaggauaucuaggucuuc

SEQ ID NO: 76025 - RNA, 19 nt, Artificial Sequence
  Description of Artificial Sequence: Synthetic oligonucleotide
  Antisense strand to SEQ ID NO: 75944
gaagaccuagauauccugg

SEQ ID NO: 76026 - RNA, 19 nt, Artificial Sequence
  Description of Artificial Sequence: Synthetic oligonucleotide
  Sense strand starting at position 3263 of SEQ ID NO: 949
gccuguguccucuuugcuu

SEQ ID NO: 76027 - RNA, 19 nt, Artificial Sequence
  Description of Artificial Sequence: Synthetic oligonucleotide
  Antisense strand to SEQ ID NO: 75946
aagcaaagaggacacaggc

SEQ ID NO: 76028 - RNA, 19 nt, Artificial Sequence
  Description of Artificial Sequence: Synthetic oligonucleotide
  Sense strand starting at position 3298 of SEQ ID NO: 949
ggguauuucuccucuuccu

SEQ ID NO: 76029 - RNA, 19 nt, Artificial Sequence
  Description of Artificial Sequence: Synthetic oligonucleotide
  Antisense strand to SEQ ID NO: 75948
aggaagaggagaaauaccc

SEQ ID NO: 76030 - RNA, 19 nt, Artificial Sequence
  Description of Artificial Sequence: Synthetic oligonucleotide
  Sense strand starting at position 3404 of SEQ ID NO: 949
uccacugucccucauugau

SEQ ID NO: 76031 - RNA, 19 nt, Artificial Sequence
  Description of Artificial Sequence: Synthetic oligonucleotide
  Antisense strand to SEQ ID NO: 75950
aucaaugagggacagugga

SEQ ID NO: 76032 - RNA, 19 nt, Artificial Sequence
  Description of Artificial Sequence: Synthetic oligonucleotide
  Sense strand starting at position 3463 of SEQ ID NO: 949
cagucaucucaauggaugu

SEQ ID NO: 76033 - RNA, 19 nt, Artificial Sequence
  Description of Artificial Sequence: Synthetic oligonucleotide
  Antisense strand to SEQ ID NO: 75952
acauccauugagaugacug

SEQ ID NO: 76034 - RNA, 19 nt, Artificial Sequence
  Description of Artificial Sequence: Synthetic oligonucleotide
  Sense strand starting at position 3465 of SEQ ID NO: 949
gucaucucaauggauguga

SEQ ID NO: 76035 - RNA, 19 nt, Artificial Sequence
  Description of Artificial Sequence: Synthetic oligonucleotide
  Antisense strand to SEQ ID NO: 75954
ucacauccauugagaugac

SEQ ID NO: 76036 - RNA, 19 nt, Artificial Sequence
  Description of Artificial Sequence: Synthetic oligonucleotide
  Sense strand starting at position 3467 of SEQ ID NO: 949
caucucaauggaugugaga

SEQ ID NO: 76037 - RNA, 19 nt, Artificial Sequence
  Description of Artificial Sequence: Synthetic oligonucleotide
  Antisense strand to SEQ ID NO: 75956
ucucacauccauugagaug

SEQ ID NO: 76038 - RNA, 19 nt, Artificial Sequence
  Description of Artificial Sequence: Synthetic oligonucleotide
  Sense strand starting at position 3469 of SEQ ID NO: 949
ucucaauggaugugagaug

SEQ ID NO: 76039 - RNA, 19 nt, Artificial Sequence
  Description of Artificial Sequence: Synthetic oligonucleotide
  Antisense strand to SEQ ID NO: 75958
caucucacauccauugaga

SEQ ID NO: 76040 - RNA, 19 nt, Artificial Sequence
  Description of Artificial Sequence: Synthetic oligonucleotide
  Sense strand starting at position 3474 of SEQ ID NO: 949
auggaugugagaugucaau

SEQ ID NO: 76041 - RNA, 19 nt, Artificial Sequence
  Description of Artificial Sequence: Synthetic oligonucleotide
  Antisense strand to SEQ ID NO: 75960
auugacaucucacauccau

SEQ ID NO: 76042 - RNA, 19 nt, Artificial Sequence
  Description of Artificial Sequence: Synthetic oligonucleotide
  Sense strand starting at position 3542 of SEQ ID NO: 949
agccauguccguguucaug

SEQ ID NO: 76043 - RNA, 19 nt, Artificial Sequence
  Description of Artificial Sequence: Synthetic oligonucleotide
  Antisense strand to SEQ ID NO: 75962
caugaacacggacauggcu

SEQ ID NO: 76044 - RNA, 19 nt, Artificial Sequence
  Description of Artificial Sequence: Synthetic oligonucleotide
  Sense strand starting at position 3083 of SEQ ID NO: 950
uuccguugcaguuagcaaa

SEQ ID NO: 76045 - RNA, 19 nt, Artificial Sequence
  Description of Artificial Sequence: Synthetic oligonucleotide
  Antisense strand to SEQ ID NO: 75964
uuugcuaacugcaacggaa

SEQ ID NO: 76046 - RNA, 19 nt, Artificial Sequence
  Description of Artificial Sequence: Synthetic oligonucleotide
  Sense strand starting at position 3078 of SEQ ID NO: 950
uguucuuccguugcaguua

SEQ ID NO: 76047 - RNA, 19 nt, Artificial Sequence
  Description of Artificial Sequence: Synthetic oligonucleotide
  Antisense strand to SEQ ID NO: 75966
uaacugcaacggaagaaca

SEQ ID NO: 76048 - RNA, 19 nt, Artificial Sequence
  Description of Artificial Sequence: Synthetic oligonucleotide
  Sense strand starting at position 3077 of SEQ ID NO: 950
guguucuuccguugcaguu

SEQ ID NO: 76049 - RNA, 19 nt, Artificial Sequence
  Description of Artificial Sequence: Synthetic oligonucleotide
  Antisense strand to SEQ ID NO: 75968
aacugcaacggaagaacac

SEQ ID NO: 76050 - RNA, 19 nt, Artificial Sequence
  Description of Artificial Sequence: Synthetic oligonucleotide
  Sense strand starting at position 3076 of SEQ ID NO: 950
gguguucuuccguugcagu

SEQ ID NO: 76051 - RNA, 19 nt, Artificial Sequence
  Description of Artificial Sequence: Synthetic oligonucleotide
  Antisense strand to SEQ ID NO: 75970
acugcaacggaagaacacc

SEQ ID NO: 76052 - RNA, 19 nt, Artificial Sequence
  Description of Artificial Sequence: Synthetic oligonucleotide
  Sense strand starting at position 2899 of SEQ ID NO: 950
uuucacuugcgcgaggaaa

SEQ ID NO: 76053 - RNA, 19 nt, Artificial Sequence
  Description of Artificial Sequence: Synthetic oligonucleotide
  Antisense strand to SEQ ID NO: 75972
uuuccucgcgcaagugaaa

SEQ ID NO: 76054 - RNA, 19 nt, Artificial Sequence
  Description of Artificial Sequence: Synthetic oligonucleotide
  Sense strand starting at position 2898 of SEQ ID NO: 950
cuuucacuugcgcgaggaa

SEQ ID NO: 76055 - RNA, 19 nt, Artificial Sequence
  Description of Artificial Sequence: Synthetic oligonucleotide
  Antisense strand to SEQ ID NO: 75974
uuccucgcgcaagugaaag

SEQ ID NO: 76056 - RNA, 19 nt, Artificial Sequence
  Description of Artificial Sequence: Synthetic oligonucleotide
  Sense strand starting at position 2689 of SEQ ID NO: 950
cccuuaaggucccuguauu

SEQ ID NO: 76057 - RNA, 19 nt, Artificial Sequence
  Description of Artificial Sequence: Synthetic oligonucleotide
  Antisense strand to SEQ ID NO: 75976
aauacagggaccuuaaggg

SEQ ID NO: 76058 - RNA, 19 nt, Artificial Sequence
  Description of Artificial Sequence: Synthetic oligonucleotide
  Sense strand starting at position 2561 of SEQ ID NO: 950
agacuuuccaugcagaggu

SEQ ID NO: 76059 - RNA, 19 nt, Artificial Sequence
  Description of Artificial Sequence: Synthetic oligonucleotide
  Antisense strand to SEQ ID NO: 75978
accucugcauggaaagucu

SEQ ID NO: 76060 - RNA, 19 nt, Artificial Sequence
  Description of Artificial Sequence: Synthetic oligonucleotide
  Sense strand starting at position 2559 of SEQ ID NO: 950
ggagacuuuccaugcagag

SEQ ID NO: 76061 - RNA, 19 nt, Artificial Sequence
  Description of Artificial Sequence: Synthetic oligonucleotide
  Antisense strand to SEQ ID NO: 75980
cucugcauggaaagucucc

SEQ ID NO: 76062 - RNA, 19 nt, Artificial Sequence
  Description of Artificial Sequence: Synthetic oligonucleotide
  Sense strand starting at position 1781 of SEQ ID NO: 950
guaccuuucucuugggcau

SEQ ID NO: 76063 - RNA, 19 nt, Artificial Sequence
  Description of Artificial Sequence: Synthetic oligonucleotide
  Antisense strand to SEQ ID NO: 75982
augcccaagagaaagguac

SEQ ID NO: 76064 - RNA, 19 nt, Artificial Sequence
  Description of Artificial Sequence: Synthetic oligonucleotide
  Sense strand starting at position 1058 of SEQ ID NO: 950
gcccgacguucguauaaga

SEQ ID NO: 76065 - RNA, 19 nt, Artificial Sequence
  Description of Artificial Sequence: Synthetic oligonucleotide
  Antisense strand to SEQ ID NO: 75984
ucuuauacgaacgucgggc

SEQ ID NO: 76066 - RNA, 19 nt, Artificial Sequence
  Description of Artificial Sequence: Synthetic oligonucleotide
  Sense strand starting at position 963 of SEQ ID NO: 950
ugaggugguucuuaauuac

SEQ ID NO: 76067 - RNA, 19 nt, Artificial Sequence
  Description of Artificial Sequence: Synthetic oligonucleotide
  Antisense strand to SEQ ID NO: 75986
guaauuaagaaccaccuca

SEQ ID NO: 76068 - RNA, 19 nt, Artificial Sequence
  Description of Artificial Sequence: Synthetic oligonucleotide
  Sense strand starting at position 854 of SEQ ID NO: 950
ggcuuugacccuugaagag

SEQ ID NO: 76069 - RNA, 19 nt, Artificial Sequence
  Description of Artificial Sequence: Synthetic oligonucleotide
  Antisense strand to SEQ ID NO: 75988
cucuucaagggucaaagcc

SEQ ID NO: 76070 - RNA, 19 nt, Artificial Sequence
  Description of Artificial Sequence: Synthetic oligonucleotide
  Sense strand starting at position 816 of SEQ ID NO: 950
cgguuaaucaccgagucca

SEQ ID NO: 76071 - RNA, 19 nt, Artificial Sequence
  Description of Artificial Sequence: Synthetic oligonucleotide
  Antisense strand to SEQ ID NO: 75990
uggacucggugauuaaccg

SEQ ID NO: 76072 - RNA, 19 nt, Artificial Sequence
  Description of Artificial Sequence: Synthetic oligonucleotide
  Sense strand starting at position 805 of SEQ ID NO: 950
gacacagguuacgguuaau

SEQ ID NO: 76073 - RNA, 19 nt, Artificial Sequence
  Description of Artificial Sequence: Synthetic oligonucleotide
  Antisense strand to SEQ ID NO: 75992
auuaaccguaaccuguguc

SEQ ID NO: 76074 - RNA, 19 nt, Artificial Sequence
  Description of Artificial Sequence: Synthetic oligonucleotide
  Sense strand starting at position 782 of SEQ ID NO: 950
agauuauaggaguguaaau

SEQ ID NO: 76075 - RNA, 19 nt, Artificial Sequence
  Description of Artificial Sequence: Synthetic oligonucleotide
  Antisense strand to SEQ ID NO: 75994
auuuacacuccuauaaucu

SEQ ID NO: 76076 - RNA, 19 nt, Artificial Sequence
  Description of Artificial Sequence: Synthetic oligonucleotide
  Sense strand starting at position 779 of SEQ ID NO: 950
ucuagauuauaggagugua

SEQ ID NO: 76077 - RNA, 19 nt, Artificial Sequence
  Description of Artificial Sequence: Synthetic oligonucleotide
  Antisense strand to SEQ ID NO: 75996
uacacuccuauaaucuaga

SEQ ID NO: 76078 - RNA, 19 nt, Artificial Sequence
  Description of Artificial Sequence: Synthetic oligonucleotide
  Sense strand starting at position 776 of SEQ ID NO: 950
ugcucuagauuauaggagu

SEQ ID NO: 76079 - RNA, 19 nt, Artificial Sequence
  Description of Artificial Sequence: Synthetic oligonucleotide
  Antisense strand to SEQ ID NO: 75998
acuccuauaaucuagagca

SEQ ID NO: 76080 - RNA, 19 nt, Artificial Sequence
  Description of Artificial Sequence: Synthetic oligonucleotide
  Sense strand starting at position 756 of SEQ ID NO: 950
uugaaaguuugguaucaau

SEQ ID NO: 76081 - RNA, 19 nt, Artificial Sequence
  Description of Artificial Sequence: Synthetic oligonucleotide
  Antisense strand to SEQ ID NO: 76000
auugauaccaaacuuucaa

SEQ ID NO: 76082 - RNA, 19 nt, Artificial Sequence
  Description of Artificial Sequence: Synthetic oligonucleotide
  Sense strand starting at position 755 of SEQ ID NO: 950
uuugaaaguuugguaucaa

SEQ ID NO: 76083 - RNA, 19 nt, Artificial Sequence
  Description of Artificial Sequence: Synthetic oligonucleotide
  Antisense strand to SEQ ID NO: 76002
uugauaccaaacuuucaaa

SEQ ID NO: 76084 - RNA, 19 nt, Artificial Sequence
  Description of Artificial Sequence: Synthetic oligonucleotide
  Sense strand starting at position 754 of SEQ ID NO: 950
cuuugaaaguuugguauca

SEQ ID NO: 76085 - RNA, 19 nt, Artificial Sequence
  Description of Artificial Sequence: Synthetic oligonucleotide
  Antisense strand to SEQ ID NO: 76004
ugauaccaaacuuucaaag

SEQ ID NO: 76086 - RNA, 19 nt, Artificial Sequence
  Description of Artificial Sequence: Synthetic oligonucleotide
  Sense strand starting at position 746 of SEQ ID NO: 950
guaagucgcuuugaaaguu

SEQ ID NO: 76087 - RNA, 19 nt, Artificial Sequence
  Description of Artificial Sequence: Synthetic oligonucleotide
  Antisense strand to SEQ ID NO: 76006
aacuuucaaagcgacuuac

SEQ ID NO: 76088 - RNA, 19 nt, Artificial Sequence
  Description of Artificial Sequence: Synthetic oligonucleotide
  Sense strand starting at position 742 of SEQ ID NO: 950
acagguaagucgcuuugaa

SEQ ID NO: 76089 - RNA, 19 nt, Artificial Sequence
  Description of Artificial Sequence: Synthetic oligonucleotide
  Antisense strand to SEQ ID NO: 76008
uucaaagcgacuuaccugu

SEQ ID NO: 76090 - RNA, 19 nt, Artificial Sequence
  Description of Artificial Sequence: Synthetic oligonucleotide
  Sense strand starting at position 722 of SEQ ID NO: 950
acgagaaaguuagaaauag

SEQ ID NO: 76091 - RNA, 19 nt, Artificial Sequence
  Description of Artificial Sequence: Synthetic oligonucleotide
  Antisense strand to SEQ ID NO: 76010
cuauuucuaacuuucucgu

SEQ ID NO: 76092 - RNA, 19 nt, Artificial Sequence
  Description of Artificial Sequence: Synthetic oligonucleotide
  Sense strand starting at position 699 of SEQ ID NO: 950
cuucucuguggcuauuaaa

SEQ ID NO: 76093 - RNA, 19 nt, Artificial Sequence
  Description of Artificial Sequence: Synthetic oligonucleotide
  Antisense strand to SEQ ID NO: 76012
uuuaauagccacagagaag

SEQ ID NO: 76094 - RNA, 19 nt, Artificial Sequence
  Description of Artificial Sequence: Synthetic oligonucleotide
  Sense strand starting at position 698 of SEQ ID NO: 950
ucuucucuguggcuauuaa

SEQ ID NO: 76095 - RNA, 19 nt, Artificial Sequence
  Description of Artificial Sequence: Synthetic oligonucleotide
  Antisense strand to SEQ ID NO: 76014
uuaauagccacagagaaga

SEQ ID NO: 76096 - RNA, 19 nt, Artificial Sequence
  Description of Artificial Sequence: Synthetic oligonucleotide
  Sense strand starting at position 696 of SEQ ID NO: 950
gaucuucucuguggcuauu

SEQ ID NO: 76097 - RNA, 19 nt, Artificial Sequence
  Description of Artificial Sequence: Synthetic oligonucleotide
  Antisense strand to SEQ ID NO: 76016
aauagccacagagaagauc

SEQ ID NO: 76098 - RNA, 19 nt, Artificial Sequence
  Description of Artificial Sequence: Synthetic oligonucleotide
  Sense strand starting at position 694 of SEQ ID NO: 950
cggaucuucucuguggcua

SEQ ID NO: 76099 - RNA, 19 nt, Artificial Sequence
  Description of Artificial Sequence: Synthetic oligonucleotide
  Antisense strand to SEQ ID NO: 76018
uagccacagagaagauccg

SEQ ID NO: 76100 - RNA, 19 nt, Artificial Sequence
  Description of Artificial Sequence: Synthetic oligonucleotide
  Sense strand starting at position 507 of SEQ ID NO: 950
ggcuacaggcaucagaauu

SEQ ID NO: 76101 - RNA, 19 nt, Artificial Sequence
  Description of Artificial Sequence: Synthetic oligonucleotide
  Antisense strand to SEQ ID NO: 76020
aauucugaugccuguagcc

SEQ ID NO: 76102 - RNA, 19 nt, Artificial Sequence
  Description of Artificial Sequence: Synthetic oligonucleotide
  Sense strand starting at position 457 of SEQ ID NO: 950
uuucuucuagaauguugga

SEQ ID NO: 76103 - RNA, 19 nt, Artificial Sequence
  Description of Artificial Sequence: Synthetic oligonucleotide
  Antisense strand to SEQ ID NO: 76022
uccaacauucuagaagaaa

SEQ ID NO: 76104 - RNA, 19 nt, Artificial Sequence
  Description of Artificial Sequence: Synthetic oligonucleotide
  Sense strand starting at position 454 of SEQ ID NO: 950
ggcuuucuucuagaauguu

SEQ ID NO: 76105 - RNA, 19 nt, Artificial Sequence
  Description of Artificial Sequence: Synthetic oligonucleotide
  Antisense strand to SEQ ID NO: 76024
aacauucuagaagaaagcc

SEQ ID NO: 76106 - RNA, 19 nt, Artificial Sequence
  Description of Artificial Sequence: Synthetic oligonucleotide
  Sense strand starting at position 452 of SEQ ID NO: 950
uuggcuuucuucuagaaug

SEQ ID NO: 76107 - RNA, 19 nt, Artificial Sequence
  Description of Artificial Sequence: Synthetic oligonucleotide
  Antisense strand to SEQ ID NO: 76026
cauucuagaagaaagccaa

SEQ ID NO: 76108 - RNA, 19 nt, Artificial Sequence
  Description of Artificial Sequence: Synthetic oligonucleotide
  Sense strand starting at position 257 of SEQ ID NO: 950
guuccaauguuagcacuua

SEQ ID NO: 76109 - RNA, 19 nt, Artificial Sequence
  Description of Artificial Sequence: Synthetic oligonucleotide
  Antisense strand to SEQ ID NO: 76028
uaagugcuaacauuggaac

SEQ ID NO: 76110 - RNA, 19 nt, Artificial Sequence
  Description of Artificial Sequence: Synthetic oligonucleotide
  Sense strand starting at position 157 of SEQ ID NO: 950
guaagcuauccacacaguu

SEQ ID NO: 76111 - RNA, 19 nt, Artificial Sequence
  Description of Artificial Sequence: Synthetic oligonucleotide
  Antisense strand to SEQ ID NO: 76030
aacuguguggauagcuuac

SEQ ID NO: 76112 - RNA, 19 nt, Artificial Sequence
  Description of Artificial Sequence: Synthetic oligonucleotide
  Sense strand starting at position 154 of SEQ ID NO: 950
gagguaagcuauccacaca

SEQ ID NO: 76113 - RNA, 19 nt, Artificial Sequence
  Description of Artificial Sequence: Synthetic oligonucleotide
  Antisense strand to SEQ ID NO: 76032
uguguggauagcuuaccuc

SEQ ID NO: 76114 - RNA, 19 nt, Artificial Sequence
  Description of Artificial Sequence: Synthetic oligonucleotide
  Sense strand starting at position 29 of SEQ ID NO: 950
uuuccuaaguaacagaaga

SEQ ID NO: 76115 - RNA, 19 nt, Artificial Sequence
  Description of Artificial Sequence: Synthetic oligonucleotide
  Antisense strand to SEQ ID NO: 76034
ucuucuguuacuuaggaaa

SEQ ID NO: 76116 - RNA, 19 nt, Artificial Sequence
  Description of Artificial Sequence: Synthetic oligonucleotide
  Sense strand starting at position 464 of SEQ ID NO: 951
ggguaagacuuaggacaac

SEQ ID NO: 76117 - RNA, 19 nt, Artificial Sequence
  Description of Artificial Sequence: Synthetic oligonucleotide
  Antisense strand to SEQ ID NO: 76036
guuguccuaagucuuaccc

SEQ ID NO: 76118 - RNA, 19 nt, Artificial Sequence
  Description of Artificial Sequence: Synthetic oligonucleotide
  Sense strand starting at position 856 of SEQ ID NO: 951
ucacaugagucucaucuuu

SEQ ID NO: 76119 - RNA, 19 nt, Artificial Sequence
  Description of Artificial Sequence: Synthetic oligonucleotide
  Antisense strand to SEQ ID NO: 76038
aaagaugagacucauguga

SEQ ID NO: 76120 - RNA, 19 nt, Artificial Sequence
  Description of Artificial Sequence: Synthetic oligonucleotide
  Sense strand starting at position 1020 of SEQ ID NO: 951
gccugaaggucaucaccuu

SEQ ID NO: 76121 - RNA, 19 nt, Artificial Sequence
  Description of Artificial Sequence: Synthetic oligonucleotide
  Antisense strand to SEQ ID NO: 76040
aaggugaugaccuucaggc

SEQ ID NO: 76122 - RNA, 19 nt, Artificial Sequence
  Description of Artificial Sequence: Synthetic oligonucleotide
  Sense strand starting at position 1106 of SEQ ID NO: 951
ugagguguuuccugauaga

SEQ ID NO: 76123 - RNA, 19 nt, Artificial Sequence
  Description of Artificial Sequence: Synthetic oligonucleotide
  Antisense strand to SEQ ID NO: 76042
ucuaucaggaaacaccuca

SEQ ID NO: 76124 - RNA, 19 nt, Artificial Sequence
  Description of Artificial Sequence: Synthetic oligonucleotide
  Sense strand starting at position 1109 of SEQ ID NO: 951
gguguuuccugauagacgu

SEQ ID NO: 76125 - RNA, 19 nt, Artificial Sequence
  Description of Artificial Sequence: Synthetic oligonucleotide
  Antisense strand to SEQ ID NO: 76044
acgucuaucaggaaacacc

SEQ ID NO: 76126 - RNA, 19 nt, Artificial Sequence
  Description of Artificial Sequence: Synthetic oligonucleotide
  Sense strand starting at position 1250 of SEQ ID NO: 951
guacaucuccgcugcugau

SEQ ID NO: 76127 - RNA, 19 nt, Artificial Sequence
  Description of Artificial Sequence: Synthetic oligonucleotide
  Antisense strand to SEQ ID NO: 76046
aucagcagcggagauguac

SEQ ID NO: 76128 - RNA, 19 nt, Artificial Sequence
  Description of Artificial Sequence: Synthetic oligonucleotide
  Sense strand starting at position 1259 of SEQ ID NO: 951
cgcugcugaucguuucaca

SEQ ID NO: 76129 - RNA, 19 nt, Artificial Sequence
  Description of Artificial Sequence: Synthetic oligonucleotide
  Antisense strand to SEQ ID NO: 76048
ugugaaacgaucagcagcg

SEQ ID NO: 76130 - RNA, 19 nt, Artificial Sequence
  Description of Artificial Sequence: Synthetic oligonucleotide
  Sense strand starting at position 1858 of SEQ ID NO: 951
ggauauaguucugugccgu

SEQ ID NO: 76131 - RNA, 19 nt, Artificial Sequence
  Description of Artificial Sequence: Synthetic oligonucleotide
  Antisense strand to SEQ ID NO: 76050
acggcacagaacuauaucc

SEQ ID NO: 76132 - RNA, 19 nt, Artificial Sequence
  Description of Artificial Sequence: Synthetic oligonucleotide
  Sense strand starting at position 1859 of SEQ ID NO: 951
gauauaguucugugccguc

SEQ ID NO: 76133 - RNA, 19 nt, Artificial Sequence
  Description of Artificial Sequence: Synthetic oligonucleotide
  Antisense strand to SEQ ID NO: 76052
gacggcacagaacuauauc

SEQ ID NO: 76134 - RNA, 19 nt, Artificial Sequence
  Description of Artificial Sequence: Synthetic oligonucleotide
  Sense strand starting at position 1862 of SEQ ID NO: 951
auaguucugugccgucgua

SEQ ID NO: 76135 - RNA, 19 nt, Artificial Sequence
  Description of Artificial Sequence: Synthetic oligonucleotide
  Antisense strand to SEQ ID NO: 76054
uacgacggcacagaacuau

SEQ ID NO: 76136 - RNA, 19 nt, Artificial Sequence
  Description of Artificial Sequence: Synthetic oligonucleotide
  Sense strand starting at position 1906 of SEQ ID NO: 951
ggcugacuguaggucagau

SEQ ID NO: 76137 - RNA, 19 nt, Artificial Sequence
  Description of Artificial Sequence: Synthetic oligonucleotide
  Antisense strand to SEQ ID NO: 76056
aucugaccuacagucagcc

SEQ ID NO: 76138 - RNA, 19 nt, Artificial Sequence
  Description of Artificial Sequence: Synthetic oligonucleotide
  Sense strand starting at position 1928 of SEQ ID NO: 951
aguguccuuccagaaauua

SEQ ID NO: 76139 - RNA, 19 nt, Artificial Sequence
  Description of Artificial Sequence: Synthetic oligonucleotide
  Antisense strand to SEQ ID NO: 76058
uaauuucuggaaggacacu

SEQ ID NO: 76140 - RNA, 19 nt, Artificial Sequence
  Description of Artificial Sequence: Synthetic oligonucleotide
  Sense strand starting at position 1936 of SEQ ID NO: 951
uccagaaauuagugacuua

SEQ ID NO: 76141 - RNA, 19 nt, Artificial Sequence
  Description of Artificial Sequence: Synthetic oligonucleotide
  Antisense strand to SEQ ID NO: 76060
uaagucacuaauuucugga

SEQ ID NO: 76142 - RNA, 19 nt, Artificial Sequence
  Description of Artificial Sequence: Synthetic oligonucleotide
  Sense strand starting at position 1969 of SEQ ID NO: 951
aguuuagaccucugguugu

SEQ ID NO: 76143 - RNA, 19 nt, Artificial Sequence
  Description of Artificial Sequence: Synthetic oligonucleotide
  Antisense strand to SEQ ID NO: 76062
acaaccagaggucuaaacu

SEQ ID NO: 76144 - RNA, 19 nt, Artificial Sequence
  Description of Artificial Sequence: Synthetic oligonucleotide
  Sense strand starting at position 2031 of SEQ ID NO: 951
gcuugaagacuuugagucu

SEQ ID NO: 76145 - RNA, 19 nt, Artificial Sequence
  Description of Artificial Sequence: Synthetic oligonucleotide
  Antisense strand to SEQ ID NO: 76064
agacucaaagucuucaagc

SEQ ID NO: 76146 - RNA, 19 nt, Artificial Sequence
  Description of Artificial Sequence: Synthetic oligonucleotide
  Sense strand starting at position 2268 of SEQ ID NO: 951
uuaagaaauugacagcguu

SEQ ID NO: 76147 - RNA, 19 nt, Artificial Sequence
  Description of Artificial Sequence: Synthetic oligonucleotide
  Antisense strand to SEQ ID NO: 76066
aacgcugucaauuucuuaa

SEQ ID NO: 76148 - RNA, 19 nt, Artificial Sequence
  Description of Artificial Sequence: Synthetic oligonucleotide
  Sense strand starting at position 2274 of SEQ ID NO: 951
aauugacagcguuagggau

SEQ ID NO: 76149 - RNA, 19 nt, Artificial Sequence
  Description of Artificial Sequence: Synthetic oligonucleotide
  Antisense strand to SEQ ID NO: 76068
aucccuaacgcugucaauu

SEQ ID NO: 76150 - RNA, 19 nt, Artificial Sequence
  Description of Artificial Sequence: Synthetic oligonucleotide
  Sense strand starting at position 2288 of SEQ ID NO: 951
gggauagaguggaagucaa

SEQ ID NO: 76151 - RNA, 19 nt, Artificial Sequence
  Description of Artificial Sequence: Synthetic oligonucleotide
  Antisense strand to SEQ ID NO: 76070
uugacuuccacucuauccc

SEQ ID NO: 76152 - RNA, 19 nt, Artificial Sequence
  Description of Artificial Sequence: Synthetic oligonucleotide
  Sense strand starting at position 2695 of SEQ ID NO: 951
guugaucuguuccggacau

SEQ ID NO: 76153 - RNA, 19 nt, Artificial Sequence
  Description of Artificial Sequence: Synthetic oligonucleotide
  Antisense strand to SEQ ID NO: 76072
auguccggaacagaucaac

SEQ ID NO: 76154 - RNA, 19 nt, Artificial Sequence
  Description of Artificial Sequence: Synthetic oligonucleotide
  Sense strand starting at position 2696 of SEQ ID NO: 951
uugaucuguuccggacauu

SEQ ID NO: 76155 - RNA, 19 nt, Artificial Sequence
  Description of Artificial Sequence: Synthetic oligonucleotide
  Antisense strand to SEQ ID NO: 76074
aauguccggaacagaucaa

SEQ ID NO: 76156 - RNA, 19 nt, Artificial Sequence
  Description of Artificial Sequence: Synthetic oligonucleotide
  Sense strand starting at position 2697 of SEQ ID NO: 951
ugaucuguuccggacauua

SEQ ID NO: 76157 - RNA, 19 nt, Artificial Sequence
  Description of Artificial Sequence: Synthetic oligonucleotide
  Antisense strand to SEQ ID NO: 76076
uaauguccggaacagauca

SEQ ID NO: 76158 - RNA, 19 nt, Artificial Sequence
  Description of Artificial Sequence: Synthetic oligonucleotide
  Sense strand starting at position 2699 of SEQ ID NO: 951
aucuguuccggacauuaga

SEQ ID NO: 76159 - RNA, 19 nt, Artificial Sequence
  Description of Artificial Sequence: Synthetic oligonucleotide
  Antisense strand to SEQ ID NO: 76078
ucuaauguccggaacagau

SEQ ID NO: 76160 - RNA, 19 nt, Artificial Sequence
  Description of Artificial Sequence: Synthetic oligonucleotide
  Sense strand starting at position 3218 of SEQ ID NO: 951
uugagauauucuuacguuc

SEQ ID NO: 76161 - RNA, 19 nt, Artificial Sequence
  Description of Artificial Sequence: Synthetic oligonucleotide
  Antisense strand to SEQ ID NO: 76080
gaacguaagaauaucucaa

SEQ ID NO: 76162 - RNA, 19 nt, Artificial Sequence
  Description of Artificial Sequence: Synthetic oligonucleotide
  Sense strand starting at position 3220 of SEQ ID NO: 951
gagauauucuuacguucug

SEQ ID NO: 76163 - RNA, 19 nt, Artificial Sequence
  Description of Artificial Sequence: Synthetic oligonucleotide
  Antisense strand to SEQ ID NO: 76082
cagaacguaagaauaucuc

SEQ ID NO: 76164 - RNA, 19 nt, Artificial Sequence
  Description of Artificial Sequence: Synthetic oligonucleotide
  Sense strand starting at position 3229 of SEQ ID NO: 951
uuacguucugcaugucagu

SEQ ID NO: 76165 - RNA, 19 nt, Artificial Sequence
  Description of Artificial Sequence: Synthetic oligonucleotide
  Antisense strand to SEQ ID NO: 76084
acugacaugcagaacguaa

SEQ ID NO: 76166 - RNA, 19 nt, Artificial Sequence
  Description of Artificial Sequence: Synthetic oligonucleotide
  Sense strand starting at position 3232 of SEQ ID NO: 951
cguucugcaugucagugaa

SEQ ID NO: 76167 - RNA, 19 nt, Artificial Sequence
  Description of Artificial Sequence: Synthetic oligonucleotide
  Antisense strand to SEQ ID NO: 76086
uucacugacaugcagaacg

SEQ ID NO: 76168 - RNA, 19 nt, Artificial Sequence
  Description of Artificial Sequence: Synthetic oligonucleotide
  Sense strand starting at position 3235 of SEQ ID NO: 951
ucugcaugucagugaaagu

SEQ ID NO: 76169 - RNA, 19 nt, Artificial Sequence
  Description of Artificial Sequence: Synthetic oligonucleotide
  Antisense strand to SEQ ID NO: 76088
acuuucacugacaugcaga

SEQ ID NO: 76170 - RNA, 19 nt, Artificial Sequence
  Description of Artificial Sequence: Synthetic oligonucleotide
  Sense strand starting at position 3236 of SEQ ID NO: 951
cugcaugucagugaaagua

SEQ ID NO: 76171 - RNA, 19 nt, Artificial Sequence
  Description of Artificial Sequence: Synthetic oligonucleotide
  Antisense strand to SEQ ID NO: 76090
uacuuucacugacaugcag

SEQ ID NO: 76172 - RNA, 19 nt, Artificial Sequence
  Description of Artificial Sequence: Synthetic oligonucleotide
  Sense strand starting at position 3531 of SEQ ID NO: 951
ggaaucugaugguccugua

SEQ ID NO: 76173 - RNA, 19 nt, Artificial Sequence
  Description of Artificial Sequence: Synthetic oligonucleotide
  Antisense strand to SEQ ID NO: 76092
uacaggaccaucagauucc

SEQ ID NO: 76174 - RNA, 19 nt, Artificial Sequence
  Description of Artificial Sequence: Synthetic oligonucleotide
  Sense strand starting at position 3534 of SEQ ID NO: 951
aucugaugguccuguaaua

SEQ ID NO: 76175 - RNA, 19 nt, Artificial Sequence
  Description of Artificial Sequence: Synthetic oligonucleotide
  Antisense strand to SEQ ID NO: 76094
uauuacaggaccaucagau

SEQ ID NO: 76176 - RNA, 19 nt, Artificial Sequence
  Description of Artificial Sequence: Synthetic oligonucleotide
  Sense strand starting at position 1 of SEQ ID NO: 952
cuuuaaauugcugguuuaa

SEQ ID NO: 76177 - RNA, 19 nt, Artificial Sequence
  Description of Artificial Sequence: Synthetic oligonucleotide
  Antisense strand to SEQ ID NO: 76096
uuaaaccagcaauuuaaag

SEQ ID NO: 76178 - RNA, 19 nt, Artificial Sequence
  Description of Artificial Sequence: Synthetic oligonucleotide
  Sense strand starting at position 12 of SEQ ID NO: 952
ugguuuaauaaagaguugu

SEQ ID NO: 76179 - RNA, 19 nt, Artificial Sequence
  Description of Artificial Sequence: Synthetic oligonucleotide
  Antisense strand to SEQ ID NO: 76098
acaacucuuuauuaaacca

SEQ ID NO: 76180 - RNA, 19 nt, Artificial Sequence
  Description of Artificial Sequence: Synthetic oligonucleotide
  Sense strand starting at position 122 of SEQ ID NO: 952
ccaauuauguuucugagga

SEQ ID NO: 76181 - RNA, 19 nt, Artificial Sequence
  Description of Artificial Sequence: Synthetic oligonucleotide
  Antisense strand to SEQ ID NO: 76100
uccucagaaacauaauugg

SEQ ID NO: 76182 - RNA, 19 nt, Artificial Sequence
  Description of Artificial Sequence: Synthetic oligonucleotide
  Sense strand starting at position 123 of SEQ ID NO: 952
caauuauguuucugaggau

SEQ ID NO: 76183 - RNA, 19 nt, Artificial Sequence
  Description of Artificial Sequence: Synthetic oligonucleotide
  Antisense strand to SEQ ID NO: 76102
auccucagaaacauaauug

SEQ ID NO: 76184 - RNA, 19 nt, Artificial Sequence
  Description of Artificial Sequence: Synthetic oligonucleotide
  Sense strand starting at position 124 of SEQ ID NO: 952
aauuauguuucugaggaug

SEQ ID NO: 76185 - RNA, 19 nt, Artificial Sequence
  Description of Artificial Sequence: Synthetic oligonucleotide
  Antisense strand to SEQ ID NO: 76104
cauccucagaaacauaauu

SEQ ID NO: 76186 - RNA, 19 nt, Artificial Sequence
  Description of Artificial Sequence: Synthetic oligonucleotide
  Sense strand starting at position 500 of SEQ ID NO: 952
ggcgcagggcaauaugaau

SEQ ID NO: 76187 - RNA, 19 nt, Artificial Sequence
  Description of Artificial Sequence: Synthetic oligonucleotide
  Antisense strand to SEQ ID NO: 76106
auucauauugcccugcgcc

SEQ ID NO: 76188 - RNA, 19 nt, Artificial Sequence
  Description of Artificial Sequence: Synthetic oligonucleotide
  Sense strand starting at position 829 of SEQ ID NO: 952
acuccaucuuuacaugagu

SEQ ID NO: 76189 - RNA, 19 nt, Artificial Sequence
  Description of Artificial Sequence: Synthetic oligonucleotide
  Antisense strand to SEQ ID NO: 76108
acucauguaaagauggagu

SEQ ID NO: 76190 - RNA, 19 nt, Artificial Sequence
  Description of Artificial Sequence: Synthetic oligonucleotide
  Sense strand starting at position 838 of SEQ ID NO: 952
uuacaugagucucaucuuu

SEQ ID NO: 76191 - RNA, 19 nt, Artificial Sequence
  Description of Artificial Sequence: Synthetic oligonucleotide
  Antisense strand to SEQ ID NO: 76110
aaagaugagacucauguaa

SEQ ID NO: 76192 - RNA, 19 nt, Artificial Sequence
  Description of Artificial Sequence: Synthetic oligonucleotide
  Sense strand starting at position 1496 of SEQ ID NO: 952
acgggaguucacggaguga

SEQ ID NO: 76193 - RNA, 19 nt, Artificial Sequence
  Description of Artificial Sequence: Synthetic oligonucleotide
  Antisense strand to SEQ ID NO: 76112
ucacuccgugaacucccgu

SEQ ID NO: 76194 - RNA, 19 nt, Artificial Sequence
  Description of Artificial Sequence: Synthetic oligonucleotide
  Sense strand starting at position 1500 of SEQ ID NO: 952
gaguucacggagugaggau

SEQ ID NO: 76195 - RNA, 19 nt, Artificial Sequence
  Description of Artificial Sequence: Synthetic oligonucleotide
  Antisense strand to SEQ ID NO: 76114
auccucacuccgugaacuc

SEQ ID NO: 76196 - RNA, 19 nt, Artificial Sequence
  Description of Artificial Sequence: Synthetic oligonucleotide
  Sense strand starting at position 1840 of SEQ ID NO: 952
augauauaguucuaugcca

SEQ ID NO: 76197 - RNA, 19 nt, Artificial Sequence
  Description of Artificial Sequence: Synthetic oligonucleotide
  Antisense strand to SEQ ID NO: 76116
uggcauagaacuauaucau

SEQ ID NO: 76198 - RNA, 19 nt, Artificial Sequence
  Description of Artificial Sequence: Synthetic oligonucleotide
  Sense strand starting at position 1845 of SEQ ID NO: 952
auaguucuaugccaucgua

SEQ ID NO: 76199 - RNA, 19 nt, Artificial Sequence
  Description of Artificial Sequence: Synthetic oligonucleotide
  Antisense strand to SEQ ID NO: 76118
uacgauggcauagaacuau

SEQ ID NO: 76200 - RNA, 19 nt, Artificial Sequence
  Description of Artificial Sequence: Synthetic oligonucleotide
  Sense strand starting at position 2000 of SEQ ID NO: 952
gcuugaagacuuugaguuu

SEQ ID NO: 76201 - RNA, 19 nt, Artificial Sequence
  Description of Artificial Sequence: Synthetic oligonucleotide
  Antisense strand to SEQ ID NO: 76120
aaacucaaagucuucaagc

SEQ ID NO: 76202 - RNA, 19 nt, Artificial Sequence
  Description of Artificial Sequence: Synthetic oligonucleotide
  Sense strand starting at position 2011 of SEQ ID NO: 952
uugaguuuguccugugggu

SEQ ID NO: 76203 - RNA, 19 nt, Artificial Sequence
  Description of Artificial Sequence: Synthetic oligonucleotide
  Antisense strand to SEQ ID NO: 76122
acccacaggacaaacucaa

SEQ ID NO: 76204 - RNA, 19 nt, Artificial Sequence
  Description of Artificial Sequence: Synthetic oligonucleotide
  Sense strand starting at position 2013 of SEQ ID NO: 952
gaguuuguccugugggucu

SEQ ID NO: 76205 - RNA, 19 nt, Artificial Sequence
  Description of Artificial Sequence: Synthetic oligonucleotide
  Antisense strand to SEQ ID NO: 76124
agacccacaggacaaacuc

SEQ ID NO: 76206 - RNA, 19 nt, Artificial Sequence
  Description of Artificial Sequence: Synthetic oligonucleotide
  Sense strand starting at position 2237 of SEQ ID NO: 952
uuaagaaauugacagaguu

SEQ ID NO: 76207 - RNA, 19 nt, Artificial Sequence
  Description of Artificial Sequence: Synthetic oligonucleotide
  Antisense strand to SEQ ID NO: 76126
aacucugucaauuucuuaa

SEQ ID NO: 76208 - RNA, 19 nt, Artificial Sequence
  Description of Artificial Sequence: Synthetic oligonucleotide
  Sense strand starting at position 2661 of SEQ ID NO: 952
guugaucuguuccagacau

SEQ ID NO: 76209 - RNA, 19 nt, Artificial Sequence
  Description of Artificial Sequence: Synthetic oligonucleotide
  Antisense strand to SEQ ID NO: 76128
augucuggaacagaucaac

SEQ ID NO: 76210 - RNA, 19 nt, Artificial Sequence
  Description of Artificial Sequence: Synthetic oligonucleotide
  Sense strand starting at position 2663 of SEQ ID NO: 952
ugaucuguuccagacauua

SEQ ID NO: 76211 - RNA, 19 nt, Artificial Sequence
  Description of Artificial Sequence: Synthetic oligonucleotide
  Antisense strand to SEQ ID NO: 76130
uaaugucuggaacagauca

SEQ ID NO: 76212 - RNA, 19 nt, Artificial Sequence
  Description of Artificial Sequence: Synthetic oligonucleotide
  Sense strand starting at position 2932 of SEQ ID NO: 952
gguuaagucuucucuggaa

SEQ ID NO: 76213 - RNA, 19 nt, Artificial Sequence
  Description of Artificial Sequence: Synthetic oligonucleotide
  Antisense strand to SEQ ID NO: 76132
uuccagagaagacuuaacc

SEQ ID NO: 76214 - RNA, 19 nt, Artificial Sequence
  Description of Artificial Sequence: Synthetic oligonucleotide
  Sense strand starting at position 2965 of SEQ ID NO: 952
accuguaaacuuuauaagu

SEQ ID NO: 76215 - RNA, 19 nt, Artificial Sequence
  Description of Artificial Sequence: Synthetic oligonucleotide
  Antisense strand to SEQ ID NO: 76134
acuuauaaaguuuacaggu

SEQ ID NO: 76216 - RNA, 19 nt, Artificial Sequence
  Description of Artificial Sequence: Synthetic oligonucleotide
  Sense strand starting at position 2979 of SEQ ID NO: 952
uaaguuuaaucagugaaga

SEQ ID NO: 76217 - RNA, 19 nt, Artificial Sequence
  Description of Artificial Sequence: Synthetic oligonucleotide
  Antisense strand to SEQ ID NO: 76136
ucuucacugauuaaacuua

SEQ ID NO: 76218 - RNA, 19 nt, Artificial Sequence
  Description of Artificial Sequence: Synthetic oligonucleotide
  Sense strand starting at position 2980 of SEQ ID NO: 952
aaguuuaaucagugaagaa

SEQ ID NO: 76219 - RNA, 19 nt, Artificial Sequence
  Description of Artificial Sequence: Synthetic oligonucleotide
  Antisense strand to SEQ ID NO: 76138
uucuucacugauuaaacuu

SEQ ID NO: 76220 - RNA, 19 nt, Artificial Sequence
  Description of Artificial Sequence: Synthetic oligonucleotide
  Sense strand starting at position 3114 of SEQ ID NO: 952
ucaaguagaccuuagcuua

SEQ ID NO: 76221 - RNA, 19 nt, Artificial Sequence
  Description of Artificial Sequence: Synthetic oligonucleotide
  Antisense strand to SEQ ID NO: 76140
uaagcuaaggucuacuuga

SEQ ID NO: 76222 - RNA, 19 nt, Artificial Sequence
  Description of Artificial Sequence: Synthetic oligonucleotide
  Sense strand starting at position 3388 of SEQ ID NO: 952
agaugaauuugaggauauc

SEQ ID NO: 76223 - RNA, 19 nt, Artificial Sequence
  Description of Artificial Sequence: Synthetic oligonucleotide
  Antisense strand to SEQ ID NO: 76142
gauauccucaaauucaucu

SEQ ID NO: 76224 - RNA, 19 nt, Artificial Sequence
  Description of Artificial Sequence: Synthetic oligonucleotide
  Sense strand starting at position 3439 of SEQ ID NO: 952
auuaaacugucugcugcaa

SEQ ID NO: 76225 - RNA, 19 nt, Artificial Sequence
  Description of Artificial Sequence: Synthetic oligonucleotide
  Antisense strand to SEQ ID NO: 76144
uugcagcagacaguuuaau

SEQ ID NO: 76226 - RNA, 19 nt, Artificial Sequence
  Description of Artificial Sequence: Synthetic oligonucleotide
  Sense strand starting at position 3460 of SEQ ID NO: 952
acugcugucucagaauauu

SEQ ID NO: 76227 - RNA, 19 nt, Artificial Sequence
  Description of Artificial Sequence: Synthetic oligonucleotide
  Antisense strand to SEQ ID NO: 76146
aauauucugagacagcagu

SEQ ID NO: 76228 - RNA, 19 nt, Artificial Sequence
  Description of Artificial Sequence: Synthetic oligonucleotide
  Sense strand starting at position 3469 of SEQ ID NO: 952
ucagaauauuggucagcua

SEQ ID NO: 76229 - RNA, 19 nt, Artificial Sequence
  Description of Artificial Sequence: Synthetic oligonucleotide
  Antisense strand to SEQ ID NO: 76148
uagcugaccaauauucuga

SEQ ID NO: 76230 - RNA, 19 nt, Artificial Sequence
  Description of Artificial Sequence: Synthetic oligonucleotide
  Sense strand starting at position 3470 of SEQ ID NO: 952
cagaauauuggucagcuac

SEQ ID NO: 76231 - RNA, 19 nt, Artificial Sequence
  Description of Artificial Sequence: Synthetic oligonucleotide
  Antisense strand to SEQ ID NO: 76150
guagcugaccaauauucug

SEQ ID NO: 76232 - RNA, 19 nt, Artificial Sequence
  Description of Artificial Sequence: Synthetic oligonucleotide
  Sense strand starting at position 3472 of SEQ ID NO: 952
gaauauuggucagcuacug

SEQ ID NO: 76233 - RNA, 19 nt, Artificial Sequence
  Description of Artificial Sequence: Synthetic oligonucleotide
  Antisense strand to SEQ ID NO: 76152
caguagcugaccaauauuc

SEQ ID NO: 76234 - RNA, 19 nt, Artificial Sequence
  Description of Artificial Sequence: Synthetic oligonucleotide
  Sense strand starting at position 3592 of SEQ ID NO: 952
augggauccugggaguuaa

SEQ ID NO: 76235 - RNA, 19 nt, Artificial Sequence
  Description of Artificial Sequence: Synthetic oligonucleotide
  Antisense strand to SEQ ID NO: 76154
uuaacucccaggaucccau

SEQ ID NO: 76236 - RNA, 19 nt, Artificial Sequence
  Description of Artificial Sequence: Synthetic oligonucleotide
  Sense strand starting at position 3653 of SEQ ID NO: 952
gguggaaucuauccaacau

SEQ ID NO: 76237 - RNA, 19 nt, Artificial Sequence
  Description of Artificial Sequence: Synthetic oligonucleotide
  Antisense strand to SEQ ID NO: 76156
auguuggauagauuccacc

SEQ ID NO: 76238 - RNA, 19 nt, Artificial Sequence
  Description of Artificial Sequence: Synthetic oligonucleotide
  Sense strand starting at position 3863 of SEQ ID NO: 952
cuccuucucuguuaaguuu

SEQ ID NO: 76239 - RNA, 19 nt, Artificial Sequence
  Description of Artificial Sequence: Synthetic oligonucleotide
  Antisense strand to SEQ ID NO: 76158
aaacuuaacagagaaggag

SEQ ID NO: 76240 - RNA, 19 nt, Artificial Sequence
  Description of Artificial Sequence: Synthetic oligonucleotide
  Sense strand starting at position 3869 of SEQ ID NO: 952
cucuguuaaguuuaccaua

SEQ ID NO: 76241 - RNA, 19 nt, Artificial Sequence
  Description of Artificial Sequence: Synthetic oligonucleotide
  Antisense strand to SEQ ID NO: 76160
uaugguaaacuuaacagag

SEQ ID NO: 76242 - RNA, 19 nt, Artificial Sequence
  Description of Artificial Sequence: Synthetic oligonucleotide
  Sense strand starting at position 3871 of SEQ ID NO: 952
cuguuaaguuuaccauaua

SEQ ID NO: 76243 - RNA, 19 nt, Artificial Sequence
  Description of Artificial Sequence: Synthetic oligonucleotide
  Antisense strand to SEQ ID NO: 76162
uauaugguaaacuuaacag

SEQ ID NO: 76244 - RNA, 19 nt, Artificial Sequence
  Description of Artificial Sequence: Synthetic oligonucleotide
  Sense strand starting at position 3899 of SEQ ID NO: 952
cacugaagaugaguaacuu

SEQ ID NO: 76245 - RNA, 19 nt, Artificial Sequence
  Description of Artificial Sequence: Synthetic oligonucleotide
  Antisense strand to SEQ ID NO: 76164
aaguuacucaucuucagug

SEQ ID NO: 76246 - RNA, 19 nt, Artificial Sequence
  Description of Artificial Sequence: Synthetic oligonucleotide
  Sense strand starting at position 3967 of SEQ ID NO: 952
aggugauaugaaggucauu

SEQ ID NO: 76247 - RNA, 19 nt, Artificial Sequence
  Description of Artificial Sequence: Synthetic oligonucleotide
  Antisense strand to SEQ ID NO: 76166
aaugaccuucauaucaccu

SEQ ID NO: 76248 - RNA, 19 nt, Artificial Sequence
  Description of Artificial Sequence: Synthetic oligonucleotide
  Sense strand starting at position 3970 of SEQ ID NO: 952
ugauaugaaggucauuguu

SEQ ID NO: 76249 - RNA, 19 nt, Artificial Sequence
  Description of Artificial Sequence: Synthetic oligonucleotide
  Antisense strand to SEQ ID NO: 76168
aacaaugaccuucauauca

SEQ ID NO: 76250 - RNA, 19 nt, Artificial Sequence
  Description of Artificial Sequence: Synthetic oligonucleotide
  Sense strand starting at position 3972 of SEQ ID NO: 952
auaugaaggucauuguuau

SEQ ID NO: 76251 - RNA, 19 nt, Artificial Sequence
  Description of Artificial Sequence: Synthetic oligonucleotide
  Antisense strand to SEQ ID NO: 76170
auaacaaugaccuucauau

SEQ ID NO: 76252 - RNA, 19 nt, Artificial Sequence
  Description of Artificial Sequence: Synthetic oligonucleotide
  Sense strand starting at position 3973 of SEQ ID NO: 952
uaugaaggucauuguuauu

SEQ ID NO: 76253 - RNA, 19 nt, Artificial Sequence
  Description of Artificial Sequence: Synthetic oligonucleotide
  Antisense strand to SEQ ID NO: 76172
aauaacaaugaccuucaua

SEQ ID NO: 76254 - RNA, 19 nt, Artificial Sequence
  Description of Artificial Sequence: Synthetic oligonucleotide
  Sense strand starting at position 3976 of SEQ ID NO: 952
gaaggucauuguuauucuu

SEQ ID NO: 76255 - RNA, 19 nt, Artificial Sequence
  Description of Artificial Sequence: Synthetic oligonucleotide
  Antisense strand to SEQ ID NO: 76174
aagaauaacaaugaccuuc

SEQ ID NO: 76256 - RNA, 19 nt, Artificial Sequence
  Description of Artificial Sequence: Synthetic oligonucleotide
  Sense strand starting at position 3095 of SEQ ID NO: 954
uaguguuguugggagaucu

SEQ ID NO: 76257 - RNA, 19 nt, Artificial Sequence
  Description of Artificial Sequence: Synthetic oligonucleotide
  Antisense strand to SEQ ID NO: 76176
agaucucccaacaacacua

SEQ ID NO: 76258 - RNA, 19 nt, Artificial Sequence
  Description of Artificial Sequence: Synthetic oligonucleotide
  Sense strand starting at position 3093 of SEQ ID NO: 954
aauaguguuguugggagau

SEQ ID NO: 76259 - RNA, 19 nt, Artificial Sequence
  Description of Artificial Sequence: Synthetic oligonucleotide
  Antisense strand to SEQ ID NO: 76178
aucucccaacaacacuauu

SEQ ID NO: 76260 - RNA, 19 nt, Artificial Sequence
  Description of Artificial Sequence: Synthetic oligonucleotide
  Sense strand starting at position 3091 of SEQ ID NO: 954
agaauaguguuguugggag

SEQ ID NO: 76261 - RNA, 19 nt, Artificial Sequence
  Description of Artificial Sequence: Synthetic oligonucleotide
  Antisense strand to SEQ ID NO: 76180
cucccaacaacacuauucu

SEQ ID NO: 76262 - RNA, 19 nt, Artificial Sequence
  Description of Artificial Sequence: Synthetic oligonucleotide
  Sense strand starting at position 3086 of SEQ ID NO: 954
accugagaauaguguuguu

SEQ ID NO: 76263 - RNA, 19 nt, Artificial Sequence
  Description of Artificial Sequence: Synthetic oligonucleotide
  Antisense strand to SEQ ID NO: 76182
aacaacacuauucucaggu

SEQ ID NO: 76264 - RNA, 19 nt, Artificial Sequence
  Description of Artificial Sequence: Synthetic oligonucleotide
  Sense strand starting at position 3053 of SEQ ID NO: 954
ugaucuguucuggacauua

SEQ ID NO: 76265 - RNA, 19 nt, Artificial Sequence
  Description of Artificial Sequence: Synthetic oligonucleotide
  Antisense strand to SEQ ID NO: 76184
uaauguccagaacagauca

SEQ ID NO: 76266 - RNA, 19 nt, Artificial Sequence
  Description of Artificial Sequence: Synthetic oligonucleotide
  Sense strand starting at position 3051 of SEQ ID NO: 954
guugaucuguucuggacau

SEQ ID NO: 76267 - RNA, 19 nt, Artificial Sequence
  Description of Artificial Sequence: Synthetic oligonucleotide
  Antisense strand to SEQ ID NO: 76186
auguccagaacagaucaac

SEQ ID NO: 76268 - RNA, 19 nt, Artificial Sequence
  Description of Artificial Sequence: Synthetic oligonucleotide
  Sense strand starting at position 2809 of SEQ ID NO: 954
gccuguaauccggauacuu

SEQ ID NO: 76269 - RNA, 19 nt, Artificial Sequence
  Description of Artificial Sequence: Synthetic oligonucleotide
  Antisense strand to SEQ ID NO: 76188
aaguauccggauuacaggc

SEQ ID NO: 76270 - RNA, 19 nt, Artificial Sequence
  Description of Artificial Sequence: Synthetic oligonucleotide
  Sense strand starting at position 2601 of SEQ ID NO: 954
ucaagaaauugacagcauu

SEQ ID NO: 76271 - RNA, 19 nt, Artificial Sequence
  Description of Artificial Sequence: Synthetic oligonucleotide
  Antisense strand to SEQ ID NO: 76190
aaugcugucaauuucuuga

SEQ ID NO: 76272 - RNA, 19 nt, Artificial Sequence
  Description of Artificial Sequence: Synthetic oligonucleotide
  Sense strand starting at position 2511 of SEQ ID NO: 954
gcuaauccugauuggguuu

SEQ ID NO: 76273 - RNA, 19 nt, Artificial Sequence
  Description of Artificial Sequence: Synthetic oligonucleotide
  Antisense strand to SEQ ID NO: 76192
aaacccaaucaggauuagc

SEQ ID NO: 76274 - RNA, 19 nt, Artificial Sequence
  Description of Artificial Sequence: Synthetic oligonucleotide
  Sense strand starting at position 2510 of SEQ ID NO: 954
agcuaauccugauuggguu

SEQ ID NO: 76275 - RNA, 19 nt, Artificial Sequence
  Description of Artificial Sequence: Synthetic oligonucleotide
  Antisense strand to SEQ ID NO: 76194
aacccaaucaggauuagcu

SEQ ID NO: 76276 - RNA, 19 nt, Artificial Sequence
  Description of Artificial Sequence: Synthetic oligonucleotide
  Sense strand starting at position 2205 of SEQ ID NO: 954
ggauauagcucugcucugu

SEQ ID NO: 76277 - RNA, 19 nt, Artificial Sequence
  Description of Artificial Sequence: Synthetic oligonucleotide
  Antisense strand to SEQ ID NO: 76196
acagagcagagcuauaucc

SEQ ID NO: 76278 - RNA, 19 nt, Artificial Sequence
  Description of Artificial Sequence: Synthetic oligonucleotide
  Sense strand starting at position 2084 of SEQ ID NO: 954
agaauucugaaaugacgua

SEQ ID NO: 76279 - RNA, 19 nt, Artificial Sequence
  Description of Artificial Sequence: Synthetic oligonucleotide
  Antisense strand to SEQ ID NO: 76198
uacgucauuucagaauucu

SEQ ID NO: 76280 - RNA, 19 nt, Artificial Sequence
  Description of Artificial Sequence: Synthetic oligonucleotide
  Sense strand starting at position 917 of SEQ ID NO: 954
uaagcaugugcugaagaug

SEQ ID NO: 76281 - RNA, 19 nt, Artificial Sequence
  Description of Artificial Sequence: Synthetic oligonucleotide
  Antisense strand to SEQ ID NO: 76200
caucuucagcacaugcuua

SEQ ID NO: 76282 - RNA, 19 nt, Artificial Sequence
  Description of Artificial Sequence: Synthetic oligonucleotide
  Sense strand starting at position 762 of SEQ ID NO: 954
acuguuaagucauaaggag

SEQ ID NO: 76283 - RNA, 19 nt, Artificial Sequence
  Description of Artificial Sequence: Synthetic oligonucleotide
  Antisense strand to SEQ ID NO: 76202
cuccuuaugacuuaacagu

SEQ ID NO: 76284 - RNA, 19 nt, Artificial Sequence
  Description of Artificial Sequence: Synthetic oligonucleotide
  Sense strand starting at position 318 of SEQ ID NO: 954
uggaauuguaggcaugagu

SEQ ID NO: 76285 - RNA, 19 nt, Artificial Sequence
  Description of Artificial Sequence: Synthetic oligonucleotide
  Antisense strand to SEQ ID NO: 76204
acucaugccuacaauucca

SEQ ID NO: 76286 - RNA, 19 nt, Artificial Sequence
  Description of Artificial Sequence: Synthetic oligonucleotide
  Sense strand starting at position 81 of SEQ ID NO: 954
guggcuauaaucgcagcua

SEQ ID NO: 76287 - RNA, 19 nt, Artificial Sequence
  Description of Artificial Sequence: Synthetic oligonucleotide
  Antisense strand to SEQ ID NO: 76206
uagcugcgauuauagccac

SEQ ID NO: 76288 - RNA, 19 nt, Artificial Sequence
  Description of Artificial Sequence: Synthetic oligonucleotide
  Sense strand starting at position 80 of SEQ ID NO: 953
guggcuauaaucgcagcua

SEQ ID NO: 76289 - RNA, 19 nt, Artificial Sequence
  Description of Artificial Sequence: Synthetic oligonucleotide
  Antisense strand to SEQ ID NO: 76208
uagcugcgauuauagccac

SEQ ID NO: 76290 - RNA, 19 nt, Artificial Sequence
  Description of Artificial Sequence: Synthetic oligonucleotide
  Sense strand starting at position 660 of SEQ ID NO: 953
ggaagcaacuauugaacuu

SEQ ID NO: 76291 - RNA, 19 nt, Artificial Sequence
  Description of Artificial Sequence: Synthetic oligonucleotide
  Antisense strand to SEQ ID NO: 76210
aaguucaauaguugcuucc

SEQ ID NO: 76292 - RNA, 19 nt, Artificial Sequence
  Description of Artificial Sequence: Synthetic oligonucleotide
  Sense strand starting at position 761 of SEQ ID NO: 953
acuguuaagucauaaggag

SEQ ID NO: 76293 - RNA, 19 nt, Artificial Sequence
  Description of Artificial Sequence: Synthetic oligonucleotide
  Antisense strand to SEQ ID NO: 76212
cuccuuaugacuuaacagu

SEQ ID NO: 76294 - RNA, 19 nt, Artificial Sequence
  Description of Artificial Sequence: Synthetic oligonucleotide
  Sense strand starting at position 861 of SEQ ID NO: 953
ggugcagggcaauaugaau

SEQ ID NO: 76295 - RNA, 19 nt, Artificial Sequence
  Description of Artificial Sequence: Synthetic oligonucleotide
  Antisense strand to SEQ ID NO: 76214
auucauauugcccugcacc

SEQ ID NO: 76296 - RNA, 19 nt, Artificial Sequence
  Description of Artificial Sequence: Synthetic oligonucleotide
  Sense strand starting at position 916 of SEQ ID NO: 953
uaagcaugugcugaagaug

SEQ ID NO: 76297 - RNA, 19 nt, Artificial Sequence
  Description of Artificial Sequence: Synthetic oligonucleotide
  Antisense strand to SEQ ID NO: 76216
caucuucagcacaugcuua

SEQ ID NO: 76298 - RNA, 19 nt, Artificial Sequence
  Description of Artificial Sequence: Synthetic oligonucleotide
  Sense strand starting at position 1199 of SEQ ID NO: 953
ucacgugagucuuauccuu

SEQ ID NO: 76299 - RNA, 19 nt, Artificial Sequence
  Description of Artificial Sequence: Synthetic oligonucleotide
  Antisense strand to SEQ ID NO: 76218
aaggauaagacucacguga

SEQ ID NO: 76300 - RNA, 19 nt, Artificial Sequence
  Description of Artificial Sequence: Synthetic oligonucleotide
  Sense strand starting at position 1201 of SEQ ID NO: 953
acgugagucuuauccuucu

SEQ ID NO: 76301 - RNA, 19 nt, Artificial Sequence
  Description of Artificial Sequence: Synthetic oligonucleotide
  Antisense strand to SEQ ID NO: 76220
agaaggauaagacucacgu

SEQ ID NO: 76302 - RNA, 19 nt, Artificial Sequence
  Description of Artificial Sequence: Synthetic oligonucleotide
  Sense strand starting at position 1208 of SEQ ID NO: 953
ucuuauccuucuucgagga

SEQ ID NO: 76303 - RNA, 19 nt, Artificial Sequence
  Description of Artificial Sequence: Synthetic oligonucleotide
  Antisense strand to SEQ ID NO: 76222
uccucgaagaaggauaaga

SEQ ID NO: 76304 - RNA, 19 nt, Artificial Sequence
  Description of Artificial Sequence: Synthetic oligonucleotide
  Sense strand starting at position 1546 of SEQ ID NO: 953
ccauaauaaucccguugca

SEQ ID NO: 76305 - RNA, 19 nt, Artificial Sequence
  Description of Artificial Sequence: Synthetic oligonucleotide
  Antisense strand to SEQ ID NO: 76224
ugcaacgggauuauuaugg

SEQ ID NO: 76306 - RNA, 19 nt, Artificial Sequence
  Description of Artificial Sequence: Synthetic oligonucleotide
  Sense strand starting at position 1549 of SEQ ID NO: 953
uaauaaucccguugcaggu

SEQ ID NO: 76307 - RNA, 19 nt, Artificial Sequence
  Description of Artificial Sequence: Synthetic oligonucleotide
  Antisense strand to SEQ ID NO: 76226
accugcaacgggauuauua

SEQ ID NO: 76308 - RNA, 19 nt, Artificial Sequence
  Description of Artificial Sequence: Synthetic oligonucleotide
  Sense strand starting at position 1555 of SEQ ID NO: 953
ucccguugcagguuauagu

SEQ ID NO: 76309 - RNA, 19 nt, Artificial Sequence
  Description of Artificial Sequence: Synthetic oligonucleotide
  Antisense strand to SEQ ID NO: 76228
acuauaaccugcaacggga

SEQ ID NO: 76310 - RNA, 19 nt, Artificial Sequence
  Description of Artificial Sequence: Synthetic oligonucleotide
  Sense strand starting at position 1563 of SEQ ID NO: 953
cagguuauaguccaaguca

SEQ ID NO: 76311 - RNA, 19 nt, Artificial Sequence
  Description of Artificial Sequence: Synthetic oligonucleotide
  Antisense strand to SEQ ID NO: 76230
ugacuuggacuauaaccug

SEQ ID NO: 76312 - RNA, 19 nt, Artificial Sequence
  Description of Artificial Sequence: Synthetic oligonucleotide
  Sense strand starting at position 1593 of SEQ ID NO: 953
guacaucucugcugcugau

SEQ ID NO: 76313 - RNA, 19 nt, Artificial Sequence
  Description of Artificial Sequence: Synthetic oligonucleotide
  Antisense strand to SEQ ID NO: 76232
aucagcagcagagauguac

SEQ ID NO: 76314 - RNA, 19 nt, Artificial Sequence
  Description of Artificial Sequence: Synthetic oligonucleotide
  Sense strand starting at position 1988 of SEQ ID NO: 953
gccggguucuacguggaga

SEQ ID NO: 76315 - RNA, 19 nt, Artificial Sequence
  Description of Artificial Sequence: Synthetic oligonucleotide
  Antisense strand to SEQ ID NO: 76234
ucuccacguagaacccggc

SEQ ID NO: 76316 - RNA, 19 nt, Artificial Sequence
  Description of Artificial Sequence: Synthetic oligonucleotide
  Sense strand starting at position 1989 of SEQ ID NO: 953
ccggguucuacguggagaa

SEQ ID NO: 76317 - RNA, 19 nt, Artificial Sequence
  Description of Artificial Sequence: Synthetic oligonucleotide
  Antisense strand to SEQ ID NO: 76236
uucuccacguagaacccgg

SEQ ID NO: 76318 - RNA, 19 nt, Artificial Sequence
  Description of Artificial Sequence: Synthetic oligonucleotide
  Sense strand starting at position 2083 of SEQ ID NO: 953
agaauucugaaaugacgua

SEQ ID NO: 76319 - RNA, 19 nt, Artificial Sequence
  Description of Artificial Sequence: Synthetic oligonucleotide
  Antisense strand to SEQ ID NO: 76238
uacgucauuucagaauucu

SEQ ID NO: 76320 - RNA, 19 nt, Artificial Sequence
  Description of Artificial Sequence: Synthetic oligonucleotide
  Sense strand starting at position 2204 of SEQ ID NO: 953
ggauauagcucugcucugu

SEQ ID NO: 76321 - RNA, 19 nt, Artificial Sequence
  Description of Artificial Sequence: Synthetic oligonucleotide
  Antisense strand to SEQ ID NO: 76240
acagagcagagcuauaucc

SEQ ID NO: 76322 - RNA, 19 nt, Artificial Sequence
  Description of Artificial Sequence: Synthetic oligonucleotide
  Sense strand starting at position 2509 of SEQ ID NO: 953
agcuaauccugauuggguu

SEQ ID NO: 76323 - RNA, 19 nt, Artificial Sequence
  Description of Artificial Sequence: Synthetic oligonucleotide
  Antisense strand to SEQ ID NO: 76242
aacccaaucaggauuagcu

SEQ ID NO: 76324 - RNA, 19 nt, Artificial Sequence
  Description of Artificial Sequence: Synthetic oligonucleotide
  Sense strand starting at position 2510 of SEQ ID NO: 953
gcuaauccugauuggguuu

SEQ ID NO: 76325 - RNA, 19 nt, Artificial Sequence
  Description of Artificial Sequence: Synthetic oligonucleotide
  Antisense strand to SEQ ID NO: 76244
aaacccaaucaggauuagc

SEQ ID NO: 76326 - RNA, 19 nt, Artificial Sequence
  Description of Artificial Sequence: Synthetic oligonucleotide
  Sense strand starting at position 2808 of SEQ ID NO: 953
gccuguaauccggauacuu

SEQ ID NO: 76327 - RNA, 19 nt, Artificial Sequence
  Description of Artificial Sequence: Synthetic oligonucleotide
  Antisense strand to SEQ ID NO: 76246
aaguauccggauuacaggc

SEQ ID NO: 76328 - RNA, 19 nt, Artificial Sequence
  Description of Artificial Sequence: Synthetic oligonucleotide
  Sense strand starting at position 2918 of SEQ ID NO: 953
gggagacucugucaacaac

SEQ ID NO: 76329 - RNA, 19 nt, Artificial Sequence
  Description of Artificial Sequence: Synthetic oligonucleotide
  Antisense strand to SEQ ID NO: 76248
guuguugacagagucuccc

SEQ ID NO: 76330 - RNA, 19 nt, Artificial Sequence
  Description of Artificial Sequence: Synthetic oligonucleotide
  Sense strand starting at position 3050 of SEQ ID NO: 953
guugaucuguucuggacau

SEQ ID NO: 76331 - RNA, 19 nt, Artificial Sequence
  Description of Artificial Sequence: Synthetic oligonucleotide
  Antisense strand to SEQ ID NO: 76250
auguccagaacagaucaac

SEQ ID NO: 76332 - RNA, 19 nt, Artificial Sequence
  Description of Artificial Sequence: Synthetic oligonucleotide
  Sense strand starting at position 3051 of SEQ ID NO: 953
uugaucuguucuggacauu

SEQ ID NO: 76333 - RNA, 19 nt, Artificial Sequence
  Description of Artificial Sequence: Synthetic oligonucleotide
  Antisense strand to SEQ ID NO: 76252
aauguccagaacagaucaa

SEQ ID NO: 76334 - RNA, 19 nt, Artificial Sequence
  Description of Artificial Sequence: Synthetic oligonucleotide
  Sense strand starting at position 3052 of SEQ ID NO: 953
ugaucuguucuggacauua

SEQ ID NO: 76335 - RNA, 19 nt, Artificial Sequence
  Description of Artificial Sequence: Synthetic oligonucleotide
  Antisense strand to SEQ ID NO: 76254
uaauguccagaacagauca

SEQ ID NO: 76336 - RNA, 19 nt, Artificial Sequence
  Description of Artificial Sequence: Synthetic oligonucleotide
  Sense strand starting at position 3085 of SEQ ID NO: 953
accugagaauaguguuguu

SEQ ID NO: 76337 - RNA, 19 nt, Artificial Sequence
  Description of Artificial Sequence: Synthetic oligonucleotide
  Antisense strand to SEQ ID NO: 76256
aacaacacuauucucaggu

SEQ ID NO: 76338 - RNA, 19 nt, Artificial Sequence
  Description of Artificial Sequence: Synthetic oligonucleotide
  Sense strand starting at position 3090 of SEQ ID NO: 953
agaauaguguuguugggag

SEQ ID NO: 76339 - RNA, 19 nt, Artificial Sequence
  Description of Artificial Sequence: Synthetic oligonucleotide
  Antisense strand to SEQ ID NO: 76258
cucccaacaacacuauucu

SEQ ID NO: 76340 - RNA, 19 nt, Artificial Sequence
  Description of Artificial Sequence: Synthetic oligonucleotide
  Sense strand starting at position 3092 of SEQ ID NO: 953
aauaguguuguugggagau

SEQ ID NO: 76341 - RNA, 19 nt, Artificial Sequence
  Description of Artificial Sequence: Synthetic oligonucleotide
  Antisense strand to SEQ ID NO: 76260
aucucccaacaacacuauu

SEQ ID NO: 76342 - RNA, 19 nt, Artificial Sequence
  Description of Artificial Sequence: Synthetic oligonucleotide
  Sense strand starting at position 3094 of SEQ ID NO: 953
uaguguuguugggagaucu

SEQ ID NO: 76343 - RNA, 19 nt, Artificial Sequence
  Description of Artificial Sequence: Synthetic oligonucleotide
  Antisense strand to SEQ ID NO: 76262
agaucucccaacaacacua

SEQ ID NO: 76344 - RNA, 19 nt, Artificial Sequence
  Description of Artificial Sequence: Synthetic oligonucleotide
  Sense strand starting at position 3173 of SEQ ID NO: 955
uaguguuguugggagaucu

SEQ ID NO: 76345 - RNA, 19 nt, Artificial Sequence
  Description of Artificial Sequence: Synthetic oligonucleotide
  Antisense strand to SEQ ID NO: 76264
agaucucccaacaacacua

SEQ ID NO: 76346 - RNA, 19 nt, Artificial Sequence
  Description of Artificial Sequence: Synthetic oligonucleotide
  Sense strand starting at position 3171 of SEQ ID NO: 955
aauaguguuguugggagau

SEQ ID NO: 76347 - RNA, 19 nt, Artificial Sequence
  Description of Artificial Sequence: Synthetic oligonucleotide
  Antisense strand to SEQ ID NO: 76266
aucucccaacaacacuauu

SEQ ID NO: 76348 - RNA, 19 nt, Artificial Sequence
  Description of Artificial Sequence: Synthetic oligonucleotide
  Sense strand starting at position 3169 of SEQ ID NO: 955
agaauaguguuguugggag

SEQ ID NO: 76349 - RNA, 19 nt, Artificial Sequence
  Description of Artificial Sequence: Synthetic oligonucleotide
  Antisense strand to SEQ ID NO: 76268
cucccaacaacacuauucu

SEQ ID NO: 76350 - RNA, 19 nt, Artificial Sequence
  Description of Artificial Sequence: Synthetic oligonucleotide
  Sense strand starting at position 3164 of SEQ ID NO: 955
accugagaauaguguuguu

SEQ ID NO: 76351 - RNA, 19 nt, Artificial Sequence
  Description of Artificial Sequence: Synthetic oligonucleotide
  Antisense strand to SEQ ID NO: 76270
aacaacacuauucucaggu

SEQ ID NO: 76352 - RNA, 19 nt, Artificial Sequence
  Description of Artificial Sequence: Synthetic oligonucleotide
  Sense strand starting at position 3131 of SEQ ID NO: 955
ugaucuguucuggacauua

SEQ ID NO: 76353 - RNA, 19 nt, Artificial Sequence
  Description of Artificial Sequence: Synthetic oligonucleotide
  Antisense strand to SEQ ID NO: 76272
uaauguccagaacagauca

SEQ ID NO: 76354 - RNA, 19 nt, Artificial Sequence
  Description of Artificial Sequence: Synthetic oligonucleotide
  Sense strand starting at position 3129 of SEQ ID NO: 955
guugaucuguucuggacau

SEQ ID NO: 76355 - RNA, 19 nt, Artificial Sequence
  Description of Artificial Sequence: Synthetic oligonucleotide
  Antisense strand to SEQ ID NO: 76274
auguccagaacagaucaac

SEQ ID NO: 76356 - RNA, 19 nt, Artificial Sequence
  Description of Artificial Sequence: Synthetic oligonucleotide
  Sense strand starting at position 2887 of SEQ ID NO: 955
gccuguaauccggauacuu

SEQ ID NO: 76357 - RNA, 19 nt, Artificial Sequence
  Description of Artificial Sequence: Synthetic oligonucleotide
  Antisense strand to SEQ ID NO: 76276
aaguauccggauuacaggc

SEQ ID NO: 76358 - RNA, 19 nt, Artificial Sequence
  Description of Artificial Sequence: Synthetic oligonucleotide
  Sense strand starting at position 2679 of SEQ ID NO: 955
ucaagaaauugacagcauu

SEQ ID NO: 76359 - RNA, 19 nt, Artificial Sequence
  Description of Artificial Sequence: Synthetic oligonucleotide
  Antisense strand to SEQ ID NO: 76278
aaugcugucaauuucuuga

SEQ ID NO: 76360 - RNA, 19 nt, Artificial Sequence
  Description of Artificial Sequence: Synthetic oligonucleotide
  Sense strand starting at position 2589 of SEQ ID NO: 955
gcuaauccugauuggguuu

SEQ ID NO: 76361 - RNA, 19 nt, Artificial Sequence
  Description of Artificial Sequence: Synthetic oligonucleotide
  Antisense strand to SEQ ID NO: 76280
aaacccaaucaggauuagc

SEQ ID NO: 76362 - RNA, 19 nt, Artificial Sequence
  Description of Artificial Sequence: Synthetic oligonucleotide
  Sense strand starting at position 2588 of SEQ ID NO: 955
agcuaauccugauuggguu

SEQ ID NO: 76363 - RNA, 19 nt, Artificial Sequence
  Description of Artificial Sequence: Synthetic oligonucleotide
  Antisense strand to SEQ ID NO: 76282
aacccaaucaggauuagcu

SEQ ID NO: 76364 - RNA, 19 nt, Artificial Sequence
  Description of Artificial Sequence: Synthetic oligonucleotide
  Sense strand starting at position 2283 of SEQ ID NO: 955
ggauauagcucugcucugu

SEQ ID NO: 76365 - RNA, 19 nt, Artificial Sequence
  Description of Artificial Sequence: Synthetic oligonucleotide
  Antisense strand to SEQ ID NO: 76284
acagagcagagcuauaucc

SEQ ID NO: 76366 - RNA, 19 nt, Artificial Sequence
  Description of Artificial Sequence: Synthetic oligonucleotide
  Sense strand starting at position 2162 of SEQ ID NO: 955
agaauucugaaaugacgua

SEQ ID NO: 76367 - RNA, 19 nt, Artificial Sequence
  Description of Artificial Sequence: Synthetic oligonucleotide
  Antisense strand to SEQ ID NO: 76286
uacgucauuucagaauucu

SEQ ID NO: 76368 - RNA, 19 nt, Artificial Sequence
  Description of Artificial Sequence: Synthetic oligonucleotide
  Sense strand starting at position 995 of SEQ ID NO: 955
uaagcaugugcugaagaug

SEQ ID NO: 76369 - RNA, 19 nt, Artificial Sequence
  Description of Artificial Sequence: Synthetic oligonucleotide
  Antisense strand to SEQ ID NO: 76288
caucuucagcacaugcuua

SEQ ID NO: 76370 - RNA, 19 nt, Artificial Sequence
  Description of Artificial Sequence: Synthetic oligonucleotide
  Sense strand starting at position 840 of SEQ ID NO: 955
acuguuaagucauaaggag

SEQ ID NO: 76371 - RNA, 19 nt, Artificial Sequence
  Description of Artificial Sequence: Synthetic oligonucleotide
  Antisense strand to SEQ ID NO: 76290
cuccuuaugacuuaacagu

SEQ ID NO: 76372 - RNA, 19 nt, Artificial Sequence
  Description of Artificial Sequence: Synthetic oligonucleotide
  Sense strand starting at position 396 of SEQ ID NO: 955
uggaauuguaggcaugagu

SEQ ID NO: 76373 - RNA, 19 nt, Artificial Sequence
  Description of Artificial Sequence: Synthetic oligonucleotide
  Antisense strand to SEQ ID NO: 76292
acucaugccuacaauucca

SEQ ID NO: 76374 - RNA, 19 nt, Artificial Sequence
  Description of Artificial Sequence: Synthetic oligonucleotide
  Sense strand starting at position 159 of SEQ ID NO: 955
guggcuauaaucgcagcua

SEQ ID NO: 76375 - RNA, 19 nt, Artificial Sequence
  Description of Artificial Sequence: Synthetic oligonucleotide
  Antisense strand to SEQ ID NO: 76294
uagcugcgauuauagccac

SEQ ID NO: 76376 - RNA, 19 nt, Artificial Sequence
  Description of Artificial Sequence: Synthetic oligonucleotide
  Sense strand starting at position 17 of SEQ ID NO: 955
guggcucacugguguaauc

SEQ ID NO: 76377 - RNA, 19 nt, Artificial Sequence
  Description of Artificial Sequence: Synthetic oligonucleotide
  Antisense strand to SEQ ID NO: 76296
gauuacaccagugagccac

SEQ ID NO: 76378 - RNA, 19 nt, Artificial Sequence
  Description of Artificial Sequence: Synthetic oligonucleotide
  Sense strand starting at position 158 of SEQ ID NO: 956
guggcuauaaucgcagcua

SEQ ID NO: 76379 - RNA, 19 nt, Artificial Sequence
  Description of Artificial Sequence: Synthetic oligonucleotide
  Antisense strand to SEQ ID NO: 76298
uagcugcgauuauagccac

SEQ ID NO: 76380 - RNA, 19 nt, Artificial Sequence
  Description of Artificial Sequence: Synthetic oligonucleotide
  Sense strand starting at position 738 of SEQ ID NO: 956
ggaagcaacuauugaacuu

SEQ ID NO: 76381 - RNA, 19 nt, Artificial Sequence
  Description of Artificial Sequence: Synthetic oligonucleotide
  Antisense strand to SEQ ID NO: 76300
aaguucaauaguugcuucc

SEQ ID NO: 76382 - RNA, 19 nt, Artificial Sequence
  Description of Artificial Sequence: Synthetic oligonucleotide
  Sense strand starting at position 839 of SEQ ID NO: 956
acuguuaagucauaaggag

SEQ ID NO: 76383 - RNA, 19 nt, Artificial Sequence
  Description of Artificial Sequence: Synthetic oligonucleotide
  Antisense strand to SEQ ID NO: 76302
cuccuuaugacuuaacagu

SEQ ID NO: 76384 - RNA, 19 nt, Artificial Sequence
  Description of Artificial Sequence: Synthetic oligonucleotide
  Sense strand starting at position 939 of SEQ ID NO: 956
ggugcagggcaauaugaau

SEQ ID NO: 76385 - RNA, 19 nt, Artificial Sequence
  Description of Artificial Sequence: Synthetic oligonucleotide
  Antisense strand to SEQ ID NO: 76304
auucauauugcccugcacc

SEQ ID NO: 76386 - RNA, 19 nt, Artificial Sequence
  Description of Artificial Sequence: Synthetic oligonucleotide
  Sense strand starting at position 994 of SEQ ID NO: 956
uaagcaugugcugaagaug

SEQ ID NO: 76387 - RNA, 19 nt, Artificial Sequence
  Description of Artificial Sequence: Synthetic oligonucleotide
  Antisense strand to SEQ ID NO: 76306
caucuucagcacaugcuua

SEQ ID NO: 76388 - RNA, 19 nt, Artificial Sequence
  Description of Artificial Sequence: Synthetic oligonucleotide
  Sense strand starting at position 1277 of SEQ ID NO: 956
ucacgugagucuuauccuu

SEQ ID NO: 76389 - RNA, 19 nt, Artificial Sequence
  Description of Artificial Sequence: Synthetic oligonucleotide
  Antisense strand to SEQ ID NO: 76308
aaggauaagacucacguga

SEQ ID NO: 76390 - RNA, 19 nt, Artificial Sequence
  Description of Artificial Sequence: Synthetic oligonucleotide
  Sense strand starting at position 1279 of SEQ ID NO: 956
acgugagucuuauccuucu

SEQ ID NO: 76391 - RNA, 19 nt, Artificial Sequence
  Description of Artificial Sequence: Synthetic oligonucleotide
  Antisense strand to SEQ ID NO: 76310
agaaggauaagacucacgu

SEQ ID NO: 76392 - RNA, 19 nt, Artificial Sequence
  Description of Artificial Sequence: Synthetic oligonucleotide
  Sense strand starting at position 1286 of SEQ ID NO: 956
ucuuauccuucuucgagga

SEQ ID NO: 76393 - RNA, 19 nt, Artificial Sequence
  Description of Artificial Sequence: Synthetic oligonucleotide
  Antisense strand to SEQ ID NO: 76312
uccucgaagaaggauaaga

SEQ ID NO: 76394 - RNA, 19 nt, Artificial Sequence
  Description of Artificial Sequence: Synthetic oligonucleotide
  Sense strand starting at position 1624 of SEQ ID NO: 956
ccauaauaaucccguugca

SEQ ID NO: 76395 - RNA, 19 nt, Artificial Sequence
  Description of Artificial Sequence: Synthetic oligonucleotide
  Antisense strand to SEQ ID NO: 76314
ugcaacgggauuauuaugg

SEQ ID NO: 76396 - RNA, 19 nt, Artificial Sequence
  Description of Artificial Sequence: Synthetic oligonucleotide
  Sense strand starting at position 1627 of SEQ ID NO: 956
uaauaaucccguugcaggu

SEQ ID NO: 76397 - RNA, 19 nt, Artificial Sequence
  Description of Artificial Sequence: Synthetic oligonucleotide
  Antisense strand to SEQ ID NO: 76316
accugcaacgggauuauua

SEQ ID NO: 76398 - RNA, 19 nt, Artificial Sequence
  Description of Artificial Sequence: Synthetic oligonucleotide
  Sense strand starting at position 1633 of SEQ ID NO: 956
ucccguugcagguuauagu

SEQ ID NO: 76399 - RNA, 19 nt, Artificial Sequence
  Description of Artificial Sequence: Synthetic oligonucleotide
  Antisense strand to SEQ ID NO: 76318
acuauaaccugcaacggga

SEQ ID NO: 76400 - RNA, 19 nt, Artificial Sequence
  Description of Artificial Sequence: Synthetic oligonucleotide
  Sense strand starting at position 1641 of SEQ ID NO: 956
cagguuauaguccaaguca

SEQ ID NO: 76401 - RNA, 19 nt, Artificial Sequence
  Description of Artificial Sequence: Synthetic oligonucleotide
  Antisense strand to SEQ ID NO: 76320
ugacuuggacuauaaccug

SEQ ID NO: 76402 - RNA, 19 nt, Artificial Sequence
  Description of Artificial Sequence: Synthetic oligonucleotide
  Sense strand starting at position 1671 of SEQ ID NO: 956
guacaucucugcugcugau

SEQ ID NO: 76403 - RNA, 19 nt, Artificial Sequence
  Description of Artificial Sequence: Synthetic oligonucleotide
  Antisense strand to SEQ ID NO: 76322
aucagcagcagagauguac

SEQ ID NO: 76404 - RNA, 19 nt, Artificial Sequence
  Description of Artificial Sequence: Synthetic oligonucleotide
  Sense strand starting at position 2066 of SEQ ID NO: 956
gccggguucuacguggaga

SEQ ID NO: 76405 - RNA, 19 nt, Artificial Sequence
  Description of Artificial Sequence: Synthetic oligonucleotide
  Antisense strand to SEQ ID NO: 76324
ucuccacguagaacccggc

SEQ ID NO: 76406 - RNA, 19 nt, Artificial Sequence
  Description of Artificial Sequence: Synthetic oligonucleotide
  Sense strand starting at position 2067 of SEQ ID NO: 956
ccggguucuacguggagaa

SEQ ID NO: 76407 - RNA, 19 nt, Artificial Sequence
  Description of Artificial Sequence: Synthetic oligonucleotide
  Antisense strand to SEQ ID NO: 76326
uucuccacguagaacccgg

SEQ ID NO: 76408 - RNA, 19 nt, Artificial Sequence
  Description of Artificial Sequence: Synthetic oligonucleotide
  Sense strand starting at position 2161 of SEQ ID NO: 956
agaauucugaaaugacgua

SEQ ID NO: 76409 - RNA, 19 nt, Artificial Sequence
  Description of Artificial Sequence: Synthetic oligonucleotide
  Antisense strand to SEQ ID NO: 76328
uacgucauuucagaauucu

SEQ ID NO: 76410 - RNA, 19 nt, Artificial Sequence
  Description of Artificial Sequence: Synthetic oligonucleotide
  Sense strand starting at position 2282 of SEQ ID NO: 956
ggauauagcucugcucugu

SEQ ID NO: 76411 - RNA, 19 nt, Artificial Sequence
  Description of Artificial Sequence: Synthetic oligonucleotide
  Antisense strand to SEQ ID NO: 76330
acagagcagagcuauaucc

SEQ ID NO: 76412 - RNA, 19 nt, Artificial Sequence
  Description of Artificial Sequence: Synthetic oligonucleotide
  Sense strand starting at position 2587 of SEQ ID NO: 956
agcuaauccugauuggguu

SEQ ID NO: 76413 - RNA, 19 nt, Artificial Sequence
  Description of Artificial Sequence: Synthetic oligonucleotide
  Antisense strand to SEQ ID NO: 76332
aacccaaucaggauuagcu

SEQ ID NO: 76414 - RNA, 19 nt, Artificial Sequence
  Description of Artificial Sequence: Synthetic oligonucleotide
  Sense strand starting at position 2588 of SEQ ID NO: 956
gcuaauccugauuggguuu

SEQ ID NO: 76415 - RNA, 19 nt, Artificial Sequence
  Description of Artificial Sequence: Synthetic oligonucleotide
  Antisense strand to SEQ ID NO: 76334
aaacccaaucaggauuagc

SEQ ID NO: 76416 - RNA, 19 nt, Artificial Sequence
  Description of Artificial Sequence: Synthetic oligonucleotide
  Sense strand starting at position 2886 of SEQ ID NO: 956
gccuguaauccggauacuu

SEQ ID NO: 76417 - RNA, 19 nt, Artificial Sequence
  Description of Artificial Sequence: Synthetic oligonucleotide
  Antisense strand to SEQ ID NO: 76336
aaguauccggauuacaggc

SEQ ID NO: 76418 - RNA, 19 nt, Artificial Sequence
  Description of Artificial Sequence: Synthetic oligonucleotide
  Sense strand starting at position 2996 of SEQ ID NO: 956
gggagacucugucaacaac

SEQ ID NO: 76419 - RNA, 19 nt, Artificial Sequence
  Description of Artificial Sequence: Synthetic oligonucleotide
  Antisense strand to SEQ ID NO: 76338
guuguugacagagucuccc

SEQ ID NO: 76420 - RNA, 19 nt, Artificial Sequence
  Description of Artificial Sequence: Synthetic oligonucleotide
  Sense strand starting at position 3128 of SEQ ID NO: 956
guugaucuguucuggacau

SEQ ID NO: 76421 - RNA, 19 nt, Artificial Sequence
  Description of Artificial Sequence: Synthetic oligonucleotide
  Antisense strand to SEQ ID NO: 76340
auguccagaacagaucaac

SEQ ID NO: 76422 - RNA, 19 nt, Artificial Sequence
  Description of Artificial Sequence: Synthetic oligonucleotide
  Sense strand starting at position 3129 of SEQ ID NO: 956
uugaucuguucuggacauu

SEQ ID NO: 76423 - RNA, 19 nt, Artificial Sequence
  Description of Artificial Sequence: Synthetic oligonucleotide
  Antisense strand to SEQ ID NO: 76342
aauguccagaacagaucaa

SEQ ID NO: 76424 - RNA, 19 nt, Artificial Sequence
  Description of Artificial Sequence: Synthetic oligonucleotide
  Sense strand starting at position 3130 of SEQ ID NO: 956
ugaucuguucuggacauua

SEQ ID NO: 76425 - RNA, 19 nt, Artificial Sequence
  Description of Artificial Sequence: Synthetic oligonucleotide
  Antisense strand to SEQ ID NO: 76344
uaauguccagaacagauca

SEQ ID NO: 76426 - RNA, 19 nt, Artificial Sequence
  Description of Artificial Sequence: Synthetic oligonucleotide
  Sense strand starting at position 3163 of SEQ ID NO: 956
accugagaauaguguuguu

SEQ ID NO: 76427 - RNA, 19 nt, Artificial Sequence
  Description of Artificial Sequence: Synthetic oligonucleotide
  Antisense strand to SEQ ID NO: 76346
aacaacacuauucucaggu

SEQ ID NO: 76428 - RNA, 19 nt, Artificial Sequence
  Description of Artificial Sequence: Synthetic oligonucleotide
  Sense strand starting at position 3168 of SEQ ID NO: 956
agaauaguguuguugggag

SEQ ID NO: 76429 - RNA, 19 nt, Artificial Sequence
  Description of Artificial Sequence: Synthetic oligonucleotide
  Antisense strand to SEQ ID NO: 76348
cucccaacaacacuauucu

SEQ ID NO: 76430 - RNA, 19 nt, Artificial Sequence
  Description of Artificial Sequence: Synthetic oligonucleotide
  Sense strand starting at position 3170 of SEQ ID NO: 956
aauaguguuguugggagau

SEQ ID NO: 76431 - RNA, 19 nt, Artificial Sequence
  Description of Artificial Sequence: Synthetic oligonucleotide
  Antisense strand to SEQ ID NO: 76350
aucucccaacaacacuauu

SEQ ID NO: 76432 - RNA, 19 nt, Artificial Sequence
  Description of Artificial Sequence: Synthetic oligonucleotide
  Sense strand starting at position 3172 of SEQ ID NO: 956
uaguguuguugggagaucu

SEQ ID NO: 76433 - RNA, 19 nt, Artificial Sequence
  Description of Artificial Sequence: Synthetic oligonucleotide
  Antisense strand to SEQ ID NO: 76352
agaucucccaacaacacua

SEQ ID NO: 76434 - RNA, 19 nt, Artificial Sequence
  Description of Artificial Sequence: Synthetic oligonucleotide
  Sense strand starting at position 60 of SEQ ID NO: 957
cucgauagcccuuaauaga

SEQ ID NO: 76435 - RNA, 19 nt, Artificial Sequence
  Description of Artificial Sequence: Synthetic oligonucleotide
  Antisense strand to SEQ ID NO: 76354
ucuauuaagggcuaucgag

SEQ ID NO: 76436 - RNA, 19 nt, Artificial Sequence
  Description of Artificial Sequence: Synthetic oligonucleotide
  Sense strand starting at position 80 of SEQ ID NO: 957
gcagacugugguuaaauuc

SEQ ID NO: 76437 - RNA, 19 nt, Artificial Sequence
  Description of Artificial Sequence: Synthetic oligonucleotide
  Antisense strand to SEQ ID NO: 76356
gaauuuaaccacagucugc

SEQ ID NO: 76438 - RNA, 19 nt, Artificial Sequence
  Description of Artificial Sequence: Synthetic oligonucleotide
  Sense strand starting at position 89 of SEQ ID NO: 957
gguuaaauucuggguggau

SEQ ID NO: 76439 - RNA, 19 nt, Artificial Sequence
  Description of Artificial Sequence: Synthetic oligonucleotide
  Antisense strand to SEQ ID NO: 76358
auccacccagaauuuaacc

SEQ ID NO: 76440 - RNA, 19 nt, Artificial Sequence
  Description of Artificial Sequence: Synthetic oligonucleotide
  Sense strand starting at position 90 of SEQ ID NO: 957
guuaaauucuggguggaug

SEQ ID NO: 76441 - RNA, 19 nt, Artificial Sequence
  Description of Artificial Sequence: Synthetic oligonucleotide
  Antisense strand to SEQ ID NO: 76360
cauccacccagaauuuaac

SEQ ID NO: 76442 - RNA, 19 nt, Artificial Sequence
  Description of Artificial Sequence: Synthetic oligonucleotide
  Sense strand starting at position 91 of SEQ ID NO: 957
uuaaauucuggguggaugu

SEQ ID NO: 76443 - RNA, 19 nt, Artificial Sequence
  Description of Artificial Sequence: Synthetic oligonucleotide
  Antisense strand to SEQ ID NO: 76362
acauccacccagaauuuaa

SEQ ID NO: 76444 - RNA, 19 nt, Artificial Sequence
  Description of Artificial Sequence: Synthetic oligonucleotide
  Sense strand starting at position 92 of SEQ ID NO: 957
uaaauucuggguggauguu

SEQ ID NO: 76445 - RNA, 19 nt, Artificial Sequence
  Description of Artificial Sequence: Synthetic oligonucleotide
  Antisense strand to SEQ ID NO: 76364
aacauccacccagaauuua

SEQ ID NO: 76446 - RNA, 19 nt, Artificial Sequence
  Description of Artificial Sequence: Synthetic oligonucleotide
  Sense strand starting at position 101 of SEQ ID NO: 957
gguggauguuucucaagac

SEQ ID NO: 76447 - RNA, 19 nt, Artificial Sequence
  Description of Artificial Sequence: Synthetic oligonucleotide
  Antisense strand to SEQ ID NO: 76366
gucuugagaaacauccacc

SEQ ID NO: 76448 - RNA, 19 nt, Artificial Sequence
  Description of Artificial Sequence: Synthetic oligonucleotide
  Sense strand starting at position 105 of SEQ ID NO: 957
gauguuucucaagacaagc

SEQ ID NO: 76449 - RNA, 19 nt, Artificial Sequence
  Description of Artificial Sequence: Synthetic oligonucleotide
  Antisense strand to SEQ ID NO: 76368
gcuugucuugagaaacauc

SEQ ID NO: 76450 - RNA, 19 nt, Artificial Sequence
  Description of Artificial Sequence: Synthetic oligonucleotide
  Sense strand starting at position 194 of SEQ ID NO: 957
gugugagaugaauacguuu

SEQ ID NO: 76451 - RNA, 19 nt, Artificial Sequence
  Description of Artificial Sequence: Synthetic oligonucleotide
  Antisense strand to SEQ ID NO: 76370
aaacguauucaucucacac

SEQ ID NO: 76452 - RNA, 19 nt, Artificial Sequence
  Description of Artificial Sequence: Synthetic oligonucleotide
  Sense strand starting at position 197 of SEQ ID NO: 957
ugagaugaauacguuuacu

SEQ ID NO: 76453 - RNA, 19 nt, Artificial Sequence
  Description of Artificial Sequence: Synthetic oligonucleotide
  Antisense strand to SEQ ID NO: 76372
aguaaacguauucaucuca

SEQ ID NO: 76454 - RNA, 19 nt, Artificial Sequence
  Description of Artificial Sequence: Synthetic oligonucleotide
  Sense strand starting at position 200 of SEQ ID NO: 957
gaugaauacguuuacugau

SEQ ID NO: 76455 - RNA, 19 nt, Artificial Sequence
  Description of Artificial Sequence: Synthetic oligonucleotide
  Antisense strand to SEQ ID NO: 76374
aucaguaaacguauucauc

SEQ ID NO: 76456 - RNA, 19 nt, Artificial Sequence
  Description of Artificial Sequence: Synthetic oligonucleotide
  Sense strand starting at position 202 of SEQ ID NO: 957
ugaauacguuuacugauua

SEQ ID NO: 76457 - RNA, 19 nt, Artificial Sequence
  Description of Artificial Sequence: Synthetic oligonucleotide
  Antisense strand to SEQ ID NO: 76376
uaaucaguaaacguauuca

SEQ ID NO: 76458 - RNA, 19 nt, Artificial Sequence
  Description of Artificial Sequence: Synthetic oligonucleotide
  Sense strand starting at position 223 of SEQ ID NO: 957
acgaccuauuucuauaaag

SEQ ID NO: 76459 - RNA, 19 nt, Artificial Sequence
  Description of Artificial Sequence: Synthetic oligonucleotide
  Antisense strand to SEQ ID NO: 76378
cuuuauagaaauaggucgu

SEQ ID NO: 76460 - RNA, 19 nt, Artificial Sequence
  Description of Artificial Sequence: Synthetic oligonucleotide
  Sense strand starting at position 364 of SEQ ID NO: 957
acagcauuguaccuaggaa

SEQ ID NO: 76461 - RNA, 19 nt, Artificial Sequence
  Description of Artificial Sequence: Synthetic oligonucleotide
  Antisense strand to SEQ ID NO: 76380
uuccuagguacaaugcugu

SEQ ID NO: 76462 - RNA, 19 nt, Artificial Sequence
  Description of Artificial Sequence: Synthetic oligonucleotide
  Sense strand starting at position 379 of SEQ ID NO: 957
ggaauacuaucagucacag

SEQ ID NO: 76463 - RNA, 19 nt, Artificial Sequence
  Description of Artificial Sequence: Synthetic oligonucleotide
  Antisense strand to SEQ ID NO: 76382
cugugacugauaguauucc

SEQ ID NO: 76464 - RNA, 19 nt, Artificial Sequence
  Description of Artificial Sequence: Synthetic oligonucleotide
  Sense strand starting at position 474 of SEQ ID NO: 957
aagacaaguuguguauuaa

SEQ ID NO: 76465 - RNA, 19 nt, Artificial Sequence
  Description of Artificial Sequence: Synthetic oligonucleotide
  Antisense strand to SEQ ID NO: 76384
uuaauacacaacuugucuu

SEQ ID NO: 76466 - RNA, 19 nt, Artificial Sequence
  Description of Artificial Sequence: Synthetic oligonucleotide
  Sense strand starting at position 475 of SEQ ID NO: 957
agacaaguuguguauuaag

SEQ ID NO: 76467 - RNA, 19 nt, Artificial Sequence
  Description of Artificial Sequence: Synthetic oligonucleotide
  Antisense strand to SEQ ID NO: 76386
cuuaauacacaacuugucu

SEQ ID NO: 76468 - RNA, 19 nt, Artificial Sequence
  Description of Artificial Sequence: Synthetic oligonucleotide
  Sense strand starting at position 484 of SEQ ID NO: 957
guguauuaaguacaagaca

SEQ ID NO: 76469 - RNA, 19 nt, Artificial Sequence
  Description of Artificial Sequence: Synthetic oligonucleotide
  Antisense strand to SEQ ID NO: 76388
ugucuuguacuuaauacac

SEQ ID NO: 76470 - RNA, 19 nt, Artificial Sequence
  Description of Artificial Sequence: Synthetic oligonucleotide
  Sense strand starting at position 527 of SEQ ID NO: 957
uugcaaaggcucuacaagu

SEQ ID NO: 76471 - RNA, 19 nt, Artificial Sequence
  Description of Artificial Sequence: Synthetic oligonucleotide
  Antisense strand to SEQ ID NO: 76390
acuuguagagccuuugcaa

SEQ ID NO: 76472 - RNA, 19 nt, Artificial Sequence
  Description of Artificial Sequence: Synthetic oligonucleotide
  Sense strand starting at position 972 of SEQ ID NO: 957
gagacuaacgguuaucuca

SEQ ID NO: 76473 - RNA, 19 nt, Artificial Sequence
  Description of Artificial Sequence: Synthetic oligonucleotide
  Antisense strand to SEQ ID NO: 76392
ugagauaaccguuagucuc

SEQ ID NO: 76474 - RNA, 19 nt, Artificial Sequence
  Description of Artificial Sequence: Synthetic oligonucleotide
  Sense strand starting at position 974 of SEQ ID NO: 957
gacuaacgguuaucucaug

SEQ ID NO: 76475 - RNA, 19 nt, Artificial Sequence
  Description of Artificial Sequence: Synthetic oligonucleotide
  Antisense strand to SEQ ID NO: 76394
caugagauaaccguuaguc

SEQ ID NO: 76476 - RNA, 19 nt, Artificial Sequence
  Description of Artificial Sequence: Synthetic oligonucleotide
  Sense strand starting at position 1139 of SEQ ID NO: 957
gccacuaccguguaagaaa

SEQ ID NO: 76477 - RNA, 19 nt, Artificial Sequence
  Description of Artificial Sequence: Synthetic oligonucleotide
  Antisense strand to SEQ ID NO: 76396
uuucuuacacgguaguggc

SEQ ID NO: 76478 - RNA, 19 nt, Artificial Sequence
  Description of Artificial Sequence: Synthetic oligonucleotide
  Sense strand starting at position 1301 of SEQ ID NO: 957
gagggaggcuucccacaca

SEQ ID NO: 76479 - RNA, 19 nt, Artificial Sequence
  Description of Artificial Sequence: Synthetic oligonucleotide
  Antisense strand to SEQ ID NO: 76398
ugugugggaagccucccuc

SEQ ID NO: 76480 - RNA, 19 nt, Artificial Sequence
  Description of Artificial Sequence: Synthetic oligonucleotide
  Sense strand starting at position 1363 of SEQ ID NO: 957
cucagauaacccugggauc

SEQ ID NO: 76481 - RNA, 19 nt, Artificial Sequence
  Description of Artificial Sequence: Synthetic oligonucleotide
  Antisense strand to SEQ ID NO: 76400
gaucccaggguuaucugag

SEQ ID NO: 76482 - RNA, 19 nt, Artificial Sequence
  Description of Artificial Sequence: Synthetic oligonucleotide
  Sense strand starting at position 1364 of SEQ ID NO: 957
ucagauaacccugggaucu

SEQ ID NO: 76483 - RNA, 19 nt, Artificial Sequence
  Description of Artificial Sequence: Synthetic oligonucleotide
  Antisense strand to SEQ ID NO: 76402
agaucccaggguuaucuga

SEQ ID NO: 76484 - RNA, 19 nt, Artificial Sequence
  Description of Artificial Sequence: Synthetic oligonucleotide
  Sense strand starting at position 1887 of SEQ ID NO: 957
agcgcgaggcgcuuugaaa

SEQ ID NO: 76485 - RNA, 19 nt, Artificial Sequence
  Description of Artificial Sequence: Synthetic oligonucleotide
  Antisense strand to SEQ ID NO: 76404
uuucaaagcgccucgcgcu

SEQ ID NO: 76486 - RNA, 19 nt, Artificial Sequence
  Description of Artificial Sequence: Synthetic oligonucleotide
  Sense strand starting at position 2097 of SEQ ID NO: 957
ucgagagccaaucgaugaa

SEQ ID NO: 76487 - RNA, 19 nt, Artificial Sequence
  Description of Artificial Sequence: Synthetic oligonucleotide
  Antisense strand to SEQ ID NO: 76406
uucaucgauuggcucucga

SEQ ID NO: 76488 - RNA, 19 nt, Artificial Sequence
  Description of Artificial Sequence: Synthetic oligonucleotide
  Sense strand starting at position 2514 of SEQ ID NO: 957
gaugauuuggcucgucauu

SEQ ID NO: 76489 - RNA, 19 nt, Artificial Sequence
  Description of Artificial Sequence: Synthetic oligonucleotide
  Antisense strand to SEQ ID NO: 76408
aaugacgagccaaaucauc

SEQ ID NO: 76490 - RNA, 19 nt, Artificial Sequence
  Description of Artificial Sequence: Synthetic oligonucleotide
  Sense strand starting at position 2563 of SEQ ID NO: 957
cuuggaacgaucggagaaa

SEQ ID NO: 76491 - RNA, 19 nt, Artificial Sequence
  Description of Artificial Sequence: Synthetic oligonucleotide
  Antisense strand to SEQ ID NO: 76410
uuucuccgaucguuccaag

SEQ ID NO: 76492 - RNA, 19 nt, Artificial Sequence
  Description of Artificial Sequence: Synthetic oligonucleotide
  Sense strand starting at position 2665 of SEQ ID NO: 957
guguaacacaagugauaga

SEQ ID NO: 76493 - RNA, 19 nt, Artificial Sequence
  Description of Artificial Sequence: Synthetic oligonucleotide
  Antisense strand to SEQ ID NO: 76412
ucuaucacuuguguuacac

SEQ ID NO: 76494 - RNA, 19 nt, Artificial Sequence
  Description of Artificial Sequence: Synthetic oligonucleotide
  Sense strand starting at position 2982 of SEQ ID NO: 957
agcaguggucugcagauuu

SEQ ID NO: 76495 - RNA, 19 nt, Artificial Sequence
  Description of Artificial Sequence: Synthetic oligonucleotide
  Antisense strand to SEQ ID NO: 76414
aaaucugcagaccacugcu

SEQ ID NO: 76496 - RNA, 19 nt, Artificial Sequence
  Description of Artificial Sequence: Synthetic oligonucleotide
  Sense strand starting at position 3006 of SEQ ID NO: 957
ugcacucaaggaugauuaa

SEQ ID NO: 76497 - RNA, 19 nt, Artificial Sequence
  Description of Artificial Sequence: Synthetic oligonucleotide
  Antisense strand to SEQ ID NO: 76416
uuaaucauccuugagugca

SEQ ID NO: 76498 - RNA, 19 nt, Artificial Sequence
  Description of Artificial Sequence: Synthetic oligonucleotide
  Sense strand starting at position 3121 of SEQ ID NO: 957
gguguaucggucagaaguu

SEQ ID NO: 76499 - RNA, 19 nt, Artificial Sequence
  Description of Artificial Sequence: Synthetic oligonucleotide
  Antisense strand to SEQ ID NO: 76418
aacuucugaccgauacacc

SEQ ID NO: 76500 - RNA, 19 nt, Artificial Sequence
  Description of Artificial Sequence: Synthetic oligonucleotide
  Sense strand starting at position 3399 of SEQ ID NO: 957
caaguuaaaucucugggua

SEQ ID NO: 76501 - RNA, 19 nt, Artificial Sequence
  Description of Artificial Sequence: Synthetic oligonucleotide
  Antisense strand to SEQ ID NO: 76420
uacccagagauuuaacuug

SEQ ID NO: 76502 - RNA, 19 nt, Artificial Sequence
  Description of Artificial Sequence: Synthetic oligonucleotide
  Sense strand starting at position 3400 of SEQ ID NO: 957
aaguuaaaucucuggguag

SEQ ID NO: 76503 - RNA, 19 nt, Artificial Sequence
  Description of Artificial Sequence: Synthetic oligonucleotide
  Antisense strand to SEQ ID NO: 76422
cuacccagagauuuaacuu

SEQ ID NO: 76504 - RNA, 19 nt, Artificial Sequence
  Description of Artificial Sequence: Synthetic oligonucleotide
  Sense strand starting at position 3402 of SEQ ID NO: 957
guuaaaucucuggguagau

SEQ ID NO: 76505 - RNA, 19 nt, Artificial Sequence
  Description of Artificial Sequence: Synthetic oligonucleotide
  Antisense strand to SEQ ID NO: 76424
aucuacccagagauuuaac

SEQ ID NO: 76506 - RNA, 19 nt, Artificial Sequence
  Description of Artificial Sequence: Synthetic oligonucleotide
  Sense strand starting at position 3403 of SEQ ID NO: 957
uuaaaucucuggguagauc

SEQ ID NO: 76507 - RNA, 19 nt, Artificial Sequence
  Description of Artificial Sequence: Synthetic oligonucleotide
  Antisense strand to SEQ ID NO: 76426
gaucuacccagagauuuaa

SEQ ID NO: 76508 - RNA, 19 nt, Artificial Sequence
  Description of Artificial Sequence: Synthetic oligonucleotide
  Sense strand starting at position 3440 of SEQ ID NO: 957
gugugagauuuacagaaau

SEQ ID NO: 76509 - RNA, 19 nt, Artificial Sequence
  Description of Artificial Sequence: Synthetic oligonucleotide
  Antisense strand to SEQ ID NO: 76428
auuucuguaaaucucacac

SEQ ID NO: 76510 - RNA, 19 nt, Artificial Sequence
  Description of Artificial Sequence: Synthetic oligonucleotide
  Sense strand starting at position 3451 of SEQ ID NO: 957
acagaaaugcugggagucu

SEQ ID NO: 76511 - RNA, 19 nt, Artificial Sequence
  Description of Artificial Sequence: Synthetic oligonucleotide
  Antisense strand to SEQ ID NO: 76430
agacucccagcauuucugu

SEQ ID NO: 76512 - RNA, 19 nt, Artificial Sequence
  Description of Artificial Sequence: Synthetic oligonucleotide
  Sense strand starting at position 3736 of SEQ ID NO: 957
gagugaaacuccuucuaga

SEQ ID NO: 76513 - RNA, 19 nt, Artificial Sequence
  Description of Artificial Sequence: Synthetic oligonucleotide
  Antisense strand to SEQ ID NO: 76432
ucuagaaggaguuucacuc

SEQ ID NO: 76514 - RNA, 19 nt, Artificial Sequence
  Description of Artificial Sequence: Synthetic oligonucleotide
  Sense strand starting at position 17 of SEQ ID NO: 958
acagaauugucuccugaua

SEQ ID NO: 76515 - RNA, 19 nt, Artificial Sequence
  Description of Artificial Sequence: Synthetic oligonucleotide
  Antisense strand to SEQ ID NO: 76434
uaucaggagacaauucugu

SEQ ID NO: 76516 - RNA, 19 nt, Artificial Sequence
  Description of Artificial Sequence: Synthetic oligonucleotide
  Sense strand starting at position 36 of SEQ ID NO: 958
cagcuuuccgaucaacgaa

SEQ ID NO: 76517 - RNA, 19 nt, Artificial Sequence
  Description of Artificial Sequence: Synthetic oligonucleotide
  Antisense strand to SEQ ID NO: 76436
uucguugaucggaaagcug

SEQ ID NO: 76518 - RNA, 19 nt, Artificial Sequence
  Description of Artificial Sequence: Synthetic oligonucleotide
  Sense strand starting at position 230 of SEQ ID NO: 958
aggccaagccucuaaacaa

SEQ ID NO: 76519 - RNA, 19 nt, Artificial Sequence
  Description of Artificial Sequence: Synthetic oligonucleotide
  Antisense strand to SEQ ID NO: 76438
uuguuuagaggcuuggccu

SEQ ID NO: 76520 - RNA, 19 nt, Artificial Sequence
  Description of Artificial Sequence: Synthetic oligonucleotide
  Sense strand starting at position 321 of SEQ ID NO: 958
cgaggacucaaaugugaau

SEQ ID NO: 76521 - RNA, 19 nt, Artificial Sequence
  Description of Artificial Sequence: Synthetic oligonucleotide
  Antisense strand to SEQ ID NO: 76440
auucacauuugaguccucg

SEQ ID NO: 76522 - RNA, 19 nt, Artificial Sequence
  Description of Artificial Sequence: Synthetic oligonucleotide
  Sense strand starting at position 406 of SEQ ID NO: 958
gccagucuccucgaugauu

SEQ ID NO: 76523 - RNA, 19 nt, Artificial Sequence
  Description of Artificial Sequence: Synthetic oligonucleotide
  Antisense strand to SEQ ID NO: 76442
aaucaucgaggagacuggc

SEQ ID NO: 76524 - RNA, 19 nt, Artificial Sequence
  Description of Artificial Sequence: Synthetic oligonucleotide
  Sense strand starting at position 411 of SEQ ID NO: 958
ucuccucgaugauucgaga

SEQ ID NO: 76525 - RNA, 19 nt, Artificial Sequence
  Description of Artificial Sequence: Synthetic oligonucleotide
  Antisense strand to SEQ ID NO: 76444
ucucgaaucaucgaggaga

SEQ ID NO: 76526 - RNA, 19 nt, Artificial Sequence
  Description of Artificial Sequence: Synthetic oligonucleotide
  Sense strand starting at position 469 of SEQ ID NO: 958
cguguaucccgaagagagc

SEQ ID NO: 76527 - RNA, 19 nt, Artificial Sequence
  Description of Artificial Sequence: Synthetic oligonucleotide
  Antisense strand to SEQ ID NO: 76446
gcucucuucgggauacacg

SEQ ID NO: 76528 - RNA, 19 nt, Artificial Sequence
  Description of Artificial Sequence: Synthetic oligonucleotide
  Sense strand starting at position 1689 of SEQ ID NO: 958
ccuugagacccuugucaga

SEQ ID NO: 76529 - RNA, 19 nt, Artificial Sequence
  Description of Artificial Sequence: Synthetic oligonucleotide
  Antisense strand to SEQ ID NO: 76448
ucugacaagggucucaagg

SEQ ID NO: 76530 - RNA, 19 nt, Artificial Sequence
  Description of Artificial Sequence: Synthetic oligonucleotide
  Sense strand starting at position 1691 of SEQ ID NO: 958
uugagacccuugucagaaa

SEQ ID NO: 76531 - RNA, 19 nt, Artificial Sequence
  Description of Artificial Sequence: Synthetic oligonucleotide
  Antisense strand to SEQ ID NO: 76450
uuucugacaagggucucaa

SEQ ID NO: 76532 - RNA, 19 nt, Artificial Sequence
  Description of Artificial Sequence: Synthetic oligonucleotide
  Sense strand starting at position 2246 of SEQ ID NO: 958
accgacucacugcaugaua

SEQ ID NO: 76533 - RNA, 19 nt, Artificial Sequence
  Description of Artificial Sequence: Synthetic oligonucleotide
  Antisense strand to SEQ ID NO: 76452
uaucaugcagugagucggu

SEQ ID NO: 76534 - RNA, 19 nt, Artificial Sequence
  Description of Artificial Sequence: Synthetic oligonucleotide
  Sense strand starting at position 2248 of SEQ ID NO: 958
cgacucacugcaugauaua

SEQ ID NO: 76535 - RNA, 19 nt, Artificial Sequence
  Description of Artificial Sequence: Synthetic oligonucleotide
  Antisense strand to SEQ ID NO: 76454
uauaucaugcagugagucg

SEQ ID NO: 76536 - RNA, 19 nt, Artificial Sequence
  Description of Artificial Sequence: Synthetic oligonucleotide
  Sense strand starting at position 2259 of SEQ ID NO: 958
augauauauuggccuuucu

SEQ ID NO: 76537 - RNA, 19 nt, Artificial Sequence
  Description of Artificial Sequence: Synthetic oligonucleotide
  Antisense strand to SEQ ID NO: 76456
agaaaggccaauauaucau

SEQ ID NO: 76538 - RNA, 19 nt, Artificial Sequence
  Description of Artificial Sequence: Synthetic oligonucleotide
  Sense strand starting at position 2289 of SEQ ID NO: 958
ggcuauacucguuuggcuu

SEQ ID NO: 76539 - RNA, 19 nt, Artificial Sequence
  Description of Artificial Sequence: Synthetic oligonucleotide
  Antisense strand to SEQ ID NO: 76458
aagccaaacgaguauagcc

SEQ ID NO: 76540 - RNA, 19 nt, Artificial Sequence
  Description of Artificial Sequence: Synthetic oligonucleotide
  Sense strand starting at position 2523 of SEQ ID NO: 958
uaccguauuugguuuaauu

SEQ ID NO: 76541 - RNA, 19 nt, Artificial Sequence
  Description of Artificial Sequence: Synthetic oligonucleotide
  Antisense strand to SEQ ID NO: 76460
aauuaaaccaaauacggua

SEQ ID NO: 76542 - RNA, 19 nt, Artificial Sequence
  Description of Artificial Sequence: Synthetic oligonucleotide
  Sense strand starting at position 2533 of SEQ ID NO: 958
gguuuaauuuguguaaguc

SEQ ID NO: 76543 - RNA, 19 nt, Artificial Sequence
  Description of Artificial Sequence: Synthetic oligonucleotide
  Antisense strand to SEQ ID NO: 76462
gacuuacacaaauuaaacc

SEQ ID NO: 76544 - RNA, 19 nt, Artificial Sequence
  Description of Artificial Sequence: Synthetic oligonucleotide
  Sense strand starting at position 2545 of SEQ ID NO: 958
guaaguccugccuugcgaa

SEQ ID NO: 76545 - RNA, 19 nt, Artificial Sequence
  Description of Artificial Sequence: Synthetic oligonucleotide
  Antisense strand to SEQ ID NO: 76464
uucgcaaggcaggacuuac

SEQ ID NO: 76546 - RNA, 19 nt, Artificial Sequence
  Description of Artificial Sequence: Synthetic oligonucleotide
  Sense strand starting at position 2553 of SEQ ID NO: 958
ugccuugcgaauuggauuu

SEQ ID NO: 76547 - RNA, 19 nt, Artificial Sequence
  Description of Artificial Sequence: Synthetic oligonucleotide
  Antisense strand to SEQ ID NO: 76466
aaauccaauucgcaaggca

SEQ ID NO: 76548 - RNA, 19 nt, Artificial Sequence
  Description of Artificial Sequence: Synthetic oligonucleotide
  Sense strand starting at position 2644 of SEQ ID NO: 958
agaggcuuugcuuacuacu

SEQ ID NO: 76549 - RNA, 19 nt, Artificial Sequence
  Description of Artificial Sequence: Synthetic oligonucleotide
  Antisense strand to SEQ ID NO: 76468
aguaguaagcaaagccucu

SEQ ID NO: 76550 - RNA, 19 nt, Artificial Sequence
  Description of Artificial Sequence: Synthetic oligonucleotide
  Sense strand starting at position 2793 of SEQ ID NO: 958
acuuguucuguccacuuua

SEQ ID NO: 76551 - RNA, 19 nt, Artificial Sequence
  Description of Artificial Sequence: Synthetic oligonucleotide
  Antisense strand to SEQ ID NO: 76470
uaaaguggacagaacaagu

SEQ ID NO: 76552 - RNA, 19 nt, Artificial Sequence
  Description of Artificial Sequence: Synthetic oligonucleotide
  Sense strand starting at position 2863 of SEQ ID NO: 958
ccaacuaggucuuugauua

SEQ ID NO: 76553 - RNA, 19 nt, Artificial Sequence
  Description of Artificial Sequence: Synthetic oligonucleotide
  Antisense strand to SEQ ID NO: 76472
uaaucaaagaccuaguugg

SEQ ID NO: 76554 - RNA, 19 nt, Artificial Sequence
  Description of Artificial Sequence: Synthetic oligonucleotide
  Sense strand starting at position 2876 of SEQ ID NO: 958
ugauuauaggcccacuuga

SEQ ID NO: 76555 - RNA, 19 nt, Artificial Sequence
  Description of Artificial Sequence: Synthetic oligonucleotide
  Antisense strand to SEQ ID NO: 76474
ucaagugggccuauaauca

SEQ ID NO: 76556 - RNA, 19 nt, Artificial Sequence
  Description of Artificial Sequence: Synthetic oligonucleotide
  Sense strand starting at position 3058 of SEQ ID NO: 958
augugaugucucgaaguuu

SEQ ID NO: 76557 - RNA, 19 nt, Artificial Sequence
  Description of Artificial Sequence: Synthetic oligonucleotide
  Antisense strand to SEQ ID NO: 76476
aaacuucgagacaucacau

SEQ ID NO: 76558 - RNA, 19 nt, Artificial Sequence
  Description of Artificial Sequence: Synthetic oligonucleotide
  Sense strand starting at position 3093 of SEQ ID NO: 958
aauuuagauucgugauaga

SEQ ID NO: 76559 - RNA, 19 nt, Artificial Sequence
  Description of Artificial Sequence: Synthetic oligonucleotide
  Antisense strand to SEQ ID NO: 76478
ucuaucacgaaucuaaauu

SEQ ID NO: 76560 - RNA, 19 nt, Artificial Sequence
  Description of Artificial Sequence: Synthetic oligonucleotide
  Sense strand starting at position 3098 of SEQ ID NO: 958
agauucgugauagaaguua

SEQ ID NO: 76561 - RNA, 19 nt, Artificial Sequence
  Description of Artificial Sequence: Synthetic oligonucleotide
  Antisense strand to SEQ ID NO: 76480
uaacuucuaucacgaaucu

SEQ ID NO: 76562 - RNA, 19 nt, Artificial Sequence
  Description of Artificial Sequence: Synthetic oligonucleotide
  Sense strand starting at position 3103 of SEQ ID NO: 958
cgugauagaaguuaacauu

SEQ ID NO: 76563 - RNA, 19 nt, Artificial Sequence
  Description of Artificial Sequence: Synthetic oligonucleotide
  Antisense strand to SEQ ID NO: 76482
aauguuaacuucuaucacg

SEQ ID NO: 76564 - RNA, 19 nt, Artificial Sequence
  Description of Artificial Sequence: Synthetic oligonucleotide
  Sense strand starting at position 3128 of SEQ ID NO: 958
ccuagauaaucugcagugu

SEQ ID NO: 76565 - RNA, 19 nt, Artificial Sequence
  Description of Artificial Sequence: Synthetic oligonucleotide
  Antisense strand to SEQ ID NO: 76484
acacugcagauuaucuagg

SEQ ID NO: 76566 - RNA, 19 nt, Artificial Sequence
  Description of Artificial Sequence: Synthetic oligonucleotide
  Sense strand starting at position 3155 of SEQ ID NO: 958
uguuccaucugacuaagga

SEQ ID NO: 76567 - RNA, 19 nt, Artificial Sequence
  Description of Artificial Sequence: Synthetic oligonucleotide
  Antisense strand to SEQ ID NO: 76486
uccuuagucagauggaaca

SEQ ID NO: 76568 - RNA, 19 nt, Artificial Sequence
  Description of Artificial Sequence: Synthetic oligonucleotide
  Sense strand starting at position 3356 of SEQ ID NO: 958
ugcagucauguauacguga

SEQ ID NO: 76569 - RNA, 19 nt, Artificial Sequence
  Description of Artificial Sequence: Synthetic oligonucleotide
  Antisense strand to SEQ ID NO: 76488
ucacguauacaugacugca

SEQ ID NO: 76570 - RNA, 19 nt, Artificial Sequence
  Description of Artificial Sequence: Synthetic oligonucleotide
  Sense strand starting at position 3359 of SEQ ID NO: 958
agucauguauacgugaaau

SEQ ID NO: 76571 - RNA, 19 nt, Artificial Sequence
  Description of Artificial Sequence: Synthetic oligonucleotide
  Antisense strand to SEQ ID NO: 76490
auuucacguauacaugacu

SEQ ID NO: 76572 - RNA, 19 nt, Artificial Sequence
  Description of Artificial Sequence: Synthetic oligonucleotide
  Sense strand starting at position 3361 of SEQ ID NO: 958
ucauguauacgugaaauau

SEQ ID NO: 76573 - RNA, 19 nt, Artificial Sequence
  Description of Artificial Sequence: Synthetic oligonucleotide
  Antisense strand to SEQ ID NO: 76492
auauuucacguauacauga

SEQ ID NO: 76574 - RNA, 19 nt, Artificial Sequence
  Description of Artificial Sequence: Synthetic oligonucleotide
  Sense strand starting at position 3388 of SEQ ID NO: 958
gugaaaugauuugacuuga

SEQ ID NO: 76575 - RNA, 19 nt, Artificial Sequence
  Description of Artificial Sequence: Synthetic oligonucleotide
  Antisense strand to SEQ ID NO: 76494
ucaagucaaaucauuucac

SEQ ID NO: 76576 - RNA, 19 nt, Artificial Sequence
  Description of Artificial Sequence: Synthetic oligonucleotide
  Sense strand starting at position 3509 of SEQ ID NO: 958
uuuagccuuugguuauaau

SEQ ID NO: 76577 - RNA, 19 nt, Artificial Sequence
  Description of Artificial Sequence: Synthetic oligonucleotide
  Antisense strand to SEQ ID NO: 76496
auuauaaccaaaggcuaaa

SEQ ID NO: 76578 - RNA, 19 nt, Artificial Sequence
  Description of Artificial Sequence: Synthetic oligonucleotide
  Sense strand starting at position 3510 of SEQ ID NO: 958
uuagccuuugguuauaauu

SEQ ID NO: 76579 - RNA, 19 nt, Artificial Sequence
  Description of Artificial Sequence: Synthetic oligonucleotide
  Antisense strand to SEQ ID NO: 76498
aauuauaaccaaaggcuaa

SEQ ID NO: 76580 - RNA, 19 nt, Artificial Sequence
  Description of Artificial Sequence: Synthetic oligonucleotide
  Sense strand starting at position 3663 of SEQ ID NO: 958
uuaugaugguuccuuaaau

SEQ ID NO: 76581 - RNA, 19 nt, Artificial Sequence
  Description of Artificial Sequence: Synthetic oligonucleotide
  Antisense strand to SEQ ID NO: 76500
auuuaaggaaccaucauaa

SEQ ID NO: 76582 - RNA, 19 nt, Artificial Sequence
  Description of Artificial Sequence: Synthetic oligonucleotide
  Sense strand starting at position 3680 of SEQ ID NO: 958
auuuauguguccuagauau

SEQ ID NO: 76583 - RNA, 19 nt, Artificial Sequence
  Description of Artificial Sequence: Synthetic oligonucleotide
  Antisense strand to SEQ ID NO: 76502
auaucuaggacacauaaau

SEQ ID NO: 76584 - RNA, 19 nt, Artificial Sequence
  Description of Artificial Sequence: Synthetic oligonucleotide
  Sense strand starting at position 3682 of SEQ ID NO: 958
uuauguguccuagauauua

SEQ ID NO: 76585 - RNA, 19 nt, Artificial Sequence
  Description of Artificial Sequence: Synthetic oligonucleotide
  Antisense strand to SEQ ID NO: 76504
uaauaucuaggacacauaa

SEQ ID NO: 76586 - RNA, 19 nt, Artificial Sequence
  Description of Artificial Sequence: Synthetic oligonucleotide
  Sense strand starting at position 3788 of SEQ ID NO: 958
uauaguagaucuguaacag

SEQ ID NO: 76587 - RNA, 19 nt, Artificial Sequence
  Description of Artificial Sequence: Synthetic oligonucleotide
  Antisense strand to SEQ ID NO: 76506
cuguuacagaucuacuaua

SEQ ID NO: 76588 - RNA, 19 nt, Artificial Sequence
  Description of Artificial Sequence: Synthetic oligonucleotide
  Sense strand starting at position 3789 of SEQ ID NO: 958
auaguagaucuguaacagu

SEQ ID NO: 76589 - RNA, 19 nt, Artificial Sequence
  Description of Artificial Sequence: Synthetic oligonucleotide
  Antisense strand to SEQ ID NO: 76508
acuguuacagaucuacuau

SEQ ID NO: 76590 - RNA, 19 nt, Artificial Sequence
  Description of Artificial Sequence: Synthetic oligonucleotide
  Sense strand starting at position 3803 of SEQ ID NO: 958
acagucacucuuggaacau

SEQ ID NO: 76591 - RNA, 19 nt, Artificial Sequence
  Description of Artificial Sequence: Synthetic oligonucleotide
  Antisense strand to SEQ ID NO: 76510
auguuccaagagugacugu

SEQ ID NO: 76592 - RNA, 19 nt, Artificial Sequence
  Description of Artificial Sequence: Synthetic oligonucleotide
  Sense strand starting at position 3869 of SEQ ID NO: 958
aagaaaguucuauggcuuu

SEQ ID NO: 76593 - RNA, 19 nt, Artificial Sequence
  Description of Artificial Sequence: Synthetic oligonucleotide
  Antisense strand to SEQ ID NO: 76512
aaagccauagaacuuucuu

SEQ ID NO: 76594 - RNA, 19 nt, Artificial Sequence
  Description of Artificial Sequence: Synthetic oligonucleotide
  Sense strand starting at position 3983 of SEQ ID NO: 959
ggcaaugcuauguauugau

SEQ ID NO: 76595 - RNA, 19 nt, Artificial Sequence
  Description of Artificial Sequence: Synthetic oligonucleotide
  Antisense strand to SEQ ID NO: 76514
aucaauacauagcauugcc

SEQ ID NO: 76596 - RNA, 19 nt, Artificial Sequence
  Description of Artificial Sequence: Synthetic oligonucleotide
  Sense strand starting at position 3970 of SEQ ID NO: 959
caaugauauguauggcaau

SEQ ID NO: 76597 - RNA, 19 nt, Artificial Sequence
  Description of Artificial Sequence: Synthetic oligonucleotide
  Antisense strand to SEQ ID NO: 76516
auugccauacauaucauug

SEQ ID NO: 76598 - RNA, 19 nt, Artificial Sequence
  Description of Artificial Sequence: Synthetic oligonucleotide
  Sense strand starting at position 3961 of SEQ ID NO: 959
ggcuuugaacaaugauaug

SEQ ID NO: 76599 - RNA, 19 nt, Artificial Sequence
  Description of Artificial Sequence: Synthetic oligonucleotide
  Antisense strand to SEQ ID NO: 76518
cauaucauuguucaaagcc

SEQ ID NO: 76600 - RNA, 19 nt, Artificial Sequence
  Description of Artificial Sequence: Synthetic oligonucleotide
  Sense strand starting at position 3922 of SEQ ID NO: 959
gucauaaauucuguugaaa

SEQ ID NO: 76601 - RNA, 19 nt, Artificial Sequence
  Description of Artificial Sequence: Synthetic oligonucleotide
  Antisense strand to SEQ ID NO: 76520
uuucaacagaauuuaugac

SEQ ID NO: 76602 - RNA, 19 nt, Artificial Sequence
  Description of Artificial Sequence: Synthetic oligonucleotide
  Sense strand starting at position 3906 of SEQ ID NO: 959
aauuuauucugcgucaguc

SEQ ID NO: 76603 - RNA, 19 nt, Artificial Sequence
  Description of Artificial Sequence: Synthetic oligonucleotide
  Antisense strand to SEQ ID NO: 76522
gacugacgcagaauaaauu

SEQ ID NO: 76604 - RNA, 19 nt, Artificial Sequence
  Description of Artificial Sequence: Synthetic oligonucleotide
  Sense strand starting at position 3905 of SEQ ID NO: 959
caauuuauucugcgucagu

SEQ ID NO: 76605 - RNA, 19 nt, Artificial Sequence
  Description of Artificial Sequence: Synthetic oligonucleotide
  Antisense strand to SEQ ID NO: 76524
acugacgcagaauaaauug

SEQ ID NO: 76606 - RNA, 19 nt, Artificial Sequence
  Description of Artificial Sequence: Synthetic oligonucleotide
  Sense strand starting at position 3822 of SEQ ID NO: 959
agaguaaauuaucagggaa

SEQ ID NO: 76607 - RNA, 19 nt, Artificial Sequence
  Description of Artificial Sequence: Synthetic oligonucleotide
  Antisense strand to SEQ ID NO: 76526
uucccugauaauuuacucu

SEQ ID NO: 76608 - RNA, 19 nt, Artificial Sequence
  Description of Artificial Sequence: Synthetic oligonucleotide
  Sense strand starting at position 3790 of SEQ ID NO: 959
gggcaauuaaguuaugcuu

SEQ ID NO: 76609 - RNA, 19 nt, Artificial Sequence
  Description of Artificial Sequence: Synthetic oligonucleotide
  Antisense strand to SEQ ID NO: 76528
aagcauaacuuaauugccc

SEQ ID NO: 76610 - RNA, 19 nt, Artificial Sequence
  Description of Artificial Sequence: Synthetic oligonucleotide
  Sense strand starting at position 3633 of SEQ ID NO: 959
guaaacauacaugguaaau

SEQ ID NO: 76611 - RNA, 19 nt, Artificial Sequence
  Description of Artificial Sequence: Synthetic oligonucleotide
  Antisense strand to SEQ ID NO: 76530
auuuaccauguauguuuac

SEQ ID NO: 76612 - RNA, 19 nt, Artificial Sequence
  Description of Artificial Sequence: Synthetic oligonucleotide
  Sense strand starting at position 3541 of SEQ ID NO: 959
gaagaccuggucugaaucu

SEQ ID NO: 76613 - RNA, 19 nt, Artificial Sequence
  Description of Artificial Sequence: Synthetic oligonucleotide
  Antisense strand to SEQ ID NO: 76532
agauucagaccaggucuuc

SEQ ID NO: 76614 - RNA, 19 nt, Artificial Sequence
  Description of Artificial Sequence: Synthetic oligonucleotide
  Sense strand starting at position 3537 of SEQ ID NO: 959
aauugaagaccuggucuga

SEQ ID NO: 76615 - RNA, 19 nt, Artificial Sequence
  Description of Artificial Sequence: Synthetic oligonucleotide
  Antisense strand to SEQ ID NO: 76534
ucagaccaggucuucaauu

SEQ ID NO: 76616 - RNA, 19 nt, Artificial Sequence
  Description of Artificial Sequence: Synthetic oligonucleotide
  Sense strand starting at position 3475 of SEQ ID NO: 959
acuuuauaugcuggaacua

SEQ ID NO: 76617 - RNA, 19 nt, Artificial Sequence
  Description of Artificial Sequence: Synthetic oligonucleotide
  Antisense strand to SEQ ID NO: 76536
uaguuccagcauauaaagu

SEQ ID NO: 76618 - RNA, 19 nt, Artificial Sequence
  Description of Artificial Sequence: Synthetic oligonucleotide
  Sense strand starting at position 3472 of SEQ ID NO: 959
gucacuuuauaugcuggaa

SEQ ID NO: 76619 - RNA, 19 nt, Artificial Sequence
  Description of Artificial Sequence: Synthetic oligonucleotide
  Antisense strand to SEQ ID NO: 76538
uuccagcauauaaagugac

SEQ ID NO: 76620 - RNA, 19 nt, Artificial Sequence
  Description of Artificial Sequence: Synthetic oligonucleotide
  Sense strand starting at position 3409 of SEQ ID NO: 959
caguauguacguuugcuau

SEQ ID NO: 76621 - RNA, 19 nt, Artificial Sequence
  Description of Artificial Sequence: Synthetic oligonucleotide
  Antisense strand to SEQ ID NO: 76540
auagcaaacguacauacug

SEQ ID NO: 76622 - RNA, 19 nt, Artificial Sequence
  Description of Artificial Sequence: Synthetic oligonucleotide
  Sense strand starting at position 3274 of SEQ ID NO: 959
ucaugcucugaguaagaaa

SEQ ID NO: 76623 - RNA, 19 nt, Artificial Sequence
  Description of Artificial Sequence: Synthetic oligonucleotide
  Antisense strand to SEQ ID NO: 76542
uuucuuacucagagcauga

SEQ ID NO: 76624 - RNA, 19 nt, Artificial Sequence
  Description of Artificial Sequence: Synthetic oligonucleotide
  Sense strand starting at position 3219 of SEQ ID NO: 959
gggcuagacuauucuuagu

SEQ ID NO: 76625 - RNA, 19 nt, Artificial Sequence
  Description of Artificial Sequence: Synthetic oligonucleotide
  Antisense strand to SEQ ID NO: 76544
acuaagaauagucuagccc

SEQ ID NO: 76626 - RNA, 19 nt, Artificial Sequence
  Description of Artificial Sequence: Synthetic oligonucleotide
  Sense strand starting at position 3198 of SEQ ID NO: 959
gauggcuuaggugauugaa

SEQ ID NO: 76627 - RNA, 19 nt, Artificial Sequence
  Description of Artificial Sequence: Synthetic oligonucleotide
  Antisense strand to SEQ ID NO: 76546
uucaaucaccuaagccauc

SEQ ID NO: 76628 - RNA, 19 nt, Artificial Sequence
  Description of Artificial Sequence: Synthetic oligonucleotide
  Sense strand starting at position 3188 of SEQ ID NO: 959
gguauugauagauggcuua

SEQ ID NO: 76629 - RNA, 19 nt, Artificial Sequence
  Description of Artificial Sequence: Synthetic oligonucleotide
  Antisense strand to SEQ ID NO: 76548
uaagccaucuaucaauacc

SEQ ID NO: 76630 - RNA, 19 nt, Artificial Sequence
  Description of Artificial Sequence: Synthetic oligonucleotide
  Sense strand starting at position 3173 of SEQ ID NO: 959
uuggaagcucuccaaggua

SEQ ID NO: 76631 - RNA, 19 nt, Artificial Sequence
  Description of Artificial Sequence: Synthetic oligonucleotide
  Antisense strand to SEQ ID NO: 76550
uaccuuggagagcuuccaa

SEQ ID NO: 76632 - RNA, 19 nt, Artificial Sequence
  Description of Artificial Sequence: Synthetic oligonucleotide
  Sense strand starting at position 3096 of SEQ ID NO: 959
uuuccuuugucaguugaaa

SEQ ID NO: 76633 - RNA, 19 nt, Artificial Sequence
  Description of Artificial Sequence: Synthetic oligonucleotide
  Antisense strand to SEQ ID NO: 76552
uuucaacugacaaaggaaa

SEQ ID NO: 76634 - RNA, 19 nt, Artificial Sequence
  Description of Artificial Sequence: Synthetic oligonucleotide
  Sense strand starting at position 2955 of SEQ ID NO: 959
gucagugcuccuuaaauaa

SEQ ID NO: 76635 - RNA, 19 nt, Artificial Sequence
  Description of Artificial Sequence: Synthetic oligonucleotide
  Antisense strand to SEQ ID NO: 76554
uuauuuaaggagcacugac

SEQ ID NO: 76636 - RNA, 19 nt, Artificial Sequence
  Description of Artificial Sequence: Synthetic oligonucleotide
  Sense strand starting at position 2771 of SEQ ID NO: 959
aaccgagacucugucucua

SEQ ID NO: 76637 - RNA, 19 nt, Artificial Sequence
  Description of Artificial Sequence: Synthetic oligonucleotide
  Antisense strand to SEQ ID NO: 76556
uagagacagagucucgguu

SEQ ID NO: 76638 - RNA, 19 nt, Artificial Sequence
  Description of Artificial Sequence: Synthetic oligonucleotide
  Sense strand starting at position 2257 of SEQ ID NO: 959
agagguuuaugaccuggca

SEQ ID NO: 76639 - RNA, 19 nt, Artificial Sequence
  Description of Artificial Sequence: Synthetic oligonucleotide
  Antisense strand to SEQ ID NO: 76558
ugccaggucauaaaccucu

SEQ ID NO: 76640 - RNA, 19 nt, Artificial Sequence
  Description of Artificial Sequence: Synthetic oligonucleotide
  Sense strand starting at position 2202 of SEQ ID NO: 959
gccaaucaacgugagacaa

SEQ ID NO: 76641 - RNA, 19 nt, Artificial Sequence
  Description of Artificial Sequence: Synthetic oligonucleotide
  Antisense strand to SEQ ID NO: 76560
uugucucacguugauuggc

SEQ ID NO: 76642 - RNA, 19 nt, Artificial Sequence
  Description of Artificial Sequence: Synthetic oligonucleotide
  Sense strand starting at position 2201 of SEQ ID NO: 959
ggccaaucaacgugagaca

SEQ ID NO: 76643 - RNA, 19 nt, Artificial Sequence
  Description of Artificial Sequence: Synthetic oligonucleotide
  Antisense strand to SEQ ID NO: 76562
ugucucacguugauuggcc

SEQ ID NO: 76644 - RNA, 19 nt, Artificial Sequence
  Description of Artificial Sequence: Synthetic oligonucleotide
  Sense strand starting at position 2192 of SEQ ID NO: 959
gugggcucuggccaaucaa

SEQ ID NO: 76645 - RNA, 19 nt, Artificial Sequence
  Description of Artificial Sequence: Synthetic oligonucleotide
  Antisense strand to SEQ ID NO: 76564
uugauuggccagagcccac

SEQ ID NO: 76646 - RNA, 19 nt, Artificial Sequence
  Description of Artificial Sequence: Synthetic oligonucleotide
  Sense strand starting at position 1420 of SEQ ID NO: 959
cgaauccucugguugagac

SEQ ID NO: 76647 - RNA, 19 nt, Artificial Sequence
  Description of Artificial Sequence: Synthetic oligonucleotide
  Antisense strand to SEQ ID NO: 76566
gucucaaccagaggauucg

SEQ ID NO: 76648 - RNA, 19 nt, Artificial Sequence
  Description of Artificial Sequence: Synthetic oligonucleotide
  Sense strand starting at position 1417 of SEQ ID NO: 959
ggucgaauccucugguuga

SEQ ID NO: 76649 - RNA, 19 nt, Artificial Sequence
  Description of Artificial Sequence: Synthetic oligonucleotide
  Antisense strand to SEQ ID NO: 76568
ucaaccagaggauucgacc

SEQ ID NO: 76650 - RNA, 19 nt, Artificial Sequence
  Description of Artificial Sequence: Synthetic oligonucleotide
  Sense strand starting at position 1171 of SEQ ID NO: 959
agcauugguccgggaacua

SEQ ID NO: 76651 - RNA, 19 nt, Artificial Sequence
  Description of Artificial Sequence: Synthetic oligonucleotide
  Antisense strand to SEQ ID NO: 76570
uaguucccggaccaaugcu

SEQ ID NO: 76652 - RNA, 19 nt, Artificial Sequence
  Description of Artificial Sequence: Synthetic oligonucleotide
  Sense strand starting at position 1169 of SEQ ID NO: 959
ggagcauugguccgggaac

SEQ ID NO: 76653 - RNA, 19 nt, Artificial Sequence
  Description of Artificial Sequence: Synthetic oligonucleotide
  Antisense strand to SEQ ID NO: 76572
guucccggaccaaugcucc

SEQ ID NO: 76654 - RNA, 19 nt, Artificial Sequence
  Description of Artificial Sequence: Synthetic oligonucleotide
  Sense strand starting at position 929 of SEQ ID NO: 959
gacagauaugccuguccag

SEQ ID NO: 76655 - RNA, 19 nt, Artificial Sequence
  Description of Artificial Sequence: Synthetic oligonucleotide
  Antisense strand to SEQ ID NO: 76574
cuggacaggcauaucuguc

SEQ ID NO: 76656 - RNA, 19 nt, Artificial Sequence
  Description of Artificial Sequence: Synthetic oligonucleotide
  Sense strand starting at position 849 of SEQ ID NO: 959
ccugaaugccagcacugau

SEQ ID NO: 76657 - RNA, 19 nt, Artificial Sequence
  Description of Artificial Sequence: Synthetic oligonucleotide
  Antisense strand to SEQ ID NO: 76576
aucagugcuggcauucagg

SEQ ID NO: 76658 - RNA, 19 nt, Artificial Sequence
  Description of Artificial Sequence: Synthetic oligonucleotide
  Sense strand starting at position 824 of SEQ ID NO: 959
uacucaauauggguuaaga

SEQ ID NO: 76659 - RNA, 19 nt, Artificial Sequence
  Description of Artificial Sequence: Synthetic oligonucleotide
  Antisense strand to SEQ ID NO: 76578
ucuuaacccauauugagua

SEQ ID NO: 76660 - RNA, 19 nt, Artificial Sequence
  Description of Artificial Sequence: Synthetic oligonucleotide
  Sense strand starting at position 798 of SEQ ID NO: 959
ccuuguggcucaucaaaca

SEQ ID NO: 76661 - RNA, 19 nt, Artificial Sequence
  Description of Artificial Sequence: Synthetic oligonucleotide
  Antisense strand to SEQ ID NO: 76580
uguuugaugagccacaagg

SEQ ID NO: 76662 - RNA, 19 nt, Artificial Sequence
  Description of Artificial Sequence: Synthetic oligonucleotide
  Sense strand starting at position 672 of SEQ ID NO: 959
ugcauuagaucacuaggga

SEQ ID NO: 76663 - RNA, 19 nt, Artificial Sequence
  Description of Artificial Sequence: Synthetic oligonucleotide
  Antisense strand to SEQ ID NO: 76582
ucccuagugaucuaaugca

SEQ ID NO: 76664 - RNA, 19 nt, Artificial Sequence
  Description of Artificial Sequence: Synthetic oligonucleotide
  Sense strand starting at position 573 of SEQ ID NO: 959
guuauuuacuuacaaagug

SEQ ID NO: 76665 - RNA, 19 nt, Artificial Sequence
  Description of Artificial Sequence: Synthetic oligonucleotide
  Antisense strand to SEQ ID NO: 76584
cacuuuguaaguaaauaac

SEQ ID NO: 76666 - RNA, 19 nt, Artificial Sequence
  Description of Artificial Sequence: Synthetic oligonucleotide
  Sense strand starting at position 506 of SEQ ID NO: 959
gcugaacaguuagcuaauu

SEQ ID NO: 76667 - RNA, 19 nt, Artificial Sequence
  Description of Artificial Sequence: Synthetic oligonucleotide
  Antisense strand to SEQ ID NO: 76586
aauuagcuaacuguucagc

SEQ ID NO: 76668 - RNA, 19 nt, Artificial Sequence
  Description of Artificial Sequence: Synthetic oligonucleotide
  Sense strand starting at position 86 of SEQ ID NO: 959
aucugugauuccuuaucau

SEQ ID NO: 76669 - RNA, 19 nt, Artificial Sequence
  Description of Artificial Sequence: Synthetic oligonucleotide
  Antisense strand to SEQ ID NO: 76588
augauaaggaaucacagau

SEQ ID NO: 76670 - RNA, 19 nt, Artificial Sequence
  Description of Artificial Sequence: Synthetic oligonucleotide
  Sense strand starting at position 82 of SEQ ID NO: 959
uguuaucugugauuccuua

SEQ ID NO: 76671 - RNA, 19 nt, Artificial Sequence
  Description of Artificial Sequence: Synthetic oligonucleotide
  Antisense strand to SEQ ID NO: 76590
uaaggaaucacagauaaca

SEQ ID NO: 76672 - RNA, 19 nt, Artificial Sequence
  Description of Artificial Sequence: Synthetic oligonucleotide
  Sense strand starting at position 76 of SEQ ID NO: 959
uuacucuguuaucugugau

SEQ ID NO: 76673 - RNA, 19 nt, Artificial Sequence
  Description of Artificial Sequence: Synthetic oligonucleotide
  Antisense strand to SEQ ID NO: 76592
aucacagauaacagaguaa

SEQ ID NO: 76674 - RNA, 19 nt, Artificial Sequence
  Description of Artificial Sequence: Synthetic oligonucleotide
  Sense strand starting at position 26 of SEQ ID NO: 960
auuaaaugugaaugagcaa

SEQ ID NO: 76675 - RNA, 19 nt, Artificial Sequence
  Description of Artificial Sequence: Synthetic oligonucleotide
  Antisense strand to SEQ ID NO: 76594
uugcucauucacauuuaau

SEQ ID NO: 76676 - RNA, 19 nt, Artificial Sequence
  Description of Artificial Sequence: Synthetic oligonucleotide
  Sense strand starting at position 38 of SEQ ID NO: 960
ugagcaauuuaaugcaaug

SEQ ID NO: 76677 - RNA, 19 nt, Artificial Sequence
  Description of Artificial Sequence: Synthetic oligonucleotide
  Antisense strand to SEQ ID NO: 76596
cauugcauuaaauugcuca

SEQ ID NO: 76678 - RNA, 19 nt, Artificial Sequence
  Description of Artificial Sequence: Synthetic oligonucleotide
  Sense strand starting at position 510 of SEQ ID NO: 960
aacagaguauuugagacuu

SEQ ID NO: 76679 - RNA, 19 nt, Artificial Sequence
  Description of Artificial Sequence: Synthetic oligonucleotide
  Antisense strand to SEQ ID NO: 76598
aagucucaaauacucuguu

SEQ ID NO: 76680 - RNA, 19 nt, Artificial Sequence
  Description of Artificial Sequence: Synthetic oligonucleotide
  Sense strand starting at position 586 of SEQ ID NO: 960
augggaguccucugcaacu

SEQ ID NO: 76681 - RNA, 19 nt, Artificial Sequence
  Description of Artificial Sequence: Synthetic oligonucleotide
  Antisense strand to SEQ ID NO: 76600
aguugcagaggacucccau

SEQ ID NO: 76682 - RNA, 19 nt, Artificial Sequence
  Description of Artificial Sequence: Synthetic oligonucleotide
  Sense strand starting at position 783 of SEQ ID NO: 960
aaacguagaggucgauauu

SEQ ID NO: 76683 - RNA, 19 nt, Artificial Sequence
  Description of Artificial Sequence: Synthetic oligonucleotide
  Antisense strand to SEQ ID NO: 76602
aauaucgaccucuacguuu

SEQ ID NO: 76684 - RNA, 19 nt, Artificial Sequence
  Description of Artificial Sequence: Synthetic oligonucleotide
  Sense strand starting at position 786 of SEQ ID NO: 960
cguagaggucgauauugca

SEQ ID NO: 76685 - RNA, 19 nt, Artificial Sequence
  Description of Artificial Sequence: Synthetic oligonucleotide
  Antisense strand to SEQ ID NO: 76604
ugcaauaucgaccucuacg

SEQ ID NO: 76686 - RNA, 19 nt, Artificial Sequence
  Description of Artificial Sequence: Synthetic oligonucleotide
  Sense strand starting at position 817 of SEQ ID NO: 960
ugaguaggguccugauuug

SEQ ID NO: 76687 - RNA, 19 nt, Artificial Sequence
  Description of Artificial Sequence: Synthetic oligonucleotide
  Antisense strand to SEQ ID NO: 76606
caaaucaggacccuacuca

SEQ ID NO: 76688 - RNA, 19 nt, Artificial Sequence
  Description of Artificial Sequence: Synthetic oligonucleotide
  Sense strand starting at position 1165 of SEQ ID NO: 960
acaggugcccaccauauau

SEQ ID NO: 76689 - RNA, 19 nt, Artificial Sequence
  Description of Artificial Sequence: Synthetic oligonucleotide
  Antisense strand to SEQ ID NO: 76608
auauauggugggcaccugu

SEQ ID NO: 76690 - RNA, 19 nt, Artificial Sequence
  Description of Artificial Sequence: Synthetic oligonucleotide
  Sense strand starting at position 1579 of SEQ ID NO: 960
gaaguuguguguccggaac

SEQ ID NO: 76691 - RNA, 19 nt, Artificial Sequence
  Description of Artificial Sequence: Synthetic oligonucleotide
  Antisense strand to SEQ ID NO: 76610
guuccggacacacaacuuc

SEQ ID NO: 76692 - RNA, 19 nt, Artificial Sequence
  Description of Artificial Sequence: Synthetic oligonucleotide
  Sense strand starting at position 1646 of SEQ ID NO: 960
ggaagaguuuacuaaagag

SEQ ID NO: 76693 - RNA, 19 nt, Artificial Sequence
  Description of Artificial Sequence: Synthetic oligonucleotide
  Antisense strand to SEQ ID NO: 76612
cucuuuaguaaacucuucc

SEQ ID NO: 76694 - RNA, 19 nt, Artificial Sequence
  Description of Artificial Sequence: Synthetic oligonucleotide
  Sense strand starting at position 1679 of SEQ ID NO: 960
agaaccuauuuacguuaaa

SEQ ID NO: 76695 - RNA, 19 nt, Artificial Sequence
  Description of Artificial Sequence: Synthetic oligonucleotide
  Antisense strand to SEQ ID NO: 76614
uuuaacguaaauagguucu

SEQ ID NO: 76696 - RNA, 19 nt, Artificial Sequence
  Description of Artificial Sequence: Synthetic oligonucleotide
  Sense strand starting at position 1721 of SEQ ID NO: 960
ccugaauucgccguccgua

SEQ ID NO: 76697 - RNA, 19 nt, Artificial Sequence
  Description of Artificial Sequence: Synthetic oligonucleotide
  Antisense strand to SEQ ID NO: 76616
uacggacggcgaauucagg

SEQ ID NO: 76698 - RNA, 19 nt, Artificial Sequence
  Description of Artificial Sequence: Synthetic oligonucleotide
  Sense strand starting at position 1751 of SEQ ID NO: 960
ucaagaaccucuguugaca

SEQ ID NO: 76699 - RNA, 19 nt, Artificial Sequence
  Description of Artificial Sequence: Synthetic oligonucleotide
  Antisense strand to SEQ ID NO: 76618
ugucaacagagguucuuga

SEQ ID NO: 76700 - RNA, 19 nt, Artificial Sequence
  Description of Artificial Sequence: Synthetic oligonucleotide
  Sense strand starting at position 1764 of SEQ ID NO: 960
uugacaaguaaguggguau

SEQ ID NO: 76701 - RNA, 19 nt, Artificial Sequence
  Description of Artificial Sequence: Synthetic oligonucleotide
  Antisense strand to SEQ ID NO: 76620
auacccacuuacuugucaa

SEQ ID NO: 76702 - RNA, 19 nt, Artificial Sequence
  Description of Artificial Sequence: Synthetic oligonucleotide
  Sense strand starting at position 1765 of SEQ ID NO: 960
ugacaaguaaguggguaua

SEQ ID NO: 76703 - RNA, 19 nt, Artificial Sequence
  Description of Artificial Sequence: Synthetic oligonucleotide
  Antisense strand to SEQ ID NO: 76622
uauacccacuuacuuguca

SEQ ID NO: 76704 - RNA, 19 nt, Artificial Sequence
  Description of Artificial Sequence: Synthetic oligonucleotide
  Sense strand starting at position 1767 of SEQ ID NO: 960
acaaguaaguggguauaca

SEQ ID NO: 76705 - RNA, 19 nt, Artificial Sequence
  Description of Artificial Sequence: Synthetic oligonucleotide
  Antisense strand to SEQ ID NO: 76624
uguauacccacuuacuugu

SEQ ID NO: 76706 - RNA, 19 nt, Artificial Sequence
  Description of Artificial Sequence: Synthetic oligonucleotide
  Sense strand starting at position 1768 of SEQ ID NO: 960
caaguaaguggguauacau

SEQ ID NO: 76707 - RNA, 19 nt, Artificial Sequence
  Description of Artificial Sequence: Synthetic oligonucleotide
  Antisense strand to SEQ ID NO: 76626
auguauacccacuuacuug

SEQ ID NO: 76708 - RNA, 19 nt, Artificial Sequence
  Description of Artificial Sequence: Synthetic oligonucleotide
  Sense strand starting at position 2609 of SEQ ID NO: 960
gcagucuucuacuuagcca

SEQ ID NO: 76709 - RNA, 19 nt, Artificial Sequence
  Description of Artificial Sequence: Synthetic oligonucleotide
  Antisense strand to SEQ ID NO: 76628
uggcuaaguagaagacugc

SEQ ID NO: 76710 - RNA, 19 nt, Artificial Sequence
  Description of Artificial Sequence: Synthetic oligonucleotide
  Sense strand starting at position 2623 of SEQ ID NO: 960
agccacuuccacuguguua

SEQ ID NO: 76711 - RNA, 19 nt, Artificial Sequence
  Description of Artificial Sequence: Synthetic oligonucleotide
  Antisense strand to SEQ ID NO: 76630
uaacacaguggaaguggcu

SEQ ID NO: 76712 - RNA, 19 nt, Artificial Sequence
  Description of Artificial Sequence: Synthetic oligonucleotide
  Sense strand starting at position 2652 of SEQ ID NO: 960
gacaauggauagcuuugaa

SEQ ID NO: 76713 - RNA, 19 nt, Artificial Sequence
  Description of Artificial Sequence: Synthetic oligonucleotide
  Antisense strand to SEQ ID NO: 76632
uucaaagcuauccauuguc

SEQ ID NO: 76714 - RNA, 19 nt, Artificial Sequence
  Description of Artificial Sequence: Synthetic oligonucleotide
  Sense strand starting at position 2655 of SEQ ID NO: 960
aauggauagcuuugaaugu

SEQ ID NO: 76715 - RNA, 19 nt, Artificial Sequence
  Description of Artificial Sequence: Synthetic oligonucleotide
  Antisense strand to SEQ ID NO: 76634
acauucaaagcuauccauu

SEQ ID NO: 76716 - RNA, 19 nt, Artificial Sequence
  Description of Artificial Sequence: Synthetic oligonucleotide
  Sense strand starting at position 2659 of SEQ ID NO: 960
gauagcuuugaauguaauu

SEQ ID NO: 76717 - RNA, 19 nt, Artificial Sequence
  Description of Artificial Sequence: Synthetic oligonucleotide
  Antisense strand to SEQ ID NO: 76636
aauuacauucaaagcuauc

SEQ ID NO: 76718 - RNA, 19 nt, Artificial Sequence
  Description of Artificial Sequence: Synthetic oligonucleotide
  Sense strand starting at position 2671 of SEQ ID NO: 960
uguaauuugucucauuuag

SEQ ID NO: 76719 - RNA, 19 nt, Artificial Sequence
  Description of Artificial Sequence: Synthetic oligonucleotide
  Antisense strand to SEQ ID NO: 76638
cuaaaugagacaaauuaca

SEQ ID NO: 76720 - RNA, 19 nt, Artificial Sequence
  Description of Artificial Sequence: Synthetic oligonucleotide
  Sense strand starting at position 2704 of SEQ ID NO: 960
cagaguggguagguauuaa

SEQ ID NO: 76721 - RNA, 19 nt, Artificial Sequence
  Description of Artificial Sequence: Synthetic oligonucleotide
  Antisense strand to SEQ ID NO: 76640
uuaauaccuacccacucug

SEQ ID NO: 76722 - RNA, 19 nt, Artificial Sequence
  Description of Artificial Sequence: Synthetic oligonucleotide
  Sense strand starting at position 2714 of SEQ ID NO: 960
agguauuaauaguuggaga

SEQ ID NO: 76723 - RNA, 19 nt, Artificial Sequence
  Description of Artificial Sequence: Synthetic oligonucleotide
  Antisense strand to SEQ ID NO: 76642
ucuccaacuauuaauaccu

SEQ ID NO: 76724 - RNA, 19 nt, Artificial Sequence
  Description of Artificial Sequence: Synthetic oligonucleotide
  Sense strand starting at position 2715 of SEQ ID NO: 960
gguauuaauaguuggagau

SEQ ID NO: 76725 - RNA, 19 nt, Artificial Sequence
  Description of Artificial Sequence: Synthetic oligonucleotide
  Antisense strand to SEQ ID NO: 76644
aucuccaacuauuaauacc

SEQ ID NO: 76726 - RNA, 19 nt, Artificial Sequence
  Description of Artificial Sequence: Synthetic oligonucleotide
  Sense strand starting at position 2716 of SEQ ID NO: 960
guauuaauaguuggagauu

SEQ ID NO: 76727 - RNA, 19 nt, Artificial Sequence
  Description of Artificial Sequence: Synthetic oligonucleotide
  Antisense strand to SEQ ID NO: 76646
aaucuccaacuauuaauac

SEQ ID NO: 76728 - RNA, 19 nt, Artificial Sequence
  Description of Artificial Sequence: Synthetic oligonucleotide
  Sense strand starting at position 2725 of SEQ ID NO: 960
guuggagauuauucaguag

SEQ ID NO: 76729 - RNA, 19 nt, Artificial Sequence
  Description of Artificial Sequence: Synthetic oligonucleotide
  Antisense strand to SEQ ID NO: 76648
cuacugaauaaucuccaac

SEQ ID NO: 76730 - RNA, 19 nt, Artificial Sequence
  Description of Artificial Sequence: Synthetic oligonucleotide
  Sense strand starting at position 2742 of SEQ ID NO: 960
aguacaagcuucuuaguuu

SEQ ID NO: 76731 - RNA, 19 nt, Artificial Sequence
  Description of Artificial Sequence: Synthetic oligonucleotide
  Antisense strand to SEQ ID NO: 76650
aaacuaagaagcuuguacu

SEQ ID NO: 76732 - RNA, 19 nt, Artificial Sequence
  Description of Artificial Sequence: Synthetic oligonucleotide
  Sense strand starting at position 2748 of SEQ ID NO: 960
agcuucuuaguuuacagau

SEQ ID NO: 76733 - RNA, 19 nt, Artificial Sequence
  Description of Artificial Sequence: Synthetic oligonucleotide
  Antisense strand to SEQ ID NO: 76652
aucuguaaacuaagaagcu

SEQ ID NO: 76734 - RNA, 19 nt, Artificial Sequence
  Description of Artificial Sequence: Synthetic oligonucleotide
  Sense strand starting at position 2787 of SEQ ID NO: 960
uucuuaccaguguaaacau

SEQ ID NO: 76735 - RNA, 19 nt, Artificial Sequence
  Description of Artificial Sequence: Synthetic oligonucleotide
  Antisense strand to SEQ ID NO: 76654
auguuuacacugguaagaa

SEQ ID NO: 76736 - RNA, 19 nt, Artificial Sequence
  Description of Artificial Sequence: Synthetic oligonucleotide
  Sense strand starting at position 2916 of SEQ ID NO: 960
aaaguuauguuggcuagau

SEQ ID NO: 76737 - RNA, 19 nt, Artificial Sequence
  Description of Artificial Sequence: Synthetic oligonucleotide
  Antisense strand to SEQ ID NO: 76656
aucuagccaacauaacuuu

SEQ ID NO: 76738 - RNA, 19 nt, Artificial Sequence
  Description of Artificial Sequence: Synthetic oligonucleotide
  Sense strand starting at position 2917 of SEQ ID NO: 960
aaguuauguuggcuagaug

SEQ ID NO: 76739 - RNA, 19 nt, Artificial Sequence
  Description of Artificial Sequence: Synthetic oligonucleotide
  Antisense strand to SEQ ID NO: 76658
caucuagccaacauaacuu

SEQ ID NO: 76740 - RNA, 19 nt, Artificial Sequence
  Description of Artificial Sequence: Synthetic oligonucleotide
  Sense strand starting at position 2918 of SEQ ID NO: 960
aguuauguuggcuagaugu

SEQ ID NO: 76741 - RNA, 19 nt, Artificial Sequence
  Description of Artificial Sequence: Synthetic oligonucleotide
  Antisense strand to SEQ ID NO: 76660
acaucuagccaacauaacu

SEQ ID NO: 76742 - RNA, 19 nt, Artificial Sequence
  Description of Artificial Sequence: Synthetic oligonucleotide
  Sense strand starting at position 3546 of SEQ ID NO: 960
gcgcccagcccuuaauaua

SEQ ID NO: 76743 - RNA, 19 nt, Artificial Sequence
  Description of Artificial Sequence: Synthetic oligonucleotide
  Antisense strand to SEQ ID NO: 76662
uauauuaagggcugggcgc

SEQ ID NO: 76744 - RNA, 19 nt, Artificial Sequence
  Description of Artificial Sequence: Synthetic oligonucleotide
  Sense strand starting at position 3585 of SEQ ID NO: 960
cuuucuguagucuguuaag

SEQ ID NO: 76745 - RNA, 19 nt, Artificial Sequence
  Description of Artificial Sequence: Synthetic oligonucleotide
  Antisense strand to SEQ ID NO: 76664
cuuaacagacuacagaaag

SEQ ID NO: 76746 - RNA, 19 nt, Artificial Sequence
  Description of Artificial Sequence: Synthetic oligonucleotide
  Sense strand starting at position 3599 of SEQ ID NO: 960
uuaagugugcaggagcaua

SEQ ID NO: 76747 - RNA, 19 nt, Artificial Sequence
  Description of Artificial Sequence: Synthetic oligonucleotide
  Antisense strand to SEQ ID NO: 76666
uaugcuccugcacacuuaa

SEQ ID NO: 76748 - RNA, 19 nt, Artificial Sequence
  Description of Artificial Sequence: Synthetic oligonucleotide
  Sense strand starting at position 3610 of SEQ ID NO: 960
ggagcauaaugucuagaaa

SEQ ID NO: 76749 - RNA, 19 nt, Artificial Sequence
  Description of Artificial Sequence: Synthetic oligonucleotide
  Antisense strand to SEQ ID NO: 76668
uuucuagacauuaugcucc

SEQ ID NO: 76750 - RNA, 19 nt, Artificial Sequence
  Description of Artificial Sequence: Synthetic oligonucleotide
  Sense strand starting at position 3613 of SEQ ID NO: 960
gcauaaugucuagaaacac

SEQ ID NO: 76751 - RNA, 19 nt, Artificial Sequence
  Description of Artificial Sequence: Synthetic oligonucleotide
  Antisense strand to SEQ ID NO: 76670
guguuucuagacauuaugc

SEQ ID NO: 76752 - RNA, 19 nt, Artificial Sequence
  Description of Artificial Sequence: Synthetic oligonucleotide
  Sense strand starting at position 3936 of SEQ ID NO: 960
gcugcuacuuugucaacua

SEQ ID NO: 76753 - RNA, 19 nt, Artificial Sequence
  Description of Artificial Sequence: Synthetic oligonucleotide
  Antisense strand to SEQ ID NO: 76672
uaguugacaaaguagcagc

SEQ ID NO: 76754 - RNA, 19 nt, Artificial Sequence
  Description of Artificial Sequence: Synthetic oligonucleotide
  Sense strand starting at position 134 of SEQ ID NO: 961
gucugaguuuacuuguggu

SEQ ID NO: 76755 - RNA, 19 nt, Artificial Sequence
  Description of Artificial Sequence: Synthetic oligonucleotide
  Antisense strand to SEQ ID NO: 76674
accacaaguaaacucagac

SEQ ID NO: 76756 - RNA, 19 nt, Artificial Sequence
  Description of Artificial Sequence: Synthetic oligonucleotide
  Sense strand starting at position 140 of SEQ ID NO: 961
guuuacuugugguuuacau

SEQ ID NO: 76757 - RNA, 19 nt, Artificial Sequence
  Description of Artificial Sequence: Synthetic oligonucleotide
  Antisense strand to SEQ ID NO: 76676
auguaaaccacaaguaaac

SEQ ID NO: 76758 - RNA, 19 nt, Artificial Sequence
  Description of Artificial Sequence: Synthetic oligonucleotide
  Sense strand starting at position 169 of SEQ ID NO: 961
ugaacaucagcuugcuuaa

SEQ ID NO: 76759 - RNA, 19 nt, Artificial Sequence
  Description of Artificial Sequence: Synthetic oligonucleotide
  Antisense strand to SEQ ID NO: 76678
uuaagcaagcugauguuca

SEQ ID NO: 76760 - RNA, 19 nt, Artificial Sequence
  Description of Artificial Sequence: Synthetic oligonucleotide
  Sense strand starting at position 223 of SEQ ID NO: 961
ugucaagggaaaugcuuaa

SEQ ID NO: 76761 - RNA, 19 nt, Artificial Sequence
  Description of Artificial Sequence: Synthetic oligonucleotide
  Antisense strand to SEQ ID NO: 76680
uuaagcauuucccuugaca

SEQ ID NO: 76762 - RNA, 19 nt, Artificial Sequence
  Description of Artificial Sequence: Synthetic oligonucleotide
  Sense strand starting at position 268 of SEQ ID NO: 961
agagucucagucuggagua

SEQ ID NO: 76763 - RNA, 19 nt, Artificial Sequence
  Description of Artificial Sequence: Synthetic oligonucleotide
  Antisense strand to SEQ ID NO: 76682
uacuccagacugagacucu

SEQ ID NO: 76764 - RNA, 19 nt, Artificial Sequence
  Description of Artificial Sequence: Synthetic oligonucleotide
  Sense strand starting at position 609 of SEQ ID NO: 961
uuaagagaaggcuguagaa

SEQ ID NO: 76765 - RNA, 19 nt, Artificial Sequence
  Description of Artificial Sequence: Synthetic oligonucleotide
  Antisense strand to SEQ ID NO: 76684
uucuacagccuucucuuaa

SEQ ID NO: 76766 - RNA, 19 nt, Artificial Sequence
  Description of Artificial Sequence: Synthetic oligonucleotide
  Sense strand starting at position 631 of SEQ ID NO: 961
ugaggaguuuaacaacgua

SEQ ID NO: 76767 - RNA, 19 nt, Artificial Sequence
  Description of Artificial Sequence: Synthetic oligonucleotide
  Antisense strand to SEQ ID NO: 76686
uacguuguuaaacuccuca

SEQ ID NO: 76768 - RNA, 19 nt, Artificial Sequence
  Description of Artificial Sequence: Synthetic oligonucleotide
  Sense strand starting at position 652 of SEQ ID NO: 961
ucaguuuacugauauccuu

SEQ ID NO: 76769 - RNA, 19 nt, Artificial Sequence
  Description of Artificial Sequence: Synthetic oligonucleotide
  Antisense strand to SEQ ID NO: 76688
aaggauaucaguaaacuga

SEQ ID NO: 76770 - RNA, 19 nt, Artificial Sequence
  Description of Artificial Sequence: Synthetic oligonucleotide
  Sense strand starting at position 655 of SEQ ID NO: 961
guuuacugauauccuugau

SEQ ID NO: 76771 - RNA, 19 nt, Artificial Sequence
  Description of Artificial Sequence: Synthetic oligonucleotide
  Antisense strand to SEQ ID NO: 76690
aucaaggauaucaguaaac

SEQ ID NO: 76772 - RNA, 19 nt, Artificial Sequence
  Description of Artificial Sequence: Synthetic oligonucleotide
  Sense strand starting at position 661 of SEQ ID NO: 961
ugauauccuugauaauaug

SEQ ID NO: 76773 - RNA, 19 nt, Artificial Sequence
  Description of Artificial Sequence: Synthetic oligonucleotide
  Antisense strand to SEQ ID NO: 76692
cauauuaucaaggauauca

SEQ ID NO: 76774 - RNA, 19 nt, Artificial Sequence
  Description of Artificial Sequence: Synthetic oligonucleotide
  Sense strand starting at position 737 of SEQ ID NO: 961
ucauuagugaugcgcugaa

SEQ ID NO: 76775 - RNA, 19 nt, Artificial Sequence
  Description of Artificial Sequence: Synthetic oligonucleotide
  Antisense strand to SEQ ID NO: 76694
uucagcgcaucacuaauga

SEQ ID NO: 76776 - RNA, 19 nt, Artificial Sequence
  Description of Artificial Sequence: Synthetic oligonucleotide
  Sense strand starting at position 935 of SEQ ID NO: 961
agugucucaucucaauaaa

SEQ ID NO: 76777 - RNA, 19 nt, Artificial Sequence
  Description of Artificial Sequence: Synthetic oligonucleotide
  Antisense strand to SEQ ID NO: 76696
uuuauugagaugagacacu

SEQ ID NO: 76778 - RNA, 19 nt, Artificial Sequence
  Description of Artificial Sequence: Synthetic oligonucleotide
  Sense strand starting at position 998 of SEQ ID NO: 961
ugaagaguucaguauacgu

SEQ ID NO: 76779 - RNA, 19 nt, Artificial Sequence
  Description of Artificial Sequence: Synthetic oligonucleotide
  Antisense strand to SEQ ID NO: 76698
acguauacugaacucuuca

SEQ ID NO: 76780 - RNA, 19 nt, Artificial Sequence
  Description of Artificial Sequence: Synthetic oligonucleotide
  Sense strand starting at position 1008 of SEQ ID NO: 961
aguauacguucuccacuaa

SEQ ID NO: 76781 - RNA, 19 nt, Artificial Sequence
  Description of Artificial Sequence: Synthetic oligonucleotide
  Antisense strand to SEQ ID NO: 76700
uuaguggagaacguauacu

SEQ ID NO: 76782 - RNA, 19 nt, Artificial Sequence
  Description of Artificial Sequence: Synthetic oligonucleotide
  Sense strand starting at position 1283 of SEQ ID NO: 961
uuuagacguuauuucgaau

SEQ ID NO: 76783 - RNA, 19 nt, Artificial Sequence
  Description of Artificial Sequence: Synthetic oligonucleotide
  Antisense strand to SEQ ID NO: 76702
auucgaaauaacgucuaaa

SEQ ID NO: 76784 - RNA, 19 nt, Artificial Sequence
  Description of Artificial Sequence: Synthetic oligonucleotide
  Sense strand starting at position 1297 of SEQ ID NO: 961
cgaauuggauucucacuuu

SEQ ID NO: 76785 - RNA, 19 nt, Artificial Sequence
  Description of Artificial Sequence: Synthetic oligonucleotide
  Antisense strand to SEQ ID NO: 76704
aaagugagaauccaauucg

SEQ ID NO: 76786 - RNA, 19 nt, Artificial Sequence
  Description of Artificial Sequence: Synthetic oligonucleotide
  Sense strand starting at position 1447 of SEQ ID NO: 961
cccggucacagcuguuaau

SEQ ID NO: 76787 - RNA, 19 nt, Artificial Sequence
  Description of Artificial Sequence: Synthetic oligonucleotide
  Antisense strand to SEQ ID NO: 76706
auuaacagcugugaccggg

SEQ ID NO: 76788 - RNA, 19 nt, Artificial Sequence
  Description of Artificial Sequence: Synthetic oligonucleotide
  Sense strand starting at position 1541 of SEQ ID NO: 961
gacuguaacuuucugacga

SEQ ID NO: 76789 - RNA, 19 nt, Artificial Sequence
  Description of Artificial Sequence: Synthetic oligonucleotide
  Antisense strand to SEQ ID NO: 76708
ucgucagaaaguuacaguc

SEQ ID NO: 76790 - RNA, 19 nt, Artificial Sequence
  Description of Artificial Sequence: Synthetic oligonucleotide
  Sense strand starting at position 3049 of SEQ ID NO: 961
agaguagugacucgggacu

SEQ ID NO: 76791 - RNA, 19 nt, Artificial Sequence
  Description of Artificial Sequence: Synthetic oligonucleotide
  Antisense strand to SEQ ID NO: 76710
agucccgagucacuacucu

SEQ ID NO: 76792 - RNA, 19 nt, Artificial Sequence
  Description of Artificial Sequence: Synthetic oligonucleotide
  Sense strand starting at position 3159 of SEQ ID NO: 961
cgggauucccuuugaauug

SEQ ID NO: 76793 - RNA, 19 nt, Artificial Sequence
  Description of Artificial Sequence: Synthetic oligonucleotide
  Antisense strand to SEQ ID NO: 76712
caauucaaagggaaucccg

SEQ ID NO: 76794 - RNA, 19 nt, Artificial Sequence
  Description of Artificial Sequence: Synthetic oligonucleotide
  Sense strand starting at position 3160 of SEQ ID NO: 961
gggauucccuuugaauugu

SEQ ID NO: 76795 - RNA, 19 nt, Artificial Sequence
  Description of Artificial Sequence: Synthetic oligonucleotide
  Antisense strand to SEQ ID NO: 76714
acaauucaaagggaauccc

SEQ ID NO: 76796 - RNA, 19 nt, Artificial Sequence
  Description of Artificial Sequence: Synthetic oligonucleotide
  Sense strand starting at position 3176 of SEQ ID NO: 961
ugucauauugcguugcuau

SEQ ID NO: 76797 - RNA, 19 nt, Artificial Sequence
  Description of Artificial Sequence: Synthetic oligonucleotide
  Antisense strand to SEQ ID NO: 76716
auagcaacgcaauaugaca

SEQ ID NO: 76798 - RNA, 19 nt, Artificial Sequence
  Description of Artificial Sequence: Synthetic oligonucleotide
  Sense strand starting at position 3187 of SEQ ID NO: 961
guugcuaucagcguacuua

SEQ ID NO: 76799 - RNA, 19 nt, Artificial Sequence
  Description of Artificial Sequence: Synthetic oligonucleotide
  Antisense strand to SEQ ID NO: 76718
uaaguacgcugauagcaac

SEQ ID NO: 76800 - RNA, 19 nt, Artificial Sequence
  Description of Artificial Sequence: Synthetic oligonucleotide
  Sense strand starting at position 3188 of SEQ ID NO: 961
uugcuaucagcguacuuaa

SEQ ID NO: 76801 - RNA, 19 nt, Artificial Sequence
  Description of Artificial Sequence: Synthetic oligonucleotide
  Antisense strand to SEQ ID NO: 76720
uuaaguacgcugauagcaa

SEQ ID NO: 76802 - RNA, 19 nt, Artificial Sequence
  Description of Artificial Sequence: Synthetic oligonucleotide
  Sense strand starting at position 3191 of SEQ ID NO: 961
cuaucagcguacuuaaaca

SEQ ID NO: 76803 - RNA, 19 nt, Artificial Sequence
  Description of Artificial Sequence: Synthetic oligonucleotide
  Antisense strand to SEQ ID NO: 76722
uguuuaaguacgcugauag

SEQ ID NO: 76804 - RNA, 19 nt, Artificial Sequence
  Description of Artificial Sequence: Synthetic oligonucleotide
  Sense strand starting at position 3240 of SEQ ID NO: 961
caaagcuaguuuggaaaga

SEQ ID NO: 76805 - RNA, 19 nt, Artificial Sequence
  Description of Artificial Sequence: Synthetic oligonucleotide
  Antisense strand to SEQ ID NO: 76724
ucuuuccaaacuagcuuug

SEQ ID NO: 76806 - RNA, 19 nt, Artificial Sequence
  Description of Artificial Sequence: Synthetic oligonucleotide
  Sense strand starting at position 3241 of SEQ ID NO: 961
aaagcuaguuuggaaagau

SEQ ID NO: 76807 - RNA, 19 nt, Artificial Sequence
  Description of Artificial Sequence: Synthetic oligonucleotide
  Antisense strand to SEQ ID NO: 76726
aucuuuccaaacuagcuuu

SEQ ID NO: 76808 - RNA, 19 nt, Artificial Sequence
  Description of Artificial Sequence: Synthetic oligonucleotide
  Sense strand starting at position 3245 of SEQ ID NO: 961
cuaguuuggaaagauuguu

SEQ ID NO: 76809 - RNA, 19 nt, Artificial Sequence
  Description of Artificial Sequence: Synthetic oligonucleotide
  Antisense strand to SEQ ID NO: 76728
aacaaucuuuccaaacuag

SEQ ID NO: 76810 - RNA, 19 nt, Artificial Sequence
  Description of Artificial Sequence: Synthetic oligonucleotide
  Sense strand starting at position 3295 of SEQ ID NO: 961
gggacuggguaauaaaugu

SEQ ID NO: 76811 - RNA, 19 nt, Artificial Sequence
  Description of Artificial Sequence: Synthetic oligonucleotide
  Antisense strand to SEQ ID NO: 76730
acauuuauuacccaguccc

SEQ ID NO: 76812 - RNA, 19 nt, Artificial Sequence
  Description of Artificial Sequence: Synthetic oligonucleotide
  Sense strand starting at position 3323 of SEQ ID NO: 961
ccaguagaauugucccaag

SEQ ID NO: 76813 - RNA, 19 nt, Artificial Sequence
  Description of Artificial Sequence: Synthetic oligonucleotide
  Antisense strand to SEQ ID NO: 76732
cuugggacaauucuacugg

SEQ ID NO: 76814 - RNA, 19 nt, Artificial Sequence
  Description of Artificial Sequence: Synthetic oligonucleotide
  Sense strand starting at position 3337 of SEQ ID NO: 961
ccaagcuuacaguagauga

SEQ ID NO: 76815 - RNA, 19 nt, Artificial Sequence
  Description of Artificial Sequence: Synthetic oligonucleotide
  Antisense strand to SEQ ID NO: 76734
ucaucuacuguaagcuugg

SEQ ID NO: 76816 - RNA, 19 nt, Artificial Sequence
  Description of Artificial Sequence: Synthetic oligonucleotide
  Sense strand starting at position 3356 of SEQ ID NO: 961
ccaguacucaaacguaugu

SEQ ID NO: 76817 - RNA, 19 nt, Artificial Sequence
  Description of Artificial Sequence: Synthetic oligonucleotide
  Antisense strand to SEQ ID NO: 76736
acauacguuugaguacugg

SEQ ID NO: 76818 - RNA, 19 nt, Artificial Sequence
  Description of Artificial Sequence: Synthetic oligonucleotide
  Sense strand starting at position 3431 of SEQ ID NO: 961
cugccauuagcauaauugu

SEQ ID NO: 76819 - RNA, 19 nt, Artificial Sequence
  Description of Artificial Sequence: Synthetic oligonucleotide
  Antisense strand to SEQ ID NO: 76738
acaauuaugcuaauggcag

SEQ ID NO: 76820 - RNA, 19 nt, Artificial Sequence
  Description of Artificial Sequence: Synthetic oligonucleotide
  Sense strand starting at position 3524 of SEQ ID NO: 961
cgaggugugcguuaucauu

SEQ ID NO: 76821 - RNA, 19 nt, Artificial Sequence
  Description of Artificial Sequence: Synthetic oligonucleotide
  Antisense strand to SEQ ID NO: 76740
aaugauaacgcacaccucg

SEQ ID NO: 76822 - RNA, 19 nt, Artificial Sequence
  Description of Artificial Sequence: Synthetic oligonucleotide
  Sense strand starting at position 3526 of SEQ ID NO: 961
aggugugcguuaucauuca

SEQ ID NO: 76823 - RNA, 19 nt, Artificial Sequence
  Description of Artificial Sequence: Synthetic oligonucleotide
  Antisense strand to SEQ ID NO: 76742
ugaaugauaacgcacaccu

SEQ ID NO: 76824 - RNA, 19 nt, Artificial Sequence
  Description of Artificial Sequence: Synthetic oligonucleotide
  Sense strand starting at position 3542 of SEQ ID NO: 961
ucauauccugauggcauua

SEQ ID NO: 76825 - RNA, 19 nt, Artificial Sequence
  Description of Artificial Sequence: Synthetic oligonucleotide
  Antisense strand to SEQ ID NO: 76744
uaaugccaucaggauauga

SEQ ID NO: 76826 - RNA, 19 nt, Artificial Sequence
  Description of Artificial Sequence: Synthetic oligonucleotide
  Sense strand starting at position 3638 of SEQ ID NO: 961
ucacucccuucguuguuaa

SEQ ID NO: 76827 - RNA, 19 nt, Artificial Sequence
  Description of Artificial Sequence: Synthetic oligonucleotide
  Antisense strand to SEQ ID NO: 76746
uuaacaacgaagggaguga

SEQ ID NO: 76828 - RNA, 19 nt, Artificial Sequence
  Description of Artificial Sequence: Synthetic oligonucleotide
  Sense strand starting at position 3648 of SEQ ID NO: 961
cguuguuaacguuucuguu

SEQ ID NO: 76829 - RNA, 19 nt, Artificial Sequence
  Description of Artificial Sequence: Synthetic oligonucleotide
  Antisense strand to SEQ ID NO: 76748
aacagaaacguuaacaacg

SEQ ID NO: 76830 - RNA, 19 nt, Artificial Sequence
  Description of Artificial Sequence: Synthetic oligonucleotide
  Sense strand starting at position 3768 of SEQ ID NO: 961
gaagcagacucagaugaga

SEQ ID NO: 76831 - RNA, 19 nt, Artificial Sequence
  Description of Artificial Sequence: Synthetic oligonucleotide
  Antisense strand to SEQ ID NO: 76750
ucucaucugagucugcuuc

SEQ ID NO: 76832 - RNA, 19 nt, Artificial Sequence
  Description of Artificial Sequence: Synthetic oligonucleotide
  Sense strand starting at position 3795 of SEQ ID NO: 961
ggagauguuuccuccucca

SEQ ID NO: 76833 - RNA, 19 nt, Artificial Sequence
  Description of Artificial Sequence: Synthetic oligonucleotide
  Antisense strand to SEQ ID NO: 76752
uggaggaggaaacaucucc

SEQ ID NO: 76834 - RNA, 19 nt, Artificial Sequence
  Description of Artificial Sequence: Synthetic oligonucleotide
  Sense strand starting at position 3893 of SEQ ID NO: 962
ucuccugaguggucuggau

SEQ ID NO: 76835 - RNA, 19 nt, Artificial Sequence
  Description of Artificial Sequence: Synthetic oligonucleotide
  Antisense strand to SEQ ID NO: 76754
auccagaccacucaggaga

SEQ ID NO: 76836 - RNA, 19 nt, Artificial Sequence
  Description of Artificial Sequence: Synthetic oligonucleotide
  Sense strand starting at position 3514 of SEQ ID NO: 962
cucagagucuagccuuagu

SEQ ID NO: 76837 - RNA, 19 nt, Artificial Sequence
  Description of Artificial Sequence: Synthetic oligonucleotide
  Antisense strand to SEQ ID NO: 76756
acuaaggcuagacucugag

SEQ ID NO: 76838 - RNA, 19 nt, Artificial Sequence
  Description of Artificial Sequence: Synthetic oligonucleotide
  Sense strand starting at position 3503 of SEQ ID NO: 962
ccucucaaguccucagagu

SEQ ID NO: 76839 - RNA, 19 nt, Artificial Sequence
  Description of Artificial Sequence: Synthetic oligonucleotide
  Antisense strand to SEQ ID NO: 76758
acucugaggacuugagagg

SEQ ID NO: 76840 - RNA, 19 nt, Artificial Sequence
  Description of Artificial Sequence: Synthetic oligonucleotide
  Sense strand starting at position 3367 of SEQ ID NO: 962
ggauuuacuucgcagguaa

SEQ ID NO: 76841 - RNA, 19 nt, Artificial Sequence
  Description of Artificial Sequence: Synthetic oligonucleotide
  Antisense strand to SEQ ID NO: 76760
uuaccugcgaaguaaaucc

SEQ ID NO: 76842 - RNA, 19 nt, Artificial Sequence
  Description of Artificial Sequence: Synthetic oligonucleotide
  Sense strand starting at position 3366 of SEQ ID NO: 962
uggauuuacuucgcaggua

SEQ ID NO: 76843 - RNA, 19 nt, Artificial Sequence
  Description of Artificial Sequence: Synthetic oligonucleotide
  Antisense strand to SEQ ID NO: 76762
uaccugcgaaguaaaucca

SEQ ID NO: 76844 - RNA, 19 nt, Artificial Sequence
  Description of Artificial Sequence: Synthetic oligonucleotide
  Sense strand starting at position 3284 of SEQ ID NO: 962
agaagagacuuugaggagu

SEQ ID NO: 76845 - RNA, 19 nt, Artificial Sequence
  Description of Artificial Sequence: Synthetic oligonucleotide
  Antisense strand to SEQ ID NO: 76764
acuccucaaagucucuucu

SEQ ID NO: 76846 - RNA, 19 nt, Artificial Sequence
  Description of Artificial Sequence: Synthetic oligonucleotide
  Sense strand starting at position 3268 of SEQ ID NO: 962
uuggguuauuaugucaaga

SEQ ID NO: 76847 - RNA, 19 nt, Artificial Sequence
  Description of Artificial Sequence: Synthetic oligonucleotide
  Antisense strand to SEQ ID NO: 76766
ucuugacauaauaacccaa

SEQ ID NO: 76848 - RNA, 19 nt, Artificial Sequence
  Description of Artificial Sequence: Synthetic oligonucleotide
  Sense strand starting at position 3260 of SEQ ID NO: 962
cagcuuccuuggguuauua

SEQ ID NO: 76849 - RNA, 19 nt, Artificial Sequence
  Description of Artificial Sequence: Synthetic oligonucleotide
  Antisense strand to SEQ ID NO: 76768
uaauaacccaaggaagcug

SEQ ID NO: 76850 - RNA, 19 nt, Artificial Sequence
  Description of Artificial Sequence: Synthetic oligonucleotide
  Sense strand starting at position 3258 of SEQ ID NO: 962
gacagcuuccuuggguuau

SEQ ID NO: 76851 - RNA, 19 nt, Artificial Sequence
  Description of Artificial Sequence: Synthetic oligonucleotide
  Antisense strand to SEQ ID NO: 76770
auaacccaaggaagcuguc

SEQ ID NO: 76852 - RNA, 19 nt, Artificial Sequence
  Description of Artificial Sequence: Synthetic oligonucleotide
  Sense strand starting at position 3165 of SEQ ID NO: 962
ggccuaugacaaugacuuu

SEQ ID NO: 76853 - RNA, 19 nt, Artificial Sequence
  Description of Artificial Sequence: Synthetic oligonucleotide
  Antisense strand to SEQ ID NO: 76772
aaagucauugucauaggcc

SEQ ID NO: 76854 - RNA, 19 nt, Artificial Sequence
  Description of Artificial Sequence: Synthetic oligonucleotide
  Sense strand starting at position 3120 of SEQ ID NO: 962
ggcaguuagaaugguaacu

SEQ ID NO: 76855 - RNA, 19 nt, Artificial Sequence
  Description of Artificial Sequence: Synthetic oligonucleotide
  Antisense strand to SEQ ID NO: 76774
aguuaccauucuaacugcc

SEQ ID NO: 76856 - RNA, 19 nt, Artificial Sequence
  Description of Artificial Sequence: Synthetic oligonucleotide
  Sense strand starting at position 3114 of SEQ ID NO: 962
ggguguggcaguuagaaug

SEQ ID NO: 76857 - RNA, 19 nt, Artificial Sequence
  Description of Artificial Sequence: Synthetic oligonucleotide
  Antisense strand to SEQ ID NO: 76776
cauucuaacugccacaccc

SEQ ID NO: 76858 - RNA, 19 nt, Artificial Sequence
  Description of Artificial Sequence: Synthetic oligonucleotide
  Sense strand starting at position 3105 of SEQ ID NO: 962
uugggauuuggguguggca

SEQ ID NO: 76859 - RNA, 19 nt, Artificial Sequence
  Description of Artificial Sequence: Synthetic oligonucleotide
  Antisense strand to SEQ ID NO: 76778
ugccacacccaaaucccaa

SEQ ID NO: 76860 - RNA, 19 nt, Artificial Sequence
  Description of Artificial Sequence: Synthetic oligonucleotide
  Sense strand starting at position 3079 of SEQ ID NO: 962
cgauauuagacauguguuu

SEQ ID NO: 76861 - RNA, 19 nt, Artificial Sequence
  Description of Artificial Sequence: Synthetic oligonucleotide
  Antisense strand to SEQ ID NO: 76780
aaacacaugucuaauaucg

SEQ ID NO: 76862 - RNA, 19 nt, Artificial Sequence
  Description of Artificial Sequence: Synthetic oligonucleotide
  Sense strand starting at position 3077 of SEQ ID NO: 962
gucgauauuagacaugugu

SEQ ID NO: 76863 - RNA, 19 nt, Artificial Sequence
  Description of Artificial Sequence: Synthetic oligonucleotide
  Antisense strand to SEQ ID NO: 76782
acacaugucuaauaucgac

SEQ ID NO: 76864 - RNA, 19 nt, Artificial Sequence
  Description of Artificial Sequence: Synthetic oligonucleotide
  Sense strand starting at position 3070 of SEQ ID NO: 962
uauacaugucgauauuaga

SEQ ID NO: 76865 - RNA, 19 nt, Artificial Sequence
  Description of Artificial Sequence: Synthetic oligonucleotide
  Antisense strand to SEQ ID NO: 76784
ucuaauaucgacauguaua

SEQ ID NO: 76866 - RNA, 19 nt, Artificial Sequence
  Description of Artificial Sequence: Synthetic oligonucleotide
  Sense strand starting at position 3024 of SEQ ID NO: 962
ucuagauagugggacuaca

SEQ ID NO: 76867 - RNA, 19 nt, Artificial Sequence
  Description of Artificial Sequence: Synthetic oligonucleotide
  Antisense strand to SEQ ID NO: 76786
uguagucccacuaucuaga

SEQ ID NO: 76868 - RNA, 19 nt, Artificial Sequence
  Description of Artificial Sequence: Synthetic oligonucleotide
  Sense strand starting at position 3022 of SEQ ID NO: 962
ugucuagauagugggacua

SEQ ID NO: 76869 - RNA, 19 nt, Artificial Sequence
  Description of Artificial Sequence: Synthetic oligonucleotide
  Antisense strand to SEQ ID NO: 76788
uagucccacuaucuagaca

SEQ ID NO: 76870 - RNA, 19 nt, Artificial Sequence
  Description of Artificial Sequence: Synthetic oligonucleotide
  Sense strand starting at position 3014 of SEQ ID NO: 962
cauuguucugucuagauag

SEQ ID NO: 76871 - RNA, 19 nt, Artificial Sequence
  Description of Artificial Sequence: Synthetic oligonucleotide
  Antisense strand to SEQ ID NO: 76790
cuaucuagacagaacaaug

SEQ ID NO: 76872 - RNA, 19 nt, Artificial Sequence
  Description of Artificial Sequence: Synthetic oligonucleotide
  Sense strand starting at position 3011 of SEQ ID NO: 962
cagcauuguucugucuaga

SEQ ID NO: 76873 - RNA, 19 nt, Artificial Sequence
  Description of Artificial Sequence: Synthetic oligonucleotide
  Antisense strand to SEQ ID NO: 76792
ucuagacagaacaaugcug

SEQ ID NO: 76874 - RNA, 19 nt, Artificial Sequence
  Description of Artificial Sequence: Synthetic oligonucleotide
  Sense strand starting at position 3009 of SEQ ID NO: 962
gccagcauuguucugucua

SEQ ID NO: 76875 - RNA, 19 nt, Artificial Sequence
  Description of Artificial Sequence: Synthetic oligonucleotide
  Antisense strand to SEQ ID NO: 76794
uagacagaacaaugcuggc

SEQ ID NO: 76876 - RNA, 19 nt, Artificial Sequence
  Description of Artificial Sequence: Synthetic oligonucleotide
  Sense strand starting at position 1398 of SEQ ID NO: 962
cggacaagugagugggaaa

SEQ ID NO: 76877 - RNA, 19 nt, Artificial Sequence
  Description of Artificial Sequence: Synthetic oligonucleotide
  Antisense strand to SEQ ID NO: 76796
uuucccacucacuuguccg

SEQ ID NO: 76878 - RNA, 19 nt, Artificial Sequence
  Description of Artificial Sequence: Synthetic oligonucleotide
  Sense strand starting at position 1328 of SEQ ID NO: 962
augcauguuucuguaaguu

SEQ ID NO: 76879 - RNA, 19 nt, Artificial Sequence
  Description of Artificial Sequence: Synthetic oligonucleotide
  Antisense strand to SEQ ID NO: 76798
aacuuacagaaacaugcau

SEQ ID NO: 76880 - RNA, 19 nt, Artificial Sequence
  Description of Artificial Sequence: Synthetic oligonucleotide
  Sense strand starting at position 1233 of SEQ ID NO: 962
ugugcaugugaucagguau

SEQ ID NO: 76881 - RNA, 19 nt, Artificial Sequence
  Description of Artificial Sequence: Synthetic oligonucleotide
  Antisense strand to SEQ ID NO: 76800
auaccugaucacaugcaca

SEQ ID NO: 76882 - RNA, 19 nt, Artificial Sequence
  Description of Artificial Sequence: Synthetic oligonucleotide
  Sense strand starting at position 1232 of SEQ ID NO: 962
augugcaugugaucaggua

SEQ ID NO: 76883 - RNA, 19 nt, Artificial Sequence
  Description of Artificial Sequence: Synthetic oligonucleotide
  Antisense strand to SEQ ID NO: 76802
uaccugaucacaugcacau

SEQ ID NO: 76884 - RNA, 19 nt, Artificial Sequence
  Description of Artificial Sequence: Synthetic oligonucleotide
  Sense strand starting at position 1227 of SEQ ID NO: 962
cucagaugugcaugugauc

SEQ ID NO: 76885 - RNA, 19 nt, Artificial Sequence
  Description of Artificial Sequence: Synthetic oligonucleotide
  Antisense strand to SEQ ID NO: 76804
gaucacaugcacaucugag

SEQ ID NO: 76886 - RNA, 19 nt, Artificial Sequence
  Description of Artificial Sequence: Synthetic oligonucleotide
  Sense strand starting at position 1196 of SEQ ID NO: 962
cgugucuuuccaucuaugu

SEQ ID NO: 76887 - RNA, 19 nt, Artificial Sequence
  Description of Artificial Sequence: Synthetic oligonucleotide
  Antisense strand to SEQ ID NO: 76806
acauagauggaaagacacg

SEQ ID NO: 76888 - RNA, 19 nt, Artificial Sequence
  Description of Artificial Sequence: Synthetic oligonucleotide
  Sense strand starting at position 1128 of SEQ ID NO: 962
ggguguguugugagugcau

SEQ ID NO: 76889 - RNA, 19 nt, Artificial Sequence
  Description of Artificial Sequence: Synthetic oligonucleotide
  Antisense strand to SEQ ID NO: 76808
augcacucacaacacaccc

SEQ ID NO: 76890 - RNA, 19 nt, Artificial Sequence
  Description of Artificial Sequence: Synthetic oligonucleotide
  Sense strand starting at position 1122 of SEQ ID NO: 962
gugaauggguguguuguga

SEQ ID NO: 76891 - RNA, 19 nt, Artificial Sequence
  Description of Artificial Sequence: Synthetic oligonucleotide
  Antisense strand to SEQ ID NO: 76810
ucacaacacacccauucac

SEQ ID NO: 76892 - RNA, 19 nt, Artificial Sequence
  Description of Artificial Sequence: Synthetic oligonucleotide
  Sense strand starting at position 1102 of SEQ ID NO: 962
gcaugaagcucugcacaca

SEQ ID NO: 76893 - RNA, 19 nt, Artificial Sequence
  Description of Artificial Sequence: Synthetic oligonucleotide
  Antisense strand to SEQ ID NO: 76812
ugugugcagagcuucaugc

SEQ ID NO: 76894 - RNA, 19 nt, Artificial Sequence
  Description of Artificial Sequence: Synthetic oligonucleotide
  Sense strand starting at position 1017 of SEQ ID NO: 962
gccaguucugcacaaggau

SEQ ID NO: 76895 - RNA, 19 nt, Artificial Sequence
  Description of Artificial Sequence: Synthetic oligonucleotide
  Antisense strand to SEQ ID NO: 76814
auccuugugcagaacuggc

SEQ ID NO: 76896 - RNA, 19 nt, Artificial Sequence
  Description of Artificial Sequence: Synthetic oligonucleotide
  Sense strand starting at position 970 of SEQ ID NO: 962
guuagauuguggaggcuga

SEQ ID NO: 76897 - RNA, 19 nt, Artificial Sequence
  Description of Artificial Sequence: Synthetic oligonucleotide
  Antisense strand to SEQ ID NO: 76816
ucagccuccacaaucuaac

SEQ ID NO: 76898 - RNA, 19 nt, Artificial Sequence
  Description of Artificial Sequence: Synthetic oligonucleotide
  Sense strand starting at position 938 of SEQ ID NO: 962
ucaucuaguccugaaaggu

SEQ ID NO: 76899 - RNA, 19 nt, Artificial Sequence
  Description of Artificial Sequence: Synthetic oligonucleotide
  Antisense strand to SEQ ID NO: 76818
accuuucaggacuagauga

SEQ ID NO: 76900 - RNA, 19 nt, Artificial Sequence
  Description of Artificial Sequence: Synthetic oligonucleotide
  Sense strand starting at position 499 of SEQ ID NO: 962
uaccgauaacuguaugcuu

SEQ ID NO: 76901 - RNA, 19 nt, Artificial Sequence
  Description of Artificial Sequence: Synthetic oligonucleotide
  Antisense strand to SEQ ID NO: 76820
aagcauacaguuaucggua

SEQ ID NO: 76902 - RNA, 19 nt, Artificial Sequence
  Description of Artificial Sequence: Synthetic oligonucleotide
  Sense strand starting at position 493 of SEQ ID NO: 962
aauguauaccgauaacugu

SEQ ID NO: 76903 - RNA, 19 nt, Artificial Sequence
  Description of Artificial Sequence: Synthetic oligonucleotide
  Antisense strand to SEQ ID NO: 76822
acaguuaucgguauacauu

SEQ ID NO: 76904 - RNA, 19 nt, Artificial Sequence
  Description of Artificial Sequence: Synthetic oligonucleotide
  Sense strand starting at position 391 of SEQ ID NO: 962
gaaccauggcugcauagau

SEQ ID NO: 76905 - RNA, 19 nt, Artificial Sequence
  Description of Artificial Sequence: Synthetic oligonucleotide
  Antisense strand to SEQ ID NO: 76824
aucuaugcagccaugguuc

SEQ ID NO: 76906 - RNA, 19 nt, Artificial Sequence
  Description of Artificial Sequence: Synthetic oligonucleotide
  Sense strand starting at position 366 of SEQ ID NO: 962
uuaguuaauaugugugaag

SEQ ID NO: 76907 - RNA, 19 nt, Artificial Sequence
  Description of Artificial Sequence: Synthetic oligonucleotide
  Antisense strand to SEQ ID NO: 76826
cuucacacauauuaacuaa

SEQ ID NO: 76908 - RNA, 19 nt, Artificial Sequence
  Description of Artificial Sequence: Synthetic oligonucleotide
  Sense strand starting at position 227 of SEQ ID NO: 962
cagaucaccuagguuugaa

SEQ ID NO: 76909 - RNA, 19 nt, Artificial Sequence
  Description of Artificial Sequence: Synthetic oligonucleotide
  Antisense strand to SEQ ID NO: 76828
uucaaaccuaggugaucug

SEQ ID NO: 76910 - RNA, 19 nt, Artificial Sequence
  Description of Artificial Sequence: Synthetic oligonucleotide
  Sense strand starting at position 226 of SEQ ID NO: 962
ucagaucaccuagguuuga

SEQ ID NO: 76911 - RNA, 19 nt, Artificial Sequence
  Description of Artificial Sequence: Synthetic oligonucleotide
  Antisense strand to SEQ ID NO: 76830
ucaaaccuaggugaucuga

SEQ ID NO: 76912 - RNA, 19 nt, Artificial Sequence
  Description of Artificial Sequence: Synthetic oligonucleotide
  Sense strand starting at position 118 of SEQ ID NO: 962
ccugcucagcacugaauau

SEQ ID NO: 76913 - RNA, 19 nt, Artificial Sequence
  Description of Artificial Sequence: Synthetic oligonucleotide
  Antisense strand to SEQ ID NO: 76832
auauucagugcugagcagg

SEQ ID NO: 76914 - RNA, 19 nt, Artificial Sequence
  Description of Artificial Sequence: Synthetic oligonucleotide
  Sense strand starting at position 138 of SEQ ID NO: 963
agggcuguccuccagcuau

SEQ ID NO: 76915 - RNA, 19 nt, Artificial Sequence
  Description of Artificial Sequence: Synthetic oligonucleotide
  Antisense strand to SEQ ID NO: 76834
auagcuggaggacagcccu

SEQ ID NO: 76916 - RNA, 19 nt, Artificial Sequence
  Description of Artificial Sequence: Synthetic oligonucleotide
  Sense strand starting at position 334 of SEQ ID NO: 963
ggugguugccauggugaca

SEQ ID NO: 76917 - RNA, 19 nt, Artificial Sequence
  Description of Artificial Sequence: Synthetic oligonucleotide
  Antisense strand to SEQ ID NO: 76836
ugucaccauggcaaccacc

SEQ ID NO: 76918 - RNA, 19 nt, Artificial Sequence
  Description of Artificial Sequence: Synthetic oligonucleotide
  Sense strand starting at position 337 of SEQ ID NO: 963
gguugccauggugacaaua

SEQ ID NO: 76919 - RNA, 19 nt, Artificial Sequence
  Description of Artificial Sequence: Synthetic oligonucleotide
  Antisense strand to SEQ ID NO: 76838
uauugucaccauggcaacc

SEQ ID NO: 76920 - RNA, 19 nt, Artificial Sequence
  Description of Artificial Sequence: Synthetic oligonucleotide
  Sense strand starting at position 349 of SEQ ID NO: 963
gacaauagcucccugguca

SEQ ID NO: 76921 - RNA, 19 nt, Artificial Sequence
  Description of Artificial Sequence: Synthetic oligonucleotide
  Antisense strand to SEQ ID NO: 76840
ugaccagggagcuauuguc

SEQ ID NO: 76922 - RNA, 19 nt, Artificial Sequence
  Description of Artificial Sequence: Synthetic oligonucleotide
  Sense strand starting at position 602 of SEQ ID NO: 963
uaccuaggcugguuaagaa

SEQ ID NO: 76923 - RNA, 19 nt, Artificial Sequence
  Description of Artificial Sequence: Synthetic oligonucleotide
  Antisense strand to SEQ ID NO: 76842
uucuuaaccagccuaggua

SEQ ID NO: 76924 - RNA, 19 nt, Artificial Sequence
  Description of Artificial Sequence: Synthetic oligonucleotide
  Sense strand starting at position 620 of SEQ ID NO: 963
aggaaugugucuucaguga

SEQ ID NO: 76925 - RNA, 19 nt, Artificial Sequence
  Description of Artificial Sequence: Synthetic oligonucleotide
  Antisense strand to SEQ ID NO: 76844
ucacugaagacacauuccu

SEQ ID NO: 76926 - RNA, 19 nt, Artificial Sequence
  Description of Artificial Sequence: Synthetic oligonucleotide
  Sense strand starting at position 624 of SEQ ID NO: 963
augugucuucagugaguuc

SEQ ID NO: 76927 - RNA, 19 nt, Artificial Sequence
  Description of Artificial Sequence: Synthetic oligonucleotide
  Antisense strand to SEQ ID NO: 76846
gaacucacugaagacacau

SEQ ID NO: 76928 - RNA, 19 nt, Artificial Sequence
  Description of Artificial Sequence: Synthetic oligonucleotide
  Sense strand starting at position 665 of SEQ ID NO: 963
ggucuccucucuuuaaugu

SEQ ID NO: 76929 - RNA, 19 nt, Artificial Sequence
  Description of Artificial Sequence: Synthetic oligonucleotide
  Antisense strand to SEQ ID NO: 76848
acauuaaagagaggagacc

SEQ ID NO: 76930 - RNA, 19 nt, Artificial Sequence
  Description of Artificial Sequence: Synthetic oligonucleotide
  Sense strand starting at position 674 of SEQ ID NO: 963
ucuuuaauguccucuuggu

SEQ ID NO: 76931 - RNA, 19 nt, Artificial Sequence
  Description of Artificial Sequence: Synthetic oligonucleotide
  Antisense strand to SEQ ID NO: 76850
accaagaggacauuaaaga

SEQ ID NO: 76932 - RNA, 19 nt, Artificial Sequence
  Description of Artificial Sequence: Synthetic oligonucleotide
  Sense strand starting at position 740 of SEQ ID NO: 963
gugccagaaggcuguucaa

SEQ ID NO: 76933 - RNA, 19 nt, Artificial Sequence
  Description of Artificial Sequence: Synthetic oligonucleotide
  Antisense strand to SEQ ID NO: 76852
uugaacagccuucuggcac

SEQ ID NO: 76934 - RNA, 19 nt, Artificial Sequence
  Description of Artificial Sequence: Synthetic oligonucleotide
  Sense strand starting at position 772 of SEQ ID NO: 963
agucuacccucucuguuau

SEQ ID NO: 76935 - RNA, 19 nt, Artificial Sequence
  Description of Artificial Sequence: Synthetic oligonucleotide
  Antisense strand to SEQ ID NO: 76854
auaacagagaggguagacu

SEQ ID NO: 76936 - RNA, 19 nt, Artificial Sequence
  Description of Artificial Sequence: Synthetic oligonucleotide
  Sense strand starting at position 773 of SEQ ID NO: 963
gucuacccucucuguuaua

SEQ ID NO: 76937 - RNA, 19 nt, Artificial Sequence
  Description of Artificial Sequence: Synthetic oligonucleotide
  Antisense strand to SEQ ID NO: 76856
uauaacagagaggguagac

SEQ ID NO: 76938 - RNA, 19 nt, Artificial Sequence
  Description of Artificial Sequence: Synthetic oligonucleotide
  Sense strand starting at position 825 of SEQ ID NO: 963
gagugacuuggccaaaguc

SEQ ID NO: 76939 - RNA, 19 nt, Artificial Sequence
  Description of Artificial Sequence: Synthetic oligonucleotide
  Antisense strand to SEQ ID NO: 76858
gacuuuggccaagucacuc

SEQ ID NO: 76940 - RNA, 19 nt, Artificial Sequence
  Description of Artificial Sequence: Synthetic oligonucleotide
  Sense strand starting at position 841 of SEQ ID NO: 963
gucaaacuuuggcuguaca

SEQ ID NO: 76941 - RNA, 19 nt, Artificial Sequence
  Description of Artificial Sequence: Synthetic oligonucleotide
  Antisense strand to SEQ ID NO: 76860
uguacagccaaaguuugac

SEQ ID NO: 76942 - RNA, 19 nt, Artificial Sequence
  Description of Artificial Sequence: Synthetic oligonucleotide
  Sense strand starting at position 842 of SEQ ID NO: 963
ucaaacuuuggcuguacaa

SEQ ID NO: 76943 - RNA, 19 nt, Artificial Sequence
  Description of Artificial Sequence: Synthetic oligonucleotide
  Antisense strand to SEQ ID NO: 76862
uuguacagccaaaguuuga

SEQ ID NO: 76944 - RNA, 19 nt, Artificial Sequence
  Description of Artificial Sequence: Synthetic oligonucleotide
  Sense strand starting at position 844 of SEQ ID NO: 963
aaacuuuggcuguacaaga

SEQ ID NO: 76945 - RNA, 19 nt, Artificial Sequence
  Description of Artificial Sequence: Synthetic oligonucleotide
  Antisense strand to SEQ ID NO: 76864
ucuuguacagccaaaguuu

SEQ ID NO: 76946 - RNA, 19 nt, Artificial Sequence
  Description of Artificial Sequence: Synthetic oligonucleotide
  Sense strand starting at position 976 of SEQ ID NO: 963
gggagcaaauagucauaca

SEQ ID NO: 76947 - RNA, 19 nt, Artificial Sequence
  Description of Artificial Sequence: Synthetic oligonucleotide
  Antisense strand to SEQ ID NO: 76866
uguaugacuauuugcuccc

SEQ ID NO: 76948 - RNA, 19 nt, Artificial Sequence
  Description of Artificial Sequence: Synthetic oligonucleotide
  Sense strand starting at position 1209 of SEQ ID NO: 963
ucgagacugugaggagaaa

SEQ ID NO: 76949 - RNA, 19 nt, Artificial Sequence
  Description of Artificial Sequence: Synthetic oligonucleotide
  Antisense strand to SEQ ID NO: 76868
uuucuccucacagucucga

SEQ ID NO: 76950 - RNA, 19 nt, Artificial Sequence
  Description of Artificial Sequence: Synthetic oligonucleotide
  Sense strand starting at position 1530 of SEQ ID NO: 963
guguguuugcgcgcgugua

SEQ ID NO: 76951 - RNA, 19 nt, Artificial Sequence
  Description of Artificial Sequence: Synthetic oligonucleotide
  Antisense strand to SEQ ID NO: 76870
uacacgcgcgcaaacacac

SEQ ID NO: 76952 - RNA, 19 nt, Artificial Sequence
  Description of Artificial Sequence: Synthetic oligonucleotide
  Sense strand starting at position 1965 of SEQ ID NO: 963
aggcgacacuauuugcaua

SEQ ID NO: 76953 - RNA, 19 nt, Artificial Sequence
  Description of Artificial Sequence: Synthetic oligonucleotide
  Antisense strand to SEQ ID NO: 76872
uaugcaaauagugucgccu

SEQ ID NO: 76954 - RNA, 19 nt, Artificial Sequence
  Description of Artificial Sequence: Synthetic oligonucleotide
  Sense strand starting at position 1966 of SEQ ID NO: 963
ggcgacacuauuugcauaa

SEQ ID NO: 76955 - RNA, 19 nt, Artificial Sequence
  Description of Artificial Sequence: Synthetic oligonucleotide
  Antisense strand to SEQ ID NO: 76874
uuaugcaaauagugucgcc

SEQ ID NO: 76956 - RNA, 19 nt, Artificial Sequence
  Description of Artificial Sequence: Synthetic oligonucleotide
  Sense strand starting at position 3027 of SEQ ID NO: 963
cuucuaaggaucugucgaa

SEQ ID NO: 76957 - RNA, 19 nt, Artificial Sequence
  Description of Artificial Sequence: Synthetic oligonucleotide
  Antisense strand to SEQ ID NO: 76876
uucgacagauccuuagaag

SEQ ID NO: 76958 - RNA, 19 nt, Artificial Sequence
  Description of Artificial Sequence: Synthetic oligonucleotide
  Sense strand starting at position 3028 of SEQ ID NO: 963
uucuaaggaucugucgaaa

SEQ ID NO: 76959 - RNA, 19 nt, Artificial Sequence
  Description of Artificial Sequence: Synthetic oligonucleotide
  Antisense strand to SEQ ID NO: 76878
uuucgacagauccuuagaa

SEQ ID NO: 76960 - RNA, 19 nt, Artificial Sequence
  Description of Artificial Sequence: Synthetic oligonucleotide
  Sense strand starting at position 3031 of SEQ ID NO: 963
uaaggaucugucgaaaguc

SEQ ID NO: 76961 - RNA, 19 nt, Artificial Sequence
  Description of Artificial Sequence: Synthetic oligonucleotide
  Antisense strand to SEQ ID NO: 76880
gacuuucgacagauccuua

SEQ ID NO: 76962 - RNA, 19 nt, Artificial Sequence
  Description of Artificial Sequence: Synthetic oligonucleotide
  Sense strand starting at position 3204 of SEQ ID NO: 963
uggagcuggucccagaaau

SEQ ID NO: 76963 - RNA, 19 nt, Artificial Sequence
  Description of Artificial Sequence: Synthetic oligonucleotide
  Antisense strand to SEQ ID NO: 76882
auuucugggaccagcucca

SEQ ID NO: 76964 - RNA, 19 nt, Artificial Sequence
  Description of Artificial Sequence: Synthetic oligonucleotide
  Sense strand starting at position 3409 of SEQ ID NO: 963
gcacuauggguuggugacu

SEQ ID NO: 76965 - RNA, 19 nt, Artificial Sequence
  Description of Artificial Sequence: Synthetic oligonucleotide
  Antisense strand to SEQ ID NO: 76884
agucaccaacccauagugc

SEQ ID NO: 76966 - RNA, 19 nt, Artificial Sequence
  Description of Artificial Sequence: Synthetic oligonucleotide
  Sense strand starting at position 3414 of SEQ ID NO: 963
auggguuggugacucauga

SEQ ID NO: 76967 - RNA, 19 nt, Artificial Sequence
  Description of Artificial Sequence: Synthetic oligonucleotide
  Antisense strand to SEQ ID NO: 76886
ucaugagucaccaacccau

SEQ ID NO: 76968 - RNA, 19 nt, Artificial Sequence
  Description of Artificial Sequence: Synthetic oligonucleotide
  Sense strand starting at position 3427 of SEQ ID NO: 963
ucaugaaagacagguguuu

SEQ ID NO: 76969 - RNA, 19 nt, Artificial Sequence
  Description of Artificial Sequence: Synthetic oligonucleotide
  Antisense strand to SEQ ID NO: 76888
aaacaccugucuuucauga

SEQ ID NO: 76970 - RNA, 19 nt, Artificial Sequence
  Description of Artificial Sequence: Synthetic oligonucleotide
  Sense strand starting at position 3429 of SEQ ID NO: 963
augaaagacagguguuuga

SEQ ID NO: 76971 - RNA, 19 nt, Artificial Sequence
  Description of Artificial Sequence: Synthetic oligonucleotide
  Antisense strand to SEQ ID NO: 76890
ucaaacaccugucuuucau

SEQ ID NO: 76972 - RNA, 19 nt, Artificial Sequence
  Description of Artificial Sequence: Synthetic oligonucleotide
  Sense strand starting at position 3537 of SEQ ID NO: 963
accauaauccaaggcguga

SEQ ID NO: 76973 - RNA, 19 nt, Artificial Sequence
  Description of Artificial Sequence: Synthetic oligonucleotide
  Antisense strand to SEQ ID NO: 76892
ucacgccuuggauuauggu

SEQ ID NO: 76974 - RNA, 19 nt, Artificial Sequence
  Description of Artificial Sequence: Synthetic oligonucleotide
  Sense strand starting at position 3541 of SEQ ID NO: 963
uaauccaaggcgugaagaa

SEQ ID NO: 76975 - RNA, 19 nt, Artificial Sequence
  Description of Artificial Sequence: Synthetic oligonucleotide
  Antisense strand to SEQ ID NO: 76894
uucuucacgccuuggauua

SEQ ID NO: 76976 - RNA, 19 nt, Artificial Sequence
  Description of Artificial Sequence: Synthetic oligonucleotide
  Sense strand starting at position 3578 of SEQ ID NO: 963
gguuacuagaagugguauc

SEQ ID NO: 76977 - RNA, 19 nt, Artificial Sequence
  Description of Artificial Sequence: Synthetic oligonucleotide
  Antisense strand to SEQ ID NO: 76896
gauaccacuucuaguaacc

SEQ ID NO: 76978 - RNA, 19 nt, Artificial Sequence
  Description of Artificial Sequence: Synthetic oligonucleotide
  Sense strand starting at position 3579 of SEQ ID NO: 963
guuacuagaagugguaucu

SEQ ID NO: 76979 - RNA, 19 nt, Artificial Sequence
  Description of Artificial Sequence: Synthetic oligonucleotide
  Antisense strand to SEQ ID NO: 76898
agauaccacuucuaguaac

SEQ ID NO: 76980 - RNA, 19 nt, Artificial Sequence
  Description of Artificial Sequence: Synthetic oligonucleotide
  Sense strand starting at position 3700 of SEQ ID NO: 963
ggccucccagucugugaaa

SEQ ID NO: 76981 - RNA, 19 nt, Artificial Sequence
  Description of Artificial Sequence: Synthetic oligonucleotide
  Antisense strand to SEQ ID NO: 76900
uuucacagacugggaggcc

SEQ ID NO: 76982 - RNA, 19 nt, Artificial Sequence
  Description of Artificial Sequence: Synthetic oligonucleotide
  Sense strand starting at position 3701 of SEQ ID NO: 963
gccucccagucugugaaau

SEQ ID NO: 76983 - RNA, 19 nt, Artificial Sequence
  Description of Artificial Sequence: Synthetic oligonucleotide
  Antisense strand to SEQ ID NO: 76902
auuucacagacugggaggc

SEQ ID NO: 76984 - RNA, 19 nt, Artificial Sequence
  Description of Artificial Sequence: Synthetic oligonucleotide
  Sense strand starting at position 3784 of SEQ ID NO: 963
gacugucccuuggacagaa

SEQ ID NO: 76985 - RNA, 19 nt, Artificial Sequence
  Description of Artificial Sequence: Synthetic oligonucleotide
  Antisense strand to SEQ ID NO: 76904
uucuguccaagggacaguc

SEQ ID NO: 76986 - RNA, 19 nt, Artificial Sequence
  Description of Artificial Sequence: Synthetic oligonucleotide
  Sense strand starting at position 3788 of SEQ ID NO: 963
gucccuuggacagaaguau

SEQ ID NO: 76987 - RNA, 19 nt, Artificial Sequence
  Description of Artificial Sequence: Synthetic oligonucleotide
  Antisense strand to SEQ ID NO: 76906
auacuucuguccaagggac

SEQ ID NO: 76988 - RNA, 19 nt, Artificial Sequence
  Description of Artificial Sequence: Synthetic oligonucleotide
  Sense strand starting at position 3870 of SEQ ID NO: 963
ucgagagcuuacuuugugu

SEQ ID NO: 76989 - RNA, 19 nt, Artificial Sequence
  Description of Artificial Sequence: Synthetic oligonucleotide
  Antisense strand to SEQ ID NO: 76908
acacaaaguaagcucucga

SEQ ID NO: 76990 - RNA, 19 nt, Artificial Sequence
  Description of Artificial Sequence: Synthetic oligonucleotide
  Sense strand starting at position 3934 of SEQ ID NO: 963
gggaauaaguuacucaauu

SEQ ID NO: 76991 - RNA, 19 nt, Artificial Sequence
  Description of Artificial Sequence: Synthetic oligonucleotide
  Antisense strand to SEQ ID NO: 76910
aauugaguaacuuauuccc

SEQ ID NO: 76992 - RNA, 19 nt, Artificial Sequence
  Description of Artificial Sequence: Synthetic oligonucleotide
  Sense strand starting at position 3961 of SEQ ID NO: 963
auaagagcucugugaggca

SEQ ID NO: 76993 - RNA, 19 nt, Artificial Sequence
  Description of Artificial Sequence: Synthetic oligonucleotide
  Antisense strand to SEQ ID NO: 76912
ugccucacagagcucuuau

SEQ ID NO: 76994 - RNA, 19 nt, Artificial Sequence
  Description of Artificial Sequence: Synthetic oligonucleotide
  Sense strand starting at position 109 of SEQ ID NO: 964
ggugguugccauggugaca

SEQ ID NO: 76995 - RNA, 19 nt, Artificial Sequence
  Description of Artificial Sequence: Synthetic oligonucleotide
  Antisense strand to SEQ ID NO: 76914
ugucaccauggcaaccacc

SEQ ID NO: 76996 - RNA, 19 nt, Artificial Sequence
  Description of Artificial Sequence: Synthetic oligonucleotide
  Sense strand starting at position 112 of SEQ ID NO: 964
gguugccauggugacaaua

SEQ ID NO: 76997 - RNA, 19 nt, Artificial Sequence
  Description of Artificial Sequence: Synthetic oligonucleotide
  Antisense strand to SEQ ID NO: 76916
uauugucaccauggcaacc

SEQ ID NO: 76998 - RNA, 19 nt, Artificial Sequence
  Description of Artificial Sequence: Synthetic oligonucleotide
  Sense strand starting at position 124 of SEQ ID NO: 964
gacaauagcucccugguca

SEQ ID NO: 76999 - RNA, 19 nt, Artificial Sequence
  Description of Artificial Sequence: Synthetic oligonucleotide
  Antisense strand to SEQ ID NO: 76918
ugaccagggagcuauuguc

SEQ ID NO: 77000 - RNA, 19 nt, Artificial Sequence
  Description of Artificial Sequence: Synthetic oligonucleotide
  Sense strand starting at position 377 of SEQ ID NO: 964
uaccuaggcugguuaagaa

SEQ ID NO: 77001 - RNA, 19 nt, Artificial Sequence
  Description of Artificial Sequence: Synthetic oligonucleotide
  Antisense strand to SEQ ID NO: 76920
uucuuaaccagccuaggua

SEQ ID NO: 77002 - RNA, 19 nt, Artificial Sequence
  Description of Artificial Sequence: Synthetic oligonucleotide
  Sense strand starting at position 395 of SEQ ID NO: 964
aggaaugugucuucaguga

SEQ ID NO: 77003 - RNA, 19 nt, Artificial Sequence
  Description of Artificial Sequence: Synthetic oligonucleotide
  Antisense strand to SEQ ID NO: 76922
ucacugaagacacauuccu

SEQ ID NO: 77004 - RNA, 19 nt, Artificial Sequence
  Description of Artificial Sequence: Synthetic oligonucleotide
  Sense strand starting at position 399 of SEQ ID NO: 964
augugucuucagugaguuc

SEQ ID NO: 77005 - RNA, 19 nt, Artificial Sequence
  Description of Artificial Sequence: Synthetic oligonucleotide
  Antisense strand to SEQ ID NO: 76924
gaacucacugaagacacau

SEQ ID NO: 77006 - RNA, 19 nt, Artificial Sequence
  Description of Artificial Sequence: Synthetic oligonucleotide
  Sense strand starting at position 440 of SEQ ID NO: 964
ggucuccucucuuuaaugu

SEQ ID NO: 77007 - RNA, 19 nt, Artificial Sequence
  Description of Artificial Sequence: Synthetic oligonucleotide
  Antisense strand to SEQ ID NO: 76926
acauuaaagagaggagacc

SEQ ID NO: 77008 - RNA, 19 nt, Artificial Sequence
  Description of Artificial Sequence: Synthetic oligonucleotide
  Sense strand starting at position 449 of SEQ ID NO: 964
ucuuuaauguccucuuggu

SEQ ID NO: 77009 - RNA, 19 nt, Artificial Sequence
  Description of Artificial Sequence: Synthetic oligonucleotide
  Antisense strand to SEQ ID NO: 76928
accaagaggacauuaaaga

SEQ ID NO: 77010 - RNA, 19 nt, Artificial Sequence
  Description of Artificial Sequence: Synthetic oligonucleotide
  Sense strand starting at position 515 of SEQ ID NO: 964
gugccagaaggcuguucaa

SEQ ID NO: 77011 - RNA, 19 nt, Artificial Sequence
  Description of Artificial Sequence: Synthetic oligonucleotide
  Antisense strand to SEQ ID NO: 76930
uugaacagccuucuggcac

SEQ ID NO: 77012 - RNA, 19 nt, Artificial Sequence
  Description of Artificial Sequence: Synthetic oligonucleotide
  Sense strand starting at position 547 of SEQ ID NO: 964
agucuacccucucuguuau

SEQ ID NO: 77013 - RNA, 19 nt, Artificial Sequence
  Description of Artificial Sequence: Synthetic oligonucleotide
  Antisense strand to SEQ ID NO: 76932
auaacagagaggguagacu

SEQ ID NO: 77014 - RNA, 19 nt, Artificial Sequence
  Description of Artificial Sequence: Synthetic oligonucleotide
  Sense strand starting at position 548 of SEQ ID NO: 964
gucuacccucucuguuaua

SEQ ID NO: 77015 - RNA, 19 nt, Artificial Sequence
  Description of Artificial Sequence: Synthetic oligonucleotide
  Antisense strand to SEQ ID NO: 76934
uauaacagagaggguagac

SEQ ID NO: 77016 - RNA, 19 nt, Artificial Sequence
  Description of Artificial Sequence: Synthetic oligonucleotide
  Sense strand starting at position 600 of SEQ ID NO: 964
gagugacuuggccaaaguc

SEQ ID NO: 77017 - RNA, 19 nt, Artificial Sequence
  Description of Artificial Sequence: Synthetic oligonucleotide
  Antisense strand to SEQ ID NO: 76936
gacuuuggccaagucacuc

SEQ ID NO: 77018 - RNA, 19 nt, Artificial Sequence
  Description of Artificial Sequence: Synthetic oligonucleotide
  Sense strand starting at position 616 of SEQ ID NO: 964
gucaaacuuuggcuguaca

SEQ ID NO: 77019 - RNA, 19 nt, Artificial Sequence
  Description of Artificial Sequence: Synthetic oligonucleotide
  Antisense strand to SEQ ID NO: 76938
uguacagccaaaguuugac

SEQ ID NO: 77020 - RNA, 19 nt, Artificial Sequence
  Description of Artificial Sequence: Synthetic oligonucleotide
  Sense strand starting at position 617 of SEQ ID NO: 964
ucaaacuuuggcuguacaa

SEQ ID NO: 77021 - RNA, 19 nt, Artificial Sequence
  Description of Artificial Sequence: Synthetic oligonucleotide
  Antisense strand to SEQ ID NO: 76940
uuguacagccaaaguuuga

SEQ ID NO: 77022 - RNA, 19 nt, Artificial Sequence
  Description of Artificial Sequence: Synthetic oligonucleotide
  Sense strand starting at position 619 of SEQ ID NO: 964
aaacuuuggcuguacaaga

SEQ ID NO: 77023 - RNA, 19 nt, Artificial Sequence
  Description of Artificial Sequence: Synthetic oligonucleotide
  Antisense strand to SEQ ID NO: 76942
ucuuguacagccaaaguuu

SEQ ID NO: 77024 - RNA, 19 nt, Artificial Sequence
  Description of Artificial Sequence: Synthetic oligonucleotide
  Sense strand starting at position 751 of SEQ ID NO: 964
gggagcaaauagucauaca

SEQ ID NO: 77025 - RNA, 19 nt, Artificial Sequence
  Description of Artificial Sequence: Synthetic oligonucleotide
  Antisense strand to SEQ ID NO: 76944
uguaugacuauuugcuccc

SEQ ID NO: 77026 - RNA, 19 nt, Artificial Sequence
  Description of Artificial Sequence: Synthetic oligonucleotide
  Sense strand starting at position 984 of SEQ ID NO: 964
ucgagacugugaggagaaa

SEQ ID NO: 77027 - RNA, 19 nt, Artificial Sequence
  Description of Artificial Sequence: Synthetic oligonucleotide
  Antisense strand to SEQ ID NO: 76946
uuucuccucacagucucga

SEQ ID NO: 77028 - RNA, 19 nt, Artificial Sequence
  Description of Artificial Sequence: Synthetic oligonucleotide
  Sense strand starting at position 1305 of SEQ ID NO: 964
guguguuugcgcgcgugua

SEQ ID NO: 77029 - RNA, 19 nt, Artificial Sequence
  Description of Artificial Sequence: Synthetic oligonucleotide
  Antisense strand to SEQ ID NO: 76948
uacacgcgcgcaaacacac

SEQ ID NO: 77030 - RNA, 19 nt, Artificial Sequence
  Description of Artificial Sequence: Synthetic oligonucleotide
  Sense strand starting at position 1740 of SEQ ID NO: 964
aggcgacacuauuugcaua

SEQ ID NO: 77031 - RNA, 19 nt, Artificial Sequence
  Description of Artificial Sequence: Synthetic oligonucleotide
  Antisense strand to SEQ ID NO: 76950
uaugcaaauagugucgccu

SEQ ID NO: 77032 - RNA, 19 nt, Artificial Sequence
  Description of Artificial Sequence: Synthetic oligonucleotide
  Sense strand starting at position 1741 of SEQ ID NO: 964
ggcgacacuauuugcauaa

SEQ ID NO: 77033 - RNA, 19 nt, Artificial Sequence
  Description of Artificial Sequence: Synthetic oligonucleotide
  Antisense strand to SEQ ID NO: 76952
uuaugcaaauagugucgcc

SEQ ID NO: 77034 - RNA, 19 nt, Artificial Sequence
  Description of Artificial Sequence: Synthetic oligonucleotide
  Sense strand starting at position 2802 of SEQ ID NO: 964
cuucuaaggaucugucgaa

SEQ ID NO: 77035 - RNA, 19 nt, Artificial Sequence
  Description of Artificial Sequence: Synthetic oligonucleotide
  Antisense strand to SEQ ID NO: 76954
uucgacagauccuuagaag

SEQ ID NO: 77036 - RNA, 19 nt, Artificial Sequence
  Description of Artificial Sequence: Synthetic oligonucleotide
  Sense strand starting at position 2803 of SEQ ID NO: 964
uucuaaggaucugucgaaa

SEQ ID NO: 77037 - RNA, 19 nt, Artificial Sequence
  Description of Artificial Sequence: Synthetic oligonucleotide
  Antisense strand to SEQ ID NO: 76956
uuucgacagauccuuagaa

SEQ ID NO: 77038 - RNA, 19 nt, Artificial Sequence
  Description of Artificial Sequence: Synthetic oligonucleotide
  Sense strand starting at position 2806 of SEQ ID NO: 964
uaaggaucugucgaaaguc

SEQ ID NO: 77039 - RNA, 19 nt, Artificial Sequence
  Description of Artificial Sequence: Synthetic oligonucleotide
  Antisense strand to SEQ ID NO: 76958
gacuuucgacagauccuua

SEQ ID NO: 77040 - RNA, 19 nt, Artificial Sequence
  Description of Artificial Sequence: Synthetic oligonucleotide
  Sense strand starting at position 2979 of SEQ ID NO: 964
uggagcuggucccagaaau

SEQ ID NO: 77041 - RNA, 19 nt, Artificial Sequence
  Description of Artificial Sequence: Synthetic oligonucleotide
  Antisense strand to SEQ ID NO: 76960
auuucugggaccagcucca

SEQ ID NO: 77042 - RNA, 19 nt, Artificial Sequence
  Description of Artificial Sequence: Synthetic oligonucleotide
  Sense strand starting at position 3184 of SEQ ID NO: 964
gcacuauggguuggugacu

SEQ ID NO: 77043 - RNA, 19 nt, Artificial Sequence
  Description of Artificial Sequence: Synthetic oligonucleotide
  Antisense strand to SEQ ID NO: 76962
agucaccaacccauagugc

SEQ ID NO: 77044 - RNA, 19 nt, Artificial Sequence
  Description of Artificial Sequence: Synthetic oligonucleotide
  Sense strand starting at position 3189 of SEQ ID NO: 964
auggguuggugacucauga

SEQ ID NO: 77045 - RNA, 19 nt, Artificial Sequence
  Description of Artificial Sequence: Synthetic oligonucleotide
  Antisense strand to SEQ ID NO: 76964
ucaugagucaccaacccau

SEQ ID NO: 77046 - RNA, 19 nt, Artificial Sequence
  Description of Artificial Sequence: Synthetic oligonucleotide
  Sense strand starting at position 3202 of SEQ ID NO: 964
ucaugaaagacagguguuu

SEQ ID NO: 77047 - RNA, 19 nt, Artificial Sequence
  Description of Artificial Sequence: Synthetic oligonucleotide
  Antisense strand to SEQ ID NO: 76966
aaacaccugucuuucauga

SEQ ID NO: 77048 - RNA, 19 nt, Artificial Sequence
  Description of Artificial Sequence: Synthetic oligonucleotide
  Sense strand starting at position 3204 of SEQ ID NO: 964
augaaagacagguguuuga

SEQ ID NO: 77049 - RNA, 19 nt, Artificial Sequence
  Description of Artificial Sequence: Synthetic oligonucleotide
  Antisense strand to SEQ ID NO: 76968
ucaaacaccugucuuucau

SEQ ID NO: 77050 - RNA, 19 nt, Artificial Sequence
  Description of Artificial Sequence: Synthetic oligonucleotide
  Sense strand starting at position 3312 of SEQ ID NO: 964
accauaauccaaggcguga

SEQ ID NO: 77051 - RNA, 19 nt, Artificial Sequence
  Description of Artificial Sequence: Synthetic oligonucleotide
  Antisense strand to SEQ ID NO: 76970
ucacgccuuggauuauggu

SEQ ID NO: 77052 - RNA, 19 nt, Artificial Sequence
  Description of Artificial Sequence: Synthetic oligonucleotide
  Sense strand starting at position 3316 of SEQ ID NO: 964
uaauccaaggcgugaagaa

SEQ ID NO: 77053 - RNA, 19 nt, Artificial Sequence
  Description of Artificial Sequence: Synthetic oligonucleotide
  Antisense strand to SEQ ID NO: 76972
uucuucacgccuuggauua

SEQ ID NO: 77054 - RNA, 19 nt, Artificial Sequence
  Description of Artificial Sequence: Synthetic oligonucleotide
  Sense strand starting at position 3353 of SEQ ID NO: 964
gguuacuagaagugguauc

SEQ ID NO: 77055 - RNA, 19 nt, Artificial Sequence
  Description of Artificial Sequence: Synthetic oligonucleotide
  Antisense strand to SEQ ID NO: 76974
gauaccacuucuaguaacc

SEQ ID NO: 77056 - RNA, 19 nt, Artificial Sequence
  Description of Artificial Sequence: Synthetic oligonucleotide
  Sense strand starting at position 3354 of SEQ ID NO: 964
guuacuagaagugguaucu

SEQ ID NO: 77057 - RNA, 19 nt, Artificial Sequence
  Description of Artificial Sequence: Synthetic oligonucleotide
  Antisense strand to SEQ ID NO: 76976
agauaccacuucuaguaac

SEQ ID NO: 77058 - RNA, 19 nt, Artificial Sequence
  Description of Artificial Sequence: Synthetic oligonucleotide
  Sense strand starting at position 3475 of SEQ ID NO: 964
ggccucccagucugugaaa

SEQ ID NO: 77059 - RNA, 19 nt, Artificial Sequence
  Description of Artificial Sequence: Synthetic oligonucleotide
  Antisense strand to SEQ ID NO: 76978
uuucacagacugggaggcc

SEQ ID NO: 77060 - RNA, 19 nt, Artificial Sequence
  Description of Artificial Sequence: Synthetic oligonucleotide
  Sense strand starting at position 3476 of SEQ ID NO: 964
gccucccagucugugaaau

SEQ ID NO: 77061 - RNA, 19 nt, Artificial Sequence
  Description of Artificial Sequence: Synthetic oligonucleotide
  Antisense strand to SEQ ID NO: 76980
auuucacagacugggaggc

SEQ ID NO: 77062 - RNA, 19 nt, Artificial Sequence
  Description of Artificial Sequence: Synthetic oligonucleotide
  Sense strand starting at position 3559 of SEQ ID NO: 964
gacugucccuuggacagaa

SEQ ID NO: 77063 - RNA, 19 nt, Artificial Sequence
  Description of Artificial Sequence: Synthetic oligonucleotide
  Antisense strand to SEQ ID NO: 76982
uucuguccaagggacaguc

SEQ ID NO: 77064 - RNA, 19 nt, Artificial Sequence
  Description of Artificial Sequence: Synthetic oligonucleotide
  Sense strand starting at position 3563 of SEQ ID NO: 964
gucccuuggacagaaguau

SEQ ID NO: 77065 - RNA, 19 nt, Artificial Sequence
  Description of Artificial Sequence: Synthetic oligonucleotide
  Antisense strand to SEQ ID NO: 76984
auacuucuguccaagggac

SEQ ID NO: 77066 - RNA, 19 nt, Artificial Sequence
  Description of Artificial Sequence: Synthetic oligonucleotide
  Sense strand starting at position 3645 of SEQ ID NO: 964
ucgagagcuuacuuugugu

SEQ ID NO: 77067 - RNA, 19 nt, Artificial Sequence
  Description of Artificial Sequence: Synthetic oligonucleotide
  Antisense strand to SEQ ID NO: 76986
acacaaaguaagcucucga

SEQ ID NO: 77068 - RNA, 19 nt, Artificial Sequence
  Description of Artificial Sequence: Synthetic oligonucleotide
  Sense strand starting at position 3709 of SEQ ID NO: 964
gggaauaaguuacucaauu

SEQ ID NO: 77069 - RNA, 19 nt, Artificial Sequence
  Description of Artificial Sequence: Synthetic oligonucleotide
  Antisense strand to SEQ ID NO: 76988
aauugaguaacuuauuccc

SEQ ID NO: 77070 - RNA, 19 nt, Artificial Sequence
  Description of Artificial Sequence: Synthetic oligonucleotide
  Sense strand starting at position 3736 of SEQ ID NO: 964
auaagagcucugugaggca

SEQ ID NO: 77071 - RNA, 19 nt, Artificial Sequence
  Description of Artificial Sequence: Synthetic oligonucleotide
  Antisense strand to SEQ ID NO: 76990
ugccucacagagcucuuau

SEQ ID NO: 77072 - RNA, 19 nt, Artificial Sequence
  Description of Artificial Sequence: Synthetic oligonucleotide
  Sense strand starting at position 3826 of SEQ ID NO: 964
ucacauugcuaguaaagag

SEQ ID NO: 77073 - RNA, 19 nt, Artificial Sequence
  Description of Artificial Sequence: Synthetic oligonucleotide
  Antisense strand to SEQ ID NO: 76992
cucuuuacuagcaauguga

SEQ ID NO: 77074 - RNA, 19 nt, Artificial Sequence
  Description of Artificial Sequence: Synthetic oligonucleotide
  Sense strand starting at position 3493 of SEQ ID NO: 965
gcuguugcuauuguaguua

SEQ ID NO: 77075 - RNA, 19 nt, Artificial Sequence
  Description of Artificial Sequence: Synthetic oligonucleotide
  Antisense strand to SEQ ID NO: 76994
uaacuacaauagcaacagc

SEQ ID NO: 77076 - RNA, 19 nt, Artificial Sequence
  Description of Artificial Sequence: Synthetic oligonucleotide
  Sense strand starting at position 3469 of SEQ ID NO: 965
ggaguaaguguucaguaaa

SEQ ID NO: 77077 - RNA, 19 nt, Artificial Sequence
  Description of Artificial Sequence: Synthetic oligonucleotide
  Antisense strand to SEQ ID NO: 76996
uuuacugaacacuuacucc

SEQ ID NO: 77078 - RNA, 19 nt, Artificial Sequence
  Description of Artificial Sequence: Synthetic oligonucleotide
  Sense strand starting at position 3468 of SEQ ID NO: 965
uggaguaaguguucaguaa

SEQ ID NO: 77079 - RNA, 19 nt, Artificial Sequence
  Description of Artificial Sequence: Synthetic oligonucleotide
  Antisense strand to SEQ ID NO: 76998
uuacugaacacuuacucca

SEQ ID NO: 77080 - RNA, 19 nt, Artificial Sequence
  Description of Artificial Sequence: Synthetic oligonucleotide
  Sense strand starting at position 3456 of SEQ ID NO: 965
gauuaagugagguggagua

SEQ ID NO: 77081 - RNA, 19 nt, Artificial Sequence
  Description of Artificial Sequence: Synthetic oligonucleotide
  Antisense strand to SEQ ID NO: 77000
uacuccaccucacuuaauc

SEQ ID NO: 77082 - RNA, 19 nt, Artificial Sequence
  Description of Artificial Sequence: Synthetic oligonucleotide
  Sense strand starting at position 3447 of SEQ ID NO: 965
aagaguugugauuaaguga

SEQ ID NO: 77083 - RNA, 19 nt, Artificial Sequence
  Description of Artificial Sequence: Synthetic oligonucleotide
  Antisense strand to SEQ ID NO: 77002
ucacuuaaucacaacucuu

SEQ ID NO: 77084 - RNA, 19 nt, Artificial Sequence
  Description of Artificial Sequence: Synthetic oligonucleotide
  Sense strand starting at position 3340 of SEQ ID NO: 965
ggguuugaaucaccagcaa

SEQ ID NO: 77085 - RNA, 19 nt, Artificial Sequence
  Description of Artificial Sequence: Synthetic oligonucleotide
  Antisense strand to SEQ ID NO: 77004
uugcuggugauucaaaccc

SEQ ID NO: 77086 - RNA, 19 nt, Artificial Sequence
  Description of Artificial Sequence: Synthetic oligonucleotide
  Sense strand starting at position 3289 of SEQ ID NO: 965
ucugcagaccagugaaugu

SEQ ID NO: 77087 - RNA, 19 nt, Artificial Sequence
  Description of Artificial Sequence: Synthetic oligonucleotide
  Antisense strand to SEQ ID NO: 77006
acauucacuggucugcaga

SEQ ID NO: 77088 - RNA, 19 nt, Artificial Sequence
  Description of Artificial Sequence: Synthetic oligonucleotide
  Sense strand starting at position 3096 of SEQ ID NO: 965
ggaugaaugccacagucca

SEQ ID NO: 77089 - RNA, 19 nt, Artificial Sequence
  Description of Artificial Sequence: Synthetic oligonucleotide
  Antisense strand to SEQ ID NO: 77008
uggacuguggcauucaucc

SEQ ID NO: 77090 - RNA, 19 nt, Artificial Sequence
  Description of Artificial Sequence: Synthetic oligonucleotide
  Sense strand starting at position 3085 of SEQ ID NO: 965
ggaggcauuuaggaugaau

SEQ ID NO: 77091 - RNA, 19 nt, Artificial Sequence
  Description of Artificial Sequence: Synthetic oligonucleotide
  Antisense strand to SEQ ID NO: 77010
auucauccuaaaugccucc

SEQ ID NO: 77092 - RNA, 19 nt, Artificial Sequence
  Description of Artificial Sequence: Synthetic oligonucleotide
  Sense strand starting at position 3046 of SEQ ID NO: 965
gagccagacucuuagagga

SEQ ID NO: 77093 - RNA, 19 nt, Artificial Sequence
  Description of Artificial Sequence: Synthetic oligonucleotide
  Antisense strand to SEQ ID NO: 77012
uccucuaagagucuggcuc

SEQ ID NO: 77094 - RNA, 19 nt, Artificial Sequence
  Description of Artificial Sequence: Synthetic oligonucleotide
  Sense strand starting at position 3040 of SEQ ID NO: 965
gagugugagccagacucuu

SEQ ID NO: 77095 - RNA, 19 nt, Artificial Sequence
  Description of Artificial Sequence: Synthetic oligonucleotide
  Antisense strand to SEQ ID NO: 77014
aagagucuggcucacacuc

SEQ ID NO: 77096 - RNA, 19 nt, Artificial Sequence
  Description of Artificial Sequence: Synthetic oligonucleotide
  Sense strand starting at position 2923 of SEQ ID NO: 965
gugugagaugacuggauug

SEQ ID NO: 77097 - RNA, 19 nt, Artificial Sequence
  Description of Artificial Sequence: Synthetic oligonucleotide
  Antisense strand to SEQ ID NO: 77016
caauccagucaucucacac

SEQ ID NO: 77098 - RNA, 19 nt, Artificial Sequence
  Description of Artificial Sequence: Synthetic oligonucleotide
  Sense strand starting at position 2917 of SEQ ID NO: 965
agaauugugugagaugacu

SEQ ID NO: 77099 - RNA, 19 nt, Artificial Sequence
  Description of Artificial Sequence: Synthetic oligonucleotide
  Antisense strand to SEQ ID NO: 77018
agucaucucacacaauucu

SEQ ID NO: 77100 - RNA, 19 nt, Artificial Sequence
  Description of Artificial Sequence: Synthetic oligonucleotide
  Sense strand starting at position 2915 of SEQ ID NO: 965
ccagaauugugugagauga

SEQ ID NO: 77101 - RNA, 19 nt, Artificial Sequence
  Description of Artificial Sequence: Synthetic oligonucleotide
  Antisense strand to SEQ ID NO: 77020
ucaucucacacaauucugg

SEQ ID NO: 77102 - RNA, 19 nt, Artificial Sequence
  Description of Artificial Sequence: Synthetic oligonucleotide
  Sense strand starting at position 2914 of SEQ ID NO: 965
cccagaauugugugagaug

SEQ ID NO: 77103 - RNA, 19 nt, Artificial Sequence
  Description of Artificial Sequence: Synthetic oligonucleotide
  Antisense strand to SEQ ID NO: 77022
caucucacacaauucuggg

SEQ ID NO: 77104 - RNA, 19 nt, Artificial Sequence
  Description of Artificial Sequence: Synthetic oligonucleotide
  Sense strand starting at position 2912 of SEQ ID NO: 965
aacccagaauugugugaga

SEQ ID NO: 77105 - RNA, 19 nt, Artificial Sequence
  Description of Artificial Sequence: Synthetic oligonucleotide
  Antisense strand to SEQ ID NO: 77024
ucucacacaauucuggguu

SEQ ID NO: 77106 - RNA, 19 nt, Artificial Sequence
  Description of Artificial Sequence: Synthetic oligonucleotide
  Sense strand starting at position 2894 of SEQ ID NO: 965
gggcacuucuggcucugaa

SEQ ID NO: 77107 - RNA, 19 nt, Artificial Sequence
  Description of Artificial Sequence: Synthetic oligonucleotide
  Antisense strand to SEQ ID NO: 77026
uucagagccagaagugccc

SEQ ID NO: 77108 - RNA, 19 nt, Artificial Sequence
  Description of Artificial Sequence: Synthetic oligonucleotide
  Sense strand starting at position 2874 of SEQ ID NO: 965
gccagagauuucuguggug

SEQ ID NO: 77109 - RNA, 19 nt, Artificial Sequence
  Description of Artificial Sequence: Synthetic oligonucleotide
  Antisense strand to SEQ ID NO: 77028
caccacagaaaucucuggc

SEQ ID NO: 77110 - RNA, 19 nt, Artificial Sequence
  Description of Artificial Sequence: Synthetic oligonucleotide
  Sense strand starting at position 2864 of SEQ ID NO: 965
uuggcauugagccagagau

SEQ ID NO: 77111 - RNA, 19 nt, Artificial Sequence
  Description of Artificial Sequence: Synthetic oligonucleotide
  Antisense strand to SEQ ID NO: 77030
aucucuggcucaaugccaa

SEQ ID NO: 77112 - RNA, 19 nt, Artificial Sequence
  Description of Artificial Sequence: Synthetic oligonucleotide
  Sense strand starting at position 2735 of SEQ ID NO: 965
caagcaagauuuggaggaa

SEQ ID NO: 77113 - RNA, 19 nt, Artificial Sequence
  Description of Artificial Sequence: Synthetic oligonucleotide
  Antisense strand to SEQ ID NO: 77032
uuccuccaaaucuugcuug

SEQ ID NO: 77114 - RNA, 19 nt, Artificial Sequence
  Description of Artificial Sequence: Synthetic oligonucleotide
  Sense strand starting at position 2652 of SEQ ID NO: 965
ucccaaaguguugggcaau

SEQ ID NO: 77115 - RNA, 19 nt, Artificial Sequence
  Description of Artificial Sequence: Synthetic oligonucleotide
  Antisense strand to SEQ ID NO: 77034
auugcccaacacuuuggga

SEQ ID NO: 77116 - RNA, 19 nt, Artificial Sequence
  Description of Artificial Sequence: Synthetic oligonucleotide
  Sense strand starting at position 2351 of SEQ ID NO: 965
cuuaauguucccuggaaua

SEQ ID NO: 77117 - RNA, 19 nt, Artificial Sequence
  Description of Artificial Sequence: Synthetic oligonucleotide
  Antisense strand to SEQ ID NO: 77036
uauuccagggaacauuaag

SEQ ID NO: 77118 - RNA, 19 nt, Artificial Sequence
  Description of Artificial Sequence: Synthetic oligonucleotide
  Sense strand starting at position 2350 of SEQ ID NO: 965
ucuuaauguucccuggaau

SEQ ID NO: 77119 - RNA, 19 nt, Artificial Sequence
  Description of Artificial Sequence: Synthetic oligonucleotide
  Antisense strand to SEQ ID NO: 77038
auuccagggaacauuaaga

SEQ ID NO: 77120 - RNA, 19 nt, Artificial Sequence
  Description of Artificial Sequence: Synthetic oligonucleotide
  Sense strand starting at position 2349 of SEQ ID NO: 965
gucuuaauguucccuggaa

SEQ ID NO: 77121 - RNA, 19 nt, Artificial Sequence
  Description of Artificial Sequence: Synthetic oligonucleotide
  Antisense strand to SEQ ID NO: 77040
uuccagggaacauuaagac

SEQ ID NO: 77122 - RNA, 19 nt, Artificial Sequence
  Description of Artificial Sequence: Synthetic oligonucleotide
  Sense strand starting at position 2341 of SEQ ID NO: 965
gccucuaagucuuaauguu

SEQ ID NO: 77123 - RNA, 19 nt, Artificial Sequence
  Description of Artificial Sequence: Synthetic oligonucleotide
  Antisense strand to SEQ ID NO: 77042
aacauuaagacuuagaggc

SEQ ID NO: 77124 - RNA, 19 nt, Artificial Sequence
  Description of Artificial Sequence: Synthetic oligonucleotide
  Sense strand starting at position 2337 of SEQ ID NO: 965
guuugccucuaagucuuaa

SEQ ID NO: 77125 - RNA, 19 nt, Artificial Sequence
  Description of Artificial Sequence: Synthetic oligonucleotide
  Antisense strand to SEQ ID NO: 77044
uuaagacuuagaggcaaac

SEQ ID NO: 77126 - RNA, 19 nt, Artificial Sequence
  Description of Artificial Sequence: Synthetic oligonucleotide
  Sense strand starting at position 2334 of SEQ ID NO: 965
ggaguuugccucuaagucu

SEQ ID NO: 77127 - RNA, 19 nt, Artificial Sequence
  Description of Artificial Sequence: Synthetic oligonucleotide
  Antisense strand to SEQ ID NO: 77046
agacuuagaggcaaacucc

SEQ ID NO: 77128 - RNA, 19 nt, Artificial Sequence
  Description of Artificial Sequence: Synthetic oligonucleotide
  Sense strand starting at position 2331 of SEQ ID NO: 965
ucuggaguuugccucuaag

SEQ ID NO: 77129 - RNA, 19 nt, Artificial Sequence
  Description of Artificial Sequence: Synthetic oligonucleotide
  Antisense strand to SEQ ID NO: 77048
cuuagaggcaaacuccaga

SEQ ID NO: 77130 - RNA, 19 nt, Artificial Sequence
  Description of Artificial Sequence: Synthetic oligonucleotide
  Sense strand starting at position 2322 of SEQ ID NO: 965
ucuuuaaguucuggaguuu

SEQ ID NO: 77131 - RNA, 19 nt, Artificial Sequence
  Description of Artificial Sequence: Synthetic oligonucleotide
  Antisense strand to SEQ ID NO: 77050
aaacuccagaacuuaaaga

SEQ ID NO: 77132 - RNA, 19 nt, Artificial Sequence
  Description of Artificial Sequence: Synthetic oligonucleotide
  Sense strand starting at position 2321 of SEQ ID NO: 965
uucuuuaaguucuggaguu

SEQ ID NO: 77133 - RNA, 19 nt, Artificial Sequence
  Description of Artificial Sequence: Synthetic oligonucleotide
  Antisense strand to SEQ ID NO: 77052
aacuccagaacuuaaagaa

SEQ ID NO: 77134 - RNA, 19 nt, Artificial Sequence
  Description of Artificial Sequence: Synthetic oligonucleotide
  Sense strand starting at position 2262 of SEQ ID NO: 965
gggaaagaguuggaauucu

SEQ ID NO: 77135 - RNA, 19 nt, Artificial Sequence
  Description of Artificial Sequence: Synthetic oligonucleotide
  Antisense strand to SEQ ID NO: 77054
agaauuccaacucuuuccc

SEQ ID NO: 77136 - RNA, 19 nt, Artificial Sequence
  Description of Artificial Sequence: Synthetic oligonucleotide
  Sense strand starting at position 80 of SEQ ID NO: 965
gguaguugggcucaacucu

SEQ ID NO: 77137 - RNA, 19 nt, Artificial Sequence
  Description of Artificial Sequence: Synthetic oligonucleotide
  Antisense strand to SEQ ID NO: 77056
agaguugagcccaacuacc

SEQ ID NO: 77138 - RNA, 19 nt, Artificial Sequence
  Description of Artificial Sequence: Synthetic oligonucleotide
  Sense strand starting at position 61 of SEQ ID NO: 965
guggcaucacucuggagua

SEQ ID NO: 77139 - RNA, 19 nt, Artificial Sequence
  Description of Artificial Sequence: Synthetic oligonucleotide
  Antisense strand to SEQ ID NO: 77058
uacuccagagugaugccac

SEQ ID NO: 77140 - RNA, 19 nt, Artificial Sequence
  Description of Artificial Sequence: Synthetic oligonucleotide
  Sense strand starting at position 262 of SEQ ID NO: 966
ugaagagaaauggguuguu

SEQ ID NO: 77141 - RNA, 19 nt, Artificial Sequence
  Description of Artificial Sequence: Synthetic oligonucleotide
  Antisense strand to SEQ ID NO: 77060
aacaacccauuucucuuca

SEQ ID NO: 77142 - RNA, 19 nt, Artificial Sequence
  Description of Artificial Sequence: Synthetic oligonucleotide
  Sense strand starting at position 287 of SEQ ID NO: 966
gauuauugaugaguuagau

SEQ ID NO: 77143 - RNA, 19 nt, Artificial Sequence
  Description of Artificial Sequence: Synthetic oligonucleotide
  Antisense strand to SEQ ID NO: 77062
aucuaacucaucaauaauc

SEQ ID NO: 77144 - RNA, 19 nt, Artificial Sequence
  Description of Artificial Sequence: Synthetic oligonucleotide
  Sense strand starting at position 297 of SEQ ID NO: 966
gaguuagauggagguuaga

SEQ ID NO: 77145 - RNA, 19 nt, Artificial Sequence
  Description of Artificial Sequence: Synthetic oligonucleotide
  Antisense strand to SEQ ID NO: 77064
ucuaaccuccaucuaacuc

SEQ ID NO: 77146 - RNA, 19 nt, Artificial Sequence
  Description of Artificial Sequence: Synthetic oligonucleotide
  Sense strand starting at position 503 of SEQ ID NO: 966
aacucaggagucugauaua

SEQ ID NO: 77147 - RNA, 19 nt, Artificial Sequence
  Description of Artificial Sequence: Synthetic oligonucleotide
  Antisense strand to SEQ ID NO: 77066
uauaucagacuccugaguu

SEQ ID NO: 77148 - RNA, 19 nt, Artificial Sequence
  Description of Artificial Sequence: Synthetic oligonucleotide
  Sense strand starting at position 665 of SEQ ID NO: 966
aggaauuagucacuuagau

SEQ ID NO: 77149 - RNA, 19 nt, Artificial Sequence
  Description of Artificial Sequence: Synthetic oligonucleotide
  Antisense strand to SEQ ID NO: 77068
aucuaagugacuaauuccu

SEQ ID NO: 77150 - RNA, 19 nt, Artificial Sequence
  Description of Artificial Sequence: Synthetic oligonucleotide
  Sense strand starting at position 823 of SEQ ID NO: 966
gacaauccucuaggauguu

SEQ ID NO: 77151 - RNA, 19 nt, Artificial Sequence
  Description of Artificial Sequence: Synthetic oligonucleotide
  Antisense strand to SEQ ID NO: 77070
aacauccuagaggauuguc

SEQ ID NO: 77152 - RNA, 19 nt, Artificial Sequence
  Description of Artificial Sequence: Synthetic oligonucleotide
  Sense strand starting at position 829 of SEQ ID NO: 966
ccucuaggauguuugacau

SEQ ID NO: 77153 - RNA, 19 nt, Artificial Sequence
  Description of Artificial Sequence: Synthetic oligonucleotide
  Antisense strand to SEQ ID NO: 77072
augucaaacauccuagagg

SEQ ID NO: 77154 - RNA, 19 nt, Artificial Sequence
  Description of Artificial Sequence: Synthetic oligonucleotide
  Sense strand starting at position 835 of SEQ ID NO: 966
ggauguuugacauauguga

SEQ ID NO: 77155 - RNA, 19 nt, Artificial Sequence
  Description of Artificial Sequence: Synthetic oligonucleotide
  Antisense strand to SEQ ID NO: 77074
ucacauaugucaaacaucc

SEQ ID NO: 77156 - RNA, 19 nt, Artificial Sequence
  Description of Artificial Sequence: Synthetic oligonucleotide
  Sense strand starting at position 839 of SEQ ID NO: 966
guuugacauaugugacaag

SEQ ID NO: 77157 - RNA, 19 nt, Artificial Sequence
  Description of Artificial Sequence: Synthetic oligonucleotide
  Antisense strand to SEQ ID NO: 77076
cuugucacauaugucaaac

SEQ ID NO: 77158 - RNA, 19 nt, Artificial Sequence
  Description of Artificial Sequence: Synthetic oligonucleotide
  Sense strand starting at position 1070 of SEQ ID NO: 966
aaguuugaguaaccuaaag

SEQ ID NO: 77159 - RNA, 19 nt, Artificial Sequence
  Description of Artificial Sequence: Synthetic oligonucleotide
  Antisense strand to SEQ ID NO: 77078
cuuuagguuacucaaacuu

SEQ ID NO: 77160 - RNA, 19 nt, Artificial Sequence
  Description of Artificial Sequence: Synthetic oligonucleotide
  Sense strand starting at position 1173 of SEQ ID NO: 966
cagaauuagucagucauga

SEQ ID NO: 77161 - RNA, 19 nt, Artificial Sequence
  Description of Artificial Sequence: Synthetic oligonucleotide
  Antisense strand to SEQ ID NO: 77080
ucaugacugacuaauucug

SEQ ID NO: 77162 - RNA, 19 nt, Artificial Sequence
  Description of Artificial Sequence: Synthetic oligonucleotide
  Sense strand starting at position 1178 of SEQ ID NO: 966
uuagucagucaugauuaaa

SEQ ID NO: 77163 - RNA, 19 nt, Artificial Sequence
  Description of Artificial Sequence: Synthetic oligonucleotide
  Antisense strand to SEQ ID NO: 77082
uuuaaucaugacugacuaa

SEQ ID NO: 77164 - RNA, 19 nt, Artificial Sequence
  Description of Artificial Sequence: Synthetic oligonucleotide
  Sense strand starting at position 1181 of SEQ ID NO: 966
gucagucaugauuaaauuc

SEQ ID NO: 77165 - RNA, 19 nt, Artificial Sequence
  Description of Artificial Sequence: Synthetic oligonucleotide
  Antisense strand to SEQ ID NO: 77084
gaauuuaaucaugacugac

SEQ ID NO: 77166 - RNA, 19 nt, Artificial Sequence
  Description of Artificial Sequence: Synthetic oligonucleotide
  Sense strand starting at position 1252 of SEQ ID NO: 966
guagcaagagagugaugaa

SEQ ID NO: 77167 - RNA, 19 nt, Artificial Sequence
  Description of Artificial Sequence: Synthetic oligonucleotide
  Antisense strand to SEQ ID NO: 77086
uucaucacucucuugcuac

SEQ ID NO: 77168 - RNA, 19 nt, Artificial Sequence
  Description of Artificial Sequence: Synthetic oligonucleotide
  Sense strand starting at position 1299 of SEQ ID NO: 966
uccauuccugaaugaaugu

SEQ ID NO: 77169 - RNA, 19 nt, Artificial Sequence
  Description of Artificial Sequence: Synthetic oligonucleotide
  Antisense strand to SEQ ID NO: 77088
acauucauucaggaaugga

SEQ ID NO: 77170 - RNA, 19 nt, Artificial Sequence
  Description of Artificial Sequence: Synthetic oligonucleotide
  Sense strand starting at position 1347 of SEQ ID NO: 966
cugccauuaccagggauaa

SEQ ID NO: 77171 - RNA, 19 nt, Artificial Sequence
  Description of Artificial Sequence: Synthetic oligonucleotide
  Antisense strand to SEQ ID NO: 77090
uuaucccugguaauggcag

SEQ ID NO: 77172 - RNA, 19 nt, Artificial Sequence
  Description of Artificial Sequence: Synthetic oligonucleotide
  Sense strand starting at position 1348 of SEQ ID NO: 966
ugccauuaccagggauaau

SEQ ID NO: 77173 - RNA, 19 nt, Artificial Sequence
  Description of Artificial Sequence: Synthetic oligonucleotide
  Antisense strand to SEQ ID NO: 77092
auuaucccugguaauggca

SEQ ID NO: 77174 - RNA, 19 nt, Artificial Sequence
  Description of Artificial Sequence: Synthetic oligonucleotide
  Sense strand starting at position 1451 of SEQ ID NO: 966
auagguccaucaucuacau

SEQ ID NO: 77175 - RNA, 19 nt, Artificial Sequence
  Description of Artificial Sequence: Synthetic oligonucleotide
  Antisense strand to SEQ ID NO: 77094
auguagaugauggaccuau

SEQ ID NO: 77176 - RNA, 19 nt, Artificial Sequence
  Description of Artificial Sequence: Synthetic oligonucleotide
  Sense strand starting at position 1494 of SEQ ID NO: 966
gcaucaauggcugaacuga

SEQ ID NO: 77177 - RNA, 19 nt, Artificial Sequence
  Description of Artificial Sequence: Synthetic oligonucleotide
  Antisense strand to SEQ ID NO: 77096
ucaguucagccauugaugc

SEQ ID NO: 77178 - RNA, 19 nt, Artificial Sequence
  Description of Artificial Sequence: Synthetic oligonucleotide
  Sense strand starting at position 1517 of SEQ ID NO: 966
ucaagacuucuaggucaga

SEQ ID NO: 77179 - RNA, 19 nt, Artificial Sequence
  Description of Artificial Sequence: Synthetic oligonucleotide
  Antisense strand to SEQ ID NO: 77098
ucugaccuagaagucuuga

SEQ ID NO: 77180 - RNA, 19 nt, Artificial Sequence
  Description of Artificial Sequence: Synthetic oligonucleotide
  Sense strand starting at position 1560 of SEQ ID NO: 966
caacaagccuaggugauau

SEQ ID NO: 77181 - RNA, 19 nt, Artificial Sequence
  Description of Artificial Sequence: Synthetic oligonucleotide
  Antisense strand to SEQ ID NO: 77100
auaucaccuaggcuuguug

SEQ ID NO: 77182 - RNA, 19 nt, Artificial Sequence
  Description of Artificial Sequence: Synthetic oligonucleotide
  Sense strand starting at position 1572 of SEQ ID NO: 966
gugauaugaagcuaagggu

SEQ ID NO: 77183 - RNA, 19 nt, Artificial Sequence
  Description of Artificial Sequence: Synthetic oligonucleotide
  Antisense strand to SEQ ID NO: 77102
acccuuagcuucauaucac

SEQ ID NO: 77184 - RNA, 19 nt, Artificial Sequence
  Description of Artificial Sequence: Synthetic oligonucleotide
  Sense strand starting at position 1717 of SEQ ID NO: 966
ccaugauauccauguuaua

SEQ ID NO: 77185 - RNA, 19 nt, Artificial Sequence
  Description of Artificial Sequence: Synthetic oligonucleotide
  Antisense strand to SEQ ID NO: 77104
uauaacauggauaucaugg

SEQ ID NO: 77186 - RNA, 19 nt, Artificial Sequence
  Description of Artificial Sequence: Synthetic oligonucleotide
  Sense strand starting at position 2033 of SEQ ID NO: 966
gaauaauggucccucuuag

SEQ ID NO: 77187 - RNA, 19 nt, Artificial Sequence
  Description of Artificial Sequence: Synthetic oligonucleotide
  Antisense strand to SEQ ID NO: 77106
cuaagagggaccauuauuc

SEQ ID NO: 77188 - RNA, 19 nt, Artificial Sequence
  Description of Artificial Sequence: Synthetic oligonucleotide
  Sense strand starting at position 2283 of SEQ ID NO: 966
acaacaaauuguguggauu

SEQ ID NO: 77189 - RNA, 19 nt, Artificial Sequence
  Description of Artificial Sequence: Synthetic oligonucleotide
  Antisense strand to SEQ ID NO: 77108
aauccacacaauuuguugu

SEQ ID NO: 77190 - RNA, 19 nt, Artificial Sequence
  Description of Artificial Sequence: Synthetic oligonucleotide
  Sense strand starting at position 2330 of SEQ ID NO: 966
gggacaucauggcccaaau

SEQ ID NO: 77191 - RNA, 19 nt, Artificial Sequence
  Description of Artificial Sequence: Synthetic oligonucleotide
  Antisense strand to SEQ ID NO: 77110
auuugggccaugauguccc

SEQ ID NO: 77192 - RNA, 19 nt, Artificial Sequence
  Description of Artificial Sequence: Synthetic oligonucleotide
  Sense strand starting at position 2332 of SEQ ID NO: 966
gacaucauggcccaaaugu

SEQ ID NO: 77193 - RNA, 19 nt, Artificial Sequence
  Description of Artificial Sequence: Synthetic oligonucleotide
  Antisense strand to SEQ ID NO: 77112
acauuugggccaugauguc

SEQ ID NO: 77194 - RNA, 19 nt, Artificial Sequence
  Description of Artificial Sequence: Synthetic oligonucleotide
  Sense strand starting at position 2689 of SEQ ID NO: 966
uuuguacuccaacaguaau

SEQ ID NO: 77195 - RNA, 19 nt, Artificial Sequence
  Description of Artificial Sequence: Synthetic oligonucleotide
  Antisense strand to SEQ ID NO: 77114
auuacuguuggaguacaaa

SEQ ID NO: 77196 - RNA, 19 nt, Artificial Sequence
  Description of Artificial Sequence: Synthetic oligonucleotide
  Sense strand starting at position 2860 of SEQ ID NO: 966
ucaagagggaguuguaauu

SEQ ID NO: 77197 - RNA, 19 nt, Artificial Sequence
  Description of Artificial Sequence: Synthetic oligonucleotide
  Antisense strand to SEQ ID NO: 77116
aauuacaacucccucuuga

SEQ ID NO: 77198 - RNA, 19 nt, Artificial Sequence
  Description of Artificial Sequence: Synthetic oligonucleotide
  Sense strand starting at position 3106 of SEQ ID NO: 966
auuugucuaugggcuuauu

SEQ ID NO: 77199 - RNA, 19 nt, Artificial Sequence
  Description of Artificial Sequence: Synthetic oligonucleotide
  Antisense strand to SEQ ID NO: 77118
aauaagcccauagacaaau

SEQ ID NO: 77200 - RNA, 19 nt, Artificial Sequence
  Description of Artificial Sequence: Synthetic oligonucleotide
  Sense strand starting at position 3211 of SEQ ID NO: 966
acauaacggucuccaauaa

SEQ ID NO: 77201 - RNA, 19 nt, Artificial Sequence
  Description of Artificial Sequence: Synthetic oligonucleotide
  Antisense strand to SEQ ID NO: 77120
uuauuggagaccguuaugu

SEQ ID NO: 77202 - RNA, 19 nt, Artificial Sequence
  Description of Artificial Sequence: Synthetic oligonucleotide
  Sense strand starting at position 3215 of SEQ ID NO: 966
aacggucuccaauaaaugu

SEQ ID NO: 77203 - RNA, 19 nt, Artificial Sequence
  Description of Artificial Sequence: Synthetic oligonucleotide
  Antisense strand to SEQ ID NO: 77122
acauuuauuggagaccguu

SEQ ID NO: 77204 - RNA, 19 nt, Artificial Sequence
  Description of Artificial Sequence: Synthetic oligonucleotide
  Sense strand starting at position 3339 of SEQ ID NO: 966
ccaucuuugccucagagga

SEQ ID NO: 77205 - RNA, 19 nt, Artificial Sequence
  Description of Artificial Sequence: Synthetic oligonucleotide
  Antisense strand to SEQ ID NO: 77124
uccucugaggcaaagaugg

SEQ ID NO: 77206 - RNA, 19 nt, Artificial Sequence
  Description of Artificial Sequence: Synthetic oligonucleotide
  Sense strand starting at position 3378 of SEQ ID NO: 966
aacggaaucuuagcauuga

SEQ ID NO: 77207 - RNA, 19 nt, Artificial Sequence
  Description of Artificial Sequence: Synthetic oligonucleotide
  Antisense strand to SEQ ID NO: 77126
ucaaugcuaagauuccguu

SEQ ID NO: 77208 - RNA, 19 nt, Artificial Sequence
  Description of Artificial Sequence: Synthetic oligonucleotide
  Sense strand starting at position 3679 of SEQ ID NO: 966
aucugauugggccagguuu

SEQ ID NO: 77209 - RNA, 19 nt, Artificial Sequence
  Description of Artificial Sequence: Synthetic oligonucleotide
  Antisense strand to SEQ ID NO: 77128
aaaccuggcccaaucagau

SEQ ID NO: 77210 - RNA, 19 nt, Artificial Sequence
  Description of Artificial Sequence: Synthetic oligonucleotide
  Sense strand starting at position 3836 of SEQ ID NO: 966
aagacuauuccaggugaac

SEQ ID NO: 77211 - RNA, 19 nt, Artificial Sequence
  Description of Artificial Sequence: Synthetic oligonucleotide
  Antisense strand to SEQ ID NO: 77130
guucaccuggaauagucuu

SEQ ID NO: 77212 - RNA, 19 nt, Artificial Sequence
  Description of Artificial Sequence: Synthetic oligonucleotide
  Sense strand starting at position 3868 of SEQ ID NO: 966
uaguguucuccugaaauag

SEQ ID NO: 77213 - RNA, 19 nt, Artificial Sequence
  Description of Artificial Sequence: Synthetic oligonucleotide
  Antisense strand to SEQ ID NO: 77132
cuauuucaggagaacacua

SEQ ID NO: 77214 - RNA, 19 nt, Artificial Sequence
  Description of Artificial Sequence: Synthetic oligonucleotide
  Sense strand starting at position 3931 of SEQ ID NO: 966
auauuaucucugcaggaca

SEQ ID NO: 77215 - RNA, 19 nt, Artificial Sequence
  Description of Artificial Sequence: Synthetic oligonucleotide
  Antisense strand to SEQ ID NO: 77134
uguccugcagagauaauau

SEQ ID NO: 77216 - RNA, 19 nt, Artificial Sequence
  Description of Artificial Sequence: Synthetic oligonucleotide
  Sense strand starting at position 3933 of SEQ ID NO: 966
auuaucucugcaggacaga

SEQ ID NO: 77217 - RNA, 19 nt, Artificial Sequence
  Description of Artificial Sequence: Synthetic oligonucleotide
  Antisense strand to SEQ ID NO: 77136
ucuguccugcagagauaau

SEQ ID NO: 77218 - RNA, 19 nt, Artificial Sequence
  Description of Artificial Sequence: Synthetic oligonucleotide
  Sense strand starting at position 3934 of SEQ ID NO: 966
uuaucucugcaggacagau

SEQ ID NO: 77219 - RNA, 19 nt, Artificial Sequence
  Description of Artificial Sequence: Synthetic oligonucleotide
  Antisense strand to SEQ ID NO: 77138
aucuguccugcagagauaa

SEQ ID NO: 77220 - RNA, 19 nt, Artificial Sequence
  Description of Artificial Sequence: Synthetic oligonucleotide
  Sense strand starting at position 3834 of SEQ ID NO: 967
gggucaguggaguagaacu

SEQ ID NO: 77221 - RNA, 19 nt, Artificial Sequence
  Description of Artificial Sequence: Synthetic oligonucleotide
  Antisense strand to SEQ ID NO: 77140
aguucuacuccacugaccc

SEQ ID NO: 77222 - RNA, 19 nt, Artificial Sequence
  Description of Artificial Sequence: Synthetic oligonucleotide
  Sense strand starting at position 3832 of SEQ ID NO: 967
cugggucaguggaguagaa

SEQ ID NO: 77223 - RNA, 19 nt, Artificial Sequence
  Description of Artificial Sequence: Synthetic oligonucleotide
  Antisense strand to SEQ ID NO: 77142
uucuacuccacugacccag

SEQ ID NO: 77224 - RNA, 19 nt, Artificial Sequence
  Description of Artificial Sequence: Synthetic oligonucleotide
  Sense strand starting at position 3824 of SEQ ID NO: 967
ucauaauucugggucagug

SEQ ID NO: 77225 - RNA, 19 nt, Artificial Sequence
  Description of Artificial Sequence: Synthetic oligonucleotide
  Antisense strand to SEQ ID NO: 77144
cacugacccagaauuauga

SEQ ID NO: 77226 - RNA, 19 nt, Artificial Sequence
  Description of Artificial Sequence: Synthetic oligonucleotide
  Sense strand starting at position 3823 of SEQ ID NO: 967
cucauaauucugggucagu

SEQ ID NO: 77227 - RNA, 19 nt, Artificial Sequence
  Description of Artificial Sequence: Synthetic oligonucleotide
  Antisense strand to SEQ ID NO: 77146
acugacccagaauuaugag

SEQ ID NO: 77228 - RNA, 19 nt, Artificial Sequence
  Description of Artificial Sequence: Synthetic oligonucleotide
  Sense strand starting at position 3758 of SEQ ID NO: 967
gacugucaguugucuauag

SEQ ID NO: 77229 - RNA, 19 nt, Artificial Sequence
  Description of Artificial Sequence: Synthetic oligonucleotide
  Antisense strand to SEQ ID NO: 77148
cuauagacaacugacaguc

SEQ ID NO: 77230 - RNA, 19 nt, Artificial Sequence
  Description of Artificial Sequence: Synthetic oligonucleotide
  Sense strand starting at position 3705 of SEQ ID NO: 967
ggucauucgagauaacauu

SEQ ID NO: 77231 - RNA, 19 nt, Artificial Sequence
  Description of Artificial Sequence: Synthetic oligonucleotide
  Antisense strand to SEQ ID NO: 77150
aauguuaucucgaaugacc

SEQ ID NO: 77232 - RNA, 19 nt, Artificial Sequence
  Description of Artificial Sequence: Synthetic oligonucleotide
  Sense strand starting at position 3698 of SEQ ID NO: 967
aucuuuaggucauucgaga

SEQ ID NO: 77233 - RNA, 19 nt, Artificial Sequence
  Description of Artificial Sequence: Synthetic oligonucleotide
  Antisense strand to SEQ ID NO: 77152
ucucgaaugaccuaaagau

SEQ ID NO: 77234 - RNA, 19 nt, Artificial Sequence
  Description of Artificial Sequence: Synthetic oligonucleotide
  Sense strand starting at position 3495 of SEQ ID NO: 967
cggaguccucuaugaacac

SEQ ID NO: 77235 - RNA, 19 nt, Artificial Sequence
  Description of Artificial Sequence: Synthetic oligonucleotide
  Antisense strand to SEQ ID NO: 77154
guguucauagaggacuccg

SEQ ID NO: 77236 - RNA, 19 nt, Artificial Sequence
  Description of Artificial Sequence: Synthetic oligonucleotide
  Sense strand starting at position 3493 of SEQ ID NO: 967
accggaguccucuaugaac

SEQ ID NO: 77237 - RNA, 19 nt, Artificial Sequence
  Description of Artificial Sequence: Synthetic oligonucleotide
  Antisense strand to SEQ ID NO: 77156
guucauagaggacuccggu

SEQ ID NO: 77238 - RNA, 19 nt, Artificial Sequence
  Description of Artificial Sequence: Synthetic oligonucleotide
  Sense strand starting at position 3467 of SEQ ID NO: 967
caagguugaggguguuaag

SEQ ID NO: 77239 - RNA, 19 nt, Artificial Sequence
  Description of Artificial Sequence: Synthetic oligonucleotide
  Antisense strand to SEQ ID NO: 77158
cuuaacacccucaaccuug

SEQ ID NO: 77240 - RNA, 19 nt, Artificial Sequence
  Description of Artificial Sequence: Synthetic oligonucleotide
  Sense strand starting at position 3458 of SEQ ID NO: 967
uuacuuauccaagguugag

SEQ ID NO: 77241 - RNA, 19 nt, Artificial Sequence
  Description of Artificial Sequence: Synthetic oligonucleotide
  Antisense strand to SEQ ID NO: 77160
cucaaccuuggauaaguaa

SEQ ID NO: 77242 - RNA, 19 nt, Artificial Sequence
  Description of Artificial Sequence: Synthetic oligonucleotide
  Sense strand starting at position 3424 of SEQ ID NO: 967
ucggguagucucuaauaag

SEQ ID NO: 77243 - RNA, 19 nt, Artificial Sequence
  Description of Artificial Sequence: Synthetic oligonucleotide
  Antisense strand to SEQ ID NO: 77162
cuuauuagagacuacccga

SEQ ID NO: 77244 - RNA, 19 nt, Artificial Sequence
  Description of Artificial Sequence: Synthetic oligonucleotide
  Sense strand starting at position 3294 of SEQ ID NO: 967
gggugaccuuugaauggga

SEQ ID NO: 77245 - RNA, 19 nt, Artificial Sequence
  Description of Artificial Sequence: Synthetic oligonucleotide
  Antisense strand to SEQ ID NO: 77164
ucccauucaaaggucaccc

SEQ ID NO: 77246 - RNA, 19 nt, Artificial Sequence
  Description of Artificial Sequence: Synthetic oligonucleotide
  Sense strand starting at position 3158 of SEQ ID NO: 967
aacaauguuguuggaguaa

SEQ ID NO: 77247 - RNA, 19 nt, Artificial Sequence
  Description of Artificial Sequence: Synthetic oligonucleotide
  Antisense strand to SEQ ID NO: 77166
uuacuccaacaacauuguu

SEQ ID NO: 77248 - RNA, 19 nt, Artificial Sequence
  Description of Artificial Sequence: Synthetic oligonucleotide
  Sense strand starting at position 3156 of SEQ ID NO: 967
uaaacaauguuguuggagu

SEQ ID NO: 77249 - RNA, 19 nt, Artificial Sequence
  Description of Artificial Sequence: Synthetic oligonucleotide
  Antisense strand to SEQ ID NO: 77168
acuccaacaacauuguuua

SEQ ID NO: 77250 - RNA, 19 nt, Artificial Sequence
  Description of Artificial Sequence: Synthetic oligonucleotide
  Sense strand starting at position 3136 of SEQ ID NO: 967
uugagugcgauuugugcuu

SEQ ID NO: 77251 - RNA, 19 nt, Artificial Sequence
  Description of Artificial Sequence: Synthetic oligonucleotide
  Antisense strand to SEQ ID NO: 77170
aagcacaaaucgcacucaa

SEQ ID NO: 77252 - RNA, 19 nt, Artificial Sequence
  Description of Artificial Sequence: Synthetic oligonucleotide
  Sense strand starting at position 2929 of SEQ ID NO: 967
gcaagaaguggagguuguu

SEQ ID NO: 77253 - RNA, 19 nt, Artificial Sequence
  Description of Artificial Sequence: Synthetic oligonucleotide
  Antisense strand to SEQ ID NO: 77172
aacaaccuccacuucuugc

SEQ ID NO: 77254 - RNA, 19 nt, Artificial Sequence
  Description of Artificial Sequence: Synthetic oligonucleotide
  Sense strand starting at position 2916 of SEQ ID NO: 967
auaauaaagcuuggcaaga

SEQ ID NO: 77255 - RNA, 19 nt, Artificial Sequence
  Description of Artificial Sequence: Synthetic oligonucleotide
  Antisense strand to SEQ ID NO: 77174
ucuugccaagcuuuauuau

SEQ ID NO: 77256 - RNA, 19 nt, Artificial Sequence
  Description of Artificial Sequence: Synthetic oligonucleotide
  Sense strand starting at position 2770 of SEQ ID NO: 967
uaauuucucgguugauccu

SEQ ID NO: 77257 - RNA, 19 nt, Artificial Sequence
  Description of Artificial Sequence: Synthetic oligonucleotide
  Antisense strand to SEQ ID NO: 77176
aggaucaaccgagaaauua

SEQ ID NO: 77258 - RNA, 19 nt, Artificial Sequence
  Description of Artificial Sequence: Synthetic oligonucleotide
  Sense strand starting at position 2768 of SEQ ID NO: 967
cuuaauuucucgguugauc

SEQ ID NO: 77259 - RNA, 19 nt, Artificial Sequence
  Description of Artificial Sequence: Synthetic oligonucleotide
  Antisense strand to SEQ ID NO: 77178
gaucaaccgagaaauuaag

SEQ ID NO: 77260 - RNA, 19 nt, Artificial Sequence
  Description of Artificial Sequence: Synthetic oligonucleotide
  Sense strand starting at position 2767 of SEQ ID NO: 967
gcuuaauuucucgguugau

SEQ ID NO: 77261 - RNA, 19 nt, Artificial Sequence
  Description of Artificial Sequence: Synthetic oligonucleotide
  Antisense strand to SEQ ID NO: 77180
aucaaccgagaaauuaagc

SEQ ID NO: 77262 - RNA, 19 nt, Artificial Sequence
  Description of Artificial Sequence: Synthetic oligonucleotide
  Sense strand starting at position 2669 of SEQ ID NO: 967
gugauugcagcugagaaag

SEQ ID NO: 77263 - RNA, 19 nt, Artificial Sequence
  Description of Artificial Sequence: Synthetic oligonucleotide
  Antisense strand to SEQ ID NO: 77182
cuuucucagcugcaaucac

SEQ ID NO: 77264 - RNA, 19 nt, Artificial Sequence
  Description of Artificial Sequence: Synthetic oligonucleotide
  Sense strand starting at position 2668 of SEQ ID NO: 967
agugauugcagcugagaaa

SEQ ID NO: 77265 - RNA, 19 nt, Artificial Sequence
  Description of Artificial Sequence: Synthetic oligonucleotide
  Antisense strand to SEQ ID NO: 77184
uuucucagcugcaaucacu

SEQ ID NO: 77266 - RNA, 19 nt, Artificial Sequence
  Description of Artificial Sequence: Synthetic oligonucleotide
  Sense strand starting at position 2659 of SEQ ID NO: 967
gagaguaggagugauugca

SEQ ID NO: 77267 - RNA, 19 nt, Artificial Sequence
  Description of Artificial Sequence: Synthetic oligonucleotide
  Antisense strand to SEQ ID NO: 77186
ugcaaucacuccuacucuc

SEQ ID NO: 77268 - RNA, 19 nt, Artificial Sequence
  Description of Artificial Sequence: Synthetic oligonucleotide
  Sense strand starting at position 2455 of SEQ ID NO: 967
ggccguuagcguucuguuu

SEQ ID NO: 77269 - RNA, 19 nt, Artificial Sequence
  Description of Artificial Sequence: Synthetic oligonucleotide
  Antisense strand to SEQ ID NO: 77188
aaacagaacgcuaacggcc

SEQ ID NO: 77270 - RNA, 19 nt, Artificial Sequence
  Description of Artificial Sequence: Synthetic oligonucleotide
  Sense strand starting at position 2373 of SEQ ID NO: 967
gugauuguauuugaugacu

SEQ ID NO: 77271 - RNA, 19 nt, Artificial Sequence
  Description of Artificial Sequence: Synthetic oligonucleotide
  Antisense strand to SEQ ID NO: 77190
agucaucaaauacaaucac

SEQ ID NO: 77272 - RNA, 19 nt, Artificial Sequence
  Description of Artificial Sequence: Synthetic oligonucleotide
  Sense strand starting at position 2366 of SEQ ID NO: 967
gcacccagugauuguauuu

SEQ ID NO: 77273 - RNA, 19 nt, Artificial Sequence
  Description of Artificial Sequence: Synthetic oligonucleotide
  Antisense strand to SEQ ID NO: 77192
aaauacaaucacugggugc

SEQ ID NO: 77274 - RNA, 19 nt, Artificial Sequence
  Description of Artificial Sequence: Synthetic oligonucleotide
  Sense strand starting at position 2362 of SEQ ID NO: 967
gaaagcacccagugauugu

SEQ ID NO: 77275 - RNA, 19 nt, Artificial Sequence
  Description of Artificial Sequence: Synthetic oligonucleotide
  Antisense strand to SEQ ID NO: 77194
acaaucacugggugcuuuc

SEQ ID NO: 77276 - RNA, 19 nt, Artificial Sequence
  Description of Artificial Sequence: Synthetic oligonucleotide
  Sense strand starting at position 2359 of SEQ ID NO: 967
aucgaaagcacccagugau

SEQ ID NO: 77277 - RNA, 19 nt, Artificial Sequence
  Description of Artificial Sequence: Synthetic oligonucleotide
  Antisense strand to SEQ ID NO: 77196
aucacugggugcuuucgau

SEQ ID NO: 77278 - RNA, 19 nt, Artificial Sequence
  Description of Artificial Sequence: Synthetic oligonucleotide
  Sense strand starting at position 2123 of SEQ ID NO: 967
ccgcuuauuggacggaaga

SEQ ID NO: 77279 - RNA, 19 nt, Artificial Sequence
  Description of Artificial Sequence: Synthetic oligonucleotide
  Antisense strand to SEQ ID NO: 77198
ucuuccguccaauaagcgg

SEQ ID NO: 77280 - RNA, 19 nt, Artificial Sequence
  Description of Artificial Sequence: Synthetic oligonucleotide
  Sense strand starting at position 1108 of SEQ ID NO: 967
cagggcuuccuguacgacu

SEQ ID NO: 77281 - RNA, 19 nt, Artificial Sequence
  Description of Artificial Sequence: Synthetic oligonucleotide
  Antisense strand to SEQ ID NO: 77200
agucguacaggaagcccug

SEQ ID NO: 77282 - RNA, 19 nt, Artificial Sequence
  Description of Artificial Sequence: Synthetic oligonucleotide
  Sense strand starting at position 1050 of SEQ ID NO: 967
aagaauucguauccagaug

SEQ ID NO: 77283 - RNA, 19 nt, Artificial Sequence
  Description of Artificial Sequence: Synthetic oligonucleotide
  Antisense strand to SEQ ID NO: 77202
caucuggauacgaauucuu

SEQ ID NO: 77284 - RNA, 19 nt, Artificial Sequence
  Description of Artificial Sequence: Synthetic oligonucleotide
  Sense strand starting at position 1012 of SEQ ID NO: 967
ucccauuucugcgcaccua

SEQ ID NO: 77285 - RNA, 19 nt, Artificial Sequence
  Description of Artificial Sequence: Synthetic oligonucleotide
  Antisense strand to SEQ ID NO: 77204
uaggugcgcagaaauggga

SEQ ID NO: 77286 - RNA, 19 nt, Artificial Sequence
  Description of Artificial Sequence: Synthetic oligonucleotide
  Sense strand starting at position 814 of SEQ ID NO: 967
ucaguuuagcgccacuaaa

SEQ ID NO: 77287 - RNA, 19 nt, Artificial Sequence
  Description of Artificial Sequence: Synthetic oligonucleotide
  Antisense strand to SEQ ID NO: 77206
uuuaguggcgcuaaacuga

SEQ ID NO: 77288 - RNA, 19 nt, Artificial Sequence
  Description of Artificial Sequence: Synthetic oligonucleotide
  Sense strand starting at position 661 of SEQ ID NO: 967
uaugguuagcuuuccgcau

SEQ ID NO: 77289 - RNA, 19 nt, Artificial Sequence
  Description of Artificial Sequence: Synthetic oligonucleotide
  Antisense strand to SEQ ID NO: 77208
augcggaaagcuaaccaua

SEQ ID NO: 77290 - RNA, 19 nt, Artificial Sequence
  Description of Artificial Sequence: Synthetic oligonucleotide
  Sense strand starting at position 634 of SEQ ID NO: 967
cuguuaacccuuuaaggua

SEQ ID NO: 77291 - RNA, 19 nt, Artificial Sequence
  Description of Artificial Sequence: Synthetic oligonucleotide
  Antisense strand to SEQ ID NO: 77210
uaccuuaaaggguuaacag

SEQ ID NO: 77292 - RNA, 19 nt, Artificial Sequence
  Description of Artificial Sequence: Synthetic oligonucleotide
  Sense strand starting at position 537 of SEQ ID NO: 967
auccgaaaguaccuauuau

SEQ ID NO: 77293 - RNA, 19 nt, Artificial Sequence
  Description of Artificial Sequence: Synthetic oligonucleotide
  Antisense strand to SEQ ID NO: 77212
auaauagguacuuucggau

SEQ ID NO: 77294 - RNA, 19 nt, Artificial Sequence
  Description of Artificial Sequence: Synthetic oligonucleotide
  Sense strand starting at position 526 of SEQ ID NO: 967
gugcccuauuaauccgaaa

SEQ ID NO: 77295 - RNA, 19 nt, Artificial Sequence
  Description of Artificial Sequence: Synthetic oligonucleotide
  Antisense strand to SEQ ID NO: 77214
uuucggauuaauagggcac

SEQ ID NO: 77296 - RNA, 19 nt, Artificial Sequence
  Description of Artificial Sequence: Synthetic oligonucleotide
  Sense strand starting at position 520 of SEQ ID NO: 967
gccaaagugcccuauuaau

SEQ ID NO: 77297 - RNA, 19 nt, Artificial Sequence
  Description of Artificial Sequence: Synthetic oligonucleotide
  Antisense strand to SEQ ID NO: 77216
auuaauagggcacuuuggc

SEQ ID NO: 77298 - RNA, 19 nt, Artificial Sequence
  Description of Artificial Sequence: Synthetic oligonucleotide
  Sense strand starting at position 79 of SEQ ID NO: 967
agaauugagggcuggaagu

SEQ ID NO: 77299 - RNA, 19 nt, Artificial Sequence
  Description of Artificial Sequence: Synthetic oligonucleotide
  Antisense strand to SEQ ID NO: 77218
acuuccagcccucaauucu

SEQ ID NO: 77300 - RNA, 19 nt, Artificial Sequence
  Description of Artificial Sequence: Synthetic oligonucleotide
  Sense strand starting at position 3969 of SEQ ID NO: 968
gagagaccauucucaaguu

SEQ ID NO: 77301 - RNA, 19 nt, Artificial Sequence
  Description of Artificial Sequence: Synthetic oligonucleotide
  Antisense strand to SEQ ID NO: 77220
aacuugagaauggucucuc

SEQ ID NO: 77302 - RNA, 19 nt, Artificial Sequence
  Description of Artificial Sequence: Synthetic oligonucleotide
  Sense strand starting at position 3953 of SEQ ID NO: 968
guaucagagucuuugagag

SEQ ID NO: 77303 - RNA, 19 nt, Artificial Sequence
  Description of Artificial Sequence: Synthetic oligonucleotide
  Antisense strand to SEQ ID NO: 77222
cucucaaagacucugauac

SEQ ID NO: 77304 - RNA, 19 nt, Artificial Sequence
  Description of Artificial Sequence: Synthetic oligonucleotide
  Sense strand starting at position 3904 of SEQ ID NO: 968
agguaaagcugaguagaaa

SEQ ID NO: 77305 - RNA, 19 nt, Artificial Sequence
  Description of Artificial Sequence: Synthetic oligonucleotide
  Antisense strand to SEQ ID NO: 77224
uuucuacucagcuuuaccu

SEQ ID NO: 77306 - RNA, 19 nt, Artificial Sequence
  Description of Artificial Sequence: Synthetic oligonucleotide
  Sense strand starting at position 3902 of SEQ ID NO: 968
ucagguaaagcugaguaga

SEQ ID NO: 77307 - RNA, 19 nt, Artificial Sequence
  Description of Artificial Sequence: Synthetic oligonucleotide
  Antisense strand to SEQ ID NO: 77226
ucuacucagcuuuaccuga

SEQ ID NO: 77308 - RNA, 19 nt, Artificial Sequence
  Description of Artificial Sequence: Synthetic oligonucleotide
  Sense strand starting at position 3874 of SEQ ID NO: 968
agaagaaacgguugucuca

SEQ ID NO: 77309 - RNA, 19 nt, Artificial Sequence
  Description of Artificial Sequence: Synthetic oligonucleotide
  Antisense strand to SEQ ID NO: 77228
ugagacaaccguuucuucu

SEQ ID NO: 77310 - RNA, 19 nt, Artificial Sequence
  Description of Artificial Sequence: Synthetic oligonucleotide
  Sense strand starting at position 3668 of SEQ ID NO: 968
gguacagauguuuaaucca

SEQ ID NO: 77311 - RNA, 19 nt, Artificial Sequence
  Description of Artificial Sequence: Synthetic oligonucleotide
  Antisense strand to SEQ ID NO: 77230
uggauuaaacaucuguacc

SEQ ID NO: 77312 - RNA, 19 nt, Artificial Sequence
  Description of Artificial Sequence: Synthetic oligonucleotide
  Sense strand starting at position 3631 of SEQ ID NO: 968
ucucuauuggauggacuaa

SEQ ID NO: 77313 - RNA, 19 nt, Artificial Sequence
  Description of Artificial Sequence: Synthetic oligonucleotide
  Antisense strand to SEQ ID NO: 77232
uuaguccauccaauagaga

SEQ ID NO: 77314 - RNA, 19 nt, Artificial Sequence
  Description of Artificial Sequence: Synthetic oligonucleotide
  Sense strand starting at position 3630 of SEQ ID NO: 968
uucucuauuggauggacua

SEQ ID NO: 77315 - RNA, 19 nt, Artificial Sequence
  Description of Artificial Sequence: Synthetic oligonucleotide
  Antisense strand to SEQ ID NO: 77234
uaguccauccaauagagaa

SEQ ID NO: 77316 - RNA, 19 nt, Artificial Sequence
  Description of Artificial Sequence: Synthetic oligonucleotide
  Sense strand starting at position 3411 of SEQ ID NO: 968
ccagaaugcucuuugaaag

SEQ ID NO: 77317 - RNA, 19 nt, Artificial Sequence
  Description of Artificial Sequence: Synthetic oligonucleotide
  Antisense strand to SEQ ID NO: 77236
cuuucaaagagcauucugg

SEQ ID NO: 77318 - RNA, 19 nt, Artificial Sequence
  Description of Artificial Sequence: Synthetic oligonucleotide
  Sense strand starting at position 3400 of SEQ ID NO: 968
uugaguguacuccagaaug

SEQ ID NO: 77319 - RNA, 19 nt, Artificial Sequence
  Description of Artificial Sequence: Synthetic oligonucleotide
  Antisense strand to SEQ ID NO: 77238
cauucuggaguacacucaa

SEQ ID NO: 77320 - RNA, 19 nt, Artificial Sequence
  Description of Artificial Sequence: Synthetic oligonucleotide
  Sense strand starting at position 3206 of SEQ ID NO: 968
agagaaccauacguucuau

SEQ ID NO: 77321 - RNA, 19 nt, Artificial Sequence
  Description of Artificial Sequence: Synthetic oligonucleotide
  Antisense strand to SEQ ID NO: 77240
auagaacguaugguucucu

SEQ ID NO: 77322 - RNA, 19 nt, Artificial Sequence
  Description of Artificial Sequence: Synthetic oligonucleotide
  Sense strand starting at position 3083 of SEQ ID NO: 968
ugguucuuugaaugacacu

SEQ ID NO: 77323 - RNA, 19 nt, Artificial Sequence
  Description of Artificial Sequence: Synthetic oligonucleotide
  Antisense strand to SEQ ID NO: 77242
agugucauucaaagaacca

SEQ ID NO: 77324 - RNA, 19 nt, Artificial Sequence
  Description of Artificial Sequence: Synthetic oligonucleotide
  Sense strand starting at position 3078 of SEQ ID NO: 968
aacauugguucuuugaaug

SEQ ID NO: 77325 - RNA, 19 nt, Artificial Sequence
  Description of Artificial Sequence: Synthetic oligonucleotide
  Antisense strand to SEQ ID NO: 77244
cauucaaagaaccaauguu

SEQ ID NO: 77326 - RNA, 19 nt, Artificial Sequence
  Description of Artificial Sequence: Synthetic oligonucleotide
  Sense strand starting at position 3077 of SEQ ID NO: 968
gaacauugguucuuugaau

SEQ ID NO: 77327 - RNA, 19 nt, Artificial Sequence
  Description of Artificial Sequence: Synthetic oligonucleotide
  Antisense strand to SEQ ID NO: 77246
auucaaagaaccaauguuc

SEQ ID NO: 77328 - RNA, 19 nt, Artificial Sequence
  Description of Artificial Sequence: Synthetic oligonucleotide
  Sense strand starting at position 3006 of SEQ ID NO: 968
uaaugucuccuuuggagaa

SEQ ID NO: 77329 - RNA, 19 nt, Artificial Sequence
  Description of Artificial Sequence: Synthetic oligonucleotide
  Antisense strand to SEQ ID NO: 77248
uucuccaaaggagacauua

SEQ ID NO: 77330 - RNA, 19 nt, Artificial Sequence
  Description of Artificial Sequence: Synthetic oligonucleotide
  Sense strand starting at position 2991 of SEQ ID NO: 968
guaauuguuggguacuaau

SEQ ID NO: 77331 - RNA, 19 nt, Artificial Sequence
  Description of Artificial Sequence: Synthetic oligonucleotide
  Antisense strand to SEQ ID NO: 77250
auuaguacccaacaauuac

SEQ ID NO: 77332 - RNA, 19 nt, Artificial Sequence
  Description of Artificial Sequence: Synthetic oligonucleotide
  Sense strand starting at position 2924 of SEQ ID NO: 968
ugcccugauggagaguaua

SEQ ID NO: 77333 - RNA, 19 nt, Artificial Sequence
  Description of Artificial Sequence: Synthetic oligonucleotide
  Antisense strand to SEQ ID NO: 77252
uauacucuccaucagggca

SEQ ID NO: 77334 - RNA, 19 nt, Artificial Sequence
  Description of Artificial Sequence: Synthetic oligonucleotide
  Sense strand starting at position 2918 of SEQ ID NO: 968
uagcuaugcccugauggag

SEQ ID NO: 77335 - RNA, 19 nt, Artificial Sequence
  Description of Artificial Sequence: Synthetic oligonucleotide
  Antisense strand to SEQ ID NO: 77254
cuccaucagggcauagcua

SEQ ID NO: 77336 - RNA, 19 nt, Artificial Sequence
  Description of Artificial Sequence: Synthetic oligonucleotide
  Sense strand starting at position 2780 of SEQ ID NO: 968
gggacuacagcaugucaaa

SEQ ID NO: 77337 - RNA, 19 nt, Artificial Sequence
  Description of Artificial Sequence: Synthetic oligonucleotide
  Antisense strand to SEQ ID NO: 77256
uuugacaugcuguaguccc

SEQ ID NO: 77338 - RNA, 19 nt, Artificial Sequence
  Description of Artificial Sequence: Synthetic oligonucleotide
  Sense strand starting at position 2708 of SEQ ID NO: 968
augauucuugccgauuaau

SEQ ID NO: 77339 - RNA, 19 nt, Artificial Sequence
  Description of Artificial Sequence: Synthetic oligonucleotide
  Antisense strand to SEQ ID NO: 77258
auuaaucggcaagaaucau

SEQ ID NO: 77340 - RNA, 19 nt, Artificial Sequence
  Description of Artificial Sequence: Synthetic oligonucleotide
  Sense strand starting at position 2672 of SEQ ID NO: 968
gaaagagaauccguaagua

SEQ ID NO: 77341 - RNA, 19 nt, Artificial Sequence
  Description of Artificial Sequence: Synthetic oligonucleotide
  Antisense strand to SEQ ID NO: 77260
uacuuacggauucucuuuc

SEQ ID NO: 77342 - RNA, 19 nt, Artificial Sequence
  Description of Artificial Sequence: Synthetic oligonucleotide
  Sense strand starting at position 2651 of SEQ ID NO: 968
ucugcaaugggauguauaa

SEQ ID NO: 77343 - RNA, 19 nt, Artificial Sequence
  Description of Artificial Sequence: Synthetic oligonucleotide
  Antisense strand to SEQ ID NO: 77262
uuauacaucccauugcaga

SEQ ID NO: 77344 - RNA, 19 nt, Artificial Sequence
  Description of Artificial Sequence: Synthetic oligonucleotide
  Sense strand starting at position 2571 of SEQ ID NO: 968
ggaaucucauaugugacuu

SEQ ID NO: 77345 - RNA, 19 nt, Artificial Sequence
  Description of Artificial Sequence: Synthetic oligonucleotide
  Antisense strand to SEQ ID NO: 77264
aagucacauaugagauucc

SEQ ID NO: 77346 - RNA, 19 nt, Artificial Sequence
  Description of Artificial Sequence: Synthetic oligonucleotide
  Sense strand starting at position 2570 of SEQ ID NO: 968
gggaaucucauaugugacu

SEQ ID NO: 77347 - RNA, 19 nt, Artificial Sequence
  Description of Artificial Sequence: Synthetic oligonucleotide
  Antisense strand to SEQ ID NO: 77266
agucacauaugagauuccc

SEQ ID NO: 77348 - RNA, 19 nt, Artificial Sequence
  Description of Artificial Sequence: Synthetic oligonucleotide
  Sense strand starting at position 2330 of SEQ ID NO: 968
ccuggagacuuauccauua

SEQ ID NO: 77349 - RNA, 19 nt, Artificial Sequence
  Description of Artificial Sequence: Synthetic oligonucleotide
  Antisense strand to SEQ ID NO: 77268
uaauggauaagucuccagg

SEQ ID NO: 77350 - RNA, 19 nt, Artificial Sequence
  Description of Artificial Sequence: Synthetic oligonucleotide
  Sense strand starting at position 2238 of SEQ ID NO: 968
cugggcaucaggcaucaau

SEQ ID NO: 77351 - RNA, 19 nt, Artificial Sequence
  Description of Artificial Sequence: Synthetic oligonucleotide
  Antisense strand to SEQ ID NO: 77270
auugaugccugaugcccag

SEQ ID NO: 77352 - RNA, 19 nt, Artificial Sequence
  Description of Artificial Sequence: Synthetic oligonucleotide
  Sense strand starting at position 2152 of SEQ ID NO: 968
gaagaagucccuuaugcua

SEQ ID NO: 77353 - RNA, 19 nt, Artificial Sequence
  Description of Artificial Sequence: Synthetic oligonucleotide
  Antisense strand to SEQ ID NO: 77272
uagcauaagggacuucuuc

SEQ ID NO: 77354 - RNA, 19 nt, Artificial Sequence
  Description of Artificial Sequence: Synthetic oligonucleotide
  Sense strand starting at position 2064 of SEQ ID NO: 968
ugguuucugggaggaguca

SEQ ID NO: 77355 - RNA, 19 nt, Artificial Sequence
  Description of Artificial Sequence: Synthetic oligonucleotide
  Antisense strand to SEQ ID NO: 77274
ugacuccucccagaaacca

SEQ ID NO: 77356 - RNA, 19 nt, Artificial Sequence
  Description of Artificial Sequence: Synthetic oligonucleotide
  Sense strand starting at position 1834 of SEQ ID NO: 968
guacuaggcccugauacaa

SEQ ID NO: 77357 - RNA, 19 nt, Artificial Sequence
  Description of Artificial Sequence: Synthetic oligonucleotide
  Antisense strand to SEQ ID NO: 77276
uuguaucagggccuaguac

SEQ ID NO: 77358 - RNA, 19 nt, Artificial Sequence
  Description of Artificial Sequence: Synthetic oligonucleotide
  Sense strand starting at position 1614 of SEQ ID NO: 968
gucccacaaugaucagaau

SEQ ID NO: 77359 - RNA, 19 nt, Artificial Sequence
  Description of Artificial Sequence: Synthetic oligonucleotide
  Antisense strand to SEQ ID NO: 77278
auucugaucauugugggac

SEQ ID NO: 77360 - RNA, 19 nt, Artificial Sequence
  Description of Artificial Sequence: Synthetic oligonucleotide
  Sense strand starting at position 1464 of SEQ ID NO: 968
aguguuugugcucugucau

SEQ ID NO: 77361 - RNA, 19 nt, Artificial Sequence
  Description of Artificial Sequence: Synthetic oligonucleotide
  Antisense strand to SEQ ID NO: 77280
augacagagcacaaacacu

SEQ ID NO: 77362 - RNA, 19 nt, Artificial Sequence
  Description of Artificial Sequence: Synthetic oligonucleotide
  Sense strand starting at position 1223 of SEQ ID NO: 968
ggcucagagggucaguauu

SEQ ID NO: 77363 - RNA, 19 nt, Artificial Sequence
  Description of Artificial Sequence: Synthetic oligonucleotide
  Antisense strand to SEQ ID NO: 77282
aauacugacccucugagcc

SEQ ID NO: 77364 - RNA, 19 nt, Artificial Sequence
  Description of Artificial Sequence: Synthetic oligonucleotide
  Sense strand starting at position 1168 of SEQ ID NO: 968
cuaguuccuugaccugaaa

SEQ ID NO: 77365 - RNA, 19 nt, Artificial Sequence
  Description of Artificial Sequence: Synthetic oligonucleotide
  Antisense strand to SEQ ID NO: 77284
uuucaggucaaggaacuag

SEQ ID NO: 77366 - RNA, 19 nt, Artificial Sequence
  Description of Artificial Sequence: Synthetic oligonucleotide
  Sense strand starting at position 1069 of SEQ ID NO: 968
gccacaacccucuggauga

SEQ ID NO: 77367 - RNA, 19 nt, Artificial Sequence
  Description of Artificial Sequence: Synthetic oligonucleotide
  Antisense strand to SEQ ID NO: 77286
ucauccagaggguuguggc

SEQ ID NO: 77368 - RNA, 19 nt, Artificial Sequence
  Description of Artificial Sequence: Synthetic oligonucleotide
  Sense strand starting at position 880 of SEQ ID NO: 968
gagaaacacuggcucugaa

SEQ ID NO: 77369 - RNA, 19 nt, Artificial Sequence
  Description of Artificial Sequence: Synthetic oligonucleotide
  Antisense strand to SEQ ID NO: 77288
uucagagccaguguuucuc

SEQ ID NO: 77370 - RNA, 19 nt, Artificial Sequence
  Description of Artificial Sequence: Synthetic oligonucleotide
  Sense strand starting at position 654 of SEQ ID NO: 968
uuuguucuagcucagaaau

SEQ ID NO: 77371 - RNA, 19 nt, Artificial Sequence
  Description of Artificial Sequence: Synthetic oligonucleotide
  Antisense strand to SEQ ID NO: 77290
auuucugagcuagaacaaa

SEQ ID NO: 77372 - RNA, 19 nt, Artificial Sequence
  Description of Artificial Sequence: Synthetic oligonucleotide
  Sense strand starting at position 391 of SEQ ID NO: 968
agauuacuugagcaucuuu

SEQ ID NO: 77373 - RNA, 19 nt, Artificial Sequence
  Description of Artificial Sequence: Synthetic oligonucleotide
  Antisense strand to SEQ ID NO: 77292
aaagaugcucaaguaaucu

SEQ ID NO: 77374 - RNA, 19 nt, Artificial Sequence
  Description of Artificial Sequence: Synthetic oligonucleotide
  Sense strand starting at position 236 of SEQ ID NO: 968
ugaucaaugguaggaaugu

SEQ ID NO: 77375 - RNA, 19 nt, Artificial Sequence
  Description of Artificial Sequence: Synthetic oligonucleotide
  Antisense strand to SEQ ID NO: 77294
acauuccuaccauugauca

SEQ ID NO: 77376 - RNA, 19 nt, Artificial Sequence
  Description of Artificial Sequence: Synthetic oligonucleotide
  Sense strand starting at position 58 of SEQ ID NO: 968
uggaacagucacugaacua

SEQ ID NO: 77377 - RNA, 19 nt, Artificial Sequence
  Description of Artificial Sequence: Synthetic oligonucleotide
  Antisense strand to SEQ ID NO: 77296
uaguucagugacuguucca

SEQ ID NO: 77378 - RNA, 19 nt, Artificial Sequence
  Description of Artificial Sequence: Synthetic oligonucleotide
  Sense strand starting at position 48 of SEQ ID NO: 968
ugaguaaggcuggaacagu

SEQ ID NO: 77379 - RNA, 19 nt, Artificial Sequence
  Description of Artificial Sequence: Synthetic oligonucleotide
  Antisense strand to SEQ ID NO: 77298
acuguuccagccuuacuca

SEQ ID NO: 77380 - RNA, 19 nt, Artificial Sequence
  Description of Artificial Sequence: Synthetic oligonucleotide
  Sense strand starting at position 3735 of SEQ ID NO: 969
gauuguuggcuccauuaaa

SEQ ID NO: 77381 - RNA, 19 nt, Artificial Sequence
  Description of Artificial Sequence: Synthetic oligonucleotide
  Antisense strand to SEQ ID NO: 77300
uuuaauggagccaacaauc

SEQ ID NO: 77382 - RNA, 19 nt, Artificial Sequence
  Description of Artificial Sequence: Synthetic oligonucleotide
  Sense strand starting at position 3723 of SEQ ID NO: 969
uuaacaauugcugauuguu

SEQ ID NO: 77383 - RNA, 19 nt, Artificial Sequence
  Description of Artificial Sequence: Synthetic oligonucleotide
  Antisense strand to SEQ ID NO: 77302
aacaaucagcaauuguuaa

SEQ ID NO: 77384 - RNA, 19 nt, Artificial Sequence
  Description of Artificial Sequence: Synthetic oligonucleotide
  Sense strand starting at position 3594 of SEQ ID NO: 969
auguuuauugucugacaua

SEQ ID NO: 77385 - RNA, 19 nt, Artificial Sequence
  Description of Artificial Sequence: Synthetic oligonucleotide
  Antisense strand to SEQ ID NO: 77304
uaugucagacaauaaacau

SEQ ID NO: 77386 - RNA, 19 nt, Artificial Sequence
  Description of Artificial Sequence: Synthetic oligonucleotide
  Sense strand starting at position 3592 of SEQ ID NO: 969
ggauguuuauugucugaca

SEQ ID NO: 77387 - RNA, 19 nt, Artificial Sequence
  Description of Artificial Sequence: Synthetic oligonucleotide
  Antisense strand to SEQ ID NO: 77306
ugucagacaauaaacaucc

SEQ ID NO: 77388 - RNA, 19 nt, Artificial Sequence
  Description of Artificial Sequence: Synthetic oligonucleotide
  Sense strand starting at position 3583 of SEQ ID NO: 969
gcagacuagggauguuuau

SEQ ID NO: 77389 - RNA, 19 nt, Artificial Sequence
  Description of Artificial Sequence: Synthetic oligonucleotide
  Antisense strand to SEQ ID NO: 77308
auaaacaucccuagucugc

SEQ ID NO: 77390 - RNA, 19 nt, Artificial Sequence
  Description of Artificial Sequence: Synthetic oligonucleotide
  Sense strand starting at position 3296 of SEQ ID NO: 969
gcucgaggucuaugaagga

SEQ ID NO: 77391 - RNA, 19 nt, Artificial Sequence
  Description of Artificial Sequence: Synthetic oligonucleotide
  Antisense strand to SEQ ID NO: 77310
uccuucauagaccucgagc

SEQ ID NO: 77392 - RNA, 19 nt, Artificial Sequence
  Description of Artificial Sequence: Synthetic oligonucleotide
  Sense strand starting at position 2985 of SEQ ID NO: 969
ugcaguccugcauucugua

SEQ ID NO: 77393 - RNA, 19 nt, Artificial Sequence
  Description of Artificial Sequence: Synthetic oligonucleotide
  Antisense strand to SEQ ID NO: 77312
uacagaaugcaggacugca

SEQ ID NO: 77394 - RNA, 19 nt, Artificial Sequence
  Description of Artificial Sequence: Synthetic oligonucleotide
  Sense strand starting at position 2804 of SEQ ID NO: 969
guaagaaacccuuagcaau

SEQ ID NO: 77395 - RNA, 19 nt, Artificial Sequence
  Description of Artificial Sequence: Synthetic oligonucleotide
  Antisense strand to SEQ ID NO: 77314
auugcuaaggguuucuuac

SEQ ID NO: 77396 - RNA, 19 nt, Artificial Sequence
  Description of Artificial Sequence: Synthetic oligonucleotide
  Sense strand starting at position 2554 of SEQ ID NO: 969
gcaagugcaauggaucaua

SEQ ID NO: 77397 - RNA, 19 nt, Artificial Sequence
  Description of Artificial Sequence: Synthetic oligonucleotide
  Antisense strand to SEQ ID NO: 77316
uaugauccauugcacuugc

SEQ ID NO: 77398 - RNA, 19 nt, Artificial Sequence
  Description of Artificial Sequence: Synthetic oligonucleotide
  Sense strand starting at position 2269 of SEQ ID NO: 969
gggaaaugugaguaauagc

SEQ ID NO: 77399 - RNA, 19 nt, Artificial Sequence
  Description of Artificial Sequence: Synthetic oligonucleotide
  Antisense strand to SEQ ID NO: 77318
gcuauuacucacauuuccc

SEQ ID NO: 77400 - RNA, 19 nt, Artificial Sequence
  Description of Artificial Sequence: Synthetic oligonucleotide
  Sense strand starting at position 2073 of SEQ ID NO: 969
ggacaauguuuacuccauu

SEQ ID NO: 77401 - RNA, 19 nt, Artificial Sequence
  Description of Artificial Sequence: Synthetic oligonucleotide
  Antisense strand to SEQ ID NO: 77320
aauggaguaaacauugucc

SEQ ID NO: 77402 - RNA, 19 nt, Artificial Sequence
  Description of Artificial Sequence: Synthetic oligonucleotide
  Sense strand starting at position 2050 of SEQ ID NO: 969
gccugugugguggauuuca

SEQ ID NO: 77403 - RNA, 19 nt, Artificial Sequence
  Description of Artificial Sequence: Synthetic oligonucleotide
  Antisense strand to SEQ ID NO: 77322
ugaaauccaccacacaggc

SEQ ID NO: 77404 - RNA, 19 nt, Artificial Sequence
  Description of Artificial Sequence: Synthetic oligonucleotide
  Sense strand starting at position 1752 of SEQ ID NO: 969
ggguacuuaccuggucuga

SEQ ID NO: 77405 - RNA, 19 nt, Artificial Sequence
  Description of Artificial Sequence: Synthetic oligonucleotide
  Antisense strand to SEQ ID NO: 77324
ucagaccagguaaguaccc

SEQ ID NO: 77406 - RNA, 19 nt, Artificial Sequence
  Description of Artificial Sequence: Synthetic oligonucleotide
  Sense strand starting at position 1541 of SEQ ID NO: 969
uggccuauuuggcuagauu

SEQ ID NO: 77407 - RNA, 19 nt, Artificial Sequence
  Description of Artificial Sequence: Synthetic oligonucleotide
  Antisense strand to SEQ ID NO: 77326
aaucuagccaaauaggcca

SEQ ID NO: 77408 - RNA, 19 nt, Artificial Sequence
  Description of Artificial Sequence: Synthetic oligonucleotide
  Sense strand starting at position 1515 of SEQ ID NO: 969
uuccauuaagggugccaaa

SEQ ID NO: 77409 - RNA, 19 nt, Artificial Sequence
  Description of Artificial Sequence: Synthetic oligonucleotide
  Antisense strand to SEQ ID NO: 77328
uuuggcacccuuaauggaa

SEQ ID NO: 77410 - RNA, 19 nt, Artificial Sequence
  Description of Artificial Sequence: Synthetic oligonucleotide
  Sense strand starting at position 1509 of SEQ ID NO: 969
acugcuuuccauuaagggu

SEQ ID NO: 77411 - RNA, 19 nt, Artificial Sequence
  Description of Artificial Sequence: Synthetic oligonucleotide
  Antisense strand to SEQ ID NO: 77330
acccuuaauggaaagcagu

SEQ ID NO: 77412 - RNA, 19 nt, Artificial Sequence
  Description of Artificial Sequence: Synthetic oligonucleotide
  Sense strand starting at position 1221 of SEQ ID NO: 969
aagagaucauaggaugaag

SEQ ID NO: 77413 - RNA, 19 nt, Artificial Sequence
  Description of Artificial Sequence: Synthetic oligonucleotide
  Antisense strand to SEQ ID NO: 77332
cuucauccuaugaucucuu

SEQ ID NO: 77414 - RNA, 19 nt, Artificial Sequence
  Description of Artificial Sequence: Synthetic oligonucleotide
  Sense strand starting at position 1148 of SEQ ID NO: 969
ucauaaacaugcucugaag

SEQ ID NO: 77415 - RNA, 19 nt, Artificial Sequence
  Description of Artificial Sequence: Synthetic oligonucleotide
  Antisense strand to SEQ ID NO: 77334
cuucagagcauguuuauga

SEQ ID NO: 77416 - RNA, 19 nt, Artificial Sequence
  Description of Artificial Sequence: Synthetic oligonucleotide
  Sense strand starting at position 1117 of SEQ ID NO: 969
cguaaaucacugugggaac

SEQ ID NO: 77417 - RNA, 19 nt, Artificial Sequence
  Description of Artificial Sequence: Synthetic oligonucleotide
  Antisense strand to SEQ ID NO: 77336
guucccacagugauuuacg

SEQ ID NO: 77418 - RNA, 19 nt, Artificial Sequence
  Description of Artificial Sequence: Synthetic oligonucleotide
  Sense strand starting at position 1094 of SEQ ID NO: 969
ccagaucaguuugucacaa

SEQ ID NO: 77419 - RNA, 19 nt, Artificial Sequence
  Description of Artificial Sequence: Synthetic oligonucleotide
  Antisense strand to SEQ ID NO: 77338
uugugacaaacugaucugg

SEQ ID NO: 77420 - RNA, 19 nt, Artificial Sequence
  Description of Artificial Sequence: Synthetic oligonucleotide
  Sense strand starting at position 1093 of SEQ ID NO: 969
cccagaucaguuugucaca

SEQ ID NO: 77421 - RNA, 19 nt, Artificial Sequence
  Description of Artificial Sequence: Synthetic oligonucleotide
  Antisense strand to SEQ ID NO: 77340
ugugacaaacugaucuggg

SEQ ID NO: 77422 - RNA, 19 nt, Artificial Sequence
  Description of Artificial Sequence: Synthetic oligonucleotide
  Sense strand starting at position 1083 of SEQ ID NO: 969
agguuaugagcccagauca

SEQ ID NO: 77423 - RNA, 19 nt, Artificial Sequence
  Description of Artificial Sequence: Synthetic oligonucleotide
  Antisense strand to SEQ ID NO: 77342
ugaucugggcucauaaccu

SEQ ID NO: 77424 - RNA, 19 nt, Artificial Sequence
  Description of Artificial Sequence: Synthetic oligonucleotide
  Sense strand starting at position 825 of SEQ ID NO: 969
cauaucugcgagcauagaa

SEQ ID NO: 77425 - RNA, 19 nt, Artificial Sequence
  Description of Artificial Sequence: Synthetic oligonucleotide
  Antisense strand to SEQ ID NO: 77344
uucuaugcucgcagauaug

SEQ ID NO: 77426 - RNA, 19 nt, Artificial Sequence
  Description of Artificial Sequence: Synthetic oligonucleotide
  Sense strand starting at position 777 of SEQ ID NO: 969
uguauaugugagcauauau

SEQ ID NO: 77427 - RNA, 19 nt, Artificial Sequence
  Description of Artificial Sequence: Synthetic oligonucleotide
  Antisense strand to SEQ ID NO: 77346
auauaugcucacauauaca

SEQ ID NO: 77428 - RNA, 19 nt, Artificial Sequence
  Description of Artificial Sequence: Synthetic oligonucleotide
  Sense strand starting at position 751 of SEQ ID NO: 969
auagaucugcgauaugcua

SEQ ID NO: 77429 - RNA, 19 nt, Artificial Sequence
  Description of Artificial Sequence: Synthetic oligonucleotide
  Antisense strand to SEQ ID NO: 77348
uagcauaucgcagaucuau

SEQ ID NO: 77430 - RNA, 19 nt, Artificial Sequence
  Description of Artificial Sequence: Synthetic oligonucleotide
  Sense strand starting at position 748 of SEQ ID NO: 969
uauauagaucugcgauaug

SEQ ID NO: 77431 - RNA, 19 nt, Artificial Sequence
  Description of Artificial Sequence: Synthetic oligonucleotide
  Antisense strand to SEQ ID NO: 77350
cauaucgcagaucuauaua

SEQ ID NO: 77432 - RNA, 19 nt, Artificial Sequence
  Description of Artificial Sequence: Synthetic oligonucleotide
  Sense strand starting at position 733 of SEQ ID NO: 969
gugcaugugccucuguaua

SEQ ID NO: 77433 - RNA, 19 nt, Artificial Sequence
  Description of Artificial Sequence: Synthetic oligonucleotide
  Antisense strand to SEQ ID NO: 77352
uauacagaggcacaugcac

SEQ ID NO: 77434 - RNA, 19 nt, Artificial Sequence
  Description of Artificial Sequence: Synthetic oligonucleotide
  Sense strand starting at position 732 of SEQ ID NO: 969
ugugcaugugccucuguau

SEQ ID NO: 77435 - RNA, 19 nt, Artificial Sequence
  Description of Artificial Sequence: Synthetic oligonucleotide
  Antisense strand to SEQ ID NO: 77354
auacagaggcacaugcaca

SEQ ID NO: 77436 - RNA, 19 nt, Artificial Sequence
  Description of Artificial Sequence: Synthetic oligonucleotide
  Sense strand starting at position 609 of SEQ ID NO: 969
ucuguugcagaauauauua

SEQ ID NO: 77437 - RNA, 19 nt, Artificial Sequence
  Description of Artificial Sequence: Synthetic oligonucleotide
  Antisense strand to SEQ ID NO: 77356
uaauauauucugcaacaga

SEQ ID NO: 77438 - RNA, 19 nt, Artificial Sequence
  Description of Artificial Sequence: Synthetic oligonucleotide
  Sense strand starting at position 606 of SEQ ID NO: 969
gacucuguugcagaauaua

SEQ ID NO: 77439 - RNA, 19 nt, Artificial Sequence
  Description of Artificial Sequence: Synthetic oligonucleotide
  Antisense strand to SEQ ID NO: 77358
uauauucugcaacagaguc

SEQ ID NO: 77440 - RNA, 19 nt, Artificial Sequence
  Description of Artificial Sequence: Synthetic oligonucleotide
  Sense strand starting at position 579 of SEQ ID NO: 969
caugucugugagcauauau

SEQ ID NO: 77441 - RNA, 19 nt, Artificial Sequence
  Description of Artificial Sequence: Synthetic oligonucleotide
  Antisense strand to SEQ ID NO: 77360
auauaugcucacagacaug

SEQ ID NO: 77442 - RNA, 19 nt, Artificial Sequence
  Description of Artificial Sequence: Synthetic oligonucleotide
  Sense strand starting at position 473 of SEQ ID NO: 969
ucugcauggguaugaggau

SEQ ID NO: 77443 - RNA, 19 nt, Artificial Sequence
  Description of Artificial Sequence: Synthetic oligonucleotide
  Antisense strand to SEQ ID NO: 77362
auccucauacccaugcaga

SEQ ID NO: 77444 - RNA, 19 nt, Artificial Sequence
  Description of Artificial Sequence: Synthetic oligonucleotide
  Sense strand starting at position 367 of SEQ ID NO: 969
gggcauuaugaguguagau

SEQ ID NO: 77445 - RNA, 19 nt, Artificial Sequence
  Description of Artificial Sequence: Synthetic oligonucleotide
  Antisense strand to SEQ ID NO: 77364
aucuacacucauaaugccc

SEQ ID NO: 77446 - RNA, 19 nt, Artificial Sequence
  Description of Artificial Sequence: Synthetic oligonucleotide
  Sense strand starting at position 366 of SEQ ID NO: 969
agggcauuaugaguguaga

SEQ ID NO: 77447 - RNA, 19 nt, Artificial Sequence
  Description of Artificial Sequence: Synthetic oligonucleotide
  Antisense strand to SEQ ID NO: 77366
ucuacacucauaaugcccu

SEQ ID NO: 77448 - RNA, 19 nt, Artificial Sequence
  Description of Artificial Sequence: Synthetic oligonucleotide
  Sense strand starting at position 361 of SEQ ID NO: 969
uucugagggcauuaugagu

SEQ ID NO: 77449 - RNA, 19 nt, Artificial Sequence
  Description of Artificial Sequence: Synthetic oligonucleotide
  Antisense strand to SEQ ID NO: 77368
acucauaaugcccucagaa

SEQ ID NO: 77450 - RNA, 19 nt, Artificial Sequence
  Description of Artificial Sequence: Synthetic oligonucleotide
  Sense strand starting at position 342 of SEQ ID NO: 969
ggcuucugugaauaggcau

SEQ ID NO: 77451 - RNA, 19 nt, Artificial Sequence
  Description of Artificial Sequence: Synthetic oligonucleotide
  Antisense strand to SEQ ID NO: 77370
augccuauucacagaagcc

SEQ ID NO: 77452 - RNA, 19 nt, Artificial Sequence
  Description of Artificial Sequence: Synthetic oligonucleotide
  Sense strand starting at position 292 of SEQ ID NO: 969
auggauaaaucaucccagu

SEQ ID NO: 77453 - RNA, 19 nt, Artificial Sequence
  Description of Artificial Sequence: Synthetic oligonucleotide
  Antisense strand to SEQ ID NO: 77372
acugggaugauuuauccau

SEQ ID NO: 77454 - RNA, 19 nt, Artificial Sequence
  Description of Artificial Sequence: Synthetic oligonucleotide
  Sense strand starting at position 189 of SEQ ID NO: 969
uagguaagaaaugguaagu

SEQ ID NO: 77455 - RNA, 19 nt, Artificial Sequence
  Description of Artificial Sequence: Synthetic oligonucleotide
  Antisense strand to SEQ ID NO: 77374
acuuaccauuucuuaccua

SEQ ID NO: 77456 - RNA, 19 nt, Artificial Sequence
  Description of Artificial Sequence: Synthetic oligonucleotide
  Sense strand starting at position 158 of SEQ ID NO: 969
gcuuaaaugagagauugcu

SEQ ID NO: 77457 - RNA, 19 nt, Artificial Sequence
  Description of Artificial Sequence: Synthetic oligonucleotide
  Antisense strand to SEQ ID NO: 77376
agcaaucucucauuuaagc

SEQ ID NO: 77458 - RNA, 19 nt, Artificial Sequence
  Description of Artificial Sequence: Synthetic oligonucleotide
  Sense strand starting at position 98 of SEQ ID NO: 969
cagaaauggcaucagucuu

SEQ ID NO: 77459 - RNA, 19 nt, Artificial Sequence
  Description of Artificial Sequence: Synthetic oligonucleotide
  Antisense strand to SEQ ID NO: 77378
aagacugaugccauuucug

SEQ ID NO: 77460 - RNA, 19 nt, Artificial Sequence
  Description of Artificial Sequence: Synthetic oligonucleotide
  Sense strand starting at position 3560 of SEQ ID NO: 970
gguuaagaauucuuucuuu

SEQ ID NO: 77461 - RNA, 19 nt, Artificial Sequence
  Description of Artificial Sequence: Synthetic oligonucleotide
  Antisense strand to SEQ ID NO: 77380
aaagaaagaauucuuaacc

SEQ ID NO: 77462 - RNA, 19 nt, Artificial Sequence
  Description of Artificial Sequence: Synthetic oligonucleotide
  Sense strand starting at position 3422 of SEQ ID NO: 970
ggugauugcccuuguauuc

SEQ ID NO: 77463 - RNA, 19 nt, Artificial Sequence
  Description of Artificial Sequence: Synthetic oligonucleotide
  Antisense strand to SEQ ID NO: 77382
gaauacaagggcaaucacc

SEQ ID NO: 77464 - RNA, 19 nt, Artificial Sequence
  Description of Artificial Sequence: Synthetic oligonucleotide
  Sense strand starting at position 3280 of SEQ ID NO: 970
cgaacugucuauguguaag

SEQ ID NO: 77465 - RNA, 19 nt, Artificial Sequence
  Description of Artificial Sequence: Synthetic oligonucleotide
  Antisense strand to SEQ ID NO: 77384
cuuacacauagacaguucg

SEQ ID NO: 77466 - RNA, 19 nt, Artificial Sequence
  Description of Artificial Sequence: Synthetic oligonucleotide
  Sense strand starting at position 3279 of SEQ ID NO: 970
gcgaacugucuauguguaa

SEQ ID NO: 77467 - RNA, 19 nt, Artificial Sequence
  Description of Artificial Sequence: Synthetic oligonucleotide
  Antisense strand to SEQ ID NO: 77386
uuacacauagacaguucgc

SEQ ID NO: 77468 - RNA, 19 nt, Artificial Sequence
  Description of Artificial Sequence: Synthetic oligonucleotide
  Sense strand starting at position 3277 of SEQ ID NO: 970
aagcgaacugucuaugugu

SEQ ID NO: 77469 - RNA, 19 nt, Artificial Sequence
  Description of Artificial Sequence: Synthetic oligonucleotide
  Antisense strand to SEQ ID NO: 77388
acacauagacaguucgcuu

SEQ ID NO: 77470 - RNA, 19 nt, Artificial Sequence
  Description of Artificial Sequence: Synthetic oligonucleotide
  Sense strand starting at position 3264 of SEQ ID NO: 970
uuauaugccuucuaagcga

SEQ ID NO: 77471 - RNA, 19 nt, Artificial Sequence
  Description of Artificial Sequence: Synthetic oligonucleotide
  Antisense strand to SEQ ID NO: 77390
ucgcuuagaaggcauauaa

SEQ ID NO: 77472 - RNA, 19 nt, Artificial Sequence
  Description of Artificial Sequence: Synthetic oligonucleotide
  Sense strand starting at position 2988 of SEQ ID NO: 970
ccgagagccuagggucaau

SEQ ID NO: 77473 - RNA, 19 nt, Artificial Sequence
  Description of Artificial Sequence: Synthetic oligonucleotide
  Antisense strand to SEQ ID NO: 77392
auugacccuaggcucucgg

SEQ ID NO: 77474 - RNA, 19 nt, Artificial Sequence
  Description of Artificial Sequence: Synthetic oligonucleotide
  Sense strand starting at position 2917 of SEQ ID NO: 970
uagggaaucugagaccaau

SEQ ID NO: 77475 - RNA, 19 nt, Artificial Sequence
  Description of Artificial Sequence: Synthetic oligonucleotide
  Antisense strand to SEQ ID NO: 77394
auuggucucagauucccua

SEQ ID NO: 77476 - RNA, 19 nt, Artificial Sequence
  Description of Artificial Sequence: Synthetic oligonucleotide
  Sense strand starting at position 2546 of SEQ ID NO: 970
gacguaaauuaccaguauu

SEQ ID NO: 77477 - RNA, 19 nt, Artificial Sequence
  Description of Artificial Sequence: Synthetic oligonucleotide
  Antisense strand to SEQ ID NO: 77396
aauacugguaauuuacguc

SEQ ID NO: 77478 - RNA, 19 nt, Artificial Sequence
  Description of Artificial Sequence: Synthetic oligonucleotide
  Sense strand starting at position 2545 of SEQ ID NO: 970
agacguaaauuaccaguau

SEQ ID NO: 77479 - RNA, 19 nt, Artificial Sequence
  Description of Artificial Sequence: Synthetic oligonucleotide
  Antisense strand to SEQ ID NO: 77398
auacugguaauuuacgucu

SEQ ID NO: 77480 - RNA, 19 nt, Artificial Sequence
  Description of Artificial Sequence: Synthetic oligonucleotide
  Sense strand starting at position 2536 of SEQ ID NO: 970
uguagaaucagacguaaau

SEQ ID NO: 77481 - RNA, 19 nt, Artificial Sequence
  Description of Artificial Sequence: Synthetic oligonucleotide
  Antisense strand to SEQ ID NO: 77400
auuuacgucugauucuaca

SEQ ID NO: 77482 - RNA, 19 nt, Artificial Sequence
  Description of Artificial Sequence: Synthetic oligonucleotide
  Sense strand starting at position 2534 of SEQ ID NO: 970
uauguagaaucagacguaa

SEQ ID NO: 77483 - RNA, 19 nt, Artificial Sequence
  Description of Artificial Sequence: Synthetic oligonucleotide
  Antisense strand to SEQ ID NO: 77402
uuacgucugauucuacaua

SEQ ID NO: 77484 - RNA, 19 nt, Artificial Sequence
  Description of Artificial Sequence: Synthetic oligonucleotide
  Sense strand starting at position 2390 of SEQ ID NO: 970
gggcgauuaucaucuaauu

SEQ ID NO: 77485 - RNA, 19 nt, Artificial Sequence
  Description of Artificial Sequence: Synthetic oligonucleotide
  Antisense strand to SEQ ID NO: 77404
aauuagaugauaaucgccc

SEQ ID NO: 77486 - RNA, 19 nt, Artificial Sequence
  Description of Artificial Sequence: Synthetic oligonucleotide
  Sense strand starting at position 2388 of SEQ ID NO: 970
uugggcgauuaucaucuaa

SEQ ID NO: 77487 - RNA, 19 nt, Artificial Sequence
  Description of Artificial Sequence: Synthetic oligonucleotide
  Antisense strand to SEQ ID NO: 77406
uuagaugauaaucgcccaa

SEQ ID NO: 77488 - RNA, 19 nt, Artificial Sequence
  Description of Artificial Sequence: Synthetic oligonucleotide
  Sense strand starting at position 2307 of SEQ ID NO: 970
uggcacuucuuugcaggaa

SEQ ID NO: 77489 - RNA, 19 nt, Artificial Sequence
  Description of Artificial Sequence: Synthetic oligonucleotide
  Antisense strand to SEQ ID NO: 77408
uuccugcaaagaagugcca

SEQ ID NO: 77490 - RNA, 19 nt, Artificial Sequence
  Description of Artificial Sequence: Synthetic oligonucleotide
  Sense strand starting at position 2211 of SEQ ID NO: 970
gcgccugaucuuuaauccu

SEQ ID NO: 77491 - RNA, 19 nt, Artificial Sequence
  Description of Artificial Sequence: Synthetic oligonucleotide
  Antisense strand to SEQ ID NO: 77410
aggauuaaagaucaggcgc

SEQ ID NO: 77492 - RNA, 19 nt, Artificial Sequence
  Description of Artificial Sequence: Synthetic oligonucleotide
  Sense strand starting at position 2207 of SEQ ID NO: 970
gcgggcgccugaucuuuaa

SEQ ID NO: 77493 - RNA, 19 nt, Artificial Sequence
  Description of Artificial Sequence: Synthetic oligonucleotide
  Antisense strand to SEQ ID NO: 77412
uuaaagaucaggcgcccgc

SEQ ID NO: 77494 - RNA, 19 nt, Artificial Sequence
  Description of Artificial Sequence: Synthetic oligonucleotide
  Sense strand starting at position 1111 of SEQ ID NO: 970
gugguuaaauaauugaaag

SEQ ID NO: 77495 - RNA, 19 nt, Artificial Sequence
  Description of Artificial Sequence: Synthetic oligonucleotide
  Antisense strand to SEQ ID NO: 77414
cuuucaauuauuuaaccac

SEQ ID NO: 77496 - RNA, 19 nt, Artificial Sequence
  Description of Artificial Sequence: Synthetic oligonucleotide
  Sense strand starting at position 1104 of SEQ ID NO: 970
uacgcaugugguuaaauaa

SEQ ID NO: 77497 - RNA, 19 nt, Artificial Sequence
  Description of Artificial Sequence: Synthetic oligonucleotide
  Antisense strand to SEQ ID NO: 77416
uuauuuaaccacaugcgua

SEQ ID NO: 77498 - RNA, 19 nt, Artificial Sequence
  Description of Artificial Sequence: Synthetic oligonucleotide
  Sense strand starting at position 1103 of SEQ ID NO: 970
auacgcaugugguuaaaua

SEQ ID NO: 77499 - RNA, 19 nt, Artificial Sequence
  Description of Artificial Sequence: Synthetic oligonucleotide
  Antisense strand to SEQ ID NO: 77418
uauuuaaccacaugcguau

SEQ ID NO: 77500 - RNA, 19 nt, Artificial Sequence
  Description of Artificial Sequence: Synthetic oligonucleotide
  Sense strand starting at position 1100 of SEQ ID NO: 970
uuaauacgcaugugguuaa

SEQ ID NO: 77501 - RNA, 19 nt, Artificial Sequence
  Description of Artificial Sequence: Synthetic oligonucleotide
  Antisense strand to SEQ ID NO: 77420
uuaaccacaugcguauuaa

SEQ ID NO: 77502 - RNA, 19 nt, Artificial Sequence
  Description of Artificial Sequence: Synthetic oligonucleotide
  Sense strand starting at position 1098 of SEQ ID NO: 970
aguuaauacgcaugugguu

SEQ ID NO: 77503 - RNA, 19 nt, Artificial Sequence
  Description of Artificial Sequence: Synthetic oligonucleotide
  Antisense strand to SEQ ID NO: 77422
aaccacaugcguauuaacu

SEQ ID NO: 77504 - RNA, 19 nt, Artificial Sequence
  Description of Artificial Sequence: Synthetic oligonucleotide
  Sense strand starting at position 754 of SEQ ID NO: 970
cagccuggcugauagcaau

SEQ ID NO: 77505 - RNA, 19 nt, Artificial Sequence
  Description of Artificial Sequence: Synthetic oligonucleotide
  Antisense strand to SEQ ID NO: 77424
auugcuaucagccaggcug

SEQ ID NO: 77506 - RNA, 19 nt, Artificial Sequence
  Description of Artificial Sequence: Synthetic oligonucleotide
  Sense strand starting at position 359 of SEQ ID NO: 970
ccuauuaugucacucauga

SEQ ID NO: 77507 - RNA, 19 nt, Artificial Sequence
  Description of Artificial Sequence: Synthetic oligonucleotide
  Antisense strand to SEQ ID NO: 77426
ucaugagugacauaauagg

SEQ ID NO: 77508 - RNA, 19 nt, Artificial Sequence
  Description of Artificial Sequence: Synthetic oligonucleotide
  Sense strand starting at position 137 of SEQ ID NO: 970
guugaccuccaaugagaag

SEQ ID NO: 77509 - RNA, 19 nt, Artificial Sequence
  Description of Artificial Sequence: Synthetic oligonucleotide
  Antisense strand to SEQ ID NO: 77428
cuucucauuggaggucaac

SEQ ID NO: 77510 - RNA, 19 nt, Artificial Sequence
  Description of Artificial Sequence: Synthetic oligonucleotide
  Sense strand starting at position 130 of SEQ ID NO: 970
gugucaaguugaccuccaa

SEQ ID NO: 77511 - RNA, 19 nt, Artificial Sequence
  Description of Artificial Sequence: Synthetic oligonucleotide
  Antisense strand to SEQ ID NO: 77430
uuggaggucaacuugacac

SEQ ID NO: 77512 - RNA, 19 nt, Artificial Sequence
  Description of Artificial Sequence: Synthetic oligonucleotide
  Sense strand starting at position 3934 of SEQ ID NO: 971
ucugcaguuguugaaagua

SEQ ID NO: 77513 - RNA, 19 nt, Artificial Sequence
  Description of Artificial Sequence: Synthetic oligonucleotide
  Antisense strand to SEQ ID NO: 77432
uacuuucaacaacugcaga

SEQ ID NO: 77514 - RNA, 19 nt, Artificial Sequence
  Description of Artificial Sequence: Synthetic oligonucleotide
  Sense strand starting at position 3888 of SEQ ID NO: 971
uggucuacauuggugaaca

SEQ ID NO: 77515 - RNA, 19 nt, Artificial Sequence
  Description of Artificial Sequence: Synthetic oligonucleotide
  Antisense strand to SEQ ID NO: 77434
uguucaccaauguagacca

SEQ ID NO: 77516 - RNA, 19 nt, Artificial Sequence
  Description of Artificial Sequence: Synthetic oligonucleotide
  Sense strand starting at position 3824 of SEQ ID NO: 971
gcauaugcacuguaugauu

SEQ ID NO: 77517 - RNA, 19 nt, Artificial Sequence
  Description of Artificial Sequence: Synthetic oligonucleotide
  Antisense strand to SEQ ID NO: 77436
aaucauacagugcauaugc

SEQ ID NO: 77518 - RNA, 19 nt, Artificial Sequence
  Description of Artificial Sequence: Synthetic oligonucleotide
  Sense strand starting at position 3777 of SEQ ID NO: 971
gauaucucauuguuaugga

SEQ ID NO: 77519 - RNA, 19 nt, Artificial Sequence
  Description of Artificial Sequence: Synthetic oligonucleotide
  Antisense strand to SEQ ID NO: 77438
uccauaacaaugagauauc

SEQ ID NO: 77520 - RNA, 19 nt, Artificial Sequence
  Description of Artificial Sequence: Synthetic oligonucleotide
  Sense strand starting at position 3659 of SEQ ID NO: 971
uguauuggguuaucaucau

SEQ ID NO: 77521 - RNA, 19 nt, Artificial Sequence
  Description of Artificial Sequence: Synthetic oligonucleotide
  Antisense strand to SEQ ID NO: 77440
augaugauaacccaauaca

SEQ ID NO: 77522 - RNA, 19 nt, Artificial Sequence
  Description of Artificial Sequence: Synthetic oligonucleotide
  Sense strand starting at position 3657 of SEQ ID NO: 971
gauguauuggguuaucauc

SEQ ID NO: 77523 - RNA, 19 nt, Artificial Sequence
  Description of Artificial Sequence: Synthetic oligonucleotide
  Antisense strand to SEQ ID NO: 77442
gaugauaacccaauacauc

SEQ ID NO: 77524 - RNA, 19 nt, Artificial Sequence
  Description of Artificial Sequence: Synthetic oligonucleotide
  Sense strand starting at position 2640 of SEQ ID NO: 971
guucgaacuuauccauauu

SEQ ID NO: 77525 - RNA, 19 nt, Artificial Sequence
  Description of Artificial Sequence: Synthetic oligonucleotide
  Antisense strand to SEQ ID NO: 77444
aauauggauaaguucgaac

SEQ ID NO: 77526 - RNA, 19 nt, Artificial Sequence
  Description of Artificial Sequence: Synthetic oligonucleotide
  Sense strand starting at position 2637 of SEQ ID NO: 971
gguguucgaacuuauccau

SEQ ID NO: 77527 - RNA, 19 nt, Artificial Sequence
  Description of Artificial Sequence: Synthetic oligonucleotide
  Antisense strand to SEQ ID NO: 77446
auggauaaguucgaacacc

SEQ ID NO: 77528 - RNA, 19 nt, Artificial Sequence
  Description of Artificial Sequence: Synthetic oligonucleotide
  Sense strand starting at position 2574 of SEQ ID NO: 971
ugauauggccuguaucaca

SEQ ID NO: 77529 - RNA, 19 nt, Artificial Sequence
  Description of Artificial Sequence: Synthetic oligonucleotide
  Antisense strand to SEQ ID NO: 77448
ugugauacaggccauauca

SEQ ID NO: 77530 - RNA, 19 nt, Artificial Sequence
  Description of Artificial Sequence: Synthetic oligonucleotide
  Sense strand starting at position 2572 of SEQ ID NO: 971
aaugauauggccuguauca

SEQ ID NO: 77531 - RNA, 19 nt, Artificial Sequence
  Description of Artificial Sequence: Synthetic oligonucleotide
  Antisense strand to SEQ ID NO: 77450
ugauacaggccauaucauu

SEQ ID NO: 77532 - RNA, 19 nt, Artificial Sequence
  Description of Artificial Sequence: Synthetic oligonucleotide
  Sense strand starting at position 2545 of SEQ ID NO: 971
aggaaagcuaucuggugau

SEQ ID NO: 77533 - RNA, 19 nt, Artificial Sequence
  Description of Artificial Sequence: Synthetic oligonucleotide
  Antisense strand to SEQ ID NO: 77452
aucaccagauagcuuuccu

SEQ ID NO: 77534 - RNA, 19 nt, Artificial Sequence
  Description of Artificial Sequence: Synthetic oligonucleotide
  Sense strand starting at position 2544 of SEQ ID NO: 971
aaggaaagcuaucugguga

SEQ ID NO: 77535 - RNA, 19 nt, Artificial Sequence
  Description of Artificial Sequence: Synthetic oligonucleotide
  Antisense strand to SEQ ID NO: 77454
ucaccagauagcuuuccuu

SEQ ID NO: 77536 - RNA, 19 nt, Artificial Sequence
  Description of Artificial Sequence: Synthetic oligonucleotide
  Sense strand starting at position 2517 of SEQ ID NO: 971
uggguuccuagaugaacaa

SEQ ID NO: 77537 - RNA, 19 nt, Artificial Sequence
  Description of Artificial Sequence: Synthetic oligonucleotide
  Antisense strand to SEQ ID NO: 77456
uuguucaucuaggaaccca

SEQ ID NO: 77538 - RNA, 19 nt, Artificial Sequence
  Description of Artificial Sequence: Synthetic oligonucleotide
  Sense strand starting at position 2481 of SEQ ID NO: 971
cugaaaccucaauggucau

SEQ ID NO: 77539 - RNA, 19 nt, Artificial Sequence
  Description of Artificial Sequence: Synthetic oligonucleotide
  Antisense strand to SEQ ID NO: 77458
augaccauugagguuucag

SEQ ID NO: 77540 - RNA, 19 nt, Artificial Sequence
  Description of Artificial Sequence: Synthetic oligonucleotide
  Sense strand starting at position 2369 of SEQ ID NO: 971
agacuaucauuugaaaugu

SEQ ID NO: 77541 - RNA, 19 nt, Artificial Sequence
  Description of Artificial Sequence: Synthetic oligonucleotide
  Antisense strand to SEQ ID NO: 77460
acauuucaaaugauagucu

SEQ ID NO: 77542 - RNA, 19 nt, Artificial Sequence
  Description of Artificial Sequence: Synthetic oligonucleotide
  Sense strand starting at position 2333 of SEQ ID NO: 971
gagggaaauccauguaagc

SEQ ID NO: 77543 - RNA, 19 nt, Artificial Sequence
  Description of Artificial Sequence: Synthetic oligonucleotide
  Antisense strand to SEQ ID NO: 77462
gcuuacauggauuucccuc

SEQ ID NO: 77544 - RNA, 19 nt, Artificial Sequence
  Description of Artificial Sequence: Synthetic oligonucleotide
  Sense strand starting at position 2276 of SEQ ID NO: 971
ccaggagaaaucugcaagu

SEQ ID NO: 77545 - RNA, 19 nt, Artificial Sequence
  Description of Artificial Sequence: Synthetic oligonucleotide
  Antisense strand to SEQ ID NO: 77464
acuugcagauuucuccugg

SEQ ID NO: 77546 - RNA, 19 nt, Artificial Sequence
  Description of Artificial Sequence: Synthetic oligonucleotide
  Sense strand starting at position 2217 of SEQ ID NO: 971
ggacacuagucaguugaua

SEQ ID NO: 77547 - RNA, 19 nt, Artificial Sequence
  Description of Artificial Sequence: Synthetic oligonucleotide
  Antisense strand to SEQ ID NO: 77466
uaucaacugacuagugucc

SEQ ID NO: 77548 - RNA, 19 nt, Artificial Sequence
  Description of Artificial Sequence: Synthetic oligonucleotide
  Sense strand starting at position 2126 of SEQ ID NO: 971
ggguuacaucucuaauucu

SEQ ID NO: 77549 - RNA, 19 nt, Artificial Sequence
  Description of Artificial Sequence: Synthetic oligonucleotide
  Antisense strand to SEQ ID NO: 77468
agaauuagagauguaaccc

SEQ ID NO: 77550 - RNA, 19 nt, Artificial Sequence
  Description of Artificial Sequence: Synthetic oligonucleotide
  Sense strand starting at position 2093 of SEQ ID NO: 971
ugggauccuuaucucagaa

SEQ ID NO: 77551 - RNA, 19 nt, Artificial Sequence
  Description of Artificial Sequence: Synthetic oligonucleotide
  Antisense strand to SEQ ID NO: 77470
uucugagauaaggauccca

SEQ ID NO: 77552 - RNA, 19 nt, Artificial Sequence
  Description of Artificial Sequence: Synthetic oligonucleotide
  Sense strand starting at position 2092 of SEQ ID NO: 971
augggauccuuaucucaga

SEQ ID NO: 77553 - RNA, 19 nt, Artificial Sequence
  Description of Artificial Sequence: Synthetic oligonucleotide
  Antisense strand to SEQ ID NO: 77472
ucugagauaaggaucccau

SEQ ID NO: 77554 - RNA, 19 nt, Artificial Sequence
  Description of Artificial Sequence: Synthetic oligonucleotide
  Sense strand starting at position 1991 of SEQ ID NO: 971
ccucauuuccuguggcaag

SEQ ID NO: 77555 - RNA, 19 nt, Artificial Sequence
  Description of Artificial Sequence: Synthetic oligonucleotide
  Antisense strand to SEQ ID NO: 77474
cuugccacaggaaaugagg

SEQ ID NO: 77556 - RNA, 19 nt, Artificial Sequence
  Description of Artificial Sequence: Synthetic oligonucleotide
  Sense strand starting at position 1906 of SEQ ID NO: 971
gcaggaguagcugaaagaa

SEQ ID NO: 77557 - RNA, 19 nt, Artificial Sequence
  Description of Artificial Sequence: Synthetic oligonucleotide
  Antisense strand to SEQ ID NO: 77476
uucuuucagcuacuccugc

SEQ ID NO: 77558 - RNA, 19 nt, Artificial Sequence
  Description of Artificial Sequence: Synthetic oligonucleotide
  Sense strand starting at position 1823 of SEQ ID NO: 971
augucaaaugguuauauac

SEQ ID NO: 77559 - RNA, 19 nt, Artificial Sequence
  Description of Artificial Sequence: Synthetic oligonucleotide
  Antisense strand to SEQ ID NO: 77478
guauauaaccauuugacau

SEQ ID NO: 77560 - RNA, 19 nt, Artificial Sequence
  Description of Artificial Sequence: Synthetic oligonucleotide
  Sense strand starting at position 1822 of SEQ ID NO: 971
gaugucaaaugguuauaua

SEQ ID NO: 77561 - RNA, 19 nt, Artificial Sequence
  Description of Artificial Sequence: Synthetic oligonucleotide
  Antisense strand to SEQ ID NO: 77480
uauauaaccauuugacauc

SEQ ID NO: 77562 - RNA, 19 nt, Artificial Sequence
  Description of Artificial Sequence: Synthetic oligonucleotide
  Sense strand starting at position 1819 of SEQ ID NO: 971
agagaugucaaaugguuau

SEQ ID NO: 77563 - RNA, 19 nt, Artificial Sequence
  Description of Artificial Sequence: Synthetic oligonucleotide
  Antisense strand to SEQ ID NO: 77482
auaaccauuugacaucucu

SEQ ID NO: 77564 - RNA, 19 nt, Artificial Sequence
  Description of Artificial Sequence: Synthetic oligonucleotide
  Sense strand starting at position 1538 of SEQ ID NO: 971
aguguuuaagauggaacca

SEQ ID NO: 77565 - RNA, 19 nt, Artificial Sequence
  Description of Artificial Sequence: Synthetic oligonucleotide
  Antisense strand to SEQ ID NO: 77484
ugguuccaucuuaaacacu

SEQ ID NO: 77566 - RNA, 19 nt, Artificial Sequence
  Description of Artificial Sequence: Synthetic oligonucleotide
  Sense strand starting at position 1453 of SEQ ID NO: 971
ugacuuuggaugugagauu

SEQ ID NO: 77567 - RNA, 19 nt, Artificial Sequence
  Description of Artificial Sequence: Synthetic oligonucleotide
  Antisense strand to SEQ ID NO: 77486
aaucucacauccaaaguca

SEQ ID NO: 77568 - RNA, 19 nt, Artificial Sequence
  Description of Artificial Sequence: Synthetic oligonucleotide
  Sense strand starting at position 1451 of SEQ ID NO: 971
gaugacuuuggaugugaga

SEQ ID NO: 77569 - RNA, 19 nt, Artificial Sequence
  Description of Artificial Sequence: Synthetic oligonucleotide
  Antisense strand to SEQ ID NO: 77488
ucucacauccaaagucauc

SEQ ID NO: 77570 - RNA, 19 nt, Artificial Sequence
  Description of Artificial Sequence: Synthetic oligonucleotide
  Sense strand starting at position 1447 of SEQ ID NO: 971
ucuugaugacuuuggaugu

SEQ ID NO: 77571 - RNA, 19 nt, Artificial Sequence
  Description of Artificial Sequence: Synthetic oligonucleotide
  Antisense strand to SEQ ID NO: 77490
acauccaaagucaucaaga

SEQ ID NO: 77572 - RNA, 19 nt, Artificial Sequence
  Description of Artificial Sequence: Synthetic oligonucleotide
  Sense strand starting at position 1377 of SEQ ID NO: 971
gaaucuagucucuggaaau

SEQ ID NO: 77573 - RNA, 19 nt, Artificial Sequence
  Description of Artificial Sequence: Synthetic oligonucleotide
  Antisense strand to SEQ ID NO: 77492
auuuccagagacuagauuc

SEQ ID NO: 77574 - RNA, 19 nt, Artificial Sequence
  Description of Artificial Sequence: Synthetic oligonucleotide
  Sense strand starting at position 1376 of SEQ ID NO: 971
agaaucuagucucuggaaa

SEQ ID NO: 77575 - RNA, 19 nt, Artificial Sequence
  Description of Artificial Sequence: Synthetic oligonucleotide
  Antisense strand to SEQ ID NO: 77494
uuuccagagacuagauucu

SEQ ID NO: 77576 - RNA, 19 nt, Artificial Sequence
  Description of Artificial Sequence: Synthetic oligonucleotide
  Sense strand starting at position 1227 of SEQ ID NO: 971
augaauguuguacagcaau

SEQ ID NO: 77577 - RNA, 19 nt, Artificial Sequence
  Description of Artificial Sequence: Synthetic oligonucleotide
  Antisense strand to SEQ ID NO: 77496
auugcuguacaacauucau

SEQ ID NO: 77578 - RNA, 19 nt, Artificial Sequence
  Description of Artificial Sequence: Synthetic oligonucleotide
  Sense strand starting at position 1201 of SEQ ID NO: 971
aggucuccaggguaauagu

SEQ ID NO: 77579 - RNA, 19 nt, Artificial Sequence
  Description of Artificial Sequence: Synthetic oligonucleotide
  Antisense strand to SEQ ID NO: 77498
acuauuacccuggagaccu

SEQ ID NO: 77580 - RNA, 19 nt, Artificial Sequence
  Description of Artificial Sequence: Synthetic oligonucleotide
  Sense strand starting at position 1199 of SEQ ID NO: 971
ugaggucuccaggguaaua

SEQ ID NO: 77581 - RNA, 19 nt, Artificial Sequence
  Description of Artificial Sequence: Synthetic oligonucleotide
  Antisense strand to SEQ ID NO: 77500
uauuacccuggagaccuca

SEQ ID NO: 77582 - RNA, 19 nt, Artificial Sequence
  Description of Artificial Sequence: Synthetic oligonucleotide
  Sense strand starting at position 1196 of SEQ ID NO: 971
uggugaggucuccagggua

SEQ ID NO: 77583 - RNA, 19 nt, Artificial Sequence
  Description of Artificial Sequence: Synthetic oligonucleotide
  Antisense strand to SEQ ID NO: 77502
uacccuggagaccucacca

SEQ ID NO: 77584 - RNA, 19 nt, Artificial Sequence
  Description of Artificial Sequence: Synthetic oligonucleotide
  Sense strand starting at position 1169 of SEQ ID NO: 971
gcacguucuagagagacaa

SEQ ID NO: 77585 - RNA, 19 nt, Artificial Sequence
  Description of Artificial Sequence: Synthetic oligonucleotide
  Antisense strand to SEQ ID NO: 77504
uugucucucuagaacgugc

SEQ ID NO: 77586 - RNA, 19 nt, Artificial Sequence
  Description of Artificial Sequence: Synthetic oligonucleotide
  Sense strand starting at position 796 of SEQ ID NO: 971
augagcaacagagguaaau

SEQ ID NO: 77587 - RNA, 19 nt, Artificial Sequence
  Description of Artificial Sequence: Synthetic oligonucleotide
  Antisense strand to SEQ ID NO: 77506
auuuaccucuguugcucau

SEQ ID NO: 77588 - RNA, 19 nt, Artificial Sequence
  Description of Artificial Sequence: Synthetic oligonucleotide
  Sense strand starting at position 600 of SEQ ID NO: 971
ugaaauagccuauggauaa

SEQ ID NO: 77589 - RNA, 19 nt, Artificial Sequence
  Description of Artificial Sequence: Synthetic oligonucleotide
  Antisense strand to SEQ ID NO: 77508
uuauccauaggcuauuuca

SEQ ID NO: 77590 - RNA, 19 nt, Artificial Sequence
  Description of Artificial Sequence: Synthetic oligonucleotide
  Sense strand starting at position 51 of SEQ ID NO: 971
aggauaauauuaccgaucu

SEQ ID NO: 77591 - RNA, 19 nt, Artificial Sequence
  Description of Artificial Sequence: Synthetic oligonucleotide
  Antisense strand to SEQ ID NO: 77510
agaucgguaauauuauccu

SEQ ID NO: 77592 - RNA, 19 nt, Artificial Sequence
  Description of Artificial Sequence: Synthetic oligonucleotide
  Sense strand starting at position 3890 of SEQ ID NO: 973
cuuugccugccauaucaga

SEQ ID NO: 77593 - RNA, 19 nt, Artificial Sequence
  Description of Artificial Sequence: Synthetic oligonucleotide
  Antisense strand to SEQ ID NO: 77512
ucugauauggcaggcaaag

SEQ ID NO: 77594 - RNA, 19 nt, Artificial Sequence
  Description of Artificial Sequence: Synthetic oligonucleotide
  Sense strand starting at position 3698 of SEQ ID NO: 973
ugccuuucuccugugugua

SEQ ID NO: 77595 - RNA, 19 nt, Artificial Sequence
  Description of Artificial Sequence: Synthetic oligonucleotide
  Antisense strand to SEQ ID NO: 77514
uacacacaggagaaaggca

SEQ ID NO: 77596 - RNA, 19 nt, Artificial Sequence
  Description of Artificial Sequence: Synthetic oligonucleotide
  Sense strand starting at position 3591 of SEQ ID NO: 973
uggucuauguugguggaaa

SEQ ID NO: 77597 - RNA, 19 nt, Artificial Sequence
  Description of Artificial Sequence: Synthetic oligonucleotide
  Antisense strand to SEQ ID NO: 77516
uuuccaccaacauagacca

SEQ ID NO: 77598 - RNA, 19 nt, Artificial Sequence
  Description of Artificial Sequence: Synthetic oligonucleotide
  Sense strand starting at position 3511 of SEQ ID NO: 973
uauuauuguggccagagca

SEQ ID NO: 77599 - RNA, 19 nt, Artificial Sequence
  Description of Artificial Sequence: Synthetic oligonucleotide
  Antisense strand to SEQ ID NO: 77518
ugcucuggccacaauaaua

SEQ ID NO: 77600 - RNA, 19 nt, Artificial Sequence
  Description of Artificial Sequence: Synthetic oligonucleotide
  Sense strand starting at position 3433 of SEQ ID NO: 973
acccaaguguuauugagaa

SEQ ID NO: 77601 - RNA, 19 nt, Artificial Sequence
  Description of Artificial Sequence: Synthetic oligonucleotide
  Antisense strand to SEQ ID NO: 77520
uucucaauaacacuugggu

SEQ ID NO: 77602 - RNA, 19 nt, Artificial Sequence
  Description of Artificial Sequence: Synthetic oligonucleotide
  Sense strand starting at position 3368 of SEQ ID NO: 973
gaugcauuggguuaucauu

SEQ ID NO: 77603 - RNA, 19 nt, Artificial Sequence
  Description of Artificial Sequence: Synthetic oligonucleotide
  Antisense strand to SEQ ID NO: 77522
aaugauaacccaaugcauc

SEQ ID NO: 77604 - RNA, 19 nt, Artificial Sequence
  Description of Artificial Sequence: Synthetic oligonucleotide
  Sense strand starting at position 3205 of SEQ ID NO: 973
ggcuuaaauguuuauuaac

SEQ ID NO: 77605 - RNA, 19 nt, Artificial Sequence
  Description of Artificial Sequence: Synthetic oligonucleotide
  Antisense strand to SEQ ID NO: 77524
guuaauaaacauuuaagcc

SEQ ID NO: 77606 - RNA, 19 nt, Artificial Sequence
  Description of Artificial Sequence: Synthetic oligonucleotide
  Sense strand starting at position 3144 of SEQ ID NO: 973
acugauugucucuauuguu

SEQ ID NO: 77607 - RNA, 19 nt, Artificial Sequence
  Description of Artificial Sequence: Synthetic oligonucleotide
  Antisense strand to SEQ ID NO: 77526
aacaauagagacaaucagu

SEQ ID NO: 77608 - RNA, 19 nt, Artificial Sequence
  Description of Artificial Sequence: Synthetic oligonucleotide
  Sense strand starting at position 3141 of SEQ ID NO: 973
accacugauugucucuauu

SEQ ID NO: 77609 - RNA, 19 nt, Artificial Sequence
  Description of Artificial Sequence: Synthetic oligonucleotide
  Antisense strand to SEQ ID NO: 77528
aauagagacaaucaguggu

SEQ ID NO: 77610 - RNA, 19 nt, Artificial Sequence
  Description of Artificial Sequence: Synthetic oligonucleotide
  Sense strand starting at position 3060 of SEQ ID NO: 973
agaucuuugugauucugga

SEQ ID NO: 77611 - RNA, 19 nt, Artificial Sequence
  Description of Artificial Sequence: Synthetic oligonucleotide
  Antisense strand to SEQ ID NO: 77530
uccagaaucacaaagaucu

SEQ ID NO: 77612 - RNA, 19 nt, Artificial Sequence
  Description of Artificial Sequence: Synthetic oligonucleotide
  Sense strand starting at position 3055 of SEQ ID NO: 973
uucuaagaucuuugugauu

SEQ ID NO: 77613 - RNA, 19 nt, Artificial Sequence
  Description of Artificial Sequence: Synthetic oligonucleotide
  Antisense strand to SEQ ID NO: 77532
aaucacaaagaucuuagaa

SEQ ID NO: 77614 - RNA, 19 nt, Artificial Sequence
  Description of Artificial Sequence: Synthetic oligonucleotide
  Sense strand starting at position 3054 of SEQ ID NO: 973
cuucuaagaucuuugugau

SEQ ID NO: 77615 - RNA, 19 nt, Artificial Sequence
  Description of Artificial Sequence: Synthetic oligonucleotide
  Antisense strand to SEQ ID NO: 77534
aucacaaagaucuuagaag

SEQ ID NO: 77616 - RNA, 19 nt, Artificial Sequence
  Description of Artificial Sequence: Synthetic oligonucleotide
  Sense strand starting at position 2984 of SEQ ID NO: 973
guaggcaauuacuuucuga

SEQ ID NO: 77617 - RNA, 19 nt, Artificial Sequence
  Description of Artificial Sequence: Synthetic oligonucleotide
  Antisense strand to SEQ ID NO: 77536
ucagaaaguaauugccuac

SEQ ID NO: 77618 - RNA, 19 nt, Artificial Sequence
  Description of Artificial Sequence: Synthetic oligonucleotide
  Sense strand starting at position 2854 of SEQ ID NO: 973
gucaaugaaccuugacagu

SEQ ID NO: 77619 - RNA, 19 nt, Artificial Sequence
  Description of Artificial Sequence: Synthetic oligonucleotide
  Antisense strand to SEQ ID NO: 77538
acugucaagguucauugac

SEQ ID NO: 77620 - RNA, 19 nt, Artificial Sequence
  Description of Artificial Sequence: Synthetic oligonucleotide
  Sense strand starting at position 2806 of SEQ ID NO: 973
uuacaaggcccagaucuua

SEQ ID NO: 77621 - RNA, 19 nt, Artificial Sequence
  Description of Artificial Sequence: Synthetic oligonucleotide
  Antisense strand to SEQ ID NO: 77540
uaagaucugggccuuguaa

SEQ ID NO: 77622 - RNA, 19 nt, Artificial Sequence
  Description of Artificial Sequence: Synthetic oligonucleotide
  Sense strand starting at position 2792 of SEQ ID NO: 973
auguaaucugggcauuaca

SEQ ID NO: 77623 - RNA, 19 nt, Artificial Sequence
  Description of Artificial Sequence: Synthetic oligonucleotide
  Antisense strand to SEQ ID NO: 77542
uguaaugcccagauuacau

SEQ ID NO: 77624 - RNA, 19 nt, Artificial Sequence
  Description of Artificial Sequence: Synthetic oligonucleotide
  Sense strand starting at position 2791 of SEQ ID NO: 973
gauguaaucugggcauuac

SEQ ID NO: 77625 - RNA, 19 nt, Artificial Sequence
  Description of Artificial Sequence: Synthetic oligonucleotide
  Antisense strand to SEQ ID NO: 77544
guaaugcccagauuacauc

SEQ ID NO: 77626 - RNA, 19 nt, Artificial Sequence
  Description of Artificial Sequence: Synthetic oligonucleotide
  Sense strand starting at position 2790 of SEQ ID NO: 973
agauguaaucugggcauua

SEQ ID NO: 77627 - RNA, 19 nt, Artificial Sequence
  Description of Artificial Sequence: Synthetic oligonucleotide
  Antisense strand to SEQ ID NO: 77546
uaaugcccagauuacaucu

SEQ ID NO: 77628 - RNA, 19 nt, Artificial Sequence
  Description of Artificial Sequence: Synthetic oligonucleotide
  Sense strand starting at position 2657 of SEQ ID NO: 973
uagcaaauuguugaacuga

SEQ ID NO: 77629 - RNA, 19 nt, Artificial Sequence
  Description of Artificial Sequence: Synthetic oligonucleotide
  Antisense strand to SEQ ID NO: 77548
ucaguucaacaauuugcua

SEQ ID NO: 77630 - RNA, 19 nt, Artificial Sequence
  Description of Artificial Sequence: Synthetic oligonucleotide
  Sense strand starting at position 2552 of SEQ ID NO: 973
ucauauggccuguaauaca

SEQ ID NO: 77631 - RNA, 19 nt, Artificial Sequence
  Description of Artificial Sequence: Synthetic oligonucleotide
  Antisense strand to SEQ ID NO: 77550
uguauuacaggccauauga

SEQ ID NO: 77632 - RNA, 19 nt, Artificial Sequence
  Description of Artificial Sequence: Synthetic oligonucleotide
  Sense strand starting at position 2548 of SEQ ID NO: 973
uuaaucauauggccuguaa

SEQ ID NO: 77633 - RNA, 19 nt, Artificial Sequence
  Description of Artificial Sequence: Synthetic oligonucleotide
  Antisense strand to SEQ ID NO: 77552
uuacaggccauaugauuaa

SEQ ID NO: 77634 - RNA, 19 nt, Artificial Sequence
  Description of Artificial Sequence: Synthetic oligonucleotide
  Sense strand starting at position 2333 of SEQ ID NO: 973
uuaucaacucucugagagu

SEQ ID NO: 77635 - RNA, 19 nt, Artificial Sequence
  Description of Artificial Sequence: Synthetic oligonucleotide
  Antisense strand to SEQ ID NO: 77554
acucucagagaguugauaa

SEQ ID NO: 77636 - RNA, 19 nt, Artificial Sequence
  Description of Artificial Sequence: Synthetic oligonucleotide
  Sense strand starting at position 2195 of SEQ ID NO: 973
gaacacuggucaguugaua

SEQ ID NO: 77637 - RNA, 19 nt, Artificial Sequence
  Description of Artificial Sequence: Synthetic oligonucleotide
  Antisense strand to SEQ ID NO: 77556
uaucaacugaccaguguuc

SEQ ID NO: 77638 - RNA, 19 nt, Artificial Sequence
  Description of Artificial Sequence: Synthetic oligonucleotide
  Sense strand starting at position 2178 of SEQ ID NO: 973
uggcuuuagccuuaacaga

SEQ ID NO: 77639 - RNA, 19 nt, Artificial Sequence
  Description of Artificial Sequence: Synthetic oligonucleotide
  Antisense strand to SEQ ID NO: 77558
ucuguuaaggcuaaagcca

SEQ ID NO: 77640 - RNA, 19 nt, Artificial Sequence
  Description of Artificial Sequence: Synthetic oligonucleotide
  Sense strand starting at position 1912 of SEQ ID NO: 973
cucuaaccguaacuuagau

SEQ ID NO: 77641 - RNA, 19 nt, Artificial Sequence
  Description of Artificial Sequence: Synthetic oligonucleotide
  Antisense strand to SEQ ID NO: 77560
aucuaaguuacgguuagag

SEQ ID NO: 77642 - RNA, 19 nt, Artificial Sequence
  Description of Artificial Sequence: Synthetic oligonucleotide
  Sense strand starting at position 1903 of SEQ ID NO: 973
aggagaaagcucuaaccgu

SEQ ID NO: 77643 - RNA, 19 nt, Artificial Sequence
  Description of Artificial Sequence: Synthetic oligonucleotide
  Antisense strand to SEQ ID NO: 77562
acgguuagagcuuucuccu

SEQ ID NO: 77644 - RNA, 19 nt, Artificial Sequence
  Description of Artificial Sequence: Synthetic oligonucleotide
  Sense strand starting at position 1812 of SEQ ID NO: 973
guuauacacucagcagaug

SEQ ID NO: 77645 - RNA, 19 nt, Artificial Sequence
  Description of Artificial Sequence: Synthetic oligonucleotide
  Antisense strand to SEQ ID NO: 77564
caucugcugaguguauaac

SEQ ID NO: 77646 - RNA, 19 nt, Artificial Sequence
  Description of Artificial Sequence: Synthetic oligonucleotide
  Sense strand starting at position 1432 of SEQ ID NO: 973
ugacuuuagaugugugacu

SEQ ID NO: 77647 - RNA, 19 nt, Artificial Sequence
  Description of Artificial Sequence: Synthetic oligonucleotide
  Antisense strand to SEQ ID NO: 77566
agucacacaucuaaaguca

SEQ ID NO: 77648 - RNA, 19 nt, Artificial Sequence
  Description of Artificial Sequence: Synthetic oligonucleotide
  Sense strand starting at position 1430 of SEQ ID NO: 973
gaugacuuuagauguguga

SEQ ID NO: 77649 - RNA, 19 nt, Artificial Sequence
  Description of Artificial Sequence: Synthetic oligonucleotide
  Antisense strand to SEQ ID NO: 77568
ucacacaucuaaagucauc

SEQ ID NO: 77650 - RNA, 19 nt, Artificial Sequence
  Description of Artificial Sequence: Synthetic oligonucleotide
  Sense strand starting at position 1426 of SEQ ID NO: 973
uucugaugacuuuagaugu

SEQ ID NO: 77651 - RNA, 19 nt, Artificial Sequence
  Description of Artificial Sequence: Synthetic oligonucleotide
  Antisense strand to SEQ ID NO: 77570
acaucuaaagucaucagaa

SEQ ID NO: 77652 - RNA, 19 nt, Artificial Sequence
  Description of Artificial Sequence: Synthetic oligonucleotide
  Sense strand starting at position 1286 of SEQ ID NO: 973
augugugacucucuagaag

SEQ ID NO: 77653 - RNA, 19 nt, Artificial Sequence
  Description of Artificial Sequence: Synthetic oligonucleotide
  Antisense strand to SEQ ID NO: 77572
cuucuagagagucacacau

SEQ ID NO: 77654 - RNA, 19 nt, Artificial Sequence
  Description of Artificial Sequence: Synthetic oligonucleotide
  Sense strand starting at position 1277 of SEQ ID NO: 973
ggagaacucaugugugacu

SEQ ID NO: 77655 - RNA, 19 nt, Artificial Sequence
  Description of Artificial Sequence: Synthetic oligonucleotide
  Antisense strand to SEQ ID NO: 77574
agucacacaugaguucucc

SEQ ID NO: 77656 - RNA, 19 nt, Artificial Sequence
  Description of Artificial Sequence: Synthetic oligonucleotide
  Sense strand starting at position 1201 of SEQ ID NO: 973
aaugauguccuuugugaau

SEQ ID NO: 77657 - RNA, 19 nt, Artificial Sequence
  Description of Artificial Sequence: Synthetic oligonucleotide
  Antisense strand to SEQ ID NO: 77576
auucacaaaggacaucauu

SEQ ID NO: 77658 - RNA, 19 nt, Artificial Sequence
  Description of Artificial Sequence: Synthetic oligonucleotide
  Sense strand starting at position 758 of SEQ ID NO: 973
gucaauuuauuuggaguau

SEQ ID NO: 77659 - RNA, 19 nt, Artificial Sequence
  Description of Artificial Sequence: Synthetic oligonucleotide
  Antisense strand to SEQ ID NO: 77578
auacuccaaauaaauugac

SEQ ID NO: 77660 - RNA, 19 nt, Artificial Sequence
  Description of Artificial Sequence: Synthetic oligonucleotide
  Sense strand starting at position 662 of SEQ ID NO: 973
ggaacuugauggguucauu

SEQ ID NO: 77661 - RNA, 19 nt, Artificial Sequence
  Description of Artificial Sequence: Synthetic oligonucleotide
  Antisense strand to SEQ ID NO: 77580
aaugaacccaucaaguucc

SEQ ID NO: 77662 - RNA, 19 nt, Artificial Sequence
  Description of Artificial Sequence: Synthetic oligonucleotide
  Sense strand starting at position 571 of SEQ ID NO: 973
gggucaagugaugaagcuu

SEQ ID NO: 77663 - RNA, 19 nt, Artificial Sequence
  Description of Artificial Sequence: Synthetic oligonucleotide
  Antisense strand to SEQ ID NO: 77582
aagcuucaucacuugaccc

SEQ ID NO: 77664 - RNA, 19 nt, Artificial Sequence
  Description of Artificial Sequence: Synthetic oligonucleotide
  Sense strand starting at position 444 of SEQ ID NO: 973
ccagaaccugcaugaagaa

SEQ ID NO: 77665 - RNA, 19 nt, Artificial Sequence
  Description of Artificial Sequence: Synthetic oligonucleotide
  Antisense strand to SEQ ID NO: 77584
uucuucaugcagguucugg

SEQ ID NO: 77666 - RNA, 19 nt, Artificial Sequence
  Description of Artificial Sequence: Synthetic oligonucleotide
  Sense strand starting at position 264 of SEQ ID NO: 973
guaaauauugcugagacau

SEQ ID NO: 77667 - RNA, 19 nt, Artificial Sequence
  Description of Artificial Sequence: Synthetic oligonucleotide
  Antisense strand to SEQ ID NO: 77586
augucucagcaauauuuac

SEQ ID NO: 77668 - RNA, 19 nt, Artificial Sequence
  Description of Artificial Sequence: Synthetic oligonucleotide
  Sense strand starting at position 243 of SEQ ID NO: 973
ccugguaucagauguuaga

SEQ ID NO: 77669 - RNA, 19 nt, Artificial Sequence
  Description of Artificial Sequence: Synthetic oligonucleotide
  Antisense strand to SEQ ID NO: 77588
ucuaacaucugauaccagg

SEQ ID NO: 77670 - RNA, 19 nt, Artificial Sequence
  Description of Artificial Sequence: Synthetic oligonucleotide
  Sense strand starting at position 208 of SEQ ID NO: 973
gcagaacucuuccucuaga

SEQ ID NO: 77671 - RNA, 19 nt, Artificial Sequence
  Description of Artificial Sequence: Synthetic oligonucleotide
  Antisense strand to SEQ ID NO: 77590
ucuagaggaagaguucugc

SEQ ID NO: 77672 - RNA, 19 nt, Artificial Sequence
  Description of Artificial Sequence: Synthetic oligonucleotide
  Sense strand starting at position 3701 of SEQ ID NO: 972
cuuugccugccauaucaga

SEQ ID NO: 77673 - RNA, 19 nt, Artificial Sequence
  Description of Artificial Sequence: Synthetic oligonucleotide
  Antisense strand to SEQ ID NO: 77592
ucugauauggcaggcaaag

SEQ ID NO: 77674 - RNA, 19 nt, Artificial Sequence
  Description of Artificial Sequence: Synthetic oligonucleotide
  Sense strand starting at position 3509 of SEQ ID NO: 972
ugccuuucuccugugugua

SEQ ID NO: 77675 - RNA, 19 nt, Artificial Sequence
  Description of Artificial Sequence: Synthetic oligonucleotide
  Antisense strand to SEQ ID NO: 77594
uacacacaggagaaaggca

SEQ ID NO: 77676 - RNA, 19 nt, Artificial Sequence
  Description of Artificial Sequence: Synthetic oligonucleotide
  Sense strand starting at position 3402 of SEQ ID NO: 972
uggucuauguugguggaaa

SEQ ID NO: 77677 - RNA, 19 nt, Artificial Sequence
  Description of Artificial Sequence: Synthetic oligonucleotide
  Antisense strand to SEQ ID NO: 77596
uuuccaccaacauagacca

SEQ ID NO: 77678 - RNA, 19 nt, Artificial Sequence
  Description of Artificial Sequence: Synthetic oligonucleotide
  Sense strand starting at position 3322 of SEQ ID NO: 972
uauuauuguggccagagca

SEQ ID NO: 77679 - RNA, 19 nt, Artificial Sequence
  Description of Artificial Sequence: Synthetic oligonucleotide
  Antisense strand to SEQ ID NO: 77598
ugcucuggccacaauaaua

SEQ ID NO: 77680 - RNA, 19 nt, Artificial Sequence
  Description of Artificial Sequence: Synthetic oligonucleotide
  Sense strand starting at position 3244 of SEQ ID NO: 972
acccaaguguuauugagaa

SEQ ID NO: 77681 - RNA, 19 nt, Artificial Sequence
  Description of Artificial Sequence: Synthetic oligonucleotide
  Antisense strand to SEQ ID NO: 77600
uucucaauaacacuugggu

SEQ ID NO: 77682 - RNA, 19 nt, Artificial Sequence
  Description of Artificial Sequence: Synthetic oligonucleotide
  Sense strand starting at position 3179 of SEQ ID NO: 972
gaugcauuggguuaucauu

SEQ ID NO: 77683 - RNA, 19 nt, Artificial Sequence
  Description of Artificial Sequence: Synthetic oligonucleotide
  Antisense strand to SEQ ID NO: 77602
aaugauaacccaaugcauc

SEQ ID NO: 77684 - RNA, 19 nt, Artificial Sequence
  Description of Artificial Sequence: Synthetic oligonucleotide
  Sense strand starting at position 3016 of SEQ ID NO: 972
ggcuuaaauguuuauuaac

SEQ ID NO: 77685 - RNA, 19 nt, Artificial Sequence
  Description of Artificial Sequence: Synthetic oligonucleotide
  Antisense strand to SEQ ID NO: 77604
guuaauaaacauuuaagcc

SEQ ID NO: 77686 - RNA, 19 nt, Artificial Sequence
  Description of Artificial Sequence: Synthetic oligonucleotide
  Sense strand starting at position 2955 of SEQ ID NO: 972
acugauugucucuauuguu

SEQ ID NO: 77687 - RNA, 19 nt, Artificial Sequence
  Description of Artificial Sequence: Synthetic oligonucleotide
  Antisense strand to SEQ ID NO: 77606
aacaauagagacaaucagu

SEQ ID NO: 77688 - RNA, 19 nt, Artificial Sequence
  Description of Artificial Sequence: Synthetic oligonucleotide
  Sense strand starting at position 2952 of SEQ ID NO: 972
accacugauugucucuauu

SEQ ID NO: 77689 - RNA, 19 nt, Artificial Sequence
  Description of Artificial Sequence: Synthetic oligonucleotide
  Antisense strand to SEQ ID NO: 77608
aauagagacaaucaguggu

SEQ ID NO: 77690 - RNA, 19 nt, Artificial Sequence
  Description of Artificial Sequence: Synthetic oligonucleotide
  Sense strand starting at position 2871 of SEQ ID NO: 972
agaucuuugugauucugga

SEQ ID NO: 77691 - RNA, 19 nt, Artificial Sequence
  Description of Artificial Sequence: Synthetic oligonucleotide
  Antisense strand to SEQ ID NO: 77610
uccagaaucacaaagaucu

SEQ ID NO: 77692 - RNA, 19 nt, Artificial Sequence
  Description of Artificial Sequence: Synthetic oligonucleotide
  Sense strand starting at position 2866 of SEQ ID NO: 972
uucuaagaucuuugugauu

SEQ ID NO: 77693 - RNA, 19 nt, Artificial Sequence
  Description of Artificial Sequence: Synthetic oligonucleotide
  Antisense strand to SEQ ID NO: 77612
aaucacaaagaucuuagaa

SEQ ID NO: 77694 - RNA, 19 nt, Artificial Sequence
  Description of Artificial Sequence: Synthetic oligonucleotide
  Sense strand starting at position 2865 of SEQ ID NO: 972
cuucuaagaucuuugugau

SEQ ID NO: 77695 - RNA, 19 nt, Artificial Sequence
  Description of Artificial Sequence: Synthetic oligonucleotide
  Antisense strand to SEQ ID NO: 77614
aucacaaagaucuuagaag

SEQ ID NO: 77696 - RNA, 19 nt, Artificial Sequence
  Description of Artificial Sequence: Synthetic oligonucleotide
  Sense strand starting at position 2795 of SEQ ID NO: 972
guaggcaauuacuuucuga

SEQ ID NO: 77697 - RNA, 19 nt, Artificial Sequence
  Description of Artificial Sequence: Synthetic oligonucleotide
  Antisense strand to SEQ ID NO: 77616
ucagaaaguaauugccuac

SEQ ID NO: 77698 - RNA, 19 nt, Artificial Sequence
  Description of Artificial Sequence: Synthetic oligonucleotide
  Sense strand starting at position 2665 of SEQ ID NO: 972
gucaaugaaccuugacagu

SEQ ID NO: 77699 - RNA, 19 nt, Artificial Sequence
  Description of Artificial Sequence: Synthetic oligonucleotide
  Antisense strand to SEQ ID NO: 77618
acugucaagguucauugac

SEQ ID NO: 77700 - RNA, 19 nt, Artificial Sequence
  Description of Artificial Sequence: Synthetic oligonucleotide
  Sense strand starting at position 2617 of SEQ ID NO: 972
uuacaaggcccagaucuua

SEQ ID NO: 77701 - RNA, 19 nt, Artificial Sequence
  Description of Artificial Sequence: Synthetic oligonucleotide
  Antisense strand to SEQ ID NO: 77620
uaagaucugggccuuguaa

SEQ ID NO: 77702 - RNA, 19 nt, Artificial Sequence
  Description of Artificial Sequence: Synthetic oligonucleotide
  Sense strand starting at position 2603 of SEQ ID NO: 972
auguaaucugggcauuaca

SEQ ID NO: 77703 - RNA, 19 nt, Artificial Sequence
  Description of Artificial Sequence: Synthetic oligonucleotide
  Antisense strand to SEQ ID NO: 77622
uguaaugcccagauuacau

SEQ ID NO: 77704 - RNA, 19 nt, Artificial Sequence
  Description of Artificial Sequence: Synthetic oligonucleotide
  Sense strand starting at position 2602 of SEQ ID NO: 972
gauguaaucugggcauuac

SEQ ID NO: 77705 - RNA, 19 nt, Artificial Sequence
  Description of Artificial Sequence: Synthetic oligonucleotide
  Antisense strand to SEQ ID NO: 77624
guaaugcccagauuacauc

SEQ ID NO: 77706 - RNA, 19 nt, Artificial Sequence
  Description of Artificial Sequence: Synthetic oligonucleotide
  Sense strand starting at position 2601 of SEQ ID NO: 972
agauguaaucugggcauua

SEQ ID NO: 77707 - RNA, 19 nt, Artificial Sequence
  Description of Artificial Sequence: Synthetic oligonucleotide
  Antisense strand to SEQ ID NO: 77626
uaaugcccagauuacaucu

SEQ ID NO: 77708 - RNA, 19 nt, Artificial Sequence
  Description of Artificial Sequence: Synthetic oligonucleotide
  Sense strand starting at position 2468 of SEQ ID NO: 972
uagcaaauuguugaacuga

SEQ ID NO: 77709 - RNA, 19 nt, Artificial Sequence
  Description of Artificial Sequence: Synthetic oligonucleotide
  Antisense strand to SEQ ID NO: 77628
ucaguucaacaauuugcua

SEQ ID NO: 77710 - RNA, 19 nt, Artificial Sequence
  Description of Artificial Sequence: Synthetic oligonucleotide
  Sense strand starting at position 2363 of SEQ ID NO: 972
ucauauggccuguaauaca

SEQ ID NO: 77711 - RNA, 19 nt, Artificial Sequence
  Description of Artificial Sequence: Synthetic oligonucleotide
  Antisense strand to SEQ ID NO: 77630
uguauuacaggccauauga

SEQ ID NO: 77712 - RNA, 19 nt, Artificial Sequence
  Description of Artificial Sequence: Synthetic oligonucleotide
  Sense strand starting at position 2359 of SEQ ID NO: 972
uuaaucauauggccuguaa

SEQ ID NO: 77713 - RNA, 19 nt, Artificial Sequence
  Description of Artificial Sequence: Synthetic oligonucleotide
  Antisense strand to SEQ ID NO: 77632
uuacaggccauaugauuaa

SEQ ID NO: 77714 - RNA, 19 nt, Artificial Sequence
  Description of Artificial Sequence: Synthetic oligonucleotide
  Sense strand starting at position 2144 of SEQ ID NO: 972
uuaucaacucucugagagu

SEQ ID NO: 77715 - RNA, 19 nt, Artificial Sequence
  Description of Artificial Sequence: Synthetic oligonucleotide
  Antisense strand to SEQ ID NO: 77634
acucucagagaguugauaa

SEQ ID NO: 77716 - RNA, 19 nt, Artificial Sequence
  Description of Artificial Sequence: Synthetic oligonucleotide
  Sense strand starting at position 2006 of SEQ ID NO: 972
gaacacuggucaguugaua

SEQ ID NO: 77717 - RNA, 19 nt, Artificial Sequence
  Description of Artificial Sequence: Synthetic oligonucleotide
  Antisense strand to SEQ ID NO: 77636
uaucaacugaccaguguuc

SEQ ID NO: 77718 - RNA, 19 nt, Artificial Sequence
  Description of Artificial Sequence: Synthetic oligonucleotide
  Sense strand starting at position 1989 of SEQ ID NO: 972
uggcuuuagccuuaacaga

SEQ ID NO: 77719 - RNA, 19 nt, Artificial Sequence
  Description of Artificial Sequence: Synthetic oligonucleotide
  Antisense strand to SEQ ID NO: 77638
ucuguuaaggcuaaagcca

SEQ ID NO: 77720 - RNA, 19 nt, Artificial Sequence
  Description of Artificial Sequence: Synthetic oligonucleotide
  Sense strand starting at position 1723 of SEQ ID NO: 972
cucuaaccguaacuuagau

SEQ ID NO: 77721 - RNA, 19 nt, Artificial Sequence
  Description of Artificial Sequence: Synthetic oligonucleotide
  Antisense strand to SEQ ID NO: 77640
aucuaaguuacgguuagag

SEQ ID NO: 77722 - RNA, 19 nt, Artificial Sequence
  Description of Artificial Sequence: Synthetic oligonucleotide
  Sense strand starting at position 1714 of SEQ ID NO: 972
aggagaaagcucuaaccgu

SEQ ID NO: 77723 - RNA, 19 nt, Artificial Sequence
  Description of Artificial Sequence: Synthetic oligonucleotide
  Antisense strand to SEQ ID NO: 77642
acgguuagagcuuucuccu

SEQ ID NO: 77724 - RNA, 19 nt, Artificial Sequence
  Description of Artificial Sequence: Synthetic oligonucleotide
  Sense strand starting at position 1623 of SEQ ID NO: 972
guuauacacucagcagaug

SEQ ID NO: 77725 - RNA, 19 nt, Artificial Sequence
  Description of Artificial Sequence: Synthetic oligonucleotide
  Antisense strand to SEQ ID NO: 77644
caucugcugaguguauaac

SEQ ID NO: 77726 - RNA, 19 nt, Artificial Sequence
  Description of Artificial Sequence: Synthetic oligonucleotide
  Sense strand starting at position 1243 of SEQ ID NO: 972
ugacuuuagaugugugacu

SEQ ID NO: 77727 - RNA, 19 nt, Artificial Sequence
  Description of Artificial Sequence: Synthetic oligonucleotide
  Antisense strand to SEQ ID NO: 77646
agucacacaucuaaaguca

SEQ ID NO: 77728 - RNA, 19 nt, Artificial Sequence
  Description of Artificial Sequence: Synthetic oligonucleotide
  Sense strand starting at position 1241 of SEQ ID NO: 972
gaugacuuuagauguguga

SEQ ID NO: 77729 - RNA, 19 nt, Artificial Sequence
  Description of Artificial Sequence: Synthetic oligonucleotide
  Antisense strand to SEQ ID NO: 77648
ucacacaucuaaagucauc

SEQ ID NO: 77730 - RNA, 19 nt, Artificial Sequence
  Description of Artificial Sequence: Synthetic oligonucleotide
  Sense strand starting at position 1237 of SEQ ID NO: 972
uucugaugacuuuagaugu

SEQ ID NO: 77731 - RNA, 19 nt, Artificial Sequence
  Description of Artificial Sequence: Synthetic oligonucleotide
  Antisense strand to SEQ ID NO: 77650
acaucuaaagucaucagaa

SEQ ID NO: 77732 - RNA, 19 nt, Artificial Sequence
  Description of Artificial Sequence: Synthetic oligonucleotide
  Sense strand starting at position 1097 of SEQ ID NO: 972
augugugacucucuagaag

SEQ ID NO: 77733 - RNA, 19 nt, Artificial Sequence
  Description of Artificial Sequence: Synthetic oligonucleotide
  Antisense strand to SEQ ID NO: 77652
cuucuagagagucacacau

SEQ ID NO: 77734 - RNA, 19 nt, Artificial Sequence
  Description of Artificial Sequence: Synthetic oligonucleotide
  Sense strand starting at position 1088 of SEQ ID NO: 972
ggagaacucaugugugacu

SEQ ID NO: 77735 - RNA, 19 nt, Artificial Sequence
  Description of Artificial Sequence: Synthetic oligonucleotide
  Antisense strand to SEQ ID NO: 77654
agucacacaugaguucucc

SEQ ID NO: 77736 - RNA, 19 nt, Artificial Sequence
  Description of Artificial Sequence: Synthetic oligonucleotide
  Sense strand starting at position 1012 of SEQ ID NO: 972
aaugauguccuuugugaau

SEQ ID NO: 77737 - RNA, 19 nt, Artificial Sequence
  Description of Artificial Sequence: Synthetic oligonucleotide
  Antisense strand to SEQ ID NO: 77656
auucacaaaggacaucauu

SEQ ID NO: 77738 - RNA, 19 nt, Artificial Sequence
  Description of Artificial Sequence: Synthetic oligonucleotide
  Sense strand starting at position 569 of SEQ ID NO: 972
gucaauuuauuuggaguau

SEQ ID NO: 77739 - RNA, 19 nt, Artificial Sequence
  Description of Artificial Sequence: Synthetic oligonucleotide
  Antisense strand to SEQ ID NO: 77658
auacuccaaauaaauugac

SEQ ID NO: 77740 - RNA, 19 nt, Artificial Sequence
  Description of Artificial Sequence: Synthetic oligonucleotide
  Sense strand starting at position 473 of SEQ ID NO: 972
ggaacuugauggguucauu

SEQ ID NO: 77741 - RNA, 19 nt, Artificial Sequence
  Description of Artificial Sequence: Synthetic oligonucleotide
  Antisense strand to SEQ ID NO: 77660
aaugaacccaucaaguucc

SEQ ID NO: 77742 - RNA, 19 nt, Artificial Sequence
  Description of Artificial Sequence: Synthetic oligonucleotide
  Sense strand starting at position 382 of SEQ ID NO: 972
gggucaagugaugaagcuu

SEQ ID NO: 77743 - RNA, 19 nt, Artificial Sequence
  Description of Artificial Sequence: Synthetic oligonucleotide
  Antisense strand to SEQ ID NO: 77662
aagcuucaucacuugaccc

SEQ ID NO: 77744 - RNA, 19 nt, Artificial Sequence
  Description of Artificial Sequence: Synthetic oligonucleotide
  Sense strand starting at position 255 of SEQ ID NO: 972
ccagaaccugcaugaagaa

SEQ ID NO: 77745 - RNA, 19 nt, Artificial Sequence
  Description of Artificial Sequence: Synthetic oligonucleotide
  Antisense strand to SEQ ID NO: 77664
uucuucaugcagguucugg

SEQ ID NO: 77746 - RNA, 19 nt, Artificial Sequence
  Description of Artificial Sequence: Synthetic oligonucleotide
  Sense strand starting at position 75 of SEQ ID NO: 972
guaaauauugcugagacau

SEQ ID NO: 77747 - RNA, 19 nt, Artificial Sequence
  Description of Artificial Sequence: Synthetic oligonucleotide
  Antisense strand to SEQ ID NO: 77666
augucucagcaauauuuac

SEQ ID NO: 77748 - RNA, 19 nt, Artificial Sequence
  Description of Artificial Sequence: Synthetic oligonucleotide
  Sense strand starting at position 54 of SEQ ID NO: 972
ccugguaucagauguuaga

SEQ ID NO: 77749 - RNA, 19 nt, Artificial Sequence
  Description of Artificial Sequence: Synthetic oligonucleotide
  Antisense strand to SEQ ID NO: 77668
ucuaacaucugauaccagg

SEQ ID NO: 77750 - RNA, 19 nt, Artificial Sequence
  Description of Artificial Sequence: Synthetic oligonucleotide
  Sense strand starting at position 19 of SEQ ID NO: 972
gcagaacucuuccucuaga

SEQ ID NO: 77751 - RNA, 19 nt, Artificial Sequence
  Description of Artificial Sequence: Synthetic oligonucleotide
  Antisense strand to SEQ ID NO: 77670
ucuagaggaagaguucugc

SEQ ID NO: 77752 - RNA, 19 nt, Artificial Sequence
  Description of Artificial Sequence: Synthetic oligonucleotide
  Sense strand starting at position 3741 of SEQ ID NO: 974
gccguacugguaaggugau

SEQ ID NO: 77753 - RNA, 19 nt, Artificial Sequence
  Description of Artificial Sequence: Synthetic oligonucleotide
  Antisense strand to SEQ ID NO: 77672
aucaccuuaccaguacggc

SEQ ID NO: 77754 - RNA, 19 nt, Artificial Sequence
  Description of Artificial Sequence: Synthetic oligonucleotide
  Sense strand starting at position 3717 of SEQ ID NO: 974
agaguuugcugcuugagag

SEQ ID NO: 77755 - RNA, 19 nt, Artificial Sequence
  Description of Artificial Sequence: Synthetic oligonucleotide
  Antisense strand to SEQ ID NO: 77674
cucucaagcagcaaacucu

SEQ ID NO: 77756 - RNA, 19 nt, Artificial Sequence
  Description of Artificial Sequence: Synthetic oligonucleotide
  Sense strand starting at position 3714 of SEQ ID NO: 974
gguagaguuugcugcuuga

SEQ ID NO: 77757 - RNA, 19 nt, Artificial Sequence
  Description of Artificial Sequence: Synthetic oligonucleotide
  Antisense strand to SEQ ID NO: 77676
ucaagcagcaaacucuacc

SEQ ID NO: 77758 - RNA, 19 nt, Artificial Sequence
  Description of Artificial Sequence: Synthetic oligonucleotide
  Sense strand starting at position 3683 of SEQ ID NO: 974
aaucgucucuccgagagca

SEQ ID NO: 77759 - RNA, 19 nt, Artificial Sequence
  Description of Artificial Sequence: Synthetic oligonucleotide
  Antisense strand to SEQ ID NO: 77678
ugcucucggagagacgauu

SEQ ID NO: 77760 - RNA, 19 nt, Artificial Sequence
  Description of Artificial Sequence: Synthetic oligonucleotide
  Sense strand starting at position 3679 of SEQ ID NO: 974
gguuaaucgucucuccgag

SEQ ID NO: 77761 - RNA, 19 nt, Artificial Sequence
  Description of Artificial Sequence: Synthetic oligonucleotide
  Antisense strand to SEQ ID NO: 77680
cucggagagacgauuaacc

SEQ ID NO: 77762 - RNA, 19 nt, Artificial Sequence
  Description of Artificial Sequence: Synthetic oligonucleotide
  Sense strand starting at position 3668 of SEQ ID NO: 974
cuggguuccuugguuaauc

SEQ ID NO: 77763 - RNA, 19 nt, Artificial Sequence
  Description of Artificial Sequence: Synthetic oligonucleotide
  Antisense strand to SEQ ID NO: 77682
gauuaaccaaggaacccag

SEQ ID NO: 77764 - RNA, 19 nt, Artificial Sequence
  Description of Artificial Sequence: Synthetic oligonucleotide
  Sense strand starting at position 3455 of SEQ ID NO: 974
agcaguguguuagagaaac

SEQ ID NO: 77765 - RNA, 19 nt, Artificial Sequence
  Description of Artificial Sequence: Synthetic oligonucleotide
  Antisense strand to SEQ ID NO: 77684
guuucucuaacacacugcu

SEQ ID NO: 77766 - RNA, 19 nt, Artificial Sequence
  Description of Artificial Sequence: Synthetic oligonucleotide
  Sense strand starting at position 3453 of SEQ ID NO: 974
uuagcaguguguuagagaa

SEQ ID NO: 77767 - RNA, 19 nt, Artificial Sequence
  Description of Artificial Sequence: Synthetic oligonucleotide
  Antisense strand to SEQ ID NO: 77686
uucucuaacacacugcuaa

SEQ ID NO: 77768 - RNA, 19 nt, Artificial Sequence
  Description of Artificial Sequence: Synthetic oligonucleotide
  Sense strand starting at position 3450 of SEQ ID NO: 974
aauuuagcaguguguuaga

SEQ ID NO: 77769 - RNA, 19 nt, Artificial Sequence
  Description of Artificial Sequence: Synthetic oligonucleotide
  Antisense strand to SEQ ID NO: 77688
ucuaacacacugcuaaauu

SEQ ID NO: 77770 - RNA, 19 nt, Artificial Sequence
  Description of Artificial Sequence: Synthetic oligonucleotide
  Sense strand starting at position 3448 of SEQ ID NO: 974
acaauuuagcaguguguua

SEQ ID NO: 77771 - RNA, 19 nt, Artificial Sequence
  Description of Artificial Sequence: Synthetic oligonucleotide
  Antisense strand to SEQ ID NO: 77690
uaacacacugcuaaauugu

SEQ ID NO: 77772 - RNA, 19 nt, Artificial Sequence
  Description of Artificial Sequence: Synthetic oligonucleotide
  Sense strand starting at position 3435 of SEQ ID NO: 974
acagucugguguuacaauu

SEQ ID NO: 77773 - RNA, 19 nt, Artificial Sequence
  Description of Artificial Sequence: Synthetic oligonucleotide
  Antisense strand to SEQ ID NO: 77692
aauuguaacaccagacugu

SEQ ID NO: 77774 - RNA, 19 nt, Artificial Sequence
  Description of Artificial Sequence: Synthetic oligonucleotide
  Sense strand starting at position 3432 of SEQ ID NO: 974
gguacagucugguguuaca

SEQ ID NO: 77775 - RNA, 19 nt, Artificial Sequence
  Description of Artificial Sequence: Synthetic oligonucleotide
  Antisense strand to SEQ ID NO: 77694
uguaacaccagacuguacc

SEQ ID NO: 77776 - RNA, 19 nt, Artificial Sequence
  Description of Artificial Sequence: Synthetic oligonucleotide
  Sense strand starting at position 3283 of SEQ ID NO: 974
acuucugaagguugacaaa

SEQ ID NO: 77777 - RNA, 19 nt, Artificial Sequence
  Description of Artificial Sequence: Synthetic oligonucleotide
  Antisense strand to SEQ ID NO: 77696
uuugucaaccuucagaagu

SEQ ID NO: 77778 - RNA, 19 nt, Artificial Sequence
  Description of Artificial Sequence: Synthetic oligonucleotide
  Sense strand starting at position 3169 of SEQ ID NO: 974
uugugacuuugugaauuga

SEQ ID NO: 77779 - RNA, 19 nt, Artificial Sequence
  Description of Artificial Sequence: Synthetic oligonucleotide
  Antisense strand to SEQ ID NO: 77698
ucaauucacaaagucacaa

SEQ ID NO: 77780 - RNA, 19 nt, Artificial Sequence
  Description of Artificial Sequence: Synthetic oligonucleotide
  Sense strand starting at position 3167 of SEQ ID NO: 974
gguugugacuuugugaauu

SEQ ID NO: 77781 - RNA, 19 nt, Artificial Sequence
  Description of Artificial Sequence: Synthetic oligonucleotide
  Antisense strand to SEQ ID NO: 77700
aauucacaaagucacaacc

SEQ ID NO: 77782 - RNA, 19 nt, Artificial Sequence
  Description of Artificial Sequence: Synthetic oligonucleotide
  Sense strand starting at position 2771 of SEQ ID NO: 974
ggcugaagacuuuacauuc

SEQ ID NO: 77783 - RNA, 19 nt, Artificial Sequence
  Description of Artificial Sequence: Synthetic oligonucleotide
  Antisense strand to SEQ ID NO: 77702
gaauguaaagucuucagcc

SEQ ID NO: 77784 - RNA, 19 nt, Artificial Sequence
  Description of Artificial Sequence: Synthetic oligonucleotide
  Sense strand starting at position 2605 of SEQ ID NO: 974
aggucuuuagcugacagua

SEQ ID NO: 77785 - RNA, 19 nt, Artificial Sequence
  Description of Artificial Sequence: Synthetic oligonucleotide
  Antisense strand to SEQ ID NO: 77704
uacugucagcuaaagaccu

SEQ ID NO: 77786 - RNA, 19 nt, Artificial Sequence
  Description of Artificial Sequence: Synthetic oligonucleotide
  Sense strand starting at position 2573 of SEQ ID NO: 974
cagagauagugagcuuuaa

SEQ ID NO: 77787 - RNA, 19 nt, Artificial Sequence
  Description of Artificial Sequence: Synthetic oligonucleotide
  Antisense strand to SEQ ID NO: 77706
uuaaagcucacuaucucug

SEQ ID NO: 77788 - RNA, 19 nt, Artificial Sequence
  Description of Artificial Sequence: Synthetic oligonucleotide
  Sense strand starting at position 2571 of SEQ ID NO: 974
gccagagauagugagcuuu

SEQ ID NO: 77789 - RNA, 19 nt, Artificial Sequence
  Description of Artificial Sequence: Synthetic oligonucleotide
  Antisense strand to SEQ ID NO: 77708
aaagcucacuaucucuggc

SEQ ID NO: 77790 - RNA, 19 nt, Artificial Sequence
  Description of Artificial Sequence: Synthetic oligonucleotide
  Sense strand starting at position 2552 of SEQ ID NO: 974
ccugguuccuuagugaaug

SEQ ID NO: 77791 - RNA, 19 nt, Artificial Sequence
  Description of Artificial Sequence: Synthetic oligonucleotide
  Antisense strand to SEQ ID NO: 77710
cauucacuaaggaaccagg

SEQ ID NO: 77792 - RNA, 19 nt, Artificial Sequence
  Description of Artificial Sequence: Synthetic oligonucleotide
  Sense strand starting at position 2549 of SEQ ID NO: 974
gugccugguuccuuaguga

SEQ ID NO: 77793 - RNA, 19 nt, Artificial Sequence
  Description of Artificial Sequence: Synthetic oligonucleotide
  Antisense strand to SEQ ID NO: 77712
ucacuaaggaaccaggcac

SEQ ID NO: 77794 - RNA, 19 nt, Artificial Sequence
  Description of Artificial Sequence: Synthetic oligonucleotide
  Sense strand starting at position 293 of SEQ ID NO: 975
cacuguguccggcggauaa

SEQ ID NO: 77795 - RNA, 19 nt, Artificial Sequence
  Description of Artificial Sequence: Synthetic oligonucleotide
  Antisense strand to SEQ ID NO: 77714
uuauccgccggacacagug

SEQ ID NO: 77796 - RNA, 19 nt, Artificial Sequence
  Description of Artificial Sequence: Synthetic oligonucleotide
  Sense strand starting at position 327 of SEQ ID NO: 975
agaguuacacuuuaggguu

SEQ ID NO: 77797 - RNA, 19 nt, Artificial Sequence
  Description of Artificial Sequence: Synthetic oligonucleotide
  Antisense strand to SEQ ID NO: 77716
aacccuaaaguguaacucu

SEQ ID NO: 77798 - RNA, 19 nt, Artificial Sequence
  Description of Artificial Sequence: Synthetic oligonucleotide
  Sense strand starting at position 330 of SEQ ID NO: 975
guuacacuuuaggguugau

SEQ ID NO: 77799 - RNA, 19 nt, Artificial Sequence
  Description of Artificial Sequence: Synthetic oligonucleotide
  Antisense strand to SEQ ID NO: 77718
aucaacccuaaaguguaac

SEQ ID NO: 77800 - RNA, 19 nt, Artificial Sequence
  Description of Artificial Sequence: Synthetic oligonucleotide
  Sense strand starting at position 333 of SEQ ID NO: 975
acacuuuaggguugauaug

SEQ ID NO: 77801 - RNA, 19 nt, Artificial Sequence
  Description of Artificial Sequence: Synthetic oligonucleotide
  Antisense strand to SEQ ID NO: 77720
cauaucaacccuaaagugu

SEQ ID NO: 77802 - RNA, 19 nt, Artificial Sequence
  Description of Artificial Sequence: Synthetic oligonucleotide
  Sense strand starting at position 505 of SEQ ID NO: 975
uggguagaauuacuuaagu

SEQ ID NO: 77803 - RNA, 19 nt, Artificial Sequence
  Description of Artificial Sequence: Synthetic oligonucleotide
  Antisense strand to SEQ ID NO: 77722
acuuaaguaauucuaccca

SEQ ID NO: 77804 - RNA, 19 nt, Artificial Sequence
  Description of Artificial Sequence: Synthetic oligonucleotide
  Sense strand starting at position 553 of SEQ ID NO: 975
gguucuuuguugcaguuaa

SEQ ID NO: 77805 - RNA, 19 nt, Artificial Sequence
  Description of Artificial Sequence: Synthetic oligonucleotide
  Antisense strand to SEQ ID NO: 77724
uuaacugcaacaaagaacc

SEQ ID NO: 77806 - RNA, 19 nt, Artificial Sequence
  Description of Artificial Sequence: Synthetic oligonucleotide
  Sense strand starting at position 561 of SEQ ID NO: 975
guugcaguuaaugagaaga

SEQ ID NO: 77807 - RNA, 19 nt, Artificial Sequence
  Description of Artificial Sequence: Synthetic oligonucleotide
  Antisense strand to SEQ ID NO: 77726
ucuucucauuaacugcaac

SEQ ID NO: 77808 - RNA, 19 nt, Artificial Sequence
  Description of Artificial Sequence: Synthetic oligonucleotide
  Sense strand starting at position 616 of SEQ ID NO: 975
ccuggugacucgccuguaa

SEQ ID NO: 77809 - RNA, 19 nt, Artificial Sequence
  Description of Artificial Sequence: Synthetic oligonucleotide
  Antisense strand to SEQ ID NO: 77728
uuacaggcgagucaccagg

SEQ ID NO: 77810 - RNA, 19 nt, Artificial Sequence
  Description of Artificial Sequence: Synthetic oligonucleotide
  Sense strand starting at position 1011 of SEQ ID NO: 975
gagcgauuaugucuccaaa

SEQ ID NO: 77811 - RNA, 19 nt, Artificial Sequence
  Description of Artificial Sequence: Synthetic oligonucleotide
  Antisense strand to SEQ ID NO: 77730
uuuggagacauaaucgcuc

SEQ ID NO: 77812 - RNA, 19 nt, Artificial Sequence
  Description of Artificial Sequence: Synthetic oligonucleotide
  Sense strand starting at position 1168 of SEQ ID NO: 975
cugguauucccugaugccu

SEQ ID NO: 77813 - RNA, 19 nt, Artificial Sequence
  Description of Artificial Sequence: Synthetic oligonucleotide
  Antisense strand to SEQ ID NO: 77732
aggcaucagggaauaccag

SEQ ID NO: 77814 - RNA, 19 nt, Artificial Sequence
  Description of Artificial Sequence: Synthetic oligonucleotide
  Sense strand starting at position 1170 of SEQ ID NO: 975
gguauucccugaugccuua

SEQ ID NO: 77815 - RNA, 19 nt, Artificial Sequence
  Description of Artificial Sequence: Synthetic oligonucleotide
  Antisense strand to SEQ ID NO: 77734
uaaggcaucagggaauacc

SEQ ID NO: 77816 - RNA, 19 nt, Artificial Sequence
  Description of Artificial Sequence: Synthetic oligonucleotide
  Sense strand starting at position 1371 of SEQ ID NO: 975
agcaucauccauugggaac

SEQ ID NO: 77817 - RNA, 19 nt, Artificial Sequence
  Description of Artificial Sequence: Synthetic oligonucleotide
  Antisense strand to SEQ ID NO: 77736
guucccaauggaugaugcu

SEQ ID NO: 77818 - RNA, 19 nt, Artificial Sequence
  Description of Artificial Sequence: Synthetic oligonucleotide
  Sense strand starting at position 1384 of SEQ ID NO: 975
gggaacgugguguacuuua

SEQ ID NO: 77819 - RNA, 19 nt, Artificial Sequence
  Description of Artificial Sequence: Synthetic oligonucleotide
  Antisense strand to SEQ ID NO: 77738
uaaaguacaccacguuccc

SEQ ID NO: 77820 - RNA, 19 nt, Artificial Sequence
  Description of Artificial Sequence: Synthetic oligonucleotide
  Sense strand starting at position 1523 of SEQ ID NO: 975
gcccuaaagccucagacuu

SEQ ID NO: 77821 - RNA, 19 nt, Artificial Sequence
  Description of Artificial Sequence: Synthetic oligonucleotide
  Antisense strand to SEQ ID NO: 77740
aagucugaggcuuuagggc

SEQ ID NO: 77822 - RNA, 19 nt, Artificial Sequence
  Description of Artificial Sequence: Synthetic oligonucleotide
  Sense strand starting at position 1627 of SEQ ID NO: 975
gcugacagcuuacauuaca

SEQ ID NO: 77823 - RNA, 19 nt, Artificial Sequence
  Description of Artificial Sequence: Synthetic oligonucleotide
  Antisense strand to SEQ ID NO: 77742
uguaauguaagcugucagc

SEQ ID NO: 77824 - RNA, 19 nt, Artificial Sequence
  Description of Artificial Sequence: Synthetic oligonucleotide
  Sense strand starting at position 1704 of SEQ ID NO: 975
cgcuauuucuggccucaaa

SEQ ID NO: 77825 - RNA, 19 nt, Artificial Sequence
  Description of Artificial Sequence: Synthetic oligonucleotide
  Antisense strand to SEQ ID NO: 77744
uuugaggccagaaauagcg

SEQ ID NO: 77826 - RNA, 19 nt, Artificial Sequence
  Description of Artificial Sequence: Synthetic oligonucleotide
  Sense strand starting at position 1722 of SEQ ID NO: 975
agaguuucgugggcuggua

SEQ ID NO: 77827 - RNA, 19 nt, Artificial Sequence
  Description of Artificial Sequence: Synthetic oligonucleotide
  Antisense strand to SEQ ID NO: 77746
uaccagcccacgaaacucu

SEQ ID NO: 77828 - RNA, 19 nt, Artificial Sequence
  Description of Artificial Sequence: Synthetic oligonucleotide
  Sense strand starting at position 2070 of SEQ ID NO: 975
gcgcgcuccaacucugaaa

SEQ ID NO: 77829 - RNA, 19 nt, Artificial Sequence
  Description of Artificial Sequence: Synthetic oligonucleotide
  Antisense strand to SEQ ID NO: 77748
uuucagaguuggagcgcgc

SEQ ID NO: 77830 - RNA, 19 nt, Artificial Sequence
  Description of Artificial Sequence: Synthetic oligonucleotide
  Sense strand starting at position 2081 of SEQ ID NO: 975
cucugaaaucuucgcgcca

SEQ ID NO: 77831 - RNA, 19 nt, Artificial Sequence
  Description of Artificial Sequence: Synthetic oligonucleotide
  Antisense strand to SEQ ID NO: 77750
uggcgcgaagauuucagag

SEQ ID NO: 77832 - RNA, 19 nt, Artificial Sequence
  Description of Artificial Sequence: Synthetic oligonucleotide
  Sense strand starting at position 2460 of SEQ ID NO: 975
ccauuacuucgcgggccaa

SEQ ID NO: 77833 - RNA, 19 nt, Artificial Sequence
  Description of Artificial Sequence: Synthetic oligonucleotide
  Antisense strand to SEQ ID NO: 77752
uuggcccgcgaaguaaugg

SEQ ID NO: 77834 - RNA, 19 nt, Artificial Sequence
  Description of Artificial Sequence: Synthetic oligonucleotide
  Sense strand starting at position 3278 of SEQ ID NO: 975
gagauaggauaggaauaga

SEQ ID NO: 77835 - RNA, 19 nt, Artificial Sequence
  Description of Artificial Sequence: Synthetic oligonucleotide
  Antisense strand to SEQ ID NO: 77754
ucuauuccuauccuaucuc

SEQ ID NO: 77836 - RNA, 19 nt, Artificial Sequence
  Description of Artificial Sequence: Synthetic oligonucleotide
  Sense strand starting at position 3355 of SEQ ID NO: 975
gauagugaggcgugaagga

SEQ ID NO: 77837 - RNA, 19 nt, Artificial Sequence
  Description of Artificial Sequence: Synthetic oligonucleotide
  Antisense strand to SEQ ID NO: 77756
uccuucacgccucacuauc

SEQ ID NO: 77838 - RNA, 19 nt, Artificial Sequence
  Description of Artificial Sequence: Synthetic oligonucleotide
  Sense strand starting at position 3371 of SEQ ID NO: 975
ggaagagggucuugaagau

SEQ ID NO: 77839 - RNA, 19 nt, Artificial Sequence
  Description of Artificial Sequence: Synthetic oligonucleotide
  Antisense strand to SEQ ID NO: 77758
aucuucaagacccucuucc

SEQ ID NO: 77840 - RNA, 19 nt, Artificial Sequence
  Description of Artificial Sequence: Synthetic oligonucleotide
  Sense strand starting at position 3381 of SEQ ID NO: 975
cuugaagauugagaacaga

SEQ ID NO: 77841 - RNA, 19 nt, Artificial Sequence
  Description of Artificial Sequence: Synthetic oligonucleotide
  Antisense strand to SEQ ID NO: 77760
ucuguucucaaucuucaag

SEQ ID NO: 77842 - RNA, 19 nt, Artificial Sequence
  Description of Artificial Sequence: Synthetic oligonucleotide
  Sense strand starting at position 3466 of SEQ ID NO: 975
aagaauagauggugaagga

SEQ ID NO: 77843 - RNA, 19 nt, Artificial Sequence
  Description of Artificial Sequence: Synthetic oligonucleotide
  Antisense strand to SEQ ID NO: 77762
uccuucaccaucuauucuu

SEQ ID NO: 77844 - RNA, 19 nt, Artificial Sequence
  Description of Artificial Sequence: Synthetic oligonucleotide
  Sense strand starting at position 3554 of SEQ ID NO: 975
gaagguugggucuguggga

SEQ ID NO: 77845 - RNA, 19 nt, Artificial Sequence
  Description of Artificial Sequence: Synthetic oligonucleotide
  Antisense strand to SEQ ID NO: 77764
ucccacagacccaaccuuc

SEQ ID NO: 77846 - RNA, 19 nt, Artificial Sequence
  Description of Artificial Sequence: Synthetic oligonucleotide
  Sense strand starting at position 3686 of SEQ ID NO: 975
agcgcuagaauugguaaga

SEQ ID NO: 77847 - RNA, 19 nt, Artificial Sequence
  Description of Artificial Sequence: Synthetic oligonucleotide
  Antisense strand to SEQ ID NO: 77766
ucuuaccaauucuagcgcu

SEQ ID NO: 77848 - RNA, 19 nt, Artificial Sequence
  Description of Artificial Sequence: Synthetic oligonucleotide
  Sense strand starting at position 3687 of SEQ ID NO: 975
gcgcuagaauugguaagag

SEQ ID NO: 77849 - RNA, 19 nt, Artificial Sequence
  Description of Artificial Sequence: Synthetic oligonucleotide
  Antisense strand to SEQ ID NO: 77768
cucuuaccaauucuagcgc

SEQ ID NO: 77850 - RNA, 19 nt, Artificial Sequence
  Description of Artificial Sequence: Synthetic oligonucleotide
  Sense strand starting at position 3719 of SEQ ID NO: 975
gagagacuggcauguucuu

SEQ ID NO: 77851 - RNA, 19 nt, Artificial Sequence
  Description of Artificial Sequence: Synthetic oligonucleotide
  Antisense strand to SEQ ID NO: 77770
aagaacaugccagucucuc

SEQ ID NO: 77852 - RNA, 19 nt, Artificial Sequence
  Description of Artificial Sequence: Synthetic oligonucleotide
  Sense strand starting at position 3726 of SEQ ID NO: 975
uggcauguucuuggaggga

SEQ ID NO: 77853 - RNA, 19 nt, Artificial Sequence
  Description of Artificial Sequence: Synthetic oligonucleotide
  Antisense strand to SEQ ID NO: 77772
ucccuccaagaacaugcca

SEQ ID NO: 77854 - RNA, 19 nt, Artificial Sequence
  Description of Artificial Sequence: Synthetic oligonucleotide
  Sense strand starting at position 3728 of SEQ ID NO: 975
gcauguucuuggagggaag

SEQ ID NO: 77855 - RNA, 19 nt, Artificial Sequence
  Description of Artificial Sequence: Synthetic oligonucleotide
  Antisense strand to SEQ ID NO: 77774
cuucccuccaagaacaugc

SEQ ID NO: 77856 - RNA, 19 nt, Artificial Sequence
  Description of Artificial Sequence: Synthetic oligonucleotide
  Sense strand starting at position 3729 of SEQ ID NO: 975
cauguucuuggagggaagu

SEQ ID NO: 77857 - RNA, 19 nt, Artificial Sequence
  Description of Artificial Sequence: Synthetic oligonucleotide
  Antisense strand to SEQ ID NO: 77776
acuucccuccaagaacaug

SEQ ID NO: 77858 - RNA, 19 nt, Artificial Sequence
  Description of Artificial Sequence: Synthetic oligonucleotide
  Sense strand starting at position 3730 of SEQ ID NO: 975
auguucuuggagggaagua

SEQ ID NO: 77859 - RNA, 19 nt, Artificial Sequence
  Description of Artificial Sequence: Synthetic oligonucleotide
  Antisense strand to SEQ ID NO: 77778
uacuucccuccaagaacau

SEQ ID NO: 77860 - RNA, 19 nt, Artificial Sequence
  Description of Artificial Sequence: Synthetic oligonucleotide
  Sense strand starting at position 3785 of SEQ ID NO: 975
gaaagugcauauuauagga

SEQ ID NO: 77861 - RNA, 19 nt, Artificial Sequence
  Description of Artificial Sequence: Synthetic oligonucleotide
  Antisense strand to SEQ ID NO: 77780
uccuauaauaugcacuuuc

SEQ ID NO: 77862 - RNA, 19 nt, Artificial Sequence
  Description of Artificial Sequence: Synthetic oligonucleotide
  Sense strand starting at position 3787 of SEQ ID NO: 975
aagugcauauuauaggaaa

SEQ ID NO: 77863 - RNA, 19 nt, Artificial Sequence
  Description of Artificial Sequence: Synthetic oligonucleotide
  Antisense strand to SEQ ID NO: 77782
uuuccuauaauaugcacuu

SEQ ID NO: 77864 - RNA, 19 nt, Artificial Sequence
  Description of Artificial Sequence: Synthetic oligonucleotide
  Sense strand starting at position 3856 of SEQ ID NO: 975
gaagguggauuguugguua

SEQ ID NO: 77865 - RNA, 19 nt, Artificial Sequence
  Description of Artificial Sequence: Synthetic oligonucleotide
  Antisense strand to SEQ ID NO: 77784
uaaccaacaauccaccuuc

SEQ ID NO: 77866 - RNA, 19 nt, Artificial Sequence
  Description of Artificial Sequence: Synthetic oligonucleotide
  Sense strand starting at position 3859 of SEQ ID NO: 975
gguggauuguugguuauug

SEQ ID NO: 77867 - RNA, 19 nt, Artificial Sequence
  Description of Artificial Sequence: Synthetic oligonucleotide
  Antisense strand to SEQ ID NO: 77786
caauaaccaacaauccacc

SEQ ID NO: 77868 - RNA, 19 nt, Artificial Sequence
  Description of Artificial Sequence: Synthetic oligonucleotide
  Sense strand starting at position 3867 of SEQ ID NO: 975
guugguuauuggugguuua

SEQ ID NO: 77869 - RNA, 19 nt, Artificial Sequence
  Description of Artificial Sequence: Synthetic oligonucleotide
  Antisense strand to SEQ ID NO: 77788
uaaaccaccaauaaccaac

SEQ ID NO: 77870 - RNA, 19 nt, Artificial Sequence
  Description of Artificial Sequence: Synthetic oligonucleotide
  Sense strand starting at position 3870 of SEQ ID NO: 975
gguuauuggugguuuagaa

SEQ ID NO: 77871 - RNA, 19 nt, Artificial Sequence
  Description of Artificial Sequence: Synthetic oligonucleotide
  Antisense strand to SEQ ID NO: 77790
uucuaaaccaccaauaacc

SEQ ID NO: 77872 - RNA, 19 nt, Artificial Sequence
  Description of Artificial Sequence: Synthetic oligonucleotide
  Sense strand starting at position 3899 of SEQ ID NO: 975
uuuaguuucuguuuagguu

SEQ ID NO: 77873 - RNA, 19 nt, Artificial Sequence
  Description of Artificial Sequence: Synthetic oligonucleotide
  Antisense strand to SEQ ID NO: 77792
aaccuaaacagaaacuaaa

SEQ ID NO: 77874 - RNA, 19 nt, Artificial Sequence
  Description of Artificial Sequence: Synthetic oligonucleotide
  Sense strand starting at position 78 of SEQ ID NO: 976
cugggaaccucggugcaaa

SEQ ID NO: 77875 - RNA, 19 nt, Artificial Sequence
  Description of Artificial Sequence: Synthetic oligonucleotide
  Antisense strand to SEQ ID NO: 77794
uuugcaccgagguucccag

SEQ ID NO: 77876 - RNA, 19 nt, Artificial Sequence
  Description of Artificial Sequence: Synthetic oligonucleotide
  Sense strand starting at position 330 of SEQ ID NO: 976
augucuucaggugagaagu

SEQ ID NO: 77877 - RNA, 19 nt, Artificial Sequence
  Description of Artificial Sequence: Synthetic oligonucleotide
  Antisense strand to SEQ ID NO: 77796
acuucucaccugaagacau

SEQ ID NO: 77878 - RNA, 19 nt, Artificial Sequence
  Description of Artificial Sequence: Synthetic oligonucleotide
  Sense strand starting at position 533 of SEQ ID NO: 976
agcuguuucucccuaagcu

SEQ ID NO: 77879 - RNA, 19 nt, Artificial Sequence
  Description of Artificial Sequence: Synthetic oligonucleotide
  Antisense strand to SEQ ID NO: 77798
agcuuagggagaaacagcu

SEQ ID NO: 77880 - RNA, 19 nt, Artificial Sequence
  Description of Artificial Sequence: Synthetic oligonucleotide
  Sense strand starting at position 623 of SEQ ID NO: 976
ugaggcuaggucuguaaca

SEQ ID NO: 77881 - RNA, 19 nt, Artificial Sequence
  Description of Artificial Sequence: Synthetic oligonucleotide
  Antisense strand to SEQ ID NO: 77800
uguuacagaccuagccuca

SEQ ID NO: 77882 - RNA, 19 nt, Artificial Sequence
  Description of Artificial Sequence: Synthetic oligonucleotide
  Sense strand starting at position 624 of SEQ ID NO: 976
gaggcuaggucuguaacaa

SEQ ID NO: 77883 - RNA, 19 nt, Artificial Sequence
  Description of Artificial Sequence: Synthetic oligonucleotide
  Antisense strand to SEQ ID NO: 77802
uuguuacagaccuagccuc

SEQ ID NO: 77884 - RNA, 19 nt, Artificial Sequence
  Description of Artificial Sequence: Synthetic oligonucleotide
  Sense strand starting at position 625 of SEQ ID NO: 976
aggcuaggucuguaacaac

SEQ ID NO: 77885 - RNA, 19 nt, Artificial Sequence
  Description of Artificial Sequence: Synthetic oligonucleotide
  Antisense strand to SEQ ID NO: 77804
guuguuacagaccuagccu

SEQ ID NO: 77886 - RNA, 19 nt, Artificial Sequence
  Description of Artificial Sequence: Synthetic oligonucleotide
  Sense strand starting at position 964 of SEQ ID NO: 976
ggaucacuugccugggaag

SEQ ID NO: 77887 - RNA, 19 nt, Artificial Sequence
  Description of Artificial Sequence: Synthetic oligonucleotide
  Antisense strand to SEQ ID NO: 77806
cuucccaggcaagugaucc

SEQ ID NO: 77888 - RNA, 19 nt, Artificial Sequence
  Description of Artificial Sequence: Synthetic oligonucleotide
  Sense strand starting at position 1013 of SEQ ID NO: 976
cugccaaagucaucggaaa

SEQ ID NO: 77889 - RNA, 19 nt, Artificial Sequence
  Description of Artificial Sequence: Synthetic oligonucleotide
  Antisense strand to SEQ ID NO: 77808
uuuccgaugacuuuggcag

SEQ ID NO: 77890 - RNA, 19 nt, Artificial Sequence
  Description of Artificial Sequence: Synthetic oligonucleotide
  Sense strand starting at position 1264 of SEQ ID NO: 976
gacugcggccgcuuuauaa

SEQ ID NO: 77891 - RNA, 19 nt, Artificial Sequence
  Description of Artificial Sequence: Synthetic oligonucleotide
  Antisense strand to SEQ ID NO: 77810
uuauaaagcggccgcaguc

SEQ ID NO: 77892 - RNA, 19 nt, Artificial Sequence
  Description of Artificial Sequence: Synthetic oligonucleotide
  Sense strand starting at position 1420 of SEQ ID NO: 976
gagcucacagccugacauu

SEQ ID NO: 77893 - RNA, 19 nt, Artificial Sequence
  Description of Artificial Sequence: Synthetic oligonucleotide
  Antisense strand to SEQ ID NO: 77812
aaugucaggcugugagcuc

SEQ ID NO: 77894 - RNA, 19 nt, Artificial Sequence
  Description of Artificial Sequence: Synthetic oligonucleotide
  Sense strand starting at position 1527 of SEQ ID NO: 976
cccagaaccuugcaaguuu

SEQ ID NO: 77895 - RNA, 19 nt, Artificial Sequence
  Description of Artificial Sequence: Synthetic oligonucleotide
  Antisense strand to SEQ ID NO: 77814
aaacuugcaagguucuggg

SEQ ID NO: 77896 - RNA, 19 nt, Artificial Sequence
  Description of Artificial Sequence: Synthetic oligonucleotide
  Sense strand starting at position 1882 of SEQ ID NO: 976
uuggcagcuuucuccuuaa

SEQ ID NO: 77897 - RNA, 19 nt, Artificial Sequence
  Description of Artificial Sequence: Synthetic oligonucleotide
  Antisense strand to SEQ ID NO: 77816
uuaaggagaaagcugccaa

SEQ ID NO: 77898 - RNA, 19 nt, Artificial Sequence
  Description of Artificial Sequence: Synthetic oligonucleotide
  Sense strand starting at position 1885 of SEQ ID NO: 976
gcagcuuucuccuuaaagg

SEQ ID NO: 77899 - RNA, 19 nt, Artificial Sequence
  Description of Artificial Sequence: Synthetic oligonucleotide
  Antisense strand to SEQ ID NO: 77818
ccuuuaaggagaaagcugc

SEQ ID NO: 77900 - RNA, 19 nt, Artificial Sequence
  Description of Artificial Sequence: Synthetic oligonucleotide
  Sense strand starting at position 1909 of SEQ ID NO: 976
aagguuguguucccggcaa

SEQ ID NO: 77901 - RNA, 19 nt, Artificial Sequence
  Description of Artificial Sequence: Synthetic oligonucleotide
  Antisense strand to SEQ ID NO: 77820
uugccgggaacacaaccuu

SEQ ID NO: 77902 - RNA, 19 nt, Artificial Sequence
  Description of Artificial Sequence: Synthetic oligonucleotide
  Sense strand starting at position 1911 of SEQ ID NO: 976
gguuguguucccggcaacu

SEQ ID NO: 77903 - RNA, 19 nt, Artificial Sequence
  Description of Artificial Sequence: Synthetic oligonucleotide
  Antisense strand to SEQ ID NO: 77822
aguugccgggaacacaacc

SEQ ID NO: 77904 - RNA, 19 nt, Artificial Sequence
  Description of Artificial Sequence: Synthetic oligonucleotide
  Sense strand starting at position 1913 of SEQ ID NO: 976
uuguguucccggcaacugu

SEQ ID NO: 77905 - RNA, 19 nt, Artificial Sequence
  Description of Artificial Sequence: Synthetic oligonucleotide
  Antisense strand to SEQ ID NO: 77824
acaguugccgggaacacaa

SEQ ID NO: 77906 - RNA, 19 nt, Artificial Sequence
  Description of Artificial Sequence: Synthetic oligonucleotide
  Sense strand starting at position 1934 of SEQ ID NO: 976
gcuccaucucugugucaga

SEQ ID NO: 77907 - RNA, 19 nt, Artificial Sequence
  Description of Artificial Sequence: Synthetic oligonucleotide
  Antisense strand to SEQ ID NO: 77826
ucugacacagagauggagc

SEQ ID NO: 77908 - RNA, 19 nt, Artificial Sequence
  Description of Artificial Sequence: Synthetic oligonucleotide
  Sense strand starting at position 1941 of SEQ ID NO: 976
cucugugucagaggugaug

SEQ ID NO: 77909 - RNA, 19 nt, Artificial Sequence
  Description of Artificial Sequence: Synthetic oligonucleotide
  Antisense strand to SEQ ID NO: 77828
caucaccucugacacagag

SEQ ID NO: 77910 - RNA, 19 nt, Artificial Sequence
  Description of Artificial Sequence: Synthetic oligonucleotide
  Sense strand starting at position 1979 of SEQ ID NO: 976
ggauuucagucagagguaa

SEQ ID NO: 77911 - RNA, 19 nt, Artificial Sequence
  Description of Artificial Sequence: Synthetic oligonucleotide
  Antisense strand to SEQ ID NO: 77830
uuaccucugacugaaaucc

SEQ ID NO: 77912 - RNA, 19 nt, Artificial Sequence
  Description of Artificial Sequence: Synthetic oligonucleotide
  Sense strand starting at position 2018 of SEQ ID NO: 976
uuauucuagcccugaguuc

SEQ ID NO: 77913 - RNA, 19 nt, Artificial Sequence
  Description of Artificial Sequence: Synthetic oligonucleotide
  Antisense strand to SEQ ID NO: 77832
gaacucagggcuagaauaa

SEQ ID NO: 77914 - RNA, 19 nt, Artificial Sequence
  Description of Artificial Sequence: Synthetic oligonucleotide
  Sense strand starting at position 2025 of SEQ ID NO: 976
agcccugaguucuagaaug

SEQ ID NO: 77915 - RNA, 19 nt, Artificial Sequence
  Description of Artificial Sequence: Synthetic oligonucleotide
  Antisense strand to SEQ ID NO: 77834
cauucuagaacucagggcu

SEQ ID NO: 77916 - RNA, 19 nt, Artificial Sequence
  Description of Artificial Sequence: Synthetic oligonucleotide
  Sense strand starting at position 2200 of SEQ ID NO: 976
gggauucgaaccuagaugu

SEQ ID NO: 77917 - RNA, 19 nt, Artificial Sequence
  Description of Artificial Sequence: Synthetic oligonucleotide
  Antisense strand to SEQ ID NO: 77836
acaucuagguucgaauccc

SEQ ID NO: 77918 - RNA, 19 nt, Artificial Sequence
  Description of Artificial Sequence: Synthetic oligonucleotide
  Sense strand starting at position 2210 of SEQ ID NO: 976
ccuagauguguuggaccca

SEQ ID NO: 77919 - RNA, 19 nt, Artificial Sequence
  Description of Artificial Sequence: Synthetic oligonucleotide
  Antisense strand to SEQ ID NO: 77838
uggguccaacacaucuagg

SEQ ID NO: 77920 - RNA, 19 nt, Artificial Sequence
  Description of Artificial Sequence: Synthetic oligonucleotide
  Sense strand starting at position 2211 of SEQ ID NO: 976
cuagauguguuggacccaa

SEQ ID NO: 77921 - RNA, 19 nt, Artificial Sequence
  Description of Artificial Sequence: Synthetic oligonucleotide
  Antisense strand to SEQ ID NO: 77840
uuggguccaacacaucuag

SEQ ID NO: 77922 - RNA, 19 nt, Artificial Sequence
  Description of Artificial Sequence: Synthetic oligonucleotide
  Sense strand starting at position 2244 of SEQ ID NO: 976
cgaggugguuugaacaugu

SEQ ID NO: 77923 - RNA, 19 nt, Artificial Sequence
  Description of Artificial Sequence: Synthetic oligonucleotide
  Antisense strand to SEQ ID NO: 77842
acauguucaaaccaccucg

SEQ ID NO: 77924 - RNA, 19 nt, Artificial Sequence
  Description of Artificial Sequence: Synthetic oligonucleotide
  Sense strand starting at position 2549 of SEQ ID NO: 976
cugucuuuguccucccaca

SEQ ID NO: 77925 - RNA, 19 nt, Artificial Sequence
  Description of Artificial Sequence: Synthetic oligonucleotide
  Antisense strand to SEQ ID NO: 77844
ugugggaggacaaagacag

SEQ ID NO: 77926 - RNA, 19 nt, Artificial Sequence
  Description of Artificial Sequence: Synthetic oligonucleotide
  Sense strand starting at position 2574 of SEQ ID NO: 976
ggcagugugacauagucuu

SEQ ID NO: 77927 - RNA, 19 nt, Artificial Sequence
  Description of Artificial Sequence: Synthetic oligonucleotide
  Antisense strand to SEQ ID NO: 77846
aagacuaugucacacugcc

SEQ ID NO: 77928 - RNA, 19 nt, Artificial Sequence
  Description of Artificial Sequence: Synthetic oligonucleotide
  Sense strand starting at position 2580 of SEQ ID NO: 976
gugacauagucuuccugug

SEQ ID NO: 77929 - RNA, 19 nt, Artificial Sequence
  Description of Artificial Sequence: Synthetic oligonucleotide
  Antisense strand to SEQ ID NO: 77848
cacaggaagacuaugucac

SEQ ID NO: 77930 - RNA, 19 nt, Artificial Sequence
  Description of Artificial Sequence: Synthetic oligonucleotide
  Sense strand starting at position 2683 of SEQ ID NO: 976
auugaagguucuugaagac

SEQ ID NO: 77931 - RNA, 19 nt, Artificial Sequence
  Description of Artificial Sequence: Synthetic oligonucleotide
  Antisense strand to SEQ ID NO: 77850
gucuucaagaaccuucaau

SEQ ID NO: 77932 - RNA, 19 nt, Artificial Sequence
  Description of Artificial Sequence: Synthetic oligonucleotide
  Sense strand starting at position 2743 of SEQ ID NO: 976
ggagcuucauccuggagag

SEQ ID NO: 77933 - RNA, 19 nt, Artificial Sequence
  Description of Artificial Sequence: Synthetic oligonucleotide
  Antisense strand to SEQ ID NO: 77852
cucuccaggaugaagcucc

SEQ ID NO: 77934 - RNA, 19 nt, Artificial Sequence
  Description of Artificial Sequence: Synthetic oligonucleotide
  Sense strand starting at position 2790 of SEQ ID NO: 976
ggugguauguggaguggaa

SEQ ID NO: 77935 - RNA, 19 nt, Artificial Sequence
  Description of Artificial Sequence: Synthetic oligonucleotide
  Antisense strand to SEQ ID NO: 77854
uuccacuccacauaccacc

SEQ ID NO: 77936 - RNA, 19 nt, Artificial Sequence
  Description of Artificial Sequence: Synthetic oligonucleotide
  Sense strand starting at position 2864 of SEQ ID NO: 976
gccuguugccucuggcaga

SEQ ID NO: 77937 - RNA, 19 nt, Artificial Sequence
  Description of Artificial Sequence: Synthetic oligonucleotide
  Antisense strand to SEQ ID NO: 77856
ucugccagaggcaacaggc

SEQ ID NO: 77938 - RNA, 19 nt, Artificial Sequence
  Description of Artificial Sequence: Synthetic oligonucleotide
  Sense strand starting at position 3411 of SEQ ID NO: 976
cucauaggccagugaugaa

SEQ ID NO: 77939 - RNA, 19 nt, Artificial Sequence
  Description of Artificial Sequence: Synthetic oligonucleotide
  Antisense strand to SEQ ID NO: 77858
uucaucacuggccuaugag

SEQ ID NO: 77940 - RNA, 19 nt, Artificial Sequence
  Description of Artificial Sequence: Synthetic oligonucleotide
  Sense strand starting at position 3432 of SEQ ID NO: 976
ccucaucacucaguaggua

SEQ ID NO: 77941 - RNA, 19 nt, Artificial Sequence
  Description of Artificial Sequence: Synthetic oligonucleotide
  Antisense strand to SEQ ID NO: 77860
uaccuacugagugaugagg

SEQ ID NO: 77942 - RNA, 19 nt, Artificial Sequence
  Description of Artificial Sequence: Synthetic oligonucleotide
  Sense strand starting at position 3433 of SEQ ID NO: 976
cucaucacucaguagguau

SEQ ID NO: 77943 - RNA, 19 nt, Artificial Sequence
  Description of Artificial Sequence: Synthetic oligonucleotide
  Antisense strand to SEQ ID NO: 77862
auaccuacugagugaugag

SEQ ID NO: 77944 - RNA, 19 nt, Artificial Sequence
  Description of Artificial Sequence: Synthetic oligonucleotide
  Sense strand starting at position 3487 of SEQ ID NO: 976
uguucuaggcucugaagga

SEQ ID NO: 77945 - RNA, 19 nt, Artificial Sequence
  Description of Artificial Sequence: Synthetic oligonucleotide
  Antisense strand to SEQ ID NO: 77864
uccuucagagccuagaaca

SEQ ID NO: 77946 - RNA, 19 nt, Artificial Sequence
  Description of Artificial Sequence: Synthetic oligonucleotide
  Sense strand starting at position 3577 of SEQ ID NO: 976
ggcucuaguugaugaaaga

SEQ ID NO: 77947 - RNA, 19 nt, Artificial Sequence
  Description of Artificial Sequence: Synthetic oligonucleotide
  Antisense strand to SEQ ID NO: 77866
ucuuucaucaacuagagcc

SEQ ID NO: 77948 - RNA, 19 nt, Artificial Sequence
  Description of Artificial Sequence: Synthetic oligonucleotide
  Sense strand starting at position 3592 of SEQ ID NO: 976
aagaguuagggucagcaga

SEQ ID NO: 77949 - RNA, 19 nt, Artificial Sequence
  Description of Artificial Sequence: Synthetic oligonucleotide
  Antisense strand to SEQ ID NO: 77868
ucugcugacccuaacucuu

SEQ ID NO: 77950 - RNA, 19 nt, Artificial Sequence
  Description of Artificial Sequence: Synthetic oligonucleotide
  Sense strand starting at position 3961 of SEQ ID NO: 976
acaaucauccaagggcuau

SEQ ID NO: 77951 - RNA, 19 nt, Artificial Sequence
  Description of Artificial Sequence: Synthetic oligonucleotide
  Antisense strand to SEQ ID NO: 77870
auagcccuuggaugauugu

SEQ ID NO: 77952 - RNA, 19 nt, Artificial Sequence
  Description of Artificial Sequence: Synthetic oligonucleotide
  Sense strand starting at position 3965 of SEQ ID NO: 976
ucauccaagggcuaucaua

SEQ ID NO: 77953 - RNA, 19 nt, Artificial Sequence
  Description of Artificial Sequence: Synthetic oligonucleotide
  Antisense strand to SEQ ID NO: 77872
uaugauagcccuuggauga

SEQ ID NO: 77954 - RNA, 19 nt, Artificial Sequence
  Description of Artificial Sequence: Synthetic oligonucleotide
  Sense strand starting at position 45 of SEQ ID NO: 977
cugccuguuuauuugucua

SEQ ID NO: 77955 - RNA, 19 nt, Artificial Sequence
  Description of Artificial Sequence: Synthetic oligonucleotide
  Antisense strand to SEQ ID NO: 77874
uagacaaauaaacaggcag

SEQ ID NO: 77956 - RNA, 19 nt, Artificial Sequence
  Description of Artificial Sequence: Synthetic oligonucleotide
  Sense strand starting at position 47 of SEQ ID NO: 977
gccuguuuauuugucuaaa

SEQ ID NO: 77957 - RNA, 19 nt, Artificial Sequence
  Description of Artificial Sequence: Synthetic oligonucleotide
  Antisense strand to SEQ ID NO: 77876
uuuagacaaauaaacaggc

SEQ ID NO: 77958 - RNA, 19 nt, Artificial Sequence
  Description of Artificial Sequence: Synthetic oligonucleotide
  Sense strand starting at position 189 of SEQ ID NO: 977
uggcaaauaucugcccaaa

SEQ ID NO: 77959 - RNA, 19 nt, Artificial Sequence
  Description of Artificial Sequence: Synthetic oligonucleotide
  Antisense strand to SEQ ID NO: 77878
uuugggcagauauuugcca

SEQ ID NO: 77960 - RNA, 19 nt, Artificial Sequence
  Description of Artificial Sequence: Synthetic oligonucleotide
  Sense strand starting at position 191 of SEQ ID NO: 977
gcaaauaucugcccaaaga

SEQ ID NO: 77961 - RNA, 19 nt, Artificial Sequence
  Description of Artificial Sequence: Synthetic oligonucleotide
  Antisense strand to SEQ ID NO: 77880
ucuuugggcagauauuugc

SEQ ID NO: 77962 - RNA, 19 nt, Artificial Sequence
  Description of Artificial Sequence: Synthetic oligonucleotide
  Sense strand starting at position 227 of SEQ ID NO: 977
cagugacugccauggaaug

SEQ ID NO: 77963 - RNA, 19 nt, Artificial Sequence
  Description of Artificial Sequence: Synthetic oligonucleotide
  Antisense strand to SEQ ID NO: 77882
cauuccauggcagucacug

SEQ ID NO: 77964 - RNA, 19 nt, Artificial Sequence
  Description of Artificial Sequence: Synthetic oligonucleotide
  Sense strand starting at position 239 of SEQ ID NO: 977
uggaaugucgcucagugau

SEQ ID NO: 77965 - RNA, 19 nt, Artificial Sequence
  Description of Artificial Sequence: Synthetic oligonucleotide
  Antisense strand to SEQ ID NO: 77884
aucacugagcgacauucca

SEQ ID NO: 77966 - RNA, 19 nt, Artificial Sequence
  Description of Artificial Sequence: Synthetic oligonucleotide
  Sense strand starting at position 241 of SEQ ID NO: 977
gaaugucgcucagugauga

SEQ ID NO: 77967 - RNA, 19 nt, Artificial Sequence
  Description of Artificial Sequence: Synthetic oligonucleotide
  Antisense strand to SEQ ID NO: 77886
ucaucacugagcgacauuc

SEQ ID NO: 77968 - RNA, 19 nt, Artificial Sequence
  Description of Artificial Sequence: Synthetic oligonucleotide
  Sense strand starting at position 242 of SEQ ID NO: 977
aaugucgcucagugaugau

SEQ ID NO: 77969 - RNA, 19 nt, Artificial Sequence
  Description of Artificial Sequence: Synthetic oligonucleotide
  Antisense strand to SEQ ID NO: 77888
aucaucacugagcgacauu

SEQ ID NO: 77970 - RNA, 19 nt, Artificial Sequence
  Description of Artificial Sequence: Synthetic oligonucleotide
  Sense strand starting at position 251 of SEQ ID NO: 977
cagugaugaucuguugaau

SEQ ID NO: 77971 - RNA, 19 nt, Artificial Sequence
  Description of Artificial Sequence: Synthetic oligonucleotide
  Antisense strand to SEQ ID NO: 77890
auucaacagaucaucacug

SEQ ID NO: 77972 - RNA, 19 nt, Artificial Sequence
  Description of Artificial Sequence: Synthetic oligonucleotide
  Sense strand starting at position 257 of SEQ ID NO: 977
ugaucuguugaaugaacaa

SEQ ID NO: 77973 - RNA, 19 nt, Artificial Sequence
  Description of Artificial Sequence: Synthetic oligonucleotide
  Antisense strand to SEQ ID NO: 77892
uuguucauucaacagauca

SEQ ID NO: 77974 - RNA, 19 nt, Artificial Sequence
  Description of Artificial Sequence: Synthetic oligonucleotide
  Sense strand starting at position 300 of SEQ ID NO: 977
ccaggaaugucuguggaaa

SEQ ID NO: 77975 - RNA, 19 nt, Artificial Sequence
  Description of Artificial Sequence: Synthetic oligonucleotide
  Antisense strand to SEQ ID NO: 77894
uuuccacagacauuccugg

SEQ ID NO: 77976 - RNA, 19 nt, Artificial Sequence
  Description of Artificial Sequence: Synthetic oligonucleotide
  Sense strand starting at position 301 of SEQ ID NO: 977
caggaaugucuguggaaau

SEQ ID NO: 77977 - RNA, 19 nt, Artificial Sequence
  Description of Artificial Sequence: Synthetic oligonucleotide
  Antisense strand to SEQ ID NO: 77896
auuuccacagacauuccug

SEQ ID NO: 77978 - RNA, 19 nt, Artificial Sequence
  Description of Artificial Sequence: Synthetic oligonucleotide
  Sense strand starting at position 312 of SEQ ID NO: 977
guggaaauuccucaugcac

SEQ ID NO: 77979 - RNA, 19 nt, Artificial Sequence
  Description of Artificial Sequence: Synthetic oligonucleotide
  Antisense strand to SEQ ID NO: 77898
gugcaugaggaauuuccac

SEQ ID NO: 77980 - RNA, 19 nt, Artificial Sequence
  Description of Artificial Sequence: Synthetic oligonucleotide
  Sense strand starting at position 526 of SEQ ID NO: 977
gauggcccugcugaauauu

SEQ ID NO: 77981 - RNA, 19 nt, Artificial Sequence
  Description of Artificial Sequence: Synthetic oligonucleotide
  Antisense strand to SEQ ID NO: 77900
aauauucagcagggccauc

SEQ ID NO: 77982 - RNA, 19 nt, Artificial Sequence
  Description of Artificial Sequence: Synthetic oligonucleotide
  Sense strand starting at position 660 of SEQ ID NO: 977
gggcuugacgagugacuca

SEQ ID NO: 77983 - RNA, 19 nt, Artificial Sequence
  Description of Artificial Sequence: Synthetic oligonucleotide
  Antisense strand to SEQ ID NO: 77902
ugagucacucgucaagccc

SEQ ID NO: 77984 - RNA, 19 nt, Artificial Sequence
  Description of Artificial Sequence: Synthetic oligonucleotide
  Sense strand starting at position 720 of SEQ ID NO: 977
caggcaguuccuggguaaa

SEQ ID NO: 77985 - RNA, 19 nt, Artificial Sequence
  Description of Artificial Sequence: Synthetic oligonucleotide
  Antisense strand to SEQ ID NO: 77904
uuuacccaggaacugccug

SEQ ID NO: 77986 - RNA, 19 nt, Artificial Sequence
  Description of Artificial Sequence: Synthetic oligonucleotide
  Sense strand starting at position 722 of SEQ ID NO: 977
ggcaguuccuggguaaaca

SEQ ID NO: 77987 - RNA, 19 nt, Artificial Sequence
  Description of Artificial Sequence: Synthetic oligonucleotide
  Antisense strand to SEQ ID NO: 77906
uguuuacccaggaacugcc

SEQ ID NO: 77988 - RNA, 19 nt, Artificial Sequence
  Description of Artificial Sequence: Synthetic oligonucleotide
  Sense strand starting at position 738 of SEQ ID NO: 977
acaccagccugguuagaaa

SEQ ID NO: 77989 - RNA, 19 nt, Artificial Sequence
  Description of Artificial Sequence: Synthetic oligonucleotide
  Antisense strand to SEQ ID NO: 77908
uuucuaaccaggcuggugu

SEQ ID NO: 77990 - RNA, 19 nt, Artificial Sequence
  Description of Artificial Sequence: Synthetic oligonucleotide
  Sense strand starting at position 761 of SEQ ID NO: 977
ccucucuuggcucagagaa

SEQ ID NO: 77991 - RNA, 19 nt, Artificial Sequence
  Description of Artificial Sequence: Synthetic oligonucleotide
  Antisense strand to SEQ ID NO: 77910
uucucugagccaagagagg

SEQ ID NO: 77992 - RNA, 19 nt, Artificial Sequence
  Description of Artificial Sequence: Synthetic oligonucleotide
  Sense strand starting at position 981 of SEQ ID NO: 977
cgggauuccugaccguaga

SEQ ID NO: 77993 - RNA, 19 nt, Artificial Sequence
  Description of Artificial Sequence: Synthetic oligonucleotide
  Antisense strand to SEQ ID NO: 77912
ucuacggucaggaaucccg

SEQ ID NO: 77994 - RNA, 19 nt, Artificial Sequence
  Description of Artificial Sequence: Synthetic oligonucleotide
  Sense strand starting at position 982 of SEQ ID NO: 977
gggauuccugaccguagaa

SEQ ID NO: 77995 - RNA, 19 nt, Artificial Sequence
  Description of Artificial Sequence: Synthetic oligonucleotide
  Antisense strand to SEQ ID NO: 77914
uucuacggucaggaauccc

SEQ ID NO: 77996 - RNA, 19 nt, Artificial Sequence
  Description of Artificial Sequence: Synthetic oligonucleotide
  Sense strand starting at position 984 of SEQ ID NO: 977
gauuccugaccguagaauu

SEQ ID NO: 77997 - RNA, 19 nt, Artificial Sequence
  Description of Artificial Sequence: Synthetic oligonucleotide
  Antisense strand to SEQ ID NO: 77916
aauucuacggucaggaauc

SEQ ID NO: 77998 - RNA, 19 nt, Artificial Sequence
  Description of Artificial Sequence: Synthetic oligonucleotide
  Sense strand starting at position 1228 of SEQ ID NO: 977
gcuggccucagagagguua

SEQ ID NO: 77999 - RNA, 19 nt, Artificial Sequence
  Description of Artificial Sequence: Synthetic oligonucleotide
  Antisense strand to SEQ ID NO: 77918
uaaccucucugaggccagc

SEQ ID NO: 78000 - RNA, 19 nt, Artificial Sequence
  Description of Artificial Sequence: Synthetic oligonucleotide
  Sense strand starting at position 1266 of SEQ ID NO: 977
cacaguuacucagugaaag

SEQ ID NO: 78001 - RNA, 19 nt, Artificial Sequence
  Description of Artificial Sequence: Synthetic oligonucleotide
  Antisense strand to SEQ ID NO: 77920
cuuucacugaguaacugug

SEQ ID NO: 78002 - RNA, 19 nt, Artificial Sequence
  Description of Artificial Sequence: Synthetic oligonucleotide
  Sense strand starting at position 1267 of SEQ ID NO: 977
acaguuacucagugaaagg

SEQ ID NO: 78003 - RNA, 19 nt, Artificial Sequence
  Description of Artificial Sequence: Synthetic oligonucleotide
  Antisense strand to SEQ ID NO: 77922
ccuuucacugaguaacugu

SEQ ID NO: 78004 - RNA, 19 nt, Artificial Sequence
  Description of Artificial Sequence: Synthetic oligonucleotide
  Sense strand starting at position 1298 of SEQ ID NO: 977
caacucuucggcuguauga

SEQ ID NO: 78005 - RNA, 19 nt, Artificial Sequence
  Description of Artificial Sequence: Synthetic oligonucleotide
  Antisense strand to SEQ ID NO: 77924
ucauacagccgaagaguug

SEQ ID NO: 78006 - RNA, 19 nt, Artificial Sequence
  Description of Artificial Sequence: Synthetic oligonucleotide
  Sense strand starting at position 1330 of SEQ ID NO: 977
ggguguuccacacaagcuu

SEQ ID NO: 78007 - RNA, 19 nt, Artificial Sequence
  Description of Artificial Sequence: Synthetic oligonucleotide
  Antisense strand to SEQ ID NO: 77926
aagcuuguguggaacaccc

SEQ ID NO: 78008 - RNA, 19 nt, Artificial Sequence
  Description of Artificial Sequence: Synthetic oligonucleotide
  Sense strand starting at position 1401 of SEQ ID NO: 977
ggugauagacgguguggua

SEQ ID NO: 78009 - RNA, 19 nt, Artificial Sequence
  Description of Artificial Sequence: Synthetic oligonucleotide
  Antisense strand to SEQ ID NO: 77928
uaccacaccgucuaucacc

SEQ ID NO: 78010 - RNA, 19 nt, Artificial Sequence
  Description of Artificial Sequence: Synthetic oligonucleotide
  Sense strand starting at position 1416 of SEQ ID NO: 977
gguaaaguuucagcgagac

SEQ ID NO: 78011 - RNA, 19 nt, Artificial Sequence
  Description of Artificial Sequence: Synthetic oligonucleotide
  Antisense strand to SEQ ID NO: 77930
gucucgcugaaacuuuacc

SEQ ID NO: 78012 - RNA, 19 nt, Artificial Sequence
  Description of Artificial Sequence: Synthetic oligonucleotide
  Sense strand starting at position 3363 of SEQ ID NO: 977
augaucugucucugaccca

SEQ ID NO: 78013 - RNA, 19 nt, Artificial Sequence
  Description of Artificial Sequence: Synthetic oligonucleotide
  Antisense strand to SEQ ID NO: 77932
ugggucagagacagaucau

SEQ ID NO: 78014 - RNA, 19 nt, Artificial Sequence
  Description of Artificial Sequence: Synthetic oligonucleotide
  Sense strand starting at position 3450 of SEQ ID NO: 977
gccugaaauuuccagggca

SEQ ID NO: 78015 - RNA, 19 nt, Artificial Sequence
  Description of Artificial Sequence: Synthetic oligonucleotide
  Antisense strand to SEQ ID NO: 77934
ugcccuggaaauuucaggc

SEQ ID NO: 78016 - RNA, 19 nt, Artificial Sequence
  Description of Artificial Sequence: Synthetic oligonucleotide
  Sense strand starting at position 3562 of SEQ ID NO: 977
uuuccauuguuuccuguga

SEQ ID NO: 78017 - RNA, 19 nt, Artificial Sequence
  Description of Artificial Sequence: Synthetic oligonucleotide
  Antisense strand to SEQ ID NO: 77936
ucacaggaaacaauggaaa

SEQ ID NO: 78018 - RNA, 19 nt, Artificial Sequence
  Description of Artificial Sequence: Synthetic oligonucleotide
  Sense strand starting at position 3566 of SEQ ID NO: 977
cauuguuuccugugagagu

SEQ ID NO: 78019 - RNA, 19 nt, Artificial Sequence
  Description of Artificial Sequence: Synthetic oligonucleotide
  Antisense strand to SEQ ID NO: 77938
acucucacaggaaacaaug

SEQ ID NO: 78020 - RNA, 19 nt, Artificial Sequence
  Description of Artificial Sequence: Synthetic oligonucleotide
  Sense strand starting at position 3597 of SEQ ID NO: 977
gaaacucauggcuggguuu

SEQ ID NO: 78021 - RNA, 19 nt, Artificial Sequence
  Description of Artificial Sequence: Synthetic oligonucleotide
  Antisense strand to SEQ ID NO: 77940
aaacccagccaugaguuuc

SEQ ID NO: 78022 - RNA, 19 nt, Artificial Sequence
  Description of Artificial Sequence: Synthetic oligonucleotide
  Sense strand starting at position 3689 of SEQ ID NO: 977
gaagcuauguucccuguga

SEQ ID NO: 78023 - RNA, 19 nt, Artificial Sequence
  Description of Artificial Sequence: Synthetic oligonucleotide
  Antisense strand to SEQ ID NO: 77942
ucacagggaacauagcuuc

SEQ ID NO: 78024 - RNA, 19 nt, Artificial Sequence
  Description of Artificial Sequence: Synthetic oligonucleotide
  Sense strand starting at position 3690 of SEQ ID NO: 977
aagcuauguucccugugau

SEQ ID NO: 78025 - RNA, 19 nt, Artificial Sequence
  Description of Artificial Sequence: Synthetic oligonucleotide
  Antisense strand to SEQ ID NO: 77944
aucacagggaacauagcuu

SEQ ID NO: 78026 - RNA, 19 nt, Artificial Sequence
  Description of Artificial Sequence: Synthetic oligonucleotide
  Sense strand starting at position 3691 of SEQ ID NO: 977
agcuauguucccugugaua

SEQ ID NO: 78027 - RNA, 19 nt, Artificial Sequence
  Description of Artificial Sequence: Synthetic oligonucleotide
  Antisense strand to SEQ ID NO: 77946
uaucacagggaacauagcu

SEQ ID NO: 78028 - RNA, 19 nt, Artificial Sequence
  Description of Artificial Sequence: Synthetic oligonucleotide
  Sense strand starting at position 3693 of SEQ ID NO: 977
cuauguucccugugauagg

SEQ ID NO: 78029 - RNA, 19 nt, Artificial Sequence
  Description of Artificial Sequence: Synthetic oligonucleotide
  Antisense strand to SEQ ID NO: 77948
ccuaucacagggaacauag

SEQ ID NO: 78030 - RNA, 19 nt, Artificial Sequence
  Description of Artificial Sequence: Synthetic oligonucleotide
  Sense strand starting at position 3862 of SEQ ID NO: 977
ccagcucagaguuguaaag

SEQ ID NO: 78031 - RNA, 19 nt, Artificial Sequence
  Description of Artificial Sequence: Synthetic oligonucleotide
  Antisense strand to SEQ ID NO: 77950
cuuuacaacucugagcugg

SEQ ID NO: 78032 - RNA, 19 nt, Artificial Sequence
  Description of Artificial Sequence: Synthetic oligonucleotide
  Sense strand starting at position 3884 of SEQ ID NO: 977
agaaauugcauccacggua

SEQ ID NO: 78033 - RNA, 19 nt, Artificial Sequence
  Description of Artificial Sequence: Synthetic oligonucleotide
  Antisense strand to SEQ ID NO: 77952
uaccguggaugcaauuucu

SEQ ID NO: 78034 - RNA, 19 nt, Artificial Sequence
  Description of Artificial Sequence: Synthetic oligonucleotide
  Sense strand starting at position 130 of SEQ ID NO: 978
auauuaugcuaaguaguga

SEQ ID NO: 78035 - RNA, 19 nt, Artificial Sequence
  Description of Artificial Sequence: Synthetic oligonucleotide
  Antisense strand to SEQ ID NO: 77954
ucacuacuuagcauaauau

SEQ ID NO: 78036 - RNA, 19 nt, Artificial Sequence
  Description of Artificial Sequence: Synthetic oligonucleotide
  Sense strand starting at position 298 of SEQ ID NO: 978
agacaaucccgaugagguu

SEQ ID NO: 78037 - RNA, 19 nt, Artificial Sequence
  Description of Artificial Sequence: Synthetic oligonucleotide
  Antisense strand to SEQ ID NO: 77956
aaccucaucgggauugucu

SEQ ID NO: 78038 - RNA, 19 nt, Artificial Sequence
  Description of Artificial Sequence: Synthetic oligonucleotide
  Sense strand starting at position 332 of SEQ ID NO: 978
uaacaagagucaucaccga

SEQ ID NO: 78039 - RNA, 19 nt, Artificial Sequence
  Description of Artificial Sequence: Synthetic oligonucleotide
  Antisense strand to SEQ ID NO: 77958
ucggugaugacucuuguua

SEQ ID NO: 78040 - RNA, 19 nt, Artificial Sequence
  Description of Artificial Sequence: Synthetic oligonucleotide
  Sense strand starting at position 340 of SEQ ID NO: 978
gucaucaccgaauaagacu

SEQ ID NO: 78041 - RNA, 19 nt, Artificial Sequence
  Description of Artificial Sequence: Synthetic oligonucleotide
  Antisense strand to SEQ ID NO: 77960
agucuuauucggugaugac

SEQ ID NO: 78042 - RNA, 19 nt, Artificial Sequence
  Description of Artificial Sequence: Synthetic oligonucleotide
  Sense strand starting at position 419 of SEQ ID NO: 978
caguguagauuauuggauu

SEQ ID NO: 78043 - RNA, 19 nt, Artificial Sequence
  Description of Artificial Sequence: Synthetic oligonucleotide
  Antisense strand to SEQ ID NO: 77962
aauccaauaaucuacacug

SEQ ID NO: 78044 - RNA, 19 nt, Artificial Sequence
  Description of Artificial Sequence: Synthetic oligonucleotide
  Sense strand starting at position 432 of SEQ ID NO: 978
uggauugaugagggaguuu

SEQ ID NO: 78045 - RNA, 19 nt, Artificial Sequence
  Description of Artificial Sequence: Synthetic oligonucleotide
  Antisense strand to SEQ ID NO: 77964
aaacucccucaucaaucca

SEQ ID NO: 78046 - RNA, 19 nt, Artificial Sequence
  Description of Artificial Sequence: Synthetic oligonucleotide
  Sense strand starting at position 569 of SEQ ID NO: 978
ccagaaugaugcccaggau

SEQ ID NO: 78047 - RNA, 19 nt, Artificial Sequence
  Description of Artificial Sequence: Synthetic oligonucleotide
  Antisense strand to SEQ ID NO: 77966
auccugggcaucauucugg

SEQ ID NO: 78048 - RNA, 19 nt, Artificial Sequence
  Description of Artificial Sequence: Synthetic oligonucleotide
  Sense strand starting at position 602 of SEQ ID NO: 978
uuucucgagcagcagaaau

SEQ ID NO: 78049 - RNA, 19 nt, Artificial Sequence
  Description of Artificial Sequence: Synthetic oligonucleotide
  Antisense strand to SEQ ID NO: 77968
auuucugcugcucgagaaa

SEQ ID NO: 78050 - RNA, 19 nt, Artificial Sequence
  Description of Artificial Sequence: Synthetic oligonucleotide
  Sense strand starting at position 827 of SEQ ID NO: 978
gguagauccggccauauag

SEQ ID NO: 78051 - RNA, 19 nt, Artificial Sequence
  Description of Artificial Sequence: Synthetic oligonucleotide
  Antisense strand to SEQ ID NO: 77970
cuauauggccggaucuacc

SEQ ID NO: 78052 - RNA, 19 nt, Artificial Sequence
  Description of Artificial Sequence: Synthetic oligonucleotide
  Sense strand starting at position 890 of SEQ ID NO: 978
aguagaugguguaggagau

SEQ ID NO: 78053 - RNA, 19 nt, Artificial Sequence
  Description of Artificial Sequence: Synthetic oligonucleotide
  Antisense strand to SEQ ID NO: 77972
aucuccuacaccaucuacu

SEQ ID NO: 78054 - RNA, 19 nt, Artificial Sequence
  Description of Artificial Sequence: Synthetic oligonucleotide
  Sense strand starting at position 909 of SEQ ID NO: 978
cugagagguguucaccaga

SEQ ID NO: 78055 - RNA, 19 nt, Artificial Sequence
  Description of Artificial Sequence: Synthetic oligonucleotide
  Antisense strand to SEQ ID NO: 77974
ucuggugaacaccucucag

SEQ ID NO: 78056 - RNA, 19 nt, Artificial Sequence
  Description of Artificial Sequence: Synthetic oligonucleotide
  Sense strand starting at position 1050 of SEQ ID NO: 978
acuguauuccagggcaucu

SEQ ID NO: 78057 - RNA, 19 nt, Artificial Sequence
  Description of Artificial Sequence: Synthetic oligonucleotide
  Antisense strand to SEQ ID NO: 77976
agaugcccuggaauacagu

SEQ ID NO: 78058 - RNA, 19 nt, Artificial Sequence
  Description of Artificial Sequence: Synthetic oligonucleotide
  Sense strand starting at position 1079 of SEQ ID NO: 978
aguaccuguccagagcaau

SEQ ID NO: 78059 - RNA, 19 nt, Artificial Sequence
  Description of Artificial Sequence: Synthetic oligonucleotide
  Antisense strand to SEQ ID NO: 77978
auugcucuggacagguacu

SEQ ID NO: 78060 - RNA, 19 nt, Artificial Sequence
  Description of Artificial Sequence: Synthetic oligonucleotide
  Sense strand starting at position 1179 of SEQ ID NO: 978
ccaggugugggugauggua

SEQ ID NO: 78061 - RNA, 19 nt, Artificial Sequence
  Description of Artificial Sequence: Synthetic oligonucleotide
  Antisense strand to SEQ ID NO: 77980
uaccaucacccacaccugg

SEQ ID NO: 78062 - RNA, 19 nt, Artificial Sequence
  Description of Artificial Sequence: Synthetic oligonucleotide
  Sense strand starting at position 1286 of SEQ ID NO: 978
gcuuccuggugaguaagau

SEQ ID NO: 78063 - RNA, 19 nt, Artificial Sequence
  Description of Artificial Sequence: Synthetic oligonucleotide
  Antisense strand to SEQ ID NO: 77982
aucuuacucaccaggaagc

SEQ ID NO: 78064 - RNA, 19 nt, Artificial Sequence
  Description of Artificial Sequence: Synthetic oligonucleotide
  Sense strand starting at position 1296 of SEQ ID NO: 978
gaguaagaugguggugagu

SEQ ID NO: 78065 - RNA, 19 nt, Artificial Sequence
  Description of Artificial Sequence: Synthetic oligonucleotide
  Antisense strand to SEQ ID NO: 77984
acucaccaccaucuuacuc

SEQ ID NO: 78066 - RNA, 19 nt, Artificial Sequence
  Description of Artificial Sequence: Synthetic oligonucleotide
  Sense strand starting at position 1542 of SEQ ID NO: 978
caagguuguccugacaaca

SEQ ID NO: 78067 - RNA, 19 nt, Artificial Sequence
  Description of Artificial Sequence: Synthetic oligonucleotide
  Antisense strand to SEQ ID NO: 77986
uguugucaggacaaccuug

SEQ ID NO: 78068 - RNA, 19 nt, Artificial Sequence
  Description of Artificial Sequence: Synthetic oligonucleotide
  Sense strand starting at position 1560 of SEQ ID NO: 978
agagcaaagucauccuucu

SEQ ID NO: 78069 - RNA, 19 nt, Artificial Sequence
  Description of Artificial Sequence: Synthetic oligonucleotide
  Antisense strand to SEQ ID NO: 77988
agaaggaugacuuugcucu

SEQ ID NO: 78070 - RNA, 19 nt, Artificial Sequence
  Description of Artificial Sequence: Synthetic oligonucleotide
  Sense strand starting at position 1640 of SEQ ID NO: 978
acuauucucuaaguacagu

SEQ ID NO: 78071 - RNA, 19 nt, Artificial Sequence
  Description of Artificial Sequence: Synthetic oligonucleotide
  Antisense strand to SEQ ID NO: 77990
acuguacuuagagaauagu

SEQ ID NO: 78072 - RNA, 19 nt, Artificial Sequence
  Description of Artificial Sequence: Synthetic oligonucleotide
  Sense strand starting at position 1708 of SEQ ID NO: 978
accggacuauuugaagaau

SEQ ID NO: 78073 - RNA, 19 nt, Artificial Sequence
  Description of Artificial Sequence: Synthetic oligonucleotide
  Antisense strand to SEQ ID NO: 77992
auucuucaaauaguccggu

SEQ ID NO: 78074 - RNA, 19 nt, Artificial Sequence
  Description of Artificial Sequence: Synthetic oligonucleotide
  Sense strand starting at position 1749 of SEQ ID NO: 978
aguuaaaggucuuuccuaa

SEQ ID NO: 78075 - RNA, 19 nt, Artificial Sequence
  Description of Artificial Sequence: Synthetic oligonucleotide
  Antisense strand to SEQ ID NO: 77994
uuaggaaagaccuuuaacu

SEQ ID NO: 78076 - RNA, 19 nt, Artificial Sequence
  Description of Artificial Sequence: Synthetic oligonucleotide
  Sense strand starting at position 1839 of SEQ ID NO: 978
ugcugaauuuguuagacaa

SEQ ID NO: 78077 - RNA, 19 nt, Artificial Sequence
  Description of Artificial Sequence: Synthetic oligonucleotide
  Antisense strand to SEQ ID NO: 77996
uugucuaacaaauucagca

SEQ ID NO: 78078 - RNA, 19 nt, Artificial Sequence
  Description of Artificial Sequence: Synthetic oligonucleotide
  Sense strand starting at position 1841 of SEQ ID NO: 978
cugaauuuguuagacaauu

SEQ ID NO: 78079 - RNA, 19 nt, Artificial Sequence
  Description of Artificial Sequence: Synthetic oligonucleotide
  Antisense strand to SEQ ID NO: 77998
aauugucuaacaaauucag

SEQ ID NO: 78080 - RNA, 19 nt, Artificial Sequence
  Description of Artificial Sequence: Synthetic oligonucleotide
  Sense strand starting at position 1880 of SEQ ID NO: 978
ugggcaaugcccugggauu

SEQ ID NO: 78081 - RNA, 19 nt, Artificial Sequence
  Description of Artificial Sequence: Synthetic oligonucleotide
  Antisense strand to SEQ ID NO: 78000
aaucccagggcauugccca

SEQ ID NO: 78082 - RNA, 19 nt, Artificial Sequence
  Description of Artificial Sequence: Synthetic oligonucleotide
  Sense strand starting at position 1980 of SEQ ID NO: 978
uugaaacgauucuggauuu

SEQ ID NO: 78083 - RNA, 19 nt, Artificial Sequence
  Description of Artificial Sequence: Synthetic oligonucleotide
  Antisense strand to SEQ ID NO: 78002
aaauccagaaucguuucaa

SEQ ID NO: 78084 - RNA, 19 nt, Artificial Sequence
  Description of Artificial Sequence: Synthetic oligonucleotide
  Sense strand starting at position 2183 of SEQ ID NO: 978
guuaccaagacucgaagaa

SEQ ID NO: 78085 - RNA, 19 nt, Artificial Sequence
  Description of Artificial Sequence: Synthetic oligonucleotide
  Antisense strand to SEQ ID NO: 78004
uucuucgagucuugguaac

SEQ ID NO: 78086 - RNA, 19 nt, Artificial Sequence
  Description of Artificial Sequence: Synthetic oligonucleotide
  Sense strand starting at position 2190 of SEQ ID NO: 978
agacucgaagaaugcauaa

SEQ ID NO: 78087 - RNA, 19 nt, Artificial Sequence
  Description of Artificial Sequence: Synthetic oligonucleotide
  Antisense strand to SEQ ID NO: 78006
uuaugcauucuucgagucu

SEQ ID NO: 78088 - RNA, 19 nt, Artificial Sequence
  Description of Artificial Sequence: Synthetic oligonucleotide
  Sense strand starting at position 2480 of SEQ ID NO: 978
ucaucacaagcuuguuaga

SEQ ID NO: 78089 - RNA, 19 nt, Artificial Sequence
  Description of Artificial Sequence: Synthetic oligonucleotide
  Antisense strand to SEQ ID NO: 78008
ucuaacaagcuugugauga

SEQ ID NO: 78090 - RNA, 19 nt, Artificial Sequence
  Description of Artificial Sequence: Synthetic oligonucleotide
  Sense strand starting at position 2482 of SEQ ID NO: 978
aucacaagcuuguuagaag

SEQ ID NO: 78091 - RNA, 19 nt, Artificial Sequence
  Description of Artificial Sequence: Synthetic oligonucleotide
  Antisense strand to SEQ ID NO: 78010
cuucuaacaagcuugugau

SEQ ID NO: 78092 - RNA, 19 nt, Artificial Sequence
  Description of Artificial Sequence: Synthetic oligonucleotide
  Sense strand starting at position 2489 of SEQ ID NO: 978
gcuuguuagaaguacauga

SEQ ID NO: 78093 - RNA, 19 nt, Artificial Sequence
  Description of Artificial Sequence: Synthetic oligonucleotide
  Antisense strand to SEQ ID NO: 78012
ucauguacuucuaacaagc

SEQ ID NO: 78094 - RNA, 19 nt, Artificial Sequence
  Description of Artificial Sequence: Synthetic oligonucleotide
  Sense strand starting at position 2505 of SEQ ID NO: 978
ugaaaucagcucuguaagu

SEQ ID NO: 78095 - RNA, 19 nt, Artificial Sequence
  Description of Artificial Sequence: Synthetic oligonucleotide
  Antisense strand to SEQ ID NO: 78014
acuuacagagcugauuuca

SEQ ID NO: 78096 - RNA, 19 nt, Artificial Sequence
  Description of Artificial Sequence: Synthetic oligonucleotide
  Sense strand starting at position 2506 of SEQ ID NO: 978
gaaaucagcucuguaaguu

SEQ ID NO: 78097 - RNA, 19 nt, Artificial Sequence
  Description of Artificial Sequence: Synthetic oligonucleotide
  Antisense strand to SEQ ID NO: 78016
aacuuacagagcugauuuc

SEQ ID NO: 78098 - RNA, 19 nt, Artificial Sequence
  Description of Artificial Sequence: Synthetic oligonucleotide
  Sense strand starting at position 2507 of SEQ ID NO: 978
aaaucagcucuguaaguug

SEQ ID NO: 78099 - RNA, 19 nt, Artificial Sequence
  Description of Artificial Sequence: Synthetic oligonucleotide
  Antisense strand to SEQ ID NO: 78018
caacuuacagagcugauuu

SEQ ID NO: 78100 - RNA, 19 nt, Artificial Sequence
  Description of Artificial Sequence: Synthetic oligonucleotide
  Sense strand starting at position 2688 of SEQ ID NO: 978
ccaaauguccuauagugag

SEQ ID NO: 78101 - RNA, 19 nt, Artificial Sequence
  Description of Artificial Sequence: Synthetic oligonucleotide
  Antisense strand to SEQ ID NO: 78020
cucacuauaggacauuugg

SEQ ID NO: 78102 - RNA, 19 nt, Artificial Sequence
  Description of Artificial Sequence: Synthetic oligonucleotide
  Sense strand starting at position 2694 of SEQ ID NO: 978
guccuauagugagcaugaa

SEQ ID NO: 78103 - RNA, 19 nt, Artificial Sequence
  Description of Artificial Sequence: Synthetic oligonucleotide
  Antisense strand to SEQ ID NO: 78022
uucaugcucacuauaggac

SEQ ID NO: 78104 - RNA, 19 nt, Artificial Sequence
  Description of Artificial Sequence: Synthetic oligonucleotide
  Sense strand starting at position 2695 of SEQ ID NO: 978
uccuauagugagcaugaau

SEQ ID NO: 78105 - RNA, 19 nt, Artificial Sequence
  Description of Artificial Sequence: Synthetic oligonucleotide
  Antisense strand to SEQ ID NO: 78024
auucaugcucacuauagga

SEQ ID NO: 78106 - RNA, 19 nt, Artificial Sequence
  Description of Artificial Sequence: Synthetic oligonucleotide
  Sense strand starting at position 3390 of SEQ ID NO: 978
gugugagcggcuuuagcuu

SEQ ID NO: 78107 - RNA, 19 nt, Artificial Sequence
  Description of Artificial Sequence: Synthetic oligonucleotide
  Antisense strand to SEQ ID NO: 78026
aagcuaaagccgcucacac

SEQ ID NO: 78108 - RNA, 19 nt, Artificial Sequence
  Description of Artificial Sequence: Synthetic oligonucleotide
  Sense strand starting at position 3396 of SEQ ID NO: 978
gcggcuuuagcuucuuaac

SEQ ID NO: 78109 - RNA, 19 nt, Artificial Sequence
  Description of Artificial Sequence: Synthetic oligonucleotide
  Antisense strand to SEQ ID NO: 78028
guuaagaagcuaaagccgc

SEQ ID NO: 78110 - RNA, 19 nt, Artificial Sequence
  Description of Artificial Sequence: Synthetic oligonucleotide
  Sense strand starting at position 3776 of SEQ ID NO: 978
cccaaauuugugggugcuu

SEQ ID NO: 78111 - RNA, 19 nt, Artificial Sequence
  Description of Artificial Sequence: Synthetic oligonucleotide
  Antisense strand to SEQ ID NO: 78030
aagcacccacaaauuuggg

SEQ ID NO: 78112 - RNA, 19 nt, Artificial Sequence
  Description of Artificial Sequence: Synthetic oligonucleotide
  Sense strand starting at position 3824 of SEQ ID NO: 978
gggaaagccucaguuuaag

SEQ ID NO: 78113 - RNA, 19 nt, Artificial Sequence
  Description of Artificial Sequence: Synthetic oligonucleotide
  Antisense strand to SEQ ID NO: 78032
cuuaaacugaggcuuuccc

SEQ ID NO: 78114 - RNA, 19 nt, Artificial Sequence
  Description of Artificial Sequence: Synthetic oligonucleotide
  Sense strand starting at position 3940 of SEQ ID NO: 979
cccauuacagauggucaaa

SEQ ID NO: 78115 - RNA, 19 nt, Artificial Sequence
  Description of Artificial Sequence: Synthetic oligonucleotide
  Antisense strand to SEQ ID NO: 78034
uuugaccaucuguaauggg

SEQ ID NO: 78116 - RNA, 19 nt, Artificial Sequence
  Description of Artificial Sequence: Synthetic oligonucleotide
  Sense strand starting at position 3916 of SEQ ID NO: 979
gcucgaugcccauggcaaa

SEQ ID NO: 78117 - RNA, 19 nt, Artificial Sequence
  Description of Artificial Sequence: Synthetic oligonucleotide
  Antisense strand to SEQ ID NO: 78036
uuugccaugggcaucgagc

SEQ ID NO: 78118 - RNA, 19 nt, Artificial Sequence
  Description of Artificial Sequence: Synthetic oligonucleotide
  Sense strand starting at position 3820 of SEQ ID NO: 979
cugagagguagacguuaaa

SEQ ID NO: 78119 - RNA, 19 nt, Artificial Sequence
  Description of Artificial Sequence: Synthetic oligonucleotide
  Antisense strand to SEQ ID NO: 78038
uuuaacgucuaccucucag

SEQ ID NO: 78120 - RNA, 19 nt, Artificial Sequence
  Description of Artificial Sequence: Synthetic oligonucleotide
  Sense strand starting at position 3812 of SEQ ID NO: 979
caauaaugcugagagguag

SEQ ID NO: 78121 - RNA, 19 nt, Artificial Sequence
  Description of Artificial Sequence: Synthetic oligonucleotide
  Antisense strand to SEQ ID NO: 78040
cuaccucucagcauuauug

SEQ ID NO: 78122 - RNA, 19 nt, Artificial Sequence
  Description of Artificial Sequence: Synthetic oligonucleotide
  Sense strand starting at position 3164 of SEQ ID NO: 979
cuagaugucaggcacuguu

SEQ ID NO: 78123 - RNA, 19 nt, Artificial Sequence
  Description of Artificial Sequence: Synthetic oligonucleotide
  Antisense strand to SEQ ID NO: 78042
aacagugccugacaucuag

SEQ ID NO: 78124 - RNA, 19 nt, Artificial Sequence
  Description of Artificial Sequence: Synthetic oligonucleotide
  Sense strand starting at position 3096 of SEQ ID NO: 979
gcagguuaauacuguuauu

SEQ ID NO: 78125 - RNA, 19 nt, Artificial Sequence
  Description of Artificial Sequence: Synthetic oligonucleotide
  Antisense strand to SEQ ID NO: 78044
aauaacaguauuaaccugc

SEQ ID NO: 78126 - RNA, 19 nt, Artificial Sequence
  Description of Artificial Sequence: Synthetic oligonucleotide
  Sense strand starting at position 3087 of SEQ ID NO: 979
cacugcugugcagguuaau

SEQ ID NO: 78127 - RNA, 19 nt, Artificial Sequence
  Description of Artificial Sequence: Synthetic oligonucleotide
  Antisense strand to SEQ ID NO: 78046
auuaaccugcacagcagug

SEQ ID NO: 78128 - RNA, 19 nt, Artificial Sequence
  Description of Artificial Sequence: Synthetic oligonucleotide
  Sense strand starting at position 3072 of SEQ ID NO: 979
agagucucugccuaacacu

SEQ ID NO: 78129 - RNA, 19 nt, Artificial Sequence
  Description of Artificial Sequence: Synthetic oligonucleotide
  Antisense strand to SEQ ID NO: 78048
aguguuaggcagagacucu

SEQ ID NO: 78130 - RNA, 19 nt, Artificial Sequence
  Description of Artificial Sequence: Synthetic oligonucleotide
  Sense strand starting at position 3069 of SEQ ID NO: 979
agaagagucucugccuaac

SEQ ID NO: 78131 - RNA, 19 nt, Artificial Sequence
  Description of Artificial Sequence: Synthetic oligonucleotide
  Antisense strand to SEQ ID NO: 78050
guuaggcagagacucuucu

SEQ ID NO: 78132 - RNA, 19 nt, Artificial Sequence
  Description of Artificial Sequence: Synthetic oligonucleotide
  Sense strand starting at position 3067 of SEQ ID NO: 979
ugagaagagucucugccua

SEQ ID NO: 78133 - RNA, 19 nt, Artificial Sequence
  Description of Artificial Sequence: Synthetic oligonucleotide
  Antisense strand to SEQ ID NO: 78052
uaggcagagacucuucuca

SEQ ID NO: 78134 - RNA, 19 nt, Artificial Sequence
  Description of Artificial Sequence: Synthetic oligonucleotide
  Sense strand starting at position 2985 of SEQ ID NO: 979
uguguuaagagucgcugca

SEQ ID NO: 78135 - RNA, 19 nt, Artificial Sequence
  Description of Artificial Sequence: Synthetic oligonucleotide
  Antisense strand to SEQ ID NO: 78054
ugcagcgacucuuaacaca

SEQ ID NO: 78136 - RNA, 19 nt, Artificial Sequence
  Description of Artificial Sequence: Synthetic oligonucleotide
  Sense strand starting at position 2934 of SEQ ID NO: 979
gcgcuccuagucuaacaga

SEQ ID NO: 78137 - RNA, 19 nt, Artificial Sequence
  Description of Artificial Sequence: Synthetic oligonucleotide
  Antisense strand to SEQ ID NO: 78056
ucuguuagacuaggagcgc

SEQ ID NO: 78138 - RNA, 19 nt, Artificial Sequence
  Description of Artificial Sequence: Synthetic oligonucleotide
  Sense strand starting at position 2932 of SEQ ID NO: 979
uggcgcuccuagucuaaca

SEQ ID NO: 78139 - RNA, 19 nt, Artificial Sequence
  Description of Artificial Sequence: Synthetic oligonucleotide
  Antisense strand to SEQ ID NO: 78058
uguuagacuaggagcgcca

SEQ ID NO: 78140 - RNA, 19 nt, Artificial Sequence
  Description of Artificial Sequence: Synthetic oligonucleotide
  Sense strand starting at position 2913 of SEQ ID NO: 979
gaugaagucccugagcugu

SEQ ID NO: 78141 - RNA, 19 nt, Artificial Sequence
  Description of Artificial Sequence: Synthetic oligonucleotide
  Antisense strand to SEQ ID NO: 78060
acagcucagggacuucauc

SEQ ID NO: 78142 - RNA, 19 nt, Artificial Sequence
  Description of Artificial Sequence: Synthetic oligonucleotide
  Sense strand starting at position 2912 of SEQ ID NO: 979
ggaugaagucccugagcug

SEQ ID NO: 78143 - RNA, 19 nt, Artificial Sequence
  Description of Artificial Sequence: Synthetic oligonucleotide
  Antisense strand to SEQ ID NO: 78062
cagcucagggacuucaucc

SEQ ID NO: 78144 - RNA, 19 nt, Artificial Sequence
  Description of Artificial Sequence: Synthetic oligonucleotide
  Sense strand starting at position 2862 of SEQ ID NO: 979
gggccuuucccgcagaaac

SEQ ID NO: 78145 - RNA, 19 nt, Artificial Sequence
  Description of Artificial Sequence: Synthetic oligonucleotide
  Antisense strand to SEQ ID NO: 78064
guuucugcgggaaaggccc

SEQ ID NO: 78146 - RNA, 19 nt, Artificial Sequence
  Description of Artificial Sequence: Synthetic oligonucleotide
  Sense strand starting at position 2833 of SEQ ID NO: 979
uaguuugagcaagaagcua

SEQ ID NO: 78147 - RNA, 19 nt, Artificial Sequence
  Description of Artificial Sequence: Synthetic oligonucleotide
  Antisense strand to SEQ ID NO: 78066
uagcuucuugcucaaacua

SEQ ID NO: 78148 - RNA, 19 nt, Artificial Sequence
  Description of Artificial Sequence: Synthetic oligonucleotide
  Sense strand starting at position 2829 of SEQ ID NO: 979
ccguuaguuugagcaagaa

SEQ ID NO: 78149 - RNA, 19 nt, Artificial Sequence
  Description of Artificial Sequence: Synthetic oligonucleotide
  Antisense strand to SEQ ID NO: 78068
uucuugcucaaacuaacgg

SEQ ID NO: 78150 - RNA, 19 nt, Artificial Sequence
  Description of Artificial Sequence: Synthetic oligonucleotide
  Sense strand starting at position 2808 of SEQ ID NO: 979
aguaauucugggcauucuu

SEQ ID NO: 78151 - RNA, 19 nt, Artificial Sequence
  Description of Artificial Sequence: Synthetic oligonucleotide
  Antisense strand to SEQ ID NO: 78070
aagaaugcccagaauuacu

SEQ ID NO: 78152 - RNA, 19 nt, Artificial Sequence
  Description of Artificial Sequence: Synthetic oligonucleotide
  Sense strand starting at position 2807 of SEQ ID NO: 979
uaguaauucugggcauucu

SEQ ID NO: 78153 - RNA, 19 nt, Artificial Sequence
  Description of Artificial Sequence: Synthetic oligonucleotide
  Antisense strand to SEQ ID NO: 78072
agaaugcccagaauuacua

SEQ ID NO: 78154 - RNA, 19 nt, Artificial Sequence
  Description of Artificial Sequence: Synthetic oligonucleotide
  Sense strand starting at position 2806 of SEQ ID NO: 979
uuaguaauucugggcauuc

SEQ ID NO: 78155 - RNA, 19 nt, Artificial Sequence
  Description of Artificial Sequence: Synthetic oligonucleotide
  Antisense strand to SEQ ID NO: 78074
gaaugcccagaauuacuaa

SEQ ID NO: 78156 - RNA, 19 nt, Artificial Sequence
  Description of Artificial Sequence: Synthetic oligonucleotide
  Sense strand starting at position 2805 of SEQ ID NO: 979
guuaguaauucugggcauu

SEQ ID NO: 78157 - RNA, 19 nt, Artificial Sequence
  Description of Artificial Sequence: Synthetic oligonucleotide
  Antisense strand to SEQ ID NO: 78076
aaugcccagaauuacuaac

SEQ ID NO: 78158 - RNA, 19 nt, Artificial Sequence
  Description of Artificial Sequence: Synthetic oligonucleotide
  Sense strand starting at position 2752 of SEQ ID NO: 979
ggacaaaucgccugacacc

SEQ ID NO: 78159 - RNA, 19 nt, Artificial Sequence
  Description of Artificial Sequence: Synthetic oligonucleotide
  Antisense strand to SEQ ID NO: 78078
ggugucaggcgauuugucc

SEQ ID NO: 78160 - RNA, 19 nt, Artificial Sequence
  Description of Artificial Sequence: Synthetic oligonucleotide
  Sense strand starting at position 2750 of SEQ ID NO: 979
uuggacaaaucgccugaca

SEQ ID NO: 78161 - RNA, 19 nt, Artificial Sequence
  Description of Artificial Sequence: Synthetic oligonucleotide
  Antisense strand to SEQ ID NO: 78080
ugucaggcgauuuguccaa

SEQ ID NO: 78162 - RNA, 19 nt, Artificial Sequence
  Description of Artificial Sequence: Synthetic oligonucleotide
  Sense strand starting at position 2741 of SEQ ID NO: 979
ugggaaauauuggacaaau

SEQ ID NO: 78163 - RNA, 19 nt, Artificial Sequence
  Description of Artificial Sequence: Synthetic oligonucleotide
  Antisense strand to SEQ ID NO: 78082
auuuguccaauauuuccca

SEQ ID NO: 78164 - RNA, 19 nt, Artificial Sequence
  Description of Artificial Sequence: Synthetic oligonucleotide
  Sense strand starting at position 2730 of SEQ ID NO: 979
gagccaggaguugggaaau

SEQ ID NO: 78165 - RNA, 19 nt, Artificial Sequence
  Description of Artificial Sequence: Synthetic oligonucleotide
  Antisense strand to SEQ ID NO: 78084
auuucccaacuccuggcuc

SEQ ID NO: 78166 - RNA, 19 nt, Artificial Sequence
  Description of Artificial Sequence: Synthetic oligonucleotide
  Sense strand starting at position 723 of SEQ ID NO: 979
gagcaaaugugugcuaagu

SEQ ID NO: 78167 - RNA, 19 nt, Artificial Sequence
  Description of Artificial Sequence: Synthetic oligonucleotide
  Antisense strand to SEQ ID NO: 78086
acuuagcacacauuugcuc

SEQ ID NO: 78168 - RNA, 19 nt, Artificial Sequence
  Description of Artificial Sequence: Synthetic oligonucleotide
  Sense strand starting at position 722 of SEQ ID NO: 979
ugagcaaaugugugcuaag

SEQ ID NO: 78169 - RNA, 19 nt, Artificial Sequence
  Description of Artificial Sequence: Synthetic oligonucleotide
  Antisense strand to SEQ ID NO: 78088
cuuagcacacauuugcuca

SEQ ID NO: 78170 - RNA, 19 nt, Artificial Sequence
  Description of Artificial Sequence: Synthetic oligonucleotide
  Sense strand starting at position 663 of SEQ ID NO: 979
aggcauuggcucuggaguu

SEQ ID NO: 78171 - RNA, 19 nt, Artificial Sequence
  Description of Artificial Sequence: Synthetic oligonucleotide
  Antisense strand to SEQ ID NO: 78090
aacuccagagccaaugccu

SEQ ID NO: 78172 - RNA, 19 nt, Artificial Sequence
  Description of Artificial Sequence: Synthetic oligonucleotide
  Sense strand starting at position 598 of SEQ ID NO: 979
guacaugguaccugggaga

SEQ ID NO: 78173 - RNA, 19 nt, Artificial Sequence
  Description of Artificial Sequence: Synthetic oligonucleotide
  Antisense strand to SEQ ID NO: 78092
ucucccagguaccauguac

SEQ ID NO: 78174 - RNA, 19 nt, Artificial Sequence
  Description of Artificial Sequence: Synthetic oligonucleotide
  Sense strand starting at position 582 of SEQ ID NO: 979
ccauaaauucccuguugua

SEQ ID NO: 78175 - RNA, 19 nt, Artificial Sequence
  Description of Artificial Sequence: Synthetic oligonucleotide
  Antisense strand to SEQ ID NO: 78094
uacaacagggaauuuaugg

SEQ ID NO: 78176 - RNA, 19 nt, Artificial Sequence
  Description of Artificial Sequence: Synthetic oligonucleotide
  Sense strand starting at position 505 of SEQ ID NO: 979
uggcaugugaugccgcaau

SEQ ID NO: 78177 - RNA, 19 nt, Artificial Sequence
  Description of Artificial Sequence: Synthetic oligonucleotide
  Antisense strand to SEQ ID NO: 78096
auugcggcaucacaugcca

SEQ ID NO: 78178 - RNA, 19 nt, Artificial Sequence
  Description of Artificial Sequence: Synthetic oligonucleotide
  Sense strand starting at position 496 of SEQ ID NO: 979
cuaaguuccuggcauguga

SEQ ID NO: 78179 - RNA, 19 nt, Artificial Sequence
  Description of Artificial Sequence: Synthetic oligonucleotide
  Antisense strand to SEQ ID NO: 78098
ucacaugccaggaacuuag

SEQ ID NO: 78180 - RNA, 19 nt, Artificial Sequence
  Description of Artificial Sequence: Synthetic oligonucleotide
  Sense strand starting at position 420 of SEQ ID NO: 979
ggagauggcaccuguuuag

SEQ ID NO: 78181 - RNA, 19 nt, Artificial Sequence
  Description of Artificial Sequence: Synthetic oligonucleotide
  Antisense strand to SEQ ID NO: 78100
cuaaacaggugccaucucc

SEQ ID NO: 78182 - RNA, 19 nt, Artificial Sequence
  Description of Artificial Sequence: Synthetic oligonucleotide
  Sense strand starting at position 295 of SEQ ID NO: 979
gugacaugaucacuucuuu

SEQ ID NO: 78183 - RNA, 19 nt, Artificial Sequence
  Description of Artificial Sequence: Synthetic oligonucleotide
  Antisense strand to SEQ ID NO: 78102
aaagaagugaucaugucac

SEQ ID NO: 78184 - RNA, 19 nt, Artificial Sequence
  Description of Artificial Sequence: Synthetic oligonucleotide
  Sense strand starting at position 271 of SEQ ID NO: 979
gccugaagagucugaagca

SEQ ID NO: 78185 - RNA, 19 nt, Artificial Sequence
  Description of Artificial Sequence: Synthetic oligonucleotide
  Antisense strand to SEQ ID NO: 78104
ugcuucagacucuucaggc

SEQ ID NO: 78186 - RNA, 19 nt, Artificial Sequence
  Description of Artificial Sequence: Synthetic oligonucleotide
  Sense strand starting at position 226 of SEQ ID NO: 979
gccagauccugagacaggu

SEQ ID NO: 78187 - RNA, 19 nt, Artificial Sequence
  Description of Artificial Sequence: Synthetic oligonucleotide
  Antisense strand to SEQ ID NO: 78106
accugucucaggaucuggc

SEQ ID NO: 78188 - RNA, 19 nt, Artificial Sequence
  Description of Artificial Sequence: Synthetic oligonucleotide
  Sense strand starting at position 157 of SEQ ID NO: 979
gcuguugcagaguaagaga

SEQ ID NO: 78189 - RNA, 19 nt, Artificial Sequence
  Description of Artificial Sequence: Synthetic oligonucleotide
  Antisense strand to SEQ ID NO: 78108
ucucuuacucugcaacagc

SEQ ID NO: 78190 - RNA, 19 nt, Artificial Sequence
  Description of Artificial Sequence: Synthetic oligonucleotide
  Sense strand starting at position 127 of SEQ ID NO: 979
gccuucuagaaccgugaga

SEQ ID NO: 78191 - RNA, 19 nt, Artificial Sequence
  Description of Artificial Sequence: Synthetic oligonucleotide
  Antisense strand to SEQ ID NO: 78110
ucucacgguucuagaaggc

SEQ ID NO: 78192 - RNA, 19 nt, Artificial Sequence
  Description of Artificial Sequence: Synthetic oligonucleotide
  Sense strand starting at position 16 of SEQ ID NO: 979
ugcagauaggguggucaaa

SEQ ID NO: 78193 - RNA, 19 nt, Artificial Sequence
  Description of Artificial Sequence: Synthetic oligonucleotide
  Antisense strand to SEQ ID NO: 78112
uuugaccacccuaucugca

SEQ ID NO: 78194 - RNA, 19 nt, Artificial Sequence
  Description of Artificial Sequence: Synthetic oligonucleotide
  Sense strand starting at position 2281 of SEQ ID NO: 980
ggcuuucccguccaaauuu

SEQ ID NO: 78195 - RNA, 19 nt, Artificial Sequence
  Description of Artificial Sequence: Synthetic oligonucleotide
  Antisense strand to SEQ ID NO: 78114
aaauuuggacgggaaagcc

SEQ ID NO: 78196 - RNA, 19 nt, Artificial Sequence
  Description of Artificial Sequence: Synthetic oligonucleotide
  Sense strand starting at position 2325 of SEQ ID NO: 980
aaauucugaucauucggua

SEQ ID NO: 78197 - RNA, 19 nt, Artificial Sequence
  Description of Artificial Sequence: Synthetic oligonucleotide
  Antisense strand to SEQ ID NO: 78116
uaccgaaugaucagaauuu

SEQ ID NO: 78198 - RNA, 19 nt, Artificial Sequence
  Description of Artificial Sequence: Synthetic oligonucleotide
  Sense strand starting at position 2329 of SEQ ID NO: 980
ucugaucauucgguauaug

SEQ ID NO: 78199 - RNA, 19 nt, Artificial Sequence
  Description of Artificial Sequence: Synthetic oligonucleotide
  Antisense strand to SEQ ID NO: 78118
cauauaccgaaugaucaga

SEQ ID NO: 78200 - RNA, 19 nt, Artificial Sequence
  Description of Artificial Sequence: Synthetic oligonucleotide
  Sense strand starting at position 2383 of SEQ ID NO: 980
gugagcauuuccucguguu

SEQ ID NO: 78201 - RNA, 19 nt, Artificial Sequence
  Description of Artificial Sequence: Synthetic oligonucleotide
  Antisense strand to SEQ ID NO: 78120
aacacgaggaaaugcucac

SEQ ID NO: 78202 - RNA, 19 nt, Artificial Sequence
  Description of Artificial Sequence: Synthetic oligonucleotide
  Sense strand starting at position 2384 of SEQ ID NO: 980
ugagcauuuccucguguuu

SEQ ID NO: 78203 - RNA, 19 nt, Artificial Sequence
  Description of Artificial Sequence: Synthetic oligonucleotide
  Antisense strand to SEQ ID NO: 78122
aaacacgaggaaaugcuca

SEQ ID NO: 78204 - RNA, 19 nt, Artificial Sequence
  Description of Artificial Sequence: Synthetic oligonucleotide
  Sense strand starting at position 2454 of SEQ ID NO: 980
gcagcaagucauuauugua

SEQ ID NO: 78205 - RNA, 19 nt, Artificial Sequence
  Description of Artificial Sequence: Synthetic oligonucleotide
  Antisense strand to SEQ ID NO: 78124
uacaauaaugacuugcugc

SEQ ID NO: 78206 - RNA, 19 nt, Artificial Sequence
  Description of Artificial Sequence: Synthetic oligonucleotide
  Sense strand starting at position 2469 of SEQ ID NO: 980
uguacuuugugguuggaua

SEQ ID NO: 78207 - RNA, 19 nt, Artificial Sequence
  Description of Artificial Sequence: Synthetic oligonucleotide
  Antisense strand to SEQ ID NO: 78126
uauccaaccacaaaguaca

SEQ ID NO: 78208 - RNA, 19 nt, Artificial Sequence
  Description of Artificial Sequence: Synthetic oligonucleotide
  Sense strand starting at position 2470 of SEQ ID NO: 980
guacuuugugguuggauau

SEQ ID NO: 78209 - RNA, 19 nt, Artificial Sequence
  Description of Artificial Sequence: Synthetic oligonucleotide
  Antisense strand to SEQ ID NO: 78128
auauccaaccacaaaguac

SEQ ID NO: 78210 - RNA, 19 nt, Artificial Sequence
  Description of Artificial Sequence: Synthetic oligonucleotide
  Sense strand starting at position 2751 of SEQ ID NO: 980
cgucguuuggaaagguaau

SEQ ID NO: 78211 - RNA, 19 nt, Artificial Sequence
  Description of Artificial Sequence: Synthetic oligonucleotide
  Antisense strand to SEQ ID NO: 78130
auuaccuuuccaaacgacg

SEQ ID NO: 78212 - RNA, 19 nt, Artificial Sequence
  Description of Artificial Sequence: Synthetic oligonucleotide
  Sense strand starting at position 2752 of SEQ ID NO: 980
gucguuuggaaagguaauu

SEQ ID NO: 78213 - RNA, 19 nt, Artificial Sequence
  Description of Artificial Sequence: Synthetic oligonucleotide
  Antisense strand to SEQ ID NO: 78132
aauuaccuuuccaaacgac

SEQ ID NO: 78214 - RNA, 19 nt, Artificial Sequence
  Description of Artificial Sequence: Synthetic oligonucleotide
  Sense strand starting at position 2829 of SEQ ID NO: 980
aggugacugggcuguagaa

SEQ ID NO: 78215 - RNA, 19 nt, Artificial Sequence
  Description of Artificial Sequence: Synthetic oligonucleotide
  Antisense strand to SEQ ID NO: 78134
uucuacagcccagucaccu

SEQ ID NO: 78216 - RNA, 19 nt, Artificial Sequence
  Description of Artificial Sequence: Synthetic oligonucleotide
  Sense strand starting at position 2855 of SEQ ID NO: 980
aagacaguccuaugguaaa

SEQ ID NO: 78217 - RNA, 19 nt, Artificial Sequence
  Description of Artificial Sequence: Synthetic oligonucleotide
  Antisense strand to SEQ ID NO: 78136
uuuaccauaggacugucuu

SEQ ID NO: 78218 - RNA, 19 nt, Artificial Sequence
  Description of Artificial Sequence: Synthetic oligonucleotide
  Sense strand starting at position 2899 of SEQ ID NO: 980
aaccaaguccugugaauag

SEQ ID NO: 78219 - RNA, 19 nt, Artificial Sequence
  Description of Artificial Sequence: Synthetic oligonucleotide
  Antisense strand to SEQ ID NO: 78138
cuauucacaggacuugguu

SEQ ID NO: 78220 - RNA, 19 nt, Artificial Sequence
  Description of Artificial Sequence: Synthetic oligonucleotide
  Sense strand starting at position 2917 of SEQ ID NO: 980
gagguagcacccugagaaa

SEQ ID NO: 78221 - RNA, 19 nt, Artificial Sequence
  Description of Artificial Sequence: Synthetic oligonucleotide
  Antisense strand to SEQ ID NO: 78140
uuucucagggugcuaccuc

SEQ ID NO: 78222 - RNA, 19 nt, Artificial Sequence
  Description of Artificial Sequence: Synthetic oligonucleotide
  Sense strand starting at position 2928 of SEQ ID NO: 980
cugagaaacccaugucauc

SEQ ID NO: 78223 - RNA, 19 nt, Artificial Sequence
  Description of Artificial Sequence: Synthetic oligonucleotide
  Antisense strand to SEQ ID NO: 78142
gaugacauggguuucucag

SEQ ID NO: 78224 - RNA, 19 nt, Artificial Sequence
  Description of Artificial Sequence: Synthetic oligonucleotide
  Sense strand starting at position 3037 of SEQ ID NO: 980
cucuuaauguuucuugaga

SEQ ID NO: 78225 - RNA, 19 nt, Artificial Sequence
  Description of Artificial Sequence: Synthetic oligonucleotide
  Antisense strand to SEQ ID NO: 78144
ucucaagaaacauuaagag

SEQ ID NO: 78226 - RNA, 19 nt, Artificial Sequence
  Description of Artificial Sequence: Synthetic oligonucleotide
  Sense strand starting at position 3038 of SEQ ID NO: 980
ucuuaauguuucuugagau

SEQ ID NO: 78227 - RNA, 19 nt, Artificial Sequence
  Description of Artificial Sequence: Synthetic oligonucleotide
  Antisense strand to SEQ ID NO: 78146
aucucaagaaacauuaaga

SEQ ID NO: 78228 - RNA, 19 nt, Artificial Sequence
  Description of Artificial Sequence: Synthetic oligonucleotide
  Sense strand starting at position 3103 of SEQ ID NO: 980
cagguucuuauggguagaa

SEQ ID NO: 78229 - RNA, 19 nt, Artificial Sequence
  Description of Artificial Sequence: Synthetic oligonucleotide
  Antisense strand to SEQ ID NO: 78148
uucuacccauaagaaccug

SEQ ID NO: 78230 - RNA, 19 nt, Artificial Sequence
  Description of Artificial Sequence: Synthetic oligonucleotide
  Sense strand starting at position 3104 of SEQ ID NO: 980
agguucuuauggguagaau

SEQ ID NO: 78231 - RNA, 19 nt, Artificial Sequence
  Description of Artificial Sequence: Synthetic oligonucleotide
  Antisense strand to SEQ ID NO: 78150
auucuacccauaagaaccu

SEQ ID NO: 78232 - RNA, 19 nt, Artificial Sequence
  Description of Artificial Sequence: Synthetic oligonucleotide
  Sense strand starting at position 3105 of SEQ ID NO: 980
gguucuuauggguagaauu

SEQ ID NO: 78233 - RNA, 19 nt, Artificial Sequence
  Description of Artificial Sequence: Synthetic oligonucleotide
  Antisense strand to SEQ ID NO: 78152
aauucuacccauaagaacc

SEQ ID NO: 78234 - RNA, 19 nt, Artificial Sequence
  Description of Artificial Sequence: Synthetic oligonucleotide
  Sense strand starting at position 3115 of SEQ ID NO: 980
gguagaauuacauggucaa

SEQ ID NO: 78235 - RNA, 19 nt, Artificial Sequence
  Description of Artificial Sequence: Synthetic oligonucleotide
  Antisense strand to SEQ ID NO: 78154
uugaccauguaauucuacc

SEQ ID NO: 78236 - RNA, 19 nt, Artificial Sequence
  Description of Artificial Sequence: Synthetic oligonucleotide
  Sense strand starting at position 3116 of SEQ ID NO: 980
guagaauuacauggucaaa

SEQ ID NO: 78237 - RNA, 19 nt, Artificial Sequence
  Description of Artificial Sequence: Synthetic oligonucleotide
  Antisense strand to SEQ ID NO: 78156
uuugaccauguaauucuac

SEQ ID NO: 78238 - RNA, 19 nt, Artificial Sequence
  Description of Artificial Sequence: Synthetic oligonucleotide
  Sense strand starting at position 3209 of SEQ ID NO: 980
gaguaaacgucaucuugau

SEQ ID NO: 78239 - RNA, 19 nt, Artificial Sequence
  Description of Artificial Sequence: Synthetic oligonucleotide
  Antisense strand to SEQ ID NO: 78158
aucaagaugacguuuacuc

SEQ ID NO: 78240 - RNA, 19 nt, Artificial Sequence
  Description of Artificial Sequence: Synthetic oligonucleotide
  Sense strand starting at position 3235 of SEQ ID NO: 980
cugugcuaacuuugacaga

SEQ ID NO: 78241 - RNA, 19 nt, Artificial Sequence
  Description of Artificial Sequence: Synthetic oligonucleotide
  Antisense strand to SEQ ID NO: 78160
ucugucaaaguuagcacag

SEQ ID NO: 78242 - RNA, 19 nt, Artificial Sequence
  Description of Artificial Sequence: Synthetic oligonucleotide
  Sense strand starting at position 3288 of SEQ ID NO: 980
cccacugauuguucuguca

SEQ ID NO: 78243 - RNA, 19 nt, Artificial Sequence
  Description of Artificial Sequence: Synthetic oligonucleotide
  Antisense strand to SEQ ID NO: 78162
ugacagaacaaucaguggg

SEQ ID NO: 78244 - RNA, 19 nt, Artificial Sequence
  Description of Artificial Sequence: Synthetic oligonucleotide
  Sense strand starting at position 3291 of SEQ ID NO: 980
acugauuguucugucaaca

SEQ ID NO: 78245 - RNA, 19 nt, Artificial Sequence
  Description of Artificial Sequence: Synthetic oligonucleotide
  Antisense strand to SEQ ID NO: 78164
uguugacagaacaaucagu

SEQ ID NO: 78246 - RNA, 19 nt, Artificial Sequence
  Description of Artificial Sequence: Synthetic oligonucleotide
  Sense strand starting at position 3296 of SEQ ID NO: 980
uuguucugucaacacucaa

SEQ ID NO: 78247 - RNA, 19 nt, Artificial Sequence
  Description of Artificial Sequence: Synthetic oligonucleotide
  Antisense strand to SEQ ID NO: 78166
uugaguguugacagaacaa

SEQ ID NO: 78248 - RNA, 19 nt, Artificial Sequence
  Description of Artificial Sequence: Synthetic oligonucleotide
  Sense strand starting at position 3373 of SEQ ID NO: 980
cccaaauucuuggcagguu

SEQ ID NO: 78249 - RNA, 19 nt, Artificial Sequence
  Description of Artificial Sequence: Synthetic oligonucleotide
  Antisense strand to SEQ ID NO: 78168
aaccugccaagaauuuggg

SEQ ID NO: 78250 - RNA, 19 nt, Artificial Sequence
  Description of Artificial Sequence: Synthetic oligonucleotide
  Sense strand starting at position 3434 of SEQ ID NO: 980
ugacacugaucaccugauu

SEQ ID NO: 78251 - RNA, 19 nt, Artificial Sequence
  Description of Artificial Sequence: Synthetic oligonucleotide
  Antisense strand to SEQ ID NO: 78170
aaucaggugaucaguguca

SEQ ID NO: 78252 - RNA, 19 nt, Artificial Sequence
  Description of Artificial Sequence: Synthetic oligonucleotide
  Sense strand starting at position 3505 of SEQ ID NO: 980
cguguuucucguccaauca

SEQ ID NO: 78253 - RNA, 19 nt, Artificial Sequence
  Description of Artificial Sequence: Synthetic oligonucleotide
  Antisense strand to SEQ ID NO: 78172
ugauuggacgagaaacacg

SEQ ID NO: 78254 - RNA, 19 nt, Artificial Sequence
  Description of Artificial Sequence: Synthetic oligonucleotide
  Sense strand starting at position 3597 of SEQ ID NO: 980
guaacaucuagaggaagua

SEQ ID NO: 78255 - RNA, 19 nt, Artificial Sequence
  Description of Artificial Sequence: Synthetic oligonucleotide
  Antisense strand to SEQ ID NO: 78174
uacuuccucuagauguuac

SEQ ID NO: 78256 - RNA, 19 nt, Artificial Sequence
  Description of Artificial Sequence: Synthetic oligonucleotide
  Sense strand starting at position 3609 of SEQ ID NO: 980
ggaaguaauuccuuuauua

SEQ ID NO: 78257 - RNA, 19 nt, Artificial Sequence
  Description of Artificial Sequence: Synthetic oligonucleotide
  Antisense strand to SEQ ID NO: 78176
uaauaaaggaauuacuucc

SEQ ID NO: 78258 - RNA, 19 nt, Artificial Sequence
  Description of Artificial Sequence: Synthetic oligonucleotide
  Sense strand starting at position 3639 of SEQ ID NO: 980
uugaucuccgaguaugcaa

SEQ ID NO: 78259 - RNA, 19 nt, Artificial Sequence
  Description of Artificial Sequence: Synthetic oligonucleotide
  Antisense strand to SEQ ID NO: 78178
uugcauacucggagaucaa

SEQ ID NO: 78260 - RNA, 19 nt, Artificial Sequence
  Description of Artificial Sequence: Synthetic oligonucleotide
  Sense strand starting at position 3684 of SEQ ID NO: 980
ugagcucugcgucagaaac

SEQ ID NO: 78261 - RNA, 19 nt, Artificial Sequence
  Description of Artificial Sequence: Synthetic oligonucleotide
  Antisense strand to SEQ ID NO: 78180
guuucugacgcagagcuca

SEQ ID NO: 78262 - RNA, 19 nt, Artificial Sequence
  Description of Artificial Sequence: Synthetic oligonucleotide
  Sense strand starting at position 3750 of SEQ ID NO: 980
gccuuagggcaguaaagau

SEQ ID NO: 78263 - RNA, 19 nt, Artificial Sequence
  Description of Artificial Sequence: Synthetic oligonucleotide
  Antisense strand to SEQ ID NO: 78182
aucuuuacugcccuaaggc

SEQ ID NO: 78264 - RNA, 19 nt, Artificial Sequence
  Description of Artificial Sequence: Synthetic oligonucleotide
  Sense strand starting at position 3858 of SEQ ID NO: 980
uaaggagugcaauguccau

SEQ ID NO: 78265 - RNA, 19 nt, Artificial Sequence
  Description of Artificial Sequence: Synthetic oligonucleotide
  Antisense strand to SEQ ID NO: 78184
auggacauugcacuccuua

SEQ ID NO: 78266 - RNA, 19 nt, Artificial Sequence
  Description of Artificial Sequence: Synthetic oligonucleotide
  Sense strand starting at position 3862 of SEQ ID NO: 980
gagugcaauguccaugaaa

SEQ ID NO: 78267 - RNA, 19 nt, Artificial Sequence
  Description of Artificial Sequence: Synthetic oligonucleotide
  Antisense strand to SEQ ID NO: 78186
uuucauggacauugcacuc

SEQ ID NO: 78268 - RNA, 19 nt, Artificial Sequence
  Description of Artificial Sequence: Synthetic oligonucleotide
  Sense strand starting at position 3897 of SEQ ID NO: 980
accuuugacuaugucuuau

SEQ ID NO: 78269 - RNA, 19 nt, Artificial Sequence
  Description of Artificial Sequence: Synthetic oligonucleotide
  Antisense strand to SEQ ID NO: 78188
auaagacauagucaaaggu

SEQ ID NO: 78270 - RNA, 19 nt, Artificial Sequence
  Description of Artificial Sequence: Synthetic oligonucleotide
  Sense strand starting at position 3930 of SEQ ID NO: 980
caggcaugacacuaaguua

SEQ ID NO: 78271 - RNA, 19 nt, Artificial Sequence
  Description of Artificial Sequence: Synthetic oligonucleotide
  Antisense strand to SEQ ID NO: 78190
uaacuuagugucaugccug

SEQ ID NO: 78272 - RNA, 19 nt, Artificial Sequence
  Description of Artificial Sequence: Synthetic oligonucleotide
  Sense strand starting at position 3933 of SEQ ID NO: 980
gcaugacacuaaguuauca

SEQ ID NO: 78273 - RNA, 19 nt, Artificial Sequence
  Description of Artificial Sequence: Synthetic oligonucleotide
  Antisense strand to SEQ ID NO: 78192
ugauaacuuagugucaugc

SEQ ID NO: 78274 - RNA, 19 nt, Artificial Sequence
  Description of Artificial Sequence: Synthetic oligonucleotide
  Sense strand starting at position 3951 of SEQ ID NO: 981
gguaguguuaaauagguac

SEQ ID NO: 78275 - RNA, 19 nt, Artificial Sequence
  Description of Artificial Sequence: Synthetic oligonucleotide
  Antisense strand to SEQ ID NO: 78194
guaccuauuuaacacuacc

SEQ ID NO: 78276 - RNA, 19 nt, Artificial Sequence
  Description of Artificial Sequence: Synthetic oligonucleotide
  Sense strand starting at position 3932 of SEQ ID NO: 981
gugaaaguggacugcugau

SEQ ID NO: 78277 - RNA, 19 nt, Artificial Sequence
  Description of Artificial Sequence: Synthetic oligonucleotide
  Antisense strand to SEQ ID NO: 78196
aucagcaguccacuuucac

SEQ ID NO: 78278 - RNA, 19 nt, Artificial Sequence
  Description of Artificial Sequence: Synthetic oligonucleotide
  Sense strand starting at position 3828 of SEQ ID NO: 981
ccucaacuuuaggagucau

SEQ ID NO: 78279 - RNA, 19 nt, Artificial Sequence
  Description of Artificial Sequence: Synthetic oligonucleotide
  Antisense strand to SEQ ID NO: 78198
augacuccuaaaguugagg

SEQ ID NO: 78280 - RNA, 19 nt, Artificial Sequence
  Description of Artificial Sequence: Synthetic oligonucleotide
  Sense strand starting at position 3801 of SEQ ID NO: 981
ggaaacagcuaauaaacau

SEQ ID NO: 78281 - RNA, 19 nt, Artificial Sequence
  Description of Artificial Sequence: Synthetic oligonucleotide
  Antisense strand to SEQ ID NO: 78200
auguuuauuagcuguuucc

SEQ ID NO: 78282 - RNA, 19 nt, Artificial Sequence
  Description of Artificial Sequence: Synthetic oligonucleotide
  Sense strand starting at position 3684 of SEQ ID NO: 981
gcaagugggccaugauuac

SEQ ID NO: 78283 - RNA, 19 nt, Artificial Sequence
  Description of Artificial Sequence: Synthetic oligonucleotide
  Antisense strand to SEQ ID NO: 78202
guaaucauggcccacuugc

SEQ ID NO: 78284 - RNA, 19 nt, Artificial Sequence
  Description of Artificial Sequence: Synthetic oligonucleotide
  Sense strand starting at position 3682 of SEQ ID NO: 981
cugcaagugggccaugauu

SEQ ID NO: 78285 - RNA, 19 nt, Artificial Sequence
  Description of Artificial Sequence: Synthetic oligonucleotide
  Antisense strand to SEQ ID NO: 78204
aaucauggcccacuugcag

SEQ ID NO: 78286 - RNA, 19 nt, Artificial Sequence
  Description of Artificial Sequence: Synthetic oligonucleotide
  Sense strand starting at position 3332 of SEQ ID NO: 981
acacuauacuguggaagaa

SEQ ID NO: 78287 - RNA, 19 nt, Artificial Sequence
  Description of Artificial Sequence: Synthetic oligonucleotide
  Antisense strand to SEQ ID NO: 78206
uucuuccacaguauagugu

SEQ ID NO: 78288 - RNA, 19 nt, Artificial Sequence
  Description of Artificial Sequence: Synthetic oligonucleotide
  Sense strand starting at position 3331 of SEQ ID NO: 981
uacacuauacuguggaaga

SEQ ID NO: 78289 - RNA, 19 nt, Artificial Sequence
  Description of Artificial Sequence: Synthetic oligonucleotide
  Antisense strand to SEQ ID NO: 78208
ucuuccacaguauagugua

SEQ ID NO: 78290 - RNA, 19 nt, Artificial Sequence
  Description of Artificial Sequence: Synthetic oligonucleotide
  Sense strand starting at position 3300 of SEQ ID NO: 981
gugcauagccaccauguua

SEQ ID NO: 78291 - RNA, 19 nt, Artificial Sequence
  Description of Artificial Sequence: Synthetic oligonucleotide
  Antisense strand to SEQ ID NO: 78210
uaacaugguggcuaugcac

SEQ ID NO: 78292 - RNA, 19 nt, Artificial Sequence
  Description of Artificial Sequence: Synthetic oligonucleotide
  Sense strand starting at position 3225 of SEQ ID NO: 981
auguaacuugcucaagaug

SEQ ID NO: 78293 - RNA, 19 nt, Artificial Sequence
  Description of Artificial Sequence: Synthetic oligonucleotide
  Antisense strand to SEQ ID NO: 78212
caucuugagcaaguuacau

SEQ ID NO: 78294 - RNA, 19 nt, Artificial Sequence
  Description of Artificial Sequence: Synthetic oligonucleotide
  Sense strand starting at position 3090 of SEQ ID NO: 981
agcucuguaccugaauuaa

SEQ ID NO: 78295 - RNA, 19 nt, Artificial Sequence
  Description of Artificial Sequence: Synthetic oligonucleotide
  Antisense strand to SEQ ID NO: 78214
uuaauucagguacagagcu

SEQ ID NO: 78296 - RNA, 19 nt, Artificial Sequence
  Description of Artificial Sequence: Synthetic oligonucleotide
  Sense strand starting at position 3088 of SEQ ID NO: 981
ccagcucuguaccugaauu

SEQ ID NO: 78297 - RNA, 19 nt, Artificial Sequence
  Description of Artificial Sequence: Synthetic oligonucleotide
  Antisense strand to SEQ ID NO: 78216
aauucagguacagagcugg

SEQ ID NO: 78298 - RNA, 19 nt, Artificial Sequence
  Description of Artificial Sequence: Synthetic oligonucleotide
  Sense strand starting at position 2911 of SEQ ID NO: 981
ggaauagccuuccuaauca

SEQ ID NO: 78299 - RNA, 19 nt, Artificial Sequence
  Description of Artificial Sequence: Synthetic oligonucleotide
  Antisense strand to SEQ ID NO: 78218
ugauuaggaaggcuauucc

SEQ ID NO: 78300 - RNA, 19 nt, Artificial Sequence
  Description of Artificial Sequence: Synthetic oligonucleotide
  Sense strand starting at position 2830 of SEQ ID NO: 981
cugacagauucugcucuau

SEQ ID NO: 78301 - RNA, 19 nt, Artificial Sequence
  Description of Artificial Sequence: Synthetic oligonucleotide
  Antisense strand to SEQ ID NO: 78220
auagagcagaaucugucag

SEQ ID NO: 78302 - RNA, 19 nt, Artificial Sequence
  Description of Artificial Sequence: Synthetic oligonucleotide
  Sense strand starting at position 2788 of SEQ ID NO: 981
cauagaauaguaugguaua

SEQ ID NO: 78303 - RNA, 19 nt, Artificial Sequence
  Description of Artificial Sequence: Synthetic oligonucleotide
  Antisense strand to SEQ ID NO: 78222
uauaccauacuauucuaug

SEQ ID NO: 78304 - RNA, 19 nt, Artificial Sequence
  Description of Artificial Sequence: Synthetic oligonucleotide
  Sense strand starting at position 2786 of SEQ ID NO: 981
cucauagaauaguauggua

SEQ ID NO: 78305 - RNA, 19 nt, Artificial Sequence
  Description of Artificial Sequence: Synthetic oligonucleotide
  Antisense strand to SEQ ID NO: 78224
uaccauacuauucuaugag

SEQ ID NO: 78306 - RNA, 19 nt, Artificial Sequence
  Description of Artificial Sequence: Synthetic oligonucleotide
  Sense strand starting at position 2627 of SEQ ID NO: 981
uggcuaucaucucuccuga

SEQ ID NO: 78307 - RNA, 19 nt, Artificial Sequence
  Description of Artificial Sequence: Synthetic oligonucleotide
  Antisense strand to SEQ ID NO: 78226
ucaggagagaugauagcca

SEQ ID NO: 78308 - RNA, 19 nt, Artificial Sequence
  Description of Artificial Sequence: Synthetic oligonucleotide
  Sense strand starting at position 2550 of SEQ ID NO: 981
ugagguuuauaggcagaaa

SEQ ID NO: 78309 - RNA, 19 nt, Artificial Sequence
  Description of Artificial Sequence: Synthetic oligonucleotide
  Antisense strand to SEQ ID NO: 78228
uuucugccuauaaaccuca

SEQ ID NO: 78310 - RNA, 19 nt, Artificial Sequence
  Description of Artificial Sequence: Synthetic oligonucleotide
  Sense strand starting at position 2389 of SEQ ID NO: 981
ggguaaugacuacgacugu

SEQ ID NO: 78311 - RNA, 19 nt, Artificial Sequence
  Description of Artificial Sequence: Synthetic oligonucleotide
  Antisense strand to SEQ ID NO: 78230
acagucguagucauuaccc

SEQ ID NO: 78312 - RNA, 19 nt, Artificial Sequence
  Description of Artificial Sequence: Synthetic oligonucleotide
  Sense strand starting at position 2316 of SEQ ID NO: 981
ugacauguacuuugcacau

SEQ ID NO: 78313 - RNA, 19 nt, Artificial Sequence
  Description of Artificial Sequence: Synthetic oligonucleotide
  Antisense strand to SEQ ID NO: 78232
augugcaaaguacauguca

SEQ ID NO: 78314 - RNA, 19 nt, Artificial Sequence
  Description of Artificial Sequence: Synthetic oligonucleotide
  Sense strand starting at position 2307 of SEQ ID NO: 981
uuugaaauuugacauguac

SEQ ID NO: 78315 - RNA, 19 nt, Artificial Sequence
  Description of Artificial Sequence: Synthetic oligonucleotide
  Antisense strand to SEQ ID NO: 78234
guacaugucaaauuucaaa

SEQ ID NO: 78316 - RNA, 19 nt, Artificial Sequence
  Description of Artificial Sequence: Synthetic oligonucleotide
  Sense strand starting at position 2297 of SEQ ID NO: 981
auacgaagccuuugaaauu

SEQ ID NO: 78317 - RNA, 19 nt, Artificial Sequence
  Description of Artificial Sequence: Synthetic oligonucleotide
  Antisense strand to SEQ ID NO: 78236
aauuucaaaggcuucguau

SEQ ID NO: 78318 - RNA, 19 nt, Artificial Sequence
  Description of Artificial Sequence: Synthetic oligonucleotide
  Sense strand starting at position 2226 of SEQ ID NO: 981
acaacauagcuaugauugu

SEQ ID NO: 78319 - RNA, 19 nt, Artificial Sequence
  Description of Artificial Sequence: Synthetic oligonucleotide
  Antisense strand to SEQ ID NO: 78238
acaaucauagcuauguugu

SEQ ID NO: 78320 - RNA, 19 nt, Artificial Sequence
  Description of Artificial Sequence: Synthetic oligonucleotide
  Sense strand starting at position 1363 of SEQ ID NO: 981
gcgauacaugcugguaacu

SEQ ID NO: 78321 - RNA, 19 nt, Artificial Sequence
  Description of Artificial Sequence: Synthetic oligonucleotide
  Antisense strand to SEQ ID NO: 78240
aguuaccagcauguaucgc

SEQ ID NO: 78322 - RNA, 19 nt, Artificial Sequence
  Description of Artificial Sequence: Synthetic oligonucleotide
  Sense strand starting at position 1352 of SEQ ID NO: 981
gggacauacgugcgauaca

SEQ ID NO: 78323 - RNA, 19 nt, Artificial Sequence
  Description of Artificial Sequence: Synthetic oligonucleotide
  Antisense strand to SEQ ID NO: 78242
uguaucgcacguauguccc

SEQ ID NO: 78324 - RNA, 19 nt, Artificial Sequence
  Description of Artificial Sequence: Synthetic oligonucleotide
  Sense strand starting at position 1350 of SEQ ID NO: 981
augggacauacgugcgaua

SEQ ID NO: 78325 - RNA, 19 nt, Artificial Sequence
  Description of Artificial Sequence: Synthetic oligonucleotide
  Antisense strand to SEQ ID NO: 78244
uaucgcacguaugucccau

SEQ ID NO: 78326 - RNA, 19 nt, Artificial Sequence
  Description of Artificial Sequence: Synthetic oligonucleotide
  Sense strand starting at position 1341 of SEQ ID NO: 981
acgguagacaugggacaua

SEQ ID NO: 78327 - RNA, 19 nt, Artificial Sequence
  Description of Artificial Sequence: Synthetic oligonucleotide
  Antisense strand to SEQ ID NO: 78246
uaugucccaugucuaccgu

SEQ ID NO: 78328 - RNA, 19 nt, Artificial Sequence
  Description of Artificial Sequence: Synthetic oligonucleotide
  Sense strand starting at position 1168 of SEQ ID NO: 981
caauauggucucgaacucu

SEQ ID NO: 78329 - RNA, 19 nt, Artificial Sequence
  Description of Artificial Sequence: Synthetic oligonucleotide
  Antisense strand to SEQ ID NO: 78248
agaguucgagaccauauug

SEQ ID NO: 78330 - RNA, 19 nt, Artificial Sequence
  Description of Artificial Sequence: Synthetic oligonucleotide
  Sense strand starting at position 1164 of SEQ ID NO: 981
uagccaauauggucucgaa

SEQ ID NO: 78331 - RNA, 19 nt, Artificial Sequence
  Description of Artificial Sequence: Synthetic oligonucleotide
  Antisense strand to SEQ ID NO: 78250
uucgagaccauauuggcua

SEQ ID NO: 78332 - RNA, 19 nt, Artificial Sequence
  Description of Artificial Sequence: Synthetic oligonucleotide
  Sense strand starting at position 745 of SEQ ID NO: 981
aggaaucucugcucuuaga

SEQ ID NO: 78333 - RNA, 19 nt, Artificial Sequence
  Description of Artificial Sequence: Synthetic oligonucleotide
  Antisense strand to SEQ ID NO: 78252
ucuaagagcagagauuccu

SEQ ID NO: 78334 - RNA, 19 nt, Artificial Sequence
  Description of Artificial Sequence: Synthetic oligonucleotide
  Sense strand starting at position 743 of SEQ ID NO: 981
agaggaaucucugcucuua

SEQ ID NO: 78335 - RNA, 19 nt, Artificial Sequence
  Description of Artificial Sequence: Synthetic oligonucleotide
  Antisense strand to SEQ ID NO: 78254
uaagagcagagauuccucu

SEQ ID NO: 78336 - RNA, 19 nt, Artificial Sequence
  Description of Artificial Sequence: Synthetic oligonucleotide
  Sense strand starting at position 698 of SEQ ID NO: 981
ccaagaauaucagggauuu

SEQ ID NO: 78337 - RNA, 19 nt, Artificial Sequence
  Description of Artificial Sequence: Synthetic oligonucleotide
  Antisense strand to SEQ ID NO: 78256
aaaucccugauauucuugg

SEQ ID NO: 78338 - RNA, 19 nt, Artificial Sequence
  Description of Artificial Sequence: Synthetic oligonucleotide
  Sense strand starting at position 696 of SEQ ID NO: 981
uuccaagaauaucagggau

SEQ ID NO: 78339 - RNA, 19 nt, Artificial Sequence
  Description of Artificial Sequence: Synthetic oligonucleotide
  Antisense strand to SEQ ID NO: 78258
aucccugauauucuuggaa

SEQ ID NO: 78340 - RNA, 19 nt, Artificial Sequence
  Description of Artificial Sequence: Synthetic oligonucleotide
  Sense strand starting at position 658 of SEQ ID NO: 981
ucagaauauuuaggcuaag

SEQ ID NO: 78341 - RNA, 19 nt, Artificial Sequence
  Description of Artificial Sequence: Synthetic oligonucleotide
  Antisense strand to SEQ ID NO: 78260
cuuagccuaaauauucuga

SEQ ID NO: 78342 - RNA, 19 nt, Artificial Sequence
  Description of Artificial Sequence: Synthetic oligonucleotide
  Sense strand starting at position 603 of SEQ ID NO: 981
uacagaagguauugacuaa

SEQ ID NO: 78343 - RNA, 19 nt, Artificial Sequence
  Description of Artificial Sequence: Synthetic oligonucleotide
  Antisense strand to SEQ ID NO: 78262
uuagucaauaccuucugua

SEQ ID NO: 78344 - RNA, 19 nt, Artificial Sequence
  Description of Artificial Sequence: Synthetic oligonucleotide
  Sense strand starting at position 591 of SEQ ID NO: 981
cucuuucuggcauacagaa

SEQ ID NO: 78345 - RNA, 19 nt, Artificial Sequence
  Description of Artificial Sequence: Synthetic oligonucleotide
  Antisense strand to SEQ ID NO: 78264
uucuguaugccagaaagag

SEQ ID NO: 78346 - RNA, 19 nt, Artificial Sequence
  Description of Artificial Sequence: Synthetic oligonucleotide
  Sense strand starting at position 479 of SEQ ID NO: 981
ccagguuacugugcacuua

SEQ ID NO: 78347 - RNA, 19 nt, Artificial Sequence
  Description of Artificial Sequence: Synthetic oligonucleotide
  Antisense strand to SEQ ID NO: 78266
uaagugcacaguaaccugg

SEQ ID NO: 78348 - RNA, 19 nt, Artificial Sequence
  Description of Artificial Sequence: Synthetic oligonucleotide
  Sense strand starting at position 456 of SEQ ID NO: 981
ccucacuugcuguaugauu

SEQ ID NO: 78349 - RNA, 19 nt, Artificial Sequence
  Description of Artificial Sequence: Synthetic oligonucleotide
  Antisense strand to SEQ ID NO: 78268
aaucauacagcaagugagg

SEQ ID NO: 78350 - RNA, 19 nt, Artificial Sequence
  Description of Artificial Sequence: Synthetic oligonucleotide
  Sense strand starting at position 354 of SEQ ID NO: 981
gcagauucccgacacacau

SEQ ID NO: 78351 - RNA, 19 nt, Artificial Sequence
  Description of Artificial Sequence: Synthetic oligonucleotide
  Antisense strand to SEQ ID NO: 78270
augugugucgggaaucugc

SEQ ID NO: 78352 - RNA, 19 nt, Artificial Sequence
  Description of Artificial Sequence: Synthetic oligonucleotide
  Sense strand starting at position 283 of SEQ ID NO: 981
cacuaaguucucgggcauu

SEQ ID NO: 78353 - RNA, 19 nt, Artificial Sequence
  Description of Artificial Sequence: Synthetic oligonucleotide
  Antisense strand to SEQ ID NO: 78272
aaugcccgagaacuuagug

SEQ ID NO: 78354 - RNA, 19 nt, Artificial Sequence
  Description of Artificial Sequence: Synthetic oligonucleotide
  Sense strand starting at position 3917 of SEQ ID NO: 982
uggcuaaacugacucagua

SEQ ID NO: 78355 - RNA, 19 nt, Artificial Sequence
  Description of Artificial Sequence: Synthetic oligonucleotide
  Antisense strand to SEQ ID NO: 78274
uacugagucaguuuagcca

SEQ ID NO: 78356 - RNA, 19 nt, Artificial Sequence
  Description of Artificial Sequence: Synthetic oligonucleotide
  Sense strand starting at position 3882 of SEQ ID NO: 982
gucaucgagggugagauau

SEQ ID NO: 78357 - RNA, 19 nt, Artificial Sequence
  Description of Artificial Sequence: Synthetic oligonucleotide
  Antisense strand to SEQ ID NO: 78276
auaucucacccucgaugac

SEQ ID NO: 78358 - RNA, 19 nt, Artificial Sequence
  Description of Artificial Sequence: Synthetic oligonucleotide
  Sense strand starting at position 3881 of SEQ ID NO: 982
ugucaucgagggugagaua

SEQ ID NO: 78359 - RNA, 19 nt, Artificial Sequence
  Description of Artificial Sequence: Synthetic oligonucleotide
  Antisense strand to SEQ ID NO: 78278
uaucucacccucgaugaca

SEQ ID NO: 78360 - RNA, 19 nt, Artificial Sequence
  Description of Artificial Sequence: Synthetic oligonucleotide
  Sense strand starting at position 3879 of SEQ ID NO: 982
gaugucaucgagggugaga

SEQ ID NO: 78361 - RNA, 19 nt, Artificial Sequence
  Description of Artificial Sequence: Synthetic oligonucleotide
  Antisense strand to SEQ ID NO: 78280
ucucacccucgaugacauc

SEQ ID NO: 78362 - RNA, 19 nt, Artificial Sequence
  Description of Artificial Sequence: Synthetic oligonucleotide
  Sense strand starting at position 3875 of SEQ ID NO: 982
guuggaugucaucgagggu

SEQ ID NO: 78363 - RNA, 19 nt, Artificial Sequence
  Description of Artificial Sequence: Synthetic oligonucleotide
  Antisense strand to SEQ ID NO: 78282
acccucgaugacauccaac

SEQ ID NO: 78364 - RNA, 19 nt, Artificial Sequence
  Description of Artificial Sequence: Synthetic oligonucleotide
  Sense strand starting at position 3754 of SEQ ID NO: 982
gggaaugacuaaggagaca

SEQ ID NO: 78365 - RNA, 19 nt, Artificial Sequence
  Description of Artificial Sequence: Synthetic oligonucleotide
  Antisense strand to SEQ ID NO: 78284
ugucuccuuagucauuccc

SEQ ID NO: 78366 - RNA, 19 nt, Artificial Sequence
  Description of Artificial Sequence: Synthetic oligonucleotide
  Sense strand starting at position 3610 of SEQ ID NO: 982
uaguaacaucagugaggaa

SEQ ID NO: 78367 - RNA, 19 nt, Artificial Sequence
  Description of Artificial Sequence: Synthetic oligonucleotide
  Antisense strand to SEQ ID NO: 78286
uuccucacugauguuacua

SEQ ID NO: 78368 - RNA, 19 nt, Artificial Sequence
  Description of Artificial Sequence: Synthetic oligonucleotide
  Sense strand starting at position 3609 of SEQ ID NO: 982
guaguaacaucagugagga

SEQ ID NO: 78369 - RNA, 19 nt, Artificial Sequence
  Description of Artificial Sequence: Synthetic oligonucleotide
  Antisense strand to SEQ ID NO: 78288
uccucacugauguuacuac

SEQ ID NO: 78370 - RNA, 19 nt, Artificial Sequence
  Description of Artificial Sequence: Synthetic oligonucleotide
  Sense strand starting at position 3598 of SEQ ID NO: 982
ccucaugaugcguaguaac

SEQ ID NO: 78371 - RNA, 19 nt, Artificial Sequence
  Description of Artificial Sequence: Synthetic oligonucleotide
  Antisense strand to SEQ ID NO: 78290
guuacuacgcaucaugagg

SEQ ID NO: 78372 - RNA, 19 nt, Artificial Sequence
  Description of Artificial Sequence: Synthetic oligonucleotide
  Sense strand starting at position 3597 of SEQ ID NO: 982
uccucaugaugcguaguaa

SEQ ID NO: 78373 - RNA, 19 nt, Artificial Sequence
  Description of Artificial Sequence: Synthetic oligonucleotide
  Antisense strand to SEQ ID NO: 78292
uuacuacgcaucaugagga

SEQ ID NO: 78374 - RNA, 19 nt, Artificial Sequence
  Description of Artificial Sequence: Synthetic oligonucleotide
  Sense strand starting at position 3570 of SEQ ID NO: 982
gucuuuguaucuguugaau

SEQ ID NO: 78375 - RNA, 19 nt, Artificial Sequence
  Description of Artificial Sequence: Synthetic oligonucleotide
  Antisense strand to SEQ ID NO: 78294
auucaacagauacaaagac

SEQ ID NO: 78376 - RNA, 19 nt, Artificial Sequence
  Description of Artificial Sequence: Synthetic oligonucleotide
  Sense strand starting at position 3569 of SEQ ID NO: 982
ggucuuuguaucuguugaa

SEQ ID NO: 78377 - RNA, 19 nt, Artificial Sequence
  Description of Artificial Sequence: Synthetic oligonucleotide
  Antisense strand to SEQ ID NO: 78296
uucaacagauacaaagacc

SEQ ID NO: 78378 - RNA, 19 nt, Artificial Sequence
  Description of Artificial Sequence: Synthetic oligonucleotide
  Sense strand starting at position 3568 of SEQ ID NO: 982
aggucuuuguaucuguuga

SEQ ID NO: 78379 - RNA, 19 nt, Artificial Sequence
  Description of Artificial Sequence: Synthetic oligonucleotide
  Antisense strand to SEQ ID NO: 78298
ucaacagauacaaagaccu

SEQ ID NO: 78380 - RNA, 19 nt, Artificial Sequence
  Description of Artificial Sequence: Synthetic oligonucleotide
  Sense strand starting at position 3563 of SEQ ID NO: 982
agcagaggucuuuguaucu

SEQ ID NO: 78381 - RNA, 19 nt, Artificial Sequence
  Description of Artificial Sequence: Synthetic oligonucleotide
  Antisense strand to SEQ ID NO: 78300
agauacaaagaccucugcu

SEQ ID NO: 78382 - RNA, 19 nt, Artificial Sequence
  Description of Artificial Sequence: Synthetic oligonucleotide
  Sense strand starting at position 3530 of SEQ ID NO: 982
cucaauguguccuuauggu

SEQ ID NO: 78383 - RNA, 19 nt, Artificial Sequence
  Description of Artificial Sequence: Synthetic oligonucleotide
  Antisense strand to SEQ ID NO: 78302
accauaaggacacauugag

SEQ ID NO: 78384 - RNA, 19 nt, Artificial Sequence
  Description of Artificial Sequence: Synthetic oligonucleotide
  Sense strand starting at position 3354 of SEQ ID NO: 982
gccacuuucccugguagua

SEQ ID NO: 78385 - RNA, 19 nt, Artificial Sequence
  Description of Artificial Sequence: Synthetic oligonucleotide
  Antisense strand to SEQ ID NO: 78304
uacuaccagggaaaguggc

SEQ ID NO: 78386 - RNA, 19 nt, Artificial Sequence
  Description of Artificial Sequence: Synthetic oligonucleotide
  Sense strand starting at position 3300 of SEQ ID NO: 982
ugcuuucucgaggagugau

SEQ ID NO: 78387 - RNA, 19 nt, Artificial Sequence
  Description of Artificial Sequence: Synthetic oligonucleotide
  Antisense strand to SEQ ID NO: 78306
aucacuccucgagaaagca

SEQ ID NO: 78388 - RNA, 19 nt, Artificial Sequence
  Description of Artificial Sequence: Synthetic oligonucleotide
  Sense strand starting at position 3299 of SEQ ID NO: 982
gugcuuucucgaggaguga

SEQ ID NO: 78389 - RNA, 19 nt, Artificial Sequence
  Description of Artificial Sequence: Synthetic oligonucleotide
  Antisense strand to SEQ ID NO: 78308
ucacuccucgagaaagcac

SEQ ID NO: 78390 - RNA, 19 nt, Artificial Sequence
  Description of Artificial Sequence: Synthetic oligonucleotide
  Sense strand starting at position 3109 of SEQ ID NO: 982
ccaucaugugucuauaguc

SEQ ID NO: 78391 - RNA, 19 nt, Artificial Sequence
  Description of Artificial Sequence: Synthetic oligonucleotide
  Antisense strand to SEQ ID NO: 78310
gacuauagacacaugaugg

SEQ ID NO: 78392 - RNA, 19 nt, Artificial Sequence
  Description of Artificial Sequence: Synthetic oligonucleotide
  Sense strand starting at position 3108 of SEQ ID NO: 982
cccaucaugugucuauagu

SEQ ID NO: 78393 - RNA, 19 nt, Artificial Sequence
  Description of Artificial Sequence: Synthetic oligonucleotide
  Antisense strand to SEQ ID NO: 78312
acuauagacacaugauggg

SEQ ID NO: 78394 - RNA, 19 nt, Artificial Sequence
  Description of Artificial Sequence: Synthetic oligonucleotide
  Sense strand starting at position 3033 of SEQ ID NO: 982
gugacaugaugagacacaa

SEQ ID NO: 78395 - RNA, 19 nt, Artificial Sequence
  Description of Artificial Sequence: Synthetic oligonucleotide
  Antisense strand to SEQ ID NO: 78314
uugugucucaucaugucac

SEQ ID NO: 78396 - RNA, 19 nt, Artificial Sequence
  Description of Artificial Sequence: Synthetic oligonucleotide
  Sense strand starting at position 3022 of SEQ ID NO: 982
cccuaaucagugugacaug

SEQ ID NO: 78397 - RNA, 19 nt, Artificial Sequence
  Description of Artificial Sequence: Synthetic oligonucleotide
  Antisense strand to SEQ ID NO: 78316
caugucacacugauuaggg

SEQ ID NO: 78398 - RNA, 19 nt, Artificial Sequence
  Description of Artificial Sequence: Synthetic oligonucleotide
  Sense strand starting at position 2969 of SEQ ID NO: 982
aagugucuccacggauaag

SEQ ID NO: 78399 - RNA, 19 nt, Artificial Sequence
  Description of Artificial Sequence: Synthetic oligonucleotide
  Antisense strand to SEQ ID NO: 78318
cuuauccguggagacacuu

SEQ ID NO: 78400 - RNA, 19 nt, Artificial Sequence
  Description of Artificial Sequence: Synthetic oligonucleotide
  Sense strand starting at position 2523 of SEQ ID NO: 982
agcauaguauucucaaagu

SEQ ID NO: 78401 - RNA, 19 nt, Artificial Sequence
  Description of Artificial Sequence: Synthetic oligonucleotide
  Antisense strand to SEQ ID NO: 78320
acuuugagaauacuaugcu

SEQ ID NO: 78402 - RNA, 19 nt, Artificial Sequence
  Description of Artificial Sequence: Synthetic oligonucleotide
  Sense strand starting at position 2498 of SEQ ID NO: 982
ucguuugcgacggcuuauu

SEQ ID NO: 78403 - RNA, 19 nt, Artificial Sequence
  Description of Artificial Sequence: Synthetic oligonucleotide
  Antisense strand to SEQ ID NO: 78322
aauaagccgucgcaaacga

SEQ ID NO: 78404 - RNA, 19 nt, Artificial Sequence
  Description of Artificial Sequence: Synthetic oligonucleotide
  Sense strand starting at position 2489 of SEQ ID NO: 982
cgggauuugucguuugcga

SEQ ID NO: 78405 - RNA, 19 nt, Artificial Sequence
  Description of Artificial Sequence: Synthetic oligonucleotide
  Antisense strand to SEQ ID NO: 78324
ucgcaaacgacaaaucccg

SEQ ID NO: 78406 - RNA, 19 nt, Artificial Sequence
  Description of Artificial Sequence: Synthetic oligonucleotide
  Sense strand starting at position 2477 of SEQ ID NO: 982
agcagaauccuacgggauu

SEQ ID NO: 78407 - RNA, 19 nt, Artificial Sequence
  Description of Artificial Sequence: Synthetic oligonucleotide
  Antisense strand to SEQ ID NO: 78326
aaucccguaggauucugcu

SEQ ID NO: 78408 - RNA, 19 nt, Artificial Sequence
  Description of Artificial Sequence: Synthetic oligonucleotide
  Sense strand starting at position 1267 of SEQ ID NO: 982
ggaugagucgcugacccau

SEQ ID NO: 78409 - RNA, 19 nt, Artificial Sequence
  Description of Artificial Sequence: Synthetic oligonucleotide
  Antisense strand to SEQ ID NO: 78328
augggucagcgacucaucc

SEQ ID NO: 78410 - RNA, 19 nt, Artificial Sequence
  Description of Artificial Sequence: Synthetic oligonucleotide
  Sense strand starting at position 1221 of SEQ ID NO: 982
agacgccucugcucugaua

SEQ ID NO: 78411 - RNA, 19 nt, Artificial Sequence
  Description of Artificial Sequence: Synthetic oligonucleotide
  Antisense strand to SEQ ID NO: 78330
uaucagagcagaggcgucu

SEQ ID NO: 78412 - RNA, 19 nt, Artificial Sequence
  Description of Artificial Sequence: Synthetic oligonucleotide
  Sense strand starting at position 1042 of SEQ ID NO: 982
ugccaaugugaccagcuau

SEQ ID NO: 78413 - RNA, 19 nt, Artificial Sequence
  Description of Artificial Sequence: Synthetic oligonucleotide
  Antisense strand to SEQ ID NO: 78332
auagcuggucacauuggca

SEQ ID NO: 78414 - RNA, 19 nt, Artificial Sequence
  Description of Artificial Sequence: Synthetic oligonucleotide
  Sense strand starting at position 1011 of SEQ ID NO: 982
ucgugaugucagcacagau

SEQ ID NO: 78415 - RNA, 19 nt, Artificial Sequence
  Description of Artificial Sequence: Synthetic oligonucleotide
  Antisense strand to SEQ ID NO: 78334
aucugugcugacaucacga

SEQ ID NO: 78416 - RNA, 19 nt, Artificial Sequence
  Description of Artificial Sequence: Synthetic oligonucleotide
  Sense strand starting at position 686 of SEQ ID NO: 982
ggugacaauuuccaagcua

SEQ ID NO: 78417 - RNA, 19 nt, Artificial Sequence
  Description of Artificial Sequence: Synthetic oligonucleotide
  Antisense strand to SEQ ID NO: 78336
uagcuuggaaauugucacc

SEQ ID NO: 78418 - RNA, 19 nt, Artificial Sequence
  Description of Artificial Sequence: Synthetic oligonucleotide
  Sense strand starting at position 677 of SEQ ID NO: 982
aacauugucggugacaauu

SEQ ID NO: 78419 - RNA, 19 nt, Artificial Sequence
  Description of Artificial Sequence: Synthetic oligonucleotide
  Antisense strand to SEQ ID NO: 78338
aauugucaccgacaauguu

SEQ ID NO: 78420 - RNA, 19 nt, Artificial Sequence
  Description of Artificial Sequence: Synthetic oligonucleotide
  Sense strand starting at position 676 of SEQ ID NO: 982
gaacauugucggugacaau

SEQ ID NO: 78421 - RNA, 19 nt, Artificial Sequence
  Description of Artificial Sequence: Synthetic oligonucleotide
  Antisense strand to SEQ ID NO: 78340
auugucaccgacaauguuc

SEQ ID NO: 78422 - RNA, 19 nt, Artificial Sequence
  Description of Artificial Sequence: Synthetic oligonucleotide
  Sense strand starting at position 675 of SEQ ID NO: 982
ugaacauugucggugacaa

SEQ ID NO: 78423 - RNA, 19 nt, Artificial Sequence
  Description of Artificial Sequence: Synthetic oligonucleotide
  Antisense strand to SEQ ID NO: 78342
uugucaccgacaauguuca

SEQ ID NO: 78424 - RNA, 19 nt, Artificial Sequence
  Description of Artificial Sequence: Synthetic oligonucleotide
  Sense strand starting at position 674 of SEQ ID NO: 982
gugaacauugucggugaca

SEQ ID NO: 78425 - RNA, 19 nt, Artificial Sequence
  Description of Artificial Sequence: Synthetic oligonucleotide
  Antisense strand to SEQ ID NO: 78344
ugucaccgacaauguucac

SEQ ID NO: 78426 - RNA, 19 nt, Artificial Sequence
  Description of Artificial Sequence: Synthetic oligonucleotide
  Sense strand starting at position 672 of SEQ ID NO: 982
augugaacauugucgguga

SEQ ID NO: 78427 - RNA, 19 nt, Artificial Sequence
  Description of Artificial Sequence: Synthetic oligonucleotide
  Antisense strand to SEQ ID NO: 78346
ucaccgacaauguucacau

SEQ ID NO: 78428 - RNA, 19 nt, Artificial Sequence
  Description of Artificial Sequence: Synthetic oligonucleotide
  Sense strand starting at position 626 of SEQ ID NO: 982
gcaccagacuucucagaaa

SEQ ID NO: 78429 - RNA, 19 nt, Artificial Sequence
  Description of Artificial Sequence: Synthetic oligonucleotide
  Antisense strand to SEQ ID NO: 78348
uuucugagaagucuggugc

SEQ ID NO: 78430 - RNA, 19 nt, Artificial Sequence
  Description of Artificial Sequence: Synthetic oligonucleotide
  Sense strand starting at position 508 of SEQ ID NO: 982
ugcccagagaugugauaug

SEQ ID NO: 78431 - RNA, 19 nt, Artificial Sequence
  Description of Artificial Sequence: Synthetic oligonucleotide
  Antisense strand to SEQ ID NO: 78350
cauaucacaucucugggca

SEQ ID NO: 78432 - RNA, 19 nt, Artificial Sequence
  Description of Artificial Sequence: Synthetic oligonucleotide
  Sense strand starting at position 500 of SEQ ID NO: 982
ccacuaagugcccagagau

SEQ ID NO: 78433 - RNA, 19 nt, Artificial Sequence
  Description of Artificial Sequence: Synthetic oligonucleotide
  Antisense strand to SEQ ID NO: 78352
aucucugggcacuuagugg

SEQ ID NO: 78434 - RNA, 19 nt, Artificial Sequence
  Description of Artificial Sequence: Synthetic oligonucleotide
  Sense strand starting at position 228 of SEQ ID NO: 983
auaggucacagaggcauua

SEQ ID NO: 78435 - RNA, 19 nt, Artificial Sequence
  Description of Artificial Sequence: Synthetic oligonucleotide
  Antisense strand to SEQ ID NO: 78354
uaaugccucugugaccuau

SEQ ID NO: 78436 - RNA, 19 nt, Artificial Sequence
  Description of Artificial Sequence: Synthetic oligonucleotide
  Sense strand starting at position 248 of SEQ ID NO: 983
gggcccuucuguccguuaa

SEQ ID NO: 78437 - RNA, 19 nt, Artificial Sequence
  Description of Artificial Sequence: Synthetic oligonucleotide
  Antisense strand to SEQ ID NO: 78356
uuaacggacagaagggccc

SEQ ID NO: 78438 - RNA, 19 nt, Artificial Sequence
  Description of Artificial Sequence: Synthetic oligonucleotide
  Sense strand starting at position 249 of SEQ ID NO: 983
ggcccuucuguccguuaaa

SEQ ID NO: 78439 - RNA, 19 nt, Artificial Sequence
  Description of Artificial Sequence: Synthetic oligonucleotide
  Antisense strand to SEQ ID NO: 78358
uuuaacggacagaagggcc

SEQ ID NO: 78440 - RNA, 19 nt, Artificial Sequence
  Description of Artificial Sequence: Synthetic oligonucleotide
  Sense strand starting at position 316 of SEQ ID NO: 983
aggagugauguaugucgga

SEQ ID NO: 78441 - RNA, 19 nt, Artificial Sequence
  Description of Artificial Sequence: Synthetic oligonucleotide
  Antisense strand to SEQ ID NO: 78360
uccgacauacaucacuccu

SEQ ID NO: 78442 - RNA, 19 nt, Artificial Sequence
  Description of Artificial Sequence: Synthetic oligonucleotide
  Sense strand starting at position 317 of SEQ ID NO: 983
ggagugauguaugucggau

SEQ ID NO: 78443 - RNA, 19 nt, Artificial Sequence
  Description of Artificial Sequence: Synthetic oligonucleotide
  Antisense strand to SEQ ID NO: 78362
auccgacauacaucacucc

SEQ ID NO: 78444 - RNA, 19 nt, Artificial Sequence
  Description of Artificial Sequence: Synthetic oligonucleotide
  Sense strand starting at position 321 of SEQ ID NO: 983
ugauguaugucggauacaa

SEQ ID NO: 78445 - RNA, 19 nt, Artificial Sequence
  Description of Artificial Sequence: Synthetic oligonucleotide
  Antisense strand to SEQ ID NO: 78364
uuguauccgacauacauca

SEQ ID NO: 78446 - RNA, 19 nt, Artificial Sequence
  Description of Artificial Sequence: Synthetic oligonucleotide
  Sense strand starting at position 389 of SEQ ID NO: 983
aaauauugauaagaggaga

SEQ ID NO: 78447 - RNA, 19 nt, Artificial Sequence
  Description of Artificial Sequence: Synthetic oligonucleotide
  Antisense strand to SEQ ID NO: 78366
ucuccucuuaucaauauuu

SEQ ID NO: 78448 - RNA, 19 nt, Artificial Sequence
  Description of Artificial Sequence: Synthetic oligonucleotide
  Sense strand starting at position 513 of SEQ ID NO: 983
ugcacuagaugugaccuaa

SEQ ID NO: 78449 - RNA, 19 nt, Artificial Sequence
  Description of Artificial Sequence: Synthetic oligonucleotide
  Antisense strand to SEQ ID NO: 78368
uuaggucacaucuagugca

SEQ ID NO: 78450 - RNA, 19 nt, Artificial Sequence
  Description of Artificial Sequence: Synthetic oligonucleotide
  Sense strand starting at position 685 of SEQ ID NO: 983
agaucuguuucugccugau

SEQ ID NO: 78451 - RNA, 19 nt, Artificial Sequence
  Description of Artificial Sequence: Synthetic oligonucleotide
  Antisense strand to SEQ ID NO: 78370
aucaggcagaaacagaucu

SEQ ID NO: 78452 - RNA, 19 nt, Artificial Sequence
  Description of Artificial Sequence: Synthetic oligonucleotide
  Sense strand starting at position 737 of SEQ ID NO: 983
gcugaaaugugagcaacua

SEQ ID NO: 78453 - RNA, 19 nt, Artificial Sequence
  Description of Artificial Sequence: Synthetic oligonucleotide
  Antisense strand to SEQ ID NO: 78372
uaguugcucacauuucagc

SEQ ID NO: 78454 - RNA, 19 nt, Artificial Sequence
  Description of Artificial Sequence: Synthetic oligonucleotide
  Sense strand starting at position 764 of SEQ ID NO: 983
ccaggagacuucguuucca

SEQ ID NO: 78455 - RNA, 19 nt, Artificial Sequence
  Description of Artificial Sequence: Synthetic oligonucleotide
  Antisense strand to SEQ ID NO: 78374
uggaaacgaagucuccugg

SEQ ID NO: 78456 - RNA, 19 nt, Artificial Sequence
  Description of Artificial Sequence: Synthetic oligonucleotide
  Sense strand starting at position 768 of SEQ ID NO: 983
gagacuucguuuccagaga

SEQ ID NO: 78457 - RNA, 19 nt, Artificial Sequence
  Description of Artificial Sequence: Synthetic oligonucleotide
  Antisense strand to SEQ ID NO: 78376
ucucuggaaacgaagucuc

SEQ ID NO: 78458 - RNA, 19 nt, Artificial Sequence
  Description of Artificial Sequence: Synthetic oligonucleotide
  Sense strand starting at position 769 of SEQ ID NO: 983
agacuucguuuccagagaa

SEQ ID NO: 78459 - RNA, 19 nt, Artificial Sequence
  Description of Artificial Sequence: Synthetic oligonucleotide
  Antisense strand to SEQ ID NO: 78378
uucucuggaaacgaagucu

SEQ ID NO: 78460 - RNA, 19 nt, Artificial Sequence
  Description of Artificial Sequence: Synthetic oligonucleotide
  Sense strand starting at position 795 of SEQ ID NO: 983
cagccuucugccggucaca

SEQ ID NO: 78461 - RNA, 19 nt, Artificial Sequence
  Description of Artificial Sequence: Synthetic oligonucleotide
  Antisense strand to SEQ ID NO: 78380
ugugaccggcagaaggcug

SEQ ID NO: 78462 - RNA, 19 nt, Artificial Sequence
  Description of Artificial Sequence: Synthetic oligonucleotide
  Sense strand starting at position 804 of SEQ ID NO: 983
gccggucacagaugagaca

SEQ ID NO: 78463 - RNA, 19 nt, Artificial Sequence
  Description of Artificial Sequence: Synthetic oligonucleotide
  Antisense strand to SEQ ID NO: 78382
ugucucaucugugaccggc

SEQ ID NO: 78464 - RNA, 19 nt, Artificial Sequence
  Description of Artificial Sequence: Synthetic oligonucleotide
  Sense strand starting at position 876 of SEQ ID NO: 983
accaguauuuccgaaggaa

SEQ ID NO: 78465 - RNA, 19 nt, Artificial Sequence
  Description of Artificial Sequence: Synthetic oligonucleotide
  Antisense strand to SEQ ID NO: 78384
uuccuucggaaauacuggu

SEQ ID NO: 78466 - RNA, 19 nt, Artificial Sequence
  Description of Artificial Sequence: Synthetic oligonucleotide
  Sense strand starting at position 890 of SEQ ID NO: 983
aggaauucuuaccagccaa

SEQ ID NO: 78467 - RNA, 19 nt, Artificial Sequence
  Description of Artificial Sequence: Synthetic oligonucleotide
  Antisense strand to SEQ ID NO: 78386
uuggcugguaagaauuccu

SEQ ID NO: 78468 - RNA, 19 nt, Artificial Sequence
  Description of Artificial Sequence: Synthetic oligonucleotide
  Sense strand starting at position 1002 of SEQ ID NO: 983
ccaagagaagcucagucau

SEQ ID NO: 78469 - RNA, 19 nt, Artificial Sequence
  Description of Artificial Sequence: Synthetic oligonucleotide
  Antisense strand to SEQ ID NO: 78388
augacugagcuucucuugg

SEQ ID NO: 78470 - RNA, 19 nt, Artificial Sequence
  Description of Artificial Sequence: Synthetic oligonucleotide
  Sense strand starting at position 1004 of SEQ ID NO: 983
aagagaagcucagucauuc

SEQ ID NO: 78471 - RNA, 19 nt, Artificial Sequence
  Description of Artificial Sequence: Synthetic oligonucleotide
  Antisense strand to SEQ ID NO: 78390
gaaugacugagcuucucuu

SEQ ID NO: 78472 - RNA, 19 nt, Artificial Sequence
  Description of Artificial Sequence: Synthetic oligonucleotide
  Sense strand starting at position 1024 of SEQ ID NO: 983
caguccucagaguacagau

SEQ ID NO: 78473 - RNA, 19 nt, Artificial Sequence
  Description of Artificial Sequence: Synthetic oligonucleotide
  Antisense strand to SEQ ID NO: 78392
aucuguacucugaggacug

SEQ ID NO: 78474 - RNA, 19 nt, Artificial Sequence
  Description of Artificial Sequence: Synthetic oligonucleotide
  Sense strand starting at position 1094 of SEQ ID NO: 983
ccgauuugcugagguugaa

SEQ ID NO: 78475 - RNA, 19 nt, Artificial Sequence
  Description of Artificial Sequence: Synthetic oligonucleotide
  Antisense strand to SEQ ID NO: 78394
uucaaccucagcaaaucgg

SEQ ID NO: 78476 - RNA, 19 nt, Artificial Sequence
  Description of Artificial Sequence: Synthetic oligonucleotide
  Sense strand starting at position 1352 of SEQ ID NO: 983
acugcuuaagccuaguuua

SEQ ID NO: 78477 - RNA, 19 nt, Artificial Sequence
  Description of Artificial Sequence: Synthetic oligonucleotide
  Antisense strand to SEQ ID NO: 78396
uaaacuaggcuuaagcagu

SEQ ID NO: 78478 - RNA, 19 nt, Artificial Sequence
  Description of Artificial Sequence: Synthetic oligonucleotide
  Sense strand starting at position 1355 of SEQ ID NO: 983
gcuuaagccuaguuuauga

SEQ ID NO: 78479 - RNA, 19 nt, Artificial Sequence
  Description of Artificial Sequence: Synthetic oligonucleotide
  Antisense strand to SEQ ID NO: 78398
ucauaaacuaggcuuaagc

SEQ ID NO: 78480 - RNA, 19 nt, Artificial Sequence
  Description of Artificial Sequence: Synthetic oligonucleotide
  Sense strand starting at position 1422 of SEQ ID NO: 983
gggccuuugaccugagaca

SEQ ID NO: 78481 - RNA, 19 nt, Artificial Sequence
  Description of Artificial Sequence: Synthetic oligonucleotide
  Antisense strand to SEQ ID NO: 78400
ugucucaggucaaaggccc

SEQ ID NO: 78482 - RNA, 19 nt, Artificial Sequence
  Description of Artificial Sequence: Synthetic oligonucleotide
  Sense strand starting at position 1454 of SEQ ID NO: 983
gucucugcaccuuaaguua

SEQ ID NO: 78483 - RNA, 19 nt, Artificial Sequence
  Description of Artificial Sequence: Synthetic oligonucleotide
  Antisense strand to SEQ ID NO: 78402
uaacuuaaggugcagagac

SEQ ID NO: 78484 - RNA, 19 nt, Artificial Sequence
  Description of Artificial Sequence: Synthetic oligonucleotide
  Sense strand starting at position 2054 of SEQ ID NO: 983
cugccaguucucgcgagaa

SEQ ID NO: 78485 - RNA, 19 nt, Artificial Sequence
  Description of Artificial Sequence: Synthetic oligonucleotide
  Antisense strand to SEQ ID NO: 78404
uucucgcgagaacuggcag

SEQ ID NO: 78486 - RNA, 19 nt, Artificial Sequence
  Description of Artificial Sequence: Synthetic oligonucleotide
  Sense strand starting at position 2056 of SEQ ID NO: 983
gccaguucucgcgagaacu

SEQ ID NO: 78487 - RNA, 19 nt, Artificial Sequence
  Description of Artificial Sequence: Synthetic oligonucleotide
  Antisense strand to SEQ ID NO: 78406
aguucucgcgagaacuggc

SEQ ID NO: 78488 - RNA, 19 nt, Artificial Sequence
  Description of Artificial Sequence: Synthetic oligonucleotide
  Sense strand starting at position 2221 of SEQ ID NO: 983
guccaaacuuagucccaaa

SEQ ID NO: 78489 - RNA, 19 nt, Artificial Sequence
  Description of Artificial Sequence: Synthetic oligonucleotide
  Antisense strand to SEQ ID NO: 78408
uuugggacuaaguuuggac

SEQ ID NO: 78490 - RNA, 19 nt, Artificial Sequence
  Description of Artificial Sequence: Synthetic oligonucleotide
  Sense strand starting at position 2337 of SEQ ID NO: 983
uggcgaaucauuugagguc

SEQ ID NO: 78491 - RNA, 19 nt, Artificial Sequence
  Description of Artificial Sequence: Synthetic oligonucleotide
  Antisense strand to SEQ ID NO: 78410
gaccucaaaugauucgcca

SEQ ID NO: 78492 - RNA, 19 nt, Artificial Sequence
  Description of Artificial Sequence: Synthetic oligonucleotide
  Sense strand starting at position 2386 of SEQ ID NO: 983
ggaaacgccgucuauacua

SEQ ID NO: 78493 - RNA, 19 nt, Artificial Sequence
  Description of Artificial Sequence: Synthetic oligonucleotide
  Antisense strand to SEQ ID NO: 78412
uaguauagacggcguuucc

SEQ ID NO: 78494 - RNA, 19 nt, Artificial Sequence
  Description of Artificial Sequence: Synthetic oligonucleotide
  Sense strand starting at position 2777 of SEQ ID NO: 983
ugggaaugcucaggauaug

SEQ ID NO: 78495 - RNA, 19 nt, Artificial Sequence
  Description of Artificial Sequence: Synthetic oligonucleotide
  Antisense strand to SEQ ID NO: 78414
cauauccugagcauuccca

SEQ ID NO: 78496 - RNA, 19 nt, Artificial Sequence
  Description of Artificial Sequence: Synthetic oligonucleotide
  Sense strand starting at position 2778 of SEQ ID NO: 983
gggaaugcucaggauaugu

SEQ ID NO: 78497 - RNA, 19 nt, Artificial Sequence
  Description of Artificial Sequence: Synthetic oligonucleotide
  Antisense strand to SEQ ID NO: 78416
acauauccugagcauuccc

SEQ ID NO: 78498 - RNA, 19 nt, Artificial Sequence
  Description of Artificial Sequence: Synthetic oligonucleotide
  Sense strand starting at position 2780 of SEQ ID NO: 983
gaaugcucaggauauguua

SEQ ID NO: 78499 - RNA, 19 nt, Artificial Sequence
  Description of Artificial Sequence: Synthetic oligonucleotide
  Antisense strand to SEQ ID NO: 78418
uaacauauccugagcauuc

SEQ ID NO: 78500 - RNA, 19 nt, Artificial Sequence
  Description of Artificial Sequence: Synthetic oligonucleotide
  Sense strand starting at position 3166 of SEQ ID NO: 983
gguaucugagccugggaaa

SEQ ID NO: 78501 - RNA, 19 nt, Artificial Sequence
  Description of Artificial Sequence: Synthetic oligonucleotide
  Antisense strand to SEQ ID NO: 78420
uuucccaggcucagauacc

SEQ ID NO: 78502 - RNA, 19 nt, Artificial Sequence
  Description of Artificial Sequence: Synthetic oligonucleotide
  Sense strand starting at position 3206 of SEQ ID NO: 983
augguauaacgccgacuau

SEQ ID NO: 78503 - RNA, 19 nt, Artificial Sequence
  Description of Artificial Sequence: Synthetic oligonucleotide
  Antisense strand to SEQ ID NO: 78422
auagucggcguuauaccau

SEQ ID NO: 78504 - RNA, 19 nt, Artificial Sequence
  Description of Artificial Sequence: Synthetic oligonucleotide
  Sense strand starting at position 3207 of SEQ ID NO: 983
ugguauaacgccgacuaua

SEQ ID NO: 78505 - RNA, 19 nt, Artificial Sequence
  Description of Artificial Sequence: Synthetic oligonucleotide
  Antisense strand to SEQ ID NO: 78424
uauagucggcguuauacca

SEQ ID NO: 78506 - RNA, 19 nt, Artificial Sequence
  Description of Artificial Sequence: Synthetic oligonucleotide
  Sense strand starting at position 3377 of SEQ ID NO: 983
ccuggccuaucuuuaggua

SEQ ID NO: 78507 - RNA, 19 nt, Artificial Sequence
  Description of Artificial Sequence: Synthetic oligonucleotide
  Antisense strand to SEQ ID NO: 78426
uaccuaaagauaggccagg

SEQ ID NO: 78508 - RNA, 19 nt, Artificial Sequence
  Description of Artificial Sequence: Synthetic oligonucleotide
  Sense strand starting at position 3395 of SEQ ID NO: 983
aguggcacucuuggugauu

SEQ ID NO: 78509 - RNA, 19 nt, Artificial Sequence
  Description of Artificial Sequence: Synthetic oligonucleotide
  Antisense strand to SEQ ID NO: 78428
aaucaccaagagugccacu

SEQ ID NO: 78510 - RNA, 19 nt, Artificial Sequence
  Description of Artificial Sequence: Synthetic oligonucleotide
  Sense strand starting at position 3396 of SEQ ID NO: 983
guggcacucuuggugauuu

SEQ ID NO: 78511 - RNA, 19 nt, Artificial Sequence
  Description of Artificial Sequence: Synthetic oligonucleotide
  Antisense strand to SEQ ID NO: 78430
aaaucaccaagagugccac

SEQ ID NO: 78512 - RNA, 19 nt, Artificial Sequence
  Description of Artificial Sequence: Synthetic oligonucleotide
  Sense strand starting at position 3757 of SEQ ID NO: 983
gugcccggcccauagauua

SEQ ID NO: 78513 - RNA, 19 nt, Artificial Sequence
  Description of Artificial Sequence: Synthetic oligonucleotide
  Antisense strand to SEQ ID NO: 78432
uaaucuaugggccgggcac

SEQ ID NO: 78514 - RNA, 19 nt, Artificial Sequence
  Description of Artificial Sequence: Synthetic oligonucleotide
  Sense strand starting at position 87 of SEQ ID NO: 984
gcgagaaagcaucauuagu

SEQ ID NO: 78515 - RNA, 19 nt, Artificial Sequence
  Description of Artificial Sequence: Synthetic oligonucleotide
  Antisense strand to SEQ ID NO: 78434
acuaaugaugcuuucucgc

SEQ ID NO: 78516 - RNA, 19 nt, Artificial Sequence
  Description of Artificial Sequence: Synthetic oligonucleotide
  Sense strand starting at position 89 of SEQ ID NO: 984
gagaaagcaucauuaguac

SEQ ID NO: 78517 - RNA, 19 nt, Artificial Sequence
  Description of Artificial Sequence: Synthetic oligonucleotide
  Antisense strand to SEQ ID NO: 78436
guacuaaugaugcuuucuc

SEQ ID NO: 78518 - RNA, 19 nt, Artificial Sequence
  Description of Artificial Sequence: Synthetic oligonucleotide
  Sense strand starting at position 489 of SEQ ID NO: 984
cagguuuagucuccaggaa

SEQ ID NO: 78519 - RNA, 19 nt, Artificial Sequence
  Description of Artificial Sequence: Synthetic oligonucleotide
  Antisense strand to SEQ ID NO: 78438
uuccuggagacuaaaccug

SEQ ID NO: 78520 - RNA, 19 nt, Artificial Sequence
  Description of Artificial Sequence: Synthetic oligonucleotide
  Sense strand starting at position 490 of SEQ ID NO: 984
agguuuagucuccaggaag

SEQ ID NO: 78521 - RNA, 19 nt, Artificial Sequence
  Description of Artificial Sequence: Synthetic oligonucleotide
  Antisense strand to SEQ ID NO: 78440
cuuccuggagacuaaaccu

SEQ ID NO: 78522 - RNA, 19 nt, Artificial Sequence
  Description of Artificial Sequence: Synthetic oligonucleotide
  Sense strand starting at position 711 of SEQ ID NO: 984
ggaggaaacuuggucugua

SEQ ID NO: 78523 - RNA, 19 nt, Artificial Sequence
  Description of Artificial Sequence: Synthetic oligonucleotide
  Antisense strand to SEQ ID NO: 78442
uacagaccaaguuuccucc

SEQ ID NO: 78524 - RNA, 19 nt, Artificial Sequence
  Description of Artificial Sequence: Synthetic oligonucleotide
  Sense strand starting at position 712 of SEQ ID NO: 984
gaggaaacuuggucuguac

SEQ ID NO: 78525 - RNA, 19 nt, Artificial Sequence
  Description of Artificial Sequence: Synthetic oligonucleotide
  Antisense strand to SEQ ID NO: 78444
guacagaccaaguuuccuc

SEQ ID NO: 78526 - RNA, 19 nt, Artificial Sequence
  Description of Artificial Sequence: Synthetic oligonucleotide
  Sense strand starting at position 714 of SEQ ID NO: 984
ggaaacuuggucuguaccu

SEQ ID NO: 78527 - RNA, 19 nt, Artificial Sequence
  Description of Artificial Sequence: Synthetic oligonucleotide
  Antisense strand to SEQ ID NO: 78446
agguacagaccaaguuucc

SEQ ID NO: 78528 - RNA, 19 nt, Artificial Sequence
  Description of Artificial Sequence: Synthetic oligonucleotide
  Sense strand starting at position 875 of SEQ ID NO: 984
cagaaagacuuguauuuag

SEQ ID NO: 78529 - RNA, 19 nt, Artificial Sequence
  Description of Artificial Sequence: Synthetic oligonucleotide
  Antisense strand to SEQ ID NO: 78448
cuaaauacaagucuuucug

SEQ ID NO: 78530 - RNA, 19 nt, Artificial Sequence
  Description of Artificial Sequence: Synthetic oligonucleotide
  Sense strand starting at position 960 of SEQ ID NO: 984
ggcuuaaaugcacaucaca

SEQ ID NO: 78531 - RNA, 19 nt, Artificial Sequence
  Description of Artificial Sequence: Synthetic oligonucleotide
  Antisense strand to SEQ ID NO: 78450
ugugaugugcauuuaagcc

SEQ ID NO: 78532 - RNA, 19 nt, Artificial Sequence
  Description of Artificial Sequence: Synthetic oligonucleotide
  Sense strand starting at position 980 of SEQ ID NO: 984
ggaaacugacucugccauu

SEQ ID NO: 78533 - RNA, 19 nt, Artificial Sequence
  Description of Artificial Sequence: Synthetic oligonucleotide
  Antisense strand to SEQ ID NO: 78452
aauggcagagucaguuucc

SEQ ID NO: 78534 - RNA, 19 nt, Artificial Sequence
  Description of Artificial Sequence: Synthetic oligonucleotide
  Sense strand starting at position 1198 of SEQ ID NO: 984
ugacaaguuccggagugag

SEQ ID NO: 78535 - RNA, 19 nt, Artificial Sequence
  Description of Artificial Sequence: Synthetic oligonucleotide
  Antisense strand to SEQ ID NO: 78454
cucacuccggaacuuguca

SEQ ID NO: 78536 - RNA, 19 nt, Artificial Sequence
  Description of Artificial Sequence: Synthetic oligonucleotide
  Sense strand starting at position 1389 of SEQ ID NO: 984
ccugcaggucgagaaugua

SEQ ID NO: 78537 - RNA, 19 nt, Artificial Sequence
  Description of Artificial Sequence: Synthetic oligonucleotide
  Antisense strand to SEQ ID NO: 78456
uacauucucgaccugcagg

SEQ ID NO: 78538 - RNA, 19 nt, Artificial Sequence
  Description of Artificial Sequence: Synthetic oligonucleotide
  Sense strand starting at position 1720 of SEQ ID NO: 984
cgcggcggucacuuauaga

SEQ ID NO: 78539 - RNA, 19 nt, Artificial Sequence
  Description of Artificial Sequence: Synthetic oligonucleotide
  Antisense strand to SEQ ID NO: 78458
ucuauaagugaccgccgcg

SEQ ID NO: 78540 - RNA, 19 nt, Artificial Sequence
  Description of Artificial Sequence: Synthetic oligonucleotide
  Sense strand starting at position 2060 of SEQ ID NO: 984
cuccuccgaggucauaaau

SEQ ID NO: 78541 - RNA, 19 nt, Artificial Sequence
  Description of Artificial Sequence: Synthetic oligonucleotide
  Antisense strand to SEQ ID NO: 78460
auuuaugaccucggaggag

SEQ ID NO: 78542 - RNA, 19 nt, Artificial Sequence
  Description of Artificial Sequence: Synthetic oligonucleotide
  Sense strand starting at position 2069 of SEQ ID NO: 984
ggucauaaaucccugaaca

SEQ ID NO: 78543 - RNA, 19 nt, Artificial Sequence
  Description of Artificial Sequence: Synthetic oligonucleotide
  Antisense strand to SEQ ID NO: 78462
uguucagggauuuaugacc

SEQ ID NO: 78544 - RNA, 19 nt, Artificial Sequence
  Description of Artificial Sequence: Synthetic oligonucleotide
  Sense strand starting at position 2070 of SEQ ID NO: 984
gucauaaaucccugaacag

SEQ ID NO: 78545 - RNA, 19 nt, Artificial Sequence
  Description of Artificial Sequence: Synthetic oligonucleotide
  Antisense strand to SEQ ID NO: 78464
cuguucagggauuuaugac

SEQ ID NO: 78546 - RNA, 19 nt, Artificial Sequence
  Description of Artificial Sequence: Synthetic oligonucleotide
  Sense strand starting at position 2153 of SEQ ID NO: 984
gaauuagugccgccuuguu

SEQ ID NO: 78547 - RNA, 19 nt, Artificial Sequence
  Description of Artificial Sequence: Synthetic oligonucleotide
  Antisense strand to SEQ ID NO: 78466
aacaaggcggcacuaauuc

SEQ ID NO: 78548 - RNA, 19 nt, Artificial Sequence
  Description of Artificial Sequence: Synthetic oligonucleotide
  Sense strand starting at position 2523 of SEQ ID NO: 984
ugggacaauuucuacauaa

SEQ ID NO: 78549 - RNA, 19 nt, Artificial Sequence
  Description of Artificial Sequence: Synthetic oligonucleotide
  Antisense strand to SEQ ID NO: 78468
uuauguagaaauuguccca

SEQ ID NO: 78550 - RNA, 19 nt, Artificial Sequence
  Description of Artificial Sequence: Synthetic oligonucleotide
  Sense strand starting at position 2564 of SEQ ID NO: 984
acccaauugggucagcaaa

SEQ ID NO: 78551 - RNA, 19 nt, Artificial Sequence
  Description of Artificial Sequence: Synthetic oligonucleotide
  Antisense strand to SEQ ID NO: 78470
uuugcugacccaauugggu

SEQ ID NO: 78552 - RNA, 19 nt, Artificial Sequence
  Description of Artificial Sequence: Synthetic oligonucleotide
  Sense strand starting at position 2566 of SEQ ID NO: 984
ccaauugggucagcaaauu

SEQ ID NO: 78553 - RNA, 19 nt, Artificial Sequence
  Description of Artificial Sequence: Synthetic oligonucleotide
  Antisense strand to SEQ ID NO: 78472
aauuugcugacccaauugg

SEQ ID NO: 78554 - RNA, 19 nt, Artificial Sequence
  Description of Artificial Sequence: Synthetic oligonucleotide
  Sense strand starting at position 2612 of SEQ ID NO: 984
acacaccucuguguagaaa

SEQ ID NO: 78555 - RNA, 19 nt, Artificial Sequence
  Description of Artificial Sequence: Synthetic oligonucleotide
  Antisense strand to SEQ ID NO: 78474
uuucuacacagaggugugu

SEQ ID NO: 78556 - RNA, 19 nt, Artificial Sequence
  Description of Artificial Sequence: Synthetic oligonucleotide
  Sense strand starting at position 2689 of SEQ ID NO: 984
ccuggacuugauuauucuu

SEQ ID NO: 78557 - RNA, 19 nt, Artificial Sequence
  Description of Artificial Sequence: Synthetic oligonucleotide
  Antisense strand to SEQ ID NO: 78476
aagaauaaucaaguccagg

SEQ ID NO: 78558 - RNA, 19 nt, Artificial Sequence
  Description of Artificial Sequence: Synthetic oligonucleotide
  Sense strand starting at position 2778 of SEQ ID NO: 984
ccuguauugcaacaggaca

SEQ ID NO: 78559 - RNA, 19 nt, Artificial Sequence
  Description of Artificial Sequence: Synthetic oligonucleotide
  Antisense strand to SEQ ID NO: 78478
uguccuguugcaauacagg

SEQ ID NO: 78560 - RNA, 19 nt, Artificial Sequence
  Description of Artificial Sequence: Synthetic oligonucleotide
  Sense strand starting at position 2792 of SEQ ID NO: 984
ggacacugugcucaguauu

SEQ ID NO: 78561 - RNA, 19 nt, Artificial Sequence
  Description of Artificial Sequence: Synthetic oligonucleotide
  Antisense strand to SEQ ID NO: 78480
aauacugagcacagugucc

SEQ ID NO: 78562 - RNA, 19 nt, Artificial Sequence
  Description of Artificial Sequence: Synthetic oligonucleotide
  Sense strand starting at position 2833 of SEQ ID NO: 984
uugucaccucccuagacau

SEQ ID NO: 78563 - RNA, 19 nt, Artificial Sequence
  Description of Artificial Sequence: Synthetic oligonucleotide
  Antisense strand to SEQ ID NO: 78482
augucuagggaggugacaa

SEQ ID NO: 78564 - RNA, 19 nt, Artificial Sequence
  Description of Artificial Sequence: Synthetic oligonucleotide
  Sense strand starting at position 2927 of SEQ ID NO: 984
ccuaaugaaucauugguga

SEQ ID NO: 78565 - RNA, 19 nt, Artificial Sequence
  Description of Artificial Sequence: Synthetic oligonucleotide
  Antisense strand to SEQ ID NO: 78484
ucaccaaugauucauuagg

SEQ ID NO: 78566 - RNA, 19 nt, Artificial Sequence
  Description of Artificial Sequence: Synthetic oligonucleotide
  Sense strand starting at position 3027 of SEQ ID NO: 984
gaaacaagaguucgauaau

SEQ ID NO: 78567 - RNA, 19 nt, Artificial Sequence
  Description of Artificial Sequence: Synthetic oligonucleotide
  Antisense strand to SEQ ID NO: 78486
auuaucgaacucuuguuuc

SEQ ID NO: 78568 - RNA, 19 nt, Artificial Sequence
  Description of Artificial Sequence: Synthetic oligonucleotide
  Sense strand starting at position 3030 of SEQ ID NO: 984
acaagaguucgauaaugug

SEQ ID NO: 78569 - RNA, 19 nt, Artificial Sequence
  Description of Artificial Sequence: Synthetic oligonucleotide
  Antisense strand to SEQ ID NO: 78488
cacauuaucgaacucuugu

SEQ ID NO: 78570 - RNA, 19 nt, Artificial Sequence
  Description of Artificial Sequence: Synthetic oligonucleotide
  Sense strand starting at position 3044 of SEQ ID NO: 984
auguguggcacugauuaac

SEQ ID NO: 78571 - RNA, 19 nt, Artificial Sequence
  Description of Artificial Sequence: Synthetic oligonucleotide
  Antisense strand to SEQ ID NO: 78490
guuaaucagugccacacau

SEQ ID NO: 78572 - RNA, 19 nt, Artificial Sequence
  Description of Artificial Sequence: Synthetic oligonucleotide
  Sense strand starting at position 3166 of SEQ ID NO: 984
uuugucauguaaucuugaa

SEQ ID NO: 78573 - RNA, 19 nt, Artificial Sequence
  Description of Artificial Sequence: Synthetic oligonucleotide
  Antisense strand to SEQ ID NO: 78492
uucaagauuacaugacaaa

SEQ ID NO: 78574 - RNA, 19 nt, Artificial Sequence
  Description of Artificial Sequence: Synthetic oligonucleotide
  Sense strand starting at position 3292 of SEQ ID NO: 984
uuuggauauguaggugaaa

SEQ ID NO: 78575 - RNA, 19 nt, Artificial Sequence
  Description of Artificial Sequence: Synthetic oligonucleotide
  Antisense strand to SEQ ID NO: 78494
uuucaccuacauauccaaa

SEQ ID NO: 78576 - RNA, 19 nt, Artificial Sequence
  Description of Artificial Sequence: Synthetic oligonucleotide
  Sense strand starting at position 3340 of SEQ ID NO: 984
agacaugcccaaugucaca

SEQ ID NO: 78577 - RNA, 19 nt, Artificial Sequence
  Description of Artificial Sequence: Synthetic oligonucleotide
  Antisense strand to SEQ ID NO: 78496
ugugacauugggcaugucu

SEQ ID NO: 78578 - RNA, 19 nt, Artificial Sequence
  Description of Artificial Sequence: Synthetic oligonucleotide
  Sense strand starting at position 3415 of SEQ ID NO: 984
ggcucuguggcccaagaaa

SEQ ID NO: 78579 - RNA, 19 nt, Artificial Sequence
  Description of Artificial Sequence: Synthetic oligonucleotide
  Antisense strand to SEQ ID NO: 78498
uuucuugggccacagagcc

SEQ ID NO: 78580 - RNA, 19 nt, Artificial Sequence
  Description of Artificial Sequence: Synthetic oligonucleotide
  Sense strand starting at position 3643 of SEQ ID NO: 984
cggucaaguccagaggguu

SEQ ID NO: 78581 - RNA, 19 nt, Artificial Sequence
  Description of Artificial Sequence: Synthetic oligonucleotide
  Antisense strand to SEQ ID NO: 78500
aacccucuggacuugaccg

SEQ ID NO: 78582 - RNA, 19 nt, Artificial Sequence
  Description of Artificial Sequence: Synthetic oligonucleotide
  Sense strand starting at position 3681 of SEQ ID NO: 984
ggcagauuucugugcaaau

SEQ ID NO: 78583 - RNA, 19 nt, Artificial Sequence
  Description of Artificial Sequence: Synthetic oligonucleotide
  Antisense strand to SEQ ID NO: 78502
auuugcacagaaaucugcc

SEQ ID NO: 78584 - RNA, 19 nt, Artificial Sequence
  Description of Artificial Sequence: Synthetic oligonucleotide
  Sense strand starting at position 3682 of SEQ ID NO: 984
gcagauuucugugcaaaug

SEQ ID NO: 78585 - RNA, 19 nt, Artificial Sequence
  Description of Artificial Sequence: Synthetic oligonucleotide
  Antisense strand to SEQ ID NO: 78504
cauuugcacagaaaucugc

SEQ ID NO: 78586 - RNA, 19 nt, Artificial Sequence
  Description of Artificial Sequence: Synthetic oligonucleotide
  Sense strand starting at position 3746 of SEQ ID NO: 984
uagacuuuggcugaguuau

SEQ ID NO: 78587 - RNA, 19 nt, Artificial Sequence
  Description of Artificial Sequence: Synthetic oligonucleotide
  Antisense strand to SEQ ID NO: 78506
auaacucagccaaagucua

SEQ ID NO: 78588 - RNA, 19 nt, Artificial Sequence
  Description of Artificial Sequence: Synthetic oligonucleotide
  Sense strand starting at position 3797 of SEQ ID NO: 984
ggaacuaauugggucuacu

SEQ ID NO: 78589 - RNA, 19 nt, Artificial Sequence
  Description of Artificial Sequence: Synthetic oligonucleotide
  Antisense strand to SEQ ID NO: 78508
aguagacccaauuaguucc

SEQ ID NO: 78590 - RNA, 19 nt, Artificial Sequence
  Description of Artificial Sequence: Synthetic oligonucleotide
  Sense strand starting at position 3800 of SEQ ID NO: 984
acuaauugggucuacucau

SEQ ID NO: 78591 - RNA, 19 nt, Artificial Sequence
  Description of Artificial Sequence: Synthetic oligonucleotide
  Antisense strand to SEQ ID NO: 78510
augaguagacccaauuagu

SEQ ID NO: 78592 - RNA, 19 nt, Artificial Sequence
  Description of Artificial Sequence: Synthetic oligonucleotide
  Sense strand starting at position 3930 of SEQ ID NO: 984
guggaaggugcucagucua

SEQ ID NO: 78593 - RNA, 19 nt, Artificial Sequence
  Description of Artificial Sequence: Synthetic oligonucleotide
  Antisense strand to SEQ ID NO: 78512
uagacugagcaccuuccac

SEQ ID NO: 78594 - RNA, 19 nt, Artificial Sequence
  Description of Artificial Sequence: Synthetic oligonucleotide
  Sense strand starting at position 3953 of SEQ ID NO: 985
guaggcuaguucucagaac

SEQ ID NO: 78595 - RNA, 19 nt, Artificial Sequence
  Description of Artificial Sequence: Synthetic oligonucleotide
  Antisense strand to SEQ ID NO: 78514
guucugagaacuagccuac

SEQ ID NO: 78596 - RNA, 19 nt, Artificial Sequence
  Description of Artificial Sequence: Synthetic oligonucleotide
  Sense strand starting at position 3932 of SEQ ID NO: 985
ggcauauaauaagcuauca

SEQ ID NO: 78597 - RNA, 19 nt, Artificial Sequence
  Description of Artificial Sequence: Synthetic oligonucleotide
  Antisense strand to SEQ ID NO: 78516
ugauagcuuauuauaugcc

SEQ ID NO: 78598 - RNA, 19 nt, Artificial Sequence
  Description of Artificial Sequence: Synthetic oligonucleotide
  Sense strand starting at position 3668 of SEQ ID NO: 985
caguaauuagccuggcaug

SEQ ID NO: 78599 - RNA, 19 nt, Artificial Sequence
  Description of Artificial Sequence: Synthetic oligonucleotide
  Antisense strand to SEQ ID NO: 78518
caugccaggcuaauuacug

SEQ ID NO: 78600 - RNA, 19 nt, Artificial Sequence
  Description of Artificial Sequence: Synthetic oligonucleotide
  Sense strand starting at position 3392 of SEQ ID NO: 985
acuauaaagcaauggcuaa

SEQ ID NO: 78601 - RNA, 19 nt, Artificial Sequence
  Description of Artificial Sequence: Synthetic oligonucleotide
  Antisense strand to SEQ ID NO: 78520
uuagccauugcuuuauagu

SEQ ID NO: 78602 - RNA, 19 nt, Artificial Sequence
  Description of Artificial Sequence: Synthetic oligonucleotide
  Sense strand starting at position 3382 of SEQ ID NO: 985
guuauuagucacuauaaag

SEQ ID NO: 78603 - RNA, 19 nt, Artificial Sequence
  Description of Artificial Sequence: Synthetic oligonucleotide
  Antisense strand to SEQ ID NO: 78522
cuuuauagugacuaauaac

SEQ ID NO: 78604 - RNA, 19 nt, Artificial Sequence
  Description of Artificial Sequence: Synthetic oligonucleotide
  Sense strand starting at position 3378 of SEQ ID NO: 985
gcaaguuauuagucacuau

SEQ ID NO: 78605 - RNA, 19 nt, Artificial Sequence
  Description of Artificial Sequence: Synthetic oligonucleotide
  Antisense strand to SEQ ID NO: 78524
auagugacuaauaacuugc

SEQ ID NO: 78606 - RNA, 19 nt, Artificial Sequence
  Description of Artificial Sequence: Synthetic oligonucleotide
  Sense strand starting at position 3374 of SEQ ID NO: 985
cuuugcaaguuauuaguca

SEQ ID NO: 78607 - RNA, 19 nt, Artificial Sequence
  Description of Artificial Sequence: Synthetic oligonucleotide
  Antisense strand to SEQ ID NO: 78526
ugacuaauaacuugcaaag

SEQ ID NO: 78608 - RNA, 19 nt, Artificial Sequence
  Description of Artificial Sequence: Synthetic oligonucleotide
  Sense strand starting at position 3330 of SEQ ID NO: 985
gcauauauugaguaaugac

SEQ ID NO: 78609 - RNA, 19 nt, Artificial Sequence
  Description of Artificial Sequence: Synthetic oligonucleotide
  Antisense strand to SEQ ID NO: 78528
gucauuacucaauauaugc

SEQ ID NO: 78610 - RNA, 19 nt, Artificial Sequence
  Description of Artificial Sequence: Synthetic oligonucleotide
  Sense strand starting at position 3329 of SEQ ID NO: 985
agcauauauugaguaauga

SEQ ID NO: 78611 - RNA, 19 nt, Artificial Sequence
  Description of Artificial Sequence: Synthetic oligonucleotide
  Antisense strand to SEQ ID NO: 78530
ucauuacucaauauaugcu

SEQ ID NO: 78612 - RNA, 19 nt, Artificial Sequence
  Description of Artificial Sequence: Synthetic oligonucleotide
  Sense strand starting at position 3236 of SEQ ID NO: 985
ggcucugagacccagaguu

SEQ ID NO: 78613 - RNA, 19 nt, Artificial Sequence
  Description of Artificial Sequence: Synthetic oligonucleotide
  Antisense strand to SEQ ID NO: 78532
aacucugggucucagagcc

SEQ ID NO: 78614 - RNA, 19 nt, Artificial Sequence
  Description of Artificial Sequence: Synthetic oligonucleotide
  Sense strand starting at position 3175 of SEQ ID NO: 985
agaggaugugauggcucaa

SEQ ID NO: 78615 - RNA, 19 nt, Artificial Sequence
  Description of Artificial Sequence: Synthetic oligonucleotide
  Antisense strand to SEQ ID NO: 78534
uugagccaucacauccucu

SEQ ID NO: 78616 - RNA, 19 nt, Artificial Sequence
  Description of Artificial Sequence: Synthetic oligonucleotide
  Sense strand starting at position 3147 of SEQ ID NO: 985
gcuugaucaugaccaauuc

SEQ ID NO: 78617 - RNA, 19 nt, Artificial Sequence
  Description of Artificial Sequence: Synthetic oligonucleotide
  Antisense strand to SEQ ID NO: 78536
gaauuggucaugaucaagc

SEQ ID NO: 78618 - RNA, 19 nt, Artificial Sequence
  Description of Artificial Sequence: Synthetic oligonucleotide
  Sense strand starting at position 3135 of SEQ ID NO: 985
agugaagagugggcuugau

SEQ ID NO: 78619 - RNA, 19 nt, Artificial Sequence
  Description of Artificial Sequence: Synthetic oligonucleotide
  Antisense strand to SEQ ID NO: 78538
aucaagcccacucuucacu

SEQ ID NO: 78620 - RNA, 19 nt, Artificial Sequence
  Description of Artificial Sequence: Synthetic oligonucleotide
  Sense strand starting at position 2988 of SEQ ID NO: 985
cguuauuguacagacgaua

SEQ ID NO: 78621 - RNA, 19 nt, Artificial Sequence
  Description of Artificial Sequence: Synthetic oligonucleotide
  Antisense strand to SEQ ID NO: 78540
uaucgucuguacaauaacg

SEQ ID NO: 78622 - RNA, 19 nt, Artificial Sequence
  Description of Artificial Sequence: Synthetic oligonucleotide
  Sense strand starting at position 2986 of SEQ ID NO: 985
ugcguuauuguacagacga

SEQ ID NO: 78623 - RNA, 19 nt, Artificial Sequence
  Description of Artificial Sequence: Synthetic oligonucleotide
  Antisense strand to SEQ ID NO: 78542
ucgucuguacaauaacgca

SEQ ID NO: 78624 - RNA, 19 nt, Artificial Sequence
  Description of Artificial Sequence: Synthetic oligonucleotide
  Sense strand starting at position 2979 of SEQ ID NO: 985
acacaucugcguuauugua

SEQ ID NO: 78625 - RNA, 19 nt, Artificial Sequence
  Description of Artificial Sequence: Synthetic oligonucleotide
  Antisense strand to SEQ ID NO: 78544
uacaauaacgcagaugugu

SEQ ID NO: 78626 - RNA, 19 nt, Artificial Sequence
  Description of Artificial Sequence: Synthetic oligonucleotide
  Sense strand starting at position 2944 of SEQ ID NO: 985
cagugucuccacugcugaa

SEQ ID NO: 78627 - RNA, 19 nt, Artificial Sequence
  Description of Artificial Sequence: Synthetic oligonucleotide
  Antisense strand to SEQ ID NO: 78546
uucagcaguggagacacug

SEQ ID NO: 78628 - RNA, 19 nt, Artificial Sequence
  Description of Artificial Sequence: Synthetic oligonucleotide
  Sense strand starting at position 2908 of SEQ ID NO: 985
gccugaggacucuggguaa

SEQ ID NO: 78629 - RNA, 19 nt, Artificial Sequence
  Description of Artificial Sequence: Synthetic oligonucleotide
  Antisense strand to SEQ ID NO: 78548
uuacccagaguccucaggc

SEQ ID NO: 78630 - RNA, 19 nt, Artificial Sequence
  Description of Artificial Sequence: Synthetic oligonucleotide
  Sense strand starting at position 2804 of SEQ ID NO: 985
uuauaaguauaucaggaca

SEQ ID NO: 78631 - RNA, 19 nt, Artificial Sequence
  Description of Artificial Sequence: Synthetic oligonucleotide
  Antisense strand to SEQ ID NO: 78550
uguccugauauacuuauaa

SEQ ID NO: 78632 - RNA, 19 nt, Artificial Sequence
  Description of Artificial Sequence: Synthetic oligonucleotide
  Sense strand starting at position 2793 of SEQ ID NO: 985
ucuacugguccuuauaagu

SEQ ID NO: 78633 - RNA, 19 nt, Artificial Sequence
  Description of Artificial Sequence: Synthetic oligonucleotide
  Antisense strand to SEQ ID NO: 78552
acuuauaaggaccaguaga

SEQ ID NO: 78634 - RNA, 19 nt, Artificial Sequence
  Description of Artificial Sequence: Synthetic oligonucleotide
  Sense strand starting at position 2769 of SEQ ID NO: 985
cuggucagucaacaacuua

SEQ ID NO: 78635 - RNA, 19 nt, Artificial Sequence
  Description of Artificial Sequence: Synthetic oligonucleotide
  Antisense strand to SEQ ID NO: 78554
uaaguuguugacugaccag

SEQ ID NO: 78636 - RNA, 19 nt, Artificial Sequence
  Description of Artificial Sequence: Synthetic oligonucleotide
  Sense strand starting at position 2740 of SEQ ID NO: 985
aauauagugcuagggaguu

SEQ ID NO: 78637 - RNA, 19 nt, Artificial Sequence
  Description of Artificial Sequence: Synthetic oligonucleotide
  Antisense strand to SEQ ID NO: 78556
aacucccuagcacuauauu

SEQ ID NO: 78638 - RNA, 19 nt, Artificial Sequence
  Description of Artificial Sequence: Synthetic oligonucleotide
  Sense strand starting at position 2693 of SEQ ID NO: 985
cuguguucccaugaugaug

SEQ ID NO: 78639 - RNA, 19 nt, Artificial Sequence
  Description of Artificial Sequence: Synthetic oligonucleotide
  Antisense strand to SEQ ID NO: 78558
caucaucaugggaacacag

SEQ ID NO: 78640 - RNA, 19 nt, Artificial Sequence
  Description of Artificial Sequence: Synthetic oligonucleotide
  Sense strand starting at position 2689 of SEQ ID NO: 985
aguccuguguucccaugau

SEQ ID NO: 78641 - RNA, 19 nt, Artificial Sequence
  Description of Artificial Sequence: Synthetic oligonucleotide
  Antisense strand to SEQ ID NO: 78560
aucaugggaacacaggacu

SEQ ID NO: 78642 - RNA, 19 nt, Artificial Sequence
  Description of Artificial Sequence: Synthetic oligonucleotide
  Sense strand starting at position 2567 of SEQ ID NO: 985
guuacagguucuccacaau

SEQ ID NO: 78643 - RNA, 19 nt, Artificial Sequence
  Description of Artificial Sequence: Synthetic oligonucleotide
  Antisense strand to SEQ ID NO: 78562
auuguggagaaccuguaac

SEQ ID NO: 78644 - RNA, 19 nt, Artificial Sequence
  Description of Artificial Sequence: Synthetic oligonucleotide
  Sense strand starting at position 2511 of SEQ ID NO: 985
cuuuguucucuagauucua

SEQ ID NO: 78645 - RNA, 19 nt, Artificial Sequence
  Description of Artificial Sequence: Synthetic oligonucleotide
  Antisense strand to SEQ ID NO: 78564
uagaaucuagagaacaaag

SEQ ID NO: 78646 - RNA, 19 nt, Artificial Sequence
  Description of Artificial Sequence: Synthetic oligonucleotide
  Sense strand starting at position 2508 of SEQ ID NO: 985
ucacuuuguucucuagauu

SEQ ID NO: 78647 - RNA, 19 nt, Artificial Sequence
  Description of Artificial Sequence: Synthetic oligonucleotide
  Antisense strand to SEQ ID NO: 78566
aaucuagagaacaaaguga

SEQ ID NO: 78648 - RNA, 19 nt, Artificial Sequence
  Description of Artificial Sequence: Synthetic oligonucleotide
  Sense strand starting at position 2481 of SEQ ID NO: 985
uugguuguccucuaaagcu

SEQ ID NO: 78649 - RNA, 19 nt, Artificial Sequence
  Description of Artificial Sequence: Synthetic oligonucleotide
  Antisense strand to SEQ ID NO: 78568
agcuuuagaggacaaccaa

SEQ ID NO: 78650 - RNA, 19 nt, Artificial Sequence
  Description of Artificial Sequence: Synthetic oligonucleotide
  Sense strand starting at position 2477 of SEQ ID NO: 985
guuauugguuguccucuaa

SEQ ID NO: 78651 - RNA, 19 nt, Artificial Sequence
  Description of Artificial Sequence: Synthetic oligonucleotide
  Antisense strand to SEQ ID NO: 78570
uuagaggacaaccaauaac

SEQ ID NO: 78652 - RNA, 19 nt, Artificial Sequence
  Description of Artificial Sequence: Synthetic oligonucleotide
  Sense strand starting at position 2476 of SEQ ID NO: 985
aguuauugguuguccucua

SEQ ID NO: 78653 - RNA, 19 nt, Artificial Sequence
  Description of Artificial Sequence: Synthetic oligonucleotide
  Antisense strand to SEQ ID NO: 78572
uagaggacaaccaauaacu

SEQ ID NO: 78654 - RNA, 19 nt, Artificial Sequence
  Description of Artificial Sequence: Synthetic oligonucleotide
  Sense strand starting at position 2461 of SEQ ID NO: 985
cgugucuagauacaaaguu

SEQ ID NO: 78655 - RNA, 19 nt, Artificial Sequence
  Description of Artificial Sequence: Synthetic oligonucleotide
  Antisense strand to SEQ ID NO: 78574
aacuuuguaucuagacacg

SEQ ID NO: 78656 - RNA, 19 nt, Artificial Sequence
  Description of Artificial Sequence: Synthetic oligonucleotide
  Sense strand starting at position 2455 of SEQ ID NO: 985
aggaaucgugucuagauac

SEQ ID NO: 78657 - RNA, 19 nt, Artificial Sequence
  Description of Artificial Sequence: Synthetic oligonucleotide
  Antisense strand to SEQ ID NO: 78576
guaucuagacacgauuccu

SEQ ID NO: 78658 - RNA, 19 nt, Artificial Sequence
  Description of Artificial Sequence: Synthetic oligonucleotide
  Sense strand starting at position 2454 of SEQ ID NO: 985
aaggaaucgugucuagaua

SEQ ID NO: 78659 - RNA, 19 nt, Artificial Sequence
  Description of Artificial Sequence: Synthetic oligonucleotide
  Antisense strand to SEQ ID NO: 78578
uaucuagacacgauuccuu

SEQ ID NO: 78660 - RNA, 19 nt, Artificial Sequence
  Description of Artificial Sequence: Synthetic oligonucleotide
  Sense strand starting at position 2304 of SEQ ID NO: 985
auaguauuacugcaaagua

SEQ ID NO: 78661 - RNA, 19 nt, Artificial Sequence
  Description of Artificial Sequence: Synthetic oligonucleotide
  Antisense strand to SEQ ID NO: 78580
uacuuugcaguaauacuau

SEQ ID NO: 78662 - RNA, 19 nt, Artificial Sequence
  Description of Artificial Sequence: Synthetic oligonucleotide
  Sense strand starting at position 2257 of SEQ ID NO: 985
aauagagaugguggccaua

SEQ ID NO: 78663 - RNA, 19 nt, Artificial Sequence
  Description of Artificial Sequence: Synthetic oligonucleotide
  Antisense strand to SEQ ID NO: 78582
uauggccaccaucucuauu

SEQ ID NO: 78664 - RNA, 19 nt, Artificial Sequence
  Description of Artificial Sequence: Synthetic oligonucleotide
  Sense strand starting at position 2164 of SEQ ID NO: 985
cugauccuucccugaucga

SEQ ID NO: 78665 - RNA, 19 nt, Artificial Sequence
  Description of Artificial Sequence: Synthetic oligonucleotide
  Antisense strand to SEQ ID NO: 78584
ucgaucagggaaggaucag

SEQ ID NO: 78666 - RNA, 19 nt, Artificial Sequence
  Description of Artificial Sequence: Synthetic oligonucleotide
  Sense strand starting at position 2145 of SEQ ID NO: 985
ucuguucugccauaaaguc

SEQ ID NO: 78667 - RNA, 19 nt, Artificial Sequence
  Description of Artificial Sequence: Synthetic oligonucleotide
  Antisense strand to SEQ ID NO: 78586
gacuuuauggcagaacaga

SEQ ID NO: 78668 - RNA, 19 nt, Artificial Sequence
  Description of Artificial Sequence: Synthetic oligonucleotide
  Sense strand starting at position 2141 of SEQ ID NO: 985
ggacucuguucugccauaa

SEQ ID NO: 78669 - RNA, 19 nt, Artificial Sequence
  Description of Artificial Sequence: Synthetic oligonucleotide
  Antisense strand to SEQ ID NO: 78588
uuauggcagaacagagucc

SEQ ID NO: 78670 - RNA, 19 nt, Artificial Sequence
  Description of Artificial Sequence: Synthetic oligonucleotide
  Sense strand starting at position 2113 of SEQ ID NO: 985
auucgaacuuucuuccgaa

SEQ ID NO: 78671 - RNA, 19 nt, Artificial Sequence
  Description of Artificial Sequence: Synthetic oligonucleotide
  Antisense strand to SEQ ID NO: 78590
uucggaagaaaguucgaau

SEQ ID NO: 78672 - RNA, 19 nt, Artificial Sequence
  Description of Artificial Sequence: Synthetic oligonucleotide
  Sense strand starting at position 2051 of SEQ ID NO: 985
acuguuuggaguuacagau

SEQ ID NO: 78673 - RNA, 19 nt, Artificial Sequence
  Description of Artificial Sequence: Synthetic oligonucleotide
  Antisense strand to SEQ ID NO: 78592
aucuguaacuccaaacagu

SEQ ID NO: 78674 - RNA, 19 nt, Artificial Sequence
  Description of Artificial Sequence: Synthetic oligonucleotide
  Sense strand starting at position 57 of SEQ ID NO: 986
cagguauaaggcuggcauu

SEQ ID NO: 78675 - RNA, 19 nt, Artificial Sequence
  Description of Artificial Sequence: Synthetic oligonucleotide
  Antisense strand to SEQ ID NO: 78594
aaugccagccuuauaccug

SEQ ID NO: 78676 - RNA, 19 nt, Artificial Sequence
  Description of Artificial Sequence: Synthetic oligonucleotide
  Sense strand starting at position 60 of SEQ ID NO: 986
guauaaggcuggcauuuga

SEQ ID NO: 78677 - RNA, 19 nt, Artificial Sequence
  Description of Artificial Sequence: Synthetic oligonucleotide
  Antisense strand to SEQ ID NO: 78596
ucaaaugccagccuuauac

SEQ ID NO: 78678 - RNA, 19 nt, Artificial Sequence
  Description of Artificial Sequence: Synthetic oligonucleotide
  Sense strand starting at position 94 of SEQ ID NO: 986
uagccuguccaaugggaga

SEQ ID NO: 78679 - RNA, 19 nt, Artificial Sequence
  Description of Artificial Sequence: Synthetic oligonucleotide
  Antisense strand to SEQ ID NO: 78598
ucucccauuggacaggcua

SEQ ID NO: 78680 - RNA, 19 nt, Artificial Sequence
  Description of Artificial Sequence: Synthetic oligonucleotide
  Sense strand starting at position 96 of SEQ ID NO: 986
gccuguccaaugggagaau

SEQ ID NO: 78681 - RNA, 19 nt, Artificial Sequence
  Description of Artificial Sequence: Synthetic oligonucleotide
  Antisense strand to SEQ ID NO: 78600
auucucccauuggacaggc

SEQ ID NO: 78682 - RNA, 19 nt, Artificial Sequence
  Description of Artificial Sequence: Synthetic oligonucleotide
  Sense strand starting at position 347 of SEQ ID NO: 986
ccucuccucuuaucggaaa

SEQ ID NO: 78683 - RNA, 19 nt, Artificial Sequence
  Description of Artificial Sequence: Synthetic oligonucleotide
  Antisense strand to SEQ ID NO: 78602
uuuccgauaagaggagagg

SEQ ID NO: 78684 - RNA, 19 nt, Artificial Sequence
  Description of Artificial Sequence: Synthetic oligonucleotide
  Sense strand starting at position 375 of SEQ ID NO: 986
acaguauugucggccagac

SEQ ID NO: 78685 - RNA, 19 nt, Artificial Sequence
  Description of Artificial Sequence: Synthetic oligonucleotide
  Antisense strand to SEQ ID NO: 78604
gucuggccgacaauacugu

SEQ ID NO: 78686 - RNA, 19 nt, Artificial Sequence
  Description of Artificial Sequence: Synthetic oligonucleotide
  Sense strand starting at position 480 of SEQ ID NO: 986
caguucuagccagagauug

SEQ ID NO: 78687 - RNA, 19 nt, Artificial Sequence
  Description of Artificial Sequence: Synthetic oligonucleotide
  Antisense strand to SEQ ID NO: 78606
caaucucuggcuagaacug

SEQ ID NO: 78688 - RNA, 19 nt, Artificial Sequence
  Description of Artificial Sequence: Synthetic oligonucleotide
  Sense strand starting at position 482 of SEQ ID NO: 986
guucuagccagagauugug

SEQ ID NO: 78689 - RNA, 19 nt, Artificial Sequence
  Description of Artificial Sequence: Synthetic oligonucleotide
  Antisense strand to SEQ ID NO: 78608
cacaaucucuggcuagaac

SEQ ID NO: 78690 - RNA, 19 nt, Artificial Sequence
  Description of Artificial Sequence: Synthetic oligonucleotide
  Sense strand starting at position 490 of SEQ ID NO: 986
cagagauuguggucucagu

SEQ ID NO: 78691 - RNA, 19 nt, Artificial Sequence
  Description of Artificial Sequence: Synthetic oligonucleotide
  Antisense strand to SEQ ID NO: 78610
acugagaccacaaucucug

SEQ ID NO: 78692 - RNA, 19 nt, Artificial Sequence
  Description of Artificial Sequence: Synthetic oligonucleotide
  Sense strand starting at position 569 of SEQ ID NO: 986
uuuguuagggcucaauaaa

SEQ ID NO: 78693 - RNA, 19 nt, Artificial Sequence
  Description of Artificial Sequence: Synthetic oligonucleotide
  Antisense strand to SEQ ID NO: 78612
uuuauugagcccuaacaaa

SEQ ID NO: 78694 - RNA, 19 nt, Artificial Sequence
  Description of Artificial Sequence: Synthetic oligonucleotide
  Sense strand starting at position 646 of SEQ ID NO: 986
gugagcagucuguuguagu

SEQ ID NO: 78695 - RNA, 19 nt, Artificial Sequence
  Description of Artificial Sequence: Synthetic oligonucleotide
  Antisense strand to SEQ ID NO: 78614
acuacaacagacugcucac

SEQ ID NO: 78696 - RNA, 19 nt, Artificial Sequence
  Description of Artificial Sequence: Synthetic oligonucleotide
  Sense strand starting at position 659 of SEQ ID NO: 986
uguaguugugguuauccaa

SEQ ID NO: 78697 - RNA, 19 nt, Artificial Sequence
  Description of Artificial Sequence: Synthetic oligonucleotide
  Antisense strand to SEQ ID NO: 78616
uuggauaaccacaacuaca

SEQ ID NO: 78698 - RNA, 19 nt, Artificial Sequence
  Description of Artificial Sequence: Synthetic oligonucleotide
  Sense strand starting at position 868 of SEQ ID NO: 986
auacuuaugcuaggagaca

SEQ ID NO: 78699 - RNA, 19 nt, Artificial Sequence
  Description of Artificial Sequence: Synthetic oligonucleotide
  Antisense strand to SEQ ID NO: 78618
ugucuccuagcauaaguau

SEQ ID NO: 78700 - RNA, 19 nt, Artificial Sequence
  Description of Artificial Sequence: Synthetic oligonucleotide
  Sense strand starting at position 889 of SEQ ID NO: 986
cuagccaggagugguuaaa

SEQ ID NO: 78701 - RNA, 19 nt, Artificial Sequence
  Description of Artificial Sequence: Synthetic oligonucleotide
  Antisense strand to SEQ ID NO: 78620
uuuaaccacuccuggcuag

SEQ ID NO: 78702 - RNA, 19 nt, Artificial Sequence
  Description of Artificial Sequence: Synthetic oligonucleotide
  Sense strand starting at position 914 of SEQ ID NO: 986
gguugaaaucccgguuuca

SEQ ID NO: 78703 - RNA, 19 nt, Artificial Sequence
  Description of Artificial Sequence: Synthetic oligonucleotide
  Antisense strand to SEQ ID NO: 78622
ugaaaccgggauuucaacc

SEQ ID NO: 78704 - RNA, 19 nt, Artificial Sequence
  Description of Artificial Sequence: Synthetic oligonucleotide
  Sense strand starting at position 985 of SEQ ID NO: 986
gguuuccucaucugcgaga

SEQ ID NO: 78705 - RNA, 19 nt, Artificial Sequence
  Description of Artificial Sequence: Synthetic oligonucleotide
  Antisense strand to SEQ ID NO: 78624
ucucgcagaugaggaaacc

SEQ ID NO: 78706 - RNA, 19 nt, Artificial Sequence
  Description of Artificial Sequence: Synthetic oligonucleotide
  Sense strand starting at position 1004 of SEQ ID NO: 986
ugaggauaagacugccuua

SEQ ID NO: 78707 - RNA, 19 nt, Artificial Sequence
  Description of Artificial Sequence: Synthetic oligonucleotide
  Antisense strand to SEQ ID NO: 78626
uaaggcagucuuauccuca

SEQ ID NO: 78708 - RNA, 19 nt, Artificial Sequence
  Description of Artificial Sequence: Synthetic oligonucleotide
  Sense strand starting at position 1007 of SEQ ID NO: 986
ggauaagacugccuuacac

SEQ ID NO: 78709 - RNA, 19 nt, Artificial Sequence
  Description of Artificial Sequence: Synthetic oligonucleotide
  Antisense strand to SEQ ID NO: 78628
guguaaggcagucuuaucc

SEQ ID NO: 78710 - RNA, 19 nt, Artificial Sequence
  Description of Artificial Sequence: Synthetic oligonucleotide
  Sense strand starting at position 1032 of SEQ ID NO: 986
cuguauugugcugagaauu

SEQ ID NO: 78711 - RNA, 19 nt, Artificial Sequence
  Description of Artificial Sequence: Synthetic oligonucleotide
  Antisense strand to SEQ ID NO: 78630
aauucucagcacaauacag

SEQ ID NO: 78712 - RNA, 19 nt, Artificial Sequence
  Description of Artificial Sequence: Synthetic oligonucleotide
  Sense strand starting at position 1048 of SEQ ID NO: 986
auuaaaugagaucgcauaa

SEQ ID NO: 78713 - RNA, 19 nt, Artificial Sequence
  Description of Artificial Sequence: Synthetic oligonucleotide
  Antisense strand to SEQ ID NO: 78632
uuaugcgaucucauuuaau

SEQ ID NO: 78714 - RNA, 19 nt, Artificial Sequence
  Description of Artificial Sequence: Synthetic oligonucleotide
  Sense strand starting at position 1077 of SEQ ID NO: 986
guuauuaugucaccuagaa

SEQ ID NO: 78715 - RNA, 19 nt, Artificial Sequence
  Description of Artificial Sequence: Synthetic oligonucleotide
  Antisense strand to SEQ ID NO: 78634
uucuaggugacauaauaac

SEQ ID NO: 78716 - RNA, 19 nt, Artificial Sequence
  Description of Artificial Sequence: Synthetic oligonucleotide
  Sense strand starting at position 1391 of SEQ ID NO: 986
cgcggaucuccggcgugau

SEQ ID NO: 78717 - RNA, 19 nt, Artificial Sequence
  Description of Artificial Sequence: Synthetic oligonucleotide
  Antisense strand to SEQ ID NO: 78636
aucacgccggagauccgcg

SEQ ID NO: 78718 - RNA, 19 nt, Artificial Sequence
  Description of Artificial Sequence: Synthetic oligonucleotide
  Sense strand starting at position 2805 of SEQ ID NO: 986
cccaaauuccuucggaugu

SEQ ID NO: 78719 - RNA, 19 nt, Artificial Sequence
  Description of Artificial Sequence: Synthetic oligonucleotide
  Antisense strand to SEQ ID NO: 78638
acauccgaaggaauuuggg

SEQ ID NO: 78720 - RNA, 19 nt, Artificial Sequence
  Description of Artificial Sequence: Synthetic oligonucleotide
  Sense strand starting at position 3354 of SEQ ID NO: 986
ccguguugcaaacauuagu

SEQ ID NO: 78721 - RNA, 19 nt, Artificial Sequence
  Description of Artificial Sequence: Synthetic oligonucleotide
  Antisense strand to SEQ ID NO: 78640
acuaauguuugcaacacgg

SEQ ID NO: 78722 - RNA, 19 nt, Artificial Sequence
  Description of Artificial Sequence: Synthetic oligonucleotide
  Sense strand starting at position 3357 of SEQ ID NO: 986
uguugcaaacauuaguaua

SEQ ID NO: 78723 - RNA, 19 nt, Artificial Sequence
  Description of Artificial Sequence: Synthetic oligonucleotide
  Antisense strand to SEQ ID NO: 78642
uauacuaauguuugcaaca

SEQ ID NO: 78724 - RNA, 19 nt, Artificial Sequence
  Description of Artificial Sequence: Synthetic oligonucleotide
  Sense strand starting at position 3382 of SEQ ID NO: 986
gcgccauacuuauuuauua

SEQ ID NO: 78725 - RNA, 19 nt, Artificial Sequence
  Description of Artificial Sequence: Synthetic oligonucleotide
  Antisense strand to SEQ ID NO: 78644
uaauaaauaaguauggcgc

SEQ ID NO: 78726 - RNA, 19 nt, Artificial Sequence
  Description of Artificial Sequence: Synthetic oligonucleotide
  Sense strand starting at position 3428 of SEQ ID NO: 986
gacguuaaguagccacaau

SEQ ID NO: 78727 - RNA, 19 nt, Artificial Sequence
  Description of Artificial Sequence: Synthetic oligonucleotide
  Antisense strand to SEQ ID NO: 78646
auuguggcuacuuaacguc

SEQ ID NO: 78728 - RNA, 19 nt, Artificial Sequence
  Description of Artificial Sequence: Synthetic oligonucleotide
  Sense strand starting at position 3593 of SEQ ID NO: 986
guaugcacuuaaccagaua

SEQ ID NO: 78729 - RNA, 19 nt, Artificial Sequence
  Description of Artificial Sequence: Synthetic oligonucleotide
  Antisense strand to SEQ ID NO: 78648
uaucugguuaagugcauac

SEQ ID NO: 78730 - RNA, 19 nt, Artificial Sequence
  Description of Artificial Sequence: Synthetic oligonucleotide
  Sense strand starting at position 3596 of SEQ ID NO: 986
ugcacuuaaccagauaugu

SEQ ID NO: 78731 - RNA, 19 nt, Artificial Sequence
  Description of Artificial Sequence: Synthetic oligonucleotide
  Antisense strand to SEQ ID NO: 78650
acauaucugguuaagugca

SEQ ID NO: 78732 - RNA, 19 nt, Artificial Sequence
  Description of Artificial Sequence: Synthetic oligonucleotide
  Sense strand starting at position 3626 of SEQ ID NO: 986
gauacuuccgacugcauuu

SEQ ID NO: 78733 - RNA, 19 nt, Artificial Sequence
  Description of Artificial Sequence: Synthetic oligonucleotide
  Antisense strand to SEQ ID NO: 78652
aaaugcagucggaaguauc

SEQ ID NO: 78734 - RNA, 19 nt, Artificial Sequence
  Description of Artificial Sequence: Synthetic oligonucleotide
  Sense strand starting at position 3703 of SEQ ID NO: 986
guauguaagcuugaggaca

SEQ ID NO: 78735 - RNA, 19 nt, Artificial Sequence
  Description of Artificial Sequence: Synthetic oligonucleotide
  Antisense strand to SEQ ID NO: 78654
uguccucaagcuuacauac

SEQ ID NO: 78736 - RNA, 19 nt, Artificial Sequence
  Description of Artificial Sequence: Synthetic oligonucleotide
  Sense strand starting at position 3727 of SEQ ID NO: 986
acugucuuacauggacaau

SEQ ID NO: 78737 - RNA, 19 nt, Artificial Sequence
  Description of Artificial Sequence: Synthetic oligonucleotide
  Antisense strand to SEQ ID NO: 78656
auuguccauguaagacagu

SEQ ID NO: 78738 - RNA, 19 nt, Artificial Sequence
  Description of Artificial Sequence: Synthetic oligonucleotide
  Sense strand starting at position 3738 of SEQ ID NO: 986
uggacaaugccuugguguu

SEQ ID NO: 78739 - RNA, 19 nt, Artificial Sequence
  Description of Artificial Sequence: Synthetic oligonucleotide
  Antisense strand to SEQ ID NO: 78658
aacaccaaggcauugucca

SEQ ID NO: 78740 - RNA, 19 nt, Artificial Sequence
  Description of Artificial Sequence: Synthetic oligonucleotide
  Sense strand starting at position 3739 of SEQ ID NO: 986
ggacaaugccuugguguuc

SEQ ID NO: 78741 - RNA, 19 nt, Artificial Sequence
  Description of Artificial Sequence: Synthetic oligonucleotide
  Antisense strand to SEQ ID NO: 78660
gaacaccaaggcauugucc

SEQ ID NO: 78742 - RNA, 19 nt, Artificial Sequence
  Description of Artificial Sequence: Synthetic oligonucleotide
  Sense strand starting at position 3748 of SEQ ID NO: 986
cuugguguucuuggugaca

SEQ ID NO: 78743 - RNA, 19 nt, Artificial Sequence
  Description of Artificial Sequence: Synthetic oligonucleotide
  Antisense strand to SEQ ID NO: 78662
ugucaccaagaacaccaag

SEQ ID NO: 78744 - RNA, 19 nt, Artificial Sequence
  Description of Artificial Sequence: Synthetic oligonucleotide
  Sense strand starting at position 3751 of SEQ ID NO: 986
gguguucuuggugacaaag

SEQ ID NO: 78745 - RNA, 19 nt, Artificial Sequence
  Description of Artificial Sequence: Synthetic oligonucleotide
  Antisense strand to SEQ ID NO: 78664
cuuugucaccaagaacacc

SEQ ID NO: 78746 - RNA, 19 nt, Artificial Sequence
  Description of Artificial Sequence: Synthetic oligonucleotide
  Sense strand starting at position 3777 of SEQ ID NO: 986
gggcuugcccuggagugau

SEQ ID NO: 78747 - RNA, 19 nt, Artificial Sequence
  Description of Artificial Sequence: Synthetic oligonucleotide
  Antisense strand to SEQ ID NO: 78666
aucacuccagggcaagccc

SEQ ID NO: 78748 - RNA, 19 nt, Artificial Sequence
  Description of Artificial Sequence: Synthetic oligonucleotide
  Sense strand starting at position 3788 of SEQ ID NO: 986
ggagugauguggcugugau

SEQ ID NO: 78749 - RNA, 19 nt, Artificial Sequence
  Description of Artificial Sequence: Synthetic oligonucleotide
  Antisense strand to SEQ ID NO: 78668
aucacagccacaucacucc

SEQ ID NO: 78750 - RNA, 19 nt, Artificial Sequence
  Description of Artificial Sequence: Synthetic oligonucleotide
  Sense strand starting at position 3789 of SEQ ID NO: 986
gagugauguggcugugaug

SEQ ID NO: 78751 - RNA, 19 nt, Artificial Sequence
  Description of Artificial Sequence: Synthetic oligonucleotide
  Antisense strand to SEQ ID NO: 78670
caucacagccacaucacuc

SEQ ID NO: 78752 - RNA, 19 nt, Artificial Sequence
  Description of Artificial Sequence: Synthetic oligonucleotide
  Sense strand starting at position 3804 of SEQ ID NO: 986
gauguuagucugcuguguu

SEQ ID NO: 78753 - RNA, 19 nt, Artificial Sequence
  Description of Artificial Sequence: Synthetic oligonucleotide
  Antisense strand to SEQ ID NO: 78672
aacacagcagacuaacauc

SEQ ID NO: 78754 - RNA, 19 nt, Artificial Sequence
  Description of Artificial Sequence: Synthetic oligonucleotide
  Sense strand starting at position 3542 of SEQ ID NO: 987
auugcaauuugugcuauca

SEQ ID NO: 78755 - RNA, 19 nt, Artificial Sequence
  Description of Artificial Sequence: Synthetic oligonucleotide
  Antisense strand to SEQ ID NO: 78674
ugauagcacaaauugcaau

SEQ ID NO: 78756 - RNA, 19 nt, Artificial Sequence
  Description of Artificial Sequence: Synthetic oligonucleotide
  Sense strand starting at position 3434 of SEQ ID NO: 987
ucaggacaaugcuccauaa

SEQ ID NO: 78757 - RNA, 19 nt, Artificial Sequence
  Description of Artificial Sequence: Synthetic oligonucleotide
  Antisense strand to SEQ ID NO: 78676
uuauggagcauuguccuga

SEQ ID NO: 78758 - RNA, 19 nt, Artificial Sequence
  Description of Artificial Sequence: Synthetic oligonucleotide
  Sense strand starting at position 3301 of SEQ ID NO: 987
uagagaacccuuggaaguu

SEQ ID NO: 78759 - RNA, 19 nt, Artificial Sequence
  Description of Artificial Sequence: Synthetic oligonucleotide
  Antisense strand to SEQ ID NO: 78678
aacuuccaaggguucucua

SEQ ID NO: 78760 - RNA, 19 nt, Artificial Sequence
  Description of Artificial Sequence: Synthetic oligonucleotide
  Sense strand starting at position 3243 of SEQ ID NO: 987
guagguagagaaggauauu

SEQ ID NO: 78761 - RNA, 19 nt, Artificial Sequence
  Description of Artificial Sequence: Synthetic oligonucleotide
  Antisense strand to SEQ ID NO: 78680
aauauccuucucuaccuac

SEQ ID NO: 78762 - RNA, 19 nt, Artificial Sequence
  Description of Artificial Sequence: Synthetic oligonucleotide
  Sense strand starting at position 3224 of SEQ ID NO: 987
uugaguuggccuuaaggca

SEQ ID NO: 78763 - RNA, 19 nt, Artificial Sequence
  Description of Artificial Sequence: Synthetic oligonucleotide
  Antisense strand to SEQ ID NO: 78682
ugccuuaaggccaacucaa

SEQ ID NO: 78764 - RNA, 19 nt, Artificial Sequence
  Description of Artificial Sequence: Synthetic oligonucleotide
  Sense strand starting at position 3206 of SEQ ID NO: 987
acucuuuacguggauacau

SEQ ID NO: 78765 - RNA, 19 nt, Artificial Sequence
  Description of Artificial Sequence: Synthetic oligonucleotide
  Antisense strand to SEQ ID NO: 78684
auguauccacguaaagagu

SEQ ID NO: 78766 - RNA, 19 nt, Artificial Sequence
  Description of Artificial Sequence: Synthetic oligonucleotide
  Sense strand starting at position 3145 of SEQ ID NO: 987
cuggaaugauggccauaaa

SEQ ID NO: 78767 - RNA, 19 nt, Artificial Sequence
  Description of Artificial Sequence: Synthetic oligonucleotide
  Antisense strand to SEQ ID NO: 78686
uuuauggccaucauuccag

SEQ ID NO: 78768 - RNA, 19 nt, Artificial Sequence
  Description of Artificial Sequence: Synthetic oligonucleotide
  Sense strand starting at position 3060 of SEQ ID NO: 987
ugaagugaauagcugaauu

SEQ ID NO: 78769 - RNA, 19 nt, Artificial Sequence
  Description of Artificial Sequence: Synthetic oligonucleotide
  Antisense strand to SEQ ID NO: 78688
aauucagcuauucacuuca

SEQ ID NO: 78770 - RNA, 19 nt, Artificial Sequence
  Description of Artificial Sequence: Synthetic oligonucleotide
  Sense strand starting at position 2952 of SEQ ID NO: 987
ggauguggucaugagugga

SEQ ID NO: 78771 - RNA, 19 nt, Artificial Sequence
  Description of Artificial Sequence: Synthetic oligonucleotide
  Antisense strand to SEQ ID NO: 78690
uccacucaugaccacaucc

SEQ ID NO: 78772 - RNA, 19 nt, Artificial Sequence
  Description of Artificial Sequence: Synthetic oligonucleotide
  Sense strand starting at position 2949 of SEQ ID NO: 987
gcaggauguggucaugagu

SEQ ID NO: 78773 - RNA, 19 nt, Artificial Sequence
  Description of Artificial Sequence: Synthetic oligonucleotide
  Antisense strand to SEQ ID NO: 78692
acucaugaccacauccugc

SEQ ID NO: 78774 - RNA, 19 nt, Artificial Sequence
  Description of Artificial Sequence: Synthetic oligonucleotide
  Sense strand starting at position 2861 of SEQ ID NO: 987
gcccuuuagcgugcuguaa

SEQ ID NO: 78775 - RNA, 19 nt, Artificial Sequence
  Description of Artificial Sequence: Synthetic oligonucleotide
  Antisense strand to SEQ ID NO: 78694
uuacagcacgcuaaagggc

SEQ ID NO: 78776 - RNA, 19 nt, Artificial Sequence
  Description of Artificial Sequence: Synthetic oligonucleotide
  Sense strand starting at position 2801 of SEQ ID NO: 987
ugaggagucuguuuaaucc

SEQ ID NO: 78777 - RNA, 19 nt, Artificial Sequence
  Description of Artificial Sequence: Synthetic oligonucleotide
  Antisense strand to SEQ ID NO: 78696
ggauuaaacagacuccuca

SEQ ID NO: 78778 - RNA, 19 nt, Artificial Sequence
  Description of Artificial Sequence: Synthetic oligonucleotide
  Sense strand starting at position 2703 of SEQ ID NO: 987
gcauuauuccuggauaaac

SEQ ID NO: 78779 - RNA, 19 nt, Artificial Sequence
  Description of Artificial Sequence: Synthetic oligonucleotide
  Antisense strand to SEQ ID NO: 78698
guuuauccaggaauaaugc

SEQ ID NO: 78780 - RNA, 19 nt, Artificial Sequence
  Description of Artificial Sequence: Synthetic oligonucleotide
  Sense strand starting at position 2702 of SEQ ID NO: 987
ugcauuauuccuggauaaa

SEQ ID NO: 78781 - RNA, 19 nt, Artificial Sequence
  Description of Artificial Sequence: Synthetic oligonucleotide
  Antisense strand to SEQ ID NO: 78700
uuuauccaggaauaaugca

SEQ ID NO: 78782 - RNA, 19 nt, Artificial Sequence
  Description of Artificial Sequence: Synthetic oligonucleotide
  Sense strand starting at position 2648 of SEQ ID NO: 987
ccaugacuagguuacuuua

SEQ ID NO: 78783 - RNA, 19 nt, Artificial Sequence
  Description of Artificial Sequence: Synthetic oligonucleotide
  Antisense strand to SEQ ID NO: 78702
uaaaguaaccuagucaugg

SEQ ID NO: 78784 - RNA, 19 nt, Artificial Sequence
  Description of Artificial Sequence: Synthetic oligonucleotide
  Sense strand starting at position 2559 of SEQ ID NO: 987
cugggcuuuccagaucaga

SEQ ID NO: 78785 - RNA, 19 nt, Artificial Sequence
  Description of Artificial Sequence: Synthetic oligonucleotide
  Antisense strand to SEQ ID NO: 78704
ucugaucuggaaagcccag

SEQ ID NO: 78786 - RNA, 19 nt, Artificial Sequence
  Description of Artificial Sequence: Synthetic oligonucleotide
  Sense strand starting at position 2496 of SEQ ID NO: 987
ugaaaucgcuauuuguuua

SEQ ID NO: 78787 - RNA, 19 nt, Artificial Sequence
  Description of Artificial Sequence: Synthetic oligonucleotide
  Antisense strand to SEQ ID NO: 78706
uaaacaaauagcgauuuca

SEQ ID NO: 78788 - RNA, 19 nt, Artificial Sequence
  Description of Artificial Sequence: Synthetic oligonucleotide
  Sense strand starting at position 2315 of SEQ ID NO: 987
acaugugagucauuagaga

SEQ ID NO: 78789 - RNA, 19 nt, Artificial Sequence
  Description of Artificial Sequence: Synthetic oligonucleotide
  Antisense strand to SEQ ID NO: 78708
ucucuaaugacucacaugu

SEQ ID NO: 78790 - RNA, 19 nt, Artificial Sequence
  Description of Artificial Sequence: Synthetic oligonucleotide
  Sense strand starting at position 2311 of SEQ ID NO: 987
acuuacaugugagucauua

SEQ ID NO: 78791 - RNA, 19 nt, Artificial Sequence
  Description of Artificial Sequence: Synthetic oligonucleotide
  Antisense strand to SEQ ID NO: 78710
uaaugacucacauguaagu

SEQ ID NO: 78792 - RNA, 19 nt, Artificial Sequence
  Description of Artificial Sequence: Synthetic oligonucleotide
  Sense strand starting at position 2148 of SEQ ID NO: 987
ugaugugcacacugaaauc

SEQ ID NO: 78793 - RNA, 19 nt, Artificial Sequence
  Description of Artificial Sequence: Synthetic oligonucleotide
  Antisense strand to SEQ ID NO: 78712
gauuucagugugcacauca

SEQ ID NO: 78794 - RNA, 19 nt, Artificial Sequence
  Description of Artificial Sequence: Synthetic oligonucleotide
  Sense strand starting at position 2145 of SEQ ID NO: 987
gggugaugugcacacugaa

SEQ ID NO: 78795 - RNA, 19 nt, Artificial Sequence
  Description of Artificial Sequence: Synthetic oligonucleotide
  Antisense strand to SEQ ID NO: 78714
uucagugugcacaucaccc

SEQ ID NO: 78796 - RNA, 19 nt, Artificial Sequence
  Description of Artificial Sequence: Synthetic oligonucleotide
  Sense strand starting at position 2118 of SEQ ID NO: 987
cuuuaauggguacaguuaa

SEQ ID NO: 78797 - RNA, 19 nt, Artificial Sequence
  Description of Artificial Sequence: Synthetic oligonucleotide
  Antisense strand to SEQ ID NO: 78716
uuaacuguacccauuaaag

SEQ ID NO: 78798 - RNA, 19 nt, Artificial Sequence
  Description of Artificial Sequence: Synthetic oligonucleotide
  Sense strand starting at position 2036 of SEQ ID NO: 987
guuucuguuagucagagaa

SEQ ID NO: 78799 - RNA, 19 nt, Artificial Sequence
  Description of Artificial Sequence: Synthetic oligonucleotide
  Antisense strand to SEQ ID NO: 78718
uucucugacuaacagaaac

SEQ ID NO: 78800 - RNA, 19 nt, Artificial Sequence
  Description of Artificial Sequence: Synthetic oligonucleotide
  Sense strand starting at position 2027 of SEQ ID NO: 987
uuagcuuucguuucuguua

SEQ ID NO: 78801 - RNA, 19 nt, Artificial Sequence
  Description of Artificial Sequence: Synthetic oligonucleotide
  Antisense strand to SEQ ID NO: 78720
uaacagaaacgaaagcuaa

SEQ ID NO: 78802 - RNA, 19 nt, Artificial Sequence
  Description of Artificial Sequence: Synthetic oligonucleotide
  Sense strand starting at position 1724 of SEQ ID NO: 987
guacucaccucacuggaaa

SEQ ID NO: 78803 - RNA, 19 nt, Artificial Sequence
  Description of Artificial Sequence: Synthetic oligonucleotide
  Antisense strand to SEQ ID NO: 78722
uuuccagugaggugaguac

SEQ ID NO: 78804 - RNA, 19 nt, Artificial Sequence
  Description of Artificial Sequence: Synthetic oligonucleotide
  Sense strand starting at position 1692 of SEQ ID NO: 987
ggaacaagaucauauuuac

SEQ ID NO: 78805 - RNA, 19 nt, Artificial Sequence
  Description of Artificial Sequence: Synthetic oligonucleotide
  Antisense strand to SEQ ID NO: 78724
guaaauaugaucuuguucc

SEQ ID NO: 78806 - RNA, 19 nt, Artificial Sequence
  Description of Artificial Sequence: Synthetic oligonucleotide
  Sense strand starting at position 1537 of SEQ ID NO: 987
auagaagaugccuguuauc

SEQ ID NO: 78807 - RNA, 19 nt, Artificial Sequence
  Description of Artificial Sequence: Synthetic oligonucleotide
  Antisense strand to SEQ ID NO: 78726
gauaacaggcaucuucuau

SEQ ID NO: 78808 - RNA, 19 nt, Artificial Sequence
  Description of Artificial Sequence: Synthetic oligonucleotide
  Sense strand starting at position 1536 of SEQ ID NO: 987
aauagaagaugccuguuau

SEQ ID NO: 78809 - RNA, 19 nt, Artificial Sequence
  Description of Artificial Sequence: Synthetic oligonucleotide
  Antisense strand to SEQ ID NO: 78728
auaacaggcaucuucuauu

SEQ ID NO: 78810 - RNA, 19 nt, Artificial Sequence
  Description of Artificial Sequence: Synthetic oligonucleotide
  Sense strand starting at position 1523 of SEQ ID NO: 987
ucaguugugguggaauaga

SEQ ID NO: 78811 - RNA, 19 nt, Artificial Sequence
  Description of Artificial Sequence: Synthetic oligonucleotide
  Antisense strand to SEQ ID NO: 78730
ucuauuccaccacaacuga

SEQ ID NO: 78812 - RNA, 19 nt, Artificial Sequence
  Description of Artificial Sequence: Synthetic oligonucleotide
  Sense strand starting at position 1455 of SEQ ID NO: 987
caguauacacucggauaau

SEQ ID NO: 78813 - RNA, 19 nt, Artificial Sequence
  Description of Artificial Sequence: Synthetic oligonucleotide
  Antisense strand to SEQ ID NO: 78732
auuauccgaguguauacug

SEQ ID NO: 78814 - RNA, 19 nt, Artificial Sequence
  Description of Artificial Sequence: Synthetic oligonucleotide
  Sense strand starting at position 1391 of SEQ ID NO: 987
ccgaguuuccaacacuucu

SEQ ID NO: 78815 - RNA, 19 nt, Artificial Sequence
  Description of Artificial Sequence: Synthetic oligonucleotide
  Antisense strand to SEQ ID NO: 78734
agaaguguuggaaacucgg

SEQ ID NO: 78816 - RNA, 19 nt, Artificial Sequence
  Description of Artificial Sequence: Synthetic oligonucleotide
  Sense strand starting at position 1358 of SEQ ID NO: 987
ucaugucacuaucuugaga

SEQ ID NO: 78817 - RNA, 19 nt, Artificial Sequence
  Description of Artificial Sequence: Synthetic oligonucleotide
  Antisense strand to SEQ ID NO: 78736
ucucaagauagugacauga

SEQ ID NO: 78818 - RNA, 19 nt, Artificial Sequence
  Description of Artificial Sequence: Synthetic oligonucleotide
  Sense strand starting at position 1257 of SEQ ID NO: 987
guacauuuguucuuauguu

SEQ ID NO: 78819 - RNA, 19 nt, Artificial Sequence
  Description of Artificial Sequence: Synthetic oligonucleotide
  Antisense strand to SEQ ID NO: 78738
aacauaagaacaaauguac

SEQ ID NO: 78820 - RNA, 19 nt, Artificial Sequence
  Description of Artificial Sequence: Synthetic oligonucleotide
  Sense strand starting at position 1255 of SEQ ID NO: 987
guguacauuuguucuuaug

SEQ ID NO: 78821 - RNA, 19 nt, Artificial Sequence
  Description of Artificial Sequence: Synthetic oligonucleotide
  Antisense strand to SEQ ID NO: 78740
cauaagaacaaauguacac

SEQ ID NO: 78822 - RNA, 19 nt, Artificial Sequence
  Description of Artificial Sequence: Synthetic oligonucleotide
  Sense strand starting at position 1254 of SEQ ID NO: 987
uguguacauuuguucuuau

SEQ ID NO: 78823 - RNA, 19 nt, Artificial Sequence
  Description of Artificial Sequence: Synthetic oligonucleotide
  Antisense strand to SEQ ID NO: 78742
auaagaacaaauguacaca

SEQ ID NO: 78824 - RNA, 19 nt, Artificial Sequence
  Description of Artificial Sequence: Synthetic oligonucleotide
  Sense strand starting at position 1253 of SEQ ID NO: 987
cuguguacauuuguucuua

SEQ ID NO: 78825 - RNA, 19 nt, Artificial Sequence
  Description of Artificial Sequence: Synthetic oligonucleotide
  Antisense strand to SEQ ID NO: 78744
uaagaacaaauguacacag

SEQ ID NO: 78826 - RNA, 19 nt, Artificial Sequence
  Description of Artificial Sequence: Synthetic oligonucleotide
  Sense strand starting at position 1152 of SEQ ID NO: 987
gcagaauggagcuaaagua

SEQ ID NO: 78827 - RNA, 19 nt, Artificial Sequence
  Description of Artificial Sequence: Synthetic oligonucleotide
  Antisense strand to SEQ ID NO: 78746
uacuuuagcuccauucugc

SEQ ID NO: 78828 - RNA, 19 nt, Artificial Sequence
  Description of Artificial Sequence: Synthetic oligonucleotide
  Sense strand starting at position 1103 of SEQ ID NO: 987
ggcagagaguaauuccaaa

SEQ ID NO: 78829 - RNA, 19 nt, Artificial Sequence
  Description of Artificial Sequence: Synthetic oligonucleotide
  Antisense strand to SEQ ID NO: 78748
uuuggaauuacucucugcc

SEQ ID NO: 78830 - RNA, 19 nt, Artificial Sequence
  Description of Artificial Sequence: Synthetic oligonucleotide
  Sense strand starting at position 457 of SEQ ID NO: 987
acauguaugugauugugag

SEQ ID NO: 78831 - RNA, 19 nt, Artificial Sequence
  Description of Artificial Sequence: Synthetic oligonucleotide
  Antisense strand to SEQ ID NO: 78750
cucacaaucacauacaugu

SEQ ID NO: 78832 - RNA, 19 nt, Artificial Sequence
  Description of Artificial Sequence: Synthetic oligonucleotide
  Sense strand starting at position 3 of SEQ ID NO: 987
gacagcagauuguuaauua

SEQ ID NO: 78833 - RNA, 19 nt, Artificial Sequence
  Description of Artificial Sequence: Synthetic oligonucleotide
  Antisense strand to SEQ ID NO: 78752
uaauuaacaaucugcuguc

SEQ ID NO: 78834 - RNA, 19 nt, Artificial Sequence
  Description of Artificial Sequence: Synthetic oligonucleotide
  Sense strand starting at position 3472 of SEQ ID NO: 988
uacaguaaaucgguacaga

SEQ ID NO: 78835 - RNA, 19 nt, Artificial Sequence
  Description of Artificial Sequence: Synthetic oligonucleotide
  Antisense strand to SEQ ID NO: 78754
ucuguaccgauuuacugua

SEQ ID NO: 78836 - RNA, 19 nt, Artificial Sequence
  Description of Artificial Sequence: Synthetic oligonucleotide
  Sense strand starting at position 3246 of SEQ ID NO: 988
ucuuauaagaugugauggu

SEQ ID NO: 78837 - RNA, 19 nt, Artificial Sequence
  Description of Artificial Sequence: Synthetic oligonucleotide
  Antisense strand to SEQ ID NO: 78756
accaucacaucuuauaaga

SEQ ID NO: 78838 - RNA, 19 nt, Artificial Sequence
  Description of Artificial Sequence: Synthetic oligonucleotide
  Sense strand starting at position 3244 of SEQ ID NO: 988
guucuuauaagaugugaug

SEQ ID NO: 78839 - RNA, 19 nt, Artificial Sequence
  Description of Artificial Sequence: Synthetic oligonucleotide
  Antisense strand to SEQ ID NO: 78758
caucacaucuuauaagaac

SEQ ID NO: 78840 - RNA, 19 nt, Artificial Sequence
  Description of Artificial Sequence: Synthetic oligonucleotide
  Sense strand starting at position 3232 of SEQ ID NO: 988
cauagugaguuaguucuua

SEQ ID NO: 78841 - RNA, 19 nt, Artificial Sequence
  Description of Artificial Sequence: Synthetic oligonucleotide
  Antisense strand to SEQ ID NO: 78760
uaagaacuaacucacuaug

SEQ ID NO: 78842 - RNA, 19 nt, Artificial Sequence
  Description of Artificial Sequence: Synthetic oligonucleotide
  Sense strand starting at position 3164 of SEQ ID NO: 988
gaggauagcagugaacagu

SEQ ID NO: 78843 - RNA, 19 nt, Artificial Sequence
  Description of Artificial Sequence: Synthetic oligonucleotide
  Antisense strand to SEQ ID NO: 78762
acuguucacugcuauccuc

SEQ ID NO: 78844 - RNA, 19 nt, Artificial Sequence
  Description of Artificial Sequence: Synthetic oligonucleotide
  Sense strand starting at position 3147 of SEQ ID NO: 988
cagaguaaaguuuggagga

SEQ ID NO: 78845 - RNA, 19 nt, Artificial Sequence
  Description of Artificial Sequence: Synthetic oligonucleotide
  Antisense strand to SEQ ID NO: 78764
uccuccaaacuuuacucug

SEQ ID NO: 78846 - RNA, 19 nt, Artificial Sequence
  Description of Artificial Sequence: Synthetic oligonucleotide
  Sense strand starting at position 3140 of SEQ ID NO: 988
guuagugcagaguaaaguu

SEQ ID NO: 78847 - RNA, 19 nt, Artificial Sequence
  Description of Artificial Sequence: Synthetic oligonucleotide
  Antisense strand to SEQ ID NO: 78766
aacuuuacucugcacuaac

SEQ ID NO: 78848 - RNA, 19 nt, Artificial Sequence
  Description of Artificial Sequence: Synthetic oligonucleotide
  Sense strand starting at position 3137 of SEQ ID NO: 988
augguuagugcagaguaaa

SEQ ID NO: 78849 - RNA, 19 nt, Artificial Sequence
  Description of Artificial Sequence: Synthetic oligonucleotide
  Antisense strand to SEQ ID NO: 78768
uuuacucugcacuaaccau

SEQ ID NO: 78850 - RNA, 19 nt, Artificial Sequence
  Description of Artificial Sequence: Synthetic oligonucleotide
  Sense strand starting at position 3066 of SEQ ID NO: 988
gugcuuuauaagcagagag

SEQ ID NO: 78851 - RNA, 19 nt, Artificial Sequence
  Description of Artificial Sequence: Synthetic oligonucleotide
  Antisense strand to SEQ ID NO: 78770
cucucugcuuauaaagcac

SEQ ID NO: 78852 - RNA, 19 nt, Artificial Sequence
  Description of Artificial Sequence: Synthetic oligonucleotide
  Sense strand starting at position 3065 of SEQ ID NO: 988
agugcuuuauaagcagaga

SEQ ID NO: 78853 - RNA, 19 nt, Artificial Sequence
  Description of Artificial Sequence: Synthetic oligonucleotide
  Antisense strand to SEQ ID NO: 78772
ucucugcuuauaaagcacu

SEQ ID NO: 78854 - RNA, 19 nt, Artificial Sequence
  Description of Artificial Sequence: Synthetic oligonucleotide
  Sense strand starting at position 3003 of SEQ ID NO: 988
gaugucauuggagaagugu

SEQ ID NO: 78855 - RNA, 19 nt, Artificial Sequence
  Description of Artificial Sequence: Synthetic oligonucleotide
  Antisense strand to SEQ ID NO: 78774
acacuucuccaaugacauc

SEQ ID NO: 78856 - RNA, 19 nt, Artificial Sequence
  Description of Artificial Sequence: Synthetic oligonucleotide
  Sense strand starting at position 2989 of SEQ ID NO: 988
ggucuaucuaaugagaugu

SEQ ID NO: 78857 - RNA, 19 nt, Artificial Sequence
  Description of Artificial Sequence: Synthetic oligonucleotide
  Antisense strand to SEQ ID NO: 78776
acaucucauuagauagacc

SEQ ID NO: 78858 - RNA, 19 nt, Artificial Sequence
  Description of Artificial Sequence: Synthetic oligonucleotide
  Sense strand starting at position 2824 of SEQ ID NO: 988
cauguaucucguguguuua

SEQ ID NO: 78859 - RNA, 19 nt, Artificial Sequence
  Description of Artificial Sequence: Synthetic oligonucleotide
  Antisense strand to SEQ ID NO: 78778
uaaacacacgagauacaug

SEQ ID NO: 78860 - RNA, 19 nt, Artificial Sequence
  Description of Artificial Sequence: Synthetic oligonucleotide
  Sense strand starting at position 2800 of SEQ ID NO: 988
agacauuauuugcaagaca

SEQ ID NO: 78861 - RNA, 19 nt, Artificial Sequence
  Description of Artificial Sequence: Synthetic oligonucleotide
  Antisense strand to SEQ ID NO: 78780
ugucuugcaaauaaugucu

SEQ ID NO: 78862 - RNA, 19 nt, Artificial Sequence
  Description of Artificial Sequence: Synthetic oligonucleotide
  Sense strand starting at position 2763 of SEQ ID NO: 988
gguauuauauacuuggcuu

SEQ ID NO: 78863 - RNA, 19 nt, Artificial Sequence
  Description of Artificial Sequence: Synthetic oligonucleotide
  Antisense strand to SEQ ID NO: 78782
aagccaaguauauaauacc

SEQ ID NO: 78864 - RNA, 19 nt, Artificial Sequence
  Description of Artificial Sequence: Synthetic oligonucleotide
  Sense strand starting at position 2643 of SEQ ID NO: 988
auaccugacugguucuaaa

SEQ ID NO: 78865 - RNA, 19 nt, Artificial Sequence
  Description of Artificial Sequence: Synthetic oligonucleotide
  Antisense strand to SEQ ID NO: 78784
uuuagaaccagucagguau

SEQ ID NO: 78866 - RNA, 19 nt, Artificial Sequence
  Description of Artificial Sequence: Synthetic oligonucleotide
  Sense strand starting at position 2569 of SEQ ID NO: 988
uuaauuguugaacgugaau

SEQ ID NO: 78867 - RNA, 19 nt, Artificial Sequence
  Description of Artificial Sequence: Synthetic oligonucleotide
  Antisense strand to SEQ ID NO: 78786
auucacguucaacaauuaa

SEQ ID NO: 78868 - RNA, 19 nt, Artificial Sequence
  Description of Artificial Sequence: Synthetic oligonucleotide
  Sense strand starting at position 2502 of SEQ ID NO: 988
guguccuauaggcagaauu

SEQ ID NO: 78869 - RNA, 19 nt, Artificial Sequence
  Description of Artificial Sequence: Synthetic oligonucleotide
  Antisense strand to SEQ ID NO: 78788
aauucugccuauaggacac

SEQ ID NO: 78870 - RNA, 19 nt, Artificial Sequence
  Description of Artificial Sequence: Synthetic oligonucleotide
  Sense strand starting at position 2494 of SEQ ID NO: 988
auaaauucguguccuauag

SEQ ID NO: 78871 - RNA, 19 nt, Artificial Sequence
  Description of Artificial Sequence: Synthetic oligonucleotide
  Antisense strand to SEQ ID NO: 78790
cuauaggacacgaauuuau

SEQ ID NO: 78872 - RNA, 19 nt, Artificial Sequence
  Description of Artificial Sequence: Synthetic oligonucleotide
  Sense strand starting at position 2327 of SEQ ID NO: 988
ccuuauguagaauguuauu

SEQ ID NO: 78873 - RNA, 19 nt, Artificial Sequence
  Description of Artificial Sequence: Synthetic oligonucleotide
  Antisense strand to SEQ ID NO: 78792
aauaacauucuacauaagg

SEQ ID NO: 78874 - RNA, 19 nt, Artificial Sequence
  Description of Artificial Sequence: Synthetic oligonucleotide
  Sense strand starting at position 2324 of SEQ ID NO: 988
guuccuuauguagaauguu

SEQ ID NO: 78875 - RNA, 19 nt, Artificial Sequence
  Description of Artificial Sequence: Synthetic oligonucleotide
  Antisense strand to SEQ ID NO: 78794
aacauucuacauaaggaac

SEQ ID NO: 78876 - RNA, 19 nt, Artificial Sequence
  Description of Artificial Sequence: Synthetic oligonucleotide
  Sense strand starting at position 2321 of SEQ ID NO: 988
auaguuccuuauguagaau

SEQ ID NO: 78877 - RNA, 19 nt, Artificial Sequence
  Description of Artificial Sequence: Synthetic oligonucleotide
  Antisense strand to SEQ ID NO: 78796
auucuacauaaggaacuau

SEQ ID NO: 78878 - RNA, 19 nt, Artificial Sequence
  Description of Artificial Sequence: Synthetic oligonucleotide
  Sense strand starting at position 2318 of SEQ ID NO: 988
aguauaguuccuuauguag

SEQ ID NO: 78879 - RNA, 19 nt, Artificial Sequence
  Description of Artificial Sequence: Synthetic oligonucleotide
  Antisense strand to SEQ ID NO: 78798
cuacauaaggaacuauacu

SEQ ID NO: 78880 - RNA, 19 nt, Artificial Sequence
  Description of Artificial Sequence: Synthetic oligonucleotide
  Sense strand starting at position 1844 of SEQ ID NO: 988
gacuaaugcuagcuaggaa

SEQ ID NO: 78881 - RNA, 19 nt, Artificial Sequence
  Description of Artificial Sequence: Synthetic oligonucleotide
  Antisense strand to SEQ ID NO: 78800
uuccuagcuagcauuaguc

SEQ ID NO: 78882 - RNA, 19 nt, Artificial Sequence
  Description of Artificial Sequence: Synthetic oligonucleotide
  Sense strand starting at position 1813 of SEQ ID NO: 988
gugacacugucaccugaga

SEQ ID NO: 78883 - RNA, 19 nt, Artificial Sequence
  Description of Artificial Sequence: Synthetic oligonucleotide
  Antisense strand to SEQ ID NO: 78802
ucucaggugacagugucac

SEQ ID NO: 78884 - RNA, 19 nt, Artificial Sequence
  Description of Artificial Sequence: Synthetic oligonucleotide
  Sense strand starting at position 1593 of SEQ ID NO: 988
gccauacuucuugaucuag

SEQ ID NO: 78885 - RNA, 19 nt, Artificial Sequence
  Description of Artificial Sequence: Synthetic oligonucleotide
  Antisense strand to SEQ ID NO: 78804
cuagaucaagaaguauggc

SEQ ID NO: 78886 - RNA, 19 nt, Artificial Sequence
  Description of Artificial Sequence: Synthetic oligonucleotide
  Sense strand starting at position 976 of SEQ ID NO: 988
ugaccaugguugucucuua

SEQ ID NO: 78887 - RNA, 19 nt, Artificial Sequence
  Description of Artificial Sequence: Synthetic oligonucleotide
  Antisense strand to SEQ ID NO: 78806
uaagagacaaccaugguca

SEQ ID NO: 78888 - RNA, 19 nt, Artificial Sequence
  Description of Artificial Sequence: Synthetic oligonucleotide
  Sense strand starting at position 933 of SEQ ID NO: 988
uaaaucuuacguuaagggu

SEQ ID NO: 78889 - RNA, 19 nt, Artificial Sequence
  Description of Artificial Sequence: Synthetic oligonucleotide
  Antisense strand to SEQ ID NO: 78808
acccuuaacguaagauuua

SEQ ID NO: 78890 - RNA, 19 nt, Artificial Sequence
  Description of Artificial Sequence: Synthetic oligonucleotide
  Sense strand starting at position 931 of SEQ ID NO: 988
gauaaaucuuacguuaagg

SEQ ID NO: 78891 - RNA, 19 nt, Artificial Sequence
  Description of Artificial Sequence: Synthetic oligonucleotide
  Antisense strand to SEQ ID NO: 78810
ccuuaacguaagauuuauc

SEQ ID NO: 78892 - RNA, 19 nt, Artificial Sequence
  Description of Artificial Sequence: Synthetic oligonucleotide
  Sense strand starting at position 826 of SEQ ID NO: 988
gaaauaaacugguuucguu

SEQ ID NO: 78893 - RNA, 19 nt, Artificial Sequence
  Description of Artificial Sequence: Synthetic oligonucleotide
  Antisense strand to SEQ ID NO: 78812
aacgaaaccaguuuauuuc

SEQ ID NO: 78894 - RNA, 19 nt, Artificial Sequence
  Description of Artificial Sequence: Synthetic oligonucleotide
  Sense strand starting at position 783 of SEQ ID NO: 988
acagcaugucccugaauaa

SEQ ID NO: 78895 - RNA, 19 nt, Artificial Sequence
  Description of Artificial Sequence: Synthetic oligonucleotide
  Antisense strand to SEQ ID NO: 78814
uuauucagggacaugcugu

SEQ ID NO: 78896 - RNA, 19 nt, Artificial Sequence
  Description of Artificial Sequence: Synthetic oligonucleotide
  Sense strand starting at position 718 of SEQ ID NO: 988
augguaagucgucacuuaa

SEQ ID NO: 78897 - RNA, 19 nt, Artificial Sequence
  Description of Artificial Sequence: Synthetic oligonucleotide
  Antisense strand to SEQ ID NO: 78816
uuaagugacgacuuaccau

SEQ ID NO: 78898 - RNA, 19 nt, Artificial Sequence
  Description of Artificial Sequence: Synthetic oligonucleotide
  Sense strand starting at position 546 of SEQ ID NO: 988
caaugaguuguguaauuau

SEQ ID NO: 78899 - RNA, 19 nt, Artificial Sequence
  Description of Artificial Sequence: Synthetic oligonucleotide
  Antisense strand to SEQ ID NO: 78818
auaauuacacaacucauug

SEQ ID NO: 78900 - RNA, 19 nt, Artificial Sequence
  Description of Artificial Sequence: Synthetic oligonucleotide
  Sense strand starting at position 537 of SEQ ID NO: 988
ucuacauuacaaugaguug

SEQ ID NO: 78901 - RNA, 19 nt, Artificial Sequence
  Description of Artificial Sequence: Synthetic oligonucleotide
  Antisense strand to SEQ ID NO: 78820
caacucauuguaauguaga

SEQ ID NO: 78902 - RNA, 19 nt, Artificial Sequence
  Description of Artificial Sequence: Synthetic oligonucleotide
  Sense strand starting at position 431 of SEQ ID NO: 988
cugcaugcuccuuaugaua

SEQ ID NO: 78903 - RNA, 19 nt, Artificial Sequence
  Description of Artificial Sequence: Synthetic oligonucleotide
  Antisense strand to SEQ ID NO: 78822
uaucauaaggagcaugcag

SEQ ID NO: 78904 - RNA, 19 nt, Artificial Sequence
  Description of Artificial Sequence: Synthetic oligonucleotide
  Sense strand starting at position 407 of SEQ ID NO: 988
ugaauugugcaugagggau

SEQ ID NO: 78905 - RNA, 19 nt, Artificial Sequence
  Description of Artificial Sequence: Synthetic oligonucleotide
  Antisense strand to SEQ ID NO: 78824
aucccucaugcacaauuca

SEQ ID NO: 78906 - RNA, 19 nt, Artificial Sequence
  Description of Artificial Sequence: Synthetic oligonucleotide
  Sense strand starting at position 406 of SEQ ID NO: 988
augaauugugcaugaggga

SEQ ID NO: 78907 - RNA, 19 nt, Artificial Sequence
  Description of Artificial Sequence: Synthetic oligonucleotide
  Antisense strand to SEQ ID NO: 78826
ucccucaugcacaauucau

SEQ ID NO: 78908 - RNA, 19 nt, Artificial Sequence
  Description of Artificial Sequence: Synthetic oligonucleotide
  Sense strand starting at position 109 of SEQ ID NO: 988
ugucaaagggcauaaaguu

SEQ ID NO: 78909 - RNA, 19 nt, Artificial Sequence
  Description of Artificial Sequence: Synthetic oligonucleotide
  Antisense strand to SEQ ID NO: 78828
aacuuuaugcccuuugaca

SEQ ID NO: 78910 - RNA, 19 nt, Artificial Sequence
  Description of Artificial Sequence: Synthetic oligonucleotide
  Sense strand starting at position 52 of SEQ ID NO: 988
cagaguuagaauggugguu

SEQ ID NO: 78911 - RNA, 19 nt, Artificial Sequence
  Description of Artificial Sequence: Synthetic oligonucleotide
  Antisense strand to SEQ ID NO: 78830
aaccaccauucuaacucug

SEQ ID NO: 78912 - RNA, 19 nt, Artificial Sequence
  Description of Artificial Sequence: Synthetic oligonucleotide
  Sense strand starting at position 12 of SEQ ID NO: 988
cgcuuauaugaggaaucua

SEQ ID NO: 78913 - RNA, 19 nt, Artificial Sequence
  Description of Artificial Sequence: Synthetic oligonucleotide
  Antisense strand to SEQ ID NO: 78832
uagauuccucauauaagcg

SEQ ID NO: 78914 - RNA, 19 nt, Artificial Sequence
  Description of Artificial Sequence: Synthetic oligonucleotide
  Sense strand starting at position 3624 of SEQ ID NO: 989
gaguauaaauuuggagaga

SEQ ID NO: 78915 - RNA, 19 nt, Artificial Sequence
  Description of Artificial Sequence: Synthetic oligonucleotide
  Antisense strand to SEQ ID NO: 78834
ucucuccaaauuuauacuc

SEQ ID NO: 78916 - RNA, 19 nt, Artificial Sequence
  Description of Artificial Sequence: Synthetic oligonucleotide
  Sense strand starting at position 3599 of SEQ ID NO: 989
uccagcaauguaugcuaaa

SEQ ID NO: 78917 - RNA, 19 nt, Artificial Sequence
  Description of Artificial Sequence: Synthetic oligonucleotide
  Antisense strand to SEQ ID NO: 78836
uuuagcauacauugcugga

SEQ ID NO: 78918 - RNA, 19 nt, Artificial Sequence
  Description of Artificial Sequence: Synthetic oligonucleotide
  Sense strand starting at position 3592 of SEQ ID NO: 989
ggcaucauccagcaaugua

SEQ ID NO: 78919 - RNA, 19 nt, Artificial Sequence
  Description of Artificial Sequence: Synthetic oligonucleotide
  Antisense strand to SEQ ID NO: 78838
uacauugcuggaugaugcc

SEQ ID NO: 78920 - RNA, 19 nt, Artificial Sequence
  Description of Artificial Sequence: Synthetic oligonucleotide
  Sense strand starting at position 3560 of SEQ ID NO: 989
uuagguaaacucuauagua

SEQ ID NO: 78921 - RNA, 19 nt, Artificial Sequence
  Description of Artificial Sequence: Synthetic oligonucleotide
  Antisense strand to SEQ ID NO: 78840
uacuauagaguuuaccuaa

SEQ ID NO: 78922 - RNA, 19 nt, Artificial Sequence
  Description of Artificial Sequence: Synthetic oligonucleotide
  Sense strand starting at position 3415 of SEQ ID NO: 989
aguauuggauuaucaccau

SEQ ID NO: 78923 - RNA, 19 nt, Artificial Sequence
  Description of Artificial Sequence: Synthetic oligonucleotide
  Antisense strand to SEQ ID NO: 78842
auggugauaauccaauacu

SEQ ID NO: 78924 - RNA, 19 nt, Artificial Sequence
  Description of Artificial Sequence: Synthetic oligonucleotide
  Sense strand starting at position 3384 of SEQ ID NO: 989
gccgaacaauuugagagaa

SEQ ID NO: 78925 - RNA, 19 nt, Artificial Sequence
  Description of Artificial Sequence: Synthetic oligonucleotide
  Antisense strand to SEQ ID NO: 78844
uucucucaaauuguucggc

SEQ ID NO: 78926 - RNA, 19 nt, Artificial Sequence
  Description of Artificial Sequence: Synthetic oligonucleotide
  Sense strand starting at position 3301 of SEQ ID NO: 989
cguagaauaucuucucaug

SEQ ID NO: 78927 - RNA, 19 nt, Artificial Sequence
  Description of Artificial Sequence: Synthetic oligonucleotide
  Antisense strand to SEQ ID NO: 78846
caugagaagauauucuacg

SEQ ID NO: 78928 - RNA, 19 nt, Artificial Sequence
  Description of Artificial Sequence: Synthetic oligonucleotide
  Sense strand starting at position 3252 of SEQ ID NO: 989
uggagaaauguuugacuac

SEQ ID NO: 78929 - RNA, 19 nt, Artificial Sequence
  Description of Artificial Sequence: Synthetic oligonucleotide
  Antisense strand to SEQ ID NO: 78848
guagucaaacauuucucca

SEQ ID NO: 78930 - RNA, 19 nt, Artificial Sequence
  Description of Artificial Sequence: Synthetic oligonucleotide
  Sense strand starting at position 3203 of SEQ ID NO: 989
gccagcuaucgugucauau

SEQ ID NO: 78931 - RNA, 19 nt, Artificial Sequence
  Description of Artificial Sequence: Synthetic oligonucleotide
  Antisense strand to SEQ ID NO: 78850
auaugacacgauagcuggc

SEQ ID NO: 78932 - RNA, 19 nt, Artificial Sequence
  Description of Artificial Sequence: Synthetic oligonucleotide
  Sense strand starting at position 3196 of SEQ ID NO: 989
gguguuagccagcuaucgu

SEQ ID NO: 78933 - RNA, 19 nt, Artificial Sequence
  Description of Artificial Sequence: Synthetic oligonucleotide
  Antisense strand to SEQ ID NO: 78852
acgauagcuggcuaacacc

SEQ ID NO: 78934 - RNA, 19 nt, Artificial Sequence
  Description of Artificial Sequence: Synthetic oligonucleotide
  Sense strand starting at position 3184 of SEQ ID NO: 989
ucugucacucaagguguua

SEQ ID NO: 78935 - RNA, 19 nt, Artificial Sequence
  Description of Artificial Sequence: Synthetic oligonucleotide
  Antisense strand to SEQ ID NO: 78854
uaacaccuugagugacaga

SEQ ID NO: 78936 - RNA, 19 nt, Artificial Sequence
  Description of Artificial Sequence: Synthetic oligonucleotide
  Sense strand starting at position 3154 of SEQ ID NO: 989
gcaugacucagcuggauuc

SEQ ID NO: 78937 - RNA, 19 nt, Artificial Sequence
  Description of Artificial Sequence: Synthetic oligonucleotide
  Antisense strand to SEQ ID NO: 78856
gaauccagcugagucaugc

SEQ ID NO: 78938 - RNA, 19 nt, Artificial Sequence
  Description of Artificial Sequence: Synthetic oligonucleotide
  Sense strand starting at position 3152 of SEQ ID NO: 989
uagcaugacucagcuggau

SEQ ID NO: 78939 - RNA, 19 nt, Artificial Sequence
  Description of Artificial Sequence: Synthetic oligonucleotide
  Antisense strand to SEQ ID NO: 78858
auccagcugagucaugcua

SEQ ID NO: 78940 - RNA, 19 nt, Artificial Sequence
  Description of Artificial Sequence: Synthetic oligonucleotide
  Sense strand starting at position 3145 of SEQ ID NO: 989
aggagauuagcaugacuca

SEQ ID NO: 78941 - RNA, 19 nt, Artificial Sequence
  Description of Artificial Sequence: Synthetic oligonucleotide
  Antisense strand to SEQ ID NO: 78860
ugagucaugcuaaucuccu

SEQ ID NO: 78942 - RNA, 19 nt, Artificial Sequence
  Description of Artificial Sequence: Synthetic oligonucleotide
  Sense strand starting at position 2976 of SEQ ID NO: 989
uuaagacaaugagaaguua

SEQ ID NO: 78943 - RNA, 19 nt, Artificial Sequence
  Description of Artificial Sequence: Synthetic oligonucleotide
  Antisense strand to SEQ ID NO: 78862
uaacuucucauugucuuaa

SEQ ID NO: 78944 - RNA, 19 nt, Artificial Sequence
  Description of Artificial Sequence: Synthetic oligonucleotide
  Sense strand starting at position 2882 of SEQ ID NO: 989
gagugacagcauuggauuc

SEQ ID NO: 78945 - RNA, 19 nt, Artificial Sequence
  Description of Artificial Sequence: Synthetic oligonucleotide
  Antisense strand to SEQ ID NO: 78864
gaauccaaugcugucacuc

SEQ ID NO: 78946 - RNA, 19 nt, Artificial Sequence
  Description of Artificial Sequence: Synthetic oligonucleotide
  Sense strand starting at position 2792 of SEQ ID NO: 989
aguuuaaacugagacauga

SEQ ID NO: 78947 - RNA, 19 nt, Artificial Sequence
  Description of Artificial Sequence: Synthetic oligonucleotide
  Antisense strand to SEQ ID NO: 78866
ucaugucucaguuuaaacu

SEQ ID NO: 78948 - RNA, 19 nt, Artificial Sequence
  Description of Artificial Sequence: Synthetic oligonucleotide
  Sense strand starting at position 2651 of SEQ ID NO: 989
agugcuguauacucaagaa

SEQ ID NO: 78949 - RNA, 19 nt, Artificial Sequence
  Description of Artificial Sequence: Synthetic oligonucleotide
  Antisense strand to SEQ ID NO: 78868
uucuugaguauacagcacu

SEQ ID NO: 78950 - RNA, 19 nt, Artificial Sequence
  Description of Artificial Sequence: Synthetic oligonucleotide
  Sense strand starting at position 2648 of SEQ ID NO: 989
gagagugcuguauacucaa

SEQ ID NO: 78951 - RNA, 19 nt, Artificial Sequence
  Description of Artificial Sequence: Synthetic oligonucleotide
  Antisense strand to SEQ ID NO: 78870
uugaguauacagcacucuc

SEQ ID NO: 78952 - RNA, 19 nt, Artificial Sequence
  Description of Artificial Sequence: Synthetic oligonucleotide
  Sense strand starting at position 2646 of SEQ ID NO: 989
aagagagugcuguauacuc

SEQ ID NO: 78953 - RNA, 19 nt, Artificial Sequence
  Description of Artificial Sequence: Synthetic oligonucleotide
  Antisense strand to SEQ ID NO: 78872
gaguauacagcacucucuu

SEQ ID NO: 78954 - RNA, 19 nt, Artificial Sequence
  Description of Artificial Sequence: Synthetic oligonucleotide
  Sense strand starting at position 2641 of SEQ ID NO: 989
ccucaaagagagugcugua

SEQ ID NO: 78955 - RNA, 19 nt, Artificial Sequence
  Description of Artificial Sequence: Synthetic oligonucleotide
  Antisense strand to SEQ ID NO: 78874
uacagcacucucuuugagg

SEQ ID NO: 78956 - RNA, 19 nt, Artificial Sequence
  Description of Artificial Sequence: Synthetic oligonucleotide
  Sense strand starting at position 2594 of SEQ ID NO: 989
aacgguggguaagauuuaa

SEQ ID NO: 78957 - RNA, 19 nt, Artificial Sequence
  Description of Artificial Sequence: Synthetic oligonucleotide
  Antisense strand to SEQ ID NO: 78876
uuaaaucuuacccaccguu

SEQ ID NO: 78958 - RNA, 19 nt, Artificial Sequence
  Description of Artificial Sequence: Synthetic oligonucleotide
  Sense strand starting at position 2591 of SEQ ID NO: 989
gauaacgguggguaagauu

SEQ ID NO: 78959 - RNA, 19 nt, Artificial Sequence
  Description of Artificial Sequence: Synthetic oligonucleotide
  Antisense strand to SEQ ID NO: 78878
aaucuuacccaccguuauc

SEQ ID NO: 78960 - RNA, 19 nt, Artificial Sequence
  Description of Artificial Sequence: Synthetic oligonucleotide
  Sense strand starting at position 2590 of SEQ ID NO: 989
ggauaacgguggguaagau

SEQ ID NO: 78961 - RNA, 19 nt, Artificial Sequence
  Description of Artificial Sequence: Synthetic oligonucleotide
  Antisense strand to SEQ ID NO: 78880
aucuuacccaccguuaucc

SEQ ID NO: 78962 - RNA, 19 nt, Artificial Sequence
  Description of Artificial Sequence: Synthetic oligonucleotide
  Sense strand starting at position 2587 of SEQ ID NO: 989
gaaggauaacgguggguaa

SEQ ID NO: 78963 - RNA, 19 nt, Artificial Sequence
  Description of Artificial Sequence: Synthetic oligonucleotide
  Antisense strand to SEQ ID NO: 78882
uuacccaccguuauccuuc

SEQ ID NO: 78964 - RNA, 19 nt, Artificial Sequence
  Description of Artificial Sequence: Synthetic oligonucleotide
  Sense strand starting at position 2469 of SEQ ID NO: 989
gccugucugcacuggaaca

SEQ ID NO: 78965 - RNA, 19 nt, Artificial Sequence
  Description of Artificial Sequence: Synthetic oligonucleotide
  Antisense strand to SEQ ID NO: 78884
uguuccagugcagacaggc

SEQ ID NO: 78966 - RNA, 19 nt, Artificial Sequence
  Description of Artificial Sequence: Synthetic oligonucleotide
  Sense strand starting at position 2307 of SEQ ID NO: 989
ggaauuuagaguuguacgu

SEQ ID NO: 78967 - RNA, 19 nt, Artificial Sequence
  Description of Artificial Sequence: Synthetic oligonucleotide
  Antisense strand to SEQ ID NO: 78886
acguacaacucuaaauucc

SEQ ID NO: 78968 - RNA, 19 nt, Artificial Sequence
  Description of Artificial Sequence: Synthetic oligonucleotide
  Sense strand starting at position 2283 of SEQ ID NO: 989
ucguuuguccuacauuuau

SEQ ID NO: 78969 - RNA, 19 nt, Artificial Sequence
  Description of Artificial Sequence: Synthetic oligonucleotide
  Antisense strand to SEQ ID NO: 78888
auaaauguaggacaaacga

SEQ ID NO: 78970 - RNA, 19 nt, Artificial Sequence
  Description of Artificial Sequence: Synthetic oligonucleotide
  Sense strand starting at position 1726 of SEQ ID NO: 989
ucccaaugauccugauuug

SEQ ID NO: 78971 - RNA, 19 nt, Artificial Sequence
  Description of Artificial Sequence: Synthetic oligonucleotide
  Antisense strand to SEQ ID NO: 78890
caaaucaggaucauuggga

SEQ ID NO: 78972 - RNA, 19 nt, Artificial Sequence
  Description of Artificial Sequence: Synthetic oligonucleotide
  Sense strand starting at position 1612 of SEQ ID NO: 989
acaacaguuuaacuauagu

SEQ ID NO: 78973 - RNA, 19 nt, Artificial Sequence
  Description of Artificial Sequence: Synthetic oligonucleotide
  Antisense strand to SEQ ID NO: 78892
acuauaguuaaacuguugu

SEQ ID NO: 78974 - RNA, 19 nt, Artificial Sequence
  Description of Artificial Sequence: Synthetic oligonucleotide
  Sense strand starting at position 1421 of SEQ ID NO: 989
gaagucacuuaccugugau

SEQ ID NO: 78975 - RNA, 19 nt, Artificial Sequence
  Description of Artificial Sequence: Synthetic oligonucleotide
  Antisense strand to SEQ ID NO: 78894
aucacagguaagugacuuc

SEQ ID NO: 78976 - RNA, 19 nt, Artificial Sequence
  Description of Artificial Sequence: Synthetic oligonucleotide
  Sense strand starting at position 1243 of SEQ ID NO: 989
aucagauuacaguaugguu

SEQ ID NO: 78977 - RNA, 19 nt, Artificial Sequence
  Description of Artificial Sequence: Synthetic oligonucleotide
  Antisense strand to SEQ ID NO: 78896
aaccauacuguaaucugau

SEQ ID NO: 78978 - RNA, 19 nt, Artificial Sequence
  Description of Artificial Sequence: Synthetic oligonucleotide
  Sense strand starting at position 1132 of SEQ ID NO: 989
aguagagagucauagauuu

SEQ ID NO: 78979 - RNA, 19 nt, Artificial Sequence
  Description of Artificial Sequence: Synthetic oligonucleotide
  Antisense strand to SEQ ID NO: 78898
aaaucuaugacucucuacu

SEQ ID NO: 78980 - RNA, 19 nt, Artificial Sequence
  Description of Artificial Sequence: Synthetic oligonucleotide
  Sense strand starting at position 789 of SEQ ID NO: 989
uguugccuucuggaaauaa

SEQ ID NO: 78981 - RNA, 19 nt, Artificial Sequence
  Description of Artificial Sequence: Synthetic oligonucleotide
  Antisense strand to SEQ ID NO: 78900
uuauuuccagaaggcaaca

SEQ ID NO: 78982 - RNA, 19 nt, Artificial Sequence
  Description of Artificial Sequence: Synthetic oligonucleotide
  Sense strand starting at position 452 of SEQ ID NO: 989
gcuagaagacuuggguugu

SEQ ID NO: 78983 - RNA, 19 nt, Artificial Sequence
  Description of Artificial Sequence: Synthetic oligonucleotide
  Antisense strand to SEQ ID NO: 78902
acaacccaagucuucuagc

SEQ ID NO: 78984 - RNA, 19 nt, Artificial Sequence
  Description of Artificial Sequence: Synthetic oligonucleotide
  Sense strand starting at position 426 of SEQ ID NO: 989
agcaauguauugucuauuu

SEQ ID NO: 78985 - RNA, 19 nt, Artificial Sequence
  Description of Artificial Sequence: Synthetic oligonucleotide
  Antisense strand to SEQ ID NO: 78904
aaauagacaauacauugcu

SEQ ID NO: 78986 - RNA, 19 nt, Artificial Sequence
  Description of Artificial Sequence: Synthetic oligonucleotide
  Sense strand starting at position 342 of SEQ ID NO: 989
guagguuaaugaguacaaa

SEQ ID NO: 78987 - RNA, 19 nt, Artificial Sequence
  Description of Artificial Sequence: Synthetic oligonucleotide
  Antisense strand to SEQ ID NO: 78906
uuuguacucauuaaccuac

SEQ ID NO: 78988 - RNA, 19 nt, Artificial Sequence
  Description of Artificial Sequence: Synthetic oligonucleotide
  Sense strand starting at position 333 of SEQ ID NO: 989
ugaagagauguagguuaau

SEQ ID NO: 78989 - RNA, 19 nt, Artificial Sequence
  Description of Artificial Sequence: Synthetic oligonucleotide
  Antisense strand to SEQ ID NO: 78908
auuaaccuacaucucuuca

SEQ ID NO: 78990 - RNA, 19 nt, Artificial Sequence
  Description of Artificial Sequence: Synthetic oligonucleotide
  Sense strand starting at position 174 of SEQ ID NO: 989
acuggagaauauuaaguga

SEQ ID NO: 78991 - RNA, 19 nt, Artificial Sequence
  Description of Artificial Sequence: Synthetic oligonucleotide
  Antisense strand to SEQ ID NO: 78910
ucacuuaauauucuccagu

SEQ ID NO: 78992 - RNA, 19 nt, Artificial Sequence
  Description of Artificial Sequence: Synthetic oligonucleotide
  Sense strand starting at position 1 of SEQ ID NO: 989
gguuuaucacagcaaccuu

SEQ ID NO: 78993 - RNA, 19 nt, Artificial Sequence
  Description of Artificial Sequence: Synthetic oligonucleotide
  Antisense strand to SEQ ID NO: 78912
aagguugcugugauaaacc

SEQ ID NO: 78994 - RNA, 19 nt, Artificial Sequence
  Description of Artificial Sequence: Synthetic oligonucleotide
  Sense strand starting at position 377 of SEQ ID NO: 990
uuuacugguuccuuaugga

SEQ ID NO: 78995 - RNA, 19 nt, Artificial Sequence
  Description of Artificial Sequence: Synthetic oligonucleotide
  Antisense strand to SEQ ID NO: 78914
uccauaaggaaccaguaaa

SEQ ID NO: 78996 - RNA, 19 nt, Artificial Sequence
  Description of Artificial Sequence: Synthetic oligonucleotide
  Sense strand starting at position 384 of SEQ ID NO: 990
guuccuuauggauauuaca

SEQ ID NO: 78997 - RNA, 19 nt, Artificial Sequence
  Description of Artificial Sequence: Synthetic oligonucleotide
  Antisense strand to SEQ ID NO: 78916
uguaauauccauaaggaac

SEQ ID NO: 78998 - RNA, 19 nt, Artificial Sequence
  Description of Artificial Sequence: Synthetic oligonucleotide
  Sense strand starting at position 398 of SEQ ID NO: 990
uuacaaaugcuccggauga

SEQ ID NO: 78999 - RNA, 19 nt, Artificial Sequence
  Description of Artificial Sequence: Synthetic oligonucleotide
  Antisense strand to SEQ ID NO: 78918
ucauccggagcauuuguaa

SEQ ID NO: 79000 - RNA, 19 nt, Artificial Sequence
  Description of Artificial Sequence: Synthetic oligonucleotide
  Sense strand starting at position 487 of SEQ ID NO: 990
uggagaccuccuuguauuc

SEQ ID NO: 79001 - RNA, 19 nt, Artificial Sequence
  Description of Artificial Sequence: Synthetic oligonucleotide
  Antisense strand to SEQ ID NO: 78920
gaauacaaggaggucucca

SEQ ID NO: 79002 - RNA, 19 nt, Artificial Sequence
  Description of Artificial Sequence: Synthetic oligonucleotide
  Sense strand starting at position 594 of SEQ ID NO: 990
ugguaaucagcuuaaccuu

SEQ ID NO: 79003 - RNA, 19 nt, Artificial Sequence
  Description of Artificial Sequence: Synthetic oligonucleotide
  Antisense strand to SEQ ID NO: 78922
aagguuaagcugauuacca

SEQ ID NO: 79004 - RNA, 19 nt, Artificial Sequence
  Description of Artificial Sequence: Synthetic oligonucleotide
  Sense strand starting at position 635 of SEQ ID NO: 990
ggaaaugccagccaucagu

SEQ ID NO: 79005 - RNA, 19 nt, Artificial Sequence
  Description of Artificial Sequence: Synthetic oligonucleotide
  Antisense strand to SEQ ID NO: 78924
acugauggcuggcauuucc

SEQ ID NO: 79006 - RNA, 19 nt, Artificial Sequence
  Description of Artificial Sequence: Synthetic oligonucleotide
  Sense strand starting at position 660 of SEQ ID NO: 990
auuagacaguuaucacuca

SEQ ID NO: 79007 - RNA, 19 nt, Artificial Sequence
  Description of Artificial Sequence: Synthetic oligonucleotide
  Antisense strand to SEQ ID NO: 78926
ugagugauaacugucuaau

SEQ ID NO: 79008 - RNA, 19 nt, Artificial Sequence
  Description of Artificial Sequence: Synthetic oligonucleotide
  Sense strand starting at position 895 of SEQ ID NO: 990
cuaauaugaucuuugucag

SEQ ID NO: 79009 - RNA, 19 nt, Artificial Sequence
  Description of Artificial Sequence: Synthetic oligonucleotide
  Antisense strand to SEQ ID NO: 78928
cugacaaagaucauauuag

SEQ ID NO: 79010 - RNA, 19 nt, Artificial Sequence
  Description of Artificial Sequence: Synthetic oligonucleotide
  Sense strand starting at position 898 of SEQ ID NO: 990
auaugaucuuugucagauc

SEQ ID NO: 79011 - RNA, 19 nt, Artificial Sequence
  Description of Artificial Sequence: Synthetic oligonucleotide
  Antisense strand to SEQ ID NO: 78930
gaucugacaaagaucauau

SEQ ID NO: 79012 - RNA, 19 nt, Artificial Sequence
  Description of Artificial Sequence: Synthetic oligonucleotide
  Sense strand starting at position 1029 of SEQ ID NO: 990
guaccauuguuaucaacca

SEQ ID NO: 79013 - RNA, 19 nt, Artificial Sequence
  Description of Artificial Sequence: Synthetic oligonucleotide
  Antisense strand to SEQ ID NO: 78932
ugguugauaacaaugguac

SEQ ID NO: 79014 - RNA, 19 nt, Artificial Sequence
  Description of Artificial Sequence: Synthetic oligonucleotide
  Sense strand starting at position 1036 of SEQ ID NO: 990
uguuaucaaccacauguua

SEQ ID NO: 79015 - RNA, 19 nt, Artificial Sequence
  Description of Artificial Sequence: Synthetic oligonucleotide
  Antisense strand to SEQ ID NO: 78934
uaacaugugguugauaaca

SEQ ID NO: 79016 - RNA, 19 nt, Artificial Sequence
  Description of Artificial Sequence: Synthetic oligonucleotide
  Sense strand starting at position 1524 of SEQ ID NO: 990
agaugaacucacugucaca

SEQ ID NO: 79017 - RNA, 19 nt, Artificial Sequence
  Description of Artificial Sequence: Synthetic oligonucleotide
  Antisense strand to SEQ ID NO: 78936
ugugacagugaguucaucu

SEQ ID NO: 79018 - RNA, 19 nt, Artificial Sequence
  Description of Artificial Sequence: Synthetic oligonucleotide
  Sense strand starting at position 1578 of SEQ ID NO: 990
caguccuuugagcagcaaa

SEQ ID NO: 79019 - RNA, 19 nt, Artificial Sequence
  Description of Artificial Sequence: Synthetic oligonucleotide
  Antisense strand to SEQ ID NO: 78938
uuugcugcucaaaggacug

SEQ ID NO: 79020 - RNA, 19 nt, Artificial Sequence
  Description of Artificial Sequence: Synthetic oligonucleotide
  Sense strand starting at position 1649 of SEQ ID NO: 990
caguguuaaggccacagau

SEQ ID NO: 79021 - RNA, 19 nt, Artificial Sequence
  Description of Artificial Sequence: Synthetic oligonucleotide
  Antisense strand to SEQ ID NO: 78940
aucuguggccuuaacacug

SEQ ID NO: 79022 - RNA, 19 nt, Artificial Sequence
  Description of Artificial Sequence: Synthetic oligonucleotide
  Sense strand starting at position 1900 of SEQ ID NO: 990
cugaguuuaccuuggagga

SEQ ID NO: 79023 - RNA, 19 nt, Artificial Sequence
  Description of Artificial Sequence: Synthetic oligonucleotide
  Antisense strand to SEQ ID NO: 78942
uccuccaagguaaacucag

SEQ ID NO: 79024 - RNA, 19 nt, Artificial Sequence
  Description of Artificial Sequence: Synthetic oligonucleotide
  Sense strand starting at position 1901 of SEQ ID NO: 990
ugaguuuaccuuggaggag

SEQ ID NO: 79025 - RNA, 19 nt, Artificial Sequence
  Description of Artificial Sequence: Synthetic oligonucleotide
  Antisense strand to SEQ ID NO: 78944
cuccuccaagguaaacuca

SEQ ID NO: 79026 - RNA, 19 nt, Artificial Sequence
  Description of Artificial Sequence: Synthetic oligonucleotide
  Sense strand starting at position 2058 of SEQ ID NO: 990
cggaguuucuauuucugca

SEQ ID NO: 79027 - RNA, 19 nt, Artificial Sequence
  Description of Artificial Sequence: Synthetic oligonucleotide
  Antisense strand to SEQ ID NO: 78946
ugcagaaauagaaacuccg

SEQ ID NO: 79028 - RNA, 19 nt, Artificial Sequence
  Description of Artificial Sequence: Synthetic oligonucleotide
  Sense strand starting at position 2389 of SEQ ID NO: 990
ugugcaaagugcucuauuu

SEQ ID NO: 79029 - RNA, 19 nt, Artificial Sequence
  Description of Artificial Sequence: Synthetic oligonucleotide
  Antisense strand to SEQ ID NO: 78948
aaauagagcacuuugcaca

SEQ ID NO: 79030 - RNA, 19 nt, Artificial Sequence
  Description of Artificial Sequence: Synthetic oligonucleotide
  Sense strand starting at position 2418 of SEQ ID NO: 990
uuuccaaucccacaguagu

SEQ ID NO: 79031 - RNA, 19 nt, Artificial Sequence
  Description of Artificial Sequence: Synthetic oligonucleotide
  Antisense strand to SEQ ID NO: 78950
acuacugugggauuggaaa

SEQ ID NO: 79032 - RNA, 19 nt, Artificial Sequence
  Description of Artificial Sequence: Synthetic oligonucleotide
  Sense strand starting at position 2429 of SEQ ID NO: 990
acaguagucaugugacaua

SEQ ID NO: 79033 - RNA, 19 nt, Artificial Sequence
  Description of Artificial Sequence: Synthetic oligonucleotide
  Antisense strand to SEQ ID NO: 78952
uaugucacaugacuacugu

SEQ ID NO: 79034 - RNA, 19 nt, Artificial Sequence
  Description of Artificial Sequence: Synthetic oligonucleotide
  Sense strand starting at position 2527 of SEQ ID NO: 990
gggucaugggcauauggua

SEQ ID NO: 79035 - RNA, 19 nt, Artificial Sequence
  Description of Artificial Sequence: Synthetic oligonucleotide
  Antisense strand to SEQ ID NO: 78954
uaccauaugcccaugaccc

SEQ ID NO: 79036 - RNA, 19 nt, Artificial Sequence
  Description of Artificial Sequence: Synthetic oligonucleotide
  Sense strand starting at position 2565 of SEQ ID NO: 990
ucauguggccaucaugaua

SEQ ID NO: 79037 - RNA, 19 nt, Artificial Sequence
  Description of Artificial Sequence: Synthetic oligonucleotide
  Antisense strand to SEQ ID NO: 78956
uaucaugauggccacauga

SEQ ID NO: 79038 - RNA, 19 nt, Artificial Sequence
  Description of Artificial Sequence: Synthetic oligonucleotide
  Sense strand starting at position 2568 of SEQ ID NO: 990
uguggccaucaugauagau

SEQ ID NO: 79039 - RNA, 19 nt, Artificial Sequence
  Description of Artificial Sequence: Synthetic oligonucleotide
  Antisense strand to SEQ ID NO: 78958
aucuaucaugauggccaca

SEQ ID NO: 79040 - RNA, 19 nt, Artificial Sequence
  Description of Artificial Sequence: Synthetic oligonucleotide
  Sense strand starting at position 2665 of SEQ ID NO: 990
agugcuaugggucagaaau

SEQ ID NO: 79041 - RNA, 19 nt, Artificial Sequence
  Description of Artificial Sequence: Synthetic oligonucleotide
  Antisense strand to SEQ ID NO: 78960
auuucugacccauagcacu

SEQ ID NO: 79042 - RNA, 19 nt, Artificial Sequence
  Description of Artificial Sequence: Synthetic oligonucleotide
  Sense strand starting at position 2756 of SEQ ID NO: 990
ugaaauaauugaccugcca

SEQ ID NO: 79043 - RNA, 19 nt, Artificial Sequence
  Description of Artificial Sequence: Synthetic oligonucleotide
  Antisense strand to SEQ ID NO: 78962
uggcaggucaauuauuuca

SEQ ID NO: 79044 - RNA, 19 nt, Artificial Sequence
  Description of Artificial Sequence: Synthetic oligonucleotide
  Sense strand starting at position 2784 of SEQ ID NO: 990
uggcuauucucauugagaa

SEQ ID NO: 79045 - RNA, 19 nt, Artificial Sequence
  Description of Artificial Sequence: Synthetic oligonucleotide
  Antisense strand to SEQ ID NO: 78964
uucucaaugagaauagcca

SEQ ID NO: 79046 - RNA, 19 nt, Artificial Sequence
  Description of Artificial Sequence: Synthetic oligonucleotide
  Sense strand starting at position 2785 of SEQ ID NO: 990
ggcuauucucauugagaaa

SEQ ID NO: 79047 - RNA, 19 nt, Artificial Sequence
  Description of Artificial Sequence: Synthetic oligonucleotide
  Antisense strand to SEQ ID NO: 78966
uuucucaaugagaauagcc

SEQ ID NO: 79048 - RNA, 19 nt, Artificial Sequence
  Description of Artificial Sequence: Synthetic oligonucleotide
  Sense strand starting at position 2925 of SEQ ID NO: 990
ggacacucauaggucuauu

SEQ ID NO: 79049 - RNA, 19 nt, Artificial Sequence
  Description of Artificial Sequence: Synthetic oligonucleotide
  Antisense strand to SEQ ID NO: 78968
aauagaccuaugagugucc

SEQ ID NO: 79050 - RNA, 19 nt, Artificial Sequence
  Description of Artificial Sequence: Synthetic oligonucleotide
  Sense strand starting at position 2953 of SEQ ID NO: 990
uagugaggcuaaguuuaga

SEQ ID NO: 79051 - RNA, 19 nt, Artificial Sequence
  Description of Artificial Sequence: Synthetic oligonucleotide
  Antisense strand to SEQ ID NO: 78970
ucuaaacuuagccucacua

SEQ ID NO: 79052 - RNA, 19 nt, Artificial Sequence
  Description of Artificial Sequence: Synthetic oligonucleotide
  Sense strand starting at position 2992 of SEQ ID NO: 990
augggacauccuggccauu

SEQ ID NO: 79053 - RNA, 19 nt, Artificial Sequence
  Description of Artificial Sequence: Synthetic oligonucleotide
  Antisense strand to SEQ ID NO: 78972
aauggccaggaugucccau

SEQ ID NO: 79054 - RNA, 19 nt, Artificial Sequence
  Description of Artificial Sequence: Synthetic oligonucleotide
  Sense strand starting at position 3032 of SEQ ID NO: 990
agcagaugaucucugguca

SEQ ID NO: 79055 - RNA, 19 nt, Artificial Sequence
  Description of Artificial Sequence: Synthetic oligonucleotide
  Antisense strand to SEQ ID NO: 78974
ugaccagagaucaucugcu

SEQ ID NO: 79056 - RNA, 19 nt, Artificial Sequence
  Description of Artificial Sequence: Synthetic oligonucleotide
  Sense strand starting at position 3037 of SEQ ID NO: 990
augaucucuggucagcauu

SEQ ID NO: 79057 - RNA, 19 nt, Artificial Sequence
  Description of Artificial Sequence: Synthetic oligonucleotide
  Antisense strand to SEQ ID NO: 78976
aaugcugaccagagaucau

SEQ ID NO: 79058 - RNA, 19 nt, Artificial Sequence
  Description of Artificial Sequence: Synthetic oligonucleotide
  Sense strand starting at position 3065 of SEQ ID NO: 990
cauagagauccaggugcuu

SEQ ID NO: 79059 - RNA, 19 nt, Artificial Sequence
  Description of Artificial Sequence: Synthetic oligonucleotide
  Antisense strand to SEQ ID NO: 78978
aagcaccuggaucucuaug

SEQ ID NO: 79060 - RNA, 19 nt, Artificial Sequence
  Description of Artificial Sequence: Synthetic oligonucleotide
  Sense strand starting at position 3193 of SEQ ID NO: 990
cuuauuaggaauuggugua

SEQ ID NO: 79061 - RNA, 19 nt, Artificial Sequence
  Description of Artificial Sequence: Synthetic oligonucleotide
  Antisense strand to SEQ ID NO: 78980
uacaccaauuccuaauaag

SEQ ID NO: 79062 - RNA, 19 nt, Artificial Sequence
  Description of Artificial Sequence: Synthetic oligonucleotide
  Sense strand starting at position 3194 of SEQ ID NO: 990
uuauuaggaauugguguau

SEQ ID NO: 79063 - RNA, 19 nt, Artificial Sequence
  Description of Artificial Sequence: Synthetic oligonucleotide
  Antisense strand to SEQ ID NO: 78982
auacaccaauuccuaauaa

SEQ ID NO: 79064 - RNA, 19 nt, Artificial Sequence
  Description of Artificial Sequence: Synthetic oligonucleotide
  Sense strand starting at position 3198 of SEQ ID NO: 990
uaggaauugguguaugucu

SEQ ID NO: 79065 - RNA, 19 nt, Artificial Sequence
  Description of Artificial Sequence: Synthetic oligonucleotide
  Antisense strand to SEQ ID NO: 78984
agacauacaccaauuccua

SEQ ID NO: 79066 - RNA, 19 nt, Artificial Sequence
  Description of Artificial Sequence: Synthetic oligonucleotide
  Sense strand starting at position 3379 of SEQ ID NO: 990
acugacuuaucugugaauu

SEQ ID NO: 79067 - RNA, 19 nt, Artificial Sequence
  Description of Artificial Sequence: Synthetic oligonucleotide
  Antisense strand to SEQ ID NO: 78986
aauucacagauaagucagu

SEQ ID NO: 79068 - RNA, 19 nt, Artificial Sequence
  Description of Artificial Sequence: Synthetic oligonucleotide
  Sense strand starting at position 3380 of SEQ ID NO: 990
cugacuuaucugugaauug

SEQ ID NO: 79069 - RNA, 19 nt, Artificial Sequence
  Description of Artificial Sequence: Synthetic oligonucleotide
  Antisense strand to SEQ ID NO: 78988
caauucacagauaagucag

SEQ ID NO: 79070 - RNA, 19 nt, Artificial Sequence
  Description of Artificial Sequence: Synthetic oligonucleotide
  Sense strand starting at position 3441 of SEQ ID NO: 990
acuccaugaggccauauau

SEQ ID NO: 79071 - RNA, 19 nt, Artificial Sequence
  Description of Artificial Sequence: Synthetic oligonucleotide
  Antisense strand to SEQ ID NO: 78990
auauauggccucauggagu

SEQ ID NO: 79072 - RNA, 19 nt, Artificial Sequence
  Description of Artificial Sequence: Synthetic oligonucleotide
  Sense strand starting at position 3510 of SEQ ID NO: 990
ugagcucccuguuuauuua

SEQ ID NO: 79073 - RNA, 19 nt, Artificial Sequence
  Description of Artificial Sequence: Synthetic oligonucleotide
  Antisense strand to SEQ ID NO: 78992
uaaauaaacagggagcuca

SEQ ID NO: 79074 - RNA, 19 nt, Artificial Sequence
  Description of Artificial Sequence: Synthetic oligonucleotide
  Sense strand starting at position 21 of SEQ ID NO: 991
ucuauugagcuuuaugauu

SEQ ID NO: 79075 - RNA, 19 nt, Artificial Sequence
  Description of Artificial Sequence: Synthetic oligonucleotide
  Antisense strand to SEQ ID NO: 78994
aaucauaaagcucaauaga

SEQ ID NO: 79076 - RNA, 19 nt, Artificial Sequence
  Description of Artificial Sequence: Synthetic oligonucleotide
  Sense strand starting at position 26 of SEQ ID NO: 991
ugagcuuuaugauuccaac

SEQ ID NO: 79077 - RNA, 19 nt, Artificial Sequence
  Description of Artificial Sequence: Synthetic oligonucleotide
  Antisense strand to SEQ ID NO: 78996
guuggaaucauaaagcuca

SEQ ID NO: 79078 - RNA, 19 nt, Artificial Sequence
  Description of Artificial Sequence: Synthetic oligonucleotide
  Sense strand starting at position 52 of SEQ ID NO: 991
ucuauugaccacuacgagu

SEQ ID NO: 79079 - RNA, 19 nt, Artificial Sequence
  Description of Artificial Sequence: Synthetic oligonucleotide
  Antisense strand to SEQ ID NO: 78998
acucguaguggucaauaga

SEQ ID NO: 79080 - RNA, 19 nt, Artificial Sequence
  Description of Artificial Sequence: Synthetic oligonucleotide
  Sense strand starting at position 125 of SEQ ID NO: 991
ucauuccugcccuauagga

SEQ ID NO: 79081 - RNA, 19 nt, Artificial Sequence
  Description of Artificial Sequence: Synthetic oligonucleotide
  Antisense strand to SEQ ID NO: 79000
uccuauagggcaggaauga

SEQ ID NO: 79082 - RNA, 19 nt, Artificial Sequence
  Description of Artificial Sequence: Synthetic oligonucleotide
  Sense strand starting at position 181 of SEQ ID NO: 991
ucccaugugccaugaugga

SEQ ID NO: 79083 - RNA, 19 nt, Artificial Sequence
  Description of Artificial Sequence: Synthetic oligonucleotide
  Antisense strand to SEQ ID NO: 79002
uccaucauggcacauggga

SEQ ID NO: 79084 - RNA, 19 nt, Artificial Sequence
  Description of Artificial Sequence: Synthetic oligonucleotide
  Sense strand starting at position 467 of SEQ ID NO: 991
ccagauucgagcuagguca

SEQ ID NO: 79085 - RNA, 19 nt, Artificial Sequence
  Description of Artificial Sequence: Synthetic oligonucleotide
  Antisense strand to SEQ ID NO: 79004
ugaccuagcucgaaucugg

SEQ ID NO: 79086 - RNA, 19 nt, Artificial Sequence
  Description of Artificial Sequence: Synthetic oligonucleotide
  Sense strand starting at position 508 of SEQ ID NO: 991
gcaacuuuccucuaugaag

SEQ ID NO: 79087 - RNA, 19 nt, Artificial Sequence
  Description of Artificial Sequence: Synthetic oligonucleotide
  Antisense strand to SEQ ID NO: 79006
cuucauagaggaaaguugc

SEQ ID NO: 79088 - RNA, 19 nt, Artificial Sequence
  Description of Artificial Sequence: Synthetic oligonucleotide
  Sense strand starting at position 548 of SEQ ID NO: 991
uaguuuggcucuuuacaug

SEQ ID NO: 79089 - RNA, 19 nt, Artificial Sequence
  Description of Artificial Sequence: Synthetic oligonucleotide
  Antisense strand to SEQ ID NO: 79008
cauguaaagagccaaacua

SEQ ID NO: 79090 - RNA, 19 nt, Artificial Sequence
  Description of Artificial Sequence: Synthetic oligonucleotide
  Sense strand starting at position 573 of SEQ ID NO: 991
cucaaucacccuugggaca

SEQ ID NO: 79091 - RNA, 19 nt, Artificial Sequence
  Description of Artificial Sequence: Synthetic oligonucleotide
  Antisense strand to SEQ ID NO: 79010
ugucccaagggugauugag

SEQ ID NO: 79092 - RNA, 19 nt, Artificial Sequence
  Description of Artificial Sequence: Synthetic oligonucleotide
  Sense strand starting at position 645 of SEQ ID NO: 991
ggcucagagacagaugcua

SEQ ID NO: 79093 - RNA, 19 nt, Artificial Sequence
  Description of Artificial Sequence: Synthetic oligonucleotide
  Antisense strand to SEQ ID NO: 79012
uagcaucugucucugagcc

SEQ ID NO: 79094 - RNA, 19 nt, Artificial Sequence
  Description of Artificial Sequence: Synthetic oligonucleotide
  Sense strand starting at position 693 of SEQ ID NO: 991
uugugugggagccaguauu

SEQ ID NO: 79095 - RNA, 19 nt, Artificial Sequence
  Description of Artificial Sequence: Synthetic oligonucleotide
  Antisense strand to SEQ ID NO: 79014
aauacuggcucccacacaa

SEQ ID NO: 79096 - RNA, 19 nt, Artificial Sequence
  Description of Artificial Sequence: Synthetic oligonucleotide
  Sense strand starting at position 701 of SEQ ID NO: 991
gagccaguauuugaacuua

SEQ ID NO: 79097 - RNA, 19 nt, Artificial Sequence
  Description of Artificial Sequence: Synthetic oligonucleotide
  Antisense strand to SEQ ID NO: 79016
uaaguucaaauacuggcuc

SEQ ID NO: 79098 - RNA, 19 nt, Artificial Sequence
  Description of Artificial Sequence: Synthetic oligonucleotide
  Sense strand starting at position 716 of SEQ ID NO: 991
cuuagaucuggcuguacuu

SEQ ID NO: 79099 - RNA, 19 nt, Artificial Sequence
  Description of Artificial Sequence: Synthetic oligonucleotide
  Antisense strand to SEQ ID NO: 79018
aaguacagccagaucuaag

SEQ ID NO: 79100 - RNA, 19 nt, Artificial Sequence
  Description of Artificial Sequence: Synthetic oligonucleotide
  Sense strand starting at position 725 of SEQ ID NO: 991
ggcuguacuuacuccuaaa

SEQ ID NO: 79101 - RNA, 19 nt, Artificial Sequence
  Description of Artificial Sequence: Synthetic oligonucleotide
  Antisense strand to SEQ ID NO: 79020
uuuaggaguaaguacagcc

SEQ ID NO: 79102 - RNA, 19 nt, Artificial Sequence
  Description of Artificial Sequence: Synthetic oligonucleotide
  Sense strand starting at position 797 of SEQ ID NO: 991
caagaaggucuggguuuga

SEQ ID NO: 79103 - RNA, 19 nt, Artificial Sequence
  Description of Artificial Sequence: Synthetic oligonucleotide
  Antisense strand to SEQ ID NO: 79022
ucaaacccagaccuucuug

SEQ ID NO: 79104 - RNA, 19 nt, Artificial Sequence
  Description of Artificial Sequence: Synthetic oligonucleotide
  Sense strand starting at position 1034 of SEQ ID NO: 991
cugccauccuucuugagga

SEQ ID NO: 79105 - RNA, 19 nt, Artificial Sequence
  Description of Artificial Sequence: Synthetic oligonucleotide
  Antisense strand to SEQ ID NO: 79024
uccucaagaaggauggcag

SEQ ID NO: 79106 - RNA, 19 nt, Artificial Sequence
  Description of Artificial Sequence: Synthetic oligonucleotide
  Sense strand starting at position 1036 of SEQ ID NO: 991
gccauccuucuugaggaau

SEQ ID NO: 79107 - RNA, 19 nt, Artificial Sequence
  Description of Artificial Sequence: Synthetic oligonucleotide
  Antisense strand to SEQ ID NO: 79026
auuccucaagaaggauggc

SEQ ID NO: 79108 - RNA, 19 nt, Artificial Sequence
  Description of Artificial Sequence: Synthetic oligonucleotide
  Sense strand starting at position 1200 of SEQ ID NO: 991
auuggauuaugcccaggga

SEQ ID NO: 79109 - RNA, 19 nt, Artificial Sequence
  Description of Artificial Sequence: Synthetic oligonucleotide
  Antisense strand to SEQ ID NO: 79028
ucccugggcauaauccaau

SEQ ID NO: 79110 - RNA, 19 nt, Artificial Sequence
  Description of Artificial Sequence: Synthetic oligonucleotide
  Sense strand starting at position 1203 of SEQ ID NO: 991
ggauuaugcccagggaccu

SEQ ID NO: 79111 - RNA, 19 nt, Artificial Sequence
  Description of Artificial Sequence: Synthetic oligonucleotide
  Antisense strand to SEQ ID NO: 79030
aggucccugggcauaaucc

SEQ ID NO: 79112 - RNA, 19 nt, Artificial Sequence
  Description of Artificial Sequence: Synthetic oligonucleotide
  Sense strand starting at position 1333 of SEQ ID NO: 991
ggguccuacggcgaggaau

SEQ ID NO: 79113 - RNA, 19 nt, Artificial Sequence
  Description of Artificial Sequence: Synthetic oligonucleotide
  Antisense strand to SEQ ID NO: 79032
auuccucgccguaggaccc

SEQ ID NO: 79114 - RNA, 19 nt, Artificial Sequence
  Description of Artificial Sequence: Synthetic oligonucleotide
  Sense strand starting at position 1335 of SEQ ID NO: 991
guccuacggcgaggaauuu

SEQ ID NO: 79115 - RNA, 19 nt, Artificial Sequence
  Description of Artificial Sequence: Synthetic oligonucleotide
  Antisense strand to SEQ ID NO: 79034
aaauuccucgccguaggac

SEQ ID NO: 79116 - RNA, 19 nt, Artificial Sequence
  Description of Artificial Sequence: Synthetic oligonucleotide
  Sense strand starting at position 1366 of SEQ ID NO: 991
cuuacucaucaguagaggu

SEQ ID NO: 79117 - RNA, 19 nt, Artificial Sequence
  Description of Artificial Sequence: Synthetic oligonucleotide
  Antisense strand to SEQ ID NO: 79036
accucuacugaugaguaag

SEQ ID NO: 79118 - RNA, 19 nt, Artificial Sequence
  Description of Artificial Sequence: Synthetic oligonucleotide
  Sense strand starting at position 1448 of SEQ ID NO: 991
aaagccgucuuguuagaaa

SEQ ID NO: 79119 - RNA, 19 nt, Artificial Sequence
  Description of Artificial Sequence: Synthetic oligonucleotide
  Antisense strand to SEQ ID NO: 79038
uuucuaacaagacggcuuu

SEQ ID NO: 79120 - RNA, 19 nt, Artificial Sequence
  Description of Artificial Sequence: Synthetic oligonucleotide
  Sense strand starting at position 1590 of SEQ ID NO: 991
aucagugcuuucuuuagga

SEQ ID NO: 79121 - RNA, 19 nt, Artificial Sequence
  Description of Artificial Sequence: Synthetic oligonucleotide
  Antisense strand to SEQ ID NO: 79040
uccuaaagaaagcacugau

SEQ ID NO: 79122 - RNA, 19 nt, Artificial Sequence
  Description of Artificial Sequence: Synthetic oligonucleotide
  Sense strand starting at position 1744 of SEQ ID NO: 991
cuguucaguccugggaaga

SEQ ID NO: 79123 - RNA, 19 nt, Artificial Sequence
  Description of Artificial Sequence: Synthetic oligonucleotide
  Antisense strand to SEQ ID NO: 79042
ucuucccaggacugaacag

SEQ ID NO: 79124 - RNA, 19 nt, Artificial Sequence
  Description of Artificial Sequence: Synthetic oligonucleotide
  Sense strand starting at position 1745 of SEQ ID NO: 991
uguucaguccugggaagaa

SEQ ID NO: 79125 - RNA, 19 nt, Artificial Sequence
  Description of Artificial Sequence: Synthetic oligonucleotide
  Antisense strand to SEQ ID NO: 79044
uucuucccaggacugaaca

SEQ ID NO: 79126 - RNA, 19 nt, Artificial Sequence
  Description of Artificial Sequence: Synthetic oligonucleotide
  Sense strand starting at position 2235 of SEQ ID NO: 991
uuuacucaauucccggaaa

SEQ ID NO: 79127 - RNA, 19 nt, Artificial Sequence
  Description of Artificial Sequence: Synthetic oligonucleotide
  Antisense strand to SEQ ID NO: 79046
uuuccgggaauugaguaaa

SEQ ID NO: 79128 - RNA, 19 nt, Artificial Sequence
  Description of Artificial Sequence: Synthetic oligonucleotide
  Sense strand starting at position 2297 of SEQ ID NO: 991
gaagaaaccggcugaugau

SEQ ID NO: 79129 - RNA, 19 nt, Artificial Sequence
  Description of Artificial Sequence: Synthetic oligonucleotide
  Antisense strand to SEQ ID NO: 79048
aucaucagccgguuucuuc

SEQ ID NO: 79130 - RNA, 19 nt, Artificial Sequence
  Description of Artificial Sequence: Synthetic oligonucleotide
  Sense strand starting at position 2303 of SEQ ID NO: 991
accggcugaugaucaauaa

SEQ ID NO: 79131 - RNA, 19 nt, Artificial Sequence
  Description of Artificial Sequence: Synthetic oligonucleotide
  Antisense strand to SEQ ID NO: 79050
uuauugaucaucagccggu

SEQ ID NO: 79132 - RNA, 19 nt, Artificial Sequence
  Description of Artificial Sequence: Synthetic oligonucleotide
  Sense strand starting at position 2626 of SEQ ID NO: 991
guagcuucccaguaaggca

SEQ ID NO: 79133 - RNA, 19 nt, Artificial Sequence
  Description of Artificial Sequence: Synthetic oligonucleotide
  Antisense strand to SEQ ID NO: 79052
ugccuuacugggaagcuac

SEQ ID NO: 79134 - RNA, 19 nt, Artificial Sequence
  Description of Artificial Sequence: Synthetic oligonucleotide
  Sense strand starting at position 2718 of SEQ ID NO: 991
uuugcaacacacugagaaa

SEQ ID NO: 79135 - RNA, 19 nt, Artificial Sequence
  Description of Artificial Sequence: Synthetic oligonucleotide
  Antisense strand to SEQ ID NO: 79054
uuucucaguguguugcaaa

SEQ ID NO: 79136 - RNA, 19 nt, Artificial Sequence
  Description of Artificial Sequence: Synthetic oligonucleotide
  Sense strand starting at position 3173 of SEQ ID NO: 991
uguugucuuugggugauga

SEQ ID NO: 79137 - RNA, 19 nt, Artificial Sequence
  Description of Artificial Sequence: Synthetic oligonucleotide
  Antisense strand to SEQ ID NO: 79056
ucaucacccaaagacaaca

SEQ ID NO: 79138 - RNA, 19 nt, Artificial Sequence
  Description of Artificial Sequence: Synthetic oligonucleotide
  Sense strand starting at position 3174 of SEQ ID NO: 991
guugucuuugggugaugag

SEQ ID NO: 79139 - RNA, 19 nt, Artificial Sequence
  Description of Artificial Sequence: Synthetic oligonucleotide
  Antisense strand to SEQ ID NO: 79058
cucaucacccaaagacaac

SEQ ID NO: 79140 - RNA, 19 nt, Artificial Sequence
  Description of Artificial Sequence: Synthetic oligonucleotide
  Sense strand starting at position 3218 of SEQ ID NO: 991
uucugaucauauuucguuu

SEQ ID NO: 79141 - RNA, 19 nt, Artificial Sequence
  Description of Artificial Sequence: Synthetic oligonucleotide
  Antisense strand to SEQ ID NO: 79060
aaacgaaauaugaucagaa

SEQ ID NO: 79142 - RNA, 19 nt, Artificial Sequence
  Description of Artificial Sequence: Synthetic oligonucleotide
  Sense strand starting at position 3313 of SEQ ID NO: 991
agagcuugguggguccaaa

SEQ ID NO: 79143 - RNA, 19 nt, Artificial Sequence
  Description of Artificial Sequence: Synthetic oligonucleotide
  Antisense strand to SEQ ID NO: 79062
uuuggacccaccaagcucu

SEQ ID NO: 79144 - RNA, 19 nt, Artificial Sequence
  Description of Artificial Sequence: Synthetic oligonucleotide
  Sense strand starting at position 3404 of SEQ ID NO: 991
gcuucugcuuaaucaggau

SEQ ID NO: 79145 - RNA, 19 nt, Artificial Sequence
  Description of Artificial Sequence: Synthetic oligonucleotide
  Antisense strand to SEQ ID NO: 79064
auccugauuaagcagaagc

SEQ ID NO: 79146 - RNA, 19 nt, Artificial Sequence
  Description of Artificial Sequence: Synthetic oligonucleotide
  Sense strand starting at position 3799 of SEQ ID NO: 991
caguguugguaucuuggga

SEQ ID NO: 79147 - RNA, 19 nt, Artificial Sequence
  Description of Artificial Sequence: Synthetic oligonucleotide
  Antisense strand to SEQ ID NO: 79066
ucccaagauaccaacacug

SEQ ID NO: 79148 - RNA, 19 nt, Artificial Sequence
  Description of Artificial Sequence: Synthetic oligonucleotide
  Sense strand starting at position 3815 of SEQ ID NO: 991
ggaucucugaaauguugac

SEQ ID NO: 79149 - RNA, 19 nt, Artificial Sequence
  Description of Artificial Sequence: Synthetic oligonucleotide
  Antisense strand to SEQ ID NO: 79068
gucaacauuucagagaucc

SEQ ID NO: 79150 - RNA, 19 nt, Artificial Sequence
  Description of Artificial Sequence: Synthetic oligonucleotide
  Sense strand starting at position 3819 of SEQ ID NO: 991
cucugaaauguugacuguu

SEQ ID NO: 79151 - RNA, 19 nt, Artificial Sequence
  Description of Artificial Sequence: Synthetic oligonucleotide
  Antisense strand to SEQ ID NO: 79070
aacagucaacauuucagag

SEQ ID NO: 79152 - RNA, 19 nt, Artificial Sequence
  Description of Artificial Sequence: Synthetic oligonucleotide
  Sense strand starting at position 3821 of SEQ ID NO: 991
cugaaauguugacuguuga

SEQ ID NO: 79153 - RNA, 19 nt, Artificial Sequence
  Description of Artificial Sequence: Synthetic oligonucleotide
  Antisense strand to SEQ ID NO: 79072
ucaacagucaacauuucag

SEQ ID NO: 79154 - RNA, 19 nt, Artificial Sequence
  Description of Artificial Sequence: Synthetic oligonucleotide
  Sense strand starting at position 3972 of SEQ ID NO: 992
gaucccuaucguugcaaua

SEQ ID NO: 79155 - RNA, 19 nt, Artificial Sequence
  Description of Artificial Sequence: Synthetic oligonucleotide
  Antisense strand to SEQ ID NO: 79074
uauugcaacgauagggauc

SEQ ID NO: 79156 - RNA, 19 nt, Artificial Sequence
  Description of Artificial Sequence: Synthetic oligonucleotide
  Sense strand starting at position 3956 of SEQ ID NO: 992
cgcugugucauacauggau

SEQ ID NO: 79157 - RNA, 19 nt, Artificial Sequence
  Description of Artificial Sequence: Synthetic oligonucleotide
  Antisense strand to SEQ ID NO: 79076
auccauguaugacacagcg

SEQ ID NO: 79158 - RNA, 19 nt, Artificial Sequence
  Description of Artificial Sequence: Synthetic oligonucleotide
  Sense strand starting at position 3770 of SEQ ID NO: 992
uguuguuguuuccuaaaca

SEQ ID NO: 79159 - RNA, 19 nt, Artificial Sequence
  Description of Artificial Sequence: Synthetic oligonucleotide
  Antisense strand to SEQ ID NO: 79078
uguuuaggaaacaacaaca

SEQ ID NO: 79160 - RNA, 19 nt, Artificial Sequence
  Description of Artificial Sequence: Synthetic oligonucleotide
  Sense strand starting at position 3545 of SEQ ID NO: 992
gccacaaugcugcaucauu

SEQ ID NO: 79161 - RNA, 19 nt, Artificial Sequence
  Description of Artificial Sequence: Synthetic oligonucleotide
  Antisense strand to SEQ ID NO: 79080
aaugaugcagcauuguggc

SEQ ID NO: 79162 - RNA, 19 nt, Artificial Sequence
  Description of Artificial Sequence: Synthetic oligonucleotide
  Sense strand starting at position 3401 of SEQ ID NO: 992
acucauucuggcugcagaa

SEQ ID NO: 79163 - RNA, 19 nt, Artificial Sequence
  Description of Artificial Sequence: Synthetic oligonucleotide
  Antisense strand to SEQ ID NO: 79082
uucugcagccagaaugagu

SEQ ID NO: 79164 - RNA, 19 nt, Artificial Sequence
  Description of Artificial Sequence: Synthetic oligonucleotide
  Sense strand starting at position 3343 of SEQ ID NO: 992
guuacugagguuuguuuaa

SEQ ID NO: 79165 - RNA, 19 nt, Artificial Sequence
  Description of Artificial Sequence: Synthetic oligonucleotide
  Antisense strand to SEQ ID NO: 79084
uuaaacaaaccucaguaac

SEQ ID NO: 79166 - RNA, 19 nt, Artificial Sequence
  Description of Artificial Sequence: Synthetic oligonucleotide
  Sense strand starting at position 3273 of SEQ ID NO: 992
ggcagugagaguugaguuu

SEQ ID NO: 79167 - RNA, 19 nt, Artificial Sequence
  Description of Artificial Sequence: Synthetic oligonucleotide
  Antisense strand to SEQ ID NO: 79086
aaacucaacucucacugcc

SEQ ID NO: 79168 - RNA, 19 nt, Artificial Sequence
  Description of Artificial Sequence: Synthetic oligonucleotide
  Sense strand starting at position 3119 of SEQ ID NO: 992
uguguuaagcccuaggaau

SEQ ID NO: 79169 - RNA, 19 nt, Artificial Sequence
  Description of Artificial Sequence: Synthetic oligonucleotide
  Antisense strand to SEQ ID NO: 79088
auuccuagggcuuaacaca

SEQ ID NO: 79170 - RNA, 19 nt, Artificial Sequence
  Description of Artificial Sequence: Synthetic oligonucleotide
  Sense strand starting at position 2847 of SEQ ID NO: 992
gggugaauguuugcaucca

SEQ ID NO: 79171 - RNA, 19 nt, Artificial Sequence
  Description of Artificial Sequence: Synthetic oligonucleotide
  Antisense strand to SEQ ID NO: 79090
uggaugcaaacauucaccc

SEQ ID NO: 79172 - RNA, 19 nt, Artificial Sequence
  Description of Artificial Sequence: Synthetic oligonucleotide
  Sense strand starting at position 2806 of SEQ ID NO: 992
cgaggcuugauugaggauu

SEQ ID NO: 79173 - RNA, 19 nt, Artificial Sequence
  Description of Artificial Sequence: Synthetic oligonucleotide
  Antisense strand to SEQ ID NO: 79092
aauccucaaucaagccucg

SEQ ID NO: 79174 - RNA, 19 nt, Artificial Sequence
  Description of Artificial Sequence: Synthetic oligonucleotide
  Sense strand starting at position 2735 of SEQ ID NO: 992
ccuggugugcuuugaaaga

SEQ ID NO: 79175 - RNA, 19 nt, Artificial Sequence
  Description of Artificial Sequence: Synthetic oligonucleotide
  Antisense strand to SEQ ID NO: 79094
ucuuucaaagcacaccagg

SEQ ID NO: 79176 - RNA, 19 nt, Artificial Sequence
  Description of Artificial Sequence: Synthetic oligonucleotide
  Sense strand starting at position 2710 of SEQ ID NO: 992
aggugaggcccaggagaua

SEQ ID NO: 79177 - RNA, 19 nt, Artificial Sequence
  Description of Artificial Sequence: Synthetic oligonucleotide
  Antisense strand to SEQ ID NO: 79096
uaucuccugggccucaccu

SEQ ID NO: 79178 - RNA, 19 nt, Artificial Sequence
  Description of Artificial Sequence: Synthetic oligonucleotide
  Sense strand starting at position 2650 of SEQ ID NO: 992
gcaaguggaaauuggaaau

SEQ ID NO: 79179 - RNA, 19 nt, Artificial Sequence
  Description of Artificial Sequence: Synthetic oligonucleotide
  Antisense strand to SEQ ID NO: 79098
auuuccaauuuccacuugc

SEQ ID NO: 79180 - RNA, 19 nt, Artificial Sequence
  Description of Artificial Sequence: Synthetic oligonucleotide
  Sense strand starting at position 2643 of SEQ ID NO: 992
auggauggcaaguggaaau

SEQ ID NO: 79181 - RNA, 19 nt, Artificial Sequence
  Description of Artificial Sequence: Synthetic oligonucleotide
  Antisense strand to SEQ ID NO: 79100
auuuccacuugccauccau

SEQ ID NO: 79182 - RNA, 19 nt, Artificial Sequence
  Description of Artificial Sequence: Synthetic oligonucleotide
  Sense strand starting at position 2224 of SEQ ID NO: 992
cagacuggcuuaguguaaa

SEQ ID NO: 79183 - RNA, 19 nt, Artificial Sequence
  Description of Artificial Sequence: Synthetic oligonucleotide
  Antisense strand to SEQ ID NO: 79102
uuuacacuaagccagucug

SEQ ID NO: 79184 - RNA, 19 nt, Artificial Sequence
  Description of Artificial Sequence: Synthetic oligonucleotide
  Sense strand starting at position 2222 of SEQ ID NO: 992
accagacuggcuuagugua

SEQ ID NO: 79185 - RNA, 19 nt, Artificial Sequence
  Description of Artificial Sequence: Synthetic oligonucleotide
  Antisense strand to SEQ ID NO: 79104
uacacuaagccagucuggu

SEQ ID NO: 79186 - RNA, 19 nt, Artificial Sequence
  Description of Artificial Sequence: Synthetic oligonucleotide
  Sense strand starting at position 2173 of SEQ ID NO: 992
gugacaucaguccauccaa

SEQ ID NO: 79187 - RNA, 19 nt, Artificial Sequence
  Description of Artificial Sequence: Synthetic oligonucleotide
  Antisense strand to SEQ ID NO: 79106
uuggauggacugaugucac

SEQ ID NO: 79188 - RNA, 19 nt, Artificial Sequence
  Description of Artificial Sequence: Synthetic oligonucleotide
  Sense strand starting at position 1766 of SEQ ID NO: 992
gcgugugauccgccagcca

SEQ ID NO: 79189 - RNA, 19 nt, Artificial Sequence
  Description of Artificial Sequence: Synthetic oligonucleotide
  Antisense strand to SEQ ID NO: 79108
uggcuggcggaucacacgc

SEQ ID NO: 79190 - RNA, 19 nt, Artificial Sequence
  Description of Artificial Sequence: Synthetic oligonucleotide
  Sense strand starting at position 1721 of SEQ ID NO: 992
uccagauauccuggaguaa

SEQ ID NO: 79191 - RNA, 19 nt, Artificial Sequence
  Description of Artificial Sequence: Synthetic oligonucleotide
  Antisense strand to SEQ ID NO: 79110
uuacuccaggauaucugga

SEQ ID NO: 79192 - RNA, 19 nt, Artificial Sequence
  Description of Artificial Sequence: Synthetic oligonucleotide
  Sense strand starting at position 1625 of SEQ ID NO: 992
uaaucuggucaucguauca

SEQ ID NO: 79193 - RNA, 19 nt, Artificial Sequence
  Description of Artificial Sequence: Synthetic oligonucleotide
  Antisense strand to SEQ ID NO: 79112
ugauacgaugaccagauua

SEQ ID NO: 79194 - RNA, 19 nt, Artificial Sequence
  Description of Artificial Sequence: Synthetic oligonucleotide
  Sense strand starting at position 1548 of SEQ ID NO: 992
ugcuuugaccaugauacua

SEQ ID NO: 79195 - RNA, 19 nt, Artificial Sequence
  Description of Artificial Sequence: Synthetic oligonucleotide
  Antisense strand to SEQ ID NO: 79114
uaguaucauggucaaagca

SEQ ID NO: 79196 - RNA, 19 nt, Artificial Sequence
  Description of Artificial Sequence: Synthetic oligonucleotide
  Sense strand starting at position 1547 of SEQ ID NO: 992
cugcuuugaccaugauacu

SEQ ID NO: 79197 - RNA, 19 nt, Artificial Sequence
  Description of Artificial Sequence: Synthetic oligonucleotide
  Antisense strand to SEQ ID NO: 79116
aguaucauggucaaagcag

SEQ ID NO: 79198 - RNA, 19 nt, Artificial Sequence
  Description of Artificial Sequence: Synthetic oligonucleotide
  Sense strand starting at position 1521 of SEQ ID NO: 992
ggaagagccaaauggaguu

SEQ ID NO: 79199 - RNA, 19 nt, Artificial Sequence
  Description of Artificial Sequence: Synthetic oligonucleotide
  Antisense strand to SEQ ID NO: 79118
aacuccauuuggcucuucc

SEQ ID NO: 79200 - RNA, 19 nt, Artificial Sequence
  Description of Artificial Sequence: Synthetic oligonucleotide
  Sense strand starting at position 1324 of SEQ ID NO: 992
gcaguuuguguccucacuu

SEQ ID NO: 79201 - RNA, 19 nt, Artificial Sequence
  Description of Artificial Sequence: Synthetic oligonucleotide
  Antisense strand to SEQ ID NO: 79120
aagugaggacacaaacugc

SEQ ID NO: 79202 - RNA, 19 nt, Artificial Sequence
  Description of Artificial Sequence: Synthetic oligonucleotide
  Sense strand starting at position 1222 of SEQ ID NO: 992
gauguagucucaguuggaa

SEQ ID NO: 79203 - RNA, 19 nt, Artificial Sequence
  Description of Artificial Sequence: Synthetic oligonucleotide
  Antisense strand to SEQ ID NO: 79122
uuccaacugagacuacauc

SEQ ID NO: 79204 - RNA, 19 nt, Artificial Sequence
  Description of Artificial Sequence: Synthetic oligonucleotide
  Sense strand starting at position 1170 of SEQ ID NO: 992
guacaaagucaaugacaca

SEQ ID NO: 79205 - RNA, 19 nt, Artificial Sequence
  Description of Artificial Sequence: Synthetic oligonucleotide
  Antisense strand to SEQ ID NO: 79124
ugugucauugacuuuguac

SEQ ID NO: 79206 - RNA, 19 nt, Artificial Sequence
  Description of Artificial Sequence: Synthetic oligonucleotide
  Sense strand starting at position 1102 of SEQ ID NO: 992
aacuuagggaugugacguu

SEQ ID NO: 79207 - RNA, 19 nt, Artificial Sequence
  Description of Artificial Sequence: Synthetic oligonucleotide
  Antisense strand to SEQ ID NO: 79126
aacgucacaucccuaaguu

SEQ ID NO: 79208 - RNA, 19 nt, Artificial Sequence
  Description of Artificial Sequence: Synthetic oligonucleotide
  Sense strand starting at position 990 of SEQ ID NO: 992
ucagcuauuggucacacau

SEQ ID NO: 79209 - RNA, 19 nt, Artificial Sequence
  Description of Artificial Sequence: Synthetic oligonucleotide
  Antisense strand to SEQ ID NO: 79128
augugugaccaauagcuga

SEQ ID NO: 79210 - RNA, 19 nt, Artificial Sequence
  Description of Artificial Sequence: Synthetic oligonucleotide
  Sense strand starting at position 989 of SEQ ID NO: 992
cucagcuauuggucacaca

SEQ ID NO: 79211 - RNA, 19 nt, Artificial Sequence
  Description of Artificial Sequence: Synthetic oligonucleotide
  Antisense strand to SEQ ID NO: 79130
ugugugaccaauagcugag

SEQ ID NO: 79212 - RNA, 19 nt, Artificial Sequence
  Description of Artificial Sequence: Synthetic oligonucleotide
  Sense strand starting at position 981 of SEQ ID NO: 992
uccuguuacucagcuauug

SEQ ID NO: 79213 - RNA, 19 nt, Artificial Sequence
  Description of Artificial Sequence: Synthetic oligonucleotide
  Antisense strand to SEQ ID NO: 79132
caauagcugaguaacagga

SEQ ID NO: 79214 - RNA, 19 nt, Artificial Sequence
  Description of Artificial Sequence: Synthetic oligonucleotide
  Sense strand starting at position 922 of SEQ ID NO: 992
acagcuaucugagucauca

SEQ ID NO: 79215 - RNA, 19 nt, Artificial Sequence
  Description of Artificial Sequence: Synthetic oligonucleotide
  Antisense strand to SEQ ID NO: 79134
ugaugacucagauagcugu

SEQ ID NO: 79216 - RNA, 19 nt, Artificial Sequence
  Description of Artificial Sequence: Synthetic oligonucleotide
  Sense strand starting at position 903 of SEQ ID NO: 992
ggaguaguuugaguucaac

SEQ ID NO: 79217 - RNA, 19 nt, Artificial Sequence
  Description of Artificial Sequence: Synthetic oligonucleotide
  Antisense strand to SEQ ID NO: 79136
guugaacucaaacuacucc

SEQ ID NO: 79218 - RNA, 19 nt, Artificial Sequence
  Description of Artificial Sequence: Synthetic oligonucleotide
  Sense strand starting at position 696 of SEQ ID NO: 992
cugcguucuggagugguca

SEQ ID NO: 79219 - RNA, 19 nt, Artificial Sequence
  Description of Artificial Sequence: Synthetic oligonucleotide
  Antisense strand to SEQ ID NO: 79138
ugaccacuccagaacgcag

SEQ ID NO: 79220 - RNA, 19 nt, Artificial Sequence
  Description of Artificial Sequence: Synthetic oligonucleotide
  Sense strand starting at position 573 of SEQ ID NO: 992
uccucucucccauggagau

SEQ ID NO: 79221 - RNA, 19 nt, Artificial Sequence
  Description of Artificial Sequence: Synthetic oligonucleotide
  Antisense strand to SEQ ID NO: 79140
aucuccaugggagagagga

SEQ ID NO: 79222 - RNA, 19 nt, Artificial Sequence
  Description of Artificial Sequence: Synthetic oligonucleotide
  Sense strand starting at position 443 of SEQ ID NO: 992
uugaaagaaucuuccagca

SEQ ID NO: 79223 - RNA, 19 nt, Artificial Sequence
  Description of Artificial Sequence: Synthetic oligonucleotide
  Antisense strand to SEQ ID NO: 79142
ugcuggaagauucuuucaa

SEQ ID NO: 79224 - RNA, 19 nt, Artificial Sequence
  Description of Artificial Sequence: Synthetic oligonucleotide
  Sense strand starting at position 277 of SEQ ID NO: 992
gugucaggugaauaggagu

SEQ ID NO: 79225 - RNA, 19 nt, Artificial Sequence
  Description of Artificial Sequence: Synthetic oligonucleotide
  Antisense strand to SEQ ID NO: 79144
acuccuauucaccugacac

SEQ ID NO: 79226 - RNA, 19 nt, Artificial Sequence
  Description of Artificial Sequence: Synthetic oligonucleotide
  Sense strand starting at position 273 of SEQ ID NO: 992
uauagugucaggugaauag

SEQ ID NO: 79227 - RNA, 19 nt, Artificial Sequence
  Description of Artificial Sequence: Synthetic oligonucleotide
  Antisense strand to SEQ ID NO: 79146
cuauucaccugacacuaua

SEQ ID NO: 79228 - RNA, 19 nt, Artificial Sequence
  Description of Artificial Sequence: Synthetic oligonucleotide
  Sense strand starting at position 256 of SEQ ID NO: 992
cucagaagccagugaauua

SEQ ID NO: 79229 - RNA, 19 nt, Artificial Sequence
  Description of Artificial Sequence: Synthetic oligonucleotide
  Antisense strand to SEQ ID NO: 79148
uaauucacuggcuucugag

SEQ ID NO: 79230 - RNA, 19 nt, Artificial Sequence
  Description of Artificial Sequence: Synthetic oligonucleotide
  Sense strand starting at position 34 of SEQ ID NO: 992
uggcuuuggaaugggaauu

SEQ ID NO: 79231 - RNA, 19 nt, Artificial Sequence
  Description of Artificial Sequence: Synthetic oligonucleotide
  Antisense strand to SEQ ID NO: 79150
aauucccauuccaaagcca

SEQ ID NO: 79232 - RNA, 19 nt, Artificial Sequence
  Description of Artificial Sequence: Synthetic oligonucleotide
  Sense strand starting at position 33 of SEQ ID NO: 992
uuggcuuuggaaugggaau

SEQ ID NO: 79233 - RNA, 19 nt, Artificial Sequence
  Description of Artificial Sequence: Synthetic oligonucleotide
  Antisense strand to SEQ ID NO: 79152
auucccauuccaaagccaa

SEQ ID NO: 79234 - RNA, 19 nt, Artificial Sequence
  Description of Artificial Sequence: Synthetic oligonucleotide
  Sense strand starting at position 3917 of SEQ ID NO: 993
ucaggugaacccugaauug

SEQ ID NO: 79235 - RNA, 19 nt, Artificial Sequence
  Description of Artificial Sequence: Synthetic oligonucleotide
  Antisense strand to SEQ ID NO: 79154
caauucaggguucaccuga

SEQ ID NO: 79236 - RNA, 19 nt, Artificial Sequence
  Description of Artificial Sequence: Synthetic oligonucleotide
  Sense strand starting at position 3906 of SEQ ID NO: 993
gcaucaguuccucagguga

SEQ ID NO: 79237 - RNA, 19 nt, Artificial Sequence
  Description of Artificial Sequence: Synthetic oligonucleotide
  Antisense strand to SEQ ID NO: 79156
ucaccugaggaacugaugc

SEQ ID NO: 79238 - RNA, 19 nt, Artificial Sequence
  Description of Artificial Sequence: Synthetic oligonucleotide
  Sense strand starting at position 3813 of SEQ ID NO: 993
ugaguugugcagggaaaug

SEQ ID NO: 79239 - RNA, 19 nt, Artificial Sequence
  Description of Artificial Sequence: Synthetic oligonucleotide
  Antisense strand to SEQ ID NO: 79158
cauuucccugcacaacuca

SEQ ID NO: 79240 - RNA, 19 nt, Artificial Sequence
  Description of Artificial Sequence: Synthetic oligonucleotide
  Sense strand starting at position 3812 of SEQ ID NO: 993
cugaguugugcagggaaau

SEQ ID NO: 79241 - RNA, 19 nt, Artificial Sequence
  Description of Artificial Sequence: Synthetic oligonucleotide
  Antisense strand to SEQ ID NO: 79160
auuucccugcacaacucag

SEQ ID NO: 79242 - RNA, 19 nt, Artificial Sequence
  Description of Artificial Sequence: Synthetic oligonucleotide
  Sense strand starting at position 3810 of SEQ ID NO: 993
gucugaguugugcagggaa

SEQ ID NO: 79243 - RNA, 19 nt, Artificial Sequence
  Description of Artificial Sequence: Synthetic oligonucleotide
  Antisense strand to SEQ ID NO: 79162
uucccugcacaacucagac

SEQ ID NO: 79244 - RNA, 19 nt, Artificial Sequence
  Description of Artificial Sequence: Synthetic oligonucleotide
  Sense strand starting at position 3741 of SEQ ID NO: 993
ucuaaauccucuguggaag

SEQ ID NO: 79245 - RNA, 19 nt, Artificial Sequence
  Description of Artificial Sequence: Synthetic oligonucleotide
  Antisense strand to SEQ ID NO: 79164
cuuccacagaggauuuaga

SEQ ID NO: 79246 - RNA, 19 nt, Artificial Sequence
  Description of Artificial Sequence: Synthetic oligonucleotide
  Sense strand starting at position 3740 of SEQ ID NO: 993
uucuaaauccucuguggaa

SEQ ID NO: 79247 - RNA, 19 nt, Artificial Sequence
  Description of Artificial Sequence: Synthetic oligonucleotide
  Antisense strand to SEQ ID NO: 79166
uuccacagaggauuuagaa

SEQ ID NO: 79248 - RNA, 19 nt, Artificial Sequence
  Description of Artificial Sequence: Synthetic oligonucleotide
  Sense strand starting at position 3482 of SEQ ID NO: 993
ugcauauggcuugaacacu

SEQ ID NO: 79249 - RNA, 19 nt, Artificial Sequence
  Description of Artificial Sequence: Synthetic oligonucleotide
  Antisense strand to SEQ ID NO: 79168
aguguucaagccauaugca

SEQ ID NO: 79250 - RNA, 19 nt, Artificial Sequence
  Description of Artificial Sequence: Synthetic oligonucleotide
  Sense strand starting at position 3470 of SEQ ID NO: 993
gguugauuggacugcauau

SEQ ID NO: 79251 - RNA, 19 nt, Artificial Sequence
  Description of Artificial Sequence: Synthetic oligonucleotide
  Antisense strand to SEQ ID NO: 79170
auaugcaguccaaucaacc

SEQ ID NO: 79252 - RNA, 19 nt, Artificial Sequence
  Description of Artificial Sequence: Synthetic oligonucleotide
  Sense strand starting at position 3382 of SEQ ID NO: 993
auagguguuugauuacagu

SEQ ID NO: 79253 - RNA, 19 nt, Artificial Sequence
  Description of Artificial Sequence: Synthetic oligonucleotide
  Antisense strand to SEQ ID NO: 79172
acuguaaucaaacaccuau

SEQ ID NO: 79254 - RNA, 19 nt, Artificial Sequence
  Description of Artificial Sequence: Synthetic oligonucleotide
  Sense strand starting at position 3379 of SEQ ID NO: 993
uaaauagguguuugauuac

SEQ ID NO: 79255 - RNA, 19 nt, Artificial Sequence
  Description of Artificial Sequence: Synthetic oligonucleotide
  Antisense strand to SEQ ID NO: 79174
guaaucaaacaccuauuua

SEQ ID NO: 79256 - RNA, 19 nt, Artificial Sequence
  Description of Artificial Sequence: Synthetic oligonucleotide
  Sense strand starting at position 3328 of SEQ ID NO: 993
uuagaaugauccucucagu

SEQ ID NO: 79257 - RNA, 19 nt, Artificial Sequence
  Description of Artificial Sequence: Synthetic oligonucleotide
  Antisense strand to SEQ ID NO: 79176
acugagaggaucauucuaa

SEQ ID NO: 79258 - RNA, 19 nt, Artificial Sequence
  Description of Artificial Sequence: Synthetic oligonucleotide
  Sense strand starting at position 3290 of SEQ ID NO: 993
uuaugaagaucugaaagca

SEQ ID NO: 79259 - RNA, 19 nt, Artificial Sequence
  Description of Artificial Sequence: Synthetic oligonucleotide
  Antisense strand to SEQ ID NO: 79178
ugcuuucagaucuucauaa

SEQ ID NO: 79260 - RNA, 19 nt, Artificial Sequence
  Description of Artificial Sequence: Synthetic oligonucleotide
  Sense strand starting at position 3275 of SEQ ID NO: 993
aggagcgauuugcauuuau

SEQ ID NO: 79261 - RNA, 19 nt, Artificial Sequence
  Description of Artificial Sequence: Synthetic oligonucleotide
  Antisense strand to SEQ ID NO: 79180
auaaaugcaaaucgcuccu

SEQ ID NO: 79262 - RNA, 19 nt, Artificial Sequence
  Description of Artificial Sequence: Synthetic oligonucleotide
  Sense strand starting at position 3169 of SEQ ID NO: 993
cagagauguccaugaaagu

SEQ ID NO: 79263 - RNA, 19 nt, Artificial Sequence
  Description of Artificial Sequence: Synthetic oligonucleotide
  Antisense strand to SEQ ID NO: 79182
acuuucauggacaucucug

SEQ ID NO: 79264 - RNA, 19 nt, Artificial Sequence
  Description of Artificial Sequence: Synthetic oligonucleotide
  Sense strand starting at position 3159 of SEQ ID NO: 993
gagcuuugugcagagaugu

SEQ ID NO: 79265 - RNA, 19 nt, Artificial Sequence
  Description of Artificial Sequence: Synthetic oligonucleotide
  Antisense strand to SEQ ID NO: 79184
acaucucugcacaaagcuc

SEQ ID NO: 79266 - RNA, 19 nt, Artificial Sequence
  Description of Artificial Sequence: Synthetic oligonucleotide
  Sense strand starting at position 3157 of SEQ ID NO: 993
gugagcuuugugcagagau

SEQ ID NO: 79267 - RNA, 19 nt, Artificial Sequence
  Description of Artificial Sequence: Synthetic oligonucleotide
  Antisense strand to SEQ ID NO: 79186
aucucugcacaaagcucac

SEQ ID NO: 79268 - RNA, 19 nt, Artificial Sequence
  Description of Artificial Sequence: Synthetic oligonucleotide
  Sense strand starting at position 3035 of SEQ ID NO: 993
caggcuguugcaucguuua

SEQ ID NO: 79269 - RNA, 19 nt, Artificial Sequence
  Description of Artificial Sequence: Synthetic oligonucleotide
  Antisense strand to SEQ ID NO: 79188
uaaacgaugcaacagccug

SEQ ID NO: 79270 - RNA, 19 nt, Artificial Sequence
  Description of Artificial Sequence: Synthetic oligonucleotide
  Sense strand starting at position 2981 of SEQ ID NO: 993
ccaggccuucuauggagaa

SEQ ID NO: 79271 - RNA, 19 nt, Artificial Sequence
  Description of Artificial Sequence: Synthetic oligonucleotide
  Antisense strand to SEQ ID NO: 79190
uucuccauagaaggccugg

SEQ ID NO: 79272 - RNA, 19 nt, Artificial Sequence
  Description of Artificial Sequence: Synthetic oligonucleotide
  Sense strand starting at position 2691 of SEQ ID NO: 993
guauguuaccauuacucuc

SEQ ID NO: 79273 - RNA, 19 nt, Artificial Sequence
  Description of Artificial Sequence: Synthetic oligonucleotide
  Antisense strand to SEQ ID NO: 79192
gagaguaaugguaacauac

SEQ ID NO: 79274 - RNA, 19 nt, Artificial Sequence
  Description of Artificial Sequence: Synthetic oligonucleotide
  Sense strand starting at position 2678 of SEQ ID NO: 993
agguuugggacuuguaugu

SEQ ID NO: 79275 - RNA, 19 nt, Artificial Sequence
  Description of Artificial Sequence: Synthetic oligonucleotide
  Antisense strand to SEQ ID NO: 79194
acauacaagucccaaaccu

SEQ ID NO: 79276 - RNA, 19 nt, Artificial Sequence
  Description of Artificial Sequence: Synthetic oligonucleotide
  Sense strand starting at position 2476 of SEQ ID NO: 993
ggguuuccauguucugaaa

SEQ ID NO: 79277 - RNA, 19 nt, Artificial Sequence
  Description of Artificial Sequence: Synthetic oligonucleotide
  Antisense strand to SEQ ID NO: 79196
uuucagaacauggaaaccc

SEQ ID NO: 79278 - RNA, 19 nt, Artificial Sequence
  Description of Artificial Sequence: Synthetic oligonucleotide
  Sense strand starting at position 2454 of SEQ ID NO: 993
gcccucauugggcaagauu

SEQ ID NO: 79279 - RNA, 19 nt, Artificial Sequence
  Description of Artificial Sequence: Synthetic oligonucleotide
  Antisense strand to SEQ ID NO: 79198
aaucuugcccaaugagggc

SEQ ID NO: 79280 - RNA, 19 nt, Artificial Sequence
  Description of Artificial Sequence: Synthetic oligonucleotide
  Sense strand starting at position 2453 of SEQ ID NO: 993
ugcccucauugggcaagau

SEQ ID NO: 79281 - RNA, 19 nt, Artificial Sequence
  Description of Artificial Sequence: Synthetic oligonucleotide
  Antisense strand to SEQ ID NO: 79200
aucuugcccaaugagggca

SEQ ID NO: 79282 - RNA, 19 nt, Artificial Sequence
  Description of Artificial Sequence: Synthetic oligonucleotide
  Sense strand starting at position 2434 of SEQ ID NO: 993
ugaccuugccaacgaugaa

SEQ ID NO: 79283 - RNA, 19 nt, Artificial Sequence
  Description of Artificial Sequence: Synthetic oligonucleotide
  Antisense strand to SEQ ID NO: 79202
uucaucguuggcaagguca

SEQ ID NO: 79284 - RNA, 19 nt, Artificial Sequence
  Description of Artificial Sequence: Synthetic oligonucleotide
  Sense strand starting at position 2428 of SEQ ID NO: 993
gaguucugaccuugccaac

SEQ ID NO: 79285 - RNA, 19 nt, Artificial Sequence
  Description of Artificial Sequence: Synthetic oligonucleotide
  Antisense strand to SEQ ID NO: 79204
guuggcaaggucagaacuc

SEQ ID NO: 79286 - RNA, 19 nt, Artificial Sequence
  Description of Artificial Sequence: Synthetic oligonucleotide
  Sense strand starting at position 2341 of SEQ ID NO: 993
gcuacucagccugaugaaa

SEQ ID NO: 79287 - RNA, 19 nt, Artificial Sequence
  Description of Artificial Sequence: Synthetic oligonucleotide
  Antisense strand to SEQ ID NO: 79206
uuucaucaggcugaguagc

SEQ ID NO: 79288 - RNA, 19 nt, Artificial Sequence
  Description of Artificial Sequence: Synthetic oligonucleotide
  Sense strand starting at position 2340 of SEQ ID NO: 993
cgcuacucagccugaugaa

SEQ ID NO: 79289 - RNA, 19 nt, Artificial Sequence
  Description of Artificial Sequence: Synthetic oligonucleotide
  Antisense strand to SEQ ID NO: 79208
uucaucaggcugaguagcg

SEQ ID NO: 79290 - RNA, 19 nt, Artificial Sequence
  Description of Artificial Sequence: Synthetic oligonucleotide
  Sense strand starting at position 2272 of SEQ ID NO: 993
gaagcuaugcuccaucgga

SEQ ID NO: 79291 - RNA, 19 nt, Artificial Sequence
  Description of Artificial Sequence: Synthetic oligonucleotide
  Antisense strand to SEQ ID NO: 79210
uccgauggagcauagcuuc

SEQ ID NO: 79292 - RNA, 19 nt, Artificial Sequence
  Description of Artificial Sequence: Synthetic oligonucleotide
  Sense strand starting at position 2123 of SEQ ID NO: 993
guccgcuaagccgauuuau

SEQ ID NO: 79293 - RNA, 19 nt, Artificial Sequence
  Description of Artificial Sequence: Synthetic oligonucleotide
  Antisense strand to SEQ ID NO: 79212
auaaaucggcuuagcggac

SEQ ID NO: 79294 - RNA, 19 nt, Artificial Sequence
  Description of Artificial Sequence: Synthetic oligonucleotide
  Sense strand starting at position 2072 of SEQ ID NO: 993
ccgcguauuauacagacuu

SEQ ID NO: 79295 - RNA, 19 nt, Artificial Sequence
  Description of Artificial Sequence: Synthetic oligonucleotide
  Antisense strand to SEQ ID NO: 79214
aagucuguauaauacgcgg

SEQ ID NO: 79296 - RNA, 19 nt, Artificial Sequence
  Description of Artificial Sequence: Synthetic oligonucleotide
  Sense strand starting at position 2067 of SEQ ID NO: 993
gcucuccgcguauuauaca

SEQ ID NO: 79297 - RNA, 19 nt, Artificial Sequence
  Description of Artificial Sequence: Synthetic oligonucleotide
  Antisense strand to SEQ ID NO: 79216
uguauaauacgcggagagc

SEQ ID NO: 79298 - RNA, 19 nt, Artificial Sequence
  Description of Artificial Sequence: Synthetic oligonucleotide
  Sense strand starting at position 2064 of SEQ ID NO: 993
cgcgcucuccgcguauuau

SEQ ID NO: 79299 - RNA, 19 nt, Artificial Sequence
  Description of Artificial Sequence: Synthetic oligonucleotide
  Antisense strand to SEQ ID NO: 79218
auaauacgcggagagcgcg

SEQ ID NO: 79300 - RNA, 19 nt, Artificial Sequence
  Description of Artificial Sequence: Synthetic oligonucleotide
  Sense strand starting at position 957 of SEQ ID NO: 993
aguaauccgcugucguaca

SEQ ID NO: 79301 - RNA, 19 nt, Artificial Sequence
  Description of Artificial Sequence: Synthetic oligonucleotide
  Antisense strand to SEQ ID NO: 79220
uguacgacagcggauuacu

SEQ ID NO: 79302 - RNA, 19 nt, Artificial Sequence
  Description of Artificial Sequence: Synthetic oligonucleotide
  Sense strand starting at position 912 of SEQ ID NO: 993
acucuuguccagugucaca

SEQ ID NO: 79303 - RNA, 19 nt, Artificial Sequence
  Description of Artificial Sequence: Synthetic oligonucleotide
  Antisense strand to SEQ ID NO: 79222
ugugacacuggacaagagu

SEQ ID NO: 79304 - RNA, 19 nt, Artificial Sequence
  Description of Artificial Sequence: Synthetic oligonucleotide
  Sense strand starting at position 279 of SEQ ID NO: 993
gggacaaggcuauggcaua

SEQ ID NO: 79305 - RNA, 19 nt, Artificial Sequence
  Description of Artificial Sequence: Synthetic oligonucleotide
  Antisense strand to SEQ ID NO: 79224
uaugccauagccuuguccc

SEQ ID NO: 79306 - RNA, 19 nt, Artificial Sequence
  Description of Artificial Sequence: Synthetic oligonucleotide
  Sense strand starting at position 141 of SEQ ID NO: 993
ggcucaaauucugcagcuu

SEQ ID NO: 79307 - RNA, 19 nt, Artificial Sequence
  Description of Artificial Sequence: Synthetic oligonucleotide
  Antisense strand to SEQ ID NO: 79226
aagcugcagaauuugagcc

SEQ ID NO: 79308 - RNA, 19 nt, Artificial Sequence
  Description of Artificial Sequence: Synthetic oligonucleotide
  Sense strand starting at position 85 of SEQ ID NO: 993
gcauuccuucuggguuaca

SEQ ID NO: 79309 - RNA, 19 nt, Artificial Sequence
  Description of Artificial Sequence: Synthetic oligonucleotide
  Antisense strand to SEQ ID NO: 79228
uguaacccagaaggaaugc

SEQ ID NO: 79310 - RNA, 19 nt, Artificial Sequence
  Description of Artificial Sequence: Synthetic oligonucleotide
  Sense strand starting at position 41 of SEQ ID NO: 993
gaaagucucuuguuccaag

SEQ ID NO: 79311 - RNA, 19 nt, Artificial Sequence
  Description of Artificial Sequence: Synthetic oligonucleotide
  Antisense strand to SEQ ID NO: 79230
cuuggaacaagagacuuuc

SEQ ID NO: 79312 - RNA, 19 nt, Artificial Sequence
  Description of Artificial Sequence: Synthetic oligonucleotide
  Sense strand starting at position 37 of SEQ ID NO: 993
uuaggaaagucucuuguuc

SEQ ID NO: 79313 - RNA, 19 nt, Artificial Sequence
  Description of Artificial Sequence: Synthetic oligonucleotide
  Antisense strand to SEQ ID NO: 79232
gaacaagagacuuuccuaa

SEQ ID NO: 79314 - RNA, 19 nt, Artificial Sequence
  Description of Artificial Sequence: Synthetic oligonucleotide
  Sense strand starting at position 192 of SEQ ID NO: 994
gagcauccauguuugacau

SEQ ID NO: 79315 - RNA, 19 nt, Artificial Sequence
  Description of Artificial Sequence: Synthetic oligonucleotide
  Antisense strand to SEQ ID NO: 79234
augucaaacauggaugcuc

SEQ ID NO: 79316 - RNA, 19 nt, Artificial Sequence
  Description of Artificial Sequence: Synthetic oligonucleotide
  Sense strand starting at position 236 of SEQ ID NO: 994
augugaagucccuaaacca

SEQ ID NO: 79317 - RNA, 19 nt, Artificial Sequence
  Description of Artificial Sequence: Synthetic oligonucleotide
  Antisense strand to SEQ ID NO: 79236
ugguuuagggacuucacau

SEQ ID NO: 79318 - RNA, 19 nt, Artificial Sequence
  Description of Artificial Sequence: Synthetic oligonucleotide
  Sense strand starting at position 338 of SEQ ID NO: 994
augauauuccaccguugcu

SEQ ID NO: 79319 - RNA, 19 nt, Artificial Sequence
  Description of Artificial Sequence: Synthetic oligonucleotide
  Antisense strand to SEQ ID NO: 79238
agcaacgguggaauaucau

SEQ ID NO: 79320 - RNA, 19 nt, Artificial Sequence
  Description of Artificial Sequence: Synthetic oligonucleotide
  Sense strand starting at position 350 of SEQ ID NO: 994
cguugcucuuggguuagaa

SEQ ID NO: 79321 - RNA, 19 nt, Artificial Sequence
  Description of Artificial Sequence: Synthetic oligonucleotide
  Antisense strand to SEQ ID NO: 79240
uucuaacccaagagcaacg

SEQ ID NO: 79322 - RNA, 19 nt, Artificial Sequence
  Description of Artificial Sequence: Synthetic oligonucleotide
  Sense strand starting at position 475 of SEQ ID NO: 994
ccaagagcagguuaaacuu

SEQ ID NO: 79323 - RNA, 19 nt, Artificial Sequence
  Description of Artificial Sequence: Synthetic oligonucleotide
  Antisense strand to SEQ ID NO: 79242
aaguuuaaccugcucuugg

SEQ ID NO: 79324 - RNA, 19 nt, Artificial Sequence
  Description of Artificial Sequence: Synthetic oligonucleotide
  Sense strand starting at position 497 of SEQ ID NO: 994
caucgauugcacugauaag

SEQ ID NO: 79325 - RNA, 19 nt, Artificial Sequence
  Description of Artificial Sequence: Synthetic oligonucleotide
  Antisense strand to SEQ ID NO: 79244
cuuaucagugcaaucgaug

SEQ ID NO: 79326 - RNA, 19 nt, Artificial Sequence
  Description of Artificial Sequence: Synthetic oligonucleotide
  Sense strand starting at position 752 of SEQ ID NO: 994
aguggaggcaagugugaaa

SEQ ID NO: 79327 - RNA, 19 nt, Artificial Sequence
  Description of Artificial Sequence: Synthetic oligonucleotide
  Antisense strand to SEQ ID NO: 79246
uuucacacuugccuccacu

SEQ ID NO: 79328 - RNA, 19 nt, Artificial Sequence
  Description of Artificial Sequence: Synthetic oligonucleotide
  Sense strand starting at position 853 of SEQ ID NO: 994
acugaaauugcagacugua

SEQ ID NO: 79329 - RNA, 19 nt, Artificial Sequence
  Description of Artificial Sequence: Synthetic oligonucleotide
  Antisense strand to SEQ ID NO: 79248
uacagucugcaauuucagu

SEQ ID NO: 79330 - RNA, 19 nt, Artificial Sequence
  Description of Artificial Sequence: Synthetic oligonucleotide
  Sense strand starting at position 862 of SEQ ID NO: 994
gcagacuguaguggauuaa

SEQ ID NO: 79331 - RNA, 19 nt, Artificial Sequence
  Description of Artificial Sequence: Synthetic oligonucleotide
  Antisense strand to SEQ ID NO: 79250
uuaauccacuacagucugc

SEQ ID NO: 79332 - RNA, 19 nt, Artificial Sequence
  Description of Artificial Sequence: Synthetic oligonucleotide
  Sense strand starting at position 872 of SEQ ID NO: 994
guggauuaauccuccagaa

SEQ ID NO: 79333 - RNA, 19 nt, Artificial Sequence
  Description of Artificial Sequence: Synthetic oligonucleotide
  Antisense strand to SEQ ID NO: 79252
uucuggaggauuaauccac

SEQ ID NO: 79334 - RNA, 19 nt, Artificial Sequence
  Description of Artificial Sequence: Synthetic oligonucleotide
  Sense strand starting at position 936 of SEQ ID NO: 994
acagaaauguccuuggcuu

SEQ ID NO: 79335 - RNA, 19 nt, Artificial Sequence
  Description of Artificial Sequence: Synthetic oligonucleotide
  Antisense strand to SEQ ID NO: 79254
aagccaaggacauuucugu

SEQ ID NO: 79336 - RNA, 19 nt, Artificial Sequence
  Description of Artificial Sequence: Synthetic oligonucleotide
  Sense strand starting at position 944 of SEQ ID NO: 994
guccuuggcuucucaguga

SEQ ID NO: 79337 - RNA, 19 nt, Artificial Sequence
  Description of Artificial Sequence: Synthetic oligonucleotide
  Antisense strand to SEQ ID NO: 79256
ucacugagaagccaaggac

SEQ ID NO: 79338 - RNA, 19 nt, Artificial Sequence
  Description of Artificial Sequence: Synthetic oligonucleotide
  Sense strand starting at position 948 of SEQ ID NO: 994
uuggcuucucagugaaggu

SEQ ID NO: 79339 - RNA, 19 nt, Artificial Sequence
  Description of Artificial Sequence: Synthetic oligonucleotide
  Antisense strand to SEQ ID NO: 79258
accuucacugagaagccaa

SEQ ID NO: 79340 - RNA, 19 nt, Artificial Sequence
  Description of Artificial Sequence: Synthetic oligonucleotide
  Sense strand starting at position 1086 of SEQ ID NO: 994
guuuccauccaugguggua

SEQ ID NO: 79341 - RNA, 19 nt, Artificial Sequence
  Description of Artificial Sequence: Synthetic oligonucleotide
  Antisense strand to SEQ ID NO: 79260
uaccaccauggauggaaac

SEQ ID NO: 79342 - RNA, 19 nt, Artificial Sequence
  Description of Artificial Sequence: Synthetic oligonucleotide
  Sense strand starting at position 1320 of SEQ ID NO: 994
gcauucugaccuugggcaa

SEQ ID NO: 79343 - RNA, 19 nt, Artificial Sequence
  Description of Artificial Sequence: Synthetic oligonucleotide
  Antisense strand to SEQ ID NO: 79262
uugcccaaggucagaaugc

SEQ ID NO: 79344 - RNA, 19 nt, Artificial Sequence
  Description of Artificial Sequence: Synthetic oligonucleotide
  Sense strand starting at position 1396 of SEQ ID NO: 994
gcccgauuguuccugaaau

SEQ ID NO: 79345 - RNA, 19 nt, Artificial Sequence
  Description of Artificial Sequence: Synthetic oligonucleotide
  Antisense strand to SEQ ID NO: 79264
auuucaggaacaaucgggc

SEQ ID NO: 79346 - RNA, 19 nt, Artificial Sequence
  Description of Artificial Sequence: Synthetic oligonucleotide
  Sense strand starting at position 1398 of SEQ ID NO: 994
ccgauuguuccugaaauac

SEQ ID NO: 79347 - RNA, 19 nt, Artificial Sequence
  Description of Artificial Sequence: Synthetic oligonucleotide
  Antisense strand to SEQ ID NO: 79266
guauuucaggaacaaucgg

SEQ ID NO: 79348 - RNA, 19 nt, Artificial Sequence
  Description of Artificial Sequence: Synthetic oligonucleotide
  Sense strand starting at position 1618 of SEQ ID NO: 994
uuauaucucgcugauugga

SEQ ID NO: 79349 - RNA, 19 nt, Artificial Sequence
  Description of Artificial Sequence: Synthetic oligonucleotide
  Antisense strand to SEQ ID NO: 79268
uccaaucagcgagauauaa

SEQ ID NO: 79350 - RNA, 19 nt, Artificial Sequence
  Description of Artificial Sequence: Synthetic oligonucleotide
  Sense strand starting at position 1620 of SEQ ID NO: 994
auaucucgcugauuggaaa

SEQ ID NO: 79351 - RNA, 19 nt, Artificial Sequence
  Description of Artificial Sequence: Synthetic oligonucleotide
  Antisense strand to SEQ ID NO: 79270
uuuccaaucagcgagauau

SEQ ID NO: 79352 - RNA, 19 nt, Artificial Sequence
  Description of Artificial Sequence: Synthetic oligonucleotide
  Sense strand starting at position 2314 of SEQ ID NO: 994
guccuuccuccuggaaaca

SEQ ID NO: 79353 - RNA, 19 nt, Artificial Sequence
  Description of Artificial Sequence: Synthetic oligonucleotide
  Antisense strand to SEQ ID NO: 79272
uguuuccaggaggaaggac

SEQ ID NO: 79354 - RNA, 19 nt, Artificial Sequence
  Description of Artificial Sequence: Synthetic oligonucleotide
  Sense strand starting at position 2418 of SEQ ID NO: 994
gaaacagccuggguucuaa

SEQ ID NO: 79355 - RNA, 19 nt, Artificial Sequence
  Description of Artificial Sequence: Synthetic oligonucleotide
  Antisense strand to SEQ ID NO: 79274
uuagaacccaggcuguuuc

SEQ ID NO: 79356 - RNA, 19 nt, Artificial Sequence
  Description of Artificial Sequence: Synthetic oligonucleotide
  Sense strand starting at position 2509 of SEQ ID NO: 994
cugcuauguggaggaaaua

SEQ ID NO: 79357 - RNA, 19 nt, Artificial Sequence
  Description of Artificial Sequence: Synthetic oligonucleotide
  Antisense strand to SEQ ID NO: 79276
uauuuccuccacauagcag

SEQ ID NO: 79358 - RNA, 19 nt, Artificial Sequence
  Description of Artificial Sequence: Synthetic oligonucleotide
  Sense strand starting at position 2550 of SEQ ID NO: 994
ggagaaaucugugacauac

SEQ ID NO: 79359 - RNA, 19 nt, Artificial Sequence
  Description of Artificial Sequence: Synthetic oligonucleotide
  Antisense strand to SEQ ID NO: 79278
guaugucacagauuucucc

SEQ ID NO: 79360 - RNA, 19 nt, Artificial Sequence
  Description of Artificial Sequence: Synthetic oligonucleotide
  Sense strand starting at position 2598 of SEQ ID NO: 994
caucacaaguggucaguaa

SEQ ID NO: 79361 - RNA, 19 nt, Artificial Sequence
  Description of Artificial Sequence: Synthetic oligonucleotide
  Antisense strand to SEQ ID NO: 79280
uuacugaccacuugugaug

SEQ ID NO: 79362 - RNA, 19 nt, Artificial Sequence
  Description of Artificial Sequence: Synthetic oligonucleotide
  Sense strand starting at position 2599 of SEQ ID NO: 994
aucacaaguggucaguaaa

SEQ ID NO: 79363 - RNA, 19 nt, Artificial Sequence
  Description of Artificial Sequence: Synthetic oligonucleotide
  Antisense strand to SEQ ID NO: 79282
uuuacugaccacuugugau

SEQ ID NO: 79364 - RNA, 19 nt, Artificial Sequence
  Description of Artificial Sequence: Synthetic oligonucleotide
  Sense strand starting at position 2602 of SEQ ID NO: 994
acaaguggucaguaaauau

SEQ ID NO: 79365 - RNA, 19 nt, Artificial Sequence
  Description of Artificial Sequence: Synthetic oligonucleotide
  Antisense strand to SEQ ID NO: 79284
auauuuacugaccacuugu

SEQ ID NO: 79366 - RNA, 19 nt, Artificial Sequence
  Description of Artificial Sequence: Synthetic oligonucleotide
  Sense strand starting at position 2697 of SEQ ID NO: 994
acaacuugcuggguagaca

SEQ ID NO: 79367 - RNA, 19 nt, Artificial Sequence
  Description of Artificial Sequence: Synthetic oligonucleotide
  Antisense strand to SEQ ID NO: 79286
ugucuacccagcaaguugu

SEQ ID NO: 79368 - RNA, 19 nt, Artificial Sequence
  Description of Artificial Sequence: Synthetic oligonucleotide
  Sense strand starting at position 2814 of SEQ ID NO: 994
uacaguguugaggaagcaa

SEQ ID NO: 79369 - RNA, 19 nt, Artificial Sequence
  Description of Artificial Sequence: Synthetic oligonucleotide
  Antisense strand to SEQ ID NO: 79288
uugcuuccucaacacugua

SEQ ID NO: 79370 - RNA, 19 nt, Artificial Sequence
  Description of Artificial Sequence: Synthetic oligonucleotide
  Sense strand starting at position 3107 of SEQ ID NO: 994
gaagaaaucgagugccaga

SEQ ID NO: 79371 - RNA, 19 nt, Artificial Sequence
  Description of Artificial Sequence: Synthetic oligonucleotide
  Antisense strand to SEQ ID NO: 79290
ucuggcacucgauuucuuc

SEQ ID NO: 79372 - RNA, 19 nt, Artificial Sequence
  Description of Artificial Sequence: Synthetic oligonucleotide
  Sense strand starting at position 3112 of SEQ ID NO: 994
aaucgagugccagaaccua

SEQ ID NO: 79373 - RNA, 19 nt, Artificial Sequence
  Description of Artificial Sequence: Synthetic oligonucleotide
  Antisense strand to SEQ ID NO: 79292
uagguucuggcacucgauu

SEQ ID NO: 79374 - RNA, 19 nt, Artificial Sequence
  Description of Artificial Sequence: Synthetic oligonucleotide
  Sense strand starting at position 3136 of SEQ ID NO: 994
cauuguaugguguguuaag

SEQ ID NO: 79375 - RNA, 19 nt, Artificial Sequence
  Description of Artificial Sequence: Synthetic oligonucleotide
  Antisense strand to SEQ ID NO: 79294
cuuaacacaccauacaaug

SEQ ID NO: 79376 - RNA, 19 nt, Artificial Sequence
  Description of Artificial Sequence: Synthetic oligonucleotide
  Sense strand starting at position 3196 of SEQ ID NO: 994
ggacuaugguuaucagaua

SEQ ID NO: 79377 - RNA, 19 nt, Artificial Sequence
  Description of Artificial Sequence: Synthetic oligonucleotide
  Antisense strand to SEQ ID NO: 79296
uaucugauaaccauagucc

SEQ ID NO: 79378 - RNA, 19 nt, Artificial Sequence
  Description of Artificial Sequence: Synthetic oligonucleotide
  Sense strand starting at position 3201 of SEQ ID NO: 994
augguuaucagauauacgu

SEQ ID NO: 79379 - RNA, 19 nt, Artificial Sequence
  Description of Artificial Sequence: Synthetic oligonucleotide
  Antisense strand to SEQ ID NO: 79298
acguauaucugauaaccau

SEQ ID NO: 79380 - RNA, 19 nt, Artificial Sequence
  Description of Artificial Sequence: Synthetic oligonucleotide
  Sense strand starting at position 3203 of SEQ ID NO: 994
gguuaucagauauacguuu

SEQ ID NO: 79381 - RNA, 19 nt, Artificial Sequence
  Description of Artificial Sequence: Synthetic oligonucleotide
  Antisense strand to SEQ ID NO: 79300
aaacguauaucugauaacc

SEQ ID NO: 79382 - RNA, 19 nt, Artificial Sequence
  Description of Artificial Sequence: Synthetic oligonucleotide
  Sense strand starting at position 3521 of SEQ ID NO: 994
caggaaucuuuccuugugu

SEQ ID NO: 79383 - RNA, 19 nt, Artificial Sequence
  Description of Artificial Sequence: Synthetic oligonucleotide
  Antisense strand to SEQ ID NO: 79302
acacaaggaaagauuccug

SEQ ID NO: 79384 - RNA, 19 nt, Artificial Sequence
  Description of Artificial Sequence: Synthetic oligonucleotide
  Sense strand starting at position 3523 of SEQ ID NO: 994
ggaaucuuuccuugugugu

SEQ ID NO: 79385 - RNA, 19 nt, Artificial Sequence
  Description of Artificial Sequence: Synthetic oligonucleotide
  Antisense strand to SEQ ID NO: 79304
acacacaaggaaagauucc

SEQ ID NO: 79386 - RNA, 19 nt, Artificial Sequence
  Description of Artificial Sequence: Synthetic oligonucleotide
  Sense strand starting at position 3526 of SEQ ID NO: 994
aucuuuccuuguguguuaa

SEQ ID NO: 79387 - RNA, 19 nt, Artificial Sequence
  Description of Artificial Sequence: Synthetic oligonucleotide
  Antisense strand to SEQ ID NO: 79306
uuaacacacaaggaaagau

SEQ ID NO: 79388 - RNA, 19 nt, Artificial Sequence
  Description of Artificial Sequence: Synthetic oligonucleotide
  Sense strand starting at position 3626 of SEQ ID NO: 994
gcaccuacuacguguuaag

SEQ ID NO: 79389 - RNA, 19 nt, Artificial Sequence
  Description of Artificial Sequence: Synthetic oligonucleotide
  Antisense strand to SEQ ID NO: 79308
cuuaacacguaguaggugc

SEQ ID NO: 79390 - RNA, 19 nt, Artificial Sequence
  Description of Artificial Sequence: Synthetic oligonucleotide
  Sense strand starting at position 3669 of SEQ ID NO: 994
uacauucuggugggaaaca

SEQ ID NO: 79391 - RNA, 19 nt, Artificial Sequence
  Description of Artificial Sequence: Synthetic oligonucleotide
  Antisense strand to SEQ ID NO: 79310
uguuucccaccagaaugua

SEQ ID NO: 79392 - RNA, 19 nt, Artificial Sequence
  Description of Artificial Sequence: Synthetic oligonucleotide
  Sense strand starting at position 3714 of SEQ ID NO: 994
aauguaacguguucugaag

SEQ ID NO: 79393 - RNA, 19 nt, Artificial Sequence
  Description of Artificial Sequence: Synthetic oligonucleotide
  Antisense strand to SEQ ID NO: 79312
cuucagaacacguuacauu

SEQ ID NO: 79394 - RNA, 19 nt, Artificial Sequence
  Description of Artificial Sequence: Synthetic oligonucleotide
  Sense strand starting at position 177 of SEQ ID NO: 995
gaugucaaucauggugaag

SEQ ID NO: 79395 - RNA, 19 nt, Artificial Sequence
  Description of Artificial Sequence: Synthetic oligonucleotide
  Antisense strand to SEQ ID NO: 79314
cuucaccaugauugacauc

SEQ ID NO: 79396 - RNA, 19 nt, Artificial Sequence
  Description of Artificial Sequence: Synthetic oligonucleotide
  Sense strand starting at position 349 of SEQ ID NO: 995
acgugaacccuguaggcaa

SEQ ID NO: 79397 - RNA, 19 nt, Artificial Sequence
  Description of Artificial Sequence: Synthetic oligonucleotide
  Antisense strand to SEQ ID NO: 79316
uugccuacaggguucacgu

SEQ ID NO: 79398 - RNA, 19 nt, Artificial Sequence
  Description of Artificial Sequence: Synthetic oligonucleotide
  Sense strand starting at position 430 of SEQ ID NO: 995
auguaugaggucugagaug

SEQ ID NO: 79399 - RNA, 19 nt, Artificial Sequence
  Description of Artificial Sequence: Synthetic oligonucleotide
  Antisense strand to SEQ ID NO: 79318
caucucagaccucauacau

SEQ ID NO: 79400 - RNA, 19 nt, Artificial Sequence
  Description of Artificial Sequence: Synthetic oligonucleotide
  Sense strand starting at position 474 of SEQ ID NO: 995
ggcaaugaaguuuauccua

SEQ ID NO: 79401 - RNA, 19 nt, Artificial Sequence
  Description of Artificial Sequence: Synthetic oligonucleotide
  Antisense strand to SEQ ID NO: 79320
uaggauaaacuucauugcc

SEQ ID NO: 79402 - RNA, 19 nt, Artificial Sequence
  Description of Artificial Sequence: Synthetic oligonucleotide
  Sense strand starting at position 492 of SEQ ID NO: 995
agaccugagauguguucua

SEQ ID NO: 79403 - RNA, 19 nt, Artificial Sequence
  Description of Artificial Sequence: Synthetic oligonucleotide
  Antisense strand to SEQ ID NO: 79322
uagaacacaucucaggucu

SEQ ID NO: 79404 - RNA, 19 nt, Artificial Sequence
  Description of Artificial Sequence: Synthetic oligonucleotide
  Sense strand starting at position 519 of SEQ ID NO: 995
cgcugaagacagugcucaa

SEQ ID NO: 79405 - RNA, 19 nt, Artificial Sequence
  Description of Artificial Sequence: Synthetic oligonucleotide
  Antisense strand to SEQ ID NO: 79324
uugagcacugucuucagcg

SEQ ID NO: 79406 - RNA, 19 nt, Artificial Sequence
  Description of Artificial Sequence: Synthetic oligonucleotide
  Sense strand starting at position 526 of SEQ ID NO: 995
gacagugcucaauggcaua

SEQ ID NO: 79407 - RNA, 19 nt, Artificial Sequence
  Description of Artificial Sequence: Synthetic oligonucleotide
  Antisense strand to SEQ ID NO: 79326
uaugccauugagcacuguc

SEQ ID NO: 79408 - RNA, 19 nt, Artificial Sequence
  Description of Artificial Sequence: Synthetic oligonucleotide
  Sense strand starting at position 672 of SEQ ID NO: 995
ucugauuugugggagcaca

SEQ ID NO: 79409 - RNA, 19 nt, Artificial Sequence
  Description of Artificial Sequence: Synthetic oligonucleotide
  Antisense strand to SEQ ID NO: 79328
ugugcucccacaaaucaga

SEQ ID NO: 79410 - RNA, 19 nt, Artificial Sequence
  Description of Artificial Sequence: Synthetic oligonucleotide
  Sense strand starting at position 762 of SEQ ID NO: 995
aucuaagcuuccuugguga

SEQ ID NO: 79411 - RNA, 19 nt, Artificial Sequence
  Description of Artificial Sequence: Synthetic oligonucleotide
  Antisense strand to SEQ ID NO: 79330
ucaccaaggaagcuuagau

SEQ ID NO: 79412 - RNA, 19 nt, Artificial Sequence
  Description of Artificial Sequence: Synthetic oligonucleotide
  Sense strand starting at position 765 of SEQ ID NO: 995
uaagcuuccuuggugagga

SEQ ID NO: 79413 - RNA, 19 nt, Artificial Sequence
  Description of Artificial Sequence: Synthetic oligonucleotide
  Antisense strand to SEQ ID NO: 79332
uccucaccaaggaagcuua

SEQ ID NO: 79414 - RNA, 19 nt, Artificial Sequence
  Description of Artificial Sequence: Synthetic oligonucleotide
  Sense strand starting at position 991 of SEQ ID NO: 995
gagcauccauguuugacau

SEQ ID NO: 79415 - RNA, 19 nt, Artificial Sequence
  Description of Artificial Sequence: Synthetic oligonucleotide
  Antisense strand to SEQ ID NO: 79334
augucaaacauggaugcuc

SEQ ID NO: 79416 - RNA, 19 nt, Artificial Sequence
  Description of Artificial Sequence: Synthetic oligonucleotide
  Sense strand starting at position 1035 of SEQ ID NO: 995
augugaagucccuaaacca

SEQ ID NO: 79417 - RNA, 19 nt, Artificial Sequence
  Description of Artificial Sequence: Synthetic oligonucleotide
  Antisense strand to SEQ ID NO: 79336
ugguuuagggacuucacau

SEQ ID NO: 79418 - RNA, 19 nt, Artificial Sequence
  Description of Artificial Sequence: Synthetic oligonucleotide
  Sense strand starting at position 1137 of SEQ ID NO: 995
augauauuccaccguugcu

SEQ ID NO: 79419 - RNA, 19 nt, Artificial Sequence
  Description of Artificial Sequence: Synthetic oligonucleotide
  Antisense strand to SEQ ID NO: 79338
agcaacgguggaauaucau

SEQ ID NO: 79420 - RNA, 19 nt, Artificial Sequence
  Description of Artificial Sequence: Synthetic oligonucleotide
  Sense strand starting at position 1274 of SEQ ID NO: 995
ccaagagcagguuaaacuu

SEQ ID NO: 79421 - RNA, 19 nt, Artificial Sequence
  Description of Artificial Sequence: Synthetic oligonucleotide
  Antisense strand to SEQ ID NO: 79340
aaguuuaaccugcucuugg

SEQ ID NO: 79422 - RNA, 19 nt, Artificial Sequence
  Description of Artificial Sequence: Synthetic oligonucleotide
  Sense strand starting at position 1296 of SEQ ID NO: 995
caucgauugcacugauaag

SEQ ID NO: 79423 - RNA, 19 nt, Artificial Sequence
  Description of Artificial Sequence: Synthetic oligonucleotide
  Antisense strand to SEQ ID NO: 79342
cuuaucagugcaaucgaug

SEQ ID NO: 79424 - RNA, 19 nt, Artificial Sequence
  Description of Artificial Sequence: Synthetic oligonucleotide
  Sense strand starting at position 1551 of SEQ ID NO: 995
aguggaggcaagugugaaa

SEQ ID NO: 79425 - RNA, 19 nt, Artificial Sequence
  Description of Artificial Sequence: Synthetic oligonucleotide
  Antisense strand to SEQ ID NO: 79344
uuucacacuugccuccacu

SEQ ID NO: 79426 - RNA, 19 nt, Artificial Sequence
  Description of Artificial Sequence: Synthetic oligonucleotide
  Sense strand starting at position 1652 of SEQ ID NO: 995
acugaaauugcagacugua

SEQ ID NO: 79427 - RNA, 19 nt, Artificial Sequence
  Description of Artificial Sequence: Synthetic oligonucleotide
  Antisense strand to SEQ ID NO: 79346
uacagucugcaauuucagu

SEQ ID NO: 79428 - RNA, 19 nt, Artificial Sequence
  Description of Artificial Sequence: Synthetic oligonucleotide
  Sense strand starting at position 1661 of SEQ ID NO: 995
gcagacuguaguggauuaa

SEQ ID NO: 79429 - RNA, 19 nt, Artificial Sequence
  Description of Artificial Sequence: Synthetic oligonucleotide
  Antisense strand to SEQ ID NO: 79348
uuaauccacuacagucugc

SEQ ID NO: 79430 - RNA, 19 nt, Artificial Sequence
  Description of Artificial Sequence: Synthetic oligonucleotide
  Sense strand starting at position 1671 of SEQ ID NO: 995
guggauuaauccuccagaa

SEQ ID NO: 79431 - RNA, 19 nt, Artificial Sequence
  Description of Artificial Sequence: Synthetic oligonucleotide
  Antisense strand to SEQ ID NO: 79350
uucuggaggauuaauccac

SEQ ID NO: 79432 - RNA, 19 nt, Artificial Sequence
  Description of Artificial Sequence: Synthetic oligonucleotide
  Sense strand starting at position 1735 of SEQ ID NO: 995
acagaaauguccuuggcuu

SEQ ID NO: 79433 - RNA, 19 nt, Artificial Sequence
  Description of Artificial Sequence: Synthetic oligonucleotide
  Antisense strand to SEQ ID NO: 79352
aagccaaggacauuucugu

SEQ ID NO: 79434 - RNA, 19 nt, Artificial Sequence
  Description of Artificial Sequence: Synthetic oligonucleotide
  Sense strand starting at position 1743 of SEQ ID NO: 995
guccuuggcuucucaguga

SEQ ID NO: 79435 - RNA, 19 nt, Artificial Sequence
  Description of Artificial Sequence: Synthetic oligonucleotide
  Antisense strand to SEQ ID NO: 79354
ucacugagaagccaaggac

SEQ ID NO: 79436 - RNA, 19 nt, Artificial Sequence
  Description of Artificial Sequence: Synthetic oligonucleotide
  Sense strand starting at position 1747 of SEQ ID NO: 995
uuggcuucucagugaaggu

SEQ ID NO: 79437 - RNA, 19 nt, Artificial Sequence
  Description of Artificial Sequence: Synthetic oligonucleotide
  Antisense strand to SEQ ID NO: 79356
accuucacugagaagccaa

SEQ ID NO: 79438 - RNA, 19 nt, Artificial Sequence
  Description of Artificial Sequence: Synthetic oligonucleotide
  Sense strand starting at position 1885 of SEQ ID NO: 995
guuuccauccaugguggua

SEQ ID NO: 79439 - RNA, 19 nt, Artificial Sequence
  Description of Artificial Sequence: Synthetic oligonucleotide
  Antisense strand to SEQ ID NO: 79358
uaccaccauggauggaaac

SEQ ID NO: 79440 - RNA, 19 nt, Artificial Sequence
  Description of Artificial Sequence: Synthetic oligonucleotide
  Sense strand starting at position 2119 of SEQ ID NO: 995
gcauucugaccuugggcaa

SEQ ID NO: 79441 - RNA, 19 nt, Artificial Sequence
  Description of Artificial Sequence: Synthetic oligonucleotide
  Antisense strand to SEQ ID NO: 79360
uugcccaaggucagaaugc

SEQ ID NO: 79442 - RNA, 19 nt, Artificial Sequence
  Description of Artificial Sequence: Synthetic oligonucleotide
  Sense strand starting at position 2195 of SEQ ID NO: 995
gcccgauuguuccugaaau

SEQ ID NO: 79443 - RNA, 19 nt, Artificial Sequence
  Description of Artificial Sequence: Synthetic oligonucleotide
  Antisense strand to SEQ ID NO: 79362
auuucaggaacaaucgggc

SEQ ID NO: 79444 - RNA, 19 nt, Artificial Sequence
  Description of Artificial Sequence: Synthetic oligonucleotide
  Sense strand starting at position 2197 of SEQ ID NO: 995
ccgauuguuccugaaauac

SEQ ID NO: 79445 - RNA, 19 nt, Artificial Sequence
  Description of Artificial Sequence: Synthetic oligonucleotide
  Antisense strand to SEQ ID NO: 79364
guauuucaggaacaaucgg

SEQ ID NO: 79446 - RNA, 19 nt, Artificial Sequence
  Description of Artificial Sequence: Synthetic oligonucleotide
  Sense strand starting at position 2417 of SEQ ID NO: 995
uuauaucucgcugauugga

SEQ ID NO: 79447 - RNA, 19 nt, Artificial Sequence
  Description of Artificial Sequence: Synthetic oligonucleotide
  Antisense strand to SEQ ID NO: 79366
uccaaucagcgagauauaa

SEQ ID NO: 79448 - RNA, 19 nt, Artificial Sequence
  Description of Artificial Sequence: Synthetic oligonucleotide
  Sense strand starting at position 2419 of SEQ ID NO: 995
auaucucgcugauuggaaa

SEQ ID NO: 79449 - RNA, 19 nt, Artificial Sequence
  Description of Artificial Sequence: Synthetic oligonucleotide
  Antisense strand to SEQ ID NO: 79368
uuuccaaucagcgagauau

SEQ ID NO: 79450 - RNA, 19 nt, Artificial Sequence
  Description of Artificial Sequence: Synthetic oligonucleotide
  Sense strand starting at position 3113 of SEQ ID NO: 995
guccuuccuccuggaaaca

SEQ ID NO: 79451 - RNA, 19 nt, Artificial Sequence
  Description of Artificial Sequence: Synthetic oligonucleotide
  Antisense strand to SEQ ID NO: 79370
uguuuccaggaggaaggac

SEQ ID NO: 79452 - RNA, 19 nt, Artificial Sequence
  Description of Artificial Sequence: Synthetic oligonucleotide
  Sense strand starting at position 3217 of SEQ ID NO: 995
gaaacagccuggguucuaa

SEQ ID NO: 79453 - RNA, 19 nt, Artificial Sequence
  Description of Artificial Sequence: Synthetic oligonucleotide
  Antisense strand to SEQ ID NO: 79372
uuagaacccaggcuguuuc

SEQ ID NO: 79454 - RNA, 19 nt, Artificial Sequence
  Description of Artificial Sequence: Synthetic oligonucleotide
  Sense strand starting at position 3308 of SEQ ID NO: 995
cugcuauguggaggaaaua

SEQ ID NO: 79455 - RNA, 19 nt, Artificial Sequence
  Description of Artificial Sequence: Synthetic oligonucleotide
  Antisense strand to SEQ ID NO: 79374
uauuuccuccacauagcag

SEQ ID NO: 79456 - RNA, 19 nt, Artificial Sequence
  Description of Artificial Sequence: Synthetic oligonucleotide
  Sense strand starting at position 3349 of SEQ ID NO: 995
ggagaaaucugugacauac

SEQ ID NO: 79457 - RNA, 19 nt, Artificial Sequence
  Description of Artificial Sequence: Synthetic oligonucleotide
  Antisense strand to SEQ ID NO: 79376
guaugucacagauuucucc

SEQ ID NO: 79458 - RNA, 19 nt, Artificial Sequence
  Description of Artificial Sequence: Synthetic oligonucleotide
  Sense strand starting at position 3397 of SEQ ID NO: 995
caucacaaguggucaguaa

SEQ ID NO: 79459 - RNA, 19 nt, Artificial Sequence
  Description of Artificial Sequence: Synthetic oligonucleotide
  Antisense strand to SEQ ID NO: 79378
uuacugaccacuugugaug

SEQ ID NO: 79460 - RNA, 19 nt, Artificial Sequence
  Description of Artificial Sequence: Synthetic oligonucleotide
  Sense strand starting at position 3398 of SEQ ID NO: 995
aucacaaguggucaguaaa

SEQ ID NO: 79461 - RNA, 19 nt, Artificial Sequence
  Description of Artificial Sequence: Synthetic oligonucleotide
  Antisense strand to SEQ ID NO: 79380
uuuacugaccacuugugau

SEQ ID NO: 79462 - RNA, 19 nt, Artificial Sequence
  Description of Artificial Sequence: Synthetic oligonucleotide
  Sense strand starting at position 3401 of SEQ ID NO: 995
acaaguggucaguaaauau

SEQ ID NO: 79463 - RNA, 19 nt, Artificial Sequence
  Description of Artificial Sequence: Synthetic oligonucleotide
  Antisense strand to SEQ ID NO: 79382
auauuuacugaccacuugu

SEQ ID NO: 79464 - RNA, 19 nt, Artificial Sequence
  Description of Artificial Sequence: Synthetic oligonucleotide
  Sense strand starting at position 3496 of SEQ ID NO: 995
acaacuugcuggguagaca

SEQ ID NO: 79465 - RNA, 19 nt, Artificial Sequence
  Description of Artificial Sequence: Synthetic oligonucleotide
  Antisense strand to SEQ ID NO: 79384
ugucuacccagcaaguugu

SEQ ID NO: 79466 - RNA, 19 nt, Artificial Sequence
  Description of Artificial Sequence: Synthetic oligonucleotide
  Sense strand starting at position 3613 of SEQ ID NO: 995
uacaguguugaggaagcaa

SEQ ID NO: 79467 - RNA, 19 nt, Artificial Sequence
  Description of Artificial Sequence: Synthetic oligonucleotide
  Antisense strand to SEQ ID NO: 79386
uugcuuccucaacacugua

SEQ ID NO: 79468 - RNA, 19 nt, Artificial Sequence
  Description of Artificial Sequence: Synthetic oligonucleotide
  Sense strand starting at position 3906 of SEQ ID NO: 995
gaagaaaucgagugccaga

SEQ ID NO: 79469 - RNA, 19 nt, Artificial Sequence
  Description of Artificial Sequence: Synthetic oligonucleotide
  Antisense strand to SEQ ID NO: 79388
ucuggcacucgauuucuuc

SEQ ID NO: 79470 - RNA, 19 nt, Artificial Sequence
  Description of Artificial Sequence: Synthetic oligonucleotide
  Sense strand starting at position 3911 of SEQ ID NO: 995
aaucgagugccagaaccua

SEQ ID NO: 79471 - RNA, 19 nt, Artificial Sequence
  Description of Artificial Sequence: Synthetic oligonucleotide
  Antisense strand to SEQ ID NO: 79390
uagguucuggcacucgauu

SEQ ID NO: 79472 - RNA, 19 nt, Artificial Sequence
  Description of Artificial Sequence: Synthetic oligonucleotide
  Sense strand starting at position 3935 of SEQ ID NO: 995
cauuguaugguguguuaag

SEQ ID NO: 79473 - RNA, 19 nt, Artificial Sequence
  Description of Artificial Sequence: Synthetic oligonucleotide
  Antisense strand to SEQ ID NO: 79392
cuuaacacaccauacaaug

SEQ ID NO: 79474 - RNA, 19 nt, Artificial Sequence
  Description of Artificial Sequence: Synthetic oligonucleotide
  Sense strand starting at position 11 of SEQ ID NO: 997
ucauaaucagagugacggu

SEQ ID NO: 79475 - RNA, 19 nt, Artificial Sequence
  Description of Artificial Sequence: Synthetic oligonucleotide
  Antisense strand to SEQ ID NO: 79394
accgucacucugauuauga

SEQ ID NO: 79476 - RNA, 19 nt, Artificial Sequence
  Description of Artificial Sequence: Synthetic oligonucleotide
  Sense strand starting at position 112 of SEQ ID NO: 997
acugcugaugcuuggagau

SEQ ID NO: 79477 - RNA, 19 nt, Artificial Sequence
  Description of Artificial Sequence: Synthetic oligonucleotide
  Antisense strand to SEQ ID NO: 79396
aucuccaagcaucagcagu

SEQ ID NO: 79478 - RNA, 19 nt, Artificial Sequence
  Description of Artificial Sequence: Synthetic oligonucleotide
  Sense strand starting at position 161 of SEQ ID NO: 997
ggaaaucaguugccacaca

SEQ ID NO: 79479 - RNA, 19 nt, Artificial Sequence
  Description of Artificial Sequence: Synthetic oligonucleotide
  Antisense strand to SEQ ID NO: 79398
uguguggcaacugauuucc

SEQ ID NO: 79480 - RNA, 19 nt, Artificial Sequence
  Description of Artificial Sequence: Synthetic oligonucleotide
  Sense strand starting at position 242 of SEQ ID NO: 997
uggaaucagaucuguguuc

SEQ ID NO: 79481 - RNA, 19 nt, Artificial Sequence
  Description of Artificial Sequence: Synthetic oligonucleotide
  Antisense strand to SEQ ID NO: 79400
gaacacagaucugauucca

SEQ ID NO: 79482 - RNA, 19 nt, Artificial Sequence
  Description of Artificial Sequence: Synthetic oligonucleotide
  Sense strand starting at position 323 of SEQ ID NO: 997
uugugaaaugaauguaagu

SEQ ID NO: 79483 - RNA, 19 nt, Artificial Sequence
  Description of Artificial Sequence: Synthetic oligonucleotide
  Antisense strand to SEQ ID NO: 79402
acuuacauucauuucacaa

SEQ ID NO: 79484 - RNA, 19 nt, Artificial Sequence
  Description of Artificial Sequence: Synthetic oligonucleotide
  Sense strand starting at position 603 of SEQ ID NO: 997
ggagcucuggucuagaaac

SEQ ID NO: 79485 - RNA, 19 nt, Artificial Sequence
  Description of Artificial Sequence: Synthetic oligonucleotide
  Antisense strand to SEQ ID NO: 79404
guuucuagaccagagcucc

SEQ ID NO: 79486 - RNA, 19 nt, Artificial Sequence
  Description of Artificial Sequence: Synthetic oligonucleotide
  Sense strand starting at position 844 of SEQ ID NO: 997
augcaagauuggcccagaa

SEQ ID NO: 79487 - RNA, 19 nt, Artificial Sequence
  Description of Artificial Sequence: Synthetic oligonucleotide
  Antisense strand to SEQ ID NO: 79406
uucugggccaaucuugcau

SEQ ID NO: 79488 - RNA, 19 nt, Artificial Sequence
  Description of Artificial Sequence: Synthetic oligonucleotide
  Sense strand starting at position 846 of SEQ ID NO: 997
gcaagauuggcccagaaca

SEQ ID NO: 79489 - RNA, 19 nt, Artificial Sequence
  Description of Artificial Sequence: Synthetic oligonucleotide
  Antisense strand to SEQ ID NO: 79408
uguucugggccaaucuugc

SEQ ID NO: 79490 - RNA, 19 nt, Artificial Sequence
  Description of Artificial Sequence: Synthetic oligonucleotide
  Sense strand starting at position 934 of SEQ ID NO: 997
cugguuucuccugaggcaa

SEQ ID NO: 79491 - RNA, 19 nt, Artificial Sequence
  Description of Artificial Sequence: Synthetic oligonucleotide
  Antisense strand to SEQ ID NO: 79410
uugccucaggagaaaccag

SEQ ID NO: 79492 - RNA, 19 nt, Artificial Sequence
  Description of Artificial Sequence: Synthetic oligonucleotide
  Sense strand starting at position 960 of SEQ ID NO: 997
ggaacuaagcggugugaaa

SEQ ID NO: 79493 - RNA, 19 nt, Artificial Sequence
  Description of Artificial Sequence: Synthetic oligonucleotide
  Antisense strand to SEQ ID NO: 79412
uuucacaccgcuuaguucc

SEQ ID NO: 79494 - RNA, 19 nt, Artificial Sequence
  Description of Artificial Sequence: Synthetic oligonucleotide
  Sense strand starting at position 1124 of SEQ ID NO: 997
uucaaagaucgugggcaga

SEQ ID NO: 79495 - RNA, 19 nt, Artificial Sequence
  Description of Artificial Sequence: Synthetic oligonucleotide
  Antisense strand to SEQ ID NO: 79414
ucugcccacgaucuuugaa

SEQ ID NO: 79496 - RNA, 19 nt, Artificial Sequence
  Description of Artificial Sequence: Synthetic oligonucleotide
  Sense strand starting at position 1993 of SEQ ID NO: 997
ccucgaaacucaccuuuga

SEQ ID NO: 79497 - RNA, 19 nt, Artificial Sequence
  Description of Artificial Sequence: Synthetic oligonucleotide
  Antisense strand to SEQ ID NO: 79416
ucaaaggugaguuucgagg

SEQ ID NO: 79498 - RNA, 19 nt, Artificial Sequence
  Description of Artificial Sequence: Synthetic oligonucleotide
  Sense strand starting at position 2392 of SEQ ID NO: 997
cagccuuuccuggagaguu

SEQ ID NO: 79499 - RNA, 19 nt, Artificial Sequence
  Description of Artificial Sequence: Synthetic oligonucleotide
  Antisense strand to SEQ ID NO: 79418
aacucuccaggaaaggcug

SEQ ID NO: 79500 - RNA, 19 nt, Artificial Sequence
  Description of Artificial Sequence: Synthetic oligonucleotide
  Sense strand starting at position 2465 of SEQ ID NO: 997
aguuauuugcucugagcca

SEQ ID NO: 79501 - RNA, 19 nt, Artificial Sequence
  Description of Artificial Sequence: Synthetic oligonucleotide
  Antisense strand to SEQ ID NO: 79420
uggcucagagcaaauaacu

SEQ ID NO: 79502 - RNA, 19 nt, Artificial Sequence
  Description of Artificial Sequence: Synthetic oligonucleotide
  Sense strand starting at position 2480 of SEQ ID NO: 997
gccauaguccucgcugcaa

SEQ ID NO: 79503 - RNA, 19 nt, Artificial Sequence
  Description of Artificial Sequence: Synthetic oligonucleotide
  Antisense strand to SEQ ID NO: 79422
uugcagcgaggacuauggc

SEQ ID NO: 79504 - RNA, 19 nt, Artificial Sequence
  Description of Artificial Sequence: Synthetic oligonucleotide
  Sense strand starting at position 2530 of SEQ ID NO: 997
ggaguuccugaaugcgaag

SEQ ID NO: 79505 - RNA, 19 nt, Artificial Sequence
  Description of Artificial Sequence: Synthetic oligonucleotide
  Antisense strand to SEQ ID NO: 79424
cuucgcauucaggaacucc

SEQ ID NO: 79506 - RNA, 19 nt, Artificial Sequence
  Description of Artificial Sequence: Synthetic oligonucleotide
  Sense strand starting at position 2665 of SEQ ID NO: 997
cgucauuucuggguugggu

SEQ ID NO: 79507 - RNA, 19 nt, Artificial Sequence
  Description of Artificial Sequence: Synthetic oligonucleotide
  Antisense strand to SEQ ID NO: 79426
acccaacccagaaaugacg

SEQ ID NO: 79508 - RNA, 19 nt, Artificial Sequence
  Description of Artificial Sequence: Synthetic oligonucleotide
  Sense strand starting at position 2731 of SEQ ID NO: 997
ugcaaauugaauugagguu

SEQ ID NO: 79509 - RNA, 19 nt, Artificial Sequence
  Description of Artificial Sequence: Synthetic oligonucleotide
  Antisense strand to SEQ ID NO: 79428
aaccucaauucaauuugca

SEQ ID NO: 79510 - RNA, 19 nt, Artificial Sequence
  Description of Artificial Sequence: Synthetic oligonucleotide
  Sense strand starting at position 2740 of SEQ ID NO: 997
aauugagguugaucacauc

SEQ ID NO: 79511 - RNA, 19 nt, Artificial Sequence
  Description of Artificial Sequence: Synthetic oligonucleotide
  Antisense strand to SEQ ID NO: 79430
gaugugaucaaccucaauu

SEQ ID NO: 79512 - RNA, 19 nt, Artificial Sequence
  Description of Artificial Sequence: Synthetic oligonucleotide
  Sense strand starting at position 2760 of SEQ ID NO: 997
cccaaaggguuauugugau

SEQ ID NO: 79513 - RNA, 19 nt, Artificial Sequence
  Description of Artificial Sequence: Synthetic oligonucleotide
  Antisense strand to SEQ ID NO: 79432
aucacaauaacccuuuggg

SEQ ID NO: 79514 - RNA, 19 nt, Artificial Sequence
  Description of Artificial Sequence: Synthetic oligonucleotide
  Sense strand starting at position 2767 of SEQ ID NO: 997
gguuauugugaugauaggu

SEQ ID NO: 79515 - RNA, 19 nt, Artificial Sequence
  Description of Artificial Sequence: Synthetic oligonucleotide
  Antisense strand to SEQ ID NO: 79434
accuaucaucacaauaacc

SEQ ID NO: 79516 - RNA, 19 nt, Artificial Sequence
  Description of Artificial Sequence: Synthetic oligonucleotide
  Sense strand starting at position 2772 of SEQ ID NO: 997
uugugaugauagguaaugu

SEQ ID NO: 79517 - RNA, 19 nt, Artificial Sequence
  Description of Artificial Sequence: Synthetic oligonucleotide
  Antisense strand to SEQ ID NO: 79436
acauuaccuaucaucacaa

SEQ ID NO: 79518 - RNA, 19 nt, Artificial Sequence
  Description of Artificial Sequence: Synthetic oligonucleotide
  Sense strand starting at position 2773 of SEQ ID NO: 997
ugugaugauagguaaugua

SEQ ID NO: 79519 - RNA, 19 nt, Artificial Sequence
  Description of Artificial Sequence: Synthetic oligonucleotide
  Antisense strand to SEQ ID NO: 79438
uacauuaccuaucaucaca

SEQ ID NO: 79520 - RNA, 19 nt, Artificial Sequence
  Description of Artificial Sequence: Synthetic oligonucleotide
  Sense strand starting at position 2791 of SEQ ID NO: 997
acauaaaguguuuggcaca

SEQ ID NO: 79521 - RNA, 19 nt, Artificial Sequence
  Description of Artificial Sequence: Synthetic oligonucleotide
  Antisense strand to SEQ ID NO: 79440
ugugccaaacacuuuaugu

SEQ ID NO: 79522 - RNA, 19 nt, Artificial Sequence
  Description of Artificial Sequence: Synthetic oligonucleotide
  Sense strand starting at position 2796 of SEQ ID NO: 997
aaguguuuggcacaggaaa

SEQ ID NO: 79523 - RNA, 19 nt, Artificial Sequence
  Description of Artificial Sequence: Synthetic oligonucleotide
  Antisense strand to SEQ ID NO: 79442
uuuccugugccaaacacuu

SEQ ID NO: 79524 - RNA, 19 nt, Artificial Sequence
  Description of Artificial Sequence: Synthetic oligonucleotide
  Sense strand starting at position 2798 of SEQ ID NO: 997
guguuuggcacaggaaacu

SEQ ID NO: 79525 - RNA, 19 nt, Artificial Sequence
  Description of Artificial Sequence: Synthetic oligonucleotide
  Antisense strand to SEQ ID NO: 79444
aguuuccugugccaaacac

SEQ ID NO: 79526 - RNA, 19 nt, Artificial Sequence
  Description of Artificial Sequence: Synthetic oligonucleotide
  Sense strand starting at position 2878 of SEQ ID NO: 997
uccuaagaggcuuaguuua

SEQ ID NO: 79527 - RNA, 19 nt, Artificial Sequence
  Description of Artificial Sequence: Synthetic oligonucleotide
  Antisense strand to SEQ ID NO: 79446
uaaacuaagccucuuagga

SEQ ID NO: 79528 - RNA, 19 nt, Artificial Sequence
  Description of Artificial Sequence: Synthetic oligonucleotide
  Sense strand starting at position 2880 of SEQ ID NO: 997
cuaagaggcuuaguuuaga

SEQ ID NO: 79529 - RNA, 19 nt, Artificial Sequence
  Description of Artificial Sequence: Synthetic oligonucleotide
  Antisense strand to SEQ ID NO: 79448
ucuaaacuaagccucuuag

SEQ ID NO: 79530 - RNA, 19 nt, Artificial Sequence
  Description of Artificial Sequence: Synthetic oligonucleotide
  Sense strand starting at position 2946 of SEQ ID NO: 997
agaugaacauugcucuguu

SEQ ID NO: 79531 - RNA, 19 nt, Artificial Sequence
  Description of Artificial Sequence: Synthetic oligonucleotide
  Antisense strand to SEQ ID NO: 79450
aacagagcaauguucaucu

SEQ ID NO: 79532 - RNA, 19 nt, Artificial Sequence
  Description of Artificial Sequence: Synthetic oligonucleotide
  Sense strand starting at position 2956 of SEQ ID NO: 997
ugcucuguucuaggaagag

SEQ ID NO: 79533 - RNA, 19 nt, Artificial Sequence
  Description of Artificial Sequence: Synthetic oligonucleotide
  Antisense strand to SEQ ID NO: 79452
cucuuccuagaacagagca

SEQ ID NO: 79534 - RNA, 19 nt, Artificial Sequence
  Description of Artificial Sequence: Synthetic oligonucleotide
  Sense strand starting at position 3027 of SEQ ID NO: 997
cugucucuuccugaacugu

SEQ ID NO: 79535 - RNA, 19 nt, Artificial Sequence
  Description of Artificial Sequence: Synthetic oligonucleotide
  Antisense strand to SEQ ID NO: 79454
acaguucaggaagagacag

SEQ ID NO: 79536 - RNA, 19 nt, Artificial Sequence
  Description of Artificial Sequence: Synthetic oligonucleotide
  Sense strand starting at position 3300 of SEQ ID NO: 997
uugacaugguauuccucaa

SEQ ID NO: 79537 - RNA, 19 nt, Artificial Sequence
  Description of Artificial Sequence: Synthetic oligonucleotide
  Antisense strand to SEQ ID NO: 79456
uugaggaauaccaugucaa

SEQ ID NO: 79538 - RNA, 19 nt, Artificial Sequence
  Description of Artificial Sequence: Synthetic oligonucleotide
  Sense strand starting at position 3513 of SEQ ID NO: 997
ccagaagguugcuccagaa

SEQ ID NO: 79539 - RNA, 19 nt, Artificial Sequence
  Description of Artificial Sequence: Synthetic oligonucleotide
  Antisense strand to SEQ ID NO: 79458
uucuggagcaaccuucugg

SEQ ID NO: 79540 - RNA, 19 nt, Artificial Sequence
  Description of Artificial Sequence: Synthetic oligonucleotide
  Sense strand starting at position 3558 of SEQ ID NO: 997
cauaucgagcuaugugaaa

SEQ ID NO: 79541 - RNA, 19 nt, Artificial Sequence
  Description of Artificial Sequence: Synthetic oligonucleotide
  Antisense strand to SEQ ID NO: 79460
uuucacauagcucgauaug

SEQ ID NO: 79542 - RNA, 19 nt, Artificial Sequence
  Description of Artificial Sequence: Synthetic oligonucleotide
  Sense strand starting at position 3611 of SEQ ID NO: 997
cgucucucccuuuauaaug

SEQ ID NO: 79543 - RNA, 19 nt, Artificial Sequence
  Description of Artificial Sequence: Synthetic oligonucleotide
  Antisense strand to SEQ ID NO: 79462
cauuauaaagggagagacg

SEQ ID NO: 79544 - RNA, 19 nt, Artificial Sequence
  Description of Artificial Sequence: Synthetic oligonucleotide
  Sense strand starting at position 3705 of SEQ ID NO: 997
agaugucauuuaugaaaug

SEQ ID NO: 79545 - RNA, 19 nt, Artificial Sequence
  Description of Artificial Sequence: Synthetic oligonucleotide
  Antisense strand to SEQ ID NO: 79464
cauuucauaaaugacaucu

SEQ ID NO: 79546 - RNA, 19 nt, Artificial Sequence
  Description of Artificial Sequence: Synthetic oligonucleotide
  Sense strand starting at position 3742 of SEQ ID NO: 997
uuuggauauuaguccuagu

SEQ ID NO: 79547 - RNA, 19 nt, Artificial Sequence
  Description of Artificial Sequence: Synthetic oligonucleotide
  Antisense strand to SEQ ID NO: 79466
acuaggacuaauauccaaa

SEQ ID NO: 79548 - RNA, 19 nt, Artificial Sequence
  Description of Artificial Sequence: Synthetic oligonucleotide
  Sense strand starting at position 3752 of SEQ ID NO: 997
aguccuaguccuuauagca

SEQ ID NO: 79549 - RNA, 19 nt, Artificial Sequence
  Description of Artificial Sequence: Synthetic oligonucleotide
  Antisense strand to SEQ ID NO: 79468
ugcuauaaggacuaggacu

SEQ ID NO: 79550 - RNA, 19 nt, Artificial Sequence
  Description of Artificial Sequence: Synthetic oligonucleotide
  Sense strand starting at position 3784 of SEQ ID NO: 997
ggugucauuuaacagaaga

SEQ ID NO: 79551 - RNA, 19 nt, Artificial Sequence
  Description of Artificial Sequence: Synthetic oligonucleotide
  Antisense strand to SEQ ID NO: 79470
ucuucuguuaaaugacacc

SEQ ID NO: 79552 - RNA, 19 nt, Artificial Sequence
  Description of Artificial Sequence: Synthetic oligonucleotide
  Sense strand starting at position 3953 of SEQ ID NO: 997
ccuguaaacucagucauuc

SEQ ID NO: 79553 - RNA, 19 nt, Artificial Sequence
  Description of Artificial Sequence: Synthetic oligonucleotide
  Antisense strand to SEQ ID NO: 79472
gaaugacugaguuuacagg

SEQ ID NO: 79554 - RNA, 19 nt, Artificial Sequence
  Description of Artificial Sequence: Synthetic oligonucleotide
  Sense strand starting at position 24 of SEQ ID NO: 996
gugggauuccagcaccauc

SEQ ID NO: 79555 - RNA, 19 nt, Artificial Sequence
  Description of Artificial Sequence: Synthetic oligonucleotide
  Antisense strand to SEQ ID NO: 79474
gauggugcuggaaucccac

SEQ ID NO: 79556 - RNA, 19 nt, Artificial Sequence
  Description of Artificial Sequence: Synthetic oligonucleotide
  Sense strand starting at position 147 of SEQ ID NO: 996
gcguaugugacucaggaga

SEQ ID NO: 79557 - RNA, 19 nt, Artificial Sequence
  Description of Artificial Sequence: Synthetic oligonucleotide
  Antisense strand to SEQ ID NO: 79476
ucuccugagucacauacgc

SEQ ID NO: 79558 - RNA, 19 nt, Artificial Sequence
  Description of Artificial Sequence: Synthetic oligonucleotide
  Sense strand starting at position 190 of SEQ ID NO: 996
ucauaaucagagugacggu

SEQ ID NO: 79559 - RNA, 19 nt, Artificial Sequence
  Description of Artificial Sequence: Synthetic oligonucleotide
  Antisense strand to SEQ ID NO: 79478
accgucacucugauuauga

SEQ ID NO: 79560 - RNA, 19 nt, Artificial Sequence
  Description of Artificial Sequence: Synthetic oligonucleotide
  Sense strand starting at position 291 of SEQ ID NO: 996
acugcugaugcuuggagau

SEQ ID NO: 79561 - RNA, 19 nt, Artificial Sequence
  Description of Artificial Sequence: Synthetic oligonucleotide
  Antisense strand to SEQ ID NO: 79480
aucuccaagcaucagcagu

SEQ ID NO: 79562 - RNA, 19 nt, Artificial Sequence
  Description of Artificial Sequence: Synthetic oligonucleotide
  Sense strand starting at position 340 of SEQ ID NO: 996
ggaaaucaguugccacaca

SEQ ID NO: 79563 - RNA, 19 nt, Artificial Sequence
  Description of Artificial Sequence: Synthetic oligonucleotide
  Antisense strand to SEQ ID NO: 79482
uguguggcaacugauuucc

SEQ ID NO: 79564 - RNA, 19 nt, Artificial Sequence
  Description of Artificial Sequence: Synthetic oligonucleotide
  Sense strand starting at position 421 of SEQ ID NO: 996
uggaaucagaucuguguuc

SEQ ID NO: 79565 - RNA, 19 nt, Artificial Sequence
  Description of Artificial Sequence: Synthetic oligonucleotide
  Antisense strand to SEQ ID NO: 79484
gaacacagaucugauucca

SEQ ID NO: 79566 - RNA, 19 nt, Artificial Sequence
  Description of Artificial Sequence: Synthetic oligonucleotide
  Sense strand starting at position 502 of SEQ ID NO: 996
uugugaaaugaauguaagu

SEQ ID NO: 79567 - RNA, 19 nt, Artificial Sequence
  Description of Artificial Sequence: Synthetic oligonucleotide
  Antisense strand to SEQ ID NO: 79486
acuuacauucauuucacaa

SEQ ID NO: 79568 - RNA, 19 nt, Artificial Sequence
  Description of Artificial Sequence: Synthetic oligonucleotide
  Sense strand starting at position 782 of SEQ ID NO: 996
ggagcucuggucuagaaac

SEQ ID NO: 79569 - RNA, 19 nt, Artificial Sequence
  Description of Artificial Sequence: Synthetic oligonucleotide
  Antisense strand to SEQ ID NO: 79488
guuucuagaccagagcucc

SEQ ID NO: 79570 - RNA, 19 nt, Artificial Sequence
  Description of Artificial Sequence: Synthetic oligonucleotide
  Sense strand starting at position 1023 of SEQ ID NO: 996
augcaagauuggcccagaa

SEQ ID NO: 79571 - RNA, 19 nt, Artificial Sequence
  Description of Artificial Sequence: Synthetic oligonucleotide
  Antisense strand to SEQ ID NO: 79490
uucugggccaaucuugcau

SEQ ID NO: 79572 - RNA, 19 nt, Artificial Sequence
  Description of Artificial Sequence: Synthetic oligonucleotide
  Sense strand starting at position 1025 of SEQ ID NO: 996
gcaagauuggcccagaaca

SEQ ID NO: 79573 - RNA, 19 nt, Artificial Sequence
  Description of Artificial Sequence: Synthetic oligonucleotide
  Antisense strand to SEQ ID NO: 79492
uguucugggccaaucuugc

SEQ ID NO: 79574 - RNA, 19 nt, Artificial Sequence
  Description of Artificial Sequence: Synthetic oligonucleotide
  Sense strand starting at position 1113 of SEQ ID NO: 996
cugguuucuccugaggcaa

SEQ ID NO: 79575 - RNA, 19 nt, Artificial Sequence
  Description of Artificial Sequence: Synthetic oligonucleotide
  Antisense strand to SEQ ID NO: 79494
uugccucaggagaaaccag

SEQ ID NO: 79576 - RNA, 19 nt, Artificial Sequence
  Description of Artificial Sequence: Synthetic oligonucleotide
  Sense strand starting at position 1139 of SEQ ID NO: 996
ggaacuaagcggugugaaa

SEQ ID NO: 79577 - RNA, 19 nt, Artificial Sequence
  Description of Artificial Sequence: Synthetic oligonucleotide
  Antisense strand to SEQ ID NO: 79496
uuucacaccgcuuaguucc

SEQ ID NO: 79578 - RNA, 19 nt, Artificial Sequence
  Description of Artificial Sequence: Synthetic oligonucleotide
  Sense strand starting at position 1303 of SEQ ID NO: 996
uucaaagaucgugggcaga

SEQ ID NO: 79579 - RNA, 19 nt, Artificial Sequence
  Description of Artificial Sequence: Synthetic oligonucleotide
  Antisense strand to SEQ ID NO: 79498
ucugcccacgaucuuugaa

SEQ ID NO: 79580 - RNA, 19 nt, Artificial Sequence
  Description of Artificial Sequence: Synthetic oligonucleotide
  Sense strand starting at position 2172 of SEQ ID NO: 996
ccucgaaacucaccuuuga

SEQ ID NO: 79581 - RNA, 19 nt, Artificial Sequence
  Description of Artificial Sequence: Synthetic oligonucleotide
  Antisense strand to SEQ ID NO: 79500
ucaaaggugaguuucgagg

SEQ ID NO: 79582 - RNA, 19 nt, Artificial Sequence
  Description of Artificial Sequence: Synthetic oligonucleotide
  Sense strand starting at position 2571 of SEQ ID NO: 996
cagccuuuccuggagaguu

SEQ ID NO: 79583 - RNA, 19 nt, Artificial Sequence
  Description of Artificial Sequence: Synthetic oligonucleotide
  Antisense strand to SEQ ID NO: 79502
aacucuccaggaaaggcug

SEQ ID NO: 79584 - RNA, 19 nt, Artificial Sequence
  Description of Artificial Sequence: Synthetic oligonucleotide
  Sense strand starting at position 2644 of SEQ ID NO: 996
aguuauuugcucugagcca

SEQ ID NO: 79585 - RNA, 19 nt, Artificial Sequence
  Description of Artificial Sequence: Synthetic oligonucleotide
  Antisense strand to SEQ ID NO: 79504
uggcucagagcaaauaacu

SEQ ID NO: 79586 - RNA, 19 nt, Artificial Sequence
  Description of Artificial Sequence: Synthetic oligonucleotide
  Sense strand starting at position 2659 of SEQ ID NO: 996
gccauaguccucgcugcaa

SEQ ID NO: 79587 - RNA, 19 nt, Artificial Sequence
  Description of Artificial Sequence: Synthetic oligonucleotide
  Antisense strand to SEQ ID NO: 79506
uugcagcgaggacuauggc

SEQ ID NO: 79588 - RNA, 19 nt, Artificial Sequence
  Description of Artificial Sequence: Synthetic oligonucleotide
  Sense strand starting at position 2709 of SEQ ID NO: 996
ggaguuccugaaugcgaag

SEQ ID NO: 79589 - RNA, 19 nt, Artificial Sequence
  Description of Artificial Sequence: Synthetic oligonucleotide
  Antisense strand to SEQ ID NO: 79508
cuucgcauucaggaacucc

SEQ ID NO: 79590 - RNA, 19 nt, Artificial Sequence
  Description of Artificial Sequence: Synthetic oligonucleotide
  Sense strand starting at position 2844 of SEQ ID NO: 996
cgucauuucuggguugggu

SEQ ID NO: 79591 - RNA, 19 nt, Artificial Sequence
  Description of Artificial Sequence: Synthetic oligonucleotide
  Antisense strand to SEQ ID NO: 79510
acccaacccagaaaugacg

SEQ ID NO: 79592 - RNA, 19 nt, Artificial Sequence
  Description of Artificial Sequence: Synthetic oligonucleotide
  Sense strand starting at position 2910 of SEQ ID NO: 996
ugcaaauugaauugagguu

SEQ ID NO: 79593 - RNA, 19 nt, Artificial Sequence
  Description of Artificial Sequence: Synthetic oligonucleotide
  Antisense strand to SEQ ID NO: 79512
aaccucaauucaauuugca

SEQ ID NO: 79594 - RNA, 19 nt, Artificial Sequence
  Description of Artificial Sequence: Synthetic oligonucleotide
  Sense strand starting at position 2919 of SEQ ID NO: 996
aauugagguugaucacauc

SEQ ID NO: 79595 - RNA, 19 nt, Artificial Sequence
  Description of Artificial Sequence: Synthetic oligonucleotide
  Antisense strand to SEQ ID NO: 79514
gaugugaucaaccucaauu

SEQ ID NO: 79596 - RNA, 19 nt, Artificial Sequence
  Description of Artificial Sequence: Synthetic oligonucleotide
  Sense strand starting at position 2939 of SEQ ID NO: 996
cccaaaggguuauugugau

SEQ ID NO: 79597 - RNA, 19 nt, Artificial Sequence
  Description of Artificial Sequence: Synthetic oligonucleotide
  Antisense strand to SEQ ID NO: 79516
aucacaauaacccuuuggg

SEQ ID NO: 79598 - RNA, 19 nt, Artificial Sequence
  Description of Artificial Sequence: Synthetic oligonucleotide
  Sense strand starting at position 2946 of SEQ ID NO: 996
gguuauugugaugauaggu

SEQ ID NO: 79599 - RNA, 19 nt, Artificial Sequence
  Description of Artificial Sequence: Synthetic oligonucleotide
  Antisense strand to SEQ ID NO: 79518
accuaucaucacaauaacc

SEQ ID NO: 79600 - RNA, 19 nt, Artificial Sequence
  Description of Artificial Sequence: Synthetic oligonucleotide
  Sense strand starting at position 2951 of SEQ ID NO: 996
uugugaugauagguaaugu

SEQ ID NO: 79601 - RNA, 19 nt, Artificial Sequence
  Description of Artificial Sequence: Synthetic oligonucleotide
  Antisense strand to SEQ ID NO: 79520
acauuaccuaucaucacaa

SEQ ID NO: 79602 - RNA, 19 nt, Artificial Sequence
  Description of Artificial Sequence: Synthetic oligonucleotide
  Sense strand starting at position 2952 of SEQ ID NO: 996
ugugaugauagguaaugua

SEQ ID NO: 79603 - RNA, 19 nt, Artificial Sequence
  Description of Artificial Sequence: Synthetic oligonucleotide
  Antisense strand to SEQ ID NO: 79522
uacauuaccuaucaucaca

SEQ ID NO: 79604 - RNA, 19 nt, Artificial Sequence
  Description of Artificial Sequence: Synthetic oligonucleotide
  Sense strand starting at position 2970 of SEQ ID NO: 996
acauaaaguguuuggcaca

SEQ ID NO: 79605 - RNA, 19 nt, Artificial Sequence
  Description of Artificial Sequence: Synthetic oligonucleotide
  Antisense strand to SEQ ID NO: 79524
ugugccaaacacuuuaugu

SEQ ID NO: 79606 - RNA, 19 nt, Artificial Sequence
  Description of Artificial Sequence: Synthetic oligonucleotide
  Sense strand starting at position 2975 of SEQ ID NO: 996
aaguguuuggcacaggaaa

SEQ ID NO: 79607 - RNA, 19 nt, Artificial Sequence
  Description of Artificial Sequence: Synthetic oligonucleotide
  Antisense strand to SEQ ID NO: 79526
uuuccugugccaaacacuu

SEQ ID NO: 79608 - RNA, 19 nt, Artificial Sequence
  Description of Artificial Sequence: Synthetic oligonucleotide
  Sense strand starting at position 3057 of SEQ ID NO: 996
uccuaagaggcuuaguuua

SEQ ID NO: 79609 - RNA, 19 nt, Artificial Sequence
  Description of Artificial Sequence: Synthetic oligonucleotide
  Antisense strand to SEQ ID NO: 79528
uaaacuaagccucuuagga

SEQ ID NO: 79610 - RNA, 19 nt, Artificial Sequence
  Description of Artificial Sequence: Synthetic oligonucleotide
  Sense strand starting at position 3059 of SEQ ID NO: 996
cuaagaggcuuaguuuaga

SEQ ID NO: 79611 - RNA, 19 nt, Artificial Sequence
  Description of Artificial Sequence: Synthetic oligonucleotide
  Antisense strand to SEQ ID NO: 79530
ucuaaacuaagccucuuag

SEQ ID NO: 79612 - RNA, 19 nt, Artificial Sequence
  Description of Artificial Sequence: Synthetic oligonucleotide
  Sense strand starting at position 3125 of SEQ ID NO: 996
agaugaacauugcucuguu

SEQ ID NO: 79613 - RNA, 19 nt, Artificial Sequence
  Description of Artificial Sequence: Synthetic oligonucleotide
  Antisense strand to SEQ ID NO: 79532
aacagagcaauguucaucu

SEQ ID NO: 79614 - RNA, 19 nt, Artificial Sequence
  Description of Artificial Sequence: Synthetic oligonucleotide
  Sense strand starting at position 3135 of SEQ ID NO: 996
ugcucuguucuaggaagag

SEQ ID NO: 79615 - RNA, 19 nt, Artificial Sequence
  Description of Artificial Sequence: Synthetic oligonucleotide
  Antisense strand to SEQ ID NO: 79534
cucuuccuagaacagagca

SEQ ID NO: 79616 - RNA, 19 nt, Artificial Sequence
  Description of Artificial Sequence: Synthetic oligonucleotide
  Sense strand starting at position 3206 of SEQ ID NO: 996
cugucucuuccugaacugu

SEQ ID NO: 79617 - RNA, 19 nt, Artificial Sequence
  Description of Artificial Sequence: Synthetic oligonucleotide
  Antisense strand to SEQ ID NO: 79536
acaguucaggaagagacag

SEQ ID NO: 79618 - RNA, 19 nt, Artificial Sequence
  Description of Artificial Sequence: Synthetic oligonucleotide
  Sense strand starting at position 3479 of SEQ ID NO: 996
uugacaugguauuccucaa

SEQ ID NO: 79619 - RNA, 19 nt, Artificial Sequence
  Description of Artificial Sequence: Synthetic oligonucleotide
  Antisense strand to SEQ ID NO: 79538
uugaggaauaccaugucaa

SEQ ID NO: 79620 - RNA, 19 nt, Artificial Sequence
  Description of Artificial Sequence: Synthetic oligonucleotide
  Sense strand starting at position 3692 of SEQ ID NO: 996
ccagaagguugcuccagaa

SEQ ID NO: 79621 - RNA, 19 nt, Artificial Sequence
  Description of Artificial Sequence: Synthetic oligonucleotide
  Antisense strand to SEQ ID NO: 79540
uucuggagcaaccuucugg

SEQ ID NO: 79622 - RNA, 19 nt, Artificial Sequence
  Description of Artificial Sequence: Synthetic oligonucleotide
  Sense strand starting at position 3737 of SEQ ID NO: 996
cauaucgagcuaugugaaa

SEQ ID NO: 79623 - RNA, 19 nt, Artificial Sequence
  Description of Artificial Sequence: Synthetic oligonucleotide
  Antisense strand to SEQ ID NO: 79542
uuucacauagcucgauaug

SEQ ID NO: 79624 - RNA, 19 nt, Artificial Sequence
  Description of Artificial Sequence: Synthetic oligonucleotide
  Sense strand starting at position 3790 of SEQ ID NO: 996
cgucucucccuuuauaaug

SEQ ID NO: 79625 - RNA, 19 nt, Artificial Sequence
  Description of Artificial Sequence: Synthetic oligonucleotide
  Antisense strand to SEQ ID NO: 79544
cauuauaaagggagagacg

SEQ ID NO: 79626 - RNA, 19 nt, Artificial Sequence
  Description of Artificial Sequence: Synthetic oligonucleotide
  Sense strand starting at position 3884 of SEQ ID NO: 996
agaugucauuuaugaaaug

SEQ ID NO: 79627 - RNA, 19 nt, Artificial Sequence
  Description of Artificial Sequence: Synthetic oligonucleotide
  Antisense strand to SEQ ID NO: 79546
cauuucauaaaugacaucu

SEQ ID NO: 79628 - RNA, 19 nt, Artificial Sequence
  Description of Artificial Sequence: Synthetic oligonucleotide
  Sense strand starting at position 3921 of SEQ ID NO: 996
uuuggauauuaguccuagu

SEQ ID NO: 79629 - RNA, 19 nt, Artificial Sequence
  Description of Artificial Sequence: Synthetic oligonucleotide
  Antisense strand to SEQ ID NO: 79548
acuaggacuaauauccaaa

SEQ ID NO: 79630 - RNA, 19 nt, Artificial Sequence
  Description of Artificial Sequence: Synthetic oligonucleotide
  Sense strand starting at position 3931 of SEQ ID NO: 996
aguccuaguccuuauagca

SEQ ID NO: 79631 - RNA, 19 nt, Artificial Sequence
  Description of Artificial Sequence: Synthetic oligonucleotide
  Antisense strand to SEQ ID NO: 79550
ugcuauaaggacuaggacu

SEQ ID NO: 79632 - RNA, 19 nt, Artificial Sequence
  Description of Artificial Sequence: Synthetic oligonucleotide
  Sense strand starting at position 3963 of SEQ ID NO: 996
ggugucauuuaacagaaga

SEQ ID NO: 79633 - RNA, 19 nt, Artificial Sequence
  Description of Artificial Sequence: Synthetic oligonucleotide
  Antisense strand to SEQ ID NO: 79552
ucuucuguuaaaugacacc

SEQ ID NO: 79634 - RNA, 19 nt, Artificial Sequence
  Description of Artificial Sequence: Synthetic oligonucleotide
  Sense strand starting at position 55 of SEQ ID NO: 998
caugcagaguuggccaaua

SEQ ID NO: 79635 - RNA, 19 nt, Artificial Sequence
  Description of Artificial Sequence: Synthetic oligonucleotide
  Antisense strand to SEQ ID NO: 79554
uauuggccaacucugcaug

SEQ ID NO: 79636 - RNA, 19 nt, Artificial Sequence
  Description of Artificial Sequence: Synthetic oligonucleotide
  Sense strand starting at position 57 of SEQ ID NO: 998
ugcagaguuggccaauacu

SEQ ID NO: 79637 - RNA, 19 nt, Artificial Sequence
  Description of Artificial Sequence: Synthetic oligonucleotide
  Antisense strand to SEQ ID NO: 79556
aguauuggccaacucugca

SEQ ID NO: 79638 - RNA, 19 nt, Artificial Sequence
  Description of Artificial Sequence: Synthetic oligonucleotide
  Sense strand starting at position 129 of SEQ ID NO: 998
ggaggaguguaguuaagug

SEQ ID NO: 79639 - RNA, 19 nt, Artificial Sequence
  Description of Artificial Sequence: Synthetic oligonucleotide
  Antisense strand to SEQ ID NO: 79558
cacuuaacuacacuccucc

SEQ ID NO: 79640 - RNA, 19 nt, Artificial Sequence
  Description of Artificial Sequence: Synthetic oligonucleotide
  Sense strand starting at position 211 of SEQ ID NO: 998
ggagaauggugagugcuga

SEQ ID NO: 79641 - RNA, 19 nt, Artificial Sequence
  Description of Artificial Sequence: Synthetic oligonucleotide
  Antisense strand to SEQ ID NO: 79560
ucagcacucaccauucucc

SEQ ID NO: 79642 - RNA, 19 nt, Artificial Sequence
  Description of Artificial Sequence: Synthetic oligonucleotide
  Sense strand starting at position 212 of SEQ ID NO: 998
gagaauggugagugcugaa

SEQ ID NO: 79643 - RNA, 19 nt, Artificial Sequence
  Description of Artificial Sequence: Synthetic oligonucleotide
  Antisense strand to SEQ ID NO: 79562
uucagcacucaccauucuc

SEQ ID NO: 79644 - RNA, 19 nt, Artificial Sequence
  Description of Artificial Sequence: Synthetic oligonucleotide
  Sense strand starting at position 219 of SEQ ID NO: 998
gugagugcugaaugcagau

SEQ ID NO: 79645 - RNA, 19 nt, Artificial Sequence
  Description of Artificial Sequence: Synthetic oligonucleotide
  Antisense strand to SEQ ID NO: 79564
aucugcauucagcacucac

SEQ ID NO: 79646 - RNA, 19 nt, Artificial Sequence
  Description of Artificial Sequence: Synthetic oligonucleotide
  Sense strand starting at position 225 of SEQ ID NO: 998
gcugaaugcagauacuaga

SEQ ID NO: 79647 - RNA, 19 nt, Artificial Sequence
  Description of Artificial Sequence: Synthetic oligonucleotide
  Antisense strand to SEQ ID NO: 79566
ucuaguaucugcauucagc

SEQ ID NO: 79648 - RNA, 19 nt, Artificial Sequence
  Description of Artificial Sequence: Synthetic oligonucleotide
  Sense strand starting at position 269 of SEQ ID NO: 998
gagaguugggaaggucuua

SEQ ID NO: 79649 - RNA, 19 nt, Artificial Sequence
  Description of Artificial Sequence: Synthetic oligonucleotide
  Antisense strand to SEQ ID NO: 79568
uaagaccuucccaacucuc

SEQ ID NO: 79650 - RNA, 19 nt, Artificial Sequence
  Description of Artificial Sequence: Synthetic oligonucleotide
  Sense strand starting at position 274 of SEQ ID NO: 998
uugggaaggucuuaggaaa

SEQ ID NO: 79651 - RNA, 19 nt, Artificial Sequence
  Description of Artificial Sequence: Synthetic oligonucleotide
  Antisense strand to SEQ ID NO: 79570
uuuccuaagaccuucccaa

SEQ ID NO: 79652 - RNA, 19 nt, Artificial Sequence
  Description of Artificial Sequence: Synthetic oligonucleotide
  Sense strand starting at position 281 of SEQ ID NO: 998
ggucuuaggaaauguggaa

SEQ ID NO: 79653 - RNA, 19 nt, Artificial Sequence
  Description of Artificial Sequence: Synthetic oligonucleotide
  Antisense strand to SEQ ID NO: 79572
uuccacauuuccuaagacc

SEQ ID NO: 79654 - RNA, 19 nt, Artificial Sequence
  Description of Artificial Sequence: Synthetic oligonucleotide
  Sense strand starting at position 361 of SEQ ID NO: 998
uuccucauaugcuuggaaa

SEQ ID NO: 79655 - RNA, 19 nt, Artificial Sequence
  Description of Artificial Sequence: Synthetic oligonucleotide
  Antisense strand to SEQ ID NO: 79574
uuuccaagcauaugaggaa

SEQ ID NO: 79656 - RNA, 19 nt, Artificial Sequence
  Description of Artificial Sequence: Synthetic oligonucleotide
  Sense strand starting at position 390 of SEQ ID NO: 998
aaggaaguaugguagauca

SEQ ID NO: 79657 - RNA, 19 nt, Artificial Sequence
  Description of Artificial Sequence: Synthetic oligonucleotide
  Antisense strand to SEQ ID NO: 79576
ugaucuaccauacuuccuu

SEQ ID NO: 79658 - RNA, 19 nt, Artificial Sequence
  Description of Artificial Sequence: Synthetic oligonucleotide
  Sense strand starting at position 574 of SEQ ID NO: 998
gcgcuuaagccucagaaag

SEQ ID NO: 79659 - RNA, 19 nt, Artificial Sequence
  Description of Artificial Sequence: Synthetic oligonucleotide
  Antisense strand to SEQ ID NO: 79578
cuuucugaggcuuaagcgc

SEQ ID NO: 79660 - RNA, 19 nt, Artificial Sequence
  Description of Artificial Sequence: Synthetic oligonucleotide
  Sense strand starting at position 820 of SEQ ID NO: 998
gcgccacuuccucacgaua

SEQ ID NO: 79661 - RNA, 19 nt, Artificial Sequence
  Description of Artificial Sequence: Synthetic oligonucleotide
  Antisense strand to SEQ ID NO: 79580
uaucgugaggaaguggcgc

SEQ ID NO: 79662 - RNA, 19 nt, Artificial Sequence
  Description of Artificial Sequence: Synthetic oligonucleotide
  Sense strand starting at position 985 of SEQ ID NO: 998
gccugugagucccugaagu

SEQ ID NO: 79663 - RNA, 19 nt, Artificial Sequence
  Description of Artificial Sequence: Synthetic oligonucleotide
  Antisense strand to SEQ ID NO: 79582
acuucagggacucacaggc

SEQ ID NO: 79664 - RNA, 19 nt, Artificial Sequence
  Description of Artificial Sequence: Synthetic oligonucleotide
  Sense strand starting at position 987 of SEQ ID NO: 998
cugugagucccugaagugu

SEQ ID NO: 79665 - RNA, 19 nt, Artificial Sequence
  Description of Artificial Sequence: Synthetic oligonucleotide
  Antisense strand to SEQ ID NO: 79584
acacuucagggacucacag

SEQ ID NO: 79666 - RNA, 19 nt, Artificial Sequence
  Description of Artificial Sequence: Synthetic oligonucleotide
  Sense strand starting at position 1140 of SEQ ID NO: 998
cacucuuggccgcaaaguu

SEQ ID NO: 79667 - RNA, 19 nt, Artificial Sequence
  Description of Artificial Sequence: Synthetic oligonucleotide
  Antisense strand to SEQ ID NO: 79586
aacuuugcggccaagagug

SEQ ID NO: 79668 - RNA, 19 nt, Artificial Sequence
  Description of Artificial Sequence: Synthetic oligonucleotide
  Sense strand starting at position 1187 of SEQ ID NO: 998
gagucugauccuugccucu

SEQ ID NO: 79669 - RNA, 19 nt, Artificial Sequence
  Description of Artificial Sequence: Synthetic oligonucleotide
  Antisense strand to SEQ ID NO: 79588
agaggcaaggaucagacuc

SEQ ID NO: 79670 - RNA, 19 nt, Artificial Sequence
  Description of Artificial Sequence: Synthetic oligonucleotide
  Sense strand starting at position 1354 of SEQ ID NO: 998
ccgagacucugaguaacua

SEQ ID NO: 79671 - RNA, 19 nt, Artificial Sequence
  Description of Artificial Sequence: Synthetic oligonucleotide
  Antisense strand to SEQ ID NO: 79590
uaguuacucagagucucgg

SEQ ID NO: 79672 - RNA, 19 nt, Artificial Sequence
  Description of Artificial Sequence: Synthetic oligonucleotide
  Sense strand starting at position 1493 of SEQ ID NO: 998
caguuaucgcuacuacgca

SEQ ID NO: 79673 - RNA, 19 nt, Artificial Sequence
  Description of Artificial Sequence: Synthetic oligonucleotide
  Antisense strand to SEQ ID NO: 79592
ugcguaguagcgauaacug

SEQ ID NO: 79674 - RNA, 19 nt, Artificial Sequence
  Description of Artificial Sequence: Synthetic oligonucleotide
  Sense strand starting at position 1558 of SEQ ID NO: 998
gcaggucuccugcacuaua

SEQ ID NO: 79675 - RNA, 19 nt, Artificial Sequence
  Description of Artificial Sequence: Synthetic oligonucleotide
  Antisense strand to SEQ ID NO: 79594
uauagugcaggagaccugc

SEQ ID NO: 79676 - RNA, 19 nt, Artificial Sequence
  Description of Artificial Sequence: Synthetic oligonucleotide
  Sense strand starting at position 1794 of SEQ ID NO: 998
ugcaguucuccgggaacuc

SEQ ID NO: 79677 - RNA, 19 nt, Artificial Sequence
  Description of Artificial Sequence: Synthetic oligonucleotide
  Antisense strand to SEQ ID NO: 79596
gaguucccggagaacugca

SEQ ID NO: 79678 - RNA, 19 nt, Artificial Sequence
  Description of Artificial Sequence: Synthetic oligonucleotide
  Sense strand starting at position 1859 of SEQ ID NO: 998
guucuacuccugcaacgaa

SEQ ID NO: 79679 - RNA, 19 nt, Artificial Sequence
  Description of Artificial Sequence: Synthetic oligonucleotide
  Antisense strand to SEQ ID NO: 79598
uucguugcaggaguagaac

SEQ ID NO: 79680 - RNA, 19 nt, Artificial Sequence
  Description of Artificial Sequence: Synthetic oligonucleotide
  Sense strand starting at position 2161 of SEQ ID NO: 998
guaguuucaggagggaaga

SEQ ID NO: 79681 - RNA, 19 nt, Artificial Sequence
  Description of Artificial Sequence: Synthetic oligonucleotide
  Antisense strand to SEQ ID NO: 79600
ucuucccuccugaaacuac

SEQ ID NO: 79682 - RNA, 19 nt, Artificial Sequence
  Description of Artificial Sequence: Synthetic oligonucleotide
  Sense strand starting at position 2551 of SEQ ID NO: 998
ucuagcaggacuggaaaua

SEQ ID NO: 79683 - RNA, 19 nt, Artificial Sequence
  Description of Artificial Sequence: Synthetic oligonucleotide
  Antisense strand to SEQ ID NO: 79602
uauuuccaguccugcuaga

SEQ ID NO: 79684 - RNA, 19 nt, Artificial Sequence
  Description of Artificial Sequence: Synthetic oligonucleotide
  Sense strand starting at position 2563 of SEQ ID NO: 998
ggaaauaccugucugcauu

SEQ ID NO: 79685 - RNA, 19 nt, Artificial Sequence
  Description of Artificial Sequence: Synthetic oligonucleotide
  Antisense strand to SEQ ID NO: 79604
aaugcagacagguauuucc

SEQ ID NO: 79686 - RNA, 19 nt, Artificial Sequence
  Description of Artificial Sequence: Synthetic oligonucleotide
  Sense strand starting at position 2564 of SEQ ID NO: 998
gaaauaccugucugcauug

SEQ ID NO: 79687 - RNA, 19 nt, Artificial Sequence
  Description of Artificial Sequence: Synthetic oligonucleotide
  Antisense strand to SEQ ID NO: 79606
caaugcagacagguauuuc

SEQ ID NO: 79688 - RNA, 19 nt, Artificial Sequence
  Description of Artificial Sequence: Synthetic oligonucleotide
  Sense strand starting at position 2806 of SEQ ID NO: 998
uggacuagaugcuuuauaa

SEQ ID NO: 79689 - RNA, 19 nt, Artificial Sequence
  Description of Artificial Sequence: Synthetic oligonucleotide
  Antisense strand to SEQ ID NO: 79608
uuauaaagcaucuagucca

SEQ ID NO: 79690 - RNA, 19 nt, Artificial Sequence
  Description of Artificial Sequence: Synthetic oligonucleotide
  Sense strand starting at position 2821 of SEQ ID NO: 998
auaacucuuguguaaccuu

SEQ ID NO: 79691 - RNA, 19 nt, Artificial Sequence
  Description of Artificial Sequence: Synthetic oligonucleotide
  Antisense strand to SEQ ID NO: 79610
aagguuacacaagaguuau

SEQ ID NO: 79692 - RNA, 19 nt, Artificial Sequence
  Description of Artificial Sequence: Synthetic oligonucleotide
  Sense strand starting at position 2841 of SEQ ID NO: 998
acagaaacccugcgaagua

SEQ ID NO: 79693 - RNA, 19 nt, Artificial Sequence
  Description of Artificial Sequence: Synthetic oligonucleotide
  Antisense strand to SEQ ID NO: 79612
uacuucgcaggguuucugu

SEQ ID NO: 79694 - RNA, 19 nt, Artificial Sequence
  Description of Artificial Sequence: Synthetic oligonucleotide
  Sense strand starting at position 3061 of SEQ ID NO: 998
uggugaugcuguagggaug

SEQ ID NO: 79695 - RNA, 19 nt, Artificial Sequence
  Description of Artificial Sequence: Synthetic oligonucleotide
  Antisense strand to SEQ ID NO: 79614
caucccuacagcaucacca

SEQ ID NO: 79696 - RNA, 19 nt, Artificial Sequence
  Description of Artificial Sequence: Synthetic oligonucleotide
  Sense strand starting at position 3123 of SEQ ID NO: 998
ucaguuggcucccuuggaa

SEQ ID NO: 79697 - RNA, 19 nt, Artificial Sequence
  Description of Artificial Sequence: Synthetic oligonucleotide
  Antisense strand to SEQ ID NO: 79616
uuccaagggagccaacuga

SEQ ID NO: 79698 - RNA, 19 nt, Artificial Sequence
  Description of Artificial Sequence: Synthetic oligonucleotide
  Sense strand starting at position 3284 of SEQ ID NO: 998
cccagaaucccuggcacau

SEQ ID NO: 79699 - RNA, 19 nt, Artificial Sequence
  Description of Artificial Sequence: Synthetic oligonucleotide
  Antisense strand to SEQ ID NO: 79618
augugccagggauucuggg

SEQ ID NO: 79700 - RNA, 19 nt, Artificial Sequence
  Description of Artificial Sequence: Synthetic oligonucleotide
  Sense strand starting at position 3301 of SEQ ID NO: 998
aucauuucuccauguaguc

SEQ ID NO: 79701 - RNA, 19 nt, Artificial Sequence
  Description of Artificial Sequence: Synthetic oligonucleotide
  Antisense strand to SEQ ID NO: 79620
gacuacauggagaaaugau

SEQ ID NO: 79702 - RNA, 19 nt, Artificial Sequence
  Description of Artificial Sequence: Synthetic oligonucleotide
  Sense strand starting at position 3409 of SEQ ID NO: 998
acaguucuuccagguguaa

SEQ ID NO: 79703 - RNA, 19 nt, Artificial Sequence
  Description of Artificial Sequence: Synthetic oligonucleotide
  Antisense strand to SEQ ID NO: 79622
uuacaccuggaagaacugu

SEQ ID NO: 79704 - RNA, 19 nt, Artificial Sequence
  Description of Artificial Sequence: Synthetic oligonucleotide
  Sense strand starting at position 3411 of SEQ ID NO: 998
aguucuuccagguguaaag

SEQ ID NO: 79705 - RNA, 19 nt, Artificial Sequence
  Description of Artificial Sequence: Synthetic oligonucleotide
  Antisense strand to SEQ ID NO: 79624
cuuuacaccuggaagaacu

SEQ ID NO: 79706 - RNA, 19 nt, Artificial Sequence
  Description of Artificial Sequence: Synthetic oligonucleotide
  Sense strand starting at position 3559 of SEQ ID NO: 998
cugaucuauugauaagacu

SEQ ID NO: 79707 - RNA, 19 nt, Artificial Sequence
  Description of Artificial Sequence: Synthetic oligonucleotide
  Antisense strand to SEQ ID NO: 79626
agucuuaucaauagaucag

SEQ ID NO: 79708 - RNA, 19 nt, Artificial Sequence
  Description of Artificial Sequence: Synthetic oligonucleotide
  Sense strand starting at position 3581 of SEQ ID NO: 998
auggaaacauguuaaugaa

SEQ ID NO: 79709 - RNA, 19 nt, Artificial Sequence
  Description of Artificial Sequence: Synthetic oligonucleotide
  Antisense strand to SEQ ID NO: 79628
uucauuaacauguuuccau

SEQ ID NO: 79710 - RNA, 19 nt, Artificial Sequence
  Description of Artificial Sequence: Synthetic oligonucleotide
  Sense strand starting at position 3970 of SEQ ID NO: 998
gucuuuggaucuuuaccaa

SEQ ID NO: 79711 - RNA, 19 nt, Artificial Sequence
  Description of Artificial Sequence: Synthetic oligonucleotide
  Antisense strand to SEQ ID NO: 79630
uugguaaagauccaaagac

SEQ ID NO: 79712 - RNA, 19 nt, Artificial Sequence
  Description of Artificial Sequence: Synthetic oligonucleotide
  Sense strand starting at position 3983 of SEQ ID NO: 998
uaccaaucauugggaagga

SEQ ID NO: 79713 - RNA, 19 nt, Artificial Sequence
  Description of Artificial Sequence: Synthetic oligonucleotide
  Antisense strand to SEQ ID NO: 79632
uccuucccaaugauuggua

SEQ ID NO: 79714 - RNA, 19 nt, Artificial Sequence
  Description of Artificial Sequence: Synthetic oligonucleotide
  Sense strand starting at position 3942 of SEQ ID NO: 999
ccggacugaggcugugaaa

SEQ ID NO: 79715 - RNA, 19 nt, Artificial Sequence
  Description of Artificial Sequence: Synthetic oligonucleotide
  Antisense strand to SEQ ID NO: 79634
uuucacagccucaguccgg

SEQ ID NO: 79716 - RNA, 19 nt, Artificial Sequence
  Description of Artificial Sequence: Synthetic oligonucleotide
  Sense strand starting at position 3831 of SEQ ID NO: 999
guugcuuggccagacuuua

SEQ ID NO: 79717 - RNA, 19 nt, Artificial Sequence
  Description of Artificial Sequence: Synthetic oligonucleotide
  Antisense strand to SEQ ID NO: 79636
uaaagucuggccaagcaac

SEQ ID NO: 79718 - RNA, 19 nt, Artificial Sequence
  Description of Artificial Sequence: Synthetic oligonucleotide
  Sense strand starting at position 3814 of SEQ ID NO: 999
aagggcuuuccagaagggu

SEQ ID NO: 79719 - RNA, 19 nt, Artificial Sequence
  Description of Artificial Sequence: Synthetic oligonucleotide
  Antisense strand to SEQ ID NO: 79638
acccuucuggaaagcccuu

SEQ ID NO: 79720 - RNA, 19 nt, Artificial Sequence
  Description of Artificial Sequence: Synthetic oligonucleotide
  Sense strand starting at position 3706 of SEQ ID NO: 999
gugugcucaggauguaaag

SEQ ID NO: 79721 - RNA, 19 nt, Artificial Sequence
  Description of Artificial Sequence: Synthetic oligonucleotide
  Antisense strand to SEQ ID NO: 79640
cuuuacauccugagcacac

SEQ ID NO: 79722 - RNA, 19 nt, Artificial Sequence
  Description of Artificial Sequence: Synthetic oligonucleotide
  Sense strand starting at position 3704 of SEQ ID NO: 999
cugugugcucaggauguaa

SEQ ID NO: 79723 - RNA, 19 nt, Artificial Sequence
  Description of Artificial Sequence: Synthetic oligonucleotide
  Antisense strand to SEQ ID NO: 79642
uuacauccugagcacacag

SEQ ID NO: 79724 - RNA, 19 nt, Artificial Sequence
  Description of Artificial Sequence: Synthetic oligonucleotide
  Sense strand starting at position 3546 of SEQ ID NO: 999
uuagacaauccguaauguu

SEQ ID NO: 79725 - RNA, 19 nt, Artificial Sequence
  Description of Artificial Sequence: Synthetic oligonucleotide
  Antisense strand to SEQ ID NO: 79644
aacauuacggauugucuaa

SEQ ID NO: 79726 - RNA, 19 nt, Artificial Sequence
  Description of Artificial Sequence: Synthetic oligonucleotide
  Sense strand starting at position 3545 of SEQ ID NO: 999
cuuagacaauccguaaugu

SEQ ID NO: 79727 - RNA, 19 nt, Artificial Sequence
  Description of Artificial Sequence: Synthetic oligonucleotide
  Antisense strand to SEQ ID NO: 79646
acauuacggauugucuaag

SEQ ID NO: 79728 - RNA, 19 nt, Artificial Sequence
  Description of Artificial Sequence: Synthetic oligonucleotide
  Sense strand starting at position 3528 of SEQ ID NO: 999
cgagguuugcuacauaacu

SEQ ID NO: 79729 - RNA, 19 nt, Artificial Sequence
  Description of Artificial Sequence: Synthetic oligonucleotide
  Antisense strand to SEQ ID NO: 79648
aguuauguagcaaaccucg

SEQ ID NO: 79730 - RNA, 19 nt, Artificial Sequence
  Description of Artificial Sequence: Synthetic oligonucleotide
  Sense strand starting at position 3525 of SEQ ID NO: 999
caccgagguuugcuacaua

SEQ ID NO: 79731 - RNA, 19 nt, Artificial Sequence
  Description of Artificial Sequence: Synthetic oligonucleotide
  Antisense strand to SEQ ID NO: 79650
uauguagcaaaccucggug

SEQ ID NO: 79732 - RNA, 19 nt, Artificial Sequence
  Description of Artificial Sequence: Synthetic oligonucleotide
  Sense strand starting at position 3486 of SEQ ID NO: 999
auuggcuuuggugagaaau

SEQ ID NO: 79733 - RNA, 19 nt, Artificial Sequence
  Description of Artificial Sequence: Synthetic oligonucleotide
  Antisense strand to SEQ ID NO: 79652
auuucucaccaaagccaau

SEQ ID NO: 79734 - RNA, 19 nt, Artificial Sequence
  Description of Artificial Sequence: Synthetic oligonucleotide
  Sense strand starting at position 3445 of SEQ ID NO: 999
gacuguccugagcagaguu

SEQ ID NO: 79735 - RNA, 19 nt, Artificial Sequence
  Description of Artificial Sequence: Synthetic oligonucleotide
  Antisense strand to SEQ ID NO: 79654
aacucugcucaggacaguc

SEQ ID NO: 79736 - RNA, 19 nt, Artificial Sequence
  Description of Artificial Sequence: Synthetic oligonucleotide
  Sense strand starting at position 3442 of SEQ ID NO: 999
agugacuguccugagcaga

SEQ ID NO: 79737 - RNA, 19 nt, Artificial Sequence
  Description of Artificial Sequence: Synthetic oligonucleotide
  Antisense strand to SEQ ID NO: 79656
ucugcucaggacagucacu

SEQ ID NO: 79738 - RNA, 19 nt, Artificial Sequence
  Description of Artificial Sequence: Synthetic oligonucleotide
  Sense strand starting at position 3367 of SEQ ID NO: 999
gcauuuauuuccugaugca

SEQ ID NO: 79739 - RNA, 19 nt, Artificial Sequence
  Description of Artificial Sequence: Synthetic oligonucleotide
  Antisense strand to SEQ ID NO: 79658
ugcaucaggaaauaaaugc

SEQ ID NO: 79740 - RNA, 19 nt, Artificial Sequence
  Description of Artificial Sequence: Synthetic oligonucleotide
  Sense strand starting at position 3322 of SEQ ID NO: 999
ccuaguuacuuugugauag

SEQ ID NO: 79741 - RNA, 19 nt, Artificial Sequence
  Description of Artificial Sequence: Synthetic oligonucleotide
  Antisense strand to SEQ ID NO: 79660
cuaucacaaaguaacuagg

SEQ ID NO: 79742 - RNA, 19 nt, Artificial Sequence
  Description of Artificial Sequence: Synthetic oligonucleotide
  Sense strand starting at position 3315 of SEQ ID NO: 999
ugcacauccuaguuacuuu

SEQ ID NO: 79743 - RNA, 19 nt, Artificial Sequence
  Description of Artificial Sequence: Synthetic oligonucleotide
  Antisense strand to SEQ ID NO: 79662
aaaguaacuaggaugugca

SEQ ID NO: 79744 - RNA, 19 nt, Artificial Sequence
  Description of Artificial Sequence: Synthetic oligonucleotide
  Sense strand starting at position 3180 of SEQ ID NO: 999
ugagcagguuggucuagau

SEQ ID NO: 79745 - RNA, 19 nt, Artificial Sequence
  Description of Artificial Sequence: Synthetic oligonucleotide
  Antisense strand to SEQ ID NO: 79664
aucuagaccaaccugcuca

SEQ ID NO: 79746 - RNA, 19 nt, Artificial Sequence
  Description of Artificial Sequence: Synthetic oligonucleotide
  Sense strand starting at position 3021 of SEQ ID NO: 999
guuggugagguggauugaa

SEQ ID NO: 79747 - RNA, 19 nt, Artificial Sequence
  Description of Artificial Sequence: Synthetic oligonucleotide
  Antisense strand to SEQ ID NO: 79666
uucaauccaccucaccaac

SEQ ID NO: 79748 - RNA, 19 nt, Artificial Sequence
  Description of Artificial Sequence: Synthetic oligonucleotide
  Sense strand starting at position 2782 of SEQ ID NO: 999
gccugagauccucauguuc

SEQ ID NO: 79749 - RNA, 19 nt, Artificial Sequence
  Description of Artificial Sequence: Synthetic oligonucleotide
  Antisense strand to SEQ ID NO: 79668
gaacaugaggaucucaggc

SEQ ID NO: 79750 - RNA, 19 nt, Artificial Sequence
  Description of Artificial Sequence: Synthetic oligonucleotide
  Sense strand starting at position 2764 of SEQ ID NO: 999
ggaggaaugugccugagug

SEQ ID NO: 79751 - RNA, 19 nt, Artificial Sequence
  Description of Artificial Sequence: Synthetic oligonucleotide
  Antisense strand to SEQ ID NO: 79670
cacucaggcacauuccucc

SEQ ID NO: 79752 - RNA, 19 nt, Artificial Sequence
  Description of Artificial Sequence: Synthetic oligonucleotide
  Sense strand starting at position 2684 of SEQ ID NO: 999
cugccuagugcucagauaa

SEQ ID NO: 79753 - RNA, 19 nt, Artificial Sequence
  Description of Artificial Sequence: Synthetic oligonucleotide
  Antisense strand to SEQ ID NO: 79672
uuaucugagcacuaggcag

SEQ ID NO: 79754 - RNA, 19 nt, Artificial Sequence
  Description of Artificial Sequence: Synthetic oligonucleotide
  Sense strand starting at position 2677 of SEQ ID NO: 999
cugagaacugccuagugcu

SEQ ID NO: 79755 - RNA, 19 nt, Artificial Sequence
  Description of Artificial Sequence: Synthetic oligonucleotide
  Antisense strand to SEQ ID NO: 79674
agcacuaggcaguucucag

SEQ ID NO: 79756 - RNA, 19 nt, Artificial Sequence
  Description of Artificial Sequence: Synthetic oligonucleotide
  Sense strand starting at position 2578 of SEQ ID NO: 999
guuucuauagaauguugga

SEQ ID NO: 79757 - RNA, 19 nt, Artificial Sequence
  Description of Artificial Sequence: Synthetic oligonucleotide
  Antisense strand to SEQ ID NO: 79676
uccaacauucuauagaaac

SEQ ID NO: 79758 - RNA, 19 nt, Artificial Sequence
  Description of Artificial Sequence: Synthetic oligonucleotide
  Sense strand starting at position 2538 of SEQ ID NO: 999
ggcaguuggauaugaaaug

SEQ ID NO: 79759 - RNA, 19 nt, Artificial Sequence
  Description of Artificial Sequence: Synthetic oligonucleotide
  Antisense strand to SEQ ID NO: 79678
cauuucauauccaacugcc

SEQ ID NO: 79760 - RNA, 19 nt, Artificial Sequence
  Description of Artificial Sequence: Synthetic oligonucleotide
  Sense strand starting at position 2532 of SEQ ID NO: 999
agagauggcaguuggauau

SEQ ID NO: 79761 - RNA, 19 nt, Artificial Sequence
  Description of Artificial Sequence: Synthetic oligonucleotide
  Antisense strand to SEQ ID NO: 79680
auauccaacugccaucucu

SEQ ID NO: 79762 - RNA, 19 nt, Artificial Sequence
  Description of Artificial Sequence: Synthetic oligonucleotide
  Sense strand starting at position 2324 of SEQ ID NO: 999
uggauauauuuggaauugu

SEQ ID NO: 79763 - RNA, 19 nt, Artificial Sequence
  Description of Artificial Sequence: Synthetic oligonucleotide
  Antisense strand to SEQ ID NO: 79682
acaauuccaaauauaucca

SEQ ID NO: 79764 - RNA, 19 nt, Artificial Sequence
  Description of Artificial Sequence: Synthetic oligonucleotide
  Sense strand starting at position 2155 of SEQ ID NO: 999
agaaguuggaucugaguca

SEQ ID NO: 79765 - RNA, 19 nt, Artificial Sequence
  Description of Artificial Sequence: Synthetic oligonucleotide
  Antisense strand to SEQ ID NO: 79684
ugacucagauccaacuucu

SEQ ID NO: 79766 - RNA, 19 nt, Artificial Sequence
  Description of Artificial Sequence: Synthetic oligonucleotide
  Sense strand starting at position 2144 of SEQ ID NO: 999
gauccaguccuagaaguug

SEQ ID NO: 79767 - RNA, 19 nt, Artificial Sequence
  Description of Artificial Sequence: Synthetic oligonucleotide
  Antisense strand to SEQ ID NO: 79686
caacuucuaggacuggauc

SEQ ID NO: 79768 - RNA, 19 nt, Artificial Sequence
  Description of Artificial Sequence: Synthetic oligonucleotide
  Sense strand starting at position 2031 of SEQ ID NO: 999
gggcucuucccagagucaa

SEQ ID NO: 79769 - RNA, 19 nt, Artificial Sequence
  Description of Artificial Sequence: Synthetic oligonucleotide
  Antisense strand to SEQ ID NO: 79688
uugacucugggaagagccc

SEQ ID NO: 79770 - RNA, 19 nt, Artificial Sequence
  Description of Artificial Sequence: Synthetic oligonucleotide
  Sense strand starting at position 1416 of SEQ ID NO: 999
cacaacgcucuaugugaga

SEQ ID NO: 79771 - RNA, 19 nt, Artificial Sequence
  Description of Artificial Sequence: Synthetic oligonucleotide
  Antisense strand to SEQ ID NO: 79690
ucucacauagagcguugug

SEQ ID NO: 79772 - RNA, 19 nt, Artificial Sequence
  Description of Artificial Sequence: Synthetic oligonucleotide
  Sense strand starting at position 917 of SEQ ID NO: 999
cagugaagcaugugagaca

SEQ ID NO: 79773 - RNA, 19 nt, Artificial Sequence
  Description of Artificial Sequence: Synthetic oligonucleotide
  Antisense strand to SEQ ID NO: 79692
ugucucacaugcuucacug

SEQ ID NO: 79774 - RNA, 19 nt, Artificial Sequence
  Description of Artificial Sequence: Synthetic oligonucleotide
  Sense strand starting at position 915 of SEQ ID NO: 999
gacagugaagcaugugaga

SEQ ID NO: 79775 - RNA, 19 nt, Artificial Sequence
  Description of Artificial Sequence: Synthetic oligonucleotide
  Antisense strand to SEQ ID NO: 79694
ucucacaugcuucacuguc

SEQ ID NO: 79776 - RNA, 19 nt, Artificial Sequence
  Description of Artificial Sequence: Synthetic oligonucleotide
  Sense strand starting at position 707 of SEQ ID NO: 999
ucaggacucugggauaaua

SEQ ID NO: 79777 - RNA, 19 nt, Artificial Sequence
  Description of Artificial Sequence: Synthetic oligonucleotide
  Antisense strand to SEQ ID NO: 79696
uauuaucccagaguccuga

SEQ ID NO: 79778 - RNA, 19 nt, Artificial Sequence
  Description of Artificial Sequence: Synthetic oligonucleotide
  Sense strand starting at position 704 of SEQ ID NO: 999
agcucaggacucugggaua

SEQ ID NO: 79779 - RNA, 19 nt, Artificial Sequence
  Description of Artificial Sequence: Synthetic oligonucleotide
  Antisense strand to SEQ ID NO: 79698
uaucccagaguccugagcu

SEQ ID NO: 79780 - RNA, 19 nt, Artificial Sequence
  Description of Artificial Sequence: Synthetic oligonucleotide
  Sense strand starting at position 673 of SEQ ID NO: 999
ggccaagggcucugauacu

SEQ ID NO: 79781 - RNA, 19 nt, Artificial Sequence
  Description of Artificial Sequence: Synthetic oligonucleotide
  Antisense strand to SEQ ID NO: 79700
aguaucagagcccuuggcc

SEQ ID NO: 79782 - RNA, 19 nt, Artificial Sequence
  Description of Artificial Sequence: Synthetic oligonucleotide
  Sense strand starting at position 566 of SEQ ID NO: 999
aguagcucagcaugaauga

SEQ ID NO: 79783 - RNA, 19 nt, Artificial Sequence
  Description of Artificial Sequence: Synthetic oligonucleotide
  Antisense strand to SEQ ID NO: 79702
ucauucaugcugagcuacu

SEQ ID NO: 79784 - RNA, 19 nt, Artificial Sequence
  Description of Artificial Sequence: Synthetic oligonucleotide
  Sense strand starting at position 564 of SEQ ID NO: 999
acaguagcucagcaugaau

SEQ ID NO: 79785 - RNA, 19 nt, Artificial Sequence
  Description of Artificial Sequence: Synthetic oligonucleotide
  Antisense strand to SEQ ID NO: 79704
auucaugcugagcuacugu

SEQ ID NO: 79786 - RNA, 19 nt, Artificial Sequence
  Description of Artificial Sequence: Synthetic oligonucleotide
  Sense strand starting at position 541 of SEQ ID NO: 999
cugagaggcuuccugaaga

SEQ ID NO: 79787 - RNA, 19 nt, Artificial Sequence
  Description of Artificial Sequence: Synthetic oligonucleotide
  Antisense strand to SEQ ID NO: 79706
ucuucaggaagccucucag

SEQ ID NO: 79788 - RNA, 19 nt, Artificial Sequence
  Description of Artificial Sequence: Synthetic oligonucleotide
  Sense strand starting at position 469 of SEQ ID NO: 999
ugaagagaucgguggucaa

SEQ ID NO: 79789 - RNA, 19 nt, Artificial Sequence
  Description of Artificial Sequence: Synthetic oligonucleotide
  Antisense strand to SEQ ID NO: 79708
uugaccaccgaucucuuca

SEQ ID NO: 79790 - RNA, 19 nt, Artificial Sequence
  Description of Artificial Sequence: Synthetic oligonucleotide
  Sense strand starting at position 368 of SEQ ID NO: 999
ccuggaauccuauguuccu

SEQ ID NO: 79791 - RNA, 19 nt, Artificial Sequence
  Description of Artificial Sequence: Synthetic oligonucleotide
  Antisense strand to SEQ ID NO: 79710
aggaacauaggauuccagg

SEQ ID NO: 79792 - RNA, 19 nt, Artificial Sequence
  Description of Artificial Sequence: Synthetic oligonucleotide
  Sense strand starting at position 292 of SEQ ID NO: 999
uuuaaauaacgcuagacua

SEQ ID NO: 79793 - RNA, 19 nt, Artificial Sequence
  Description of Artificial Sequence: Synthetic oligonucleotide
  Antisense strand to SEQ ID NO: 79712
uagucuagcguuauuuaaa

SEQ ID NO: 79794 - RNA, 19 nt, Artificial Sequence
  Description of Artificial Sequence: Synthetic oligonucleotide
  Sense strand starting at position 38 of SEQ ID NO: 1000
ggugaaugauguuuccucu

SEQ ID NO: 79795 - RNA, 19 nt, Artificial Sequence
  Description of Artificial Sequence: Synthetic oligonucleotide
  Antisense strand to SEQ ID NO: 79714
agaggaaacaucauucacc

SEQ ID NO: 79796 - RNA, 19 nt, Artificial Sequence
  Description of Artificial Sequence: Synthetic oligonucleotide
  Sense strand starting at position 186 of SEQ ID NO: 1000
caggaaagcuguuugcaaa

SEQ ID NO: 79797 - RNA, 19 nt, Artificial Sequence
  Description of Artificial Sequence: Synthetic oligonucleotide
  Antisense strand to SEQ ID NO: 79716
uuugcaaacagcuuuccug

SEQ ID NO: 79798 - RNA, 19 nt, Artificial Sequence
  Description of Artificial Sequence: Synthetic oligonucleotide
  Sense strand starting at position 187 of SEQ ID NO: 1000
aggaaagcuguuugcaaau

SEQ ID NO: 79799 - RNA, 19 nt, Artificial Sequence
  Description of Artificial Sequence: Synthetic oligonucleotide
  Antisense strand to SEQ ID NO: 79718
auuugcaaacagcuuuccu

SEQ ID NO: 79800 - RNA, 19 nt, Artificial Sequence
  Description of Artificial Sequence: Synthetic oligonucleotide
  Sense strand starting at position 266 of SEQ ID NO: 1000
aucugacuccaggagucuu

SEQ ID NO: 79801 - RNA, 19 nt, Artificial Sequence
  Description of Artificial Sequence: Synthetic oligonucleotide
  Antisense strand to SEQ ID NO: 79720
aagacuccuggagucagau

SEQ ID NO: 79802 - RNA, 19 nt, Artificial Sequence
  Description of Artificial Sequence: Synthetic oligonucleotide
  Sense strand starting at position 346 of SEQ ID NO: 1000
ccugcuggucuguaggaga

SEQ ID NO: 79803 - RNA, 19 nt, Artificial Sequence
  Description of Artificial Sequence: Synthetic oligonucleotide
  Antisense strand to SEQ ID NO: 79722
ucuccuacagaccagcagg

SEQ ID NO: 79804 - RNA, 19 nt, Artificial Sequence
  Description of Artificial Sequence: Synthetic oligonucleotide
  Sense strand starting at position 353 of SEQ ID NO: 1000
gucuguaggagaugguauu

SEQ ID NO: 79805 - RNA, 19 nt, Artificial Sequence
  Description of Artificial Sequence: Synthetic oligonucleotide
  Antisense strand to SEQ ID NO: 79724
aauaccaucuccuacagac

SEQ ID NO: 79806 - RNA, 19 nt, Artificial Sequence
  Description of Artificial Sequence: Synthetic oligonucleotide
  Sense strand starting at position 578 of SEQ ID NO: 1000
gccaaaggugagugagaga

SEQ ID NO: 79807 - RNA, 19 nt, Artificial Sequence
  Description of Artificial Sequence: Synthetic oligonucleotide
  Antisense strand to SEQ ID NO: 79726
ucucucacucaccuuuggc

SEQ ID NO: 79808 - RNA, 19 nt, Artificial Sequence
  Description of Artificial Sequence: Synthetic oligonucleotide
  Sense strand starting at position 640 of SEQ ID NO: 1000
agaggacagcuugguucua

SEQ ID NO: 79809 - RNA, 19 nt, Artificial Sequence
  Description of Artificial Sequence: Synthetic oligonucleotide
  Antisense strand to SEQ ID NO: 79728
uagaaccaagcuguccucu

SEQ ID NO: 79810 - RNA, 19 nt, Artificial Sequence
  Description of Artificial Sequence: Synthetic oligonucleotide
  Sense strand starting at position 692 of SEQ ID NO: 1000
gacugagcccuuuguaaac

SEQ ID NO: 79811 - RNA, 19 nt, Artificial Sequence
  Description of Artificial Sequence: Synthetic oligonucleotide
  Antisense strand to SEQ ID NO: 79730
guuuacaaagggcucaguc

SEQ ID NO: 79812 - RNA, 19 nt, Artificial Sequence
  Description of Artificial Sequence: Synthetic oligonucleotide
  Sense strand starting at position 1297 of SEQ ID NO: 1000
uccaguuuagcuuggaaag

SEQ ID NO: 79813 - RNA, 19 nt, Artificial Sequence
  Description of Artificial Sequence: Synthetic oligonucleotide
  Antisense strand to SEQ ID NO: 79732
cuuuccaagcuaaacugga

SEQ ID NO: 79814 - RNA, 19 nt, Artificial Sequence
  Description of Artificial Sequence: Synthetic oligonucleotide
  Sense strand starting at position 1298 of SEQ ID NO: 1000
ccaguuuagcuuggaaaga

SEQ ID NO: 79815 - RNA, 19 nt, Artificial Sequence
  Description of Artificial Sequence: Synthetic oligonucleotide
  Antisense strand to SEQ ID NO: 79734
ucuuuccaagcuaaacugg

SEQ ID NO: 79816 - RNA, 19 nt, Artificial Sequence
  Description of Artificial Sequence: Synthetic oligonucleotide
  Sense strand starting at position 1523 of SEQ ID NO: 1000
uaaguuucucagcacgaga

SEQ ID NO: 79817 - RNA, 19 nt, Artificial Sequence
  Description of Artificial Sequence: Synthetic oligonucleotide
  Antisense strand to SEQ ID NO: 79736
ucucgugcugagaaacuua

SEQ ID NO: 79818 - RNA, 19 nt, Artificial Sequence
  Description of Artificial Sequence: Synthetic oligonucleotide
  Sense strand starting at position 1564 of SEQ ID NO: 1000
gcagguuuccugcacauuu

SEQ ID NO: 79819 - RNA, 19 nt, Artificial Sequence
  Description of Artificial Sequence: Synthetic oligonucleotide
  Antisense strand to SEQ ID NO: 79738
aaaugugcaggaaaccugc

SEQ ID NO: 79820 - RNA, 19 nt, Artificial Sequence
  Description of Artificial Sequence: Synthetic oligonucleotide
  Sense strand starting at position 1620 of SEQ ID NO: 1000
uggcuugaucuaggauucu

SEQ ID NO: 79821 - RNA, 19 nt, Artificial Sequence
  Description of Artificial Sequence: Synthetic oligonucleotide
  Antisense strand to SEQ ID NO: 79740
agaauccuagaucaagcca

SEQ ID NO: 79822 - RNA, 19 nt, Artificial Sequence
  Description of Artificial Sequence: Synthetic oligonucleotide
  Sense strand starting at position 1692 of SEQ ID NO: 1000
ggaggaggguucuuauagu

SEQ ID NO: 79823 - RNA, 19 nt, Artificial Sequence
  Description of Artificial Sequence: Synthetic oligonucleotide
  Antisense strand to SEQ ID NO: 79742
acuauaagaacccuccucc

SEQ ID NO: 79824 - RNA, 19 nt, Artificial Sequence
  Description of Artificial Sequence: Synthetic oligonucleotide
  Sense strand starting at position 1703 of SEQ ID NO: 1000
cuuauaguuccaggagaau

SEQ ID NO: 79825 - RNA, 19 nt, Artificial Sequence
  Description of Artificial Sequence: Synthetic oligonucleotide
  Antisense strand to SEQ ID NO: 79744
auucuccuggaacuauaag

SEQ ID NO: 79826 - RNA, 19 nt, Artificial Sequence
  Description of Artificial Sequence: Synthetic oligonucleotide
  Sense strand starting at position 1806 of SEQ ID NO: 1000
cucggagaucucgaagcau

SEQ ID NO: 79827 - RNA, 19 nt, Artificial Sequence
  Description of Artificial Sequence: Synthetic oligonucleotide
  Antisense strand to SEQ ID NO: 79746
augcuucgagaucuccgag

SEQ ID NO: 79828 - RNA, 19 nt, Artificial Sequence
  Description of Artificial Sequence: Synthetic oligonucleotide
  Sense strand starting at position 2216 of SEQ ID NO: 1000
ugggcuaccucucuuagaa

SEQ ID NO: 79829 - RNA, 19 nt, Artificial Sequence
  Description of Artificial Sequence: Synthetic oligonucleotide
  Antisense strand to SEQ ID NO: 79748
uucuaagagagguagccca

SEQ ID NO: 79830 - RNA, 19 nt, Artificial Sequence
  Description of Artificial Sequence: Synthetic oligonucleotide
  Sense strand starting at position 2318 of SEQ ID NO: 1000
ucucauucgcguguuccua

SEQ ID NO: 79831 - RNA, 19 nt, Artificial Sequence
  Description of Artificial Sequence: Synthetic oligonucleotide
  Antisense strand to SEQ ID NO: 79750
uaggaacacgcgaaugaga

SEQ ID NO: 79832 - RNA, 19 nt, Artificial Sequence
  Description of Artificial Sequence: Synthetic oligonucleotide
  Sense strand starting at position 2340 of SEQ ID NO: 1000
cacagugacguggacaaau

SEQ ID NO: 79833 - RNA, 19 nt, Artificial Sequence
  Description of Artificial Sequence: Synthetic oligonucleotide
  Antisense strand to SEQ ID NO: 79752
auuuguccacgucacugug

SEQ ID NO: 79834 - RNA, 19 nt, Artificial Sequence
  Description of Artificial Sequence: Synthetic oligonucleotide
  Sense strand starting at position 2351 of SEQ ID NO: 1000
ggacaaauugcccauucca

SEQ ID NO: 79835 - RNA, 19 nt, Artificial Sequence
  Description of Artificial Sequence: Synthetic oligonucleotide
  Antisense strand to SEQ ID NO: 79754
uggaaugggcaauuugucc

SEQ ID NO: 79836 - RNA, 19 nt, Artificial Sequence
  Description of Artificial Sequence: Synthetic oligonucleotide
  Sense strand starting at position 2499 of SEQ ID NO: 1000
ugggcuaaauauccucaaa

SEQ ID NO: 79837 - RNA, 19 nt, Artificial Sequence
  Description of Artificial Sequence: Synthetic oligonucleotide
  Antisense strand to SEQ ID NO: 79756
uuugaggauauuuagccca

SEQ ID NO: 79838 - RNA, 19 nt, Artificial Sequence
  Description of Artificial Sequence: Synthetic oligonucleotide
  Sense strand starting at position 2501 of SEQ ID NO: 1000
ggcuaaauauccucaaagu

SEQ ID NO: 79839 - RNA, 19 nt, Artificial Sequence
  Description of Artificial Sequence: Synthetic oligonucleotide
  Antisense strand to SEQ ID NO: 79758
acuuugaggauauuuagcc

SEQ ID NO: 79840 - RNA, 19 nt, Artificial Sequence
  Description of Artificial Sequence: Synthetic oligonucleotide
  Sense strand starting at position 2614 of SEQ ID NO: 1000
ucauuaggauucucaggca

SEQ ID NO: 79841 - RNA, 19 nt, Artificial Sequence
  Description of Artificial Sequence: Synthetic oligonucleotide
  Antisense strand to SEQ ID NO: 79760
ugccugagaauccuaauga

SEQ ID NO: 79842 - RNA, 19 nt, Artificial Sequence
  Description of Artificial Sequence: Synthetic oligonucleotide
  Sense strand starting at position 2890 of SEQ ID NO: 1000
ggauuaaauuggccuuaga

SEQ ID NO: 79843 - RNA, 19 nt, Artificial Sequence
  Description of Artificial Sequence: Synthetic oligonucleotide
  Antisense strand to SEQ ID NO: 79762
ucuaaggccaauuuaaucc

SEQ ID NO: 79844 - RNA, 19 nt, Artificial Sequence
  Description of Artificial Sequence: Synthetic oligonucleotide
  Sense strand starting at position 2893 of SEQ ID NO: 1000
uuaaauuggccuuagaguu

SEQ ID NO: 79845 - RNA, 19 nt, Artificial Sequence
  Description of Artificial Sequence: Synthetic oligonucleotide
  Antisense strand to SEQ ID NO: 79764
aacucuaaggccaauuuaa

SEQ ID NO: 79846 - RNA, 19 nt, Artificial Sequence
  Description of Artificial Sequence: Synthetic oligonucleotide
  Sense strand starting at position 2932 of SEQ ID NO: 1000
guggcuggagucuaaaguu

SEQ ID NO: 79847 - RNA, 19 nt, Artificial Sequence
  Description of Artificial Sequence: Synthetic oligonucleotide
  Antisense strand to SEQ ID NO: 79766
aacuuuagacuccagccac

SEQ ID NO: 79848 - RNA, 19 nt, Artificial Sequence
  Description of Artificial Sequence: Synthetic oligonucleotide
  Sense strand starting at position 2994 of SEQ ID NO: 1000
ucaggauuccauggaggcu

SEQ ID NO: 79849 - RNA, 19 nt, Artificial Sequence
  Description of Artificial Sequence: Synthetic oligonucleotide
  Antisense strand to SEQ ID NO: 79768
agccuccauggaauccuga

SEQ ID NO: 79850 - RNA, 19 nt, Artificial Sequence
  Description of Artificial Sequence: Synthetic oligonucleotide
  Sense strand starting at position 3069 of SEQ ID NO: 1000
gccuuaguaguguugucuu

SEQ ID NO: 79851 - RNA, 19 nt, Artificial Sequence
  Description of Artificial Sequence: Synthetic oligonucleotide
  Antisense strand to SEQ ID NO: 79770
aagacaacacuacuaaggc

SEQ ID NO: 79852 - RNA, 19 nt, Artificial Sequence
  Description of Artificial Sequence: Synthetic oligonucleotide
  Sense strand starting at position 3076 of SEQ ID NO: 1000
uaguguugucuuggauuug

SEQ ID NO: 79853 - RNA, 19 nt, Artificial Sequence
  Description of Artificial Sequence: Synthetic oligonucleotide
  Antisense strand to SEQ ID NO: 79772
caaauccaagacaacacua

SEQ ID NO: 79854 - RNA, 19 nt, Artificial Sequence
  Description of Artificial Sequence: Synthetic oligonucleotide
  Sense strand starting at position 3245 of SEQ ID NO: 1000
ggauccuuugauugagccu

SEQ ID NO: 79855 - RNA, 19 nt, Artificial Sequence
  Description of Artificial Sequence: Synthetic oligonucleotide
  Antisense strand to SEQ ID NO: 79774
aggcucaaucaaaggaucc

SEQ ID NO: 79856 - RNA, 19 nt, Artificial Sequence
  Description of Artificial Sequence: Synthetic oligonucleotide
  Sense strand starting at position 3299 of SEQ ID NO: 1000
uccaguuuagacuguaacu

SEQ ID NO: 79857 - RNA, 19 nt, Artificial Sequence
  Description of Artificial Sequence: Synthetic oligonucleotide
  Antisense strand to SEQ ID NO: 79776
aguuacagucuaaacugga

SEQ ID NO: 79858 - RNA, 19 nt, Artificial Sequence
  Description of Artificial Sequence: Synthetic oligonucleotide
  Sense strand starting at position 3372 of SEQ ID NO: 1000
cucuauagucagggcaaau

SEQ ID NO: 79859 - RNA, 19 nt, Artificial Sequence
  Description of Artificial Sequence: Synthetic oligonucleotide
  Antisense strand to SEQ ID NO: 79778
auuugcccugacuauagag

SEQ ID NO: 79860 - RNA, 19 nt, Artificial Sequence
  Description of Artificial Sequence: Synthetic oligonucleotide
  Sense strand starting at position 3463 of SEQ ID NO: 1000
gagcauugagcuuaaguag

SEQ ID NO: 79861 - RNA, 19 nt, Artificial Sequence
  Description of Artificial Sequence: Synthetic oligonucleotide
  Antisense strand to SEQ ID NO: 79780
cuacuuaagcucaaugcuc

SEQ ID NO: 79862 - RNA, 19 nt, Artificial Sequence
  Description of Artificial Sequence: Synthetic oligonucleotide
  Sense strand starting at position 3470 of SEQ ID NO: 1000
gagcuuaaguagccaugga

SEQ ID NO: 79863 - RNA, 19 nt, Artificial Sequence
  Description of Artificial Sequence: Synthetic oligonucleotide
  Antisense strand to SEQ ID NO: 79782
uccauggcuacuuaagcuc

SEQ ID NO: 79864 - RNA, 19 nt, Artificial Sequence
  Description of Artificial Sequence: Synthetic oligonucleotide
  Sense strand starting at position 3499 of SEQ ID NO: 1000
gggcauuuccaguguucug

SEQ ID NO: 79865 - RNA, 19 nt, Artificial Sequence
  Description of Artificial Sequence: Synthetic oligonucleotide
  Antisense strand to SEQ ID NO: 79784
cagaacacuggaaaugccc

SEQ ID NO: 79866 - RNA, 19 nt, Artificial Sequence
  Description of Artificial Sequence: Synthetic oligonucleotide
  Sense strand starting at position 3695 of SEQ ID NO: 1000
ugcugugugaccuauggau

SEQ ID NO: 79867 - RNA, 19 nt, Artificial Sequence
  Description of Artificial Sequence: Synthetic oligonucleotide
  Antisense strand to SEQ ID NO: 79786
auccauaggucacacagca

SEQ ID NO: 79868 - RNA, 19 nt, Artificial Sequence
  Description of Artificial Sequence: Synthetic oligonucleotide
  Sense strand starting at position 3697 of SEQ ID NO: 1000
cugugugaccuauggauca

SEQ ID NO: 79869 - RNA, 19 nt, Artificial Sequence
  Description of Artificial Sequence: Synthetic oligonucleotide
  Antisense strand to SEQ ID NO: 79788
ugauccauaggucacacag

SEQ ID NO: 79870 - RNA, 19 nt, Artificial Sequence
  Description of Artificial Sequence: Synthetic oligonucleotide
  Sense strand starting at position 3788 of SEQ ID NO: 1000
ugagaaagagccugcuaga

SEQ ID NO: 79871 - RNA, 19 nt, Artificial Sequence
  Description of Artificial Sequence: Synthetic oligonucleotide
  Antisense strand to SEQ ID NO: 79790
ucuagcaggcucuuucuca

SEQ ID NO: 79872 - RNA, 19 nt, Artificial Sequence
  Description of Artificial Sequence: Synthetic oligonucleotide
  Sense strand starting at position 3844 of SEQ ID NO: 1000
ccagacuuagacuggcuua

SEQ ID NO: 79873 - RNA, 19 nt, Artificial Sequence
  Description of Artificial Sequence: Synthetic oligonucleotide
  Antisense strand to SEQ ID NO: 79792
uaagccagucuaagucugg

SEQ ID NO: 79874 - RNA, 19 nt, Artificial Sequence
  Description of Artificial Sequence: Synthetic oligonucleotide
  Sense strand starting at position 3342 of SEQ ID NO: 1001
ugagcaguucaguggauuu

SEQ ID NO: 79875 - RNA, 19 nt, Artificial Sequence
  Description of Artificial Sequence: Synthetic oligonucleotide
  Antisense strand to SEQ ID NO: 79794
aaauccacugaacugcuca

SEQ ID NO: 79876 - RNA, 19 nt, Artificial Sequence
  Description of Artificial Sequence: Synthetic oligonucleotide
  Sense strand starting at position 3341 of SEQ ID NO: 1001
uugagcaguucaguggauu

SEQ ID NO: 79877 - RNA, 19 nt, Artificial Sequence
  Description of Artificial Sequence: Synthetic oligonucleotide
  Antisense strand to SEQ ID NO: 79796
aauccacugaacugcucaa

SEQ ID NO: 79878 - RNA, 19 nt, Artificial Sequence
  Description of Artificial Sequence: Synthetic oligonucleotide
  Sense strand starting at position 3270 of SEQ ID NO: 1001
uuaugauugucaucacaga

SEQ ID NO: 79879 - RNA, 19 nt, Artificial Sequence
  Description of Artificial Sequence: Synthetic oligonucleotide
  Antisense strand to SEQ ID NO: 79798
ucugugaugacaaucauaa

SEQ ID NO: 79880 - RNA, 19 nt, Artificial Sequence
  Description of Artificial Sequence: Synthetic oligonucleotide
  Sense strand starting at position 3231 of SEQ ID NO: 1001
aaguguucccauuauugug

SEQ ID NO: 79881 - RNA, 19 nt, Artificial Sequence
  Description of Artificial Sequence: Synthetic oligonucleotide
  Antisense strand to SEQ ID NO: 79800
cacaauaaugggaacacuu

SEQ ID NO: 79882 - RNA, 19 nt, Artificial Sequence
  Description of Artificial Sequence: Synthetic oligonucleotide
  Sense strand starting at position 3218 of SEQ ID NO: 1001
aacaaauauuucgaagugu

SEQ ID NO: 79883 - RNA, 19 nt, Artificial Sequence
  Description of Artificial Sequence: Synthetic oligonucleotide
  Antisense strand to SEQ ID NO: 79802
acacuucgaaauauuuguu

SEQ ID NO: 79884 - RNA, 19 nt, Artificial Sequence
  Description of Artificial Sequence: Synthetic oligonucleotide
  Sense strand starting at position 3193 of SEQ ID NO: 1001
cguuguuaugaagagacga

SEQ ID NO: 79885 - RNA, 19 nt, Artificial Sequence
  Description of Artificial Sequence: Synthetic oligonucleotide
  Antisense strand to SEQ ID NO: 79804
ucgucucuucauaacaacg

SEQ ID NO: 79886 - RNA, 19 nt, Artificial Sequence
  Description of Artificial Sequence: Synthetic oligonucleotide
  Sense strand starting at position 3186 of SEQ ID NO: 1001
agugauacguuguuaugaa

SEQ ID NO: 79887 - RNA, 19 nt, Artificial Sequence
  Description of Artificial Sequence: Synthetic oligonucleotide
  Antisense strand to SEQ ID NO: 79806
uucauaacaacguaucacu

SEQ ID NO: 79888 - RNA, 19 nt, Artificial Sequence
  Description of Artificial Sequence: Synthetic oligonucleotide
  Sense strand starting at position 3145 of SEQ ID NO: 1001
agagguuuauuuguuguuu

SEQ ID NO: 79889 - RNA, 19 nt, Artificial Sequence
  Description of Artificial Sequence: Synthetic oligonucleotide
  Antisense strand to SEQ ID NO: 79808
aaacaacaaauaaaccucu

SEQ ID NO: 79890 - RNA, 19 nt, Artificial Sequence
  Description of Artificial Sequence: Synthetic oligonucleotide
  Sense strand starting at position 3101 of SEQ ID NO: 1001
aguacauguuaucuaauag

SEQ ID NO: 79891 - RNA, 19 nt, Artificial Sequence
  Description of Artificial Sequence: Synthetic oligonucleotide
  Antisense strand to SEQ ID NO: 79810
cuauuagauaacauguacu

SEQ ID NO: 79892 - RNA, 19 nt, Artificial Sequence
  Description of Artificial Sequence: Synthetic oligonucleotide
  Sense strand starting at position 3009 of SEQ ID NO: 1001
uugucuuaaagugaguuau

SEQ ID NO: 79893 - RNA, 19 nt, Artificial Sequence
  Description of Artificial Sequence: Synthetic oligonucleotide
  Antisense strand to SEQ ID NO: 79812
auaacucacuuuaagacaa

SEQ ID NO: 79894 - RNA, 19 nt, Artificial Sequence
  Description of Artificial Sequence: Synthetic oligonucleotide
  Sense strand starting at position 2871 of SEQ ID NO: 1001
guuuacaugcuuuaguaau

SEQ ID NO: 79895 - RNA, 19 nt, Artificial Sequence
  Description of Artificial Sequence: Synthetic oligonucleotide
  Antisense strand to SEQ ID NO: 79814
auuacuaaagcauguaaac

SEQ ID NO: 79896 - RNA, 19 nt, Artificial Sequence
  Description of Artificial Sequence: Synthetic oligonucleotide
  Sense strand starting at position 2857 of SEQ ID NO: 1001
ugugacauacuguaguuua

SEQ ID NO: 79897 - RNA, 19 nt, Artificial Sequence
  Description of Artificial Sequence: Synthetic oligonucleotide
  Antisense strand to SEQ ID NO: 79816
uaaacuacaguaugucaca

SEQ ID NO: 79898 - RNA, 19 nt, Artificial Sequence
  Description of Artificial Sequence: Synthetic oligonucleotide
  Sense strand starting at position 2852 of SEQ ID NO: 1001
gggauugugacauacugua

SEQ ID NO: 79899 - RNA, 19 nt, Artificial Sequence
  Description of Artificial Sequence: Synthetic oligonucleotide
  Antisense strand to SEQ ID NO: 79818
uacaguaugucacaauccc

SEQ ID NO: 79900 - RNA, 19 nt, Artificial Sequence
  Description of Artificial Sequence: Synthetic oligonucleotide
  Sense strand starting at position 2845 of SEQ ID NO: 1001
ucuuuaugggauugugaca

SEQ ID NO: 79901 - RNA, 19 nt, Artificial Sequence
  Description of Artificial Sequence: Synthetic oligonucleotide
  Antisense strand to SEQ ID NO: 79820
ugucacaaucccauaaaga

SEQ ID NO: 79902 - RNA, 19 nt, Artificial Sequence
  Description of Artificial Sequence: Synthetic oligonucleotide
  Sense strand starting at position 2837 of SEQ ID NO: 1001
guagauugucuuuauggga

SEQ ID NO: 79903 - RNA, 19 nt, Artificial Sequence
  Description of Artificial Sequence: Synthetic oligonucleotide
  Antisense strand to SEQ ID NO: 79822
ucccauaaagacaaucuac

SEQ ID NO: 79904 - RNA, 19 nt, Artificial Sequence
  Description of Artificial Sequence: Synthetic oligonucleotide
  Sense strand starting at position 2834 of SEQ ID NO: 1001
acaguagauugucuuuaug

SEQ ID NO: 79905 - RNA, 19 nt, Artificial Sequence
  Description of Artificial Sequence: Synthetic oligonucleotide
  Antisense strand to SEQ ID NO: 79824
cauaaagacaaucuacugu

SEQ ID NO: 79906 - RNA, 19 nt, Artificial Sequence
  Description of Artificial Sequence: Synthetic oligonucleotide
  Sense strand starting at position 2777 of SEQ ID NO: 1001
gcucucaauguuugagaug

SEQ ID NO: 79907 - RNA, 19 nt, Artificial Sequence
  Description of Artificial Sequence: Synthetic oligonucleotide
  Antisense strand to SEQ ID NO: 79826
caucucaaacauugagagc

SEQ ID NO: 79908 - RNA, 19 nt, Artificial Sequence
  Description of Artificial Sequence: Synthetic oligonucleotide
  Sense strand starting at position 2473 of SEQ ID NO: 1001
uuauuuaugcgcuaguaag

SEQ ID NO: 79909 - RNA, 19 nt, Artificial Sequence
  Description of Artificial Sequence: Synthetic oligonucleotide
  Antisense strand to SEQ ID NO: 79828
cuuacuagcgcauaaauaa

SEQ ID NO: 79910 - RNA, 19 nt, Artificial Sequence
  Description of Artificial Sequence: Synthetic oligonucleotide
  Sense strand starting at position 2471 of SEQ ID NO: 1001
cauuauuuaugcgcuagua

SEQ ID NO: 79911 - RNA, 19 nt, Artificial Sequence
  Description of Artificial Sequence: Synthetic oligonucleotide
  Antisense strand to SEQ ID NO: 79830
uacuagcgcauaaauaaug

SEQ ID NO: 79912 - RNA, 19 nt, Artificial Sequence
  Description of Artificial Sequence: Synthetic oligonucleotide
  Sense strand starting at position 2234 of SEQ ID NO: 1001
ggcagcucugcauaauauu

SEQ ID NO: 79913 - RNA, 19 nt, Artificial Sequence
  Description of Artificial Sequence: Synthetic oligonucleotide
  Antisense strand to SEQ ID NO: 79832
aauauuaugcagagcugcc

SEQ ID NO: 79914 - RNA, 19 nt, Artificial Sequence
  Description of Artificial Sequence: Synthetic oligonucleotide
  Sense strand starting at position 2165 of SEQ ID NO: 1001
cguauaggucccguguuau

SEQ ID NO: 79915 - RNA, 19 nt, Artificial Sequence
  Description of Artificial Sequence: Synthetic oligonucleotide
  Antisense strand to SEQ ID NO: 79834
auaacacgggaccuauacg

SEQ ID NO: 79916 - RNA, 19 nt, Artificial Sequence
  Description of Artificial Sequence: Synthetic oligonucleotide
  Sense strand starting at position 1223 of SEQ ID NO: 1001
aucguauuggaagacuuua

SEQ ID NO: 79917 - RNA, 19 nt, Artificial Sequence
  Description of Artificial Sequence: Synthetic oligonucleotide
  Antisense strand to SEQ ID NO: 79836
uaaagucuuccaauacgau

SEQ ID NO: 79918 - RNA, 19 nt, Artificial Sequence
  Description of Artificial Sequence: Synthetic oligonucleotide
  Sense strand starting at position 811 of SEQ ID NO: 1001
ggccaauuugcuugcacca

SEQ ID NO: 79919 - RNA, 19 nt, Artificial Sequence
  Description of Artificial Sequence: Synthetic oligonucleotide
  Antisense strand to SEQ ID NO: 79838
uggugcaagcaaauuggcc

SEQ ID NO: 79920 - RNA, 19 nt, Artificial Sequence
  Description of Artificial Sequence: Synthetic oligonucleotide
  Sense strand starting at position 735 of SEQ ID NO: 1001
guguguccuagggagauga

SEQ ID NO: 79921 - RNA, 19 nt, Artificial Sequence
  Description of Artificial Sequence: Synthetic oligonucleotide
  Antisense strand to SEQ ID NO: 79840
ucaucucccuaggacacac

SEQ ID NO: 79922 - RNA, 19 nt, Artificial Sequence
  Description of Artificial Sequence: Synthetic oligonucleotide
  Sense strand starting at position 733 of SEQ ID NO: 1001
uaguguguccuagggagau

SEQ ID NO: 79923 - RNA, 19 nt, Artificial Sequence
  Description of Artificial Sequence: Synthetic oligonucleotide
  Antisense strand to SEQ ID NO: 79842
aucucccuaggacacacua

SEQ ID NO: 79924 - RNA, 19 nt, Artificial Sequence
  Description of Artificial Sequence: Synthetic oligonucleotide
  Sense strand starting at position 726 of SEQ ID NO: 1001
ugauauuuaguguguccua

SEQ ID NO: 79925 - RNA, 19 nt, Artificial Sequence
  Description of Artificial Sequence: Synthetic oligonucleotide
  Antisense strand to SEQ ID NO: 79844
uaggacacacuaaauauca

SEQ ID NO: 79926 - RNA, 19 nt, Artificial Sequence
  Description of Artificial Sequence: Synthetic oligonucleotide
  Sense strand starting at position 671 of SEQ ID NO: 1001
uuuguaagaccuggaucua

SEQ ID NO: 79927 - RNA, 19 nt, Artificial Sequence
  Description of Artificial Sequence: Synthetic oligonucleotide
  Antisense strand to SEQ ID NO: 79846
uagauccaggucuuacaaa

SEQ ID NO: 79928 - RNA, 19 nt, Artificial Sequence
  Description of Artificial Sequence: Synthetic oligonucleotide
  Sense strand starting at position 631 of SEQ ID NO: 1001
guucuuagacaaggucuau

SEQ ID NO: 79929 - RNA, 19 nt, Artificial Sequence
  Description of Artificial Sequence: Synthetic oligonucleotide
  Antisense strand to SEQ ID NO: 79848
auagaccuugucuaagaac

SEQ ID NO: 79930 - RNA, 19 nt, Artificial Sequence
  Description of Artificial Sequence: Synthetic oligonucleotide
  Sense strand starting at position 623 of SEQ ID NO: 1001
gggacccuguucuuagaca

SEQ ID NO: 79931 - RNA, 19 nt, Artificial Sequence
  Description of Artificial Sequence: Synthetic oligonucleotide
  Antisense strand to SEQ ID NO: 79850
ugucuaagaacaggguccc

SEQ ID NO: 79932 - RNA, 19 nt, Artificial Sequence
  Description of Artificial Sequence: Synthetic oligonucleotide
  Sense strand starting at position 621 of SEQ ID NO: 1001
ccgggacccuguucuuaga

SEQ ID NO: 79933 - RNA, 19 nt, Artificial Sequence
  Description of Artificial Sequence: Synthetic oligonucleotide
  Antisense strand to SEQ ID NO: 79852
ucuaagaacagggucccgg

SEQ ID NO: 79934 - RNA, 19 nt, Artificial Sequence
  Description of Artificial Sequence: Synthetic oligonucleotide
  Sense strand starting at position 166 of SEQ ID NO: 1001
guaggugcucaacaaagau

SEQ ID NO: 79935 - RNA, 19 nt, Artificial Sequence
  Description of Artificial Sequence: Synthetic oligonucleotide
  Antisense strand to SEQ ID NO: 79854
aucuuuguugagcaccuac

SEQ ID NO: 79936 - RNA, 19 nt, Artificial Sequence
  Description of Artificial Sequence: Synthetic oligonucleotide
  Sense strand starting at position 94 of SEQ ID NO: 1001
ugggaauacuaauaacaau

SEQ ID NO: 79937 - RNA, 19 nt, Artificial Sequence
  Description of Artificial Sequence: Synthetic oligonucleotide
  Antisense strand to SEQ ID NO: 79856
auuguuauuaguauuccca

SEQ ID NO: 79938 - RNA, 19 nt, Artificial Sequence
  Description of Artificial Sequence: Synthetic oligonucleotide
  Sense strand starting at position 68 of SEQ ID NO: 1001
acauguaaguuuccacauc

SEQ ID NO: 79939 - RNA, 19 nt, Artificial Sequence
  Description of Artificial Sequence: Synthetic oligonucleotide
  Antisense strand to SEQ ID NO: 79858
gauguggaaacuuacaugu

SEQ ID NO: 79940 - RNA, 19 nt, Artificial Sequence
  Description of Artificial Sequence: Synthetic oligonucleotide
  Sense strand starting at position 61 of SEQ ID NO: 1001
gugugaaacauguaaguuu

SEQ ID NO: 79941 - RNA, 19 nt, Artificial Sequence
  Description of Artificial Sequence: Synthetic oligonucleotide
  Antisense strand to SEQ ID NO: 79860
aaacuuacauguuucacac

SEQ ID NO: 79942 - RNA, 19 nt, Artificial Sequence
  Description of Artificial Sequence: Synthetic oligonucleotide
  Sense strand starting at position 59 of SEQ ID NO: 1001
cugugugaaacauguaagu

SEQ ID NO: 79943 - RNA, 19 nt, Artificial Sequence
  Description of Artificial Sequence: Synthetic oligonucleotide
  Antisense strand to SEQ ID NO: 79862
acuuacauguuucacacag

SEQ ID NO: 79944 - RNA, 19 nt, Artificial Sequence
  Description of Artificial Sequence: Synthetic oligonucleotide
  Sense strand starting at position 52 of SEQ ID NO: 1001
ucucuaacugugugaaaca

SEQ ID NO: 79945 - RNA, 19 nt, Artificial Sequence
  Description of Artificial Sequence: Synthetic oligonucleotide
  Antisense strand to SEQ ID NO: 79864
uguuucacacaguuagaga

SEQ ID NO: 79946 - RNA, 19 nt, Artificial Sequence
  Description of Artificial Sequence: Synthetic oligonucleotide
  Sense strand starting at position 51 of SEQ ID NO: 1001
cucucuaacugugugaaac

SEQ ID NO: 79947 - RNA, 19 nt, Artificial Sequence
  Description of Artificial Sequence: Synthetic oligonucleotide
  Antisense strand to SEQ ID NO: 79866
guuucacacaguuagagag

SEQ ID NO: 79948 - RNA, 19 nt, Artificial Sequence
  Description of Artificial Sequence: Synthetic oligonucleotide
  Sense strand starting at position 50 of SEQ ID NO: 1001
acucucuaacugugugaaa

SEQ ID NO: 79949 - RNA, 19 nt, Artificial Sequence
  Description of Artificial Sequence: Synthetic oligonucleotide
  Antisense strand to SEQ ID NO: 79868
uuucacacaguuagagagu

SEQ ID NO: 79950 - RNA, 19 nt, Artificial Sequence
  Description of Artificial Sequence: Synthetic oligonucleotide
  Sense strand starting at position 44 of SEQ ID NO: 1001
ccuguaacucucuaacugu

SEQ ID NO: 79951 - RNA, 19 nt, Artificial Sequence
  Description of Artificial Sequence: Synthetic oligonucleotide
  Antisense strand to SEQ ID NO: 79870
acaguuagagaguuacagg

SEQ ID NO: 79952 - RNA, 19 nt, Artificial Sequence
  Description of Artificial Sequence: Synthetic oligonucleotide
  Sense strand starting at position 36 of SEQ ID NO: 1001
gccagaaaccuguaacucu

SEQ ID NO: 79953 - RNA, 19 nt, Artificial Sequence
  Description of Artificial Sequence: Synthetic oligonucleotide
  Antisense strand to SEQ ID NO: 79872
agaguuacagguuucuggc

SEQ ID NO: 79954 - RNA, 19 nt, Artificial Sequence
  Description of Artificial Sequence: Synthetic oligonucleotide
  Sense strand starting at position 3902 of SEQ ID NO: 1002
uguuuccuucgucagacaa

SEQ ID NO: 79955 - RNA, 19 nt, Artificial Sequence
  Description of Artificial Sequence: Synthetic oligonucleotide
  Antisense strand to SEQ ID NO: 79874
uugucugacgaaggaaaca

SEQ ID NO: 79956 - RNA, 19 nt, Artificial Sequence
  Description of Artificial Sequence: Synthetic oligonucleotide
  Sense strand starting at position 3872 of SEQ ID NO: 1002
augugucacccacauugua

SEQ ID NO: 79957 - RNA, 19 nt, Artificial Sequence
  Description of Artificial Sequence: Synthetic oligonucleotide
  Antisense strand to SEQ ID NO: 79876
uacaaugugggugacacau

SEQ ID NO: 79958 - RNA, 19 nt, Artificial Sequence
  Description of Artificial Sequence: Synthetic oligonucleotide
  Sense strand starting at position 3833 of SEQ ID NO: 1002
ccaacauaagcguaucaca

SEQ ID NO: 79959 - RNA, 19 nt, Artificial Sequence
  Description of Artificial Sequence: Synthetic oligonucleotide
  Antisense strand to SEQ ID NO: 79878
ugugauacgcuuauguugg

SEQ ID NO: 79960 - RNA, 19 nt, Artificial Sequence
  Description of Artificial Sequence: Synthetic oligonucleotide
  Sense strand starting at position 3765 of SEQ ID NO: 1002
auggaagguuaagauuuaa

SEQ ID NO: 79961 - RNA, 19 nt, Artificial Sequence
  Description of Artificial Sequence: Synthetic oligonucleotide
  Antisense strand to SEQ ID NO: 79880
uuaaaucuuaaccuuccau

SEQ ID NO: 79962 - RNA, 19 nt, Artificial Sequence
  Description of Artificial Sequence: Synthetic oligonucleotide
  Sense strand starting at position 2915 of SEQ ID NO: 1002
acaccuauuccaugagguc

SEQ ID NO: 79963 - RNA, 19 nt, Artificial Sequence
  Description of Artificial Sequence: Synthetic oligonucleotide
  Antisense strand to SEQ ID NO: 79882
gaccucauggaauaggugu

SEQ ID NO: 79964 - RNA, 19 nt, Artificial Sequence
  Description of Artificial Sequence: Synthetic oligonucleotide
  Sense strand starting at position 2737 of SEQ ID NO: 1002
agaaaugugucacuccagu

SEQ ID NO: 79965 - RNA, 19 nt, Artificial Sequence
  Description of Artificial Sequence: Synthetic oligonucleotide
  Antisense strand to SEQ ID NO: 79884
acuggagugacacauuucu

SEQ ID NO: 79966 - RNA, 19 nt, Artificial Sequence
  Description of Artificial Sequence: Synthetic oligonucleotide
  Sense strand starting at position 2730 of SEQ ID NO: 1002
ugagcuuagaaauguguca

SEQ ID NO: 79967 - RNA, 19 nt, Artificial Sequence
  Description of Artificial Sequence: Synthetic oligonucleotide
  Antisense strand to SEQ ID NO: 79886
ugacacauuucuaagcuca

SEQ ID NO: 79968 - RNA, 19 nt, Artificial Sequence
  Description of Artificial Sequence: Synthetic oligonucleotide
  Sense strand starting at position 2719 of SEQ ID NO: 1002
auaagugguggugagcuua

SEQ ID NO: 79969 - RNA, 19 nt, Artificial Sequence
  Description of Artificial Sequence: Synthetic oligonucleotide
  Antisense strand to SEQ ID NO: 79888
uaagcucaccaccacuuau

SEQ ID NO: 79970 - RNA, 19 nt, Artificial Sequence
  Description of Artificial Sequence: Synthetic oligonucleotide
  Sense strand starting at position 2683 of SEQ ID NO: 1002
ggagauguccuauauagcc

SEQ ID NO: 79971 - RNA, 19 nt, Artificial Sequence
  Description of Artificial Sequence: Synthetic oligonucleotide
  Antisense strand to SEQ ID NO: 79890
ggcuauauaggacaucucc

SEQ ID NO: 79972 - RNA, 19 nt, Artificial Sequence
  Description of Artificial Sequence: Synthetic oligonucleotide
  Sense strand starting at position 2604 of SEQ ID NO: 1002
acuugagucugcucauuga

SEQ ID NO: 79973 - RNA, 19 nt, Artificial Sequence
  Description of Artificial Sequence: Synthetic oligonucleotide
  Antisense strand to SEQ ID NO: 79892
ucaaugagcagacucaagu

SEQ ID NO: 79974 - RNA, 19 nt, Artificial Sequence
  Description of Artificial Sequence: Synthetic oligonucleotide
  Sense strand starting at position 2579 of SEQ ID NO: 1002
ugcucuagugaccauuaau

SEQ ID NO: 79975 - RNA, 19 nt, Artificial Sequence
  Description of Artificial Sequence: Synthetic oligonucleotide
  Antisense strand to SEQ ID NO: 79894
auuaauggucacuagagca

SEQ ID NO: 79976 - RNA, 19 nt, Artificial Sequence
  Description of Artificial Sequence: Synthetic oligonucleotide
  Sense strand starting at position 2576 of SEQ ID NO: 1002
uggugcucuagugaccauu

SEQ ID NO: 79977 - RNA, 19 nt, Artificial Sequence
  Description of Artificial Sequence: Synthetic oligonucleotide
  Antisense strand to SEQ ID NO: 79896
aauggucacuagagcacca

SEQ ID NO: 79978 - RNA, 19 nt, Artificial Sequence
  Description of Artificial Sequence: Synthetic oligonucleotide
  Sense strand starting at position 2571 of SEQ ID NO: 1002
gcuguuggugcucuaguga

SEQ ID NO: 79979 - RNA, 19 nt, Artificial Sequence
  Description of Artificial Sequence: Synthetic oligonucleotide
  Antisense strand to SEQ ID NO: 79898
ucacuagagcaccaacagc

SEQ ID NO: 79980 - RNA, 19 nt, Artificial Sequence
  Description of Artificial Sequence: Synthetic oligonucleotide
  Sense strand starting at position 2491 of SEQ ID NO: 1002
aggaacaucucugcuuaua

SEQ ID NO: 79981 - RNA, 19 nt, Artificial Sequence
  Description of Artificial Sequence: Synthetic oligonucleotide
  Antisense strand to SEQ ID NO: 79900
uauaagcagagauguuccu

SEQ ID NO: 79982 - RNA, 19 nt, Artificial Sequence
  Description of Artificial Sequence: Synthetic oligonucleotide
  Sense strand starting at position 2489 of SEQ ID NO: 1002
uuaggaacaucucugcuua

SEQ ID NO: 79983 - RNA, 19 nt, Artificial Sequence
  Description of Artificial Sequence: Synthetic oligonucleotide
  Antisense strand to SEQ ID NO: 79902
uaagcagagauguuccuaa

SEQ ID NO: 79984 - RNA, 19 nt, Artificial Sequence
  Description of Artificial Sequence: Synthetic oligonucleotide
  Sense strand starting at position 2417 of SEQ ID NO: 1002
gcaaauuuauuggaaacua

SEQ ID NO: 79985 - RNA, 19 nt, Artificial Sequence
  Description of Artificial Sequence: Synthetic oligonucleotide
  Antisense strand to SEQ ID NO: 79904
uaguuuccaauaaauuugc

SEQ ID NO: 79986 - RNA, 19 nt, Artificial Sequence
  Description of Artificial Sequence: Synthetic oligonucleotide
  Sense strand starting at position 2364 of SEQ ID NO: 1002
aagaguggguucuuagauc

SEQ ID NO: 79987 - RNA, 19 nt, Artificial Sequence
  Description of Artificial Sequence: Synthetic oligonucleotide
  Antisense strand to SEQ ID NO: 79906
gaucuaagaacccacucuu

SEQ ID NO: 79988 - RNA, 19 nt, Artificial Sequence
  Description of Artificial Sequence: Synthetic oligonucleotide
  Sense strand starting at position 2312 of SEQ ID NO: 1002
auggucacauacucaagau

SEQ ID NO: 79989 - RNA, 19 nt, Artificial Sequence
  Description of Artificial Sequence: Synthetic oligonucleotide
  Antisense strand to SEQ ID NO: 79908
aucuugaguaugugaccau

SEQ ID NO: 79990 - RNA, 19 nt, Artificial Sequence
  Description of Artificial Sequence: Synthetic oligonucleotide
  Sense strand starting at position 2258 of SEQ ID NO: 1002
ugguauuggguucaaaugu

SEQ ID NO: 79991 - RNA, 19 nt, Artificial Sequence
  Description of Artificial Sequence: Synthetic oligonucleotide
  Antisense strand to SEQ ID NO: 79910
acauuugaacccaauacca

SEQ ID NO: 79992 - RNA, 19 nt, Artificial Sequence
  Description of Artificial Sequence: Synthetic oligonucleotide
  Sense strand starting at position 1644 of SEQ ID NO: 1002
ggugucuuguauuuguauu

SEQ ID NO: 79993 - RNA, 19 nt, Artificial Sequence
  Description of Artificial Sequence: Synthetic oligonucleotide
  Antisense strand to SEQ ID NO: 79912
aauacaaauacaagacacc

SEQ ID NO: 79994 - RNA, 19 nt, Artificial Sequence
  Description of Artificial Sequence: Synthetic oligonucleotide
  Sense strand starting at position 1612 of SEQ ID NO: 1002
guguuuaucuaccugaaau

SEQ ID NO: 79995 - RNA, 19 nt, Artificial Sequence
  Description of Artificial Sequence: Synthetic oligonucleotide
  Antisense strand to SEQ ID NO: 79914
auuucagguagauaaacac

SEQ ID NO: 79996 - RNA, 19 nt, Artificial Sequence
  Description of Artificial Sequence: Synthetic oligonucleotide
  Sense strand starting at position 1604 of SEQ ID NO: 1002
acaucucaguguuuaucua

SEQ ID NO: 79997 - RNA, 19 nt, Artificial Sequence
  Description of Artificial Sequence: Synthetic oligonucleotide
  Antisense strand to SEQ ID NO: 79916
uagauaaacacugagaugu

SEQ ID NO: 79998 - RNA, 19 nt, Artificial Sequence
  Description of Artificial Sequence: Synthetic oligonucleotide
  Sense strand starting at position 1553 of SEQ ID NO: 1002
uauauucccgcuggauaca

SEQ ID NO: 79999 - RNA, 19 nt, Artificial Sequence
  Description of Artificial Sequence: Synthetic oligonucleotide
  Antisense strand to SEQ ID NO: 79918
uguauccagcgggaauaua

SEQ ID NO: 80000 - RNA, 19 nt, Artificial Sequence
  Description of Artificial Sequence: Synthetic oligonucleotide
  Sense strand starting at position 1525 of SEQ ID NO: 1002
gguugaguugaccacuacu

SEQ ID NO: 80001 - RNA, 19 nt, Artificial Sequence
  Description of Artificial Sequence: Synthetic oligonucleotide
  Antisense strand to SEQ ID NO: 79920
aguaguggucaacucaacc

SEQ ID NO: 80002 - RNA, 19 nt, Artificial Sequence
  Description of Artificial Sequence: Synthetic oligonucleotide
  Sense strand starting at position 1451 of SEQ ID NO: 1002
gugacuuccuuugugaaac

SEQ ID NO: 80003 - RNA, 19 nt, Artificial Sequence
  Description of Artificial Sequence: Synthetic oligonucleotide
  Antisense strand to SEQ ID NO: 79922
guuucacaaaggaagucac

SEQ ID NO: 80004 - RNA, 19 nt, Artificial Sequence
  Description of Artificial Sequence: Synthetic oligonucleotide
  Sense strand starting at position 1450 of SEQ ID NO: 1002
ugugacuuccuuugugaaa

SEQ ID NO: 80005 - RNA, 19 nt, Artificial Sequence
  Description of Artificial Sequence: Synthetic oligonucleotide
  Antisense strand to SEQ ID NO: 79924
uuucacaaaggaagucaca

SEQ ID NO: 80006 - RNA, 19 nt, Artificial Sequence
  Description of Artificial Sequence: Synthetic oligonucleotide
  Sense strand starting at position 1372 of SEQ ID NO: 1002
aggcucaucucaccuagaa

SEQ ID NO: 80007 - RNA, 19 nt, Artificial Sequence
  Description of Artificial Sequence: Synthetic oligonucleotide
  Antisense strand to SEQ ID NO: 79926
uucuaggugagaugagccu

SEQ ID NO: 80008 - RNA, 19 nt, Artificial Sequence
  Description of Artificial Sequence: Synthetic oligonucleotide
  Sense strand starting at position 1221 of SEQ ID NO: 1002
cuuggaacucuccagucua

SEQ ID NO: 80009 - RNA, 19 nt, Artificial Sequence
  Description of Artificial Sequence: Synthetic oligonucleotide
  Antisense strand to SEQ ID NO: 79928
uagacuggagaguuccaag

SEQ ID NO: 80010 - RNA, 19 nt, Artificial Sequence
  Description of Artificial Sequence: Synthetic oligonucleotide
  Sense strand starting at position 1008 of SEQ ID NO: 1002
cagggaucuuggucaaagu

SEQ ID NO: 80011 - RNA, 19 nt, Artificial Sequence
  Description of Artificial Sequence: Synthetic oligonucleotide
  Antisense strand to SEQ ID NO: 79930
acuuugaccaagaucccug

SEQ ID NO: 80012 - RNA, 19 nt, Artificial Sequence
  Description of Artificial Sequence: Synthetic oligonucleotide
  Sense strand starting at position 869 of SEQ ID NO: 1002
ugucauuacccaggaagcu

SEQ ID NO: 80013 - RNA, 19 nt, Artificial Sequence
  Description of Artificial Sequence: Synthetic oligonucleotide
  Antisense strand to SEQ ID NO: 79932
agcuuccuggguaaugaca

SEQ ID NO: 80014 - RNA, 19 nt, Artificial Sequence
  Description of Artificial Sequence: Synthetic oligonucleotide
  Sense strand starting at position 866 of SEQ ID NO: 1002
acuugucauuacccaggaa

SEQ ID NO: 80015 - RNA, 19 nt, Artificial Sequence
  Description of Artificial Sequence: Synthetic oligonucleotide
  Antisense strand to SEQ ID NO: 79934
uuccuggguaaugacaagu

SEQ ID NO: 80016 - RNA, 19 nt, Artificial Sequence
  Description of Artificial Sequence: Synthetic oligonucleotide
  Sense strand starting at position 862 of SEQ ID NO: 1002
ucugacuugucauuaccca

SEQ ID NO: 80017 - RNA, 19 nt, Artificial Sequence
  Description of Artificial Sequence: Synthetic oligonucleotide
  Antisense strand to SEQ ID NO: 79936
uggguaaugacaagucaga

SEQ ID NO: 80018 - RNA, 19 nt, Artificial Sequence
  Description of Artificial Sequence: Synthetic oligonucleotide
  Sense strand starting at position 769 of SEQ ID NO: 1002
aggauuagguagaguggaa

SEQ ID NO: 80019 - RNA, 19 nt, Artificial Sequence
  Description of Artificial Sequence: Synthetic oligonucleotide
  Antisense strand to SEQ ID NO: 79938
uuccacucuaccuaauccu

SEQ ID NO: 80020 - RNA, 19 nt, Artificial Sequence
  Description of Artificial Sequence: Synthetic oligonucleotide
  Sense strand starting at position 728 of SEQ ID NO: 1002
ggcucagcgcccuuucuaa

SEQ ID NO: 80021 - RNA, 19 nt, Artificial Sequence
  Description of Artificial Sequence: Synthetic oligonucleotide
  Antisense strand to SEQ ID NO: 79940
uuagaaagggcgcugagcc

SEQ ID NO: 80022 - RNA, 19 nt, Artificial Sequence
  Description of Artificial Sequence: Synthetic oligonucleotide
  Sense strand starting at position 690 of SEQ ID NO: 1002
uggcacaacugcucucaaa

SEQ ID NO: 80023 - RNA, 19 nt, Artificial Sequence
  Description of Artificial Sequence: Synthetic oligonucleotide
  Antisense strand to SEQ ID NO: 79942
uuugagagcaguugugcca

SEQ ID NO: 80024 - RNA, 19 nt, Artificial Sequence
  Description of Artificial Sequence: Synthetic oligonucleotide
  Sense strand starting at position 417 of SEQ ID NO: 1002
acuucuguauagcuuugaa

SEQ ID NO: 80025 - RNA, 19 nt, Artificial Sequence
  Description of Artificial Sequence: Synthetic oligonucleotide
  Antisense strand to SEQ ID NO: 79944
uucaaagcuauacagaagu

SEQ ID NO: 80026 - RNA, 19 nt, Artificial Sequence
  Description of Artificial Sequence: Synthetic oligonucleotide
  Sense strand starting at position 412 of SEQ ID NO: 1002
ugugaacuucuguauagcu

SEQ ID NO: 80027 - RNA, 19 nt, Artificial Sequence
  Description of Artificial Sequence: Synthetic oligonucleotide
  Antisense strand to SEQ ID NO: 79946
agcuauacagaaguucaca

SEQ ID NO: 80028 - RNA, 19 nt, Artificial Sequence
  Description of Artificial Sequence: Synthetic oligonucleotide
  Sense strand starting at position 402 of SEQ ID NO: 1002
uaaugauaugugugaacuu

SEQ ID NO: 80029 - RNA, 19 nt, Artificial Sequence
  Description of Artificial Sequence: Synthetic oligonucleotide
  Antisense strand to SEQ ID NO: 79948
aaguucacacauaucauua

SEQ ID NO: 80030 - RNA, 19 nt, Artificial Sequence
  Description of Artificial Sequence: Synthetic oligonucleotide
  Sense strand starting at position 399 of SEQ ID NO: 1002
ucauaaugauaugugugaa

SEQ ID NO: 80031 - RNA, 19 nt, Artificial Sequence
  Description of Artificial Sequence: Synthetic oligonucleotide
  Antisense strand to SEQ ID NO: 79950
uucacacauaucauuauga

SEQ ID NO: 80032 - RNA, 19 nt, Artificial Sequence
  Description of Artificial Sequence: Synthetic oligonucleotide
  Sense strand starting at position 382 of SEQ ID NO: 1002
ugguaaauauaucuagauc

SEQ ID NO: 80033 - RNA, 19 nt, Artificial Sequence
  Description of Artificial Sequence: Synthetic oligonucleotide
  Antisense strand to SEQ ID NO: 79952
gaucuagauauauuuacca

SEQ ID NO: 80034 - RNA, 19 nt, Artificial Sequence
  Description of Artificial Sequence: Synthetic oligonucleotide
  Sense strand starting at position 3958 of SEQ ID NO: 1003
agacaaagaucacaagaca

SEQ ID NO: 80035 - RNA, 19 nt, Artificial Sequence
  Description of Artificial Sequence: Synthetic oligonucleotide
  Antisense strand to SEQ ID NO: 79954
ugucuugugaucuuugucu

SEQ ID NO: 80036 - RNA, 19 nt, Artificial Sequence
  Description of Artificial Sequence: Synthetic oligonucleotide
  Sense strand starting at position 3910 of SEQ ID NO: 1003
gaacaucccugagucugua

SEQ ID NO: 80037 - RNA, 19 nt, Artificial Sequence
  Description of Artificial Sequence: Synthetic oligonucleotide
  Antisense strand to SEQ ID NO: 79956
uacagacucagggauguuc

SEQ ID NO: 80038 - RNA, 19 nt, Artificial Sequence
  Description of Artificial Sequence: Synthetic oligonucleotide
  Sense strand starting at position 3613 of SEQ ID NO: 1003
ggaggacugacuuggcaaa

SEQ ID NO: 80039 - RNA, 19 nt, Artificial Sequence
  Description of Artificial Sequence: Synthetic oligonucleotide
  Antisense strand to SEQ ID NO: 79958
uuugccaagucaguccucc

SEQ ID NO: 80040 - RNA, 19 nt, Artificial Sequence
  Description of Artificial Sequence: Synthetic oligonucleotide
  Sense strand starting at position 3590 of SEQ ID NO: 1003
ccaguugagcaagaaagua

SEQ ID NO: 80041 - RNA, 19 nt, Artificial Sequence
  Description of Artificial Sequence: Synthetic oligonucleotide
  Antisense strand to SEQ ID NO: 79960
uacuuucuugcucaacugg

SEQ ID NO: 80042 - RNA, 19 nt, Artificial Sequence
  Description of Artificial Sequence: Synthetic oligonucleotide
  Sense strand starting at position 3566 of SEQ ID NO: 1003
cccuuccugccugagaauu

SEQ ID NO: 80043 - RNA, 19 nt, Artificial Sequence
  Description of Artificial Sequence: Synthetic oligonucleotide
  Antisense strand to SEQ ID NO: 79962
aauucucaggcaggaaggg

SEQ ID NO: 80044 - RNA, 19 nt, Artificial Sequence
  Description of Artificial Sequence: Synthetic oligonucleotide
  Sense strand starting at position 3188 of SEQ ID NO: 1003
gagugauaagaguaggucu

SEQ ID NO: 80045 - RNA, 19 nt, Artificial Sequence
  Description of Artificial Sequence: Synthetic oligonucleotide
  Antisense strand to SEQ ID NO: 79964
agaccuacucuuaucacuc

SEQ ID NO: 80046 - RNA, 19 nt, Artificial Sequence
  Description of Artificial Sequence: Synthetic oligonucleotide
  Sense strand starting at position 3180 of SEQ ID NO: 1003
ggguuugugagugauaaga

SEQ ID NO: 80047 - RNA, 19 nt, Artificial Sequence
  Description of Artificial Sequence: Synthetic oligonucleotide
  Antisense strand to SEQ ID NO: 79966
ucuuaucacucacaaaccc

SEQ ID NO: 80048 - RNA, 19 nt, Artificial Sequence
  Description of Artificial Sequence: Synthetic oligonucleotide
  Sense strand starting at position 3179 of SEQ ID NO: 1003
aggguuugugagugauaag

SEQ ID NO: 80049 - RNA, 19 nt, Artificial Sequence
  Description of Artificial Sequence: Synthetic oligonucleotide
  Antisense strand to SEQ ID NO: 79968
cuuaucacucacaaacccu

SEQ ID NO: 80050 - RNA, 19 nt, Artificial Sequence
  Description of Artificial Sequence: Synthetic oligonucleotide
  Sense strand starting at position 3178 of SEQ ID NO: 1003
uaggguuugugagugauaa

SEQ ID NO: 80051 - RNA, 19 nt, Artificial Sequence
  Description of Artificial Sequence: Synthetic oligonucleotide
  Antisense strand to SEQ ID NO: 79970
uuaucacucacaaacccua

SEQ ID NO: 80052 - RNA, 19 nt, Artificial Sequence
  Description of Artificial Sequence: Synthetic oligonucleotide
  Sense strand starting at position 3039 of SEQ ID NO: 1003
gucaauaucccugaaugug

SEQ ID NO: 80053 - RNA, 19 nt, Artificial Sequence
  Description of Artificial Sequence: Synthetic oligonucleotide
  Antisense strand to SEQ ID NO: 79972
cacauucagggauauugac

SEQ ID NO: 80054 - RNA, 19 nt, Artificial Sequence
  Description of Artificial Sequence: Synthetic oligonucleotide
  Sense strand starting at position 3038 of SEQ ID NO: 1003
agucaauaucccugaaugu

SEQ ID NO: 80055 - RNA, 19 nt, Artificial Sequence
  Description of Artificial Sequence: Synthetic oligonucleotide
  Antisense strand to SEQ ID NO: 79974
acauucagggauauugacu

SEQ ID NO: 80056 - RNA, 19 nt, Artificial Sequence
  Description of Artificial Sequence: Synthetic oligonucleotide
  Sense strand starting at position 3032 of SEQ ID NO: 1003
gccagaagucaauaucccu

SEQ ID NO: 80057 - RNA, 19 nt, Artificial Sequence
  Description of Artificial Sequence: Synthetic oligonucleotide
  Antisense strand to SEQ ID NO: 79976
agggauauugacuucuggc

SEQ ID NO: 80058 - RNA, 19 nt, Artificial Sequence
  Description of Artificial Sequence: Synthetic oligonucleotide
  Sense strand starting at position 3010 of SEQ ID NO: 1003
cucauagucacguggagaa

SEQ ID NO: 80059 - RNA, 19 nt, Artificial Sequence
  Description of Artificial Sequence: Synthetic oligonucleotide
  Antisense strand to SEQ ID NO: 79978
uucuccacgugacuaugag

SEQ ID NO: 80060 - RNA, 19 nt, Artificial Sequence
  Description of Artificial Sequence: Synthetic oligonucleotide
  Sense strand starting at position 2460 of SEQ ID NO: 1003
cuguccuugucauuucuau

SEQ ID NO: 80061 - RNA, 19 nt, Artificial Sequence
  Description of Artificial Sequence: Synthetic oligonucleotide
  Antisense strand to SEQ ID NO: 79980
auagaaaugacaaggacag

SEQ ID NO: 80062 - RNA, 19 nt, Artificial Sequence
  Description of Artificial Sequence: Synthetic oligonucleotide
  Sense strand starting at position 2337 of SEQ ID NO: 1003
uuacuuuggcuguggaaag

SEQ ID NO: 80063 - RNA, 19 nt, Artificial Sequence
  Description of Artificial Sequence: Synthetic oligonucleotide
  Antisense strand to SEQ ID NO: 79982
cuuuccacagccaaaguaa

SEQ ID NO: 80064 - RNA, 19 nt, Artificial Sequence
  Description of Artificial Sequence: Synthetic oligonucleotide
  Sense strand starting at position 2335 of SEQ ID NO: 1003
aauuacuuuggcuguggaa

SEQ ID NO: 80065 - RNA, 19 nt, Artificial Sequence
  Description of Artificial Sequence: Synthetic oligonucleotide
  Antisense strand to SEQ ID NO: 79984
uuccacagccaaaguaauu

SEQ ID NO: 80066 - RNA, 19 nt, Artificial Sequence
  Description of Artificial Sequence: Synthetic oligonucleotide
  Sense strand starting at position 2274 of SEQ ID NO: 1003
ggcccagaggcauauauaa

SEQ ID NO: 80067 - RNA, 19 nt, Artificial Sequence
  Description of Artificial Sequence: Synthetic oligonucleotide
  Antisense strand to SEQ ID NO: 79986
uuauauaugccucugggcc

SEQ ID NO: 80068 - RNA, 19 nt, Artificial Sequence
  Description of Artificial Sequence: Synthetic oligonucleotide
  Sense strand starting at position 2101 of SEQ ID NO: 1003
acggcaaccucuuuacaaa

SEQ ID NO: 80069 - RNA, 19 nt, Artificial Sequence
  Description of Artificial Sequence: Synthetic oligonucleotide
  Antisense strand to SEQ ID NO: 79988
uuuguaaagagguugccgu

SEQ ID NO: 80070 - RNA, 19 nt, Artificial Sequence
  Description of Artificial Sequence: Synthetic oligonucleotide
  Sense strand starting at position 1841 of SEQ ID NO: 1003
gucccuauagcagaaauua

SEQ ID NO: 80071 - RNA, 19 nt, Artificial Sequence
  Description of Artificial Sequence: Synthetic oligonucleotide
  Antisense strand to SEQ ID NO: 79990
uaauuucugcuauagggac

SEQ ID NO: 80072 - RNA, 19 nt, Artificial Sequence
  Description of Artificial Sequence: Synthetic oligonucleotide
  Sense strand starting at position 1774 of SEQ ID NO: 1003
cccagucuuccagagucuu

SEQ ID NO: 80073 - RNA, 19 nt, Artificial Sequence
  Description of Artificial Sequence: Synthetic oligonucleotide
  Antisense strand to SEQ ID NO: 79992
aagacucuggaagacuggg

SEQ ID NO: 80074 - RNA, 19 nt, Artificial Sequence
  Description of Artificial Sequence: Synthetic oligonucleotide
  Sense strand starting at position 1707 of SEQ ID NO: 1003
gcagucuggcaauaaggaa

SEQ ID NO: 80075 - RNA, 19 nt, Artificial Sequence
  Description of Artificial Sequence: Synthetic oligonucleotide
  Antisense strand to SEQ ID NO: 79994
uuccuuauugccagacugc

SEQ ID NO: 80076 - RNA, 19 nt, Artificial Sequence
  Description of Artificial Sequence: Synthetic oligonucleotide
  Sense strand starting at position 1618 of SEQ ID NO: 1003
uuauuugucugccuuucca

SEQ ID NO: 80077 - RNA, 19 nt, Artificial Sequence
  Description of Artificial Sequence: Synthetic oligonucleotide
  Antisense strand to SEQ ID NO: 79996
uggaaaggcagacaaauaa

SEQ ID NO: 80078 - RNA, 19 nt, Artificial Sequence
  Description of Artificial Sequence: Synthetic oligonucleotide
  Sense strand starting at position 1615 of SEQ ID NO: 1003
gguuuauuugucugccuuu

SEQ ID NO: 80079 - RNA, 19 nt, Artificial Sequence
  Description of Artificial Sequence: Synthetic oligonucleotide
  Antisense strand to SEQ ID NO: 79998
aaaggcagacaaauaaacc

SEQ ID NO: 80080 - RNA, 19 nt, Artificial Sequence
  Description of Artificial Sequence: Synthetic oligonucleotide
  Sense strand starting at position 1614 of SEQ ID NO: 1003
ugguuuauuugucugccuu

SEQ ID NO: 80081 - RNA, 19 nt, Artificial Sequence
  Description of Artificial Sequence: Synthetic oligonucleotide
  Antisense strand to SEQ ID NO: 80000
aaggcagacaaauaaacca

SEQ ID NO: 80082 - RNA, 19 nt, Artificial Sequence
  Description of Artificial Sequence: Synthetic oligonucleotide
  Sense strand starting at position 1569 of SEQ ID NO: 1003
ggccaugaccaguauggga

SEQ ID NO: 80083 - RNA, 19 nt, Artificial Sequence
  Description of Artificial Sequence: Synthetic oligonucleotide
  Antisense strand to SEQ ID NO: 80002
ucccauacuggucauggcc

SEQ ID NO: 80084 - RNA, 19 nt, Artificial Sequence
  Description of Artificial Sequence: Synthetic oligonucleotide
  Sense strand starting at position 1529 of SEQ ID NO: 1003
cuagcaaccuuggugaaga

SEQ ID NO: 80085 - RNA, 19 nt, Artificial Sequence
  Description of Artificial Sequence: Synthetic oligonucleotide
  Antisense strand to SEQ ID NO: 80004
ucuucaccaagguugcuag

SEQ ID NO: 80086 - RNA, 19 nt, Artificial Sequence
  Description of Artificial Sequence: Synthetic oligonucleotide
  Sense strand starting at position 1445 of SEQ ID NO: 1003
ucccauggauauucugaga

SEQ ID NO: 80087 - RNA, 19 nt, Artificial Sequence
  Description of Artificial Sequence: Synthetic oligonucleotide
  Antisense strand to SEQ ID NO: 80006
ucucagaauauccauggga

SEQ ID NO: 80088 - RNA, 19 nt, Artificial Sequence
  Description of Artificial Sequence: Synthetic oligonucleotide
  Sense strand starting at position 1297 of SEQ ID NO: 1003
cugcaaacugcucagagau

SEQ ID NO: 80089 - RNA, 19 nt, Artificial Sequence
  Description of Artificial Sequence: Synthetic oligonucleotide
  Antisense strand to SEQ ID NO: 80008
aucucugagcaguuugcag

SEQ ID NO: 80090 - RNA, 19 nt, Artificial Sequence
  Description of Artificial Sequence: Synthetic oligonucleotide
  Sense strand starting at position 1296 of SEQ ID NO: 1003
ucugcaaacugcucagaga

SEQ ID NO: 80091 - RNA, 19 nt, Artificial Sequence
  Description of Artificial Sequence: Synthetic oligonucleotide
  Antisense strand to SEQ ID NO: 80010
ucucugagcaguuugcaga

SEQ ID NO: 80092 - RNA, 19 nt, Artificial Sequence
  Description of Artificial Sequence: Synthetic oligonucleotide
  Sense strand starting at position 1215 of SEQ ID NO: 1003
gggacuuuagagcacuagu

SEQ ID NO: 80093 - RNA, 19 nt, Artificial Sequence
  Description of Artificial Sequence: Synthetic oligonucleotide
  Antisense strand to SEQ ID NO: 80012
acuagugcucuaaaguccc

SEQ ID NO: 80094 - RNA, 19 nt, Artificial Sequence
  Description of Artificial Sequence: Synthetic oligonucleotide
  Sense strand starting at position 1140 of SEQ ID NO: 1003
ggcuauagcugauuggaaa

SEQ ID NO: 80095 - RNA, 19 nt, Artificial Sequence
  Description of Artificial Sequence: Synthetic oligonucleotide
  Antisense strand to SEQ ID NO: 80014
uuuccaaucagcuauagcc

SEQ ID NO: 80096 - RNA, 19 nt, Artificial Sequence
  Description of Artificial Sequence: Synthetic oligonucleotide
  Sense strand starting at position 1030 of SEQ ID NO: 1003
gauugaucagagggucuuc

SEQ ID NO: 80097 - RNA, 19 nt, Artificial Sequence
  Description of Artificial Sequence: Synthetic oligonucleotide
  Antisense strand to SEQ ID NO: 80016
gaagacccucugaucaauc

SEQ ID NO: 80098 - RNA, 19 nt, Artificial Sequence
  Description of Artificial Sequence: Synthetic oligonucleotide
  Sense strand starting at position 1013 of SEQ ID NO: 1003
ggucacuuccuccauagga

SEQ ID NO: 80099 - RNA, 19 nt, Artificial Sequence
  Description of Artificial Sequence: Synthetic oligonucleotide
  Antisense strand to SEQ ID NO: 80018
uccuauggaggaagugacc

SEQ ID NO: 80100 - RNA, 19 nt, Artificial Sequence
  Description of Artificial Sequence: Synthetic oligonucleotide
  Sense strand starting at position 1010 of SEQ ID NO: 1003
agaggucacuuccuccaua

SEQ ID NO: 80101 - RNA, 19 nt, Artificial Sequence
  Description of Artificial Sequence: Synthetic oligonucleotide
  Antisense strand to SEQ ID NO: 80020
uauggaggaagugaccucu

SEQ ID NO: 80102 - RNA, 19 nt, Artificial Sequence
  Description of Artificial Sequence: Synthetic oligonucleotide
  Sense strand starting at position 747 of SEQ ID NO: 1003
uuaaucaagccuggacaau

SEQ ID NO: 80103 - RNA, 19 nt, Artificial Sequence
  Description of Artificial Sequence: Synthetic oligonucleotide
  Antisense strand to SEQ ID NO: 80022
auuguccaggcuugauuaa

SEQ ID NO: 80104 - RNA, 19 nt, Artificial Sequence
  Description of Artificial Sequence: Synthetic oligonucleotide
  Sense strand starting at position 746 of SEQ ID NO: 1003
uuuaaucaagccuggacaa

SEQ ID NO: 80105 - RNA, 19 nt, Artificial Sequence
  Description of Artificial Sequence: Synthetic oligonucleotide
  Antisense strand to SEQ ID NO: 80024
uuguccaggcuugauuaaa

SEQ ID NO: 80106 - RNA, 19 nt, Artificial Sequence
  Description of Artificial Sequence: Synthetic oligonucleotide
  Sense strand starting at position 679 of SEQ ID NO: 1003
caguguuguguccucagca

SEQ ID NO: 80107 - RNA, 19 nt, Artificial Sequence
  Description of Artificial Sequence: Synthetic oligonucleotide
  Antisense strand to SEQ ID NO: 80026
ugcugaggacacaacacug

SEQ ID NO: 80108 - RNA, 19 nt, Artificial Sequence
  Description of Artificial Sequence: Synthetic oligonucleotide
  Sense strand starting at position 587 of SEQ ID NO: 1003
cugaaagccuaguuuagag

SEQ ID NO: 80109 - RNA, 19 nt, Artificial Sequence
  Description of Artificial Sequence: Synthetic oligonucleotide
  Antisense strand to SEQ ID NO: 80028
cucuaaacuaggcuuucag

SEQ ID NO: 80110 - RNA, 19 nt, Artificial Sequence
  Description of Artificial Sequence: Synthetic oligonucleotide
  Sense strand starting at position 214 of SEQ ID NO: 1003
gggcuugaucaccaucauu

SEQ ID NO: 80111 - RNA, 19 nt, Artificial Sequence
  Description of Artificial Sequence: Synthetic oligonucleotide
  Antisense strand to SEQ ID NO: 80030
aaugauggugaucaagccc

SEQ ID NO: 80112 - RNA, 19 nt, Artificial Sequence
  Description of Artificial Sequence: Synthetic oligonucleotide
  Sense strand starting at position 213 of SEQ ID NO: 1003
agggcuugaucaccaucau

SEQ ID NO: 80113 - RNA, 19 nt, Artificial Sequence
  Description of Artificial Sequence: Synthetic oligonucleotide
  Antisense strand to SEQ ID NO: 80032
augauggugaucaagcccu

SEQ ID NO: 80114 - RNA, 19 nt, Artificial Sequence
  Description of Artificial Sequence: Synthetic oligonucleotide
  Sense strand starting at position 3963 of SEQ ID NO: 1004
guuaguuguccugaacuaa

SEQ ID NO: 80115 - RNA, 19 nt, Artificial Sequence
  Description of Artificial Sequence: Synthetic oligonucleotide
  Antisense strand to SEQ ID NO: 80034
uuaguucaggacaacuaac

SEQ ID NO: 80116 - RNA, 19 nt, Artificial Sequence
  Description of Artificial Sequence: Synthetic oligonucleotide
  Sense strand starting at position 3947 of SEQ ID NO: 1004
uuaaguagagauugauguu

SEQ ID NO: 80117 - RNA, 19 nt, Artificial Sequence
  Description of Artificial Sequence: Synthetic oligonucleotide
  Antisense strand to SEQ ID NO: 80036
aacaucaaucucuacuuaa

SEQ ID NO: 80118 - RNA, 19 nt, Artificial Sequence
  Description of Artificial Sequence: Synthetic oligonucleotide
  Sense strand starting at position 3760 of SEQ ID NO: 1004
gaaugaguuggccacccua

SEQ ID NO: 80119 - RNA, 19 nt, Artificial Sequence
  Description of Artificial Sequence: Synthetic oligonucleotide
  Antisense strand to SEQ ID NO: 80038
uaggguggccaacucauuc

SEQ ID NO: 80120 - RNA, 19 nt, Artificial Sequence
  Description of Artificial Sequence: Synthetic oligonucleotide
  Sense strand starting at position 3641 of SEQ ID NO: 1004
acuaguuuccauugaugug

SEQ ID NO: 80121 - RNA, 19 nt, Artificial Sequence
  Description of Artificial Sequence: Synthetic oligonucleotide
  Antisense strand to SEQ ID NO: 80040
cacaucaauggaaacuagu

SEQ ID NO: 80122 - RNA, 19 nt, Artificial Sequence
  Description of Artificial Sequence: Synthetic oligonucleotide
  Sense strand starting at position 3637 of SEQ ID NO: 1004
cuuuacuaguuuccauuga

SEQ ID NO: 80123 - RNA, 19 nt, Artificial Sequence
  Description of Artificial Sequence: Synthetic oligonucleotide
  Antisense strand to SEQ ID NO: 80042
ucaauggaaacuaguaaag

SEQ ID NO: 80124 - RNA, 19 nt, Artificial Sequence
  Description of Artificial Sequence: Synthetic oligonucleotide
  Sense strand starting at position 3584 of SEQ ID NO: 1004
caaagaggacucuggguuu

SEQ ID NO: 80125 - RNA, 19 nt, Artificial Sequence
  Description of Artificial Sequence: Synthetic oligonucleotide
  Antisense strand to SEQ ID NO: 80044
aaacccagaguccucuuug

SEQ ID NO: 80126 - RNA, 19 nt, Artificial Sequence
  Description of Artificial Sequence: Synthetic oligonucleotide
  Sense strand starting at position 3481 of SEQ ID NO: 1004
uccuauaugccaggcaaua

SEQ ID NO: 80127 - RNA, 19 nt, Artificial Sequence
  Description of Artificial Sequence: Synthetic oligonucleotide
  Antisense strand to SEQ ID NO: 80046
uauugccuggcauauagga

SEQ ID NO: 80128 - RNA, 19 nt, Artificial Sequence
  Description of Artificial Sequence: Synthetic oligonucleotide
  Sense strand starting at position 3441 of SEQ ID NO: 1004
uuggcacagcacugauaau

SEQ ID NO: 80129 - RNA, 19 nt, Artificial Sequence
  Description of Artificial Sequence: Synthetic oligonucleotide
  Antisense strand to SEQ ID NO: 80048
auuaucagugcugugccaa

SEQ ID NO: 80130 - RNA, 19 nt, Artificial Sequence
  Description of Artificial Sequence: Synthetic oligonucleotide
  Sense strand starting at position 2896 of SEQ ID NO: 1004
auaauaaugggcugagguu

SEQ ID NO: 80131 - RNA, 19 nt, Artificial Sequence
  Description of Artificial Sequence: Synthetic oligonucleotide
  Antisense strand to SEQ ID NO: 80050
aaccucagcccauuauuau

SEQ ID NO: 80132 - RNA, 19 nt, Artificial Sequence
  Description of Artificial Sequence: Synthetic oligonucleotide
  Sense strand starting at position 2843 of SEQ ID NO: 1004
gagccuccucaguaagaga

SEQ ID NO: 80133 - RNA, 19 nt, Artificial Sequence
  Description of Artificial Sequence: Synthetic oligonucleotide
  Antisense strand to SEQ ID NO: 80052
ucucuuacugaggaggcuc

SEQ ID NO: 80134 - RNA, 19 nt, Artificial Sequence
  Description of Artificial Sequence: Synthetic oligonucleotide
  Sense strand starting at position 2729 of SEQ ID NO: 1004
ggguggauucgagaguaca

SEQ ID NO: 80135 - RNA, 19 nt, Artificial Sequence
  Description of Artificial Sequence: Synthetic oligonucleotide
  Antisense strand to SEQ ID NO: 80054
uguacucucgaauccaccc

SEQ ID NO: 80136 - RNA, 19 nt, Artificial Sequence
  Description of Artificial Sequence: Synthetic oligonucleotide
  Sense strand starting at position 2558 of SEQ ID NO: 1004
ggguaacagauucgcuuaa

SEQ ID NO: 80137 - RNA, 19 nt, Artificial Sequence
  Description of Artificial Sequence: Synthetic oligonucleotide
  Antisense strand to SEQ ID NO: 80056
uuaagcgaaucuguuaccc

SEQ ID NO: 80138 - RNA, 19 nt, Artificial Sequence
  Description of Artificial Sequence: Synthetic oligonucleotide
  Sense strand starting at position 2520 of SEQ ID NO: 1004
cuguuuggcauuugucuga

SEQ ID NO: 80139 - RNA, 19 nt, Artificial Sequence
  Description of Artificial Sequence: Synthetic oligonucleotide
  Antisense strand to SEQ ID NO: 80058
ucagacaaaugccaaacag

SEQ ID NO: 80140 - RNA, 19 nt, Artificial Sequence
  Description of Artificial Sequence: Synthetic oligonucleotide
  Sense strand starting at position 2275 of SEQ ID NO: 1004
ggcacuugcagugaauaga

SEQ ID NO: 80141 - RNA, 19 nt, Artificial Sequence
  Description of Artificial Sequence: Synthetic oligonucleotide
  Antisense strand to SEQ ID NO: 80060
ucuauucacugcaagugcc

SEQ ID NO: 80142 - RNA, 19 nt, Artificial Sequence
  Description of Artificial Sequence: Synthetic oligonucleotide
  Sense strand starting at position 2253 of SEQ ID NO: 1004
gcagguaaggccuggaaca

SEQ ID NO: 80143 - RNA, 19 nt, Artificial Sequence
  Description of Artificial Sequence: Synthetic oligonucleotide
  Antisense strand to SEQ ID NO: 80062
uguuccaggccuuaccugc

SEQ ID NO: 80144 - RNA, 19 nt, Artificial Sequence
  Description of Artificial Sequence: Synthetic oligonucleotide
  Sense strand starting at position 2137 of SEQ ID NO: 1004
caagccucccgugaagaga

SEQ ID NO: 80145 - RNA, 19 nt, Artificial Sequence
  Description of Artificial Sequence: Synthetic oligonucleotide
  Antisense strand to SEQ ID NO: 80064
ucucuucacgggaggcuug

SEQ ID NO: 80146 - RNA, 19 nt, Artificial Sequence
  Description of Artificial Sequence: Synthetic oligonucleotide
  Sense strand starting at position 2006 of SEQ ID NO: 1004
gagcaugacuuacugaguu

SEQ ID NO: 80147 - RNA, 19 nt, Artificial Sequence
  Description of Artificial Sequence: Synthetic oligonucleotide
  Antisense strand to SEQ ID NO: 80066
aacucaguaagucaugcuc

SEQ ID NO: 80148 - RNA, 19 nt, Artificial Sequence
  Description of Artificial Sequence: Synthetic oligonucleotide
  Sense strand starting at position 1653 of SEQ ID NO: 1004
guuauuucuuuggaauaca

SEQ ID NO: 80149 - RNA, 19 nt, Artificial Sequence
  Description of Artificial Sequence: Synthetic oligonucleotide
  Antisense strand to SEQ ID NO: 80068
uguauuccaaagaaauaac

SEQ ID NO: 80150 - RNA, 19 nt, Artificial Sequence
  Description of Artificial Sequence: Synthetic oligonucleotide
  Sense strand starting at position 1102 of SEQ ID NO: 1004
aagagaguuuaguugcuaa

SEQ ID NO: 80151 - RNA, 19 nt, Artificial Sequence
  Description of Artificial Sequence: Synthetic oligonucleotide
  Antisense strand to SEQ ID NO: 80070
uuagcaacuaaacucucuu

SEQ ID NO: 80152 - RNA, 19 nt, Artificial Sequence
  Description of Artificial Sequence: Synthetic oligonucleotide
  Sense strand starting at position 1021 of SEQ ID NO: 1004
cuuauuaccuagucacaug

SEQ ID NO: 80153 - RNA, 19 nt, Artificial Sequence
  Description of Artificial Sequence: Synthetic oligonucleotide
  Antisense strand to SEQ ID NO: 80072
caugugacuagguaauaag

SEQ ID NO: 80154 - RNA, 19 nt, Artificial Sequence
  Description of Artificial Sequence: Synthetic oligonucleotide
  Sense strand starting at position 1017 of SEQ ID NO: 1004
aguucuuauuaccuaguca

SEQ ID NO: 80155 - RNA, 19 nt, Artificial Sequence
  Description of Artificial Sequence: Synthetic oligonucleotide
  Antisense strand to SEQ ID NO: 80074
ugacuagguaauaagaacu

SEQ ID NO: 80156 - RNA, 19 nt, Artificial Sequence
  Description of Artificial Sequence: Synthetic oligonucleotide
  Sense strand starting at position 957 of SEQ ID NO: 1004
ucuuuagacuuugcaaagu

SEQ ID NO: 80157 - RNA, 19 nt, Artificial Sequence
  Description of Artificial Sequence: Synthetic oligonucleotide
  Antisense strand to SEQ ID NO: 80076
acuuugcaaagucuaaaga

SEQ ID NO: 80158 - RNA, 19 nt, Artificial Sequence
  Description of Artificial Sequence: Synthetic oligonucleotide
  Sense strand starting at position 956 of SEQ ID NO: 1004
uucuuuagacuuugcaaag

SEQ ID NO: 80159 - RNA, 19 nt, Artificial Sequence
  Description of Artificial Sequence: Synthetic oligonucleotide
  Antisense strand to SEQ ID NO: 80078
cuuugcaaagucuaaagaa

SEQ ID NO: 80160 - RNA, 19 nt, Artificial Sequence
  Description of Artificial Sequence: Synthetic oligonucleotide
  Sense strand starting at position 949 of SEQ ID NO: 1004
cuuauaguucuuuagacuu

SEQ ID NO: 80161 - RNA, 19 nt, Artificial Sequence
  Description of Artificial Sequence: Synthetic oligonucleotide
  Antisense strand to SEQ ID NO: 80080
aagucuaaagaacuauaag

SEQ ID NO: 80162 - RNA, 19 nt, Artificial Sequence
  Description of Artificial Sequence: Synthetic oligonucleotide
  Sense strand starting at position 948 of SEQ ID NO: 1004
ucuuauaguucuuuagacu

SEQ ID NO: 80163 - RNA, 19 nt, Artificial Sequence
  Description of Artificial Sequence: Synthetic oligonucleotide
  Antisense strand to SEQ ID NO: 80082
agucuaaagaacuauaaga

SEQ ID NO: 80164 - RNA, 19 nt, Artificial Sequence
  Description of Artificial Sequence: Synthetic oligonucleotide
  Sense strand starting at position 947 of SEQ ID NO: 1004
aucuuauaguucuuuagac

SEQ ID NO: 80165 - RNA, 19 nt, Artificial Sequence
  Description of Artificial Sequence: Synthetic oligonucleotide
  Antisense strand to SEQ ID NO: 80084
gucuaaagaacuauaagau

SEQ ID NO: 80166 - RNA, 19 nt, Artificial Sequence
  Description of Artificial Sequence: Synthetic oligonucleotide
  Sense strand starting at position 836 of SEQ ID NO: 1004
cuaauugacugccuagaca

SEQ ID NO: 80167 - RNA, 19 nt, Artificial Sequence
  Description of Artificial Sequence: Synthetic oligonucleotide
  Antisense strand to SEQ ID NO: 80086
ugucuaggcagucaauuag

SEQ ID NO: 80168 - RNA, 19 nt, Artificial Sequence
  Description of Artificial Sequence: Synthetic oligonucleotide
  Sense strand starting at position 822 of SEQ ID NO: 1004
agcucaauggucuacuaau

SEQ ID NO: 80169 - RNA, 19 nt, Artificial Sequence
  Description of Artificial Sequence: Synthetic oligonucleotide
  Antisense strand to SEQ ID NO: 80088
auuaguagaccauugagcu

SEQ ID NO: 80170 - RNA, 19 nt, Artificial Sequence
  Description of Artificial Sequence: Synthetic oligonucleotide
  Sense strand starting at position 782 of SEQ ID NO: 1004
uugaauuccuagguccuau

SEQ ID NO: 80171 - RNA, 19 nt, Artificial Sequence
  Description of Artificial Sequence: Synthetic oligonucleotide
  Antisense strand to SEQ ID NO: 80090
auaggaccuaggaauucaa

SEQ ID NO: 80172 - RNA, 19 nt, Artificial Sequence
  Description of Artificial Sequence: Synthetic oligonucleotide
  Sense strand starting at position 781 of SEQ ID NO: 1004
auugaauuccuagguccua

SEQ ID NO: 80173 - RNA, 19 nt, Artificial Sequence
  Description of Artificial Sequence: Synthetic oligonucleotide
  Antisense strand to SEQ ID NO: 80092
uaggaccuaggaauucaau

SEQ ID NO: 80174 - RNA, 19 nt, Artificial Sequence
  Description of Artificial Sequence: Synthetic oligonucleotide
  Sense strand starting at position 528 of SEQ ID NO: 1004
ggaugcuuauuccuauaga

SEQ ID NO: 80175 - RNA, 19 nt, Artificial Sequence
  Description of Artificial Sequence: Synthetic oligonucleotide
  Antisense strand to SEQ ID NO: 80094
ucuauaggaauaagcaucc

SEQ ID NO: 80176 - RNA, 19 nt, Artificial Sequence
  Description of Artificial Sequence: Synthetic oligonucleotide
  Sense strand starting at position 526 of SEQ ID NO: 1004
gaggaugcuuauuccuaua

SEQ ID NO: 80177 - RNA, 19 nt, Artificial Sequence
  Description of Artificial Sequence: Synthetic oligonucleotide
  Antisense strand to SEQ ID NO: 80096
uauaggaauaagcauccuc

SEQ ID NO: 80178 - RNA, 19 nt, Artificial Sequence
  Description of Artificial Sequence: Synthetic oligonucleotide
  Sense strand starting at position 525 of SEQ ID NO: 1004
ugaggaugcuuauuccuau

SEQ ID NO: 80179 - RNA, 19 nt, Artificial Sequence
  Description of Artificial Sequence: Synthetic oligonucleotide
  Antisense strand to SEQ ID NO: 80098
auaggaauaagcauccuca

SEQ ID NO: 80180 - RNA, 19 nt, Artificial Sequence
  Description of Artificial Sequence: Synthetic oligonucleotide
  Sense strand starting at position 263 of SEQ ID NO: 1004
gaugucuaacagugaauaa

SEQ ID NO: 80181 - RNA, 19 nt, Artificial Sequence
  Description of Artificial Sequence: Synthetic oligonucleotide
  Antisense strand to SEQ ID NO: 80100
uuauucacuguuagacauc

SEQ ID NO: 80182 - RNA, 19 nt, Artificial Sequence
  Description of Artificial Sequence: Synthetic oligonucleotide
  Sense strand starting at position 215 of SEQ ID NO: 1004
agggcugguccucaugauu

SEQ ID NO: 80183 - RNA, 19 nt, Artificial Sequence
  Description of Artificial Sequence: Synthetic oligonucleotide
  Antisense strand to SEQ ID NO: 80102
aaucaugaggaccagcccu

SEQ ID NO: 80184 - RNA, 19 nt, Artificial Sequence
  Description of Artificial Sequence: Synthetic oligonucleotide
  Sense strand starting at position 112 of SEQ ID NO: 1004
uagugacuugauggaauca

SEQ ID NO: 80185 - RNA, 19 nt, Artificial Sequence
  Description of Artificial Sequence: Synthetic oligonucleotide
  Antisense strand to SEQ ID NO: 80104
ugauuccaucaagucacua

SEQ ID NO: 80186 - RNA, 19 nt, Artificial Sequence
  Description of Artificial Sequence: Synthetic oligonucleotide
  Sense strand starting at position 108 of SEQ ID NO: 1004
acuguagugacuugaugga

SEQ ID NO: 80187 - RNA, 19 nt, Artificial Sequence
  Description of Artificial Sequence: Synthetic oligonucleotide
  Antisense strand to SEQ ID NO: 80106
uccaucaagucacuacagu

SEQ ID NO: 80188 - RNA, 19 nt, Artificial Sequence
  Description of Artificial Sequence: Synthetic oligonucleotide
  Sense strand starting at position 42 of SEQ ID NO: 1004
cauagaagugugugaacau

SEQ ID NO: 80189 - RNA, 19 nt, Artificial Sequence
  Description of Artificial Sequence: Synthetic oligonucleotide
  Antisense strand to SEQ ID NO: 80108
auguucacacacuucuaug

SEQ ID NO: 80190 - RNA, 19 nt, Artificial Sequence
  Description of Artificial Sequence: Synthetic oligonucleotide
  Sense strand starting at position 40 of SEQ ID NO: 1004
uacauagaagugugugaac

SEQ ID NO: 80191 - RNA, 19 nt, Artificial Sequence
  Description of Artificial Sequence: Synthetic oligonucleotide
  Antisense strand to SEQ ID NO: 80110
guucacacacuucuaugua

SEQ ID NO: 80192 - RNA, 19 nt, Artificial Sequence
  Description of Artificial Sequence: Synthetic oligonucleotide
  Sense strand starting at position 38 of SEQ ID NO: 1004
gguacauagaaguguguga

SEQ ID NO: 80193 - RNA, 19 nt, Artificial Sequence
  Description of Artificial Sequence: Synthetic oligonucleotide
  Antisense strand to SEQ ID NO: 80112
ucacacacuucuauguacc

SEQ ID NO: 80194 - RNA, 19 nt, Artificial Sequence
  Description of Artificial Sequence: Synthetic oligonucleotide
  Sense strand starting at position 4 of SEQ ID NO: 1005
ugagucuaaaguugaggaa

SEQ ID NO: 80195 - RNA, 19 nt, Artificial Sequence
  Description of Artificial Sequence: Synthetic oligonucleotide
  Antisense strand to SEQ ID NO: 80114
uuccucaacuuuagacuca

SEQ ID NO: 80196 - RNA, 19 nt, Artificial Sequence
  Description of Artificial Sequence: Synthetic oligonucleotide
  Sense strand starting at position 167 of SEQ ID NO: 1005
caguguucugggugggaaa

SEQ ID NO: 80197 - RNA, 19 nt, Artificial Sequence
  Description of Artificial Sequence: Synthetic oligonucleotide
  Antisense strand to SEQ ID NO: 80116
uuucccacccagaacacug

SEQ ID NO: 80198 - RNA, 19 nt, Artificial Sequence
  Description of Artificial Sequence: Synthetic oligonucleotide
  Sense strand starting at position 168 of SEQ ID NO: 1005
aguguucugggugggaaau

SEQ ID NO: 80199 - RNA, 19 nt, Artificial Sequence
  Description of Artificial Sequence: Synthetic oligonucleotide
  Antisense strand to SEQ ID NO: 80118
auuucccacccagaacacu

SEQ ID NO: 80200 - RNA, 19 nt, Artificial Sequence
  Description of Artificial Sequence: Synthetic oligonucleotide
  Sense strand starting at position 349 of SEQ ID NO: 1005
uagggaugucagggucuaa

SEQ ID NO: 80201 - RNA, 19 nt, Artificial Sequence
  Description of Artificial Sequence: Synthetic oligonucleotide
  Antisense strand to SEQ ID NO: 80120
uuagacccugacaucccua

SEQ ID NO: 80202 - RNA, 19 nt, Artificial Sequence
  Description of Artificial Sequence: Synthetic oligonucleotide
  Sense strand starting at position 461 of SEQ ID NO: 1005
ggugaaagucuauauugug

SEQ ID NO: 80203 - RNA, 19 nt, Artificial Sequence
  Description of Artificial Sequence: Synthetic oligonucleotide
  Antisense strand to SEQ ID NO: 80122
cacaauauagacuuucacc

SEQ ID NO: 80204 - RNA, 19 nt, Artificial Sequence
  Description of Artificial Sequence: Synthetic oligonucleotide
  Sense strand starting at position 686 of SEQ ID NO: 1005
gcagcugacccuugacaau

SEQ ID NO: 80205 - RNA, 19 nt, Artificial Sequence
  Description of Artificial Sequence: Synthetic oligonucleotide
  Antisense strand to SEQ ID NO: 80124
auugucaagggucagcugc

SEQ ID NO: 80206 - RNA, 19 nt, Artificial Sequence
  Description of Artificial Sequence: Synthetic oligonucleotide
  Sense strand starting at position 1019 of SEQ ID NO: 1005
ucaggacuaugcuuugacu

SEQ ID NO: 80207 - RNA, 19 nt, Artificial Sequence
  Description of Artificial Sequence: Synthetic oligonucleotide
  Antisense strand to SEQ ID NO: 80126
agucaaagcauaguccuga

SEQ ID NO: 80208 - RNA, 19 nt, Artificial Sequence
  Description of Artificial Sequence: Synthetic oligonucleotide
  Sense strand starting at position 1028 of SEQ ID NO: 1005
ugcuuugacuuccuaagga

SEQ ID NO: 80209 - RNA, 19 nt, Artificial Sequence
  Description of Artificial Sequence: Synthetic oligonucleotide
  Antisense strand to SEQ ID NO: 80128
uccuuaggaagucaaagca

SEQ ID NO: 80210 - RNA, 19 nt, Artificial Sequence
  Description of Artificial Sequence: Synthetic oligonucleotide
  Sense strand starting at position 1094 of SEQ ID NO: 1005
uagggucucauguaacguu

SEQ ID NO: 80211 - RNA, 19 nt, Artificial Sequence
  Description of Artificial Sequence: Synthetic oligonucleotide
  Antisense strand to SEQ ID NO: 80130
aacguuacaugagacccua

SEQ ID NO: 80212 - RNA, 19 nt, Artificial Sequence
  Description of Artificial Sequence: Synthetic oligonucleotide
  Sense strand starting at position 1103 of SEQ ID NO: 1005
auguaacguucuccauaau

SEQ ID NO: 80213 - RNA, 19 nt, Artificial Sequence
  Description of Artificial Sequence: Synthetic oligonucleotide
  Antisense strand to SEQ ID NO: 80132
auuauggagaacguuacau

SEQ ID NO: 80214 - RNA, 19 nt, Artificial Sequence
  Description of Artificial Sequence: Synthetic oligonucleotide
  Sense strand starting at position 1104 of SEQ ID NO: 1005
uguaacguucuccauaaug

SEQ ID NO: 80215 - RNA, 19 nt, Artificial Sequence
  Description of Artificial Sequence: Synthetic oligonucleotide
  Antisense strand to SEQ ID NO: 80134
cauuauggagaacguuaca

SEQ ID NO: 80216 - RNA, 19 nt, Artificial Sequence
  Description of Artificial Sequence: Synthetic oligonucleotide
  Sense strand starting at position 1185 of SEQ ID NO: 1005
aaaugaguccugugucuua

SEQ ID NO: 80217 - RNA, 19 nt, Artificial Sequence
  Description of Artificial Sequence: Synthetic oligonucleotide
  Antisense strand to SEQ ID NO: 80136
uaagacacaggacucauuu

SEQ ID NO: 80218 - RNA, 19 nt, Artificial Sequence
  Description of Artificial Sequence: Synthetic oligonucleotide
  Sense strand starting at position 1188 of SEQ ID NO: 1005
ugaguccugugucuuaaga

SEQ ID NO: 80219 - RNA, 19 nt, Artificial Sequence
  Description of Artificial Sequence: Synthetic oligonucleotide
  Antisense strand to SEQ ID NO: 80138
ucuuaagacacaggacuca

SEQ ID NO: 80220 - RNA, 19 nt, Artificial Sequence
  Description of Artificial Sequence: Synthetic oligonucleotide
  Sense strand starting at position 1502 of SEQ ID NO: 1005
cuggcuauaucccucaaga

SEQ ID NO: 80221 - RNA, 19 nt, Artificial Sequence
  Description of Artificial Sequence: Synthetic oligonucleotide
  Antisense strand to SEQ ID NO: 80140
ucuugagggauauagccag

SEQ ID NO: 80222 - RNA, 19 nt, Artificial Sequence
  Description of Artificial Sequence: Synthetic oligonucleotide
  Sense strand starting at position 1595 of SEQ ID NO: 1005
ggcauuugcuucuccguga

SEQ ID NO: 80223 - RNA, 19 nt, Artificial Sequence
  Description of Artificial Sequence: Synthetic oligonucleotide
  Antisense strand to SEQ ID NO: 80142
ucacggagaagcaaaugcc

SEQ ID NO: 80224 - RNA, 19 nt, Artificial Sequence
  Description of Artificial Sequence: Synthetic oligonucleotide
  Sense strand starting at position 1596 of SEQ ID NO: 1005
gcauuugcuucuccgugaa

SEQ ID NO: 80225 - RNA, 19 nt, Artificial Sequence
  Description of Artificial Sequence: Synthetic oligonucleotide
  Antisense strand to SEQ ID NO: 80144
uucacggagaagcaaaugc

SEQ ID NO: 80226 - RNA, 19 nt, Artificial Sequence
  Description of Artificial Sequence: Synthetic oligonucleotide
  Sense strand starting at position 1598 of SEQ ID NO: 1005
auuugcuucuccgugaaca

SEQ ID NO: 80227 - RNA, 19 nt, Artificial Sequence
  Description of Artificial Sequence: Synthetic oligonucleotide
  Antisense strand to SEQ ID NO: 80146
uguucacggagaagcaaau

SEQ ID NO: 80228 - RNA, 19 nt, Artificial Sequence
  Description of Artificial Sequence: Synthetic oligonucleotide
  Sense strand starting at position 1687 of SEQ ID NO: 1005
gggagaugacccugaucgu

SEQ ID NO: 80229 - RNA, 19 nt, Artificial Sequence
  Description of Artificial Sequence: Synthetic oligonucleotide
  Antisense strand to SEQ ID NO: 80148
acgaucagggucaucuccc

SEQ ID NO: 80230 - RNA, 19 nt, Artificial Sequence
  Description of Artificial Sequence: Synthetic oligonucleotide
  Sense strand starting at position 1688 of SEQ ID NO: 1005
ggagaugacccugaucguu

SEQ ID NO: 80231 - RNA, 19 nt, Artificial Sequence
  Description of Artificial Sequence: Synthetic oligonucleotide
  Antisense strand to SEQ ID NO: 80150
aacgaucagggucaucucc

SEQ ID NO: 80232 - RNA, 19 nt, Artificial Sequence
  Description of Artificial Sequence: Synthetic oligonucleotide
  Sense strand starting at position 1984 of SEQ ID NO: 1005
gguucugggcgggaucuaa

SEQ ID NO: 80233 - RNA, 19 nt, Artificial Sequence
  Description of Artificial Sequence: Synthetic oligonucleotide
  Antisense strand to SEQ ID NO: 80152
uuagaucccgcccagaacc

SEQ ID NO: 80234 - RNA, 19 nt, Artificial Sequence
  Description of Artificial Sequence: Synthetic oligonucleotide
  Sense strand starting at position 2079 of SEQ ID NO: 1005
ucccaagugguuuaucaag

SEQ ID NO: 80235 - RNA, 19 nt, Artificial Sequence
  Description of Artificial Sequence: Synthetic oligonucleotide
  Antisense strand to SEQ ID NO: 80154
cuugauaaaccacuuggga

SEQ ID NO: 80236 - RNA, 19 nt, Artificial Sequence
  Description of Artificial Sequence: Synthetic oligonucleotide
  Sense strand starting at position 2081 of SEQ ID NO: 1005
ccaagugguuuaucaagga

SEQ ID NO: 80237 - RNA, 19 nt, Artificial Sequence
  Description of Artificial Sequence: Synthetic oligonucleotide
  Antisense strand to SEQ ID NO: 80156
uccuugauaaaccacuugg

SEQ ID NO: 80238 - RNA, 19 nt, Artificial Sequence
  Description of Artificial Sequence: Synthetic oligonucleotide
  Sense strand starting at position 2086 of SEQ ID NO: 1005
ugguuuaucaaggagcuga

SEQ ID NO: 80239 - RNA, 19 nt, Artificial Sequence
  Description of Artificial Sequence: Synthetic oligonucleotide
  Antisense strand to SEQ ID NO: 80158
ucagcuccuugauaaacca

SEQ ID NO: 80240 - RNA, 19 nt, Artificial Sequence
  Description of Artificial Sequence: Synthetic oligonucleotide
  Sense strand starting at position 2120 of SEQ ID NO: 1005
agaauaauccacgauaugc

SEQ ID NO: 80241 - RNA, 19 nt, Artificial Sequence
  Description of Artificial Sequence: Synthetic oligonucleotide
  Antisense strand to SEQ ID NO: 80160
gcauaucguggauuauucu

SEQ ID NO: 80242 - RNA, 19 nt, Artificial Sequence
  Description of Artificial Sequence: Synthetic oligonucleotide
  Sense strand starting at position 2153 of SEQ ID NO: 1005
gcaauuuggcacuguggau

SEQ ID NO: 80243 - RNA, 19 nt, Artificial Sequence
  Description of Artificial Sequence: Synthetic oligonucleotide
  Antisense strand to SEQ ID NO: 80162
auccacagugccaaauugc

SEQ ID NO: 80244 - RNA, 19 nt, Artificial Sequence
  Description of Artificial Sequence: Synthetic oligonucleotide
  Sense strand starting at position 2274 of SEQ ID NO: 1005
cccagaauguuucuugcag

SEQ ID NO: 80245 - RNA, 19 nt, Artificial Sequence
  Description of Artificial Sequence: Synthetic oligonucleotide
  Antisense strand to SEQ ID NO: 80164
cugcaagaaacauucuggg

SEQ ID NO: 80246 - RNA, 19 nt, Artificial Sequence
  Description of Artificial Sequence: Synthetic oligonucleotide
  Sense strand starting at position 2281 of SEQ ID NO: 1005
uguuucuugcagcaaagga

SEQ ID NO: 80247 - RNA, 19 nt, Artificial Sequence
  Description of Artificial Sequence: Synthetic oligonucleotide
  Antisense strand to SEQ ID NO: 80166
uccuuugcugcaagaaaca

SEQ ID NO: 80248 - RNA, 19 nt, Artificial Sequence
  Description of Artificial Sequence: Synthetic oligonucleotide
  Sense strand starting at position 2572 of SEQ ID NO: 1005
uuugguucgggacgaugaa

SEQ ID NO: 80249 - RNA, 19 nt, Artificial Sequence
  Description of Artificial Sequence: Synthetic oligonucleotide
  Antisense strand to SEQ ID NO: 80168
uucaucgucccgaaccaaa

SEQ ID NO: 80250 - RNA, 19 nt, Artificial Sequence
  Description of Artificial Sequence: Synthetic oligonucleotide
  Sense strand starting at position 2846 of SEQ ID NO: 1005
uguaaugggcugugauaug

SEQ ID NO: 80251 - RNA, 19 nt, Artificial Sequence
  Description of Artificial Sequence: Synthetic oligonucleotide
  Antisense strand to SEQ ID NO: 80170
cauaucacagcccauuaca

SEQ ID NO: 80252 - RNA, 19 nt, Artificial Sequence
  Description of Artificial Sequence: Synthetic oligonucleotide
  Sense strand starting at position 2867 of SEQ ID NO: 1005
gagaucgguguuuaaguuu

SEQ ID NO: 80253 - RNA, 19 nt, Artificial Sequence
  Description of Artificial Sequence: Synthetic oligonucleotide
  Antisense strand to SEQ ID NO: 80172
aaacuuaaacaccgaucuc

SEQ ID NO: 80254 - RNA, 19 nt, Artificial Sequence
  Description of Artificial Sequence: Synthetic oligonucleotide
  Sense strand starting at position 2892 of SEQ ID NO: 1005
ccugaauuguaauuguuau

SEQ ID NO: 80255 - RNA, 19 nt, Artificial Sequence
  Description of Artificial Sequence: Synthetic oligonucleotide
  Antisense strand to SEQ ID NO: 80174
auaacaauuacaauucagg

SEQ ID NO: 80256 - RNA, 19 nt, Artificial Sequence
  Description of Artificial Sequence: Synthetic oligonucleotide
  Sense strand starting at position 2922 of SEQ ID NO: 1005
gcuaaaguuuguuugacaa

SEQ ID NO: 80257 - RNA, 19 nt, Artificial Sequence
  Description of Artificial Sequence: Synthetic oligonucleotide
  Antisense strand to SEQ ID NO: 80176
uugucaaacaaacuuuagc

SEQ ID NO: 80258 - RNA, 19 nt, Artificial Sequence
  Description of Artificial Sequence: Synthetic oligonucleotide
  Sense strand starting at position 2958 of SEQ ID NO: 1005
ugugcuuuggaggaauuaa

SEQ ID NO: 80259 - RNA, 19 nt, Artificial Sequence
  Description of Artificial Sequence: Synthetic oligonucleotide
  Antisense strand to SEQ ID NO: 80178
uuaauuccuccaaagcaca

SEQ ID NO: 80260 - RNA, 19 nt, Artificial Sequence
  Description of Artificial Sequence: Synthetic oligonucleotide
  Sense strand starting at position 3314 of SEQ ID NO: 1005
ugaacugucuguccugauu

SEQ ID NO: 80261 - RNA, 19 nt, Artificial Sequence
  Description of Artificial Sequence: Synthetic oligonucleotide
  Antisense strand to SEQ ID NO: 80180
aaucaggacagacaguuca

SEQ ID NO: 80262 - RNA, 19 nt, Artificial Sequence
  Description of Artificial Sequence: Synthetic oligonucleotide
  Sense strand starting at position 3317 of SEQ ID NO: 1005
acugucuguccugauuagu

SEQ ID NO: 80263 - RNA, 19 nt, Artificial Sequence
  Description of Artificial Sequence: Synthetic oligonucleotide
  Antisense strand to SEQ ID NO: 80182
acuaaucaggacagacagu

SEQ ID NO: 80264 - RNA, 19 nt, Artificial Sequence
  Description of Artificial Sequence: Synthetic oligonucleotide
  Sense strand starting at position 3378 of SEQ ID NO: 1005
uaaagucccuuggucugaa

SEQ ID NO: 80265 - RNA, 19 nt, Artificial Sequence
  Description of Artificial Sequence: Synthetic oligonucleotide
  Antisense strand to SEQ ID NO: 80184
uucagaccaagggacuuua

SEQ ID NO: 80266 - RNA, 19 nt, Artificial Sequence
  Description of Artificial Sequence: Synthetic oligonucleotide
  Sense strand starting at position 3379 of SEQ ID NO: 1005
aaagucccuuggucugaaa

SEQ ID NO: 80267 - RNA, 19 nt, Artificial Sequence
  Description of Artificial Sequence: Synthetic oligonucleotide
  Antisense strand to SEQ ID NO: 80186
uuucagaccaagggacuuu

SEQ ID NO: 80268 - RNA, 19 nt, Artificial Sequence
  Description of Artificial Sequence: Synthetic oligonucleotide
  Sense strand starting at position 3381 of SEQ ID NO: 1005
agucccuuggucugaaaga

SEQ ID NO: 80269 - RNA, 19 nt, Artificial Sequence
  Description of Artificial Sequence: Synthetic oligonucleotide
  Antisense strand to SEQ ID NO: 80188
ucuuucagaccaagggacu

SEQ ID NO: 80270 - RNA, 19 nt, Artificial Sequence
  Description of Artificial Sequence: Synthetic oligonucleotide
  Sense strand starting at position 3573 of SEQ ID NO: 1005
ccaacaggucuguggaaca

SEQ ID NO: 80271 - RNA, 19 nt, Artificial Sequence
  Description of Artificial Sequence: Synthetic oligonucleotide
  Antisense strand to SEQ ID NO: 80190
uguuccacagaccuguugg

SEQ ID NO: 80272 - RNA, 19 nt, Artificial Sequence
  Description of Artificial Sequence: Synthetic oligonucleotide
  Sense strand starting at position 3675 of SEQ ID NO: 1005
ugugguuauguaggaauua

SEQ ID NO: 80273 - RNA, 19 nt, Artificial Sequence
  Description of Artificial Sequence: Synthetic oligonucleotide
  Antisense strand to SEQ ID NO: 80192
uaauuccuacauaaccaca

SEQ ID NO: 80274 - RNA, 19 nt, Artificial Sequence
  Description of Artificial Sequence: Synthetic oligonucleotide
  Sense strand starting at position 3702 of SEQ ID NO: 1006
guaucccagucauuaagca

SEQ ID NO: 80275 - RNA, 19 nt, Artificial Sequence
  Description of Artificial Sequence: Synthetic oligonucleotide
  Antisense strand to SEQ ID NO: 80194
ugcuuaaugacugggauac

SEQ ID NO: 80276 - RNA, 19 nt, Artificial Sequence
  Description of Artificial Sequence: Synthetic oligonucleotide
  Sense strand starting at position 3670 of SEQ ID NO: 1006
ccagaaucgccugaugaca

SEQ ID NO: 80277 - RNA, 19 nt, Artificial Sequence
  Description of Artificial Sequence: Synthetic oligonucleotide
  Antisense strand to SEQ ID NO: 80196
ugucaucaggcgauucugg

SEQ ID NO: 80278 - RNA, 19 nt, Artificial Sequence
  Description of Artificial Sequence: Synthetic oligonucleotide
  Sense strand starting at position 3669 of SEQ ID NO: 1006
uccagaaucgccugaugac

SEQ ID NO: 80279 - RNA, 19 nt, Artificial Sequence
  Description of Artificial Sequence: Synthetic oligonucleotide
  Antisense strand to SEQ ID NO: 80198
gucaucaggcgauucugga

SEQ ID NO: 80280 - RNA, 19 nt, Artificial Sequence
  Description of Artificial Sequence: Synthetic oligonucleotide
  Sense strand starting at position 3634 of SEQ ID NO: 1006
uuauccgucuuccuugaaa

SEQ ID NO: 80281 - RNA, 19 nt, Artificial Sequence
  Description of Artificial Sequence: Synthetic oligonucleotide
  Antisense strand to SEQ ID NO: 80200
uuucaaggaagacggauaa

SEQ ID NO: 80282 - RNA, 19 nt, Artificial Sequence
  Description of Artificial Sequence: Synthetic oligonucleotide
  Sense strand starting at position 3586 of SEQ ID NO: 1006
ugugauaaucaguaauguu

SEQ ID NO: 80283 - RNA, 19 nt, Artificial Sequence
  Description of Artificial Sequence: Synthetic oligonucleotide
  Antisense strand to SEQ ID NO: 80202
aacauuacugauuaucaca

SEQ ID NO: 80284 - RNA, 19 nt, Artificial Sequence
  Description of Artificial Sequence: Synthetic oligonucleotide
  Sense strand starting at position 3585 of SEQ ID NO: 1006
augugauaaucaguaaugu

SEQ ID NO: 80285 - RNA, 19 nt, Artificial Sequence
  Description of Artificial Sequence: Synthetic oligonucleotide
  Antisense strand to SEQ ID NO: 80204
acauuacugauuaucacau

SEQ ID NO: 80286 - RNA, 19 nt, Artificial Sequence
  Description of Artificial Sequence: Synthetic oligonucleotide
  Sense strand starting at position 3579 of SEQ ID NO: 1006
guauuuaugugauaaucag

SEQ ID NO: 80287 - RNA, 19 nt, Artificial Sequence
  Description of Artificial Sequence: Synthetic oligonucleotide
  Antisense strand to SEQ ID NO: 80206
cugauuaucacauaaauac

SEQ ID NO: 80288 - RNA, 19 nt, Artificial Sequence
  Description of Artificial Sequence: Synthetic oligonucleotide
  Sense strand starting at position 3220 of SEQ ID NO: 1006
agugauaucuaauuguagu

SEQ ID NO: 80289 - RNA, 19 nt, Artificial Sequence
  Description of Artificial Sequence: Synthetic oligonucleotide
  Antisense strand to SEQ ID NO: 80208
acuacaauuagauaucacu

SEQ ID NO: 80290 - RNA, 19 nt, Artificial Sequence
  Description of Artificial Sequence: Synthetic oligonucleotide
  Sense strand starting at position 2869 of SEQ ID NO: 1006
uccuguauagccuacagau

SEQ ID NO: 80291 - RNA, 19 nt, Artificial Sequence
  Description of Artificial Sequence: Synthetic oligonucleotide
  Antisense strand to SEQ ID NO: 80210
aucuguaggcuauacagga

SEQ ID NO: 80292 - RNA, 19 nt, Artificial Sequence
  Description of Artificial Sequence: Synthetic oligonucleotide
  Sense strand starting at position 2796 of SEQ ID NO: 1006
gcauaaugcccucaaguug

SEQ ID NO: 80293 - RNA, 19 nt, Artificial Sequence
  Description of Artificial Sequence: Synthetic oligonucleotide
  Antisense strand to SEQ ID NO: 80212
caacuugagggcauuaugc

SEQ ID NO: 80294 - RNA, 19 nt, Artificial Sequence
  Description of Artificial Sequence: Synthetic oligonucleotide
  Sense strand starting at position 2731 of SEQ ID NO: 1006
ucagauucugcauauaagu

SEQ ID NO: 80295 - RNA, 19 nt, Artificial Sequence
  Description of Artificial Sequence: Synthetic oligonucleotide
  Antisense strand to SEQ ID NO: 80214
acuuauaugcagaaucuga

SEQ ID NO: 80296 - RNA, 19 nt, Artificial Sequence
  Description of Artificial Sequence: Synthetic oligonucleotide
  Sense strand starting at position 2584 of SEQ ID NO: 1006
gucaccauacuguauauca

SEQ ID NO: 80297 - RNA, 19 nt, Artificial Sequence
  Description of Artificial Sequence: Synthetic oligonucleotide
  Antisense strand to SEQ ID NO: 80216
ugauauacaguauggugac

SEQ ID NO: 80298 - RNA, 19 nt, Artificial Sequence
  Description of Artificial Sequence: Synthetic oligonucleotide
  Sense strand starting at position 2574 of SEQ ID NO: 1006
guuaacuauggucaccaua

SEQ ID NO: 80299 - RNA, 19 nt, Artificial Sequence
  Description of Artificial Sequence: Synthetic oligonucleotide
  Antisense strand to SEQ ID NO: 80218
uauggugaccauaguuaac

SEQ ID NO: 80300 - RNA, 19 nt, Artificial Sequence
  Description of Artificial Sequence: Synthetic oligonucleotide
  Sense strand starting at position 2548 of SEQ ID NO: 1006
ucaaguaugcuguauaauu

SEQ ID NO: 80301 - RNA, 19 nt, Artificial Sequence
  Description of Artificial Sequence: Synthetic oligonucleotide
  Antisense strand to SEQ ID NO: 80220
aauuauacagcauacuuga

SEQ ID NO: 80302 - RNA, 19 nt, Artificial Sequence
  Description of Artificial Sequence: Synthetic oligonucleotide
  Sense strand starting at position 2375 of SEQ ID NO: 1006
uccagcuuuguugaaauau

SEQ ID NO: 80303 - RNA, 19 nt, Artificial Sequence
  Description of Artificial Sequence: Synthetic oligonucleotide
  Antisense strand to SEQ ID NO: 80222
auauuucaacaaagcugga

SEQ ID NO: 80304 - RNA, 19 nt, Artificial Sequence
  Description of Artificial Sequence: Synthetic oligonucleotide
  Sense strand starting at position 2373 of SEQ ID NO: 1006
uuuccagcuuuguugaaau

SEQ ID NO: 80305 - RNA, 19 nt, Artificial Sequence
  Description of Artificial Sequence: Synthetic oligonucleotide
  Antisense strand to SEQ ID NO: 80224
auuucaacaaagcuggaaa

SEQ ID NO: 80306 - RNA, 19 nt, Artificial Sequence
  Description of Artificial Sequence: Synthetic oligonucleotide
  Sense strand starting at position 2149 of SEQ ID NO: 1006
cuggcucucgugucacuau

SEQ ID NO: 80307 - RNA, 19 nt, Artificial Sequence
  Description of Artificial Sequence: Synthetic oligonucleotide
  Antisense strand to SEQ ID NO: 80226
auagugacacgagagccag

SEQ ID NO: 80308 - RNA, 19 nt, Artificial Sequence
  Description of Artificial Sequence: Synthetic oligonucleotide
  Sense strand starting at position 2063 of SEQ ID NO: 1006
uucugaggucaauggaaau

SEQ ID NO: 80309 - RNA, 19 nt, Artificial Sequence
  Description of Artificial Sequence: Synthetic oligonucleotide
  Antisense strand to SEQ ID NO: 80228
auuuccauugaccucagaa

SEQ ID NO: 80310 - RNA, 19 nt, Artificial Sequence
  Description of Artificial Sequence: Synthetic oligonucleotide
  Sense strand starting at position 2003 of SEQ ID NO: 1006
ggcugugucaugucuucuu

SEQ ID NO: 80311 - RNA, 19 nt, Artificial Sequence
  Description of Artificial Sequence: Synthetic oligonucleotide
  Antisense strand to SEQ ID NO: 80230
aagaagacaugacacagcc

SEQ ID NO: 80312 - RNA, 19 nt, Artificial Sequence
  Description of Artificial Sequence: Synthetic oligonucleotide
  Sense strand starting at position 1926 of SEQ ID NO: 1006
gaugaucgcugccuauuua

SEQ ID NO: 80313 - RNA, 19 nt, Artificial Sequence
  Description of Artificial Sequence: Synthetic oligonucleotide
  Antisense strand to SEQ ID NO: 80232
uaaauaggcagcgaucauc

SEQ ID NO: 80314 - RNA, 19 nt, Artificial Sequence
  Description of Artificial Sequence: Synthetic oligonucleotide
  Sense strand starting at position 1897 of SEQ ID NO: 1006
aaggaaauauagcugucuu

SEQ ID NO: 80315 - RNA, 19 nt, Artificial Sequence
  Description of Artificial Sequence: Synthetic oligonucleotide
  Antisense strand to SEQ ID NO: 80234
aagacagcuauauuuccuu

SEQ ID NO: 80316 - RNA, 19 nt, Artificial Sequence
  Description of Artificial Sequence: Synthetic oligonucleotide
  Sense strand starting at position 1845 of SEQ ID NO: 1006
ggaauaucaugagaacuug

SEQ ID NO: 80317 - RNA, 19 nt, Artificial Sequence
  Description of Artificial Sequence: Synthetic oligonucleotide
  Antisense strand to SEQ ID NO: 80236
caaguucucaugauauucc

SEQ ID NO: 80318 - RNA, 19 nt, Artificial Sequence
  Description of Artificial Sequence: Synthetic oligonucleotide
  Sense strand starting at position 1832 of SEQ ID NO: 1006
guaaccacugcauggaaua

SEQ ID NO: 80319 - RNA, 19 nt, Artificial Sequence
  Description of Artificial Sequence: Synthetic oligonucleotide
  Antisense strand to SEQ ID NO: 80238
uauuccaugcagugguuac

SEQ ID NO: 80320 - RNA, 19 nt, Artificial Sequence
  Description of Artificial Sequence: Synthetic oligonucleotide
  Sense strand starting at position 1735 of SEQ ID NO: 1006
aaauguuccuaguuagaag

SEQ ID NO: 80321 - RNA, 19 nt, Artificial Sequence
  Description of Artificial Sequence: Synthetic oligonucleotide
  Antisense strand to SEQ ID NO: 80240
cuucuaacuaggaacauuu

SEQ ID NO: 80322 - RNA, 19 nt, Artificial Sequence
  Description of Artificial Sequence: Synthetic oligonucleotide
  Sense strand starting at position 1592 of SEQ ID NO: 1006
augcauggcucaucauauc

SEQ ID NO: 80323 - RNA, 19 nt, Artificial Sequence
  Description of Artificial Sequence: Synthetic oligonucleotide
  Antisense strand to SEQ ID NO: 80242
gauaugaugagccaugcau

SEQ ID NO: 80324 - RNA, 19 nt, Artificial Sequence
  Description of Artificial Sequence: Synthetic oligonucleotide
  Sense strand starting at position 1413 of SEQ ID NO: 1006
gcgaaaggaacacguuaua

SEQ ID NO: 80325 - RNA, 19 nt, Artificial Sequence
  Description of Artificial Sequence: Synthetic oligonucleotide
  Antisense strand to SEQ ID NO: 80244
uauaacguguuccuuucgc

SEQ ID NO: 80326 - RNA, 19 nt, Artificial Sequence
  Description of Artificial Sequence: Synthetic oligonucleotide
  Sense strand starting at position 1080 of SEQ ID NO: 1006
ugcucucaccagugagacu

SEQ ID NO: 80327 - RNA, 19 nt, Artificial Sequence
  Description of Artificial Sequence: Synthetic oligonucleotide
  Antisense strand to SEQ ID NO: 80246
agucucacuggugagagca

SEQ ID NO: 80328 - RNA, 19 nt, Artificial Sequence
  Description of Artificial Sequence: Synthetic oligonucleotide
  Sense strand starting at position 980 of SEQ ID NO: 1006
agucuuugaugagcuaaac

SEQ ID NO: 80329 - RNA, 19 nt, Artificial Sequence
  Description of Artificial Sequence: Synthetic oligonucleotide
  Antisense strand to SEQ ID NO: 80248
guuuagcucaucaaagacu

SEQ ID NO: 80330 - RNA, 19 nt, Artificial Sequence
  Description of Artificial Sequence: Synthetic oligonucleotide
  Sense strand starting at position 978 of SEQ ID NO: 1006
cuagucuuugaugagcuaa

SEQ ID NO: 80331 - RNA, 19 nt, Artificial Sequence
  Description of Artificial Sequence: Synthetic oligonucleotide
  Antisense strand to SEQ ID NO: 80250
uuagcucaucaaagacuag

SEQ ID NO: 80332 - RNA, 19 nt, Artificial Sequence
  Description of Artificial Sequence: Synthetic oligonucleotide
  Sense strand starting at position 974 of SEQ ID NO: 1006
aauacuagucuuugaugag

SEQ ID NO: 80333 - RNA, 19 nt, Artificial Sequence
  Description of Artificial Sequence: Synthetic oligonucleotide
  Antisense strand to SEQ ID NO: 80252
cucaucaaagacuaguauu

SEQ ID NO: 80334 - RNA, 19 nt, Artificial Sequence
  Description of Artificial Sequence: Synthetic oligonucleotide
  Sense strand starting at position 567 of SEQ ID NO: 1006
ugguauauuuaggagauau

SEQ ID NO: 80335 - RNA, 19 nt, Artificial Sequence
  Description of Artificial Sequence: Synthetic oligonucleotide
  Antisense strand to SEQ ID NO: 80254
auaucuccuaaauauacca

SEQ ID NO: 80336 - RNA, 19 nt, Artificial Sequence
  Description of Artificial Sequence: Synthetic oligonucleotide
  Sense strand starting at position 566 of SEQ ID NO: 1006
cugguauauuuaggagaua

SEQ ID NO: 80337 - RNA, 19 nt, Artificial Sequence
  Description of Artificial Sequence: Synthetic oligonucleotide
  Antisense strand to SEQ ID NO: 80256
uaucuccuaaauauaccag

SEQ ID NO: 80338 - RNA, 19 nt, Artificial Sequence
  Description of Artificial Sequence: Synthetic oligonucleotide
  Sense strand starting at position 554 of SEQ ID NO: 1006
aaagaaauguuacugguau

SEQ ID NO: 80339 - RNA, 19 nt, Artificial Sequence
  Description of Artificial Sequence: Synthetic oligonucleotide
  Antisense strand to SEQ ID NO: 80258
auaccaguaacauuucuuu

SEQ ID NO: 80340 - RNA, 19 nt, Artificial Sequence
  Description of Artificial Sequence: Synthetic oligonucleotide
  Sense strand starting at position 479 of SEQ ID NO: 1006
uguauuugaugggaaccuu

SEQ ID NO: 80341 - RNA, 19 nt, Artificial Sequence
  Description of Artificial Sequence: Synthetic oligonucleotide
  Antisense strand to SEQ ID NO: 80260
aagguucccaucaaauaca

SEQ ID NO: 80342 - RNA, 19 nt, Artificial Sequence
  Description of Artificial Sequence: Synthetic oligonucleotide
  Sense strand starting at position 476 of SEQ ID NO: 1006
uauuguauuugaugggaac

SEQ ID NO: 80343 - RNA, 19 nt, Artificial Sequence
  Description of Artificial Sequence: Synthetic oligonucleotide
  Antisense strand to SEQ ID NO: 80262
guucccaucaaauacaaua

SEQ ID NO: 80344 - RNA, 19 nt, Artificial Sequence
  Description of Artificial Sequence: Synthetic oligonucleotide
  Sense strand starting at position 82 of SEQ ID NO: 1006
gcugucuagaagggaaauu

SEQ ID NO: 80345 - RNA, 19 nt, Artificial Sequence
  Description of Artificial Sequence: Synthetic oligonucleotide
  Antisense strand to SEQ ID NO: 80264
aauuucccuucuagacagc

SEQ ID NO: 80346 - RNA, 19 nt, Artificial Sequence
  Description of Artificial Sequence: Synthetic oligonucleotide
  Sense strand starting at position 81 of SEQ ID NO: 1006
ggcugucuagaagggaaau

SEQ ID NO: 80347 - RNA, 19 nt, Artificial Sequence
  Description of Artificial Sequence: Synthetic oligonucleotide
  Antisense strand to SEQ ID NO: 80266
auuucccuucuagacagcc

SEQ ID NO: 80348 - RNA, 19 nt, Artificial Sequence
  Description of Artificial Sequence: Synthetic oligonucleotide
  Sense strand starting at position 72 of SEQ ID NO: 1006
gaguaagagggcugucuag

SEQ ID NO: 80349 - RNA, 19 nt, Artificial Sequence
  Description of Artificial Sequence: Synthetic oligonucleotide
  Antisense strand to SEQ ID NO: 80268
cuagacagcccucuuacuc

SEQ ID NO: 80350 - RNA, 19 nt, Artificial Sequence
  Description of Artificial Sequence: Synthetic oligonucleotide
  Sense strand starting at position 45 of SEQ ID NO: 1006
agcuccuuuguggaaauau

SEQ ID NO: 80351 - RNA, 19 nt, Artificial Sequence
  Description of Artificial Sequence: Synthetic oligonucleotide
  Antisense strand to SEQ ID NO: 80270
auauuuccacaaaggagcu

SEQ ID NO: 80352 - RNA, 19 nt, Artificial Sequence
  Description of Artificial Sequence: Synthetic oligonucleotide
  Sense strand starting at position 42 of SEQ ID NO: 1006
auaagcuccuuuguggaaa

SEQ ID NO: 80353 - RNA, 19 nt, Artificial Sequence
  Description of Artificial Sequence: Synthetic oligonucleotide
  Antisense strand to SEQ ID NO: 80272
uuuccacaaaggagcuuau

SEQ ID NO: 80354 - RNA, 19 nt, Artificial Sequence
  Description of Artificial Sequence: Synthetic oligonucleotide
  Sense strand starting at position 3890 of SEQ ID NO: 1007
agacuacugucugcagaua

SEQ ID NO: 80355 - RNA, 19 nt, Artificial Sequence
  Description of Artificial Sequence: Synthetic oligonucleotide
  Antisense strand to SEQ ID NO: 80274
uaucugcagacaguagucu

SEQ ID NO: 80356 - RNA, 19 nt, Artificial Sequence
  Description of Artificial Sequence: Synthetic oligonucleotide
  Sense strand starting at position 3889 of SEQ ID NO: 1007
uagacuacugucugcagau

SEQ ID NO: 80357 - RNA, 19 nt, Artificial Sequence
  Description of Artificial Sequence: Synthetic oligonucleotide
  Antisense strand to SEQ ID NO: 80276
aucugcagacaguagucua

SEQ ID NO: 80358 - RNA, 19 nt, Artificial Sequence
  Description of Artificial Sequence: Synthetic oligonucleotide
  Sense strand starting at position 3879 of SEQ ID NO: 1007
gcugaaauccuagacuacu

SEQ ID NO: 80359 - RNA, 19 nt, Artificial Sequence
  Description of Artificial Sequence: Synthetic oligonucleotide
  Antisense strand to SEQ ID NO: 80278
aguagucuaggauuucagc

SEQ ID NO: 80360 - RNA, 19 nt, Artificial Sequence
  Description of Artificial Sequence: Synthetic oligonucleotide
  Sense strand starting at position 3795 of SEQ ID NO: 1007
gugagagugcuggaguaau

SEQ ID NO: 80361 - RNA, 19 nt, Artificial Sequence
  Description of Artificial Sequence: Synthetic oligonucleotide
  Antisense strand to SEQ ID NO: 80280
auuacuccagcacucucac

SEQ ID NO: 80362 - RNA, 19 nt, Artificial Sequence
  Description of Artificial Sequence: Synthetic oligonucleotide
  Sense strand starting at position 3636 of SEQ ID NO: 1007
agucuuacccuccagaagu

SEQ ID NO: 80363 - RNA, 19 nt, Artificial Sequence
  Description of Artificial Sequence: Synthetic oligonucleotide
  Antisense strand to SEQ ID NO: 80282
acuucuggaggguaagacu

SEQ ID NO: 80364 - RNA, 19 nt, Artificial Sequence
  Description of Artificial Sequence: Synthetic oligonucleotide
  Sense strand starting at position 3521 of SEQ ID NO: 1007
uacucaguguuguuuauuu

SEQ ID NO: 80365 - RNA, 19 nt, Artificial Sequence
  Description of Artificial Sequence: Synthetic oligonucleotide
  Antisense strand to SEQ ID NO: 80284
aaauaaacaacacugagua

SEQ ID NO: 80366 - RNA, 19 nt, Artificial Sequence
  Description of Artificial Sequence: Synthetic oligonucleotide
  Sense strand starting at position 3470 of SEQ ID NO: 1007
ggcagacucuucccaaucu

SEQ ID NO: 80367 - RNA, 19 nt, Artificial Sequence
  Description of Artificial Sequence: Synthetic oligonucleotide
  Antisense strand to SEQ ID NO: 80286
agauugggaagagucugcc

SEQ ID NO: 80368 - RNA, 19 nt, Artificial Sequence
  Description of Artificial Sequence: Synthetic oligonucleotide
  Sense strand starting at position 3468 of SEQ ID NO: 1007
uuggcagacucuucccaau

SEQ ID NO: 80369 - RNA, 19 nt, Artificial Sequence
  Description of Artificial Sequence: Synthetic oligonucleotide
  Antisense strand to SEQ ID NO: 80288
auugggaagagucugccaa

SEQ ID NO: 80370 - RNA, 19 nt, Artificial Sequence
  Description of Artificial Sequence: Synthetic oligonucleotide
  Sense strand starting at position 3342 of SEQ ID NO: 1007
ggaagaguuugcccaaccu

SEQ ID NO: 80371 - RNA, 19 nt, Artificial Sequence
  Description of Artificial Sequence: Synthetic oligonucleotide
  Antisense strand to SEQ ID NO: 80290
agguugggcaaacucuucc

SEQ ID NO: 80372 - RNA, 19 nt, Artificial Sequence
  Description of Artificial Sequence: Synthetic oligonucleotide
  Sense strand starting at position 3339 of SEQ ID NO: 1007
acaggaagaguuugcccaa

SEQ ID NO: 80373 - RNA, 19 nt, Artificial Sequence
  Description of Artificial Sequence: Synthetic oligonucleotide
  Antisense strand to SEQ ID NO: 80292
uugggcaaacucuuccugu

SEQ ID NO: 80374 - RNA, 19 nt, Artificial Sequence
  Description of Artificial Sequence: Synthetic oligonucleotide
  Sense strand starting at position 3234 of SEQ ID NO: 1007
gacauauuguugcuaauug

SEQ ID NO: 80375 - RNA, 19 nt, Artificial Sequence
  Description of Artificial Sequence: Synthetic oligonucleotide
  Antisense strand to SEQ ID NO: 80294
caauuagcaacaauauguc

SEQ ID NO: 80376 - RNA, 19 nt, Artificial Sequence
  Description of Artificial Sequence: Synthetic oligonucleotide
  Sense strand starting at position 3219 of SEQ ID NO: 1007
ucacauauguuuguugaca

SEQ ID NO: 80377 - RNA, 19 nt, Artificial Sequence
  Description of Artificial Sequence: Synthetic oligonucleotide
  Antisense strand to SEQ ID NO: 80296
ugucaacaaacauauguga

SEQ ID NO: 80378 - RNA, 19 nt, Artificial Sequence
  Description of Artificial Sequence: Synthetic oligonucleotide
  Sense strand starting at position 3094 of SEQ ID NO: 1007
cugagaauggcuuaaccuu

SEQ ID NO: 80379 - RNA, 19 nt, Artificial Sequence
  Description of Artificial Sequence: Synthetic oligonucleotide
  Antisense strand to SEQ ID NO: 80298
aagguuaagccauucucag

SEQ ID NO: 80380 - RNA, 19 nt, Artificial Sequence
  Description of Artificial Sequence: Synthetic oligonucleotide
  Sense strand starting at position 3009 of SEQ ID NO: 1007
gcccacaucccugaggaau

SEQ ID NO: 80381 - RNA, 19 nt, Artificial Sequence
  Description of Artificial Sequence: Synthetic oligonucleotide
  Antisense strand to SEQ ID NO: 80300
auuccucagggaugugggc

SEQ ID NO: 80382 - RNA, 19 nt, Artificial Sequence
  Description of Artificial Sequence: Synthetic oligonucleotide
  Sense strand starting at position 3008 of SEQ ID NO: 1007
ugcccacaucccugaggaa

SEQ ID NO: 80383 - RNA, 19 nt, Artificial Sequence
  Description of Artificial Sequence: Synthetic oligonucleotide
  Antisense strand to SEQ ID NO: 80302
uuccucagggaugugggca

SEQ ID NO: 80384 - RNA, 19 nt, Artificial Sequence
  Description of Artificial Sequence: Synthetic oligonucleotide
  Sense strand starting at position 2878 of SEQ ID NO: 1007
cuugcaagauccuccauga

SEQ ID NO: 80385 - RNA, 19 nt, Artificial Sequence
  Description of Artificial Sequence: Synthetic oligonucleotide
  Antisense strand to SEQ ID NO: 80304
ucauggaggaucuugcaag

SEQ ID NO: 80386 - RNA, 19 nt, Artificial Sequence
  Description of Artificial Sequence: Synthetic oligonucleotide
  Sense strand starting at position 2866 of SEQ ID NO: 1007
aggaauucuugucuugcaa

SEQ ID NO: 80387 - RNA, 19 nt, Artificial Sequence
  Description of Artificial Sequence: Synthetic oligonucleotide
  Antisense strand to SEQ ID NO: 80306
uugcaagacaagaauuccu

SEQ ID NO: 80388 - RNA, 19 nt, Artificial Sequence
  Description of Artificial Sequence: Synthetic oligonucleotide
  Sense strand starting at position 2865 of SEQ ID NO: 1007
gaggaauucuugucuugca

SEQ ID NO: 80389 - RNA, 19 nt, Artificial Sequence
  Description of Artificial Sequence: Synthetic oligonucleotide
  Antisense strand to SEQ ID NO: 80308
ugcaagacaagaauuccuc

SEQ ID NO: 80390 - RNA, 19 nt, Artificial Sequence
  Description of Artificial Sequence: Synthetic oligonucleotide
  Sense strand starting at position 2514 of SEQ ID NO: 1007
ugaggaguguuuccugaca

SEQ ID NO: 80391 - RNA, 19 nt, Artificial Sequence
  Description of Artificial Sequence: Synthetic oligonucleotide
  Antisense strand to SEQ ID NO: 80310
ugucaggaaacacuccuca

SEQ ID NO: 80392 - RNA, 19 nt, Artificial Sequence
  Description of Artificial Sequence: Synthetic oligonucleotide
  Sense strand starting at position 2476 of SEQ ID NO: 1007
guaaguaccucuccuuuaa

SEQ ID NO: 80393 - RNA, 19 nt, Artificial Sequence
  Description of Artificial Sequence: Synthetic oligonucleotide
  Antisense strand to SEQ ID NO: 80312
uuaaaggagagguacuuac

SEQ ID NO: 80394 - RNA, 19 nt, Artificial Sequence
  Description of Artificial Sequence: Synthetic oligonucleotide
  Sense strand starting at position 2450 of SEQ ID NO: 1007
aguaguccacagcgaagaa

SEQ ID NO: 80395 - RNA, 19 nt, Artificial Sequence
  Description of Artificial Sequence: Synthetic oligonucleotide
  Antisense strand to SEQ ID NO: 80314
uucuucgcuguggacuacu

SEQ ID NO: 80396 - RNA, 19 nt, Artificial Sequence
  Description of Artificial Sequence: Synthetic oligonucleotide
  Sense strand starting at position 2447 of SEQ ID NO: 1007
gacaguaguccacagcgaa

SEQ ID NO: 80397 - RNA, 19 nt, Artificial Sequence
  Description of Artificial Sequence: Synthetic oligonucleotide
  Antisense strand to SEQ ID NO: 80316
uucgcuguggacuacuguc

SEQ ID NO: 80398 - RNA, 19 nt, Artificial Sequence
  Description of Artificial Sequence: Synthetic oligonucleotide
  Sense strand starting at position 2374 of SEQ ID NO: 1007
auuauuacugugcagcaua

SEQ ID NO: 80399 - RNA, 19 nt, Artificial Sequence
  Description of Artificial Sequence: Synthetic oligonucleotide
  Antisense strand to SEQ ID NO: 80318
uaugcugcacaguaauaau

SEQ ID NO: 80400 - RNA, 19 nt, Artificial Sequence
  Description of Artificial Sequence: Synthetic oligonucleotide
  Sense strand starting at position 2347 of SEQ ID NO: 1007
ugguaaacucuguacacau

SEQ ID NO: 80401 - RNA, 19 nt, Artificial Sequence
  Description of Artificial Sequence: Synthetic oligonucleotide
  Antisense strand to SEQ ID NO: 80320
auguguacagaguuuacca

SEQ ID NO: 80402 - RNA, 19 nt, Artificial Sequence
  Description of Artificial Sequence: Synthetic oligonucleotide
  Sense strand starting at position 2346 of SEQ ID NO: 1007
uugguaaacucuguacaca

SEQ ID NO: 80403 - RNA, 19 nt, Artificial Sequence
  Description of Artificial Sequence: Synthetic oligonucleotide
  Antisense strand to SEQ ID NO: 80322
uguguacagaguuuaccaa

SEQ ID NO: 80404 - RNA, 19 nt, Artificial Sequence
  Description of Artificial Sequence: Synthetic oligonucleotide
  Sense strand starting at position 2335 of SEQ ID NO: 1007
cacagaggugcuugguaaa

SEQ ID NO: 80405 - RNA, 19 nt, Artificial Sequence
  Description of Artificial Sequence: Synthetic oligonucleotide
  Antisense strand to SEQ ID NO: 80324
uuuaccaagcaccucugug

SEQ ID NO: 80406 - RNA, 19 nt, Artificial Sequence
  Description of Artificial Sequence: Synthetic oligonucleotide
  Sense strand starting at position 2176 of SEQ ID NO: 1007
agaugagaccuggguuuga

SEQ ID NO: 80407 - RNA, 19 nt, Artificial Sequence
  Description of Artificial Sequence: Synthetic oligonucleotide
  Antisense strand to SEQ ID NO: 80326
ucaaacccaggucucaucu

SEQ ID NO: 80408 - RNA, 19 nt, Artificial Sequence
  Description of Artificial Sequence: Synthetic oligonucleotide
  Sense strand starting at position 2174 of SEQ ID NO: 1007
ugagaugagaccuggguuu

SEQ ID NO: 80409 - RNA, 19 nt, Artificial Sequence
  Description of Artificial Sequence: Synthetic oligonucleotide
  Antisense strand to SEQ ID NO: 80328
aaacccaggucucaucuca

SEQ ID NO: 80410 - RNA, 19 nt, Artificial Sequence
  Description of Artificial Sequence: Synthetic oligonucleotide
  Sense strand starting at position 2087 of SEQ ID NO: 1007
ggucaugcuuuccuagaga

SEQ ID NO: 80411 - RNA, 19 nt, Artificial Sequence
  Description of Artificial Sequence: Synthetic oligonucleotide
  Antisense strand to SEQ ID NO: 80330
ucucuaggaaagcaugacc

SEQ ID NO: 80412 - RNA, 19 nt, Artificial Sequence
  Description of Artificial Sequence: Synthetic oligonucleotide
  Sense strand starting at position 2078 of SEQ ID NO: 1007
agggaaauuggucaugcuu

SEQ ID NO: 80413 - RNA, 19 nt, Artificial Sequence
  Description of Artificial Sequence: Synthetic oligonucleotide
  Antisense strand to SEQ ID NO: 80332
aagcaugaccaauuucccu

SEQ ID NO: 80414 - RNA, 19 nt, Artificial Sequence
  Description of Artificial Sequence: Synthetic oligonucleotide
  Sense strand starting at position 2077 of SEQ ID NO: 1007
aagggaaauuggucaugcu

SEQ ID NO: 80415 - RNA, 19 nt, Artificial Sequence
  Description of Artificial Sequence: Synthetic oligonucleotide
  Antisense strand to SEQ ID NO: 80334
agcaugaccaauuucccuu

SEQ ID NO: 80416 - RNA, 19 nt, Artificial Sequence
  Description of Artificial Sequence: Synthetic oligonucleotide
  Sense strand starting at position 1703 of SEQ ID NO: 1007
augucuugucccuacauca

SEQ ID NO: 80417 - RNA, 19 nt, Artificial Sequence
  Description of Artificial Sequence: Synthetic oligonucleotide
  Antisense strand to SEQ ID NO: 80336
ugauguagggacaagacau

SEQ ID NO: 80418 - RNA, 19 nt, Artificial Sequence
  Description of Artificial Sequence: Synthetic oligonucleotide
  Sense strand starting at position 858 of SEQ ID NO: 1007
accuaacgccauuauguau

SEQ ID NO: 80419 - RNA, 19 nt, Artificial Sequence
  Description of Artificial Sequence: Synthetic oligonucleotide
  Antisense strand to SEQ ID NO: 80338
auacauaauggcguuaggu

SEQ ID NO: 80420 - RNA, 19 nt, Artificial Sequence
  Description of Artificial Sequence: Synthetic oligonucleotide
  Sense strand starting at position 770 of SEQ ID NO: 1007
gcaucagauuuccagauga

SEQ ID NO: 80421 - RNA, 19 nt, Artificial Sequence
  Description of Artificial Sequence: Synthetic oligonucleotide
  Antisense strand to SEQ ID NO: 80340
ucaucuggaaaucugaugc

SEQ ID NO: 80422 - RNA, 19 nt, Artificial Sequence
  Description of Artificial Sequence: Synthetic oligonucleotide
  Sense strand starting at position 715 of SEQ ID NO: 1007
ccacucacucuugagucua

SEQ ID NO: 80423 - RNA, 19 nt, Artificial Sequence
  Description of Artificial Sequence: Synthetic oligonucleotide
  Antisense strand to SEQ ID NO: 80342
uagacucaagagugagugg

SEQ ID NO: 80424 - RNA, 19 nt, Artificial Sequence
  Description of Artificial Sequence: Synthetic oligonucleotide
  Sense strand starting at position 238 of SEQ ID NO: 1007
gcaaguugagacuauugca

SEQ ID NO: 80425 - RNA, 19 nt, Artificial Sequence
  Description of Artificial Sequence: Synthetic oligonucleotide
  Antisense strand to SEQ ID NO: 80344
ugcaauagucucaacuugc

SEQ ID NO: 80426 - RNA, 19 nt, Artificial Sequence
  Description of Artificial Sequence: Synthetic oligonucleotide
  Sense strand starting at position 173 of SEQ ID NO: 1007
aguuacaugcccugggaaa

SEQ ID NO: 80427 - RNA, 19 nt, Artificial Sequence
  Description of Artificial Sequence: Synthetic oligonucleotide
  Antisense strand to SEQ ID NO: 80346
uuucccagggcauguaacu

SEQ ID NO: 80428 - RNA, 19 nt, Artificial Sequence
  Description of Artificial Sequence: Synthetic oligonucleotide
  Sense strand starting at position 158 of SEQ ID NO: 1007
ggcccucugacccagaguu

SEQ ID NO: 80429 - RNA, 19 nt, Artificial Sequence
  Description of Artificial Sequence: Synthetic oligonucleotide
  Antisense strand to SEQ ID NO: 80348
aacucugggucagagggcc

SEQ ID NO: 80430 - RNA, 19 nt, Artificial Sequence
  Description of Artificial Sequence: Synthetic oligonucleotide
  Sense strand starting at position 115 of SEQ ID NO: 1007
gcagaagggucugcugaaa

SEQ ID NO: 80431 - RNA, 19 nt, Artificial Sequence
  Description of Artificial Sequence: Synthetic oligonucleotide
  Antisense strand to SEQ ID NO: 80350
uuucagcagacccuucugc

SEQ ID NO: 80432 - RNA, 19 nt, Artificial Sequence
  Description of Artificial Sequence: Synthetic oligonucleotide
  Sense strand starting at position 114 of SEQ ID NO: 1007
ggcagaagggucugcugaa

SEQ ID NO: 80433 - RNA, 19 nt, Artificial Sequence
  Description of Artificial Sequence: Synthetic oligonucleotide
  Antisense strand to SEQ ID NO: 80352
uucagcagacccuucugcc

SEQ ID NO: 80434 - RNA, 19 nt, Artificial Sequence
  Description of Artificial Sequence: Synthetic oligonucleotide
  Sense strand starting at position 3917 of SEQ ID NO: 1008
aguguugugguucacauga

SEQ ID NO: 80435 - RNA, 19 nt, Artificial Sequence
  Description of Artificial Sequence: Synthetic oligonucleotide
  Antisense strand to SEQ ID NO: 80354
ucaugugaaccacaacacu

SEQ ID NO: 80436 - RNA, 19 nt, Artificial Sequence
  Description of Artificial Sequence: Synthetic oligonucleotide
  Sense strand starting at position 3889 of SEQ ID NO: 1008
agauaagcgcagcaauaua

SEQ ID NO: 80437 - RNA, 19 nt, Artificial Sequence
  Description of Artificial Sequence: Synthetic oligonucleotide
  Antisense strand to SEQ ID NO: 80356
uauauugcugcgcuuaucu

SEQ ID NO: 80438 - RNA, 19 nt, Artificial Sequence
  Description of Artificial Sequence: Synthetic oligonucleotide
  Sense strand starting at position 3886 of SEQ ID NO: 1008
guaagauaagcgcagcaau

SEQ ID NO: 80439 - RNA, 19 nt, Artificial Sequence
  Description of Artificial Sequence: Synthetic oligonucleotide
  Antisense strand to SEQ ID NO: 80358
auugcugcgcuuaucuuac

SEQ ID NO: 80440 - RNA, 19 nt, Artificial Sequence
  Description of Artificial Sequence: Synthetic oligonucleotide
  Sense strand starting at position 3875 of SEQ ID NO: 1008
uuuccugauuuguaagaua

SEQ ID NO: 80441 - RNA, 19 nt, Artificial Sequence
  Description of Artificial Sequence: Synthetic oligonucleotide
  Antisense strand to SEQ ID NO: 80360
uaucuuacaaaucaggaaa

SEQ ID NO: 80442 - RNA, 19 nt, Artificial Sequence
  Description of Artificial Sequence: Synthetic oligonucleotide
  Sense strand starting at position 3835 of SEQ ID NO: 1008
gugugacuuaagcaagcua

SEQ ID NO: 80443 - RNA, 19 nt, Artificial Sequence
  Description of Artificial Sequence: Synthetic oligonucleotide
  Antisense strand to SEQ ID NO: 80362
uagcuugcuuaagucacac

SEQ ID NO: 80444 - RNA, 19 nt, Artificial Sequence
  Description of Artificial Sequence: Synthetic oligonucleotide
  Sense strand starting at position 3367 of SEQ ID NO: 1008
gaucuuucuguaggaacca

SEQ ID NO: 80445 - RNA, 19 nt, Artificial Sequence
  Description of Artificial Sequence: Synthetic oligonucleotide
  Antisense strand to SEQ ID NO: 80364
ugguuccuacagaaagauc

SEQ ID NO: 80446 - RNA, 19 nt, Artificial Sequence
  Description of Artificial Sequence: Synthetic oligonucleotide
  Sense strand starting at position 3364 of SEQ ID NO: 1008
cuggaucuuucuguaggaa

SEQ ID NO: 80447 - RNA, 19 nt, Artificial Sequence
  Description of Artificial Sequence: Synthetic oligonucleotide
  Antisense strand to SEQ ID NO: 80366
uuccuacagaaagauccag

SEQ ID NO: 80448 - RNA, 19 nt, Artificial Sequence
  Description of Artificial Sequence: Synthetic oligonucleotide
  Sense strand starting at position 3360 of SEQ ID NO: 1008
gcaucuggaucuuucugua

SEQ ID NO: 80449 - RNA, 19 nt, Artificial Sequence
  Description of Artificial Sequence: Synthetic oligonucleotide
  Antisense strand to SEQ ID NO: 80368
uacagaaagauccagaugc

SEQ ID NO: 80450 - RNA, 19 nt, Artificial Sequence
  Description of Artificial Sequence: Synthetic oligonucleotide
  Sense strand starting at position 3236 of SEQ ID NO: 1008
ggccaauccuaacccagau

SEQ ID NO: 80451 - RNA, 19 nt, Artificial Sequence
  Description of Artificial Sequence: Synthetic oligonucleotide
  Antisense strand to SEQ ID NO: 80370
aucuggguuaggauuggcc

SEQ ID NO: 80452 - RNA, 19 nt, Artificial Sequence
  Description of Artificial Sequence: Synthetic oligonucleotide
  Sense strand starting at position 3200 of SEQ ID NO: 1008
ugcucauuagaauguguuu

SEQ ID NO: 80453 - RNA, 19 nt, Artificial Sequence
  Description of Artificial Sequence: Synthetic oligonucleotide
  Antisense strand to SEQ ID NO: 80372
aaacacauucuaaugagca

SEQ ID NO: 80454 - RNA, 19 nt, Artificial Sequence
  Description of Artificial Sequence: Synthetic oligonucleotide
  Sense strand starting at position 3195 of SEQ ID NO: 1008
gcaacugcucauuagaaug

SEQ ID NO: 80455 - RNA, 19 nt, Artificial Sequence
  Description of Artificial Sequence: Synthetic oligonucleotide
  Antisense strand to SEQ ID NO: 80374
cauucuaaugagcaguugc

SEQ ID NO: 80456 - RNA, 19 nt, Artificial Sequence
  Description of Artificial Sequence: Synthetic oligonucleotide
  Sense strand starting at position 3194 of SEQ ID NO: 1008
agcaacugcucauuagaau

SEQ ID NO: 80457 - RNA, 19 nt, Artificial Sequence
  Description of Artificial Sequence: Synthetic oligonucleotide
  Antisense strand to SEQ ID NO: 80376
auucuaaugagcaguugcu

SEQ ID NO: 80458 - RNA, 19 nt, Artificial Sequence
  Description of Artificial Sequence: Synthetic oligonucleotide
  Sense strand starting at position 3192 of SEQ ID NO: 1008
ccagcaacugcucauuaga

SEQ ID NO: 80459 - RNA, 19 nt, Artificial Sequence
  Description of Artificial Sequence: Synthetic oligonucleotide
  Antisense strand to SEQ ID NO: 80378
ucuaaugagcaguugcugg

SEQ ID NO: 80460 - RNA, 19 nt, Artificial Sequence
  Description of Artificial Sequence: Synthetic oligonucleotide
  Sense strand starting at position 3165 of SEQ ID NO: 1008
uaaaguuuaggcugagaag

SEQ ID NO: 80461 - RNA, 19 nt, Artificial Sequence
  Description of Artificial Sequence: Synthetic oligonucleotide
  Antisense strand to SEQ ID NO: 80380
cuucucagccuaaacuuua

SEQ ID NO: 80462 - RNA, 19 nt, Artificial Sequence
  Description of Artificial Sequence: Synthetic oligonucleotide
  Sense strand starting at position 3114 of SEQ ID NO: 1008
cugauaggauggccucaua

SEQ ID NO: 80463 - RNA, 19 nt, Artificial Sequence
  Description of Artificial Sequence: Synthetic oligonucleotide
  Antisense strand to SEQ ID NO: 80382
uaugaggccauccuaucag

SEQ ID NO: 80464 - RNA, 19 nt, Artificial Sequence
  Description of Artificial Sequence: Synthetic oligonucleotide
  Sense strand starting at position 2558 of SEQ ID NO: 1008
gugcucaguagacaucaga

SEQ ID NO: 80465 - RNA, 19 nt, Artificial Sequence
  Description of Artificial Sequence: Synthetic oligonucleotide
  Antisense strand to SEQ ID NO: 80384
ucugaugucuacugagcac

SEQ ID NO: 80466 - RNA, 19 nt, Artificial Sequence
  Description of Artificial Sequence: Synthetic oligonucleotide
  Sense strand starting at position 2554 of SEQ ID NO: 1008
acacgugcucaguagacau

SEQ ID NO: 80467 - RNA, 19 nt, Artificial Sequence
  Description of Artificial Sequence: Synthetic oligonucleotide
  Antisense strand to SEQ ID NO: 80386
augucuacugagcacgugu

SEQ ID NO: 80468 - RNA, 19 nt, Artificial Sequence
  Description of Artificial Sequence: Synthetic oligonucleotide
  Sense strand starting at position 2507 of SEQ ID NO: 1008
gaagguucuguggauggca

SEQ ID NO: 80469 - RNA, 19 nt, Artificial Sequence
  Description of Artificial Sequence: Synthetic oligonucleotide
  Antisense strand to SEQ ID NO: 80388
ugccauccacagaaccuuc

SEQ ID NO: 80470 - RNA, 19 nt, Artificial Sequence
  Description of Artificial Sequence: Synthetic oligonucleotide
  Sense strand starting at position 2428 of SEQ ID NO: 1008
gugacuucgguucagaauc

SEQ ID NO: 80471 - RNA, 19 nt, Artificial Sequence
  Description of Artificial Sequence: Synthetic oligonucleotide
  Antisense strand to SEQ ID NO: 80390
gauucugaaccgaagucac

SEQ ID NO: 80472 - RNA, 19 nt, Artificial Sequence
  Description of Artificial Sequence: Synthetic oligonucleotide
  Sense strand starting at position 2371 of SEQ ID NO: 1008
ggacuuugcagucagauag

SEQ ID NO: 80473 - RNA, 19 nt, Artificial Sequence
  Description of Artificial Sequence: Synthetic oligonucleotide
  Antisense strand to SEQ ID NO: 80392
cuaucugacugcaaagucc

SEQ ID NO: 80474 - RNA, 19 nt, Artificial Sequence
  Description of Artificial Sequence: Synthetic oligonucleotide
  Sense strand starting at position 2236 of SEQ ID NO: 1008
gggucgggucuccagagau

SEQ ID NO: 80475 - RNA, 19 nt, Artificial Sequence
  Description of Artificial Sequence: Synthetic oligonucleotide
  Antisense strand to SEQ ID NO: 80394
aucucuggagacccgaccc

SEQ ID NO: 80476 - RNA, 19 nt, Artificial Sequence
  Description of Artificial Sequence: Synthetic oligonucleotide
  Sense strand starting at position 2151 of SEQ ID NO: 1008
uccucuuacccuuagggua

SEQ ID NO: 80477 - RNA, 19 nt, Artificial Sequence
  Description of Artificial Sequence: Synthetic oligonucleotide
  Antisense strand to SEQ ID NO: 80396
uacccuaaggguaagagga

SEQ ID NO: 80478 - RNA, 19 nt, Artificial Sequence
  Description of Artificial Sequence: Synthetic oligonucleotide
  Sense strand starting at position 2101 of SEQ ID NO: 1008
gggauuacgcugugaaagg

SEQ ID NO: 80479 - RNA, 19 nt, Artificial Sequence
  Description of Artificial Sequence: Synthetic oligonucleotide
  Antisense strand to SEQ ID NO: 80398
ccuuucacagcguaauccc

SEQ ID NO: 80480 - RNA, 19 nt, Artificial Sequence
  Description of Artificial Sequence: Synthetic oligonucleotide
  Sense strand starting at position 2099 of SEQ ID NO: 1008
acgggauuacgcugugaaa

SEQ ID NO: 80481 - RNA, 19 nt, Artificial Sequence
  Description of Artificial Sequence: Synthetic oligonucleotide
  Antisense strand to SEQ ID NO: 80400
uuucacagcguaaucccgu

SEQ ID NO: 80482 - RNA, 19 nt, Artificial Sequence
  Description of Artificial Sequence: Synthetic oligonucleotide
  Sense strand starting at position 2089 of SEQ ID NO: 1008
gguuucgugaacgggauua

SEQ ID NO: 80483 - RNA, 19 nt, Artificial Sequence
  Description of Artificial Sequence: Synthetic oligonucleotide
  Antisense strand to SEQ ID NO: 80402
uaaucccguucacgaaacc

SEQ ID NO: 80484 - RNA, 19 nt, Artificial Sequence
  Description of Artificial Sequence: Synthetic oligonucleotide
  Sense strand starting at position 2023 of SEQ ID NO: 1008
cccgguucuguugaugaga

SEQ ID NO: 80485 - RNA, 19 nt, Artificial Sequence
  Description of Artificial Sequence: Synthetic oligonucleotide
  Antisense strand to SEQ ID NO: 80404
ucucaucaacagaaccggg

SEQ ID NO: 80486 - RNA, 19 nt, Artificial Sequence
  Description of Artificial Sequence: Synthetic oligonucleotide
  Sense strand starting at position 1191 of SEQ ID NO: 1008
ucagguuugcaaggacaca

SEQ ID NO: 80487 - RNA, 19 nt, Artificial Sequence
  Description of Artificial Sequence: Synthetic oligonucleotide
  Antisense strand to SEQ ID NO: 80406
uguguccuugcaaaccuga

SEQ ID NO: 80488 - RNA, 19 nt, Artificial Sequence
  Description of Artificial Sequence: Synthetic oligonucleotide
  Sense strand starting at position 924 of SEQ ID NO: 1008
cgggaagauccgugacuca

SEQ ID NO: 80489 - RNA, 19 nt, Artificial Sequence
  Description of Artificial Sequence: Synthetic oligonucleotide
  Antisense strand to SEQ ID NO: 80408
ugagucacggaucuucccg

SEQ ID NO: 80490 - RNA, 19 nt, Artificial Sequence
  Description of Artificial Sequence: Synthetic oligonucleotide
  Sense strand starting at position 891 of SEQ ID NO: 1008
agaguugguggcugccaaa

SEQ ID NO: 80491 - RNA, 19 nt, Artificial Sequence
  Description of Artificial Sequence: Synthetic oligonucleotide
  Antisense strand to SEQ ID NO: 80410
uuuggcagccaccaacucu

SEQ ID NO: 80492 - RNA, 19 nt, Artificial Sequence
  Description of Artificial Sequence: Synthetic oligonucleotide
  Sense strand starting at position 596 of SEQ ID NO: 1008
ucugcuguguccucaaaga

SEQ ID NO: 80493 - RNA, 19 nt, Artificial Sequence
  Description of Artificial Sequence: Synthetic oligonucleotide
  Antisense strand to SEQ ID NO: 80412
ucuuugaggacacagcaga

SEQ ID NO: 80494 - RNA, 19 nt, Artificial Sequence
  Description of Artificial Sequence: Synthetic oligonucleotide
  Sense strand starting at position 554 of SEQ ID NO: 1008
ccugucagcuguuccagaa

SEQ ID NO: 80495 - RNA, 19 nt, Artificial Sequence
  Description of Artificial Sequence: Synthetic oligonucleotide
  Antisense strand to SEQ ID NO: 80414
uucuggaacagcugacagg

SEQ ID NO: 80496 - RNA, 19 nt, Artificial Sequence
  Description of Artificial Sequence: Synthetic oligonucleotide
  Sense strand starting at position 515 of SEQ ID NO: 1008
gaucuagugguugaaaguc

SEQ ID NO: 80497 - RNA, 19 nt, Artificial Sequence
  Description of Artificial Sequence: Synthetic oligonucleotide
  Antisense strand to SEQ ID NO: 80416
gacuuucaaccacuagauc

SEQ ID NO: 80498 - RNA, 19 nt, Artificial Sequence
  Description of Artificial Sequence: Synthetic oligonucleotide
  Sense strand starting at position 514 of SEQ ID NO: 1008
ugaucuagugguugaaagu

SEQ ID NO: 80499 - RNA, 19 nt, Artificial Sequence
  Description of Artificial Sequence: Synthetic oligonucleotide
  Antisense strand to SEQ ID NO: 80418
acuuucaaccacuagauca

SEQ ID NO: 80500 - RNA, 19 nt, Artificial Sequence
  Description of Artificial Sequence: Synthetic oligonucleotide
  Sense strand starting at position 513 of SEQ ID NO: 1008
gugaucuagugguugaaag

SEQ ID NO: 80501 - RNA, 19 nt, Artificial Sequence
  Description of Artificial Sequence: Synthetic oligonucleotide
  Antisense strand to SEQ ID NO: 80420
cuuucaaccacuagaucac

SEQ ID NO: 80502 - RNA, 19 nt, Artificial Sequence
  Description of Artificial Sequence: Synthetic oligonucleotide
  Sense strand starting at position 511 of SEQ ID NO: 1008
gugugaucuagugguugaa

SEQ ID NO: 80503 - RNA, 19 nt, Artificial Sequence
  Description of Artificial Sequence: Synthetic oligonucleotide
  Antisense strand to SEQ ID NO: 80422
uucaaccacuagaucacac

SEQ ID NO: 80504 - RNA, 19 nt, Artificial Sequence
  Description of Artificial Sequence: Synthetic oligonucleotide
  Sense strand starting at position 476 of SEQ ID NO: 1008
gggagagaucaguguucac

SEQ ID NO: 80505 - RNA, 19 nt, Artificial Sequence
  Description of Artificial Sequence: Synthetic oligonucleotide
  Antisense strand to SEQ ID NO: 80424
gugaacacugaucucuccc

SEQ ID NO: 80506 - RNA, 19 nt, Artificial Sequence
  Description of Artificial Sequence: Synthetic oligonucleotide
  Sense strand starting at position 339 of SEQ ID NO: 1008
aggaguuauaaauguguau

SEQ ID NO: 80507 - RNA, 19 nt, Artificial Sequence
  Description of Artificial Sequence: Synthetic oligonucleotide
  Antisense strand to SEQ ID NO: 80426
auacacauuuauaacuccu

SEQ ID NO: 80508 - RNA, 19 nt, Artificial Sequence
  Description of Artificial Sequence: Synthetic oligonucleotide
  Sense strand starting at position 329 of SEQ ID NO: 1008
uguuacuggcaggaguuau

SEQ ID NO: 80509 - RNA, 19 nt, Artificial Sequence
  Description of Artificial Sequence: Synthetic oligonucleotide
  Antisense strand to SEQ ID NO: 80428
auaacuccugccaguaaca

SEQ ID NO: 80510 - RNA, 19 nt, Artificial Sequence
  Description of Artificial Sequence: Synthetic oligonucleotide
  Sense strand starting at position 133 of SEQ ID NO: 1008
auuugagagucuuagacau

SEQ ID NO: 80511 - RNA, 19 nt, Artificial Sequence
  Description of Artificial Sequence: Synthetic oligonucleotide
  Antisense strand to SEQ ID NO: 80430
augucuaagacucucaaau

SEQ ID NO: 80512 - RNA, 19 nt, Artificial Sequence
  Description of Artificial Sequence: Synthetic oligonucleotide
  Sense strand starting at position 118 of SEQ ID NO: 1008
cugaucuaguucuauauuu

SEQ ID NO: 80513 - RNA, 19 nt, Artificial Sequence
  Description of Artificial Sequence: Synthetic oligonucleotide
  Antisense strand to SEQ ID NO: 80432
aaauauagaacuagaucag

SEQ ID NO: 80514 - RNA, 19 nt, Artificial Sequence
  Description of Artificial Sequence: Synthetic oligonucleotide
  Sense strand starting at position 26 of SEQ ID NO: 1009
acuggaaucuagucccuaa

SEQ ID NO: 80515 - RNA, 19 nt, Artificial Sequence
  Description of Artificial Sequence: Synthetic oligonucleotide
  Antisense strand to SEQ ID NO: 80434
uuagggacuagauuccagu

SEQ ID NO: 80516 - RNA, 19 nt, Artificial Sequence
  Description of Artificial Sequence: Synthetic oligonucleotide
  Sense strand starting at position 29 of SEQ ID NO: 1009
ggaaucuagucccuaauca

SEQ ID NO: 80517 - RNA, 19 nt, Artificial Sequence
  Description of Artificial Sequence: Synthetic oligonucleotide
  Antisense strand to SEQ ID NO: 80436
ugauuagggacuagauucc

SEQ ID NO: 80518 - RNA, 19 nt, Artificial Sequence
  Description of Artificial Sequence: Synthetic oligonucleotide
  Sense strand starting at position 124 of SEQ ID NO: 1009
uguaguacccuccagugau

SEQ ID NO: 80519 - RNA, 19 nt, Artificial Sequence
  Description of Artificial Sequence: Synthetic oligonucleotide
  Antisense strand to SEQ ID NO: 80438
aucacuggaggguacuaca

SEQ ID NO: 80520 - RNA, 19 nt, Artificial Sequence
  Description of Artificial Sequence: Synthetic oligonucleotide
  Sense strand starting at position 127 of SEQ ID NO: 1009
aguacccuccagugauaug

SEQ ID NO: 80521 - RNA, 19 nt, Artificial Sequence
  Description of Artificial Sequence: Synthetic oligonucleotide
  Antisense strand to SEQ ID NO: 80440
cauaucacuggaggguacu

SEQ ID NO: 80522 - RNA, 19 nt, Artificial Sequence
  Description of Artificial Sequence: Synthetic oligonucleotide
  Sense strand starting at position 176 of SEQ ID NO: 1009
uaaagagagcucuauguuu

SEQ ID NO: 80523 - RNA, 19 nt, Artificial Sequence
  Description of Artificial Sequence: Synthetic oligonucleotide
  Antisense strand to SEQ ID NO: 80442
aaacauagagcucucuuua

SEQ ID NO: 80524 - RNA, 19 nt, Artificial Sequence
  Description of Artificial Sequence: Synthetic oligonucleotide
  Sense strand starting at position 342 of SEQ ID NO: 1009
aggacuaagugcccugaga

SEQ ID NO: 80525 - RNA, 19 nt, Artificial Sequence
  Description of Artificial Sequence: Synthetic oligonucleotide
  Antisense strand to SEQ ID NO: 80444
ucucagggcacuuaguccu

SEQ ID NO: 80526 - RNA, 19 nt, Artificial Sequence
  Description of Artificial Sequence: Synthetic oligonucleotide
  Sense strand starting at position 344 of SEQ ID NO: 1009
gacuaagugcccugagaau

SEQ ID NO: 80527 - RNA, 19 nt, Artificial Sequence
  Description of Artificial Sequence: Synthetic oligonucleotide
  Antisense strand to SEQ ID NO: 80446
auucucagggcacuuaguc

SEQ ID NO: 80528 - RNA, 19 nt, Artificial Sequence
  Description of Artificial Sequence: Synthetic oligonucleotide
  Sense strand starting at position 350 of SEQ ID NO: 1009
gugcccugagaauauugau

SEQ ID NO: 80529 - RNA, 19 nt, Artificial Sequence
  Description of Artificial Sequence: Synthetic oligonucleotide
  Antisense strand to SEQ ID NO: 80448
aucaauauucucagggcac

SEQ ID NO: 80530 - RNA, 19 nt, Artificial Sequence
  Description of Artificial Sequence: Synthetic oligonucleotide
  Sense strand starting at position 383 of SEQ ID NO: 1009
gcagauuaaggaugugaag

SEQ ID NO: 80531 - RNA, 19 nt, Artificial Sequence
  Description of Artificial Sequence: Synthetic oligonucleotide
  Antisense strand to SEQ ID NO: 80450
cuucacauccuuaaucugc

SEQ ID NO: 80532 - RNA, 19 nt, Artificial Sequence
  Description of Artificial Sequence: Synthetic oligonucleotide
  Sense strand starting at position 773 of SEQ ID NO: 1009
agaucuucuggcuggugau

SEQ ID NO: 80533 - RNA, 19 nt, Artificial Sequence
  Description of Artificial Sequence: Synthetic oligonucleotide
  Antisense strand to SEQ ID NO: 80452
aucaccagccagaagaucu

SEQ ID NO: 80534 - RNA, 19 nt, Artificial Sequence
  Description of Artificial Sequence: Synthetic oligonucleotide
  Sense strand starting at position 788 of SEQ ID NO: 1009
ugaugcuagaggugacaaa

SEQ ID NO: 80535 - RNA, 19 nt, Artificial Sequence
  Description of Artificial Sequence: Synthetic oligonucleotide
  Antisense strand to SEQ ID NO: 80454
uuugucaccucuagcauca

SEQ ID NO: 80536 - RNA, 19 nt, Artificial Sequence
  Description of Artificial Sequence: Synthetic oligonucleotide
  Sense strand starting at position 940 of SEQ ID NO: 1009
aguccaagcuauccagaca

SEQ ID NO: 80537 - RNA, 19 nt, Artificial Sequence
  Description of Artificial Sequence: Synthetic oligonucleotide
  Antisense strand to SEQ ID NO: 80456
ugucuggauagcuuggacu

SEQ ID NO: 80538 - RNA, 19 nt, Artificial Sequence
  Description of Artificial Sequence: Synthetic oligonucleotide
  Sense strand starting at position 1030 of SEQ ID NO: 1009
ccuguaucccuaugggaau

SEQ ID NO: 80539 - RNA, 19 nt, Artificial Sequence
  Description of Artificial Sequence: Synthetic oligonucleotide
  Antisense strand to SEQ ID NO: 80458
auucccauagggauacagg

SEQ ID NO: 80540 - RNA, 19 nt, Artificial Sequence
  Description of Artificial Sequence: Synthetic oligonucleotide
  Sense strand starting at position 1152 of SEQ ID NO: 1009
cagcuagaccagugacuuu

SEQ ID NO: 80541 - RNA, 19 nt, Artificial Sequence
  Description of Artificial Sequence: Synthetic oligonucleotide
  Antisense strand to SEQ ID NO: 80460
aaagucacuggucuagcug

SEQ ID NO: 80542 - RNA, 19 nt, Artificial Sequence
  Description of Artificial Sequence: Synthetic oligonucleotide
  Sense strand starting at position 1419 of SEQ ID NO: 1009
ccuccuucucuagggaaga

SEQ ID NO: 80543 - RNA, 19 nt, Artificial Sequence
  Description of Artificial Sequence: Synthetic oligonucleotide
  Antisense strand to SEQ ID NO: 80462
ucuucccuagagaaggagg

SEQ ID NO: 80544 - RNA, 19 nt, Artificial Sequence
  Description of Artificial Sequence: Synthetic oligonucleotide
  Sense strand starting at position 1593 of SEQ ID NO: 1009
gggaaaugcauucgaaaga

SEQ ID NO: 80545 - RNA, 19 nt, Artificial Sequence
  Description of Artificial Sequence: Synthetic oligonucleotide
  Antisense strand to SEQ ID NO: 80464
ucuuucgaaugcauuuccc

SEQ ID NO: 80546 - RNA, 19 nt, Artificial Sequence
  Description of Artificial Sequence: Synthetic oligonucleotide
  Sense strand starting at position 1789 of SEQ ID NO: 1009
cuuuaaacauggucaguaa

SEQ ID NO: 80547 - RNA, 19 nt, Artificial Sequence
  Description of Artificial Sequence: Synthetic oligonucleotide
  Antisense strand to SEQ ID NO: 80466
uuacugaccauguuuaaag

SEQ ID NO: 80548 - RNA, 19 nt, Artificial Sequence
  Description of Artificial Sequence: Synthetic oligonucleotide
  Sense strand starting at position 1792 of SEQ ID NO: 1009
uaaacauggucaguaagga

SEQ ID NO: 80549 - RNA, 19 nt, Artificial Sequence
  Description of Artificial Sequence: Synthetic oligonucleotide
  Antisense strand to SEQ ID NO: 80468
uccuuacugaccauguuua

SEQ ID NO: 80550 - RNA, 19 nt, Artificial Sequence
  Description of Artificial Sequence: Synthetic oligonucleotide
  Sense strand starting at position 1963 of SEQ ID NO: 1009
cgaauuacggagugaggaa

SEQ ID NO: 80551 - RNA, 19 nt, Artificial Sequence
  Description of Artificial Sequence: Synthetic oligonucleotide
  Antisense strand to SEQ ID NO: 80470
uuccucacuccguaauucg

SEQ ID NO: 80552 - RNA, 19 nt, Artificial Sequence
  Description of Artificial Sequence: Synthetic oligonucleotide
  Sense strand starting at position 1983 of SEQ ID NO: 1009
gugggaaauggcuggaaca

SEQ ID NO: 80553 - RNA, 19 nt, Artificial Sequence
  Description of Artificial Sequence: Synthetic oligonucleotide
  Antisense strand to SEQ ID NO: 80472
uguuccagccauuucccac

SEQ ID NO: 80554 - RNA, 19 nt, Artificial Sequence
  Description of Artificial Sequence: Synthetic oligonucleotide
  Sense strand starting at position 2630 of SEQ ID NO: 1009
uagcaaguccucuaggcua

SEQ ID NO: 80555 - RNA, 19 nt, Artificial Sequence
  Description of Artificial Sequence: Synthetic oligonucleotide
  Antisense strand to SEQ ID NO: 80474
uagccuagaggacuugcua

SEQ ID NO: 80556 - RNA, 19 nt, Artificial Sequence
  Description of Artificial Sequence: Synthetic oligonucleotide
  Sense strand starting at position 2633 of SEQ ID NO: 1009
caaguccucuaggcuagaa

SEQ ID NO: 80557 - RNA, 19 nt, Artificial Sequence
  Description of Artificial Sequence: Synthetic oligonucleotide
  Antisense strand to SEQ ID NO: 80476
uucuagccuagaggacuug

SEQ ID NO: 80558 - RNA, 19 nt, Artificial Sequence
  Description of Artificial Sequence: Synthetic oligonucleotide
  Sense strand starting at position 2637 of SEQ ID NO: 1009
uccucuaggcuagaauguu

SEQ ID NO: 80559 - RNA, 19 nt, Artificial Sequence
  Description of Artificial Sequence: Synthetic oligonucleotide
  Antisense strand to SEQ ID NO: 80478
aacauucuagccuagagga

SEQ ID NO: 80560 - RNA, 19 nt, Artificial Sequence
  Description of Artificial Sequence: Synthetic oligonucleotide
  Sense strand starting at position 2746 of SEQ ID NO: 1009
ggcgggaaucucgcgucau

SEQ ID NO: 80561 - RNA, 19 nt, Artificial Sequence
  Description of Artificial Sequence: Synthetic oligonucleotide
  Antisense strand to SEQ ID NO: 80480
augacgcgagauucccgcc

SEQ ID NO: 80562 - RNA, 19 nt, Artificial Sequence
  Description of Artificial Sequence: Synthetic oligonucleotide
  Sense strand starting at position 2879 of SEQ ID NO: 1009
uauagauuccagcacgcau

SEQ ID NO: 80563 - RNA, 19 nt, Artificial Sequence
  Description of Artificial Sequence: Synthetic oligonucleotide
  Antisense strand to SEQ ID NO: 80482
augcgugcuggaaucuaua

SEQ ID NO: 80564 - RNA, 19 nt, Artificial Sequence
  Description of Artificial Sequence: Synthetic oligonucleotide
  Sense strand starting at position 3017 of SEQ ID NO: 1009
ggugcuaagaacuaagguu

SEQ ID NO: 80565 - RNA, 19 nt, Artificial Sequence
  Description of Artificial Sequence: Synthetic oligonucleotide
  Antisense strand to SEQ ID NO: 80484
aaccuuaguucuuagcacc

SEQ ID NO: 80566 - RNA, 19 nt, Artificial Sequence
  Description of Artificial Sequence: Synthetic oligonucleotide
  Sense strand starting at position 3074 of SEQ ID NO: 1009
cucaucuugggucgaggaa

SEQ ID NO: 80567 - RNA, 19 nt, Artificial Sequence
  Description of Artificial Sequence: Synthetic oligonucleotide
  Antisense strand to SEQ ID NO: 80486
uuccucgacccaagaugag

SEQ ID NO: 80568 - RNA, 19 nt, Artificial Sequence
  Description of Artificial Sequence: Synthetic oligonucleotide
  Sense strand starting at position 3075 of SEQ ID NO: 1009
ucaucuugggucgaggaaa

SEQ ID NO: 80569 - RNA, 19 nt, Artificial Sequence
  Description of Artificial Sequence: Synthetic oligonucleotide
  Antisense strand to SEQ ID NO: 80488
uuuccucgacccaagauga

SEQ ID NO: 80570 - RNA, 19 nt, Artificial Sequence
  Description of Artificial Sequence: Synthetic oligonucleotide
  Sense strand starting at position 3169 of SEQ ID NO: 1009
gagaaagugccuugggaac

SEQ ID NO: 80571 - RNA, 19 nt, Artificial Sequence
  Description of Artificial Sequence: Synthetic oligonucleotide
  Antisense strand to SEQ ID NO: 80490
guucccaaggcacuuucuc

SEQ ID NO: 80572 - RNA, 19 nt, Artificial Sequence
  Description of Artificial Sequence: Synthetic oligonucleotide
  Sense strand starting at position 3253 of SEQ ID NO: 1009
ugagcuggcauuugcagaa

SEQ ID NO: 80573 - RNA, 19 nt, Artificial Sequence
  Description of Artificial Sequence: Synthetic oligonucleotide
  Antisense strand to SEQ ID NO: 80492
uucugcaaaugccagcuca

SEQ ID NO: 80574 - RNA, 19 nt, Artificial Sequence
  Description of Artificial Sequence: Synthetic oligonucleotide
  Sense strand starting at position 3434 of SEQ ID NO: 1009
aagagugaauguguacaca

SEQ ID NO: 80575 - RNA, 19 nt, Artificial Sequence
  Description of Artificial Sequence: Synthetic oligonucleotide
  Antisense strand to SEQ ID NO: 80494
uguguacacauucacucuu

SEQ ID NO: 80576 - RNA, 19 nt, Artificial Sequence
  Description of Artificial Sequence: Synthetic oligonucleotide
  Sense strand starting at position 3458 of SEQ ID NO: 1009
ggagaauauguaugugaac

SEQ ID NO: 80577 - RNA, 19 nt, Artificial Sequence
  Description of Artificial Sequence: Synthetic oligonucleotide
  Antisense strand to SEQ ID NO: 80496
guucacauacauauucucc

SEQ ID NO: 80578 - RNA, 19 nt, Artificial Sequence
  Description of Artificial Sequence: Synthetic oligonucleotide
  Sense strand starting at position 3459 of SEQ ID NO: 1009
gagaauauguaugugaaca

SEQ ID NO: 80579 - RNA, 19 nt, Artificial Sequence
  Description of Artificial Sequence: Synthetic oligonucleotide
  Antisense strand to SEQ ID NO: 80498
uguucacauacauauucuc

SEQ ID NO: 80580 - RNA, 19 nt, Artificial Sequence
  Description of Artificial Sequence: Synthetic oligonucleotide
  Sense strand starting at position 3464 of SEQ ID NO: 1009
uauguaugugaacauguga

SEQ ID NO: 80581 - RNA, 19 nt, Artificial Sequence
  Description of Artificial Sequence: Synthetic oligonucleotide
  Antisense strand to SEQ ID NO: 80500
ucacauguucacauacaua

SEQ ID NO: 80582 - RNA, 19 nt, Artificial Sequence
  Description of Artificial Sequence: Synthetic oligonucleotide
  Sense strand starting at position 3676 of SEQ ID NO: 1009
ggagcaagugguggauaua

SEQ ID NO: 80583 - RNA, 19 nt, Artificial Sequence
  Description of Artificial Sequence: Synthetic oligonucleotide
  Antisense strand to SEQ ID NO: 80502
uauauccaccacuugcucc

SEQ ID NO: 80584 - RNA, 19 nt, Artificial Sequence
  Description of Artificial Sequence: Synthetic oligonucleotide
  Sense strand starting at position 3677 of SEQ ID NO: 1009
gagcaagugguggauauaa

SEQ ID NO: 80585 - RNA, 19 nt, Artificial Sequence
  Description of Artificial Sequence: Synthetic oligonucleotide
  Antisense strand to SEQ ID NO: 80504
uuauauccaccacuugcuc

SEQ ID NO: 80586 - RNA, 19 nt, Artificial Sequence
  Description of Artificial Sequence: Synthetic oligonucleotide
  Sense strand starting at position 3679 of SEQ ID NO: 1009
gcaagugguggauauaaga

SEQ ID NO: 80587 - RNA, 19 nt, Artificial Sequence
  Description of Artificial Sequence: Synthetic oligonucleotide
  Antisense strand to SEQ ID NO: 80506
ucuuauauccaccacuugc

SEQ ID NO: 80588 - RNA, 19 nt, Artificial Sequence
  Description of Artificial Sequence: Synthetic oligonucleotide
  Sense strand starting at position 3947 of SEQ ID NO: 1009
ugcuauguacugcaugaga

SEQ ID NO: 80589 - RNA, 19 nt, Artificial Sequence
  Description of Artificial Sequence: Synthetic oligonucleotide
  Antisense strand to SEQ ID NO: 80508
ucucaugcaguacauagca

SEQ ID NO: 80590 - RNA, 19 nt, Artificial Sequence
  Description of Artificial Sequence: Synthetic oligonucleotide
  Sense strand starting at position 3949 of SEQ ID NO: 1009
cuauguacugcaugagaga

SEQ ID NO: 80591 - RNA, 19 nt, Artificial Sequence
  Description of Artificial Sequence: Synthetic oligonucleotide
  Antisense strand to SEQ ID NO: 80510
ucucucaugcaguacauag

SEQ ID NO: 80592 - RNA, 19 nt, Artificial Sequence
  Description of Artificial Sequence: Synthetic oligonucleotide
  Sense strand starting at position 3963 of SEQ ID NO: 1009
agagaaauuugaggacuau

SEQ ID NO: 80593 - RNA, 19 nt, Artificial Sequence
  Description of Artificial Sequence: Synthetic oligonucleotide
  Antisense strand to SEQ ID NO: 80512
auaguccucaaauuucucu

SEQ ID NO: 80594 - RNA, 19 nt, Artificial Sequence
  Description of Artificial Sequence: Synthetic oligonucleotide
  Sense strand starting at position 110 of SEQ ID NO: 1010
ggcagagguccugauuccu

SEQ ID NO: 80595 - RNA, 19 nt, Artificial Sequence
  Description of Artificial Sequence: Synthetic oligonucleotide
  Antisense strand to SEQ ID NO: 80514
aggaaucaggaccucugcc

SEQ ID NO: 80596 - RNA, 19 nt, Artificial Sequence
  Description of Artificial Sequence: Synthetic oligonucleotide
  Sense strand starting at position 372 of SEQ ID NO: 1010
ugcuuacacuguuucugua

SEQ ID NO: 80597 - RNA, 19 nt, Artificial Sequence
  Description of Artificial Sequence: Synthetic oligonucleotide
  Antisense strand to SEQ ID NO: 80516
uacagaaacaguguaagca

SEQ ID NO: 80598 - RNA, 19 nt, Artificial Sequence
  Description of Artificial Sequence: Synthetic oligonucleotide
  Sense strand starting at position 376 of SEQ ID NO: 1010
uacacuguuucuguaugua

SEQ ID NO: 80599 - RNA, 19 nt, Artificial Sequence
  Description of Artificial Sequence: Synthetic oligonucleotide
  Antisense strand to SEQ ID NO: 80518
uacauacagaaacagugua

SEQ ID NO: 80600 - RNA, 19 nt, Artificial Sequence
  Description of Artificial Sequence: Synthetic oligonucleotide
  Sense strand starting at position 379 of SEQ ID NO: 1010
acuguuucuguauguaaag

SEQ ID NO: 80601 - RNA, 19 nt, Artificial Sequence
  Description of Artificial Sequence: Synthetic oligonucleotide
  Antisense strand to SEQ ID NO: 80520
cuuuacauacagaaacagu

SEQ ID NO: 80602 - RNA, 19 nt, Artificial Sequence
  Description of Artificial Sequence: Synthetic oligonucleotide
  Sense strand starting at position 381 of SEQ ID NO: 1010
uguuucuguauguaaagca

SEQ ID NO: 80603 - RNA, 19 nt, Artificial Sequence
  Description of Artificial Sequence: Synthetic oligonucleotide
  Antisense strand to SEQ ID NO: 80522
ugcuuuacauacagaaaca

SEQ ID NO: 80604 - RNA, 19 nt, Artificial Sequence
  Description of Artificial Sequence: Synthetic oligonucleotide
  Sense strand starting at position 743 of SEQ ID NO: 1010
gggagauacugggcuccau

SEQ ID NO: 80605 - RNA, 19 nt, Artificial Sequence
  Description of Artificial Sequence: Synthetic oligonucleotide
  Antisense strand to SEQ ID NO: 80524
auggagcccaguaucuccc

SEQ ID NO: 80606 - RNA, 19 nt, Artificial Sequence
  Description of Artificial Sequence: Synthetic oligonucleotide
  Sense strand starting at position 818 of SEQ ID NO: 1010
ucaaaugggauauguggua

SEQ ID NO: 80607 - RNA, 19 nt, Artificial Sequence
  Description of Artificial Sequence: Synthetic oligonucleotide
  Antisense strand to SEQ ID NO: 80526
uaccacauaucccauuuga

SEQ ID NO: 80608 - RNA, 19 nt, Artificial Sequence
  Description of Artificial Sequence: Synthetic oligonucleotide
  Sense strand starting at position 868 of SEQ ID NO: 1010
gccaaauuauucccuaggu

SEQ ID NO: 80609 - RNA, 19 nt, Artificial Sequence
  Description of Artificial Sequence: Synthetic oligonucleotide
  Antisense strand to SEQ ID NO: 80528
accuagggaauaauuuggc

SEQ ID NO: 80610 - RNA, 19 nt, Artificial Sequence
  Description of Artificial Sequence: Synthetic oligonucleotide
  Sense strand starting at position 872 of SEQ ID NO: 1010
aauuauucccuagguagga

SEQ ID NO: 80611 - RNA, 19 nt, Artificial Sequence
  Description of Artificial Sequence: Synthetic oligonucleotide
  Antisense strand to SEQ ID NO: 80530
uccuaccuagggaauaauu

SEQ ID NO: 80612 - RNA, 19 nt, Artificial Sequence
  Description of Artificial Sequence: Synthetic oligonucleotide
  Sense strand starting at position 873 of SEQ ID NO: 1010
auuauucccuagguaggaa

SEQ ID NO: 80613 - RNA, 19 nt, Artificial Sequence
  Description of Artificial Sequence: Synthetic oligonucleotide
  Antisense strand to SEQ ID NO: 80532
uuccuaccuagggaauaau

SEQ ID NO: 80614 - RNA, 19 nt, Artificial Sequence
  Description of Artificial Sequence: Synthetic oligonucleotide
  Sense strand starting at position 885 of SEQ ID NO: 1010
guaggaaucaagcgagaug

SEQ ID NO: 80615 - RNA, 19 nt, Artificial Sequence
  Description of Artificial Sequence: Synthetic oligonucleotide
  Antisense strand to SEQ ID NO: 80534
caucucgcuugauuccuac

SEQ ID NO: 80616 - RNA, 19 nt, Artificial Sequence
  Description of Artificial Sequence: Synthetic oligonucleotide
  Sense strand starting at position 886 of SEQ ID NO: 1010
uaggaaucaagcgagaugu

SEQ ID NO: 80617 - RNA, 19 nt, Artificial Sequence
  Description of Artificial Sequence: Synthetic oligonucleotide
  Antisense strand to SEQ ID NO: 80536
acaucucgcuugauuccua

SEQ ID NO: 80618 - RNA, 19 nt, Artificial Sequence
  Description of Artificial Sequence: Synthetic oligonucleotide
  Sense strand starting at position 892 of SEQ ID NO: 1010
ucaagcgagauguaaauaa

SEQ ID NO: 80619 - RNA, 19 nt, Artificial Sequence
  Description of Artificial Sequence: Synthetic oligonucleotide
  Antisense strand to SEQ ID NO: 80538
uuauuuacaucucgcuuga

SEQ ID NO: 80620 - RNA, 19 nt, Artificial Sequence
  Description of Artificial Sequence: Synthetic oligonucleotide
  Sense strand starting at position 930 of SEQ ID NO: 1010
acaugucaguccucagaau

SEQ ID NO: 80621 - RNA, 19 nt, Artificial Sequence
  Description of Artificial Sequence: Synthetic oligonucleotide
  Antisense strand to SEQ ID NO: 80540
auucugaggacugacaugu

SEQ ID NO: 80622 - RNA, 19 nt, Artificial Sequence
  Description of Artificial Sequence: Synthetic oligonucleotide
  Sense strand starting at position 931 of SEQ ID NO: 1010
caugucaguccucagaaug

SEQ ID NO: 80623 - RNA, 19 nt, Artificial Sequence
  Description of Artificial Sequence: Synthetic oligonucleotide
  Antisense strand to SEQ ID NO: 80542
cauucugaggacugacaug

SEQ ID NO: 80624 - RNA, 19 nt, Artificial Sequence
  Description of Artificial Sequence: Synthetic oligonucleotide
  Sense strand starting at position 936 of SEQ ID NO: 1010
caguccucagaaugaguga

SEQ ID NO: 80625 - RNA, 19 nt, Artificial Sequence
  Description of Artificial Sequence: Synthetic oligonucleotide
  Antisense strand to SEQ ID NO: 80544
ucacucauucugaggacug

SEQ ID NO: 80626 - RNA, 19 nt, Artificial Sequence
  Description of Artificial Sequence: Synthetic oligonucleotide
  Sense strand starting at position 1056 of SEQ ID NO: 1010
gugacauuagucuacucua

SEQ ID NO: 80627 - RNA, 19 nt, Artificial Sequence
  Description of Artificial Sequence: Synthetic oligonucleotide
  Antisense strand to SEQ ID NO: 80546
uagaguagacuaaugucac

SEQ ID NO: 80628 - RNA, 19 nt, Artificial Sequence
  Description of Artificial Sequence: Synthetic oligonucleotide
  Sense strand starting at position 1339 of SEQ ID NO: 1010
uccaaauggugcccaguua

SEQ ID NO: 80629 - RNA, 19 nt, Artificial Sequence
  Description of Artificial Sequence: Synthetic oligonucleotide
  Antisense strand to SEQ ID NO: 80548
uaacugggcaccauuugga

SEQ ID NO: 80630 - RNA, 19 nt, Artificial Sequence
  Description of Artificial Sequence: Synthetic oligonucleotide
  Sense strand starting at position 1411 of SEQ ID NO: 1010
cucagugagcccuacacuu

SEQ ID NO: 80631 - RNA, 19 nt, Artificial Sequence
  Description of Artificial Sequence: Synthetic oligonucleotide
  Antisense strand to SEQ ID NO: 80550
aaguguagggcucacugag

SEQ ID NO: 80632 - RNA, 19 nt, Artificial Sequence
  Description of Artificial Sequence: Synthetic oligonucleotide
  Sense strand starting at position 1461 of SEQ ID NO: 1010
uaauacuucggaggcuaaa

SEQ ID NO: 80633 - RNA, 19 nt, Artificial Sequence
  Description of Artificial Sequence: Synthetic oligonucleotide
  Antisense strand to SEQ ID NO: 80552
uuuagccuccgaaguauua

SEQ ID NO: 80634 - RNA, 19 nt, Artificial Sequence
  Description of Artificial Sequence: Synthetic oligonucleotide
  Sense strand starting at position 1533 of SEQ ID NO: 1010
aggccuucgcacugaggau

SEQ ID NO: 80635 - RNA, 19 nt, Artificial Sequence
  Description of Artificial Sequence: Synthetic oligonucleotide
  Antisense strand to SEQ ID NO: 80554
auccucagugcgaaggccu

SEQ ID NO: 80636 - RNA, 19 nt, Artificial Sequence
  Description of Artificial Sequence: Synthetic oligonucleotide
  Sense strand starting at position 1537 of SEQ ID NO: 1010
cuucgcacugaggaugaau

SEQ ID NO: 80637 - RNA, 19 nt, Artificial Sequence
  Description of Artificial Sequence: Synthetic oligonucleotide
  Antisense strand to SEQ ID NO: 80556
auucauccucagugcgaag

SEQ ID NO: 80638 - RNA, 19 nt, Artificial Sequence
  Description of Artificial Sequence: Synthetic oligonucleotide
  Sense strand starting at position 1848 of SEQ ID NO: 1010
cgucgaauaccugaaaccu

SEQ ID NO: 80639 - RNA, 19 nt, Artificial Sequence
  Description of Artificial Sequence: Synthetic oligonucleotide
  Antisense strand to SEQ ID NO: 80558
agguuucagguauucgacg

SEQ ID NO: 80640 - RNA, 19 nt, Artificial Sequence
  Description of Artificial Sequence: Synthetic oligonucleotide
  Sense strand starting at position 2035 of SEQ ID NO: 1010
auuggcuuacuuugucaaa

SEQ ID NO: 80641 - RNA, 19 nt, Artificial Sequence
  Description of Artificial Sequence: Synthetic oligonucleotide
  Antisense strand to SEQ ID NO: 80560
uuugacaaaguaagccaau

SEQ ID NO: 80642 - RNA, 19 nt, Artificial Sequence
  Description of Artificial Sequence: Synthetic oligonucleotide
  Sense strand starting at position 2036 of SEQ ID NO: 1010
uuggcuuacuuugucaaac

SEQ ID NO: 80643 - RNA, 19 nt, Artificial Sequence
  Description of Artificial Sequence: Synthetic oligonucleotide
  Antisense strand to SEQ ID NO: 80562
guuugacaaaguaagccaa

SEQ ID NO: 80644 - RNA, 19 nt, Artificial Sequence
  Description of Artificial Sequence: Synthetic oligonucleotide
  Sense strand starting at position 2180 of SEQ ID NO: 1010
cguaguguucuauaacaau

SEQ ID NO: 80645 - RNA, 19 nt, Artificial Sequence
  Description of Artificial Sequence: Synthetic oligonucleotide
  Antisense strand to SEQ ID NO: 80564
auuguuauagaacacuacg

SEQ ID NO: 80646 - RNA, 19 nt, Artificial Sequence
  Description of Artificial Sequence: Synthetic oligonucleotide
  Sense strand starting at position 2320 of SEQ ID NO: 1010
gcauacguaaucuacguuu

SEQ ID NO: 80647 - RNA, 19 nt, Artificial Sequence
  Description of Artificial Sequence: Synthetic oligonucleotide
  Antisense strand to SEQ ID NO: 80566
aaacguagauuacguaugc

SEQ ID NO: 80648 - RNA, 19 nt, Artificial Sequence
  Description of Artificial Sequence: Synthetic oligonucleotide
  Sense strand starting at position 2322 of SEQ ID NO: 1010
auacguaaucuacguuucu

SEQ ID NO: 80649 - RNA, 19 nt, Artificial Sequence
  Description of Artificial Sequence: Synthetic oligonucleotide
  Antisense strand to SEQ ID NO: 80568
agaaacguagauuacguau

SEQ ID NO: 80650 - RNA, 19 nt, Artificial Sequence
  Description of Artificial Sequence: Synthetic oligonucleotide
  Sense strand starting at position 2329 of SEQ ID NO: 1010
aucuacguuucuuuaguga

SEQ ID NO: 80651 - RNA, 19 nt, Artificial Sequence
  Description of Artificial Sequence: Synthetic oligonucleotide
  Antisense strand to SEQ ID NO: 80570
ucacuaaagaaacguagau

SEQ ID NO: 80652 - RNA, 19 nt, Artificial Sequence
  Description of Artificial Sequence: Synthetic oligonucleotide
  Sense strand starting at position 2334 of SEQ ID NO: 1010
cguuucuuuagugaaggaa

SEQ ID NO: 80653 - RNA, 19 nt, Artificial Sequence
  Description of Artificial Sequence: Synthetic oligonucleotide
  Antisense strand to SEQ ID NO: 80572
uuccuucacuaaagaaacg

SEQ ID NO: 80654 - RNA, 19 nt, Artificial Sequence
  Description of Artificial Sequence: Synthetic oligonucleotide
  Sense strand starting at position 2406 of SEQ ID NO: 1010
gccacuagcaguugaaguu

SEQ ID NO: 80655 - RNA, 19 nt, Artificial Sequence
  Description of Artificial Sequence: Synthetic oligonucleotide
  Antisense strand to SEQ ID NO: 80574
aacuucaacugcuaguggc

SEQ ID NO: 80656 - RNA, 19 nt, Artificial Sequence
  Description of Artificial Sequence: Synthetic oligonucleotide
  Sense strand starting at position 2434 of SEQ ID NO: 1010
aagggaguuuaggcaacua

SEQ ID NO: 80657 - RNA, 19 nt, Artificial Sequence
  Description of Artificial Sequence: Synthetic oligonucleotide
  Antisense strand to SEQ ID NO: 80576
uaguugccuaaacucccuu

SEQ ID NO: 80658 - RNA, 19 nt, Artificial Sequence
  Description of Artificial Sequence: Synthetic oligonucleotide
  Sense strand starting at position 2545 of SEQ ID NO: 1010
uuccauguccauggaaaca

SEQ ID NO: 80659 - RNA, 19 nt, Artificial Sequence
  Description of Artificial Sequence: Synthetic oligonucleotide
  Antisense strand to SEQ ID NO: 80578
uguuuccauggacauggaa

SEQ ID NO: 80660 - RNA, 19 nt, Artificial Sequence
  Description of Artificial Sequence: Synthetic oligonucleotide
  Sense strand starting at position 2784 of SEQ ID NO: 1010
acaucuuaagucuaaacgu

SEQ ID NO: 80661 - RNA, 19 nt, Artificial Sequence
  Description of Artificial Sequence: Synthetic oligonucleotide
  Antisense strand to SEQ ID NO: 80580
acguuuagacuuaagaugu

SEQ ID NO: 80662 - RNA, 19 nt, Artificial Sequence
  Description of Artificial Sequence: Synthetic oligonucleotide
  Sense strand starting at position 2799 of SEQ ID NO: 1010
acguauucuggccacguaa

SEQ ID NO: 80663 - RNA, 19 nt, Artificial Sequence
  Description of Artificial Sequence: Synthetic oligonucleotide
  Antisense strand to SEQ ID NO: 80582
uuacguggccagaauacgu

SEQ ID NO: 80664 - RNA, 19 nt, Artificial Sequence
  Description of Artificial Sequence: Synthetic oligonucleotide
  Sense strand starting at position 3205 of SEQ ID NO: 1010
ucagguuugucguccauuu

SEQ ID NO: 80665 - RNA, 19 nt, Artificial Sequence
  Description of Artificial Sequence: Synthetic oligonucleotide
  Antisense strand to SEQ ID NO: 80584
aaauggacgacaaaccuga

SEQ ID NO: 80666 - RNA, 19 nt, Artificial Sequence
  Description of Artificial Sequence: Synthetic oligonucleotide
  Sense strand starting at position 3207 of SEQ ID NO: 1010
agguuugucguccauuuau

SEQ ID NO: 80667 - RNA, 19 nt, Artificial Sequence
  Description of Artificial Sequence: Synthetic oligonucleotide
  Antisense strand to SEQ ID NO: 80586
auaaauggacgacaaaccu

SEQ ID NO: 80668 - RNA, 19 nt, Artificial Sequence
  Description of Artificial Sequence: Synthetic oligonucleotide
  Sense strand starting at position 3213 of SEQ ID NO: 1010
gucguccauuuauuaaauu

SEQ ID NO: 80669 - RNA, 19 nt, Artificial Sequence
  Description of Artificial Sequence: Synthetic oligonucleotide
  Antisense strand to SEQ ID NO: 80588
aauuuaauaaauggacgac

SEQ ID NO: 80670 - RNA, 19 nt, Artificial Sequence
  Description of Artificial Sequence: Synthetic oligonucleotide
  Sense strand starting at position 3319 of SEQ ID NO: 1010
ccaguaaucucuuugucuc

SEQ ID NO: 80671 - RNA, 19 nt, Artificial Sequence
  Description of Artificial Sequence: Synthetic oligonucleotide
  Antisense strand to SEQ ID NO: 80590
gagacaaagagauuacugg

SEQ ID NO: 80672 - RNA, 19 nt, Artificial Sequence
  Description of Artificial Sequence: Synthetic oligonucleotide
  Sense strand starting at position 3322 of SEQ ID NO: 1010
guaaucucuuugucucuua

SEQ ID NO: 80673 - RNA, 19 nt, Artificial Sequence
  Description of Artificial Sequence: Synthetic oligonucleotide
  Antisense strand to SEQ ID NO: 80592
uaagagacaaagagauuac

SEQ ID NO: 80674 - RNA, 19 nt, Artificial Sequence
  Description of Artificial Sequence: Synthetic oligonucleotide
  Sense strand starting at position 3830 of SEQ ID NO: 1011
gccuacaauuugucuaugu

SEQ ID NO: 80675 - RNA, 19 nt, Artificial Sequence
  Description of Artificial Sequence: Synthetic oligonucleotide
  Antisense strand to SEQ ID NO: 80594
acauagacaaauuguaggc

SEQ ID NO: 80676 - RNA, 19 nt, Artificial Sequence
  Description of Artificial Sequence: Synthetic oligonucleotide
  Sense strand starting at position 3658 of SEQ ID NO: 1011
uuaaccagagucugagauu

SEQ ID NO: 80677 - RNA, 19 nt, Artificial Sequence
  Description of Artificial Sequence: Synthetic oligonucleotide
  Antisense strand to SEQ ID NO: 80596
aaucucagacucugguuaa

SEQ ID NO: 80678 - RNA, 19 nt, Artificial Sequence
  Description of Artificial Sequence: Synthetic oligonucleotide
  Sense strand starting at position 3627 of SEQ ID NO: 1011
uugaaagcauggguuagaa

SEQ ID NO: 80679 - RNA, 19 nt, Artificial Sequence
  Description of Artificial Sequence: Synthetic oligonucleotide
  Antisense strand to SEQ ID NO: 80598
uucuaacccaugcuuucaa

SEQ ID NO: 80680 - RNA, 19 nt, Artificial Sequence
  Description of Artificial Sequence: Synthetic oligonucleotide
  Sense strand starting at position 3626 of SEQ ID NO: 1011
uuugaaagcauggguuaga

SEQ ID NO: 80681 - RNA, 19 nt, Artificial Sequence
  Description of Artificial Sequence: Synthetic oligonucleotide
  Antisense strand to SEQ ID NO: 80600
ucuaacccaugcuuucaaa

SEQ ID NO: 80682 - RNA, 19 nt, Artificial Sequence
  Description of Artificial Sequence: Synthetic oligonucleotide
  Sense strand starting at position 3548 of SEQ ID NO: 1011
acaaacuacugagggaaau

SEQ ID NO: 80683 - RNA, 19 nt, Artificial Sequence
  Description of Artificial Sequence: Synthetic oligonucleotide
  Antisense strand to SEQ ID NO: 80602
auuucccucaguaguuugu

SEQ ID NO: 80684 - RNA, 19 nt, Artificial Sequence
  Description of Artificial Sequence: Synthetic oligonucleotide
  Sense strand starting at position 3511 of SEQ ID NO: 1011
acacaauaucagcaugguu

SEQ ID NO: 80685 - RNA, 19 nt, Artificial Sequence
  Description of Artificial Sequence: Synthetic oligonucleotide
  Antisense strand to SEQ ID NO: 80604
aaccaugcugauauugugu

SEQ ID NO: 80686 - RNA, 19 nt, Artificial Sequence
  Description of Artificial Sequence: Synthetic oligonucleotide
  Sense strand starting at position 3488 of SEQ ID NO: 1011
cuuguuagucaugguaaga

SEQ ID NO: 80687 - RNA, 19 nt, Artificial Sequence
  Description of Artificial Sequence: Synthetic oligonucleotide
  Antisense strand to SEQ ID NO: 80606
ucuuaccaugacuaacaag

SEQ ID NO: 80688 - RNA, 19 nt, Artificial Sequence
  Description of Artificial Sequence: Synthetic oligonucleotide
  Sense strand starting at position 3485 of SEQ ID NO: 1011
acacuuguuagucauggua

SEQ ID NO: 80689 - RNA, 19 nt, Artificial Sequence
  Description of Artificial Sequence: Synthetic oligonucleotide
  Antisense strand to SEQ ID NO: 80608
uaccaugacuaacaagugu

SEQ ID NO: 80690 - RNA, 19 nt, Artificial Sequence
  Description of Artificial Sequence: Synthetic oligonucleotide
  Sense strand starting at position 3480 of SEQ ID NO: 1011
auguaacacuuguuaguca

SEQ ID NO: 80691 - RNA, 19 nt, Artificial Sequence
  Description of Artificial Sequence: Synthetic oligonucleotide
  Antisense strand to SEQ ID NO: 80610
ugacuaacaaguguuacau

SEQ ID NO: 80692 - RNA, 19 nt, Artificial Sequence
  Description of Artificial Sequence: Synthetic oligonucleotide
  Sense strand starting at position 2890 of SEQ ID NO: 1011
gauugauugugggaagaug

SEQ ID NO: 80693 - RNA, 19 nt, Artificial Sequence
  Description of Artificial Sequence: Synthetic oligonucleotide
  Antisense strand to SEQ ID NO: 80612
caucuucccacaaucaauc

SEQ ID NO: 80694 - RNA, 19 nt, Artificial Sequence
  Description of Artificial Sequence: Synthetic oligonucleotide
  Sense strand starting at position 2877 of SEQ ID NO: 1011
uguuaaacacugugauuga

SEQ ID NO: 80695 - RNA, 19 nt, Artificial Sequence
  Description of Artificial Sequence: Synthetic oligonucleotide
  Antisense strand to SEQ ID NO: 80614
ucaaucacaguguuuaaca

SEQ ID NO: 80696 - RNA, 19 nt, Artificial Sequence
  Description of Artificial Sequence: Synthetic oligonucleotide
  Sense strand starting at position 2875 of SEQ ID NO: 1011
auuguuaaacacugugauu

SEQ ID NO: 80697 - RNA, 19 nt, Artificial Sequence
  Description of Artificial Sequence: Synthetic oligonucleotide
  Antisense strand to SEQ ID NO: 80616
aaucacaguguuuaacaau

SEQ ID NO: 80698 - RNA, 19 nt, Artificial Sequence
  Description of Artificial Sequence: Synthetic oligonucleotide
  Sense strand starting at position 2861 of SEQ ID NO: 1011
gaguacauacaguaauugu

SEQ ID NO: 80699 - RNA, 19 nt, Artificial Sequence
  Description of Artificial Sequence: Synthetic oligonucleotide
  Antisense strand to SEQ ID NO: 80618
acaauuacuguauguacuc

SEQ ID NO: 80700 - RNA, 19 nt, Artificial Sequence
  Description of Artificial Sequence: Synthetic oligonucleotide
  Sense strand starting at position 2793 of SEQ ID NO: 1011
uuuacuuugccugauacag

SEQ ID NO: 80701 - RNA, 19 nt, Artificial Sequence
  Description of Artificial Sequence: Synthetic oligonucleotide
  Antisense strand to SEQ ID NO: 80620
cuguaucaggcaaaguaaa

SEQ ID NO: 80702 - RNA, 19 nt, Artificial Sequence
  Description of Artificial Sequence: Synthetic oligonucleotide
  Sense strand starting at position 2739 of SEQ ID NO: 1011
ccgauagccuucuuccacu

SEQ ID NO: 80703 - RNA, 19 nt, Artificial Sequence
  Description of Artificial Sequence: Synthetic oligonucleotide
  Antisense strand to SEQ ID NO: 80622
aguggaagaaggcuaucgg

SEQ ID NO: 80704 - RNA, 19 nt, Artificial Sequence
  Description of Artificial Sequence: Synthetic oligonucleotide
  Sense strand starting at position 2712 of SEQ ID NO: 1011
augucacaccuucgagaaa

SEQ ID NO: 80705 - RNA, 19 nt, Artificial Sequence
  Description of Artificial Sequence: Synthetic oligonucleotide
  Antisense strand to SEQ ID NO: 80624
uuucucgaaggugugacau

SEQ ID NO: 80706 - RNA, 19 nt, Artificial Sequence
  Description of Artificial Sequence: Synthetic oligonucleotide
  Sense strand starting at position 2662 of SEQ ID NO: 1011
cucuaacuacagugaugau

SEQ ID NO: 80707 - RNA, 19 nt, Artificial Sequence
  Description of Artificial Sequence: Synthetic oligonucleotide
  Antisense strand to SEQ ID NO: 80626
aucaucacuguaguuagag

SEQ ID NO: 80708 - RNA, 19 nt, Artificial Sequence
  Description of Artificial Sequence: Synthetic oligonucleotide
  Sense strand starting at position 2619 of SEQ ID NO: 1011
gguugacuggcccaaaguu

SEQ ID NO: 80709 - RNA, 19 nt, Artificial Sequence
  Description of Artificial Sequence: Synthetic oligonucleotide
  Antisense strand to SEQ ID NO: 80628
aacuuugggccagucaacc

SEQ ID NO: 80710 - RNA, 19 nt, Artificial Sequence
  Description of Artificial Sequence: Synthetic oligonucleotide
  Sense strand starting at position 2528 of SEQ ID NO: 1011
gcaguauuugccugcugua

SEQ ID NO: 80711 - RNA, 19 nt, Artificial Sequence
  Description of Artificial Sequence: Synthetic oligonucleotide
  Antisense strand to SEQ ID NO: 80630
uacagcaggcaaauacugc

SEQ ID NO: 80712 - RNA, 19 nt, Artificial Sequence
  Description of Artificial Sequence: Synthetic oligonucleotide
  Sense strand starting at position 2499 of SEQ ID NO: 1011
cuucucauuuaguggaaga

SEQ ID NO: 80713 - RNA, 19 nt, Artificial Sequence
  Description of Artificial Sequence: Synthetic oligonucleotide
  Antisense strand to SEQ ID NO: 80632
ucuuccacuaaaugagaag

SEQ ID NO: 80714 - RNA, 19 nt, Artificial Sequence
  Description of Artificial Sequence: Synthetic oligonucleotide
  Sense strand starting at position 2473 of SEQ ID NO: 1011
cguguaaaugugggaguca

SEQ ID NO: 80715 - RNA, 19 nt, Artificial Sequence
  Description of Artificial Sequence: Synthetic oligonucleotide
  Antisense strand to SEQ ID NO: 80634
ugacucccacauuuacacg

SEQ ID NO: 80716 - RNA, 19 nt, Artificial Sequence
  Description of Artificial Sequence: Synthetic oligonucleotide
  Sense strand starting at position 2437 of SEQ ID NO: 1011
ucucuauucgcugacgcaa

SEQ ID NO: 80717 - RNA, 19 nt, Artificial Sequence
  Description of Artificial Sequence: Synthetic oligonucleotide
  Antisense strand to SEQ ID NO: 80636
uugcgucagcgaauagaga

SEQ ID NO: 80718 - RNA, 19 nt, Artificial Sequence
  Description of Artificial Sequence: Synthetic oligonucleotide
  Sense strand starting at position 2369 of SEQ ID NO: 1011
ggucaauccgcuuaacacu

SEQ ID NO: 80719 - RNA, 19 nt, Artificial Sequence
  Description of Artificial Sequence: Synthetic oligonucleotide
  Antisense strand to SEQ ID NO: 80638
aguguuaagcggauugacc

SEQ ID NO: 80720 - RNA, 19 nt, Artificial Sequence
  Description of Artificial Sequence: Synthetic oligonucleotide
  Sense strand starting at position 2356 of SEQ ID NO: 1011
gaugaaagcguugggucaa

SEQ ID NO: 80721 - RNA, 19 nt, Artificial Sequence
  Description of Artificial Sequence: Synthetic oligonucleotide
  Antisense strand to SEQ ID NO: 80640
uugacccaacgcuuucauc

SEQ ID NO: 80722 - RNA, 19 nt, Artificial Sequence
  Description of Artificial Sequence: Synthetic oligonucleotide
  Sense strand starting at position 2355 of SEQ ID NO: 1011
cgaugaaagcguuggguca

SEQ ID NO: 80723 - RNA, 19 nt, Artificial Sequence
  Description of Artificial Sequence: Synthetic oligonucleotide
  Antisense strand to SEQ ID NO: 80642
ugacccaacgcuuucaucg

SEQ ID NO: 80724 - RNA, 19 nt, Artificial Sequence
  Description of Artificial Sequence: Synthetic oligonucleotide
  Sense strand starting at position 2349 of SEQ ID NO: 1011
ggauaucgaugaaagcguu

SEQ ID NO: 80725 - RNA, 19 nt, Artificial Sequence
  Description of Artificial Sequence: Synthetic oligonucleotide
  Antisense strand to SEQ ID NO: 80644
aacgcuuucaucgauaucc

SEQ ID NO: 80726 - RNA, 19 nt, Artificial Sequence
  Description of Artificial Sequence: Synthetic oligonucleotide
  Sense strand starting at position 2346 of SEQ ID NO: 1011
ggaggauaucgaugaaagc

SEQ ID NO: 80727 - RNA, 19 nt, Artificial Sequence
  Description of Artificial Sequence: Synthetic oligonucleotide
  Antisense strand to SEQ ID NO: 80646
gcuuucaucgauauccucc

SEQ ID NO: 80728 - RNA, 19 nt, Artificial Sequence
  Description of Artificial Sequence: Synthetic oligonucleotide
  Sense strand starting at position 2334 of SEQ ID NO: 1011
caaggaaauugaggaggau

SEQ ID NO: 80729 - RNA, 19 nt, Artificial Sequence
  Description of Artificial Sequence: Synthetic oligonucleotide
  Antisense strand to SEQ ID NO: 80648
auccuccucaauuuccuug

SEQ ID NO: 80730 - RNA, 19 nt, Artificial Sequence
  Description of Artificial Sequence: Synthetic oligonucleotide
  Sense strand starting at position 1532 of SEQ ID NO: 1011
auaccagugggccgagauu

SEQ ID NO: 80731 - RNA, 19 nt, Artificial Sequence
  Description of Artificial Sequence: Synthetic oligonucleotide
  Antisense strand to SEQ ID NO: 80650
aaucucggcccacugguau

SEQ ID NO: 80732 - RNA, 19 nt, Artificial Sequence
  Description of Artificial Sequence: Synthetic oligonucleotide
  Sense strand starting at position 1196 of SEQ ID NO: 1011
augcuuuccugagcuugau

SEQ ID NO: 80733 - RNA, 19 nt, Artificial Sequence
  Description of Artificial Sequence: Synthetic oligonucleotide
  Antisense strand to SEQ ID NO: 80652
aucaagcucaggaaagcau

SEQ ID NO: 80734 - RNA, 19 nt, Artificial Sequence
  Description of Artificial Sequence: Synthetic oligonucleotide
  Sense strand starting at position 899 of SEQ ID NO: 1011
guaucauccucaguggaac

SEQ ID NO: 80735 - RNA, 19 nt, Artificial Sequence
  Description of Artificial Sequence: Synthetic oligonucleotide
  Antisense strand to SEQ ID NO: 80654
guuccacugaggaugauac

SEQ ID NO: 80736 - RNA, 19 nt, Artificial Sequence
  Description of Artificial Sequence: Synthetic oligonucleotide
  Sense strand starting at position 897 of SEQ ID NO: 1011
uaguaucauccucagugga

SEQ ID NO: 80737 - RNA, 19 nt, Artificial Sequence
  Description of Artificial Sequence: Synthetic oligonucleotide
  Antisense strand to SEQ ID NO: 80656
uccacugaggaugauacua

SEQ ID NO: 80738 - RNA, 19 nt, Artificial Sequence
  Description of Artificial Sequence: Synthetic oligonucleotide
  Sense strand starting at position 843 of SEQ ID NO: 1011
aauagaugugugcaaauua

SEQ ID NO: 80739 - RNA, 19 nt, Artificial Sequence
  Description of Artificial Sequence: Synthetic oligonucleotide
  Antisense strand to SEQ ID NO: 80658
uaauuugcacacaucuauu

SEQ ID NO: 80740 - RNA, 19 nt, Artificial Sequence
  Description of Artificial Sequence: Synthetic oligonucleotide
  Sense strand starting at position 841 of SEQ ID NO: 1011
caaauagaugugugcaaau

SEQ ID NO: 80741 - RNA, 19 nt, Artificial Sequence
  Description of Artificial Sequence: Synthetic oligonucleotide
  Antisense strand to SEQ ID NO: 80660
auuugcacacaucuauuug

SEQ ID NO: 80742 - RNA, 19 nt, Artificial Sequence
  Description of Artificial Sequence: Synthetic oligonucleotide
  Sense strand starting at position 840 of SEQ ID NO: 1011
ucaaauagaugugugcaaa

SEQ ID NO: 80743 - RNA, 19 nt, Artificial Sequence
  Description of Artificial Sequence: Synthetic oligonucleotide
  Antisense strand to SEQ ID NO: 80662
uuugcacacaucuauuuga

SEQ ID NO: 80744 - RNA, 19 nt, Artificial Sequence
  Description of Artificial Sequence: Synthetic oligonucleotide
  Sense strand starting at position 634 of SEQ ID NO: 1011
ggcuauaacgcucauuucu

SEQ ID NO: 80745 - RNA, 19 nt, Artificial Sequence
  Description of Artificial Sequence: Synthetic oligonucleotide
  Antisense strand to SEQ ID NO: 80664
agaaaugagcguuauagcc

SEQ ID NO: 80746 - RNA, 19 nt, Artificial Sequence
  Description of Artificial Sequence: Synthetic oligonucleotide
  Sense strand starting at position 444 of SEQ ID NO: 1011
cugauaagaugcucuccau

SEQ ID NO: 80747 - RNA, 19 nt, Artificial Sequence
  Description of Artificial Sequence: Synthetic oligonucleotide
  Antisense strand to SEQ ID NO: 80666
auggagagcaucuuaucag

SEQ ID NO: 80748 - RNA, 19 nt, Artificial Sequence
  Description of Artificial Sequence: Synthetic oligonucleotide
  Sense strand starting at position 434 of SEQ ID NO: 1011
guugccaggccugauaaga

SEQ ID NO: 80749 - RNA, 19 nt, Artificial Sequence
  Description of Artificial Sequence: Synthetic oligonucleotide
  Antisense strand to SEQ ID NO: 80668
ucuuaucaggccuggcaac

SEQ ID NO: 80750 - RNA, 19 nt, Artificial Sequence
  Description of Artificial Sequence: Synthetic oligonucleotide
  Sense strand starting at position 118 of SEQ ID NO: 1011
uuucuuuaggaaugcagua

SEQ ID NO: 80751 - RNA, 19 nt, Artificial Sequence
  Description of Artificial Sequence: Synthetic oligonucleotide
  Antisense strand to SEQ ID NO: 80670
uacugcauuccuaaagaaa

SEQ ID NO: 80752 - RNA, 19 nt, Artificial Sequence
  Description of Artificial Sequence: Synthetic oligonucleotide
  Sense strand starting at position 68 of SEQ ID NO: 1011
agauaaagaucggucucaa

SEQ ID NO: 80753 - RNA, 19 nt, Artificial Sequence
  Description of Artificial Sequence: Synthetic oligonucleotide
  Antisense strand to SEQ ID NO: 80672
uugagaccgaucuuuaucu

SEQ ID NO: 80754 - RNA, 19 nt, Artificial Sequence
  Description of Artificial Sequence: Synthetic oligonucleotide
  Sense strand starting at position 526 of SEQ ID NO: 1013
gauugagaucccugcacau

SEQ ID NO: 80755 - RNA, 19 nt, Artificial Sequence
  Description of Artificial Sequence: Synthetic oligonucleotide
  Antisense strand to SEQ ID NO: 80674
augugcagggaucucaauc

SEQ ID NO: 80756 - RNA, 19 nt, Artificial Sequence
  Description of Artificial Sequence: Synthetic oligonucleotide
  Sense strand starting at position 580 of SEQ ID NO: 1013
gcuggccugacuugucaua

SEQ ID NO: 80757 - RNA, 19 nt, Artificial Sequence
  Description of Artificial Sequence: Synthetic oligonucleotide
  Antisense strand to SEQ ID NO: 80676
uaugacaagucaggccagc

SEQ ID NO: 80758 - RNA, 19 nt, Artificial Sequence
  Description of Artificial Sequence: Synthetic oligonucleotide
  Sense strand starting at position 582 of SEQ ID NO: 1013
uggccugacuugucauaga

SEQ ID NO: 80759 - RNA, 19 nt, Artificial Sequence
  Description of Artificial Sequence: Synthetic oligonucleotide
  Antisense strand to SEQ ID NO: 80678
ucuaugacaagucaggcca

SEQ ID NO: 80760 - RNA, 19 nt, Artificial Sequence
  Description of Artificial Sequence: Synthetic oligonucleotide
  Sense strand starting at position 585 of SEQ ID NO: 1013
ccugacuugucauagaaga

SEQ ID NO: 80761 - RNA, 19 nt, Artificial Sequence
  Description of Artificial Sequence: Synthetic oligonucleotide
  Antisense strand to SEQ ID NO: 80680
ucuucuaugacaagucagg

SEQ ID NO: 80762 - RNA, 19 nt, Artificial Sequence
  Description of Artificial Sequence: Synthetic oligonucleotide
  Sense strand starting at position 637 of SEQ ID NO: 1013
ugguguacuggcugagaac

SEQ ID NO: 80763 - RNA, 19 nt, Artificial Sequence
  Description of Artificial Sequence: Synthetic oligonucleotide
  Antisense strand to SEQ ID NO: 80682
guucucagccaguacacca

SEQ ID NO: 80764 - RNA, 19 nt, Artificial Sequence
  Description of Artificial Sequence: Synthetic oligonucleotide
  Sense strand starting at position 638 of SEQ ID NO: 1013
gguguacuggcugagaaca

SEQ ID NO: 80765 - RNA, 19 nt, Artificial Sequence
  Description of Artificial Sequence: Synthetic oligonucleotide
  Antisense strand to SEQ ID NO: 80684
uguucucagccaguacacc

SEQ ID NO: 80766 - RNA, 19 nt, Artificial Sequence
  Description of Artificial Sequence: Synthetic oligonucleotide
  Sense strand starting at position 695 of SEQ ID NO: 1013
ccgccaauugucuggauuc

SEQ ID NO: 80767 - RNA, 19 nt, Artificial Sequence
  Description of Artificial Sequence: Synthetic oligonucleotide
  Antisense strand to SEQ ID NO: 80686
gaauccagacaauuggcgg

SEQ ID NO: 80768 - RNA, 19 nt, Artificial Sequence
  Description of Artificial Sequence: Synthetic oligonucleotide
  Sense strand starting at position 783 of SEQ ID NO: 1013
ccagaaugucauggaaacu

SEQ ID NO: 80769 - RNA, 19 nt, Artificial Sequence
  Description of Artificial Sequence: Synthetic oligonucleotide
  Antisense strand to SEQ ID NO: 80688
aguuuccaugacauucugg

SEQ ID NO: 80770 - RNA, 19 nt, Artificial Sequence
  Description of Artificial Sequence: Synthetic oligonucleotide
  Sense strand starting at position 797 of SEQ ID NO: 1013
aaacucuagugauagugaa

SEQ ID NO: 80771 - RNA, 19 nt, Artificial Sequence
  Description of Artificial Sequence: Synthetic oligonucleotide
  Antisense strand to SEQ ID NO: 80690
uucacuaucacuagaguuu

SEQ ID NO: 80772 - RNA, 19 nt, Artificial Sequence
  Description of Artificial Sequence: Synthetic oligonucleotide
  Sense strand starting at position 877 of SEQ ID NO: 1013
uugugauggcugcaaugaa

SEQ ID NO: 80773 - RNA, 19 nt, Artificial Sequence
  Description of Artificial Sequence: Synthetic oligonucleotide
  Antisense strand to SEQ ID NO: 80692
uucauugcagccaucacaa

SEQ ID NO: 80774 - RNA, 19 nt, Artificial Sequence
  Description of Artificial Sequence: Synthetic oligonucleotide
  Sense strand starting at position 932 of SEQ ID NO: 1013
cguuuccucucaguuuaca

SEQ ID NO: 80775 - RNA, 19 nt, Artificial Sequence
  Description of Artificial Sequence: Synthetic oligonucleotide
  Antisense strand to SEQ ID NO: 80694
uguaaacugagaggaaacg

SEQ ID NO: 80776 - RNA, 19 nt, Artificial Sequence
  Description of Artificial Sequence: Synthetic oligonucleotide
  Sense strand starting at position 990 of SEQ ID NO: 1013
guuuccaagccuuguaaga

SEQ ID NO: 80777 - RNA, 19 nt, Artificial Sequence
  Description of Artificial Sequence: Synthetic oligonucleotide
  Antisense strand to SEQ ID NO: 80696
ucuuacaaggcuuggaaac

SEQ ID NO: 80778 - RNA, 19 nt, Artificial Sequence
  Description of Artificial Sequence: Synthetic oligonucleotide
  Sense strand starting at position 1063 of SEQ ID NO: 1013
cuggcaaaugacugucaca

SEQ ID NO: 80779 - RNA, 19 nt, Artificial Sequence
  Description of Artificial Sequence: Synthetic oligonucleotide
  Antisense strand to SEQ ID NO: 80698
ugugacagucauuugccag

SEQ ID NO: 80780 - RNA, 19 nt, Artificial Sequence
  Description of Artificial Sequence: Synthetic oligonucleotide
  Sense strand starting at position 1369 of SEQ ID NO: 1013
ccucuagucccagaguaga

SEQ ID NO: 80781 - RNA, 19 nt, Artificial Sequence
  Description of Artificial Sequence: Synthetic oligonucleotide
  Antisense strand to SEQ ID NO: 80700
ucuacucugggacuagagg

SEQ ID NO: 80782 - RNA, 19 nt, Artificial Sequence
  Description of Artificial Sequence: Synthetic oligonucleotide
  Sense strand starting at position 1536 of SEQ ID NO: 1013
cucggaagaucaggauuga

SEQ ID NO: 80783 - RNA, 19 nt, Artificial Sequence
  Description of Artificial Sequence: Synthetic oligonucleotide
  Antisense strand to SEQ ID NO: 80702
ucaauccugaucuuccgag

SEQ ID NO: 80784 - RNA, 19 nt, Artificial Sequence
  Description of Artificial Sequence: Synthetic oligonucleotide
  Sense strand starting at position 1707 of SEQ ID NO: 1013
agaagaacaucacagaacu

SEQ ID NO: 80785 - RNA, 19 nt, Artificial Sequence
  Description of Artificial Sequence: Synthetic oligonucleotide
  Antisense strand to SEQ ID NO: 80704
aguucugugauguucuucu

SEQ ID NO: 80786 - RNA, 19 nt, Artificial Sequence
  Description of Artificial Sequence: Synthetic oligonucleotide
  Sense strand starting at position 1885 of SEQ ID NO: 1013
caguguugcgcucccgaga

SEQ ID NO: 80787 - RNA, 19 nt, Artificial Sequence
  Description of Artificial Sequence: Synthetic oligonucleotide
  Antisense strand to SEQ ID NO: 80706
ucucgggagcgcaacacug

SEQ ID NO: 80788 - RNA, 19 nt, Artificial Sequence
  Description of Artificial Sequence: Synthetic oligonucleotide
  Sense strand starting at position 2096 of SEQ ID NO: 1013
ccguuucuuccgggacgga

SEQ ID NO: 80789 - RNA, 19 nt, Artificial Sequence
  Description of Artificial Sequence: Synthetic oligonucleotide
  Antisense strand to SEQ ID NO: 80708
uccgucccggaagaaacgg

SEQ ID NO: 80790 - RNA, 19 nt, Artificial Sequence
  Description of Artificial Sequence: Synthetic oligonucleotide
  Sense strand starting at position 2097 of SEQ ID NO: 1013
cguuucuuccgggacggau

SEQ ID NO: 80791 - RNA, 19 nt, Artificial Sequence
  Description of Artificial Sequence: Synthetic oligonucleotide
  Antisense strand to SEQ ID NO: 80710
auccgucccggaagaaacg

SEQ ID NO: 80792 - RNA, 19 nt, Artificial Sequence
  Description of Artificial Sequence: Synthetic oligonucleotide
  Sense strand starting at position 2150 of SEQ ID NO: 1013
gguaacuagggccgaguua

SEQ ID NO: 80793 - RNA, 19 nt, Artificial Sequence
  Description of Artificial Sequence: Synthetic oligonucleotide
  Antisense strand to SEQ ID NO: 80712
uaacucggcccuaguuacc

SEQ ID NO: 80794 - RNA, 19 nt, Artificial Sequence
  Description of Artificial Sequence: Synthetic oligonucleotide
  Sense strand starting at position 2309 of SEQ ID NO: 1013
ccggcucugcaugauugua

SEQ ID NO: 80795 - RNA, 19 nt, Artificial Sequence
  Description of Artificial Sequence: Synthetic oligonucleotide
  Antisense strand to SEQ ID NO: 80714
uacaaucaugcagagccgg

SEQ ID NO: 80796 - RNA, 19 nt, Artificial Sequence
  Description of Artificial Sequence: Synthetic oligonucleotide
  Sense strand starting at position 2311 of SEQ ID NO: 1013
ggcucugcaugauuguauu

SEQ ID NO: 80797 - RNA, 19 nt, Artificial Sequence
  Description of Artificial Sequence: Synthetic oligonucleotide
  Antisense strand to SEQ ID NO: 80716
aauacaaucaugcagagcc

SEQ ID NO: 80798 - RNA, 19 nt, Artificial Sequence
  Description of Artificial Sequence: Synthetic oligonucleotide
  Sense strand starting at position 2322 of SEQ ID NO: 1013
auuguauuaucccaagaga

SEQ ID NO: 80799 - RNA, 19 nt, Artificial Sequence
  Description of Artificial Sequence: Synthetic oligonucleotide
  Antisense strand to SEQ ID NO: 80718
ucucuugggauaauacaau

SEQ ID NO: 80800 - RNA, 19 nt, Artificial Sequence
  Description of Artificial Sequence: Synthetic oligonucleotide
  Sense strand starting at position 2395 of SEQ ID NO: 1013
augcaagaauaauugugaa

SEQ ID NO: 80801 - RNA, 19 nt, Artificial Sequence
  Description of Artificial Sequence: Synthetic oligonucleotide
  Antisense strand to SEQ ID NO: 80720
uucacaauuauucuugcau

SEQ ID NO: 80802 - RNA, 19 nt, Artificial Sequence
  Description of Artificial Sequence: Synthetic oligonucleotide
  Sense strand starting at position 2421 of SEQ ID NO: 1013
guacuauuccaaggcagag

SEQ ID NO: 80803 - RNA, 19 nt, Artificial Sequence
  Description of Artificial Sequence: Synthetic oligonucleotide
  Antisense strand to SEQ ID NO: 80722
cucugccuuggaauaguac

SEQ ID NO: 80804 - RNA, 19 nt, Artificial Sequence
  Description of Artificial Sequence: Synthetic oligonucleotide
  Sense strand starting at position 2455 of SEQ ID NO: 1013
ugaaccucacgguaacuau

SEQ ID NO: 80805 - RNA, 19 nt, Artificial Sequence
  Description of Artificial Sequence: Synthetic oligonucleotide
  Antisense strand to SEQ ID NO: 80724
auaguuaccgugagguuca

SEQ ID NO: 80806 - RNA, 19 nt, Artificial Sequence
  Description of Artificial Sequence: Synthetic oligonucleotide
  Sense strand starting at position 2480 of SEQ ID NO: 1013
aggucugugccucguauaa

SEQ ID NO: 80807 - RNA, 19 nt, Artificial Sequence
  Description of Artificial Sequence: Synthetic oligonucleotide
  Antisense strand to SEQ ID NO: 80726
uuauacgaggcacagaccu

SEQ ID NO: 80808 - RNA, 19 nt, Artificial Sequence
  Description of Artificial Sequence: Synthetic oligonucleotide
  Sense strand starting at position 2484 of SEQ ID NO: 1013
cugugccucguauaaauau

SEQ ID NO: 80809 - RNA, 19 nt, Artificial Sequence
  Description of Artificial Sequence: Synthetic oligonucleotide
  Antisense strand to SEQ ID NO: 80728
auauuuauacgaggcacag

SEQ ID NO: 80810 - RNA, 19 nt, Artificial Sequence
  Description of Artificial Sequence: Synthetic oligonucleotide
  Sense strand starting at position 2538 of SEQ ID NO: 1013
ggaggaaacuauuauccca

SEQ ID NO: 80811 - RNA, 19 nt, Artificial Sequence
  Description of Artificial Sequence: Synthetic oligonucleotide
  Antisense strand to SEQ ID NO: 80730
ugggauaauaguuuccucc

SEQ ID NO: 80812 - RNA, 19 nt, Artificial Sequence
  Description of Artificial Sequence: Synthetic oligonucleotide
  Sense strand starting at position 2923 of SEQ ID NO: 1013
gucugaggucgcagaguga

SEQ ID NO: 80813 - RNA, 19 nt, Artificial Sequence
  Description of Artificial Sequence: Synthetic oligonucleotide
  Antisense strand to SEQ ID NO: 80732
ucacucugcgaccucagac

SEQ ID NO: 80814 - RNA, 19 nt, Artificial Sequence
  Description of Artificial Sequence: Synthetic oligonucleotide
  Sense strand starting at position 3049 of SEQ ID NO: 1013
uaagcaguguguuuacuau

SEQ ID NO: 80815 - RNA, 19 nt, Artificial Sequence
  Description of Artificial Sequence: Synthetic oligonucleotide
  Antisense strand to SEQ ID NO: 80734
auaguaaacacacugcuua

SEQ ID NO: 80816 - RNA, 19 nt, Artificial Sequence
  Description of Artificial Sequence: Synthetic oligonucleotide
  Sense strand starting at position 3055 of SEQ ID NO: 1013
guguguuuacuaugaaaua

SEQ ID NO: 80817 - RNA, 19 nt, Artificial Sequence
  Description of Artificial Sequence: Synthetic oligonucleotide
  Antisense strand to SEQ ID NO: 80736
uauuucauaguaaacacac

SEQ ID NO: 80818 - RNA, 19 nt, Artificial Sequence
  Description of Artificial Sequence: Synthetic oligonucleotide
  Sense strand starting at position 3079 of SEQ ID NO: 1013
agacaaguccucuguuucu

SEQ ID NO: 80819 - RNA, 19 nt, Artificial Sequence
  Description of Artificial Sequence: Synthetic oligonucleotide
  Antisense strand to SEQ ID NO: 80738
agaaacagaggacuugucu

SEQ ID NO: 80820 - RNA, 19 nt, Artificial Sequence
  Description of Artificial Sequence: Synthetic oligonucleotide
  Sense strand starting at position 3127 of SEQ ID NO: 1013
agaaauucuugagucaccu

SEQ ID NO: 80821 - RNA, 19 nt, Artificial Sequence
  Description of Artificial Sequence: Synthetic oligonucleotide
  Antisense strand to SEQ ID NO: 80740
aggugacucaagaauuucu

SEQ ID NO: 80822 - RNA, 19 nt, Artificial Sequence
  Description of Artificial Sequence: Synthetic oligonucleotide
  Sense strand starting at position 3175 of SEQ ID NO: 1013
acuaucugacucuggaaca

SEQ ID NO: 80823 - RNA, 19 nt, Artificial Sequence
  Description of Artificial Sequence: Synthetic oligonucleotide
  Antisense strand to SEQ ID NO: 80742
uguuccagagucagauagu

SEQ ID NO: 80824 - RNA, 19 nt, Artificial Sequence
  Description of Artificial Sequence: Synthetic oligonucleotide
  Sense strand starting at position 3268 of SEQ ID NO: 1013
ugugcaaggacaugauaua

SEQ ID NO: 80825 - RNA, 19 nt, Artificial Sequence
  Description of Artificial Sequence: Synthetic oligonucleotide
  Antisense strand to SEQ ID NO: 80744
uauaucauguccuugcaca

SEQ ID NO: 80826 - RNA, 19 nt, Artificial Sequence
  Description of Artificial Sequence: Synthetic oligonucleotide
  Sense strand starting at position 3371 of SEQ ID NO: 1013
cauacuuggccucgucuga

SEQ ID NO: 80827 - RNA, 19 nt, Artificial Sequence
  Description of Artificial Sequence: Synthetic oligonucleotide
  Antisense strand to SEQ ID NO: 80746
ucagacgaggccaaguaug

SEQ ID NO: 80828 - RNA, 19 nt, Artificial Sequence
  Description of Artificial Sequence: Synthetic oligonucleotide
  Sense strand starting at position 3378 of SEQ ID NO: 1013
ggccucgucugauccucaa

SEQ ID NO: 80829 - RNA, 19 nt, Artificial Sequence
  Description of Artificial Sequence: Synthetic oligonucleotide
  Antisense strand to SEQ ID NO: 80748
uugaggaucagacgaggcc

SEQ ID NO: 80830 - RNA, 19 nt, Artificial Sequence
  Description of Artificial Sequence: Synthetic oligonucleotide
  Sense strand starting at position 3403 of SEQ ID NO: 1013
uggcuuauugaagaaggca

SEQ ID NO: 80831 - RNA, 19 nt, Artificial Sequence
  Description of Artificial Sequence: Synthetic oligonucleotide
  Antisense strand to SEQ ID NO: 80750
ugccuucuucaauaagcca

SEQ ID NO: 80832 - RNA, 19 nt, Artificial Sequence
  Description of Artificial Sequence: Synthetic oligonucleotide
  Sense strand starting at position 3671 of SEQ ID NO: 1013
cccucuaaccugggaggua

SEQ ID NO: 80833 - RNA, 19 nt, Artificial Sequence
  Description of Artificial Sequence: Synthetic oligonucleotide
  Antisense strand to SEQ ID NO: 80752
uaccucccagguuagaggg

SEQ ID NO: 80834 - RNA, 19 nt, Artificial Sequence
  Description of Artificial Sequence: Synthetic oligonucleotide
  Sense strand starting at position 9 of SEQ ID NO: 1012
ccagcaugcagcuaugagu

SEQ ID NO: 80835 - RNA, 19 nt, Artificial Sequence
  Description of Artificial Sequence: Synthetic oligonucleotide
  Antisense strand to SEQ ID NO: 80754
acucauagcugcaugcugg

SEQ ID NO: 80836 - RNA, 19 nt, Artificial Sequence
  Description of Artificial Sequence: Synthetic oligonucleotide
  Sense strand starting at position 390 of SEQ ID NO: 1012
uagaucauguggcuuguua

SEQ ID NO: 80837 - RNA, 19 nt, Artificial Sequence
  Description of Artificial Sequence: Synthetic oligonucleotide
  Antisense strand to SEQ ID NO: 80756
uaacaagccacaugaucua

SEQ ID NO: 80838 - RNA, 19 nt, Artificial Sequence
  Description of Artificial Sequence: Synthetic oligonucleotide
  Sense strand starting at position 449 of SEQ ID NO: 1012
aggcucaagaucuggacua

SEQ ID NO: 80839 - RNA, 19 nt, Artificial Sequence
  Description of Artificial Sequence: Synthetic oligonucleotide
  Antisense strand to SEQ ID NO: 80758
uaguccagaucuugagccu

SEQ ID NO: 80840 - RNA, 19 nt, Artificial Sequence
  Description of Artificial Sequence: Synthetic oligonucleotide
  Sense strand starting at position 451 of SEQ ID NO: 1012
gcucaagaucuggacuagu

SEQ ID NO: 80841 - RNA, 19 nt, Artificial Sequence
  Description of Artificial Sequence: Synthetic oligonucleotide
  Antisense strand to SEQ ID NO: 80760
acuaguccagaucuugagc

SEQ ID NO: 80842 - RNA, 19 nt, Artificial Sequence
  Description of Artificial Sequence: Synthetic oligonucleotide
  Sense strand starting at position 459 of SEQ ID NO: 1012
ucuggacuaguauguuaaa

SEQ ID NO: 80843 - RNA, 19 nt, Artificial Sequence
  Description of Artificial Sequence: Synthetic oligonucleotide
  Antisense strand to SEQ ID NO: 80762
uuuaacauacuaguccaga

SEQ ID NO: 80844 - RNA, 19 nt, Artificial Sequence
  Description of Artificial Sequence: Synthetic oligonucleotide
  Sense strand starting at position 472 of SEQ ID NO: 1012
guuaaacugucucuucuca

SEQ ID NO: 80845 - RNA, 19 nt, Artificial Sequence
  Description of Artificial Sequence: Synthetic oligonucleotide
  Antisense strand to SEQ ID NO: 80764
ugagaagagacaguuuaac

SEQ ID NO: 80846 - RNA, 19 nt, Artificial Sequence
  Description of Artificial Sequence: Synthetic oligonucleotide
  Sense strand starting at position 512 of SEQ ID NO: 1012
ugaggauuaugaguuagua

SEQ ID NO: 80847 - RNA, 19 nt, Artificial Sequence
  Description of Artificial Sequence: Synthetic oligonucleotide
  Antisense strand to SEQ ID NO: 80766
uacuaacucauaauccuca

SEQ ID NO: 80848 - RNA, 19 nt, Artificial Sequence
  Description of Artificial Sequence: Synthetic oligonucleotide
  Sense strand starting at position 578 of SEQ ID NO: 1012
ugugauaauuauucuagga

SEQ ID NO: 80849 - RNA, 19 nt, Artificial Sequence
  Description of Artificial Sequence: Synthetic oligonucleotide
  Antisense strand to SEQ ID NO: 80768
uccuagaauaauuaucaca

SEQ ID NO: 80850 - RNA, 19 nt, Artificial Sequence
  Description of Artificial Sequence: Synthetic oligonucleotide
  Sense strand starting at position 580 of SEQ ID NO: 1012
ugauaauuauucuaggaga

SEQ ID NO: 80851 - RNA, 19 nt, Artificial Sequence
  Description of Artificial Sequence: Synthetic oligonucleotide
  Antisense strand to SEQ ID NO: 80770
ucuccuagaauaauuauca

SEQ ID NO: 80852 - RNA, 19 nt, Artificial Sequence
  Description of Artificial Sequence: Synthetic oligonucleotide
  Sense strand starting at position 1047 of SEQ ID NO: 1012
aggacucaguaaguacuua

SEQ ID NO: 80853 - RNA, 19 nt, Artificial Sequence
  Description of Artificial Sequence: Synthetic oligonucleotide
  Antisense strand to SEQ ID NO: 80772
uaaguacuuacugaguccu

SEQ ID NO: 80854 - RNA, 19 nt, Artificial Sequence
  Description of Artificial Sequence: Synthetic oligonucleotide
  Sense strand starting at position 1302 of SEQ ID NO: 1012
cgcuuuggucaacaaguua

SEQ ID NO: 80855 - RNA, 19 nt, Artificial Sequence
  Description of Artificial Sequence: Synthetic oligonucleotide
  Antisense strand to SEQ ID NO: 80774
uaacuuguugaccaaagcg

SEQ ID NO: 80856 - RNA, 19 nt, Artificial Sequence
  Description of Artificial Sequence: Synthetic oligonucleotide
  Sense strand starting at position 1370 of SEQ ID NO: 1012
ggccuuugcagagggagau

SEQ ID NO: 80857 - RNA, 19 nt, Artificial Sequence
  Description of Artificial Sequence: Synthetic oligonucleotide
  Antisense strand to SEQ ID NO: 80776
aucucccucugcaaaggcc

SEQ ID NO: 80858 - RNA, 19 nt, Artificial Sequence
  Description of Artificial Sequence: Synthetic oligonucleotide
  Sense strand starting at position 1489 of SEQ ID NO: 1012
ggaucuacaguuugcuaua

SEQ ID NO: 80859 - RNA, 19 nt, Artificial Sequence
  Description of Artificial Sequence: Synthetic oligonucleotide
  Antisense strand to SEQ ID NO: 80778
uauagcaaacuguagaucc

SEQ ID NO: 80860 - RNA, 19 nt, Artificial Sequence
  Description of Artificial Sequence: Synthetic oligonucleotide
  Sense strand starting at position 1540 of SEQ ID NO: 1012
uugaguguggucuauccuu

SEQ ID NO: 80861 - RNA, 19 nt, Artificial Sequence
  Description of Artificial Sequence: Synthetic oligonucleotide
  Antisense strand to SEQ ID NO: 80780
aaggauagaccacacucaa

SEQ ID NO: 80862 - RNA, 19 nt, Artificial Sequence
  Description of Artificial Sequence: Synthetic oligonucleotide
  Sense strand starting at position 1546 of SEQ ID NO: 1012
guggucuauccuuguugga

SEQ ID NO: 80863 - RNA, 19 nt, Artificial Sequence
  Description of Artificial Sequence: Synthetic oligonucleotide
  Antisense strand to SEQ ID NO: 80782
uccaacaaggauagaccac

SEQ ID NO: 80864 - RNA, 19 nt, Artificial Sequence
  Description of Artificial Sequence: Synthetic oligonucleotide
  Sense strand starting at position 1548 of SEQ ID NO: 1012
ggucuauccuuguuggaag

SEQ ID NO: 80865 - RNA, 19 nt, Artificial Sequence
  Description of Artificial Sequence: Synthetic oligonucleotide
  Antisense strand to SEQ ID NO: 80784
cuuccaacaaggauagacc

SEQ ID NO: 80866 - RNA, 19 nt, Artificial Sequence
  Description of Artificial Sequence: Synthetic oligonucleotide
  Sense strand starting at position 1738 of SEQ ID NO: 1012
uccucuuuccuuggagaca

SEQ ID NO: 80867 - RNA, 19 nt, Artificial Sequence
  Description of Artificial Sequence: Synthetic oligonucleotide
  Antisense strand to SEQ ID NO: 80786
ugucuccaaggaaagagga

SEQ ID NO: 80868 - RNA, 19 nt, Artificial Sequence
  Description of Artificial Sequence: Synthetic oligonucleotide
  Sense strand starting at position 2118 of SEQ ID NO: 1012
cugggcuuccuauaccaga

SEQ ID NO: 80869 - RNA, 19 nt, Artificial Sequence
  Description of Artificial Sequence: Synthetic oligonucleotide
  Antisense strand to SEQ ID NO: 80788
ucugguauaggaagcccag

SEQ ID NO: 80870 - RNA, 19 nt, Artificial Sequence
  Description of Artificial Sequence: Synthetic oligonucleotide
  Sense strand starting at position 2237 of SEQ ID NO: 1012
ggaagaauauaaugcauuu

SEQ ID NO: 80871 - RNA, 19 nt, Artificial Sequence
  Description of Artificial Sequence: Synthetic oligonucleotide
  Antisense strand to SEQ ID NO: 80790
aaaugcauuauauucuucc

SEQ ID NO: 80872 - RNA, 19 nt, Artificial Sequence
  Description of Artificial Sequence: Synthetic oligonucleotide
  Sense strand starting at position 2344 of SEQ ID NO: 1012
accuucuccugguuuaaug

SEQ ID NO: 80873 - RNA, 19 nt, Artificial Sequence
  Description of Artificial Sequence: Synthetic oligonucleotide
  Antisense strand to SEQ ID NO: 80792
cauuaaaccaggagaaggu

SEQ ID NO: 80874 - RNA, 19 nt, Artificial Sequence
  Description of Artificial Sequence: Synthetic oligonucleotide
  Sense strand starting at position 2352 of SEQ ID NO: 1012
cugguuuaauggagggaga

SEQ ID NO: 80875 - RNA, 19 nt, Artificial Sequence
  Description of Artificial Sequence: Synthetic oligonucleotide
  Antisense strand to SEQ ID NO: 80794
ucucccuccauuaaaccag

SEQ ID NO: 80876 - RNA, 19 nt, Artificial Sequence
  Description of Artificial Sequence: Synthetic oligonucleotide
  Sense strand starting at position 2412 of SEQ ID NO: 1012
gaaacugagccuuggauag

SEQ ID NO: 80877 - RNA, 19 nt, Artificial Sequence
  Description of Artificial Sequence: Synthetic oligonucleotide
  Antisense strand to SEQ ID NO: 80796
cuauccaaggcucaguuuc

SEQ ID NO: 80878 - RNA, 19 nt, Artificial Sequence
  Description of Artificial Sequence: Synthetic oligonucleotide
  Sense strand starting at position 2430 of SEQ ID NO: 1012
gguuaagcaguuugacauu

SEQ ID NO: 80879 - RNA, 19 nt, Artificial Sequence
  Description of Artificial Sequence: Synthetic oligonucleotide
  Antisense strand to SEQ ID NO: 80798
aaugucaaacugcuuaacc

SEQ ID NO: 80880 - RNA, 19 nt, Artificial Sequence
  Description of Artificial Sequence: Synthetic oligonucleotide
  Sense strand starting at position 2487 of SEQ ID NO: 1012
cugaaagucugacugcaac

SEQ ID NO: 80881 - RNA, 19 nt, Artificial Sequence
  Description of Artificial Sequence: Synthetic oligonucleotide
  Antisense strand to SEQ ID NO: 80800
guugcagucagacuuucag

SEQ ID NO: 80882 - RNA, 19 nt, Artificial Sequence
  Description of Artificial Sequence: Synthetic oligonucleotide
  Sense strand starting at position 2686 of SEQ ID NO: 1012
gaccuuucuucccuuggga

SEQ ID NO: 80883 - RNA, 19 nt, Artificial Sequence
  Description of Artificial Sequence: Synthetic oligonucleotide
  Antisense strand to SEQ ID NO: 80802
ucccaagggaagaaagguc

SEQ ID NO: 80884 - RNA, 19 nt, Artificial Sequence
  Description of Artificial Sequence: Synthetic oligonucleotide
  Sense strand starting at position 2873 of SEQ ID NO: 1012
uuuaaauuuagccggguau

SEQ ID NO: 80885 - RNA, 19 nt, Artificial Sequence
  Description of Artificial Sequence: Synthetic oligonucleotide
  Antisense strand to SEQ ID NO: 80804
auacccggcuaaauuuaaa

SEQ ID NO: 80886 - RNA, 19 nt, Artificial Sequence
  Description of Artificial Sequence: Synthetic oligonucleotide
  Sense strand starting at position 2974 of SEQ ID NO: 1012
agcugugauugcucaccca

SEQ ID NO: 80887 - RNA, 19 nt, Artificial Sequence
  Description of Artificial Sequence: Synthetic oligonucleotide
  Antisense strand to SEQ ID NO: 80806
ugggugagcaaucacagcu

SEQ ID NO: 80888 - RNA, 19 nt, Artificial Sequence
  Description of Artificial Sequence: Synthetic oligonucleotide
  Sense strand starting at position 3000 of SEQ ID NO: 1012
uaaggaaugcuaggaucau

SEQ ID NO: 80889 - RNA, 19 nt, Artificial Sequence
  Description of Artificial Sequence: Synthetic oligonucleotide
  Antisense strand to SEQ ID NO: 80808
augauccuagcauuccuua

SEQ ID NO: 80890 - RNA, 19 nt, Artificial Sequence
  Description of Artificial Sequence: Synthetic oligonucleotide
  Sense strand starting at position 3029 of SEQ ID NO: 1012
ccuauuggcuguuuaauua

SEQ ID NO: 80891 - RNA, 19 nt, Artificial Sequence
  Description of Artificial Sequence: Synthetic oligonucleotide
  Antisense strand to SEQ ID NO: 80810
uaauuaaacagccaauagg

SEQ ID NO: 80892 - RNA, 19 nt, Artificial Sequence
  Description of Artificial Sequence: Synthetic oligonucleotide
  Sense strand starting at position 3037 of SEQ ID NO: 1012
cuguuuaauuaagcuguaa

SEQ ID NO: 80893 - RNA, 19 nt, Artificial Sequence
  Description of Artificial Sequence: Synthetic oligonucleotide
  Antisense strand to SEQ ID NO: 80812
uuacagcuuaauuaaacag

SEQ ID NO: 80894 - RNA, 19 nt, Artificial Sequence
  Description of Artificial Sequence: Synthetic oligonucleotide
  Sense strand starting at position 3107 of SEQ ID NO: 1012
gcacacaguuaucuaugga

SEQ ID NO: 80895 - RNA, 19 nt, Artificial Sequence
  Description of Artificial Sequence: Synthetic oligonucleotide
  Antisense strand to SEQ ID NO: 80814
uccauagauaacugugugc

SEQ ID NO: 80896 - RNA, 19 nt, Artificial Sequence
  Description of Artificial Sequence: Synthetic oligonucleotide
  Sense strand starting at position 3110 of SEQ ID NO: 1012
cacaguuaucuauggaguu

SEQ ID NO: 80897 - RNA, 19 nt, Artificial Sequence
  Description of Artificial Sequence: Synthetic oligonucleotide
  Antisense strand to SEQ ID NO: 80816
aacuccauagauaacugug

SEQ ID NO: 80898 - RNA, 19 nt, Artificial Sequence
  Description of Artificial Sequence: Synthetic oligonucleotide
  Sense strand starting at position 3130 of SEQ ID NO: 1012
gugaauuacuuucugaacu

SEQ ID NO: 80899 - RNA, 19 nt, Artificial Sequence
  Description of Artificial Sequence: Synthetic oligonucleotide
  Antisense strand to SEQ ID NO: 80818
aguucagaaaguaauucac

SEQ ID NO: 80900 - RNA, 19 nt, Artificial Sequence
  Description of Artificial Sequence: Synthetic oligonucleotide
  Sense strand starting at position 3224 of SEQ ID NO: 1012
acuguugugacuugugaac

SEQ ID NO: 80901 - RNA, 19 nt, Artificial Sequence
  Description of Artificial Sequence: Synthetic oligonucleotide
  Antisense strand to SEQ ID NO: 80820
guucacaagucacaacagu

SEQ ID NO: 80902 - RNA, 19 nt, Artificial Sequence
  Description of Artificial Sequence: Synthetic oligonucleotide
  Sense strand starting at position 3264 of SEQ ID NO: 1012
aagugaaguggccauccua

SEQ ID NO: 80903 - RNA, 19 nt, Artificial Sequence
  Description of Artificial Sequence: Synthetic oligonucleotide
  Antisense strand to SEQ ID NO: 80822
uaggauggccacuucacuu

SEQ ID NO: 80904 - RNA, 19 nt, Artificial Sequence
  Description of Artificial Sequence: Synthetic oligonucleotide
  Sense strand starting at position 3375 of SEQ ID NO: 1012
acaaauggagcucaaguuu

SEQ ID NO: 80905 - RNA, 19 nt, Artificial Sequence
  Description of Artificial Sequence: Synthetic oligonucleotide
  Antisense strand to SEQ ID NO: 80824
aaacuugagcuccauuugu

SEQ ID NO: 80906 - RNA, 19 nt, Artificial Sequence
  Description of Artificial Sequence: Synthetic oligonucleotide
  Sense strand starting at position 3407 of SEQ ID NO: 1012
gucuaagucauguggacga

SEQ ID NO: 80907 - RNA, 19 nt, Artificial Sequence
  Description of Artificial Sequence: Synthetic oligonucleotide
  Antisense strand to SEQ ID NO: 80826
ucguccacaugacuuagac

SEQ ID NO: 80908 - RNA, 19 nt, Artificial Sequence
  Description of Artificial Sequence: Synthetic oligonucleotide
  Sense strand starting at position 3534 of SEQ ID NO: 1012
ggagggucugggcaaagua

SEQ ID NO: 80909 - RNA, 19 nt, Artificial Sequence
  Description of Artificial Sequence: Synthetic oligonucleotide
  Antisense strand to SEQ ID NO: 80828
uacuuugcccagacccucc

SEQ ID NO: 80910 - RNA, 19 nt, Artificial Sequence
  Description of Artificial Sequence: Synthetic oligonucleotide
  Sense strand starting at position 3763 of SEQ ID NO: 1012
agcugugggcuugauaaag

SEQ ID NO: 80911 - RNA, 19 nt, Artificial Sequence
  Description of Artificial Sequence: Synthetic oligonucleotide
  Antisense strand to SEQ ID NO: 80830
cuuuaucaagcccacagcu

SEQ ID NO: 80912 - RNA, 19 nt, Artificial Sequence
  Description of Artificial Sequence: Synthetic oligonucleotide
  Sense strand starting at position 3983 of SEQ ID NO: 1012
ggagcugccugguugaagu

SEQ ID NO: 80913 - RNA, 19 nt, Artificial Sequence
  Description of Artificial Sequence: Synthetic oligonucleotide
  Antisense strand to SEQ ID NO: 80832
acuucaaccaggcagcucc

SEQ ID NO: 80914 - RNA, 19 nt, Artificial Sequence
  Description of Artificial Sequence: Synthetic oligonucleotide
  Sense strand starting at position 162 of SEQ ID NO: 1014
ggagaacgaugguuaucag

SEQ ID NO: 80915 - RNA, 19 nt, Artificial Sequence
  Description of Artificial Sequence: Synthetic oligonucleotide
  Antisense strand to SEQ ID NO: 80834
cugauaaccaucguucucc

SEQ ID NO: 80916 - RNA, 19 nt, Artificial Sequence
  Description of Artificial Sequence: Synthetic oligonucleotide
  Sense strand starting at position 165 of SEQ ID NO: 1014
gaacgaugguuaucagagg

SEQ ID NO: 80917 - RNA, 19 nt, Artificial Sequence
  Description of Artificial Sequence: Synthetic oligonucleotide
  Antisense strand to SEQ ID NO: 80836
ccucugauaaccaucguuc

SEQ ID NO: 80918 - RNA, 19 nt, Artificial Sequence
  Description of Artificial Sequence: Synthetic oligonucleotide
  Sense strand starting at position 401 of SEQ ID NO: 1014
auuccacauguauauugua

SEQ ID NO: 80919 - RNA, 19 nt, Artificial Sequence
  Description of Artificial Sequence: Synthetic oligonucleotide
  Antisense strand to SEQ ID NO: 80838
uacaauauacauguggaau

SEQ ID NO: 80920 - RNA, 19 nt, Artificial Sequence
  Description of Artificial Sequence: Synthetic oligonucleotide
  Sense strand starting at position 559 of SEQ ID NO: 1014
gacggaagauugcuugaag

SEQ ID NO: 80921 - RNA, 19 nt, Artificial Sequence
  Description of Artificial Sequence: Synthetic oligonucleotide
  Antisense strand to SEQ ID NO: 80840
cuucaagcaaucuuccguc

SEQ ID NO: 80922 - RNA, 19 nt, Artificial Sequence
  Description of Artificial Sequence: Synthetic oligonucleotide
  Sense strand starting at position 1155 of SEQ ID NO: 1014
cgagacucaguauggaauu

SEQ ID NO: 80923 - RNA, 19 nt, Artificial Sequence
  Description of Artificial Sequence: Synthetic oligonucleotide
  Antisense strand to SEQ ID NO: 80842
aauuccauacugagucucg

SEQ ID NO: 80924 - RNA, 19 nt, Artificial Sequence
  Description of Artificial Sequence: Synthetic oligonucleotide
  Sense strand starting at position 1266 of SEQ ID NO: 1014
augauaaauggugguaauu

SEQ ID NO: 80925 - RNA, 19 nt, Artificial Sequence
  Description of Artificial Sequence: Synthetic oligonucleotide
  Antisense strand to SEQ ID NO: 80844
aauuaccaccauuuaucau

SEQ ID NO: 80926 - RNA, 19 nt, Artificial Sequence
  Description of Artificial Sequence: Synthetic oligonucleotide
  Sense strand starting at position 1314 of SEQ ID NO: 1014
agcugaaugaaauguugca

SEQ ID NO: 80927 - RNA, 19 nt, Artificial Sequence
  Description of Artificial Sequence: Synthetic oligonucleotide
  Antisense strand to SEQ ID NO: 80846
ugcaacauuucauucagcu

SEQ ID NO: 80928 - RNA, 19 nt, Artificial Sequence
  Description of Artificial Sequence: Synthetic oligonucleotide
  Sense strand starting at position 1321 of SEQ ID NO: 1014
ugaaauguugcacauguaa

SEQ ID NO: 80929 - RNA, 19 nt, Artificial Sequence
  Description of Artificial Sequence: Synthetic oligonucleotide
  Antisense strand to SEQ ID NO: 80848
uuacaugugcaacauuuca

SEQ ID NO: 80930 - RNA, 19 nt, Artificial Sequence
  Description of Artificial Sequence: Synthetic oligonucleotide
  Sense strand starting at position 1406 of SEQ ID NO: 1014
ccggaauucuaacuuauua

SEQ ID NO: 80931 - RNA, 19 nt, Artificial Sequence
  Description of Artificial Sequence: Synthetic oligonucleotide
  Antisense strand to SEQ ID NO: 80850
uaauaaguuagaauuccgg

SEQ ID NO: 80932 - RNA, 19 nt, Artificial Sequence
  Description of Artificial Sequence: Synthetic oligonucleotide
  Sense strand starting at position 1529 of SEQ ID NO: 1014
cauugaaguagucaugcga

SEQ ID NO: 80933 - RNA, 19 nt, Artificial Sequence
  Description of Artificial Sequence: Synthetic oligonucleotide
  Antisense strand to SEQ ID NO: 80852
ucgcaugacuacuucaaug

SEQ ID NO: 80934 - RNA, 19 nt, Artificial Sequence
  Description of Artificial Sequence: Synthetic oligonucleotide
  Sense strand starting at position 1537 of SEQ ID NO: 1014
uagucaugcgauuaaauga

SEQ ID NO: 80935 - RNA, 19 nt, Artificial Sequence
  Description of Artificial Sequence: Synthetic oligonucleotide
  Antisense strand to SEQ ID NO: 80854
ucauuuaaucgcaugacua

SEQ ID NO: 80936 - RNA, 19 nt, Artificial Sequence
  Description of Artificial Sequence: Synthetic oligonucleotide
  Sense strand starting at position 1676 of SEQ ID NO: 1014
ccucaacaguacuuagaga

SEQ ID NO: 80937 - RNA, 19 nt, Artificial Sequence
  Description of Artificial Sequence: Synthetic oligonucleotide
  Antisense strand to SEQ ID NO: 80856
ucucuaaguacuguugagg

SEQ ID NO: 80938 - RNA, 19 nt, Artificial Sequence
  Description of Artificial Sequence: Synthetic oligonucleotide
  Sense strand starting at position 1980 of SEQ ID NO: 1014
gugaaucugauaugguaaa

SEQ ID NO: 80939 - RNA, 19 nt, Artificial Sequence
  Description of Artificial Sequence: Synthetic oligonucleotide
  Antisense strand to SEQ ID NO: 80858
uuuaccauaucagauucac

SEQ ID NO: 80940 - RNA, 19 nt, Artificial Sequence
  Description of Artificial Sequence: Synthetic oligonucleotide
  Sense strand starting at position 1992 of SEQ ID NO: 1014
ugguaaauauagucaaauc

SEQ ID NO: 80941 - RNA, 19 nt, Artificial Sequence
  Description of Artificial Sequence: Synthetic oligonucleotide
  Antisense strand to SEQ ID NO: 80860
gauuugacuauauuuacca

SEQ ID NO: 80942 - RNA, 19 nt, Artificial Sequence
  Description of Artificial Sequence: Synthetic oligonucleotide
  Sense strand starting at position 2010 of SEQ ID NO: 1014
caaauucuggagugacugu

SEQ ID NO: 80943 - RNA, 19 nt, Artificial Sequence
  Description of Artificial Sequence: Synthetic oligonucleotide
  Antisense strand to SEQ ID NO: 80862
acagucacuccagaauuug

SEQ ID NO: 80944 - RNA, 19 nt, Artificial Sequence
  Description of Artificial Sequence: Synthetic oligonucleotide
  Sense strand starting at position 2110 of SEQ ID NO: 1014
aggguuacacaguaaaguu

SEQ ID NO: 80945 - RNA, 19 nt, Artificial Sequence
  Description of Artificial Sequence: Synthetic oligonucleotide
  Antisense strand to SEQ ID NO: 80864
aacuuuacuguguaacccu

SEQ ID NO: 80946 - RNA, 19 nt, Artificial Sequence
  Description of Artificial Sequence: Synthetic oligonucleotide
  Sense strand starting at position 2188 of SEQ ID NO: 1014
gcaucugugagaugauaaa

SEQ ID NO: 80947 - RNA, 19 nt, Artificial Sequence
  Description of Artificial Sequence: Synthetic oligonucleotide
  Antisense strand to SEQ ID NO: 80866
uuuaucaucucacagaugc

SEQ ID NO: 80948 - RNA, 19 nt, Artificial Sequence
  Description of Artificial Sequence: Synthetic oligonucleotide
  Sense strand starting at position 2287 of SEQ ID NO: 1014
gcuacuuacugagugacau

SEQ ID NO: 80949 - RNA, 19 nt, Artificial Sequence
  Description of Artificial Sequence: Synthetic oligonucleotide
  Antisense strand to SEQ ID NO: 80868
augucacucaguaaguagc

SEQ ID NO: 80950 - RNA, 19 nt, Artificial Sequence
  Description of Artificial Sequence: Synthetic oligonucleotide
  Sense strand starting at position 2288 of SEQ ID NO: 1014
cuacuuacugagugacaua

SEQ ID NO: 80951 - RNA, 19 nt, Artificial Sequence
  Description of Artificial Sequence: Synthetic oligonucleotide
  Antisense strand to SEQ ID NO: 80870
uaugucacucaguaaguag

SEQ ID NO: 80952 - RNA, 19 nt, Artificial Sequence
  Description of Artificial Sequence: Synthetic oligonucleotide
  Sense strand starting at position 2475 of SEQ ID NO: 1014
ggcacaauggcauacuuga

SEQ ID NO: 80953 - RNA, 19 nt, Artificial Sequence
  Description of Artificial Sequence: Synthetic oligonucleotide
  Antisense strand to SEQ ID NO: 80872
ucaaguaugccauugugcc

SEQ ID NO: 80954 - RNA, 19 nt, Artificial Sequence
  Description of Artificial Sequence: Synthetic oligonucleotide
  Sense strand starting at position 2511 of SEQ ID NO: 1014
uacaaugagccaugacagu

SEQ ID NO: 80955 - RNA, 19 nt, Artificial Sequence
  Description of Artificial Sequence: Synthetic oligonucleotide
  Antisense strand to SEQ ID NO: 80874
acugucauggcucauugua

SEQ ID NO: 80956 - RNA, 19 nt, Artificial Sequence
  Description of Artificial Sequence: Synthetic oligonucleotide
  Sense strand starting at position 2721 of SEQ ID NO: 1014
gcaauuucuuauguccuga

SEQ ID NO: 80957 - RNA, 19 nt, Artificial Sequence
  Description of Artificial Sequence: Synthetic oligonucleotide
  Antisense strand to SEQ ID NO: 80876
ucaggacauaagaaauugc

SEQ ID NO: 80958 - RNA, 19 nt, Artificial Sequence
  Description of Artificial Sequence: Synthetic oligonucleotide
  Sense strand starting at position 2726 of SEQ ID NO: 1014
uucuuauguccugaguuug

SEQ ID NO: 80959 - RNA, 19 nt, Artificial Sequence
  Description of Artificial Sequence: Synthetic oligonucleotide
  Antisense strand to SEQ ID NO: 80878
caaacucaggacauaagaa

SEQ ID NO: 80960 - RNA, 19 nt, Artificial Sequence
  Description of Artificial Sequence: Synthetic oligonucleotide
  Sense strand starting at position 2757 of SEQ ID NO: 1014
ugcuguugccuggcuguua

SEQ ID NO: 80961 - RNA, 19 nt, Artificial Sequence
  Description of Artificial Sequence: Synthetic oligonucleotide
  Antisense strand to SEQ ID NO: 80880
uaacagccaggcaacagca

SEQ ID NO: 80962 - RNA, 19 nt, Artificial Sequence
  Description of Artificial Sequence: Synthetic oligonucleotide
  Sense strand starting at position 2761 of SEQ ID NO: 1014
guugccuggcuguuacuua

SEQ ID NO: 80963 - RNA, 19 nt, Artificial Sequence
  Description of Artificial Sequence: Synthetic oligonucleotide
  Antisense strand to SEQ ID NO: 80882
uaaguaacagccaggcaac

SEQ ID NO: 80964 - RNA, 19 nt, Artificial Sequence
  Description of Artificial Sequence: Synthetic oligonucleotide
  Sense strand starting at position 2786 of SEQ ID NO: 1014
cuagacucuuaagcaaguu

SEQ ID NO: 80965 - RNA, 19 nt, Artificial Sequence
  Description of Artificial Sequence: Synthetic oligonucleotide
  Antisense strand to SEQ ID NO: 80884
aacuugcuuaagagucuag

SEQ ID NO: 80966 - RNA, 19 nt, Artificial Sequence
  Description of Artificial Sequence: Synthetic oligonucleotide
  Sense strand starting at position 2809 of SEQ ID NO: 1014
aggcauccuucuuuguaaa

SEQ ID NO: 80967 - RNA, 19 nt, Artificial Sequence
  Description of Artificial Sequence: Synthetic oligonucleotide
  Antisense strand to SEQ ID NO: 80886
uuuacaaagaaggaugccu

SEQ ID NO: 80968 - RNA, 19 nt, Artificial Sequence
  Description of Artificial Sequence: Synthetic oligonucleotide
  Sense strand starting at position 2827 of SEQ ID NO: 1014
aauaguguugaugauugua

SEQ ID NO: 80969 - RNA, 19 nt, Artificial Sequence
  Description of Artificial Sequence: Synthetic oligonucleotide
  Antisense strand to SEQ ID NO: 80888
uacaaucaucaacacuauu

SEQ ID NO: 80970 - RNA, 19 nt, Artificial Sequence
  Description of Artificial Sequence: Synthetic oligonucleotide
  Sense strand starting at position 2829 of SEQ ID NO: 1014
uaguguugaugauuguaac

SEQ ID NO: 80971 - RNA, 19 nt, Artificial Sequence
  Description of Artificial Sequence: Synthetic oligonucleotide
  Antisense strand to SEQ ID NO: 80890
guuacaaucaucaacacua

SEQ ID NO: 80972 - RNA, 19 nt, Artificial Sequence
  Description of Artificial Sequence: Synthetic oligonucleotide
  Sense strand starting at position 3386 of SEQ ID NO: 1014
auagaaagcuaaguccaua

SEQ ID NO: 80973 - RNA, 19 nt, Artificial Sequence
  Description of Artificial Sequence: Synthetic oligonucleotide
  Antisense strand to SEQ ID NO: 80892
uauggacuuagcuuucuau

SEQ ID NO: 80974 - RNA, 19 nt, Artificial Sequence
  Description of Artificial Sequence: Synthetic oligonucleotide
  Sense strand starting at position 3555 of SEQ ID NO: 1014
ucaguugauucugugaaau

SEQ ID NO: 80975 - RNA, 19 nt, Artificial Sequence
  Description of Artificial Sequence: Synthetic oligonucleotide
  Antisense strand to SEQ ID NO: 80894
auuucacagaaucaacuga

SEQ ID NO: 80976 - RNA, 19 nt, Artificial Sequence
  Description of Artificial Sequence: Synthetic oligonucleotide
  Sense strand starting at position 3568 of SEQ ID NO: 1014
ugaaauccuugucugugau

SEQ ID NO: 80977 - RNA, 19 nt, Artificial Sequence
  Description of Artificial Sequence: Synthetic oligonucleotide
  Antisense strand to SEQ ID NO: 80896
aucacagacaaggauuuca

SEQ ID NO: 80978 - RNA, 19 nt, Artificial Sequence
  Description of Artificial Sequence: Synthetic oligonucleotide
  Sense strand starting at position 3569 of SEQ ID NO: 1014
gaaauccuugucugugauu

SEQ ID NO: 80979 - RNA, 19 nt, Artificial Sequence
  Description of Artificial Sequence: Synthetic oligonucleotide
  Antisense strand to SEQ ID NO: 80898
aaucacagacaaggauuuc

SEQ ID NO: 80980 - RNA, 19 nt, Artificial Sequence
  Description of Artificial Sequence: Synthetic oligonucleotide
  Sense strand starting at position 3581 of SEQ ID NO: 1014
ugugauuccugguuggaaa

SEQ ID NO: 80981 - RNA, 19 nt, Artificial Sequence
  Description of Artificial Sequence: Synthetic oligonucleotide
  Antisense strand to SEQ ID NO: 80900
uuuccaaccaggaaucaca

SEQ ID NO: 80982 - RNA, 19 nt, Artificial Sequence
  Description of Artificial Sequence: Synthetic oligonucleotide
  Sense strand starting at position 3611 of SEQ ID NO: 1014
gucuguggccaugaucaua

SEQ ID NO: 80983 - RNA, 19 nt, Artificial Sequence
  Description of Artificial Sequence: Synthetic oligonucleotide
  Antisense strand to SEQ ID NO: 80902
uaugaucauggccacagac

SEQ ID NO: 80984 - RNA, 19 nt, Artificial Sequence
  Description of Artificial Sequence: Synthetic oligonucleotide
  Sense strand starting at position 3652 of SEQ ID NO: 1014
cacuguucuucuguaggga

SEQ ID NO: 80985 - RNA, 19 nt, Artificial Sequence
  Description of Artificial Sequence: Synthetic oligonucleotide
  Antisense strand to SEQ ID NO: 80904
ucccuacagaagaacagug

SEQ ID NO: 80986 - RNA, 19 nt, Artificial Sequence
  Description of Artificial Sequence: Synthetic oligonucleotide
  Sense strand starting at position 3653 of SEQ ID NO: 1014
acuguucuucuguagggaa

SEQ ID NO: 80987 - RNA, 19 nt, Artificial Sequence
  Description of Artificial Sequence: Synthetic oligonucleotide
  Antisense strand to SEQ ID NO: 80906
uucccuacagaagaacagu

SEQ ID NO: 80988 - RNA, 19 nt, Artificial Sequence
  Description of Artificial Sequence: Synthetic oligonucleotide
  Sense strand starting at position 3694 of SEQ ID NO: 1014
ucuguuaucuaauugaaag

SEQ ID NO: 80989 - RNA, 19 nt, Artificial Sequence
  Description of Artificial Sequence: Synthetic oligonucleotide
  Antisense strand to SEQ ID NO: 80908
cuuucaauuagauaacaga

SEQ ID NO: 80990 - RNA, 19 nt, Artificial Sequence
  Description of Artificial Sequence: Synthetic oligonucleotide
  Sense strand starting at position 3777 of SEQ ID NO: 1014
uagugugaagaauggauua

SEQ ID NO: 80991 - RNA, 19 nt, Artificial Sequence
  Description of Artificial Sequence: Synthetic oligonucleotide
  Antisense strand to SEQ ID NO: 80910
uaauccauucuucacacua

SEQ ID NO: 80992 - RNA, 19 nt, Artificial Sequence
  Description of Artificial Sequence: Synthetic oligonucleotide
  Sense strand starting at position 3849 of SEQ ID NO: 1014
agauaugaugguggccuaa

SEQ ID NO: 80993 - RNA, 19 nt, Artificial Sequence
  Description of Artificial Sequence: Synthetic oligonucleotide
  Antisense strand to SEQ ID NO: 80912
uuaggccaccaucauaucu

SEQ ID NO: 80994 - RNA, 19 nt, Artificial Sequence
  Description of Artificial Sequence: Synthetic oligonucleotide
  Sense strand starting at position 127 of SEQ ID NO: 1015
uccugauaguuuguuaaga

SEQ ID NO: 80995 - RNA, 19 nt, Artificial Sequence
  Description of Artificial Sequence: Synthetic oligonucleotide
  Antisense strand to SEQ ID NO: 80914
ucuuaacaaacuaucagga

SEQ ID NO: 80996 - RNA, 19 nt, Artificial Sequence
  Description of Artificial Sequence: Synthetic oligonucleotide
  Sense strand starting at position 128 of SEQ ID NO: 1015
ccugauaguuuguuaagag

SEQ ID NO: 80997 - RNA, 19 nt, Artificial Sequence
  Description of Artificial Sequence: Synthetic oligonucleotide
  Antisense strand to SEQ ID NO: 80916
cucuuaacaaacuaucagg

SEQ ID NO: 80998 - RNA, 19 nt, Artificial Sequence
  Description of Artificial Sequence: Synthetic oligonucleotide
  Sense strand starting at position 129 of SEQ ID NO: 1015
cugauaguuuguuaagaga

SEQ ID NO: 80999 - RNA, 19 nt, Artificial Sequence
  Description of Artificial Sequence: Synthetic oligonucleotide
  Antisense strand to SEQ ID NO: 80918
ucucuuaacaaacuaucag

SEQ ID NO: 81000 - RNA, 19 nt, Artificial Sequence
  Description of Artificial Sequence: Synthetic oligonucleotide
  Sense strand starting at position 132 of SEQ ID NO: 1015
auaguuuguuaagagaggu

SEQ ID NO: 81001 - RNA, 19 nt, Artificial Sequence
  Description of Artificial Sequence: Synthetic oligonucleotide
  Antisense strand to SEQ ID NO: 80920
accucucuuaacaaacuau

SEQ ID NO: 81002 - RNA, 19 nt, Artificial Sequence
  Description of Artificial Sequence: Synthetic oligonucleotide
  Sense strand starting at position 190 of SEQ ID NO: 1015
uucucccuguugucauuaa

SEQ ID NO: 81003 - RNA, 19 nt, Artificial Sequence
  Description of Artificial Sequence: Synthetic oligonucleotide
  Antisense strand to SEQ ID NO: 80922
uuaaugacaacagggagaa

SEQ ID NO: 81004 - RNA, 19 nt, Artificial Sequence
  Description of Artificial Sequence: Synthetic oligonucleotide
  Sense strand starting at position 191 of SEQ ID NO: 1015
ucucccuguugucauuaau

SEQ ID NO: 81005 - RNA, 19 nt, Artificial Sequence
  Description of Artificial Sequence: Synthetic oligonucleotide
  Antisense strand to SEQ ID NO: 80924
auuaaugacaacagggaga

SEQ ID NO: 81006 - RNA, 19 nt, Artificial Sequence
  Description of Artificial Sequence: Synthetic oligonucleotide
  Sense strand starting at position 194 of SEQ ID NO: 1015
cccuguugucauuaauggu

SEQ ID NO: 81007 - RNA, 19 nt, Artificial Sequence
  Description of Artificial Sequence: Synthetic oligonucleotide
  Antisense strand to SEQ ID NO: 80926
accauuaaugacaacaggg

SEQ ID NO: 81008 - RNA, 19 nt, Artificial Sequence
  Description of Artificial Sequence: Synthetic oligonucleotide
  Sense strand starting at position 203 of SEQ ID NO: 1015
cauuaaugguccugagcuu

SEQ ID NO: 81009 - RNA, 19 nt, Artificial Sequence
  Description of Artificial Sequence: Synthetic oligonucleotide
  Antisense strand to SEQ ID NO: 80928
aagcucaggaccauuaaug

SEQ ID NO: 81010 - RNA, 19 nt, Artificial Sequence
  Description of Artificial Sequence: Synthetic oligonucleotide
  Sense strand starting at position 626 of SEQ ID NO: 1015
uggcaucugcugugcagaa

SEQ ID NO: 81011 - RNA, 19 nt, Artificial Sequence
  Description of Artificial Sequence: Synthetic oligonucleotide
  Antisense strand to SEQ ID NO: 80930
uucugcacagcagaugcca

SEQ ID NO: 81012 - RNA, 19 nt, Artificial Sequence
  Description of Artificial Sequence: Synthetic oligonucleotide
  Sense strand starting at position 628 of SEQ ID NO: 1015
gcaucugcugugcagaaga

SEQ ID NO: 81013 - RNA, 19 nt, Artificial Sequence
  Description of Artificial Sequence: Synthetic oligonucleotide
  Antisense strand to SEQ ID NO: 80932
ucuucugcacagcagaugc

SEQ ID NO: 81014 - RNA, 19 nt, Artificial Sequence
  Description of Artificial Sequence: Synthetic oligonucleotide
  Sense strand starting at position 673 of SEQ ID NO: 1015
ggugcuaugccuuacagac

SEQ ID NO: 81015 - RNA, 19 nt, Artificial Sequence
  Description of Artificial Sequence: Synthetic oligonucleotide
  Antisense strand to SEQ ID NO: 80934
gucuguaaggcauagcacc

SEQ ID NO: 81016 - RNA, 19 nt, Artificial Sequence
  Description of Artificial Sequence: Synthetic oligonucleotide
  Sense strand starting at position 750 of SEQ ID NO: 1015
ucccaucuccaugggaaga

SEQ ID NO: 81017 - RNA, 19 nt, Artificial Sequence
  Description of Artificial Sequence: Synthetic oligonucleotide
  Antisense strand to SEQ ID NO: 80936
ucuucccauggagauggga

SEQ ID NO: 81018 - RNA, 19 nt, Artificial Sequence
  Description of Artificial Sequence: Synthetic oligonucleotide
  Sense strand starting at position 1181 of SEQ ID NO: 1015
acccuuaguucucagagcu

SEQ ID NO: 81019 - RNA, 19 nt, Artificial Sequence
  Description of Artificial Sequence: Synthetic oligonucleotide
  Antisense strand to SEQ ID NO: 80938
agcucugagaacuaagggu

SEQ ID NO: 81020 - RNA, 19 nt, Artificial Sequence
  Description of Artificial Sequence: Synthetic oligonucleotide
  Sense strand starting at position 1199 of SEQ ID NO: 1015
ugcaguuuccugucggcaa

SEQ ID NO: 81021 - RNA, 19 nt, Artificial Sequence
  Description of Artificial Sequence: Synthetic oligonucleotide
  Antisense strand to SEQ ID NO: 80940
uugccgacaggaaacugca

SEQ ID NO: 81022 - RNA, 19 nt, Artificial Sequence
  Description of Artificial Sequence: Synthetic oligonucleotide
  Sense strand starting at position 1201 of SEQ ID NO: 1015
caguuuccugucggcaaca

SEQ ID NO: 81023 - RNA, 19 nt, Artificial Sequence
  Description of Artificial Sequence: Synthetic oligonucleotide
  Antisense strand to SEQ ID NO: 80942
uguugccgacaggaaacug

SEQ ID NO: 81024 - RNA, 19 nt, Artificial Sequence
  Description of Artificial Sequence: Synthetic oligonucleotide
  Sense strand starting at position 1202 of SEQ ID NO: 1015
aguuuccugucggcaacau

SEQ ID NO: 81025 - RNA, 19 nt, Artificial Sequence
  Description of Artificial Sequence: Synthetic oligonucleotide
  Antisense strand to SEQ ID NO: 80944
auguugccgacaggaaacu

SEQ ID NO: 81026 - RNA, 19 nt, Artificial Sequence
  Description of Artificial Sequence: Synthetic oligonucleotide
  Sense strand starting at position 1203 of SEQ ID NO: 1015
guuuccugucggcaacauu

SEQ ID NO: 81027 - RNA, 19 nt, Artificial Sequence
  Description of Artificial Sequence: Synthetic oligonucleotide
  Antisense strand to SEQ ID NO: 80946
aauguugccgacaggaaac

SEQ ID NO: 81028 - RNA, 19 nt, Artificial Sequence
  Description of Artificial Sequence: Synthetic oligonucleotide
  Sense strand starting at position 1294 of SEQ ID NO: 1015
agagaugacuucuaacacu

SEQ ID NO: 81029 - RNA, 19 nt, Artificial Sequence
  Description of Artificial Sequence: Synthetic oligonucleotide
  Antisense strand to SEQ ID NO: 80948
aguguuagaagucaucucu

SEQ ID NO: 81030 - RNA, 19 nt, Artificial Sequence
  Description of Artificial Sequence: Synthetic oligonucleotide
  Sense strand starting at position 1374 of SEQ ID NO: 1015
acggaagauaucuacuugu

SEQ ID NO: 81031 - RNA, 19 nt, Artificial Sequence
  Description of Artificial Sequence: Synthetic oligonucleotide
  Antisense strand to SEQ ID NO: 80950
acaaguagauaucuuccgu

SEQ ID NO: 81032 - RNA, 19 nt, Artificial Sequence
  Description of Artificial Sequence: Synthetic oligonucleotide
  Sense strand starting at position 1407 of SEQ ID NO: 1015
ucuucucaucucugaggga

SEQ ID NO: 81033 - RNA, 19 nt, Artificial Sequence
  Description of Artificial Sequence: Synthetic oligonucleotide
  Antisense strand to SEQ ID NO: 80952
ucccucagagaugagaaga

SEQ ID NO: 81034 - RNA, 19 nt, Artificial Sequence
  Description of Artificial Sequence: Synthetic oligonucleotide
  Sense strand starting at position 1477 of SEQ ID NO: 1015
caguucuccugagcgcuaa

SEQ ID NO: 81035 - RNA, 19 nt, Artificial Sequence
  Description of Artificial Sequence: Synthetic oligonucleotide
  Antisense strand to SEQ ID NO: 80954
uuagcgcucaggagaacug

SEQ ID NO: 81036 - RNA, 19 nt, Artificial Sequence
  Description of Artificial Sequence: Synthetic oligonucleotide
  Sense strand starting at position 1609 of SEQ ID NO: 1015
ggacucacccucuacugua

SEQ ID NO: 81037 - RNA, 19 nt, Artificial Sequence
  Description of Artificial Sequence: Synthetic oligonucleotide
  Antisense strand to SEQ ID NO: 80956
uacaguagagggugagucc

SEQ ID NO: 81038 - RNA, 19 nt, Artificial Sequence
  Description of Artificial Sequence: Synthetic oligonucleotide
  Sense strand starting at position 1753 of SEQ ID NO: 1015
gggagaacggugugauaag

SEQ ID NO: 81039 - RNA, 19 nt, Artificial Sequence
  Description of Artificial Sequence: Synthetic oligonucleotide
  Antisense strand to SEQ ID NO: 80958
cuuaucacaccguucuccc

SEQ ID NO: 81040 - RNA, 19 nt, Artificial Sequence
  Description of Artificial Sequence: Synthetic oligonucleotide
  Sense strand starting at position 1920 of SEQ ID NO: 1015
agagacucagcaugagauu

SEQ ID NO: 81041 - RNA, 19 nt, Artificial Sequence
  Description of Artificial Sequence: Synthetic oligonucleotide
  Antisense strand to SEQ ID NO: 80960
aaucucaugcugagucucu

SEQ ID NO: 81042 - RNA, 19 nt, Artificial Sequence
  Description of Artificial Sequence: Synthetic oligonucleotide
  Sense strand starting at position 2003 of SEQ ID NO: 1015
gacacaggguucugagcaa

SEQ ID NO: 81043 - RNA, 19 nt, Artificial Sequence
  Description of Artificial Sequence: Synthetic oligonucleotide
  Antisense strand to SEQ ID NO: 80962
uugcucagaacccuguguc

SEQ ID NO: 81044 - RNA, 19 nt, Artificial Sequence
  Description of Artificial Sequence: Synthetic oligonucleotide
  Sense strand starting at position 2123 of SEQ ID NO: 1015
gggagagucucccuggauc

SEQ ID NO: 81045 - RNA, 19 nt, Artificial Sequence
  Description of Artificial Sequence: Synthetic oligonucleotide
  Antisense strand to SEQ ID NO: 80964
gauccagggagacucuccc

SEQ ID NO: 81046 - RNA, 19 nt, Artificial Sequence
  Description of Artificial Sequence: Synthetic oligonucleotide
  Sense strand starting at position 2691 of SEQ ID NO: 1015
cuugguucugaccaagauc

SEQ ID NO: 81047 - RNA, 19 nt, Artificial Sequence
  Description of Artificial Sequence: Synthetic oligonucleotide
  Antisense strand to SEQ ID NO: 80966
gaucuuggucagaaccaag

SEQ ID NO: 81048 - RNA, 19 nt, Artificial Sequence
  Description of Artificial Sequence: Synthetic oligonucleotide
  Sense strand starting at position 2941 of SEQ ID NO: 1015
gcuugagacggauggguua

SEQ ID NO: 81049 - RNA, 19 nt, Artificial Sequence
  Description of Artificial Sequence: Synthetic oligonucleotide
  Antisense strand to SEQ ID NO: 80968
uaacccauccgucucaagc

SEQ ID NO: 81050 - RNA, 19 nt, Artificial Sequence
  Description of Artificial Sequence: Synthetic oligonucleotide
  Sense strand starting at position 3136 of SEQ ID NO: 1015
cgaauaaaucgaugcucuu

SEQ ID NO: 81051 - RNA, 19 nt, Artificial Sequence
  Description of Artificial Sequence: Synthetic oligonucleotide
  Antisense strand to SEQ ID NO: 80970
aagagcaucgauuuauucg

SEQ ID NO: 81052 - RNA, 19 nt, Artificial Sequence
  Description of Artificial Sequence: Synthetic oligonucleotide
  Sense strand starting at position 3449 of SEQ ID NO: 1015
gguucugcgauugauccuu

SEQ ID NO: 81053 - RNA, 19 nt, Artificial Sequence
  Description of Artificial Sequence: Synthetic oligonucleotide
  Antisense strand to SEQ ID NO: 80972
aaggaucaaucgcagaacc

SEQ ID NO: 81054 - RNA, 19 nt, Artificial Sequence
  Description of Artificial Sequence: Synthetic oligonucleotide
  Sense strand starting at position 3454 of SEQ ID NO: 1015
ugcgauugauccuuuggua

SEQ ID NO: 81055 - RNA, 19 nt, Artificial Sequence
  Description of Artificial Sequence: Synthetic oligonucleotide
  Antisense strand to SEQ ID NO: 80974
uaccaaaggaucaaucgca

SEQ ID NO: 81056 - RNA, 19 nt, Artificial Sequence
  Description of Artificial Sequence: Synthetic oligonucleotide
  Sense strand starting at position 3457 of SEQ ID NO: 1015
gauugauccuuugguaguc

SEQ ID NO: 81057 - RNA, 19 nt, Artificial Sequence
  Description of Artificial Sequence: Synthetic oligonucleotide
  Antisense strand to SEQ ID NO: 80976
gacuaccaaaggaucaauc

SEQ ID NO: 81058 - RNA, 19 nt, Artificial Sequence
  Description of Artificial Sequence: Synthetic oligonucleotide
  Sense strand starting at position 3487 of SEQ ID NO: 1015
cuuccuagaguucggagaa

SEQ ID NO: 81059 - RNA, 19 nt, Artificial Sequence
  Description of Artificial Sequence: Synthetic oligonucleotide
  Antisense strand to SEQ ID NO: 80978
uucuccgaacucuaggaag

SEQ ID NO: 81060 - RNA, 19 nt, Artificial Sequence
  Description of Artificial Sequence: Synthetic oligonucleotide
  Sense strand starting at position 3488 of SEQ ID NO: 1015
uuccuagaguucggagaau

SEQ ID NO: 81061 - RNA, 19 nt, Artificial Sequence
  Description of Artificial Sequence: Synthetic oligonucleotide
  Antisense strand to SEQ ID NO: 80980
auucuccgaacucuaggaa

SEQ ID NO: 81062 - RNA, 19 nt, Artificial Sequence
  Description of Artificial Sequence: Synthetic oligonucleotide
  Sense strand starting at position 3494 of SEQ ID NO: 1015
gaguucggagaauguucua

SEQ ID NO: 81063 - RNA, 19 nt, Artificial Sequence
  Description of Artificial Sequence: Synthetic oligonucleotide
  Antisense strand to SEQ ID NO: 80982
uagaacauucuccgaacuc

SEQ ID NO: 81064 - RNA, 19 nt, Artificial Sequence
  Description of Artificial Sequence: Synthetic oligonucleotide
  Sense strand starting at position 3499 of SEQ ID NO: 1015
cggagaauguucuaccuaa

SEQ ID NO: 81065 - RNA, 19 nt, Artificial Sequence
  Description of Artificial Sequence: Synthetic oligonucleotide
  Antisense strand to SEQ ID NO: 80984
uuagguagaacauucuccg

SEQ ID NO: 81066 - RNA, 19 nt, Artificial Sequence
  Description of Artificial Sequence: Synthetic oligonucleotide
  Sense strand starting at position 3660 of SEQ ID NO: 1015
gcugcuuuaagcugagaga

SEQ ID NO: 81067 - RNA, 19 nt, Artificial Sequence
  Description of Artificial Sequence: Synthetic oligonucleotide
  Antisense strand to SEQ ID NO: 80986
ucucucagcuuaaagcagc

SEQ ID NO: 81068 - RNA, 19 nt, Artificial Sequence
  Description of Artificial Sequence: Synthetic oligonucleotide
  Sense strand starting at position 3661 of SEQ ID NO: 1015
cugcuuuaagcugagagaa

SEQ ID NO: 81069 - RNA, 19 nt, Artificial Sequence
  Description of Artificial Sequence: Synthetic oligonucleotide
  Antisense strand to SEQ ID NO: 80988
uucucucagcuuaaagcag

SEQ ID NO: 81070 - RNA, 19 nt, Artificial Sequence
  Description of Artificial Sequence: Synthetic oligonucleotide
  Sense strand starting at position 3663 of SEQ ID NO: 1015
gcuuuaagcugagagaaau

SEQ ID NO: 81071 - RNA, 19 nt, Artificial Sequence
  Description of Artificial Sequence: Synthetic oligonucleotide
  Antisense strand to SEQ ID NO: 80990
auuucucucagcuuaaagc

SEQ ID NO: 81072 - RNA, 19 nt, Artificial Sequence
  Description of Artificial Sequence: Synthetic oligonucleotide
  Sense strand starting at position 3674 of SEQ ID NO: 1015
agagaaauaacguaucagc

SEQ ID NO: 81073 - RNA, 19 nt, Artificial Sequence
  Description of Artificial Sequence: Synthetic oligonucleotide
  Antisense strand to SEQ ID NO: 80992
gcugauacguuauuucucu

SEQ ID NO: 81074 - RNA, 19 nt, Artificial Sequence
  Description of Artificial Sequence: Synthetic oligonucleotide
  Sense strand starting at position 3923 of SEQ ID NO: 1016
accuaauggaugugagauc

SEQ ID NO: 81075 - RNA, 19 nt, Artificial Sequence
  Description of Artificial Sequence: Synthetic oligonucleotide
  Antisense strand to SEQ ID NO: 80994
gaucucacauccauuaggu

SEQ ID NO: 81076 - RNA, 19 nt, Artificial Sequence
  Description of Artificial Sequence: Synthetic oligonucleotide
  Sense strand starting at position 3909 of SEQ ID NO: 1016
gggaacauuaugugaccua

SEQ ID NO: 81077 - RNA, 19 nt, Artificial Sequence
  Description of Artificial Sequence: Synthetic oligonucleotide
  Antisense strand to SEQ ID NO: 80996
uaggucacauaauguuccc

SEQ ID NO: 81078 - RNA, 19 nt, Artificial Sequence
  Description of Artificial Sequence: Synthetic oligonucleotide
  Sense strand starting at position 3896 of SEQ ID NO: 1016
gccugugagcuuugggaac

SEQ ID NO: 81079 - RNA, 19 nt, Artificial Sequence
  Description of Artificial Sequence: Synthetic oligonucleotide
  Antisense strand to SEQ ID NO: 80998
guucccaaagcucacaggc

SEQ ID NO: 81080 - RNA, 19 nt, Artificial Sequence
  Description of Artificial Sequence: Synthetic oligonucleotide
  Sense strand starting at position 3687 of SEQ ID NO: 1016
gccaaauuucgcuauguuu

SEQ ID NO: 81081 - RNA, 19 nt, Artificial Sequence
  Description of Artificial Sequence: Synthetic oligonucleotide
  Antisense strand to SEQ ID NO: 81000
aaacauagcgaaauuuggc

SEQ ID NO: 81082 - RNA, 19 nt, Artificial Sequence
  Description of Artificial Sequence: Synthetic oligonucleotide
  Sense strand starting at position 3686 of SEQ ID NO: 1016
ggccaaauuucgcuauguu

SEQ ID NO: 81083 - RNA, 19 nt, Artificial Sequence
  Description of Artificial Sequence: Synthetic oligonucleotide
  Antisense strand to SEQ ID NO: 81002
aacauagcgaaauuuggcc

SEQ ID NO: 81084 - RNA, 19 nt, Artificial Sequence
  Description of Artificial Sequence: Synthetic oligonucleotide
  Sense strand starting at position 3685 of SEQ ID NO: 1016
cggccaaauuucgcuaugu

SEQ ID NO: 81085 - RNA, 19 nt, Artificial Sequence
  Description of Artificial Sequence: Synthetic oligonucleotide
  Antisense strand to SEQ ID NO: 81004
acauagcgaaauuuggccg

SEQ ID NO: 81086 - RNA, 19 nt, Artificial Sequence
  Description of Artificial Sequence: Synthetic oligonucleotide
  Sense strand starting at position 3155 of SEQ ID NO: 1016
gcacuuuaggauuaucuuu

SEQ ID NO: 81087 - RNA, 19 nt, Artificial Sequence
  Description of Artificial Sequence: Synthetic oligonucleotide
  Antisense strand to SEQ ID NO: 81006
aaagauaauccuaaagugc

SEQ ID NO: 81088 - RNA, 19 nt, Artificial Sequence
  Description of Artificial Sequence: Synthetic oligonucleotide
  Sense strand starting at position 3125 of SEQ ID NO: 1016
gugugucucaguggcauuu

SEQ ID NO: 81089 - RNA, 19 nt, Artificial Sequence
  Description of Artificial Sequence: Synthetic oligonucleotide
  Antisense strand to SEQ ID NO: 81008
aaaugccacugagacacac

SEQ ID NO: 81090 - RNA, 19 nt, Artificial Sequence
  Description of Artificial Sequence: Synthetic oligonucleotide
  Sense strand starting at position 3071 of SEQ ID NO: 1016
caauguggccuugauuguu

SEQ ID NO: 81091 - RNA, 19 nt, Artificial Sequence
  Description of Artificial Sequence: Synthetic oligonucleotide
  Antisense strand to SEQ ID NO: 81010
aacaaucaaggccacauug

SEQ ID NO: 81092 - RNA, 19 nt, Artificial Sequence
  Description of Artificial Sequence: Synthetic oligonucleotide
  Sense strand starting at position 3067 of SEQ ID NO: 1016
aaugcaauguggccuugau

SEQ ID NO: 81093 - RNA, 19 nt, Artificial Sequence
  Description of Artificial Sequence: Synthetic oligonucleotide
  Antisense strand to SEQ ID NO: 81012
aucaaggccacauugcauu

SEQ ID NO: 81094 - RNA, 19 nt, Artificial Sequence
  Description of Artificial Sequence: Synthetic oligonucleotide
  Sense strand starting at position 3052 of SEQ ID NO: 1016
uugugaugcguugcgaaug

SEQ ID NO: 81095 - RNA, 19 nt, Artificial Sequence
  Description of Artificial Sequence: Synthetic oligonucleotide
  Antisense strand to SEQ ID NO: 81014
cauucgcaacgcaucacaa

SEQ ID NO: 81096 - RNA, 19 nt, Artificial Sequence
  Description of Artificial Sequence: Synthetic oligonucleotide
  Sense strand starting at position 3050 of SEQ ID NO: 1016
uguugugaugcguugcgaa

SEQ ID NO: 81097 - RNA, 19 nt, Artificial Sequence
  Description of Artificial Sequence: Synthetic oligonucleotide
  Antisense strand to SEQ ID NO: 81016
uucgcaacgcaucacaaca

SEQ ID NO: 81098 - RNA, 19 nt, Artificial Sequence
  Description of Artificial Sequence: Synthetic oligonucleotide
  Sense strand starting at position 3017 of SEQ ID NO: 1016
gggacugacccaugucacu

SEQ ID NO: 81099 - RNA, 19 nt, Artificial Sequence
  Description of Artificial Sequence: Synthetic oligonucleotide
  Antisense strand to SEQ ID NO: 81018
agugacaugggucaguccc

SEQ ID NO: 81100 - RNA, 19 nt, Artificial Sequence
  Description of Artificial Sequence: Synthetic oligonucleotide
  Sense strand starting at position 2521 of SEQ ID NO: 1016
gagcuaagagugcaucaca

SEQ ID NO: 81101 - RNA, 19 nt, Artificial Sequence
  Description of Artificial Sequence: Synthetic oligonucleotide
  Antisense strand to SEQ ID NO: 81020
ugugaugcacucuuagcuc

SEQ ID NO: 81102 - RNA, 19 nt, Artificial Sequence
  Description of Artificial Sequence: Synthetic oligonucleotide
  Sense strand starting at position 2209 of SEQ ID NO: 1016
aagagagccuggucugaug

SEQ ID NO: 81103 - RNA, 19 nt, Artificial Sequence
  Description of Artificial Sequence: Synthetic oligonucleotide
  Antisense strand to SEQ ID NO: 81022
caucagaccaggcucucuu

SEQ ID NO: 81104 - RNA, 19 nt, Artificial Sequence
  Description of Artificial Sequence: Synthetic oligonucleotide
  Sense strand starting at position 2207 of SEQ ID NO: 1016
agaagagagccuggucuga

SEQ ID NO: 81105 - RNA, 19 nt, Artificial Sequence
  Description of Artificial Sequence: Synthetic oligonucleotide
  Antisense strand to SEQ ID NO: 81024
ucagaccaggcucucuucu

SEQ ID NO: 81106 - RNA, 19 nt, Artificial Sequence
  Description of Artificial Sequence: Synthetic oligonucleotide
  Sense strand starting at position 1241 of SEQ ID NO: 1016
ccgguauccgcuccaguau

SEQ ID NO: 81107 - RNA, 19 nt, Artificial Sequence
  Description of Artificial Sequence: Synthetic oligonucleotide
  Antisense strand to SEQ ID NO: 81026
auacuggagcggauaccgg

SEQ ID NO: 81108 - RNA, 19 nt, Artificial Sequence
  Description of Artificial Sequence: Synthetic oligonucleotide
  Sense strand starting at position 1240 of SEQ ID NO: 1016
cccgguauccgcuccagua

SEQ ID NO: 81109 - RNA, 19 nt, Artificial Sequence
  Description of Artificial Sequence: Synthetic oligonucleotide
  Antisense strand to SEQ ID NO: 81028
uacuggagcggauaccggg

SEQ ID NO: 81110 - RNA, 19 nt, Artificial Sequence
  Description of Artificial Sequence: Synthetic oligonucleotide
  Sense strand starting at position 1040 of SEQ ID NO: 1016
gguaaaccuggauguugua

SEQ ID NO: 81111 - RNA, 19 nt, Artificial Sequence
  Description of Artificial Sequence: Synthetic oligonucleotide
  Antisense strand to SEQ ID NO: 81030
uacaacauccagguuuacc

SEQ ID NO: 81112 - RNA, 19 nt, Artificial Sequence
  Description of Artificial Sequence: Synthetic oligonucleotide
  Sense strand starting at position 1037 of SEQ ID NO: 1016
uucgguaaaccuggauguu

SEQ ID NO: 81113 - RNA, 19 nt, Artificial Sequence
  Description of Artificial Sequence: Synthetic oligonucleotide
  Antisense strand to SEQ ID NO: 81032
aacauccagguuuaccgaa

SEQ ID NO: 81114 - RNA, 19 nt, Artificial Sequence
  Description of Artificial Sequence: Synthetic oligonucleotide
  Sense strand starting at position 1012 of SEQ ID NO: 1016
ugucgaaaggaaugucaaa

SEQ ID NO: 81115 - RNA, 19 nt, Artificial Sequence
  Description of Artificial Sequence: Synthetic oligonucleotide
  Antisense strand to SEQ ID NO: 81034
uuugacauuccuuucgaca

SEQ ID NO: 81116 - RNA, 19 nt, Artificial Sequence
  Description of Artificial Sequence: Synthetic oligonucleotide
  Sense strand starting at position 1005 of SEQ ID NO: 1016
guguguaugucgaaaggaa

SEQ ID NO: 81117 - RNA, 19 nt, Artificial Sequence
  Description of Artificial Sequence: Synthetic oligonucleotide
  Antisense strand to SEQ ID NO: 81036
uuccuuucgacauacacac

SEQ ID NO: 81118 - RNA, 19 nt, Artificial Sequence
  Description of Artificial Sequence: Synthetic oligonucleotide
  Sense strand starting at position 1004 of SEQ ID NO: 1016
gguguguaugucgaaagga

SEQ ID NO: 81119 - RNA, 19 nt, Artificial Sequence
  Description of Artificial Sequence: Synthetic oligonucleotide
  Antisense strand to SEQ ID NO: 81038
uccuuucgacauacacacc

SEQ ID NO: 81120 - RNA, 19 nt, Artificial Sequence
  Description of Artificial Sequence: Synthetic oligonucleotide
  Sense strand starting at position 973 of SEQ ID NO: 1016
cugaaacaggguugauagu

SEQ ID NO: 81121 - RNA, 19 nt, Artificial Sequence
  Description of Artificial Sequence: Synthetic oligonucleotide
  Antisense strand to SEQ ID NO: 81040
acuaucaacccuguuucag

SEQ ID NO: 81122 - RNA, 19 nt, Artificial Sequence
  Description of Artificial Sequence: Synthetic oligonucleotide
  Sense strand starting at position 962 of SEQ ID NO: 1016
uugaccuaagucugaaaca

SEQ ID NO: 81123 - RNA, 19 nt, Artificial Sequence
  Description of Artificial Sequence: Synthetic oligonucleotide
  Antisense strand to SEQ ID NO: 81042
uguuucagacuuaggucaa

SEQ ID NO: 81124 - RNA, 19 nt, Artificial Sequence
  Description of Artificial Sequence: Synthetic oligonucleotide
  Sense strand starting at position 845 of SEQ ID NO: 1016
gguugugucuacacgaagu

SEQ ID NO: 81125 - RNA, 19 nt, Artificial Sequence
  Description of Artificial Sequence: Synthetic oligonucleotide
  Antisense strand to SEQ ID NO: 81044
acuucguguagacacaacc

SEQ ID NO: 81126 - RNA, 19 nt, Artificial Sequence
  Description of Artificial Sequence: Synthetic oligonucleotide
  Sense strand starting at position 842 of SEQ ID NO: 1016
auugguugugucuacacga

SEQ ID NO: 81127 - RNA, 19 nt, Artificial Sequence
  Description of Artificial Sequence: Synthetic oligonucleotide
  Antisense strand to SEQ ID NO: 81046
ucguguagacacaaccaau

SEQ ID NO: 81128 - RNA, 19 nt, Artificial Sequence
  Description of Artificial Sequence: Synthetic oligonucleotide
  Sense strand starting at position 825 of SEQ ID NO: 1016
aguuaacaucacuggcaau

SEQ ID NO: 81129 - RNA, 19 nt, Artificial Sequence
  Description of Artificial Sequence: Synthetic oligonucleotide
  Antisense strand to SEQ ID NO: 81048
auugccagugauguuaacu

SEQ ID NO: 81130 - RNA, 19 nt, Artificial Sequence
  Description of Artificial Sequence: Synthetic oligonucleotide
  Sense strand starting at position 812 of SEQ ID NO: 1016
auucuagaugcccaguuaa

SEQ ID NO: 81131 - RNA, 19 nt, Artificial Sequence
  Description of Artificial Sequence: Synthetic oligonucleotide
  Antisense strand to SEQ ID NO: 81050
uuaacugggcaucuagaau

SEQ ID NO: 81132 - RNA, 19 nt, Artificial Sequence
  Description of Artificial Sequence: Synthetic oligonucleotide
  Sense strand starting at position 762 of SEQ ID NO: 1016
ggcugaugccaccaaacua

SEQ ID NO: 81133 - RNA, 19 nt, Artificial Sequence
  Description of Artificial Sequence: Synthetic oligonucleotide
  Antisense strand to SEQ ID NO: 81052
uaguuugguggcaucagcc

SEQ ID NO: 81134 - RNA, 19 nt, Artificial Sequence
  Description of Artificial Sequence: Synthetic oligonucleotide
  Sense strand starting at position 560 of SEQ ID NO: 1016
cgugaucaacucugagaug

SEQ ID NO: 81135 - RNA, 19 nt, Artificial Sequence
  Description of Artificial Sequence: Synthetic oligonucleotide
  Antisense strand to SEQ ID NO: 81054
caucucagaguugaucacg

SEQ ID NO: 81136 - RNA, 19 nt, Artificial Sequence
  Description of Artificial Sequence: Synthetic oligonucleotide
  Sense strand starting at position 554 of SEQ ID NO: 1016
gguauacgugaucaacucu

SEQ ID NO: 81137 - RNA, 19 nt, Artificial Sequence
  Description of Artificial Sequence: Synthetic oligonucleotide
  Antisense strand to SEQ ID NO: 81056
agaguugaucacguauacc

SEQ ID NO: 81138 - RNA, 19 nt, Artificial Sequence
  Description of Artificial Sequence: Synthetic oligonucleotide
  Sense strand starting at position 553 of SEQ ID NO: 1016
agguauacgugaucaacuc

SEQ ID NO: 81139 - RNA, 19 nt, Artificial Sequence
  Description of Artificial Sequence: Synthetic oligonucleotide
  Antisense strand to SEQ ID NO: 81058
gaguugaucacguauaccu

SEQ ID NO: 81140 - RNA, 19 nt, Artificial Sequence
  Description of Artificial Sequence: Synthetic oligonucleotide
  Sense strand starting at position 551 of SEQ ID NO: 1016
aaagguauacgugaucaac

SEQ ID NO: 81141 - RNA, 19 nt, Artificial Sequence
  Description of Artificial Sequence: Synthetic oligonucleotide
  Antisense strand to SEQ ID NO: 81060
guugaucacguauaccuuu

SEQ ID NO: 81142 - RNA, 19 nt, Artificial Sequence
  Description of Artificial Sequence: Synthetic oligonucleotide
  Sense strand starting at position 548 of SEQ ID NO: 1016
uggaaagguauacgugauc

SEQ ID NO: 81143 - RNA, 19 nt, Artificial Sequence
  Description of Artificial Sequence: Synthetic oligonucleotide
  Antisense strand to SEQ ID NO: 81062
gaucacguauaccuuucca

SEQ ID NO: 81144 - RNA, 19 nt, Artificial Sequence
  Description of Artificial Sequence: Synthetic oligonucleotide
  Sense strand starting at position 546 of SEQ ID NO: 1016
aguggaaagguauacguga

SEQ ID NO: 81145 - RNA, 19 nt, Artificial Sequence
  Description of Artificial Sequence: Synthetic oligonucleotide
  Antisense strand to SEQ ID NO: 81064
ucacguauaccuuuccacu

SEQ ID NO: 81146 - RNA, 19 nt, Artificial Sequence
  Description of Artificial Sequence: Synthetic oligonucleotide
  Sense strand starting at position 528 of SEQ ID NO: 1016
cauauucucguuuguagga

SEQ ID NO: 81147 - RNA, 19 nt, Artificial Sequence
  Description of Artificial Sequence: Synthetic oligonucleotide
  Antisense strand to SEQ ID NO: 81066
uccuacaaacgagaauaug

SEQ ID NO: 81148 - RNA, 19 nt, Artificial Sequence
  Description of Artificial Sequence: Synthetic oligonucleotide
  Sense strand starting at position 526 of SEQ ID NO: 1016
uacauauucucguuuguag

SEQ ID NO: 81149 - RNA, 19 nt, Artificial Sequence
  Description of Artificial Sequence: Synthetic oligonucleotide
  Antisense strand to SEQ ID NO: 81068
cuacaaacgagaauaugua

SEQ ID NO: 81150 - RNA, 19 nt, Artificial Sequence
  Description of Artificial Sequence: Synthetic oligonucleotide
  Sense strand starting at position 123 of SEQ ID NO: 1016
ucauccugucccuggauaa

SEQ ID NO: 81151 - RNA, 19 nt, Artificial Sequence
  Description of Artificial Sequence: Synthetic oligonucleotide
  Antisense strand to SEQ ID NO: 81070
uuauccagggacaggauga

SEQ ID NO: 81152 - RNA, 19 nt, Artificial Sequence
  Description of Artificial Sequence: Synthetic oligonucleotide
  Sense strand starting at position 100 of SEQ ID NO: 1016
agagcuaaggccuguuaau

SEQ ID NO: 81153 - RNA, 19 nt, Artificial Sequence
  Description of Artificial Sequence: Synthetic oligonucleotide
  Antisense strand to SEQ ID NO: 81072
auuaacaggccuuagcucu

SEQ ID NO: 81154 - RNA, 19 nt, Artificial Sequence
  Description of Artificial Sequence: Synthetic oligonucleotide
  Sense strand starting at position 32 of SEQ ID NO: 1017
uuagaacucguagggauau

SEQ ID NO: 81155 - RNA, 19 nt, Artificial Sequence
  Description of Artificial Sequence: Synthetic oligonucleotide
  Antisense strand to SEQ ID NO: 81074
auaucccuacgaguucuaa

SEQ ID NO: 81156 - RNA, 19 nt, Artificial Sequence
  Description of Artificial Sequence: Synthetic oligonucleotide
  Sense strand starting at position 52 of SEQ ID NO: 1017
agauauuauccugaccugu

SEQ ID NO: 81157 - RNA, 19 nt, Artificial Sequence
  Description of Artificial Sequence: Synthetic oligonucleotide
  Antisense strand to SEQ ID NO: 81076
acaggucaggauaauaucu

SEQ ID NO: 81158 - RNA, 19 nt, Artificial Sequence
  Description of Artificial Sequence: Synthetic oligonucleotide
  Sense strand starting at position 637 of SEQ ID NO: 1017
cugagaaacucuuauuuag

SEQ ID NO: 81159 - RNA, 19 nt, Artificial Sequence
  Description of Artificial Sequence: Synthetic oligonucleotide
  Antisense strand to SEQ ID NO: 81078
cuaaauaagaguuucucag

SEQ ID NO: 81160 - RNA, 19 nt, Artificial Sequence
  Description of Artificial Sequence: Synthetic oligonucleotide
  Sense strand starting at position 773 of SEQ ID NO: 1017
aguccaguucuccaacauu

SEQ ID NO: 81161 - RNA, 19 nt, Artificial Sequence
  Description of Artificial Sequence: Synthetic oligonucleotide
  Antisense strand to SEQ ID NO: 81080
aauguuggagaacuggacu

SEQ ID NO: 81162 - RNA, 19 nt, Artificial Sequence
  Description of Artificial Sequence: Synthetic oligonucleotide
  Sense strand starting at position 789 of SEQ ID NO: 1017
auuauauauuggcuacgau

SEQ ID NO: 81163 - RNA, 19 nt, Artificial Sequence
  Description of Artificial Sequence: Synthetic oligonucleotide
  Antisense strand to SEQ ID NO: 81082
aucguagccaauauauaau

SEQ ID NO: 81164 - RNA, 19 nt, Artificial Sequence
  Description of Artificial Sequence: Synthetic oligonucleotide
  Sense strand starting at position 790 of SEQ ID NO: 1017
uuauauauuggcuacgauu

SEQ ID NO: 81165 - RNA, 19 nt, Artificial Sequence
  Description of Artificial Sequence: Synthetic oligonucleotide
  Antisense strand to SEQ ID NO: 81084
aaucguagccaauauauaa

SEQ ID NO: 81166 - RNA, 19 nt, Artificial Sequence
  Description of Artificial Sequence: Synthetic oligonucleotide
  Sense strand starting at position 792 of SEQ ID NO: 1017
auauauuggcuacgauuaa

SEQ ID NO: 81167 - RNA, 19 nt, Artificial Sequence
  Description of Artificial Sequence: Synthetic oligonucleotide
  Antisense strand to SEQ ID NO: 81086
uuaaucguagccaauauau

SEQ ID NO: 81168 - RNA, 19 nt, Artificial Sequence
  Description of Artificial Sequence: Synthetic oligonucleotide
  Sense strand starting at position 796 of SEQ ID NO: 1017
auuggcuacgauuaaucaa

SEQ ID NO: 81169 - RNA, 19 nt, Artificial Sequence
  Description of Artificial Sequence: Synthetic oligonucleotide
  Antisense strand to SEQ ID NO: 81088
uugauuaaucguagccaau

SEQ ID NO: 81170 - RNA, 19 nt, Artificial Sequence
  Description of Artificial Sequence: Synthetic oligonucleotide
  Sense strand starting at position 799 of SEQ ID NO: 1017
ggcuacgauuaaucaagau

SEQ ID NO: 81171 - RNA, 19 nt, Artificial Sequence
  Description of Artificial Sequence: Synthetic oligonucleotide
  Antisense strand to SEQ ID NO: 81090
aucuugauuaaucguagcc

SEQ ID NO: 81172 - RNA, 19 nt, Artificial Sequence
  Description of Artificial Sequence: Synthetic oligonucleotide
  Sense strand starting at position 834 of SEQ ID NO: 1017
ugccgaaauguuucccgua

SEQ ID NO: 81173 - RNA, 19 nt, Artificial Sequence
  Description of Artificial Sequence: Synthetic oligonucleotide
  Antisense strand to SEQ ID NO: 81092
uacgggaaacauuucggca

SEQ ID NO: 81174 - RNA, 19 nt, Artificial Sequence
  Description of Artificial Sequence: Synthetic oligonucleotide
  Sense strand starting at position 841 of SEQ ID NO: 1017
auguuucccguacaauaaa

SEQ ID NO: 81175 - RNA, 19 nt, Artificial Sequence
  Description of Artificial Sequence: Synthetic oligonucleotide
  Antisense strand to SEQ ID NO: 81094
uuuauuguacgggaaacau

SEQ ID NO: 81176 - RNA, 19 nt, Artificial Sequence
  Description of Artificial Sequence: Synthetic oligonucleotide
  Sense strand starting at position 894 of SEQ ID NO: 1017
agucgaguucuuuacuaac

SEQ ID NO: 81177 - RNA, 19 nt, Artificial Sequence
  Description of Artificial Sequence: Synthetic oligonucleotide
  Antisense strand to SEQ ID NO: 81096
guuaguaaagaacucgacu

SEQ ID NO: 81178 - RNA, 19 nt, Artificial Sequence
  Description of Artificial Sequence: Synthetic oligonucleotide
  Sense strand starting at position 896 of SEQ ID NO: 1017
ucgaguucuuuacuaacaa

SEQ ID NO: 81179 - RNA, 19 nt, Artificial Sequence
  Description of Artificial Sequence: Synthetic oligonucleotide
  Antisense strand to SEQ ID NO: 81098
uuguuaguaaagaacucga

SEQ ID NO: 81180 - RNA, 19 nt, Artificial Sequence
  Description of Artificial Sequence: Synthetic oligonucleotide
  Sense strand starting at position 1171 of SEQ ID NO: 1017
ggaacuuguccgcagagaa

SEQ ID NO: 81181 - RNA, 19 nt, Artificial Sequence
  Description of Artificial Sequence: Synthetic oligonucleotide
  Antisense strand to SEQ ID NO: 81100
uucucugcggacaaguucc

SEQ ID NO: 81182 - RNA, 19 nt, Artificial Sequence
  Description of Artificial Sequence: Synthetic oligonucleotide
  Sense strand starting at position 1251 of SEQ ID NO: 1017
guaacagagcuauggaaau

SEQ ID NO: 81183 - RNA, 19 nt, Artificial Sequence
  Description of Artificial Sequence: Synthetic oligonucleotide
  Antisense strand to SEQ ID NO: 81102
auuuccauagcucuguuac

SEQ ID NO: 81184 - RNA, 19 nt, Artificial Sequence
  Description of Artificial Sequence: Synthetic oligonucleotide
  Sense strand starting at position 1317 of SEQ ID NO: 1017
ucaugaagaccuggucuca

SEQ ID NO: 81185 - RNA, 19 nt, Artificial Sequence
  Description of Artificial Sequence: Synthetic oligonucleotide
  Antisense strand to SEQ ID NO: 81104
ugagaccaggucuucauga

SEQ ID NO: 81186 - RNA, 19 nt, Artificial Sequence
  Description of Artificial Sequence: Synthetic oligonucleotide
  Sense strand starting at position 1749 of SEQ ID NO: 1017
aggaaagacuuaguugagu

SEQ ID NO: 81187 - RNA, 19 nt, Artificial Sequence
  Description of Artificial Sequence: Synthetic oligonucleotide
  Antisense strand to SEQ ID NO: 81106
acucaacuaagucuuuccu

SEQ ID NO: 81188 - RNA, 19 nt, Artificial Sequence
  Description of Artificial Sequence: Synthetic oligonucleotide
  Sense strand starting at position 1794 of SEQ ID NO: 1017
cgacuagccuagucagaaa

SEQ ID NO: 81189 - RNA, 19 nt, Artificial Sequence
  Description of Artificial Sequence: Synthetic oligonucleotide
  Antisense strand to SEQ ID NO: 81108
uuucugacuaggcuagucg

SEQ ID NO: 81190 - RNA, 19 nt, Artificial Sequence
  Description of Artificial Sequence: Synthetic oligonucleotide
  Sense strand starting at position 2408 of SEQ ID NO: 1017
aaauuaguguuagcaggga

SEQ ID NO: 81191 - RNA, 19 nt, Artificial Sequence
  Description of Artificial Sequence: Synthetic oligonucleotide
  Antisense strand to SEQ ID NO: 81110
ucccugcuaacacuaauuu

SEQ ID NO: 81192 - RNA, 19 nt, Artificial Sequence
  Description of Artificial Sequence: Synthetic oligonucleotide
  Sense strand starting at position 2512 of SEQ ID NO: 1017
cgaaauaacugccuuccaa

SEQ ID NO: 81193 - RNA, 19 nt, Artificial Sequence
  Description of Artificial Sequence: Synthetic oligonucleotide
  Antisense strand to SEQ ID NO: 81112
uuggaaggcaguuauuucg

SEQ ID NO: 81194 - RNA, 19 nt, Artificial Sequence
  Description of Artificial Sequence: Synthetic oligonucleotide
  Sense strand starting at position 2576 of SEQ ID NO: 1017
caugcauuuguguguauau

SEQ ID NO: 81195 - RNA, 19 nt, Artificial Sequence
  Description of Artificial Sequence: Synthetic oligonucleotide
  Antisense strand to SEQ ID NO: 81114
auauacacacaaaugcaug

SEQ ID NO: 81196 - RNA, 19 nt, Artificial Sequence
  Description of Artificial Sequence: Synthetic oligonucleotide
  Sense strand starting at position 2685 of SEQ ID NO: 1017
gugcuauagguauauacca

SEQ ID NO: 81197 - RNA, 19 nt, Artificial Sequence
  Description of Artificial Sequence: Synthetic oligonucleotide
  Antisense strand to SEQ ID NO: 81116
ugguauauaccuauagcac

SEQ ID NO: 81198 - RNA, 19 nt, Artificial Sequence
  Description of Artificial Sequence: Synthetic oligonucleotide
  Sense strand starting at position 2693 of SEQ ID NO: 1017
gguauauaccagugaauau

SEQ ID NO: 81199 - RNA, 19 nt, Artificial Sequence
  Description of Artificial Sequence: Synthetic oligonucleotide
  Antisense strand to SEQ ID NO: 81118
auauucacugguauauacc

SEQ ID NO: 81200 - RNA, 19 nt, Artificial Sequence
  Description of Artificial Sequence: Synthetic oligonucleotide
  Sense strand starting at position 2824 of SEQ ID NO: 1017
agugaaagaugccuguaac

SEQ ID NO: 81201 - RNA, 19 nt, Artificial Sequence
  Description of Artificial Sequence: Synthetic oligonucleotide
  Antisense strand to SEQ ID NO: 81120
guuacaggcaucuuucacu

SEQ ID NO: 81202 - RNA, 19 nt, Artificial Sequence
  Description of Artificial Sequence: Synthetic oligonucleotide
  Sense strand starting at position 2827 of SEQ ID NO: 1017
gaaagaugccuguaaccac

SEQ ID NO: 81203 - RNA, 19 nt, Artificial Sequence
  Description of Artificial Sequence: Synthetic oligonucleotide
  Antisense strand to SEQ ID NO: 81122
gugguuacaggcaucuuuc

SEQ ID NO: 81204 - RNA, 19 nt, Artificial Sequence
  Description of Artificial Sequence: Synthetic oligonucleotide
  Sense strand starting at position 2842 of SEQ ID NO: 1017
ccacauccgccagagauga

SEQ ID NO: 81205 - RNA, 19 nt, Artificial Sequence
  Description of Artificial Sequence: Synthetic oligonucleotide
  Antisense strand to SEQ ID NO: 81124
ucaucucuggcggaugugg

SEQ ID NO: 81206 - RNA, 19 nt, Artificial Sequence
  Description of Artificial Sequence: Synthetic oligonucleotide
  Sense strand starting at position 2864 of SEQ ID NO: 1017
cuguuaauagauugaagua

SEQ ID NO: 81207 - RNA, 19 nt, Artificial Sequence
  Description of Artificial Sequence: Synthetic oligonucleotide
  Antisense strand to SEQ ID NO: 81126
uacuucaaucuauuaacag

SEQ ID NO: 81208 - RNA, 19 nt, Artificial Sequence
  Description of Artificial Sequence: Synthetic oligonucleotide
  Sense strand starting at position 2876 of SEQ ID NO: 1017
ugaaguauauuauuccaga

SEQ ID NO: 81209 - RNA, 19 nt, Artificial Sequence
  Description of Artificial Sequence: Synthetic oligonucleotide
  Antisense strand to SEQ ID NO: 81128
ucuggaauaauauacuuca

SEQ ID NO: 81210 - RNA, 19 nt, Artificial Sequence
  Description of Artificial Sequence: Synthetic oligonucleotide
  Sense strand starting at position 2966 of SEQ ID NO: 1017
augguauaaguugaacgua

SEQ ID NO: 81211 - RNA, 19 nt, Artificial Sequence
  Description of Artificial Sequence: Synthetic oligonucleotide
  Antisense strand to SEQ ID NO: 81130
uacguucaacuuauaccau

SEQ ID NO: 81212 - RNA, 19 nt, Artificial Sequence
  Description of Artificial Sequence: Synthetic oligonucleotide
  Sense strand starting at position 2988 of SEQ ID NO: 1017
ccauguuaauacguagaaa

SEQ ID NO: 81213 - RNA, 19 nt, Artificial Sequence
  Description of Artificial Sequence: Synthetic oligonucleotide
  Antisense strand to SEQ ID NO: 81132
uuucuacguauuaacaugg

SEQ ID NO: 81214 - RNA, 19 nt, Artificial Sequence
  Description of Artificial Sequence: Synthetic oligonucleotide
  Sense strand starting at position 2991 of SEQ ID NO: 1017
uguuaauacguagaaaucu

SEQ ID NO: 81215 - RNA, 19 nt, Artificial Sequence
  Description of Artificial Sequence: Synthetic oligonucleotide
  Antisense strand to SEQ ID NO: 81134
agauuucuacguauuaaca

SEQ ID NO: 81216 - RNA, 19 nt, Artificial Sequence
  Description of Artificial Sequence: Synthetic oligonucleotide
  Sense strand starting at position 3057 of SEQ ID NO: 1017
agauuuggaugucaucaac

SEQ ID NO: 81217 - RNA, 19 nt, Artificial Sequence
  Description of Artificial Sequence: Synthetic oligonucleotide
  Antisense strand to SEQ ID NO: 81136
guugaugacauccaaaucu

SEQ ID NO: 81218 - RNA, 19 nt, Artificial Sequence
  Description of Artificial Sequence: Synthetic oligonucleotide
  Sense strand starting at position 3104 of SEQ ID NO: 1017
ggagcuaacuacccagauu

SEQ ID NO: 81219 - RNA, 19 nt, Artificial Sequence
  Description of Artificial Sequence: Synthetic oligonucleotide
  Antisense strand to SEQ ID NO: 81138
aaucuggguaguuagcucc

SEQ ID NO: 81220 - RNA, 19 nt, Artificial Sequence
  Description of Artificial Sequence: Synthetic oligonucleotide
  Sense strand starting at position 3187 of SEQ ID NO: 1017
ccuugaaacuauguggaaa

SEQ ID NO: 81221 - RNA, 19 nt, Artificial Sequence
  Description of Artificial Sequence: Synthetic oligonucleotide
  Antisense strand to SEQ ID NO: 81140
uuuccacauaguuucaagg

SEQ ID NO: 81222 - RNA, 19 nt, Artificial Sequence
  Description of Artificial Sequence: Synthetic oligonucleotide
  Sense strand starting at position 3234 of SEQ ID NO: 1017
cagcgaugagucuaggaaa

SEQ ID NO: 81223 - RNA, 19 nt, Artificial Sequence
  Description of Artificial Sequence: Synthetic oligonucleotide
  Antisense strand to SEQ ID NO: 81142
uuuccuagacucaucgcug

SEQ ID NO: 81224 - RNA, 19 nt, Artificial Sequence
  Description of Artificial Sequence: Synthetic oligonucleotide
  Sense strand starting at position 3387 of SEQ ID NO: 1017
cugggaccuuguuugagua

SEQ ID NO: 81225 - RNA, 19 nt, Artificial Sequence
  Description of Artificial Sequence: Synthetic oligonucleotide
  Antisense strand to SEQ ID NO: 81144
uacucaaacaaggucccag

SEQ ID NO: 81226 - RNA, 19 nt, Artificial Sequence
  Description of Artificial Sequence: Synthetic oligonucleotide
  Sense strand starting at position 3388 of SEQ ID NO: 1017
ugggaccuuguuugaguaa

SEQ ID NO: 81227 - RNA, 19 nt, Artificial Sequence
  Description of Artificial Sequence: Synthetic oligonucleotide
  Antisense strand to SEQ ID NO: 81146
uuacucaaacaagguccca

SEQ ID NO: 81228 - RNA, 19 nt, Artificial Sequence
  Description of Artificial Sequence: Synthetic oligonucleotide
  Sense strand starting at position 3419 of SEQ ID NO: 1017
cuguuuaagagugacagua

SEQ ID NO: 81229 - RNA, 19 nt, Artificial Sequence
  Description of Artificial Sequence: Synthetic oligonucleotide
  Antisense strand to SEQ ID NO: 81148
uacugucacucuuaaacag

SEQ ID NO: 81230 - RNA, 19 nt, Artificial Sequence
  Description of Artificial Sequence: Synthetic oligonucleotide
  Sense strand starting at position 3451 of SEQ ID NO: 1017
agaacucugucuuugaagu

SEQ ID NO: 81231 - RNA, 19 nt, Artificial Sequence
  Description of Artificial Sequence: Synthetic oligonucleotide
  Antisense strand to SEQ ID NO: 81150
acuucaaagacagaguucu

SEQ ID NO: 81232 - RNA, 19 nt, Artificial Sequence
  Description of Artificial Sequence: Synthetic oligonucleotide
  Sense strand starting at position 3622 of SEQ ID NO: 1017
guuacauaauagucacuga

SEQ ID NO: 81233 - RNA, 19 nt, Artificial Sequence
  Description of Artificial Sequence: Synthetic oligonucleotide
  Antisense strand to SEQ ID NO: 81152
ucagugacuauuauguaac

SEQ ID NO: 81234 - RNA, 19 nt, Artificial Sequence
  Description of Artificial Sequence: Synthetic oligonucleotide
  Sense strand starting at position 3970 of SEQ ID NO: 1018
caacuuagucaguaugugu

SEQ ID NO: 81235 - RNA, 19 nt, Artificial Sequence
  Description of Artificial Sequence: Synthetic oligonucleotide
  Antisense strand to SEQ ID NO: 81154
acacauacugacuaaguug

SEQ ID NO: 81236 - RNA, 19 nt, Artificial Sequence
  Description of Artificial Sequence: Synthetic oligonucleotide
  Sense strand starting at position 3966 of SEQ ID NO: 1018
accacaacuuagucaguau

SEQ ID NO: 81237 - RNA, 19 nt, Artificial Sequence
  Description of Artificial Sequence: Synthetic oligonucleotide
  Antisense strand to SEQ ID NO: 81156
auacugacuaaguuguggu

SEQ ID NO: 81238 - RNA, 19 nt, Artificial Sequence
  Description of Artificial Sequence: Synthetic oligonucleotide
  Sense strand starting at position 3831 of SEQ ID NO: 1018
gguuuaaaugcacaaauuc

SEQ ID NO: 81239 - RNA, 19 nt, Artificial Sequence
  Description of Artificial Sequence: Synthetic oligonucleotide
  Antisense strand to SEQ ID NO: 81158
gaauuugugcauuuaaacc

SEQ ID NO: 81240 - RNA, 19 nt, Artificial Sequence
  Description of Artificial Sequence: Synthetic oligonucleotide
  Sense strand starting at position 3738 of SEQ ID NO: 1018
gugccuagggugugaaaua

SEQ ID NO: 81241 - RNA, 19 nt, Artificial Sequence
  Description of Artificial Sequence: Synthetic oligonucleotide
  Antisense strand to SEQ ID NO: 81160
uauuucacacccuaggcac

SEQ ID NO: 81242 - RNA, 19 nt, Artificial Sequence
  Description of Artificial Sequence: Synthetic oligonucleotide
  Sense strand starting at position 3600 of SEQ ID NO: 1018
ucaagugagcaaugaugau

SEQ ID NO: 81243 - RNA, 19 nt, Artificial Sequence
  Description of Artificial Sequence: Synthetic oligonucleotide
  Antisense strand to SEQ ID NO: 81162
aucaucauugcucacuuga

SEQ ID NO: 81244 - RNA, 19 nt, Artificial Sequence
  Description of Artificial Sequence: Synthetic oligonucleotide
  Sense strand starting at position 3596 of SEQ ID NO: 1018
gguuucaagugagcaauga

SEQ ID NO: 81245 - RNA, 19 nt, Artificial Sequence
  Description of Artificial Sequence: Synthetic oligonucleotide
  Antisense strand to SEQ ID NO: 81164
ucauugcucacuugaaacc

SEQ ID NO: 81246 - RNA, 19 nt, Artificial Sequence
  Description of Artificial Sequence: Synthetic oligonucleotide
  Sense strand starting at position 3568 of SEQ ID NO: 1018
uccuaagugcaauaugaaa

SEQ ID NO: 81247 - RNA, 19 nt, Artificial Sequence
  Description of Artificial Sequence: Synthetic oligonucleotide
  Antisense strand to SEQ ID NO: 81166
uuucauauugcacuuagga

SEQ ID NO: 81248 - RNA, 19 nt, Artificial Sequence
  Description of Artificial Sequence: Synthetic oligonucleotide
  Sense strand starting at position 3547 of SEQ ID NO: 1018
cuuguaggaguuuggacau

SEQ ID NO: 81249 - RNA, 19 nt, Artificial Sequence
  Description of Artificial Sequence: Synthetic oligonucleotide
  Antisense strand to SEQ ID NO: 81168
auguccaaacuccuacaag

SEQ ID NO: 81250 - RNA, 19 nt, Artificial Sequence
  Description of Artificial Sequence: Synthetic oligonucleotide
  Sense strand starting at position 3541 of SEQ ID NO: 1018
uagauucuuguaggaguuu

SEQ ID NO: 81251 - RNA, 19 nt, Artificial Sequence
  Description of Artificial Sequence: Synthetic oligonucleotide
  Antisense strand to SEQ ID NO: 81170
aaacuccuacaagaaucua

SEQ ID NO: 81252 - RNA, 19 nt, Artificial Sequence
  Description of Artificial Sequence: Synthetic oligonucleotide
  Sense strand starting at position 3524 of SEQ ID NO: 1018
agacaaguugguggcaaua

SEQ ID NO: 81253 - RNA, 19 nt, Artificial Sequence
  Description of Artificial Sequence: Synthetic oligonucleotide
  Antisense strand to SEQ ID NO: 81172
uauugccaccaacuugucu

SEQ ID NO: 81254 - RNA, 19 nt, Artificial Sequence
  Description of Artificial Sequence: Synthetic oligonucleotide
  Sense strand starting at position 3501 of SEQ ID NO: 1018
gaguaacagagaugagguu

SEQ ID NO: 81255 - RNA, 19 nt, Artificial Sequence
  Description of Artificial Sequence: Synthetic oligonucleotide
  Antisense strand to SEQ ID NO: 81174
aaccucaucucuguuacuc

SEQ ID NO: 81256 - RNA, 19 nt, Artificial Sequence
  Description of Artificial Sequence: Synthetic oligonucleotide
  Sense strand starting at position 3495 of SEQ ID NO: 1018
ggguaugaguaacagagau

SEQ ID NO: 81257 - RNA, 19 nt, Artificial Sequence
  Description of Artificial Sequence: Synthetic oligonucleotide
  Antisense strand to SEQ ID NO: 81176
aucucuguuacucauaccc

SEQ ID NO: 81258 - RNA, 19 nt, Artificial Sequence
  Description of Artificial Sequence: Synthetic oligonucleotide
  Sense strand starting at position 3080 of SEQ ID NO: 1018
guaggacucuaagucauuc

SEQ ID NO: 81259 - RNA, 19 nt, Artificial Sequence
  Description of Artificial Sequence: Synthetic oligonucleotide
  Antisense strand to SEQ ID NO: 81178
gaaugacuuagaguccuac

SEQ ID NO: 81260 - RNA, 19 nt, Artificial Sequence
  Description of Artificial Sequence: Synthetic oligonucleotide
  Sense strand starting at position 3077 of SEQ ID NO: 1018
ccaguaggacucuaaguca

SEQ ID NO: 81261 - RNA, 19 nt, Artificial Sequence
  Description of Artificial Sequence: Synthetic oligonucleotide
  Antisense strand to SEQ ID NO: 81180
ugacuuagaguccuacugg

SEQ ID NO: 81262 - RNA, 19 nt, Artificial Sequence
  Description of Artificial Sequence: Synthetic oligonucleotide
  Sense strand starting at position 3011 of SEQ ID NO: 1018
uugaucugagcuugaagaa

SEQ ID NO: 81263 - RNA, 19 nt, Artificial Sequence
  Description of Artificial Sequence: Synthetic oligonucleotide
  Antisense strand to SEQ ID NO: 81182
uucuucaagcucagaucaa

SEQ ID NO: 81264 - RNA, 19 nt, Artificial Sequence
  Description of Artificial Sequence: Synthetic oligonucleotide
  Sense strand starting at position 2984 of SEQ ID NO: 1018
caugaaggcuucccugaga

SEQ ID NO: 81265 - RNA, 19 nt, Artificial Sequence
  Description of Artificial Sequence: Synthetic oligonucleotide
  Antisense strand to SEQ ID NO: 81184
ucucagggaagccuucaug

SEQ ID NO: 81266 - RNA, 19 nt, Artificial Sequence
  Description of Artificial Sequence: Synthetic oligonucleotide
  Sense strand starting at position 2896 of SEQ ID NO: 1018
gugcaaagagcuccguagu

SEQ ID NO: 81267 - RNA, 19 nt, Artificial Sequence
  Description of Artificial Sequence: Synthetic oligonucleotide
  Antisense strand to SEQ ID NO: 81186
acuacggagcucuuugcac

SEQ ID NO: 81268 - RNA, 19 nt, Artificial Sequence
  Description of Artificial Sequence: Synthetic oligonucleotide
  Sense strand starting at position 2781 of SEQ ID NO: 1018
auagaucuggucugccaca

SEQ ID NO: 81269 - RNA, 19 nt, Artificial Sequence
  Description of Artificial Sequence: Synthetic oligonucleotide
  Antisense strand to SEQ ID NO: 81188
uguggcagaccagaucuau

SEQ ID NO: 81270 - RNA, 19 nt, Artificial Sequence
  Description of Artificial Sequence: Synthetic oligonucleotide
  Sense strand starting at position 2728 of SEQ ID NO: 1018
gaaaguuaggcuuaucuug

SEQ ID NO: 81271 - RNA, 19 nt, Artificial Sequence
  Description of Artificial Sequence: Synthetic oligonucleotide
  Antisense strand to SEQ ID NO: 81190
caagauaagccuaacuuuc

SEQ ID NO: 81272 - RNA, 19 nt, Artificial Sequence
  Description of Artificial Sequence: Synthetic oligonucleotide
  Sense strand starting at position 2666 of SEQ ID NO: 1018
uagcucugagguggauauu

SEQ ID NO: 81273 - RNA, 19 nt, Artificial Sequence
  Description of Artificial Sequence: Synthetic oligonucleotide
  Antisense strand to SEQ ID NO: 81192
aauauccaccucagagcua

SEQ ID NO: 81274 - RNA, 19 nt, Artificial Sequence
  Description of Artificial Sequence: Synthetic oligonucleotide
  Sense strand starting at position 2665 of SEQ ID NO: 1018
auagcucugagguggauau

SEQ ID NO: 81275 - RNA, 19 nt, Artificial Sequence
  Description of Artificial Sequence: Synthetic oligonucleotide
  Antisense strand to SEQ ID NO: 81194
auauccaccucagagcuau

SEQ ID NO: 81276 - RNA, 19 nt, Artificial Sequence
  Description of Artificial Sequence: Synthetic oligonucleotide
  Sense strand starting at position 2660 of SEQ ID NO: 1018
ucuuaauagcucugaggug

SEQ ID NO: 81277 - RNA, 19 nt, Artificial Sequence
  Description of Artificial Sequence: Synthetic oligonucleotide
  Antisense strand to SEQ ID NO: 81196
caccucagagcuauuaaga

SEQ ID NO: 81278 - RNA, 19 nt, Artificial Sequence
  Description of Artificial Sequence: Synthetic oligonucleotide
  Sense strand starting at position 2630 of SEQ ID NO: 1018
gcaggacuuugcuuaccuu

SEQ ID NO: 81279 - RNA, 19 nt, Artificial Sequence
  Description of Artificial Sequence: Synthetic oligonucleotide
  Antisense strand to SEQ ID NO: 81198
aagguaagcaaaguccugc

SEQ ID NO: 81280 - RNA, 19 nt, Artificial Sequence
  Description of Artificial Sequence: Synthetic oligonucleotide
  Sense strand starting at position 2598 of SEQ ID NO: 1018
gaguaagaguagcuuacau

SEQ ID NO: 81281 - RNA, 19 nt, Artificial Sequence
  Description of Artificial Sequence: Synthetic oligonucleotide
  Antisense strand to SEQ ID NO: 81200
auguaagcuacucuuacuc

SEQ ID NO: 81282 - RNA, 19 nt, Artificial Sequence
  Description of Artificial Sequence: Synthetic oligonucleotide
  Sense strand starting at position 2589 of SEQ ID NO: 1018
guguaacuagaguaagagu

SEQ ID NO: 81283 - RNA, 19 nt, Artificial Sequence
  Description of Artificial Sequence: Synthetic oligonucleotide
  Antisense strand to SEQ ID NO: 81202
acucuuacucuaguuacac

SEQ ID NO: 81284 - RNA, 19 nt, Artificial Sequence
  Description of Artificial Sequence: Synthetic oligonucleotide
  Sense strand starting at position 2583 of SEQ ID NO: 1018
cuuuauguguaacuagagu

SEQ ID NO: 81285 - RNA, 19 nt, Artificial Sequence
  Description of Artificial Sequence: Synthetic oligonucleotide
  Antisense strand to SEQ ID NO: 81204
acucuaguuacacauaaag

SEQ ID NO: 81286 - RNA, 19 nt, Artificial Sequence
  Description of Artificial Sequence: Synthetic oligonucleotide
  Sense strand starting at position 2579 of SEQ ID NO: 1018
guaacuuuauguguaacua

SEQ ID NO: 81287 - RNA, 19 nt, Artificial Sequence
  Description of Artificial Sequence: Synthetic oligonucleotide
  Antisense strand to SEQ ID NO: 81206
uaguuacacauaaaguuac

SEQ ID NO: 81288 - RNA, 19 nt, Artificial Sequence
  Description of Artificial Sequence: Synthetic oligonucleotide
  Sense strand starting at position 2241 of SEQ ID NO: 1018
gcaggcauuccgggucaga

SEQ ID NO: 81289 - RNA, 19 nt, Artificial Sequence
  Description of Artificial Sequence: Synthetic oligonucleotide
  Antisense strand to SEQ ID NO: 81208
ucugacccggaaugccugc

SEQ ID NO: 81290 - RNA, 19 nt, Artificial Sequence
  Description of Artificial Sequence: Synthetic oligonucleotide
  Sense strand starting at position 2126 of SEQ ID NO: 1018
ugggaaauguaguccgugu

SEQ ID NO: 81291 - RNA, 19 nt, Artificial Sequence
  Description of Artificial Sequence: Synthetic oligonucleotide
  Antisense strand to SEQ ID NO: 81210
acacggacuacauuuccca

SEQ ID NO: 81292 - RNA, 19 nt, Artificial Sequence
  Description of Artificial Sequence: Synthetic oligonucleotide
  Sense strand starting at position 2114 of SEQ ID NO: 1018
cgcuguucacccugggaaa

SEQ ID NO: 81293 - RNA, 19 nt, Artificial Sequence
  Description of Artificial Sequence: Synthetic oligonucleotide
  Antisense strand to SEQ ID NO: 81212
uuucccagggugaacagcg

SEQ ID NO: 81294 - RNA, 19 nt, Artificial Sequence
  Description of Artificial Sequence: Synthetic oligonucleotide
  Sense strand starting at position 958 of SEQ ID NO: 1018
ccauuagggcacugcaaua

SEQ ID NO: 81295 - RNA, 19 nt, Artificial Sequence
  Description of Artificial Sequence: Synthetic oligonucleotide
  Antisense strand to SEQ ID NO: 81214
uauugcagugcccuaaugg

SEQ ID NO: 81296 - RNA, 19 nt, Artificial Sequence
  Description of Artificial Sequence: Synthetic oligonucleotide
  Sense strand starting at position 926 of SEQ ID NO: 1018
gggaccugccuguaaggaa

SEQ ID NO: 81297 - RNA, 19 nt, Artificial Sequence
  Description of Artificial Sequence: Synthetic oligonucleotide
  Antisense strand to SEQ ID NO: 81216
uuccuuacaggcagguccc

SEQ ID NO: 81298 - RNA, 19 nt, Artificial Sequence
  Description of Artificial Sequence: Synthetic oligonucleotide
  Sense strand starting at position 762 of SEQ ID NO: 1018
aguauaauuccaggagacu

SEQ ID NO: 81299 - RNA, 19 nt, Artificial Sequence
  Description of Artificial Sequence: Synthetic oligonucleotide
  Antisense strand to SEQ ID NO: 81218
agucuccuggaauuauacu

SEQ ID NO: 81300 - RNA, 19 nt, Artificial Sequence
  Description of Artificial Sequence: Synthetic oligonucleotide
  Sense strand starting at position 760 of SEQ ID NO: 1018
ucaguauaauuccaggaga

SEQ ID NO: 81301 - RNA, 19 nt, Artificial Sequence
  Description of Artificial Sequence: Synthetic oligonucleotide
  Antisense strand to SEQ ID NO: 81220
ucuccuggaauuauacuga

SEQ ID NO: 81302 - RNA, 19 nt, Artificial Sequence
  Description of Artificial Sequence: Synthetic oligonucleotide
  Sense strand starting at position 749 of SEQ ID NO: 1018
augguuuggcaucaguaua

SEQ ID NO: 81303 - RNA, 19 nt, Artificial Sequence
  Description of Artificial Sequence: Synthetic oligonucleotide
  Antisense strand to SEQ ID NO: 81222
uauacugaugccaaaccau

SEQ ID NO: 81304 - RNA, 19 nt, Artificial Sequence
  Description of Artificial Sequence: Synthetic oligonucleotide
  Sense strand starting at position 426 of SEQ ID NO: 1018
ucaaguuguagggagcaga

SEQ ID NO: 81305 - RNA, 19 nt, Artificial Sequence
  Description of Artificial Sequence: Synthetic oligonucleotide
  Antisense strand to SEQ ID NO: 81224
ucugcucccuacaacuuga

SEQ ID NO: 81306 - RNA, 19 nt, Artificial Sequence
  Description of Artificial Sequence: Synthetic oligonucleotide
  Sense strand starting at position 406 of SEQ ID NO: 1018
ggugcaugcauuccugcau

SEQ ID NO: 81307 - RNA, 19 nt, Artificial Sequence
  Description of Artificial Sequence: Synthetic oligonucleotide
  Antisense strand to SEQ ID NO: 81226
augcaggaaugcaugcacc

SEQ ID NO: 81308 - RNA, 19 nt, Artificial Sequence
  Description of Artificial Sequence: Synthetic oligonucleotide
  Sense strand starting at position 302 of SEQ ID NO: 1018
gaugcauccucauuguuug

SEQ ID NO: 81309 - RNA, 19 nt, Artificial Sequence
  Description of Artificial Sequence: Synthetic oligonucleotide
  Antisense strand to SEQ ID NO: 81228
caaacaaugaggaugcauc

SEQ ID NO: 81310 - RNA, 19 nt, Artificial Sequence
  Description of Artificial Sequence: Synthetic oligonucleotide
  Sense strand starting at position 299 of SEQ ID NO: 1018
agagaugcauccucauugu

SEQ ID NO: 81311 - RNA, 19 nt, Artificial Sequence
  Description of Artificial Sequence: Synthetic oligonucleotide
  Antisense strand to SEQ ID NO: 81230
acaaugaggaugcaucucu

SEQ ID NO: 81312 - RNA, 19 nt, Artificial Sequence
  Description of Artificial Sequence: Synthetic oligonucleotide
  Sense strand starting at position 31 of SEQ ID NO: 1018
agugcucuccacuagcaga

SEQ ID NO: 81313 - RNA, 19 nt, Artificial Sequence
  Description of Artificial Sequence: Synthetic oligonucleotide
  Antisense strand to SEQ ID NO: 81232
ucugcuaguggagagcacu

SEQ ID NO: 81314 - RNA, 19 nt, Artificial Sequence
  Description of Artificial Sequence: Synthetic oligonucleotide
  Sense strand starting at position 3674 of SEQ ID NO: 1019
ugaagagaguucucaacac

SEQ ID NO: 81315 - RNA, 19 nt, Artificial Sequence
  Description of Artificial Sequence: Synthetic oligonucleotide
  Antisense strand to SEQ ID NO: 81234
guguugagaacucucuuca

SEQ ID NO: 81316 - RNA, 19 nt, Artificial Sequence
  Description of Artificial Sequence: Synthetic oligonucleotide
  Sense strand starting at position 3510 of SEQ ID NO: 1019
gggauuaagucaucucauc

SEQ ID NO: 81317 - RNA, 19 nt, Artificial Sequence
  Description of Artificial Sequence: Synthetic oligonucleotide
  Antisense strand to SEQ ID NO: 81236
gaugagaugacuuaauccc

SEQ ID NO: 81318 - RNA, 19 nt, Artificial Sequence
  Description of Artificial Sequence: Synthetic oligonucleotide
  Sense strand starting at position 3487 of SEQ ID NO: 1019
ggaugcuggacugguaaca

SEQ ID NO: 81319 - RNA, 19 nt, Artificial Sequence
  Description of Artificial Sequence: Synthetic oligonucleotide
  Antisense strand to SEQ ID NO: 81238
uguuaccaguccagcaucc

SEQ ID NO: 81320 - RNA, 19 nt, Artificial Sequence
  Description of Artificial Sequence: Synthetic oligonucleotide
  Sense strand starting at position 3325 of SEQ ID NO: 1019
guuggaaugggagguucua

SEQ ID NO: 81321 - RNA, 19 nt, Artificial Sequence
  Description of Artificial Sequence: Synthetic oligonucleotide
  Antisense strand to SEQ ID NO: 81240
uagaaccucccauuccaac

SEQ ID NO: 81322 - RNA, 19 nt, Artificial Sequence
  Description of Artificial Sequence: Synthetic oligonucleotide
  Sense strand starting at position 3314 of SEQ ID NO: 1019
gauagaauguuguuggaau

SEQ ID NO: 81323 - RNA, 19 nt, Artificial Sequence
  Description of Artificial Sequence: Synthetic oligonucleotide
  Antisense strand to SEQ ID NO: 81242
auuccaacaacauucuauc

SEQ ID NO: 81324 - RNA, 19 nt, Artificial Sequence
  Description of Artificial Sequence: Synthetic oligonucleotide
  Sense strand starting at position 3179 of SEQ ID NO: 1019
uguagugugcugucaucac

SEQ ID NO: 81325 - RNA, 19 nt, Artificial Sequence
  Description of Artificial Sequence: Synthetic oligonucleotide
  Antisense strand to SEQ ID NO: 81244
gugaugacagcacacuaca

SEQ ID NO: 81326 - RNA, 19 nt, Artificial Sequence
  Description of Artificial Sequence: Synthetic oligonucleotide
  Sense strand starting at position 3176 of SEQ ID NO: 1019
ggcuguagugugcugucau

SEQ ID NO: 81327 - RNA, 19 nt, Artificial Sequence
  Description of Artificial Sequence: Synthetic oligonucleotide
  Antisense strand to SEQ ID NO: 81246
augacagcacacuacagcc

SEQ ID NO: 81328 - RNA, 19 nt, Artificial Sequence
  Description of Artificial Sequence: Synthetic oligonucleotide
  Sense strand starting at position 2696 of SEQ ID NO: 1019
acaagagcaguuugaugau

SEQ ID NO: 81329 - RNA, 19 nt, Artificial Sequence
  Description of Artificial Sequence: Synthetic oligonucleotide
  Antisense strand to SEQ ID NO: 81248
aucaucaaacugcucuugu

SEQ ID NO: 81330 - RNA, 19 nt, Artificial Sequence
  Description of Artificial Sequence: Synthetic oligonucleotide
  Sense strand starting at position 2663 of SEQ ID NO: 1019
gaaauuauggcuggacauu

SEQ ID NO: 81331 - RNA, 19 nt, Artificial Sequence
  Description of Artificial Sequence: Synthetic oligonucleotide
  Antisense strand to SEQ ID NO: 81250
aauguccagccauaauuuc

SEQ ID NO: 81332 - RNA, 19 nt, Artificial Sequence
  Description of Artificial Sequence: Synthetic oligonucleotide
  Sense strand starting at position 2662 of SEQ ID NO: 1019
agaaauuauggcuggacau

SEQ ID NO: 81333 - RNA, 19 nt, Artificial Sequence
  Description of Artificial Sequence: Synthetic oligonucleotide
  Antisense strand to SEQ ID NO: 81252
auguccagccauaauuucu

SEQ ID NO: 81334 - RNA, 19 nt, Artificial Sequence
  Description of Artificial Sequence: Synthetic oligonucleotide
  Sense strand starting at position 2607 of SEQ ID NO: 1019
gugacuauuugagaaugaa

SEQ ID NO: 81335 - RNA, 19 nt, Artificial Sequence
  Description of Artificial Sequence: Synthetic oligonucleotide
  Antisense strand to SEQ ID NO: 81254
uucauucucaaauagucac

SEQ ID NO: 81336 - RNA, 19 nt, Artificial Sequence
  Description of Artificial Sequence: Synthetic oligonucleotide
  Sense strand starting at position 2605 of SEQ ID NO: 1019
augugacuauuugagaaug

SEQ ID NO: 81337 - RNA, 19 nt, Artificial Sequence
  Description of Artificial Sequence: Synthetic oligonucleotide
  Antisense strand to SEQ ID NO: 81256
cauucucaaauagucacau

SEQ ID NO: 81338 - RNA, 19 nt, Artificial Sequence
  Description of Artificial Sequence: Synthetic oligonucleotide
  Sense strand starting at position 2580 of SEQ ID NO: 1019
gaguuucuuccagagugag

SEQ ID NO: 81339 - RNA, 19 nt, Artificial Sequence
  Description of Artificial Sequence: Synthetic oligonucleotide
  Antisense strand to SEQ ID NO: 81258
cucacucuggaagaaacuc

SEQ ID NO: 81340 - RNA, 19 nt, Artificial Sequence
  Description of Artificial Sequence: Synthetic oligonucleotide
  Sense strand starting at position 2416 of SEQ ID NO: 1019
ucaucuuagccucaggaau

SEQ ID NO: 81341 - RNA, 19 nt, Artificial Sequence
  Description of Artificial Sequence: Synthetic oligonucleotide
  Antisense strand to SEQ ID NO: 81260
auuccugaggcuaagauga

SEQ ID NO: 81342 - RNA, 19 nt, Artificial Sequence
  Description of Artificial Sequence: Synthetic oligonucleotide
  Sense strand starting at position 2326 of SEQ ID NO: 1019
gagagaggucugggucaca

SEQ ID NO: 81343 - RNA, 19 nt, Artificial Sequence
  Description of Artificial Sequence: Synthetic oligonucleotide
  Antisense strand to SEQ ID NO: 81262
ugugacccagaccucucuc

SEQ ID NO: 81344 - RNA, 19 nt, Artificial Sequence
  Description of Artificial Sequence: Synthetic oligonucleotide
  Sense strand starting at position 2200 of SEQ ID NO: 1019
aaaguugcacaguaaguua

SEQ ID NO: 81345 - RNA, 19 nt, Artificial Sequence
  Description of Artificial Sequence: Synthetic oligonucleotide
  Antisense strand to SEQ ID NO: 81264
uaacuuacugugcaacuuu

SEQ ID NO: 81346 - RNA, 19 nt, Artificial Sequence
  Description of Artificial Sequence: Synthetic oligonucleotide
  Sense strand starting at position 2140 of SEQ ID NO: 1019
cugcaaggaucucuggauu

SEQ ID NO: 81347 - RNA, 19 nt, Artificial Sequence
  Description of Artificial Sequence: Synthetic oligonucleotide
  Antisense strand to SEQ ID NO: 81266
aauccagagauccuugcag

SEQ ID NO: 81348 - RNA, 19 nt, Artificial Sequence
  Description of Artificial Sequence: Synthetic oligonucleotide
  Sense strand starting at position 2119 of SEQ ID NO: 1019
gaacgagaacugcaccuuu

SEQ ID NO: 81349 - RNA, 19 nt, Artificial Sequence
  Description of Artificial Sequence: Synthetic oligonucleotide
  Antisense strand to SEQ ID NO: 81268
aaaggugcaguucucguuc

SEQ ID NO: 81350 - RNA, 19 nt, Artificial Sequence
  Description of Artificial Sequence: Synthetic oligonucleotide
  Sense strand starting at position 1431 of SEQ ID NO: 1019
gaaagacuuugguccugga

SEQ ID NO: 81351 - RNA, 19 nt, Artificial Sequence
  Description of Artificial Sequence: Synthetic oligonucleotide
  Antisense strand to SEQ ID NO: 81270
uccaggaccaaagucuuuc

SEQ ID NO: 81352 - RNA, 19 nt, Artificial Sequence
  Description of Artificial Sequence: Synthetic oligonucleotide
  Sense strand starting at position 1303 of SEQ ID NO: 1019
cagaaacuuguuugaugac

SEQ ID NO: 81353 - RNA, 19 nt, Artificial Sequence
  Description of Artificial Sequence: Synthetic oligonucleotide
  Antisense strand to SEQ ID NO: 81272
gucaucaaacaaguuucug

SEQ ID NO: 81354 - RNA, 19 nt, Artificial Sequence
  Description of Artificial Sequence: Synthetic oligonucleotide
  Sense strand starting at position 1301 of SEQ ID NO: 1019
ggcagaaacuuguuugaug

SEQ ID NO: 81355 - RNA, 19 nt, Artificial Sequence
  Description of Artificial Sequence: Synthetic oligonucleotide
  Antisense strand to SEQ ID NO: 81274
caucaaacaaguuucugcc

SEQ ID NO: 81356 - RNA, 19 nt, Artificial Sequence
  Description of Artificial Sequence: Synthetic oligonucleotide
  Sense strand starting at position 1278 of SEQ ID NO: 1019
acuagcuagguuuauaacu

SEQ ID NO: 81357 - RNA, 19 nt, Artificial Sequence
  Description of Artificial Sequence: Synthetic oligonucleotide
  Antisense strand to SEQ ID NO: 81276
aguuauaaaccuagcuagu

SEQ ID NO: 81358 - RNA, 19 nt, Artificial Sequence
  Description of Artificial Sequence: Synthetic oligonucleotide
  Sense strand starting at position 1275 of SEQ ID NO: 1019
acaacuagcuagguuuaua

SEQ ID NO: 81359 - RNA, 19 nt, Artificial Sequence
  Description of Artificial Sequence: Synthetic oligonucleotide
  Antisense strand to SEQ ID NO: 81278
uauaaaccuagcuaguugu

SEQ ID NO: 81360 - RNA, 19 nt, Artificial Sequence
  Description of Artificial Sequence: Synthetic oligonucleotide
  Sense strand starting at position 1241 of SEQ ID NO: 1019
gcauuuaauuucugggaaa

SEQ ID NO: 81361 - RNA, 19 nt, Artificial Sequence
  Description of Artificial Sequence: Synthetic oligonucleotide
  Antisense strand to SEQ ID NO: 81280
uuucccagaaauuaaaugc

SEQ ID NO: 81362 - RNA, 19 nt, Artificial Sequence
  Description of Artificial Sequence: Synthetic oligonucleotide
  Sense strand starting at position 975 of SEQ ID NO: 1019
cuguuucuggauuaaauug

SEQ ID NO: 81363 - RNA, 19 nt, Artificial Sequence
  Description of Artificial Sequence: Synthetic oligonucleotide
  Antisense strand to SEQ ID NO: 81282
caauuuaauccagaaacag

SEQ ID NO: 81364 - RNA, 19 nt, Artificial Sequence
  Description of Artificial Sequence: Synthetic oligonucleotide
  Sense strand starting at position 881 of SEQ ID NO: 1019
auauuccugaguugggaga

SEQ ID NO: 81365 - RNA, 19 nt, Artificial Sequence
  Description of Artificial Sequence: Synthetic oligonucleotide
  Antisense strand to SEQ ID NO: 81284
ucucccaacucaggaauau

SEQ ID NO: 81366 - RNA, 19 nt, Artificial Sequence
  Description of Artificial Sequence: Synthetic oligonucleotide
  Sense strand starting at position 879 of SEQ ID NO: 1019
aaauauuccugaguuggga

SEQ ID NO: 81367 - RNA, 19 nt, Artificial Sequence
  Description of Artificial Sequence: Synthetic oligonucleotide
  Antisense strand to SEQ ID NO: 81286
ucccaacucaggaauauuu

SEQ ID NO: 81368 - RNA, 19 nt, Artificial Sequence
  Description of Artificial Sequence: Synthetic oligonucleotide
  Sense strand starting at position 875 of SEQ ID NO: 1019
guggaaauauuccugaguu

SEQ ID NO: 81369 - RNA, 19 nt, Artificial Sequence
  Description of Artificial Sequence: Synthetic oligonucleotide
  Antisense strand to SEQ ID NO: 81288
aacucaggaauauuuccac

SEQ ID NO: 81370 - RNA, 19 nt, Artificial Sequence
  Description of Artificial Sequence: Synthetic oligonucleotide
  Sense strand starting at position 865 of SEQ ID NO: 1019
uuaaguggugguggaaaua

SEQ ID NO: 81371 - RNA, 19 nt, Artificial Sequence
  Description of Artificial Sequence: Synthetic oligonucleotide
  Antisense strand to SEQ ID NO: 81290
uauuuccaccaccacuuaa

SEQ ID NO: 81372 - RNA, 19 nt, Artificial Sequence
  Description of Artificial Sequence: Synthetic oligonucleotide
  Sense strand starting at position 834 of SEQ ID NO: 1019
gggacaauuucccauaucu

SEQ ID NO: 81373 - RNA, 19 nt, Artificial Sequence
  Description of Artificial Sequence: Synthetic oligonucleotide
  Antisense strand to SEQ ID NO: 81292
agauaugggaaauuguccc

SEQ ID NO: 81374 - RNA, 19 nt, Artificial Sequence
  Description of Artificial Sequence: Synthetic oligonucleotide
  Sense strand starting at position 814 of SEQ ID NO: 1019
gaauaugauggguguguga

SEQ ID NO: 81375 - RNA, 19 nt, Artificial Sequence
  Description of Artificial Sequence: Synthetic oligonucleotide
  Antisense strand to SEQ ID NO: 81294
ucacacacccaucauauuc

SEQ ID NO: 81376 - RNA, 19 nt, Artificial Sequence
  Description of Artificial Sequence: Synthetic oligonucleotide
  Sense strand starting at position 532 of SEQ ID NO: 1019
ccuuuagauuaguuuauac

SEQ ID NO: 81377 - RNA, 19 nt, Artificial Sequence
  Description of Artificial Sequence: Synthetic oligonucleotide
  Antisense strand to SEQ ID NO: 81296
guauaaacuaaucuaaagg

SEQ ID NO: 81378 - RNA, 19 nt, Artificial Sequence
  Description of Artificial Sequence: Synthetic oligonucleotide
  Sense strand starting at position 487 of SEQ ID NO: 1019
cauuaaugugcauaaacga

SEQ ID NO: 81379 - RNA, 19 nt, Artificial Sequence
  Description of Artificial Sequence: Synthetic oligonucleotide
  Antisense strand to SEQ ID NO: 81298
ucguuuaugcacauuaaug

SEQ ID NO: 81380 - RNA, 19 nt, Artificial Sequence
  Description of Artificial Sequence: Synthetic oligonucleotide
  Sense strand starting at position 484 of SEQ ID NO: 1019
agacauuaaugugcauaaa

SEQ ID NO: 81381 - RNA, 19 nt, Artificial Sequence
  Description of Artificial Sequence: Synthetic oligonucleotide
  Antisense strand to SEQ ID NO: 81300
uuuaugcacauuaaugucu

SEQ ID NO: 81382 - RNA, 19 nt, Artificial Sequence
  Description of Artificial Sequence: Synthetic oligonucleotide
  Sense strand starting at position 418 of SEQ ID NO: 1019
ugacaacuugaaugugaug

SEQ ID NO: 81383 - RNA, 19 nt, Artificial Sequence
  Description of Artificial Sequence: Synthetic oligonucleotide
  Antisense strand to SEQ ID NO: 81302
caucacauucaaguuguca

SEQ ID NO: 81384 - RNA, 19 nt, Artificial Sequence
  Description of Artificial Sequence: Synthetic oligonucleotide
  Sense strand starting at position 356 of SEQ ID NO: 1019
guaccacucagggaagguu

SEQ ID NO: 81385 - RNA, 19 nt, Artificial Sequence
  Description of Artificial Sequence: Synthetic oligonucleotide
  Antisense strand to SEQ ID NO: 81304
aaccuucccugagugguac

SEQ ID NO: 81386 - RNA, 19 nt, Artificial Sequence
  Description of Artificial Sequence: Synthetic oligonucleotide
  Sense strand starting at position 226 of SEQ ID NO: 1019
cauggcauuuggcuaaagu

SEQ ID NO: 81387 - RNA, 19 nt, Artificial Sequence
  Description of Artificial Sequence: Synthetic oligonucleotide
  Antisense strand to SEQ ID NO: 81306
acuuuagccaaaugccaug

SEQ ID NO: 81388 - RNA, 19 nt, Artificial Sequence
  Description of Artificial Sequence: Synthetic oligonucleotide
  Sense strand starting at position 204 of SEQ ID NO: 1019
auugacuuugcccagauga

SEQ ID NO: 81389 - RNA, 19 nt, Artificial Sequence
  Description of Artificial Sequence: Synthetic oligonucleotide
  Antisense strand to SEQ ID NO: 81308
ucaucugggcaaagucaau

SEQ ID NO: 81390 - RNA, 19 nt, Artificial Sequence
  Description of Artificial Sequence: Synthetic oligonucleotide
  Sense strand starting at position 201 of SEQ ID NO: 1019
auaauugacuuugcccaga

SEQ ID NO: 81391 - RNA, 19 nt, Artificial Sequence
  Description of Artificial Sequence: Synthetic oligonucleotide
  Antisense strand to SEQ ID NO: 81310
ucugggcaaagucaauuau

SEQ ID NO: 81392 - RNA, 19 nt, Artificial Sequence
  Description of Artificial Sequence: Synthetic oligonucleotide
  Sense strand starting at position 105 of SEQ ID NO: 1019
cuccaaagucuacacgaua

SEQ ID NO: 81393 - RNA, 19 nt, Artificial Sequence
  Description of Artificial Sequence: Synthetic oligonucleotide
  Antisense strand to SEQ ID NO: 81312
uaucguguagacuuuggag

SEQ ID NO: 81394 - RNA, 19 nt, Artificial Sequence
  Description of Artificial Sequence: Synthetic oligonucleotide
  Sense strand starting at position 197 of SEQ ID NO: 1020
ccauguauuuggcccuaca

SEQ ID NO: 81395 - RNA, 19 nt, Artificial Sequence
  Description of Artificial Sequence: Synthetic oligonucleotide
  Antisense strand to SEQ ID NO: 81314
uguagggccaaauacaugg

SEQ ID NO: 81396 - RNA, 19 nt, Artificial Sequence
  Description of Artificial Sequence: Synthetic oligonucleotide
  Sense strand starting at position 296 of SEQ ID NO: 1020
gaacccuagugguuuaauu

SEQ ID NO: 81397 - RNA, 19 nt, Artificial Sequence
  Description of Artificial Sequence: Synthetic oligonucleotide
  Antisense strand to SEQ ID NO: 81316
aauuaaaccacuaggguuc

SEQ ID NO: 81398 - RNA, 19 nt, Artificial Sequence
  Description of Artificial Sequence: Synthetic oligonucleotide
  Sense strand starting at position 298 of SEQ ID NO: 1020
acccuagugguuuaauuac

SEQ ID NO: 81399 - RNA, 19 nt, Artificial Sequence
  Description of Artificial Sequence: Synthetic oligonucleotide
  Antisense strand to SEQ ID NO: 81318
guaauuaaaccacuagggu

SEQ ID NO: 81400 - RNA, 19 nt, Artificial Sequence
  Description of Artificial Sequence: Synthetic oligonucleotide
  Sense strand starting at position 407 of SEQ ID NO: 1020
uauccauucggguggcaga

SEQ ID NO: 81401 - RNA, 19 nt, Artificial Sequence
  Description of Artificial Sequence: Synthetic oligonucleotide
  Antisense strand to SEQ ID NO: 81320
ucugccacccgaauggaua

SEQ ID NO: 81402 - RNA, 19 nt, Artificial Sequence
  Description of Artificial Sequence: Synthetic oligonucleotide
  Sense strand starting at position 434 of SEQ ID NO: 1020
auacuagucuguuaccaug

SEQ ID NO: 81403 - RNA, 19 nt, Artificial Sequence
  Description of Artificial Sequence: Synthetic oligonucleotide
  Antisense strand to SEQ ID NO: 81322
caugguaacagacuaguau

SEQ ID NO: 81404 - RNA, 19 nt, Artificial Sequence
  Description of Artificial Sequence: Synthetic oligonucleotide
  Sense strand starting at position 492 of SEQ ID NO: 1020
guaggaacgucaucccaaa

SEQ ID NO: 81405 - RNA, 19 nt, Artificial Sequence
  Description of Artificial Sequence: Synthetic oligonucleotide
  Antisense strand to SEQ ID NO: 81324
uuugggaugacguuccuac

SEQ ID NO: 81406 - RNA, 19 nt, Artificial Sequence
  Description of Artificial Sequence: Synthetic oligonucleotide
  Sense strand starting at position 526 of SEQ ID NO: 1020
ugaccauauuuccaaagga

SEQ ID NO: 81407 - RNA, 19 nt, Artificial Sequence
  Description of Artificial Sequence: Synthetic oligonucleotide
  Antisense strand to SEQ ID NO: 81326
uccuuuggaaauaugguca

SEQ ID NO: 81408 - RNA, 19 nt, Artificial Sequence
  Description of Artificial Sequence: Synthetic oligonucleotide
  Sense strand starting at position 549 of SEQ ID NO: 1020
agcacaauucugugacguu

SEQ ID NO: 81409 - RNA, 19 nt, Artificial Sequence
  Description of Artificial Sequence: Synthetic oligonucleotide
  Antisense strand to SEQ ID NO: 81328
aacgucacagaauugugcu

SEQ ID NO: 81410 - RNA, 19 nt, Artificial Sequence
  Description of Artificial Sequence: Synthetic oligonucleotide
  Sense strand starting at position 598 of SEQ ID NO: 1020
cagauuguugacugggcaa

SEQ ID NO: 81411 - RNA, 19 nt, Artificial Sequence
  Description of Artificial Sequence: Synthetic oligonucleotide
  Antisense strand to SEQ ID NO: 81330
uugcccagucaacaaucug

SEQ ID NO: 81412 - RNA, 19 nt, Artificial Sequence
  Description of Artificial Sequence: Synthetic oligonucleotide
  Sense strand starting at position 658 of SEQ ID NO: 1020
ucgggaggaucgcuugauu

SEQ ID NO: 81413 - RNA, 19 nt, Artificial Sequence
  Description of Artificial Sequence: Synthetic oligonucleotide
  Antisense strand to SEQ ID NO: 81332
aaucaagcgauccucccga

SEQ ID NO: 81414 - RNA, 19 nt, Artificial Sequence
  Description of Artificial Sequence: Synthetic oligonucleotide
  Sense strand starting at position 1087 of SEQ ID NO: 1020
aacauuagcuggcugugau

SEQ ID NO: 81415 - RNA, 19 nt, Artificial Sequence
  Description of Artificial Sequence: Synthetic oligonucleotide
  Antisense strand to SEQ ID NO: 81334
aucacagccagcuaauguu

SEQ ID NO: 81416 - RNA, 19 nt, Artificial Sequence
  Description of Artificial Sequence: Synthetic oligonucleotide
  Sense strand starting at position 1153 of SEQ ID NO: 1020
ucgcuagagccugagaagu

SEQ ID NO: 81417 - RNA, 19 nt, Artificial Sequence
  Description of Artificial Sequence: Synthetic oligonucleotide
  Antisense strand to SEQ ID NO: 81336
acuucucaggcucuagcga

SEQ ID NO: 81418 - RNA, 19 nt, Artificial Sequence
  Description of Artificial Sequence: Synthetic oligonucleotide
  Sense strand starting at position 1397 of SEQ ID NO: 1020
gguucuuugugcuugaguu

SEQ ID NO: 81419 - RNA, 19 nt, Artificial Sequence
  Description of Artificial Sequence: Synthetic oligonucleotide
  Antisense strand to SEQ ID NO: 81338
aacucaagcacaaagaacc

SEQ ID NO: 81420 - RNA, 19 nt, Artificial Sequence
  Description of Artificial Sequence: Synthetic oligonucleotide
  Sense strand starting at position 1398 of SEQ ID NO: 1020
guucuuugugcuugaguug

SEQ ID NO: 81421 - RNA, 19 nt, Artificial Sequence
  Description of Artificial Sequence: Synthetic oligonucleotide
  Antisense strand to SEQ ID NO: 81340
caacucaagcacaaagaac

SEQ ID NO: 81422 - RNA, 19 nt, Artificial Sequence
  Description of Artificial Sequence: Synthetic oligonucleotide
  Sense strand starting at position 1675 of SEQ ID NO: 1020
ucuagaggcuucucucacu

SEQ ID NO: 81423 - RNA, 19 nt, Artificial Sequence
  Description of Artificial Sequence: Synthetic oligonucleotide
  Antisense strand to SEQ ID NO: 81342
agugagagaagccucuaga

SEQ ID NO: 81424 - RNA, 19 nt, Artificial Sequence
  Description of Artificial Sequence: Synthetic oligonucleotide
  Sense strand starting at position 2232 of SEQ ID NO: 1020
ucucuacuguucucucgaa

SEQ ID NO: 81425 - RNA, 19 nt, Artificial Sequence
  Description of Artificial Sequence: Synthetic oligonucleotide
  Antisense strand to SEQ ID NO: 81344
uucgagagaacaguagaga

SEQ ID NO: 81426 - RNA, 19 nt, Artificial Sequence
  Description of Artificial Sequence: Synthetic oligonucleotide
  Sense strand starting at position 2233 of SEQ ID NO: 1020
cucuacuguucucucgaau

SEQ ID NO: 81427 - RNA, 19 nt, Artificial Sequence
  Description of Artificial Sequence: Synthetic oligonucleotide
  Antisense strand to SEQ ID NO: 81346
auucgagagaacaguagag

SEQ ID NO: 81428 - RNA, 19 nt, Artificial Sequence
  Description of Artificial Sequence: Synthetic oligonucleotide
  Sense strand starting at position 2236 of SEQ ID NO: 1020
uacuguucucucgaaucgu

SEQ ID NO: 81429 - RNA, 19 nt, Artificial Sequence
  Description of Artificial Sequence: Synthetic oligonucleotide
  Antisense strand to SEQ ID NO: 81348
acgauucgagagaacagua

SEQ ID NO: 81430 - RNA, 19 nt, Artificial Sequence
  Description of Artificial Sequence: Synthetic oligonucleotide
  Sense strand starting at position 2342 of SEQ ID NO: 1020
acccucaugugucacauua

SEQ ID NO: 81431 - RNA, 19 nt, Artificial Sequence
  Description of Artificial Sequence: Synthetic oligonucleotide
  Antisense strand to SEQ ID NO: 81350
uaaugugacacaugagggu

SEQ ID NO: 81432 - RNA, 19 nt, Artificial Sequence
  Description of Artificial Sequence: Synthetic oligonucleotide
  Sense strand starting at position 2344 of SEQ ID NO: 1020
ccucaugugucacauuagu

SEQ ID NO: 81433 - RNA, 19 nt, Artificial Sequence
  Description of Artificial Sequence: Synthetic oligonucleotide
  Antisense strand to SEQ ID NO: 81352
acuaaugugacacaugagg

SEQ ID NO: 81434 - RNA, 19 nt, Artificial Sequence
  Description of Artificial Sequence: Synthetic oligonucleotide
  Sense strand starting at position 2425 of SEQ ID NO: 1020
accacauacuugugaguau

SEQ ID NO: 81435 - RNA, 19 nt, Artificial Sequence
  Description of Artificial Sequence: Synthetic oligonucleotide
  Antisense strand to SEQ ID NO: 81354
auacucacaaguauguggu

SEQ ID NO: 81436 - RNA, 19 nt, Artificial Sequence
  Description of Artificial Sequence: Synthetic oligonucleotide
  Sense strand starting at position 2426 of SEQ ID NO: 1020
ccacauacuugugaguaua

SEQ ID NO: 81437 - RNA, 19 nt, Artificial Sequence
  Description of Artificial Sequence: Synthetic oligonucleotide
  Antisense strand to SEQ ID NO: 81356
uauacucacaaguaugugg

SEQ ID NO: 81438 - RNA, 19 nt, Artificial Sequence
  Description of Artificial Sequence: Synthetic oligonucleotide
  Sense strand starting at position 2428 of SEQ ID NO: 1020
acauacuugugaguauaua

SEQ ID NO: 81439 - RNA, 19 nt, Artificial Sequence
  Description of Artificial Sequence: Synthetic oligonucleotide
  Antisense strand to SEQ ID NO: 81358
uauauacucacaaguaugu

SEQ ID NO: 81440 - RNA, 19 nt, Artificial Sequence
  Description of Artificial Sequence: Synthetic oligonucleotide
  Sense strand starting at position 3100 of SEQ ID NO: 1020
cccgcagugcacuaaauuu

SEQ ID NO: 81441 - RNA, 19 nt, Artificial Sequence
  Description of Artificial Sequence: Synthetic oligonucleotide
  Antisense strand to SEQ ID NO: 81360
aaauuuagugcacugcggg

SEQ ID NO: 81442 - RNA, 19 nt, Artificial Sequence
  Description of Artificial Sequence: Synthetic oligonucleotide
  Sense strand starting at position 3160 of SEQ ID NO: 1020
gggaccuauugucagcaaa

SEQ ID NO: 81443 - RNA, 19 nt, Artificial Sequence
  Description of Artificial Sequence: Synthetic oligonucleotide
  Antisense strand to SEQ ID NO: 81362
uuugcugacaauagguccc

SEQ ID NO: 81444 - RNA, 19 nt, Artificial Sequence
  Description of Artificial Sequence: Synthetic oligonucleotide
  Sense strand starting at position 3170 of SEQ ID NO: 1020
gucagcaaacauugucaaa

SEQ ID NO: 81445 - RNA, 19 nt, Artificial Sequence
  Description of Artificial Sequence: Synthetic oligonucleotide
  Antisense strand to SEQ ID NO: 81364
uuugacaauguuugcugac

SEQ ID NO: 81446 - RNA, 19 nt, Artificial Sequence
  Description of Artificial Sequence: Synthetic oligonucleotide
  Sense strand starting at position 3183 of SEQ ID NO: 1020
gucaaagacuuggaaauga

SEQ ID NO: 81447 - RNA, 19 nt, Artificial Sequence
  Description of Artificial Sequence: Synthetic oligonucleotide
  Antisense strand to SEQ ID NO: 81366
ucauuuccaagucuuugac

SEQ ID NO: 81448 - RNA, 19 nt, Artificial Sequence
  Description of Artificial Sequence: Synthetic oligonucleotide
  Sense strand starting at position 3207 of SEQ ID NO: 1020
agagaauucugugugcccu

SEQ ID NO: 81449 - RNA, 19 nt, Artificial Sequence
  Description of Artificial Sequence: Synthetic oligonucleotide
  Antisense strand to SEQ ID NO: 81368
agggcacacagaauucucu

SEQ ID NO: 81450 - RNA, 19 nt, Artificial Sequence
  Description of Artificial Sequence: Synthetic oligonucleotide
  Sense strand starting at position 3208 of SEQ ID NO: 1020
gagaauucugugugcccuu

SEQ ID NO: 81451 - RNA, 19 nt, Artificial Sequence
  Description of Artificial Sequence: Synthetic oligonucleotide
  Antisense strand to SEQ ID NO: 81370
aagggcacacagaauucuc

SEQ ID NO: 81452 - RNA, 19 nt, Artificial Sequence
  Description of Artificial Sequence: Synthetic oligonucleotide
  Sense strand starting at position 3262 of SEQ ID NO: 1020
agcucugacuuucuauuga

SEQ ID NO: 81453 - RNA, 19 nt, Artificial Sequence
  Description of Artificial Sequence: Synthetic oligonucleotide
  Antisense strand to SEQ ID NO: 81372
ucaauagaaagucagagcu

SEQ ID NO: 81454 - RNA, 19 nt, Artificial Sequence
  Description of Artificial Sequence: Synthetic oligonucleotide
  Sense strand starting at position 3360 of SEQ ID NO: 1020
uuuauugaccuguagcaua

SEQ ID NO: 81455 - RNA, 19 nt, Artificial Sequence
  Description of Artificial Sequence: Synthetic oligonucleotide
  Antisense strand to SEQ ID NO: 81374
uaugcuacaggucaauaaa

SEQ ID NO: 81456 - RNA, 19 nt, Artificial Sequence
  Description of Artificial Sequence: Synthetic oligonucleotide
  Sense strand starting at position 3365 of SEQ ID NO: 1020
ugaccuguagcauauuaag

SEQ ID NO: 81457 - RNA, 19 nt, Artificial Sequence
  Description of Artificial Sequence: Synthetic oligonucleotide
  Antisense strand to SEQ ID NO: 81376
cuuaauaugcuacagguca

SEQ ID NO: 81458 - RNA, 19 nt, Artificial Sequence
  Description of Artificial Sequence: Synthetic oligonucleotide
  Sense strand starting at position 3463 of SEQ ID NO: 1020
cuggcucccuuauaaguua

SEQ ID NO: 81459 - RNA, 19 nt, Artificial Sequence
  Description of Artificial Sequence: Synthetic oligonucleotide
  Antisense strand to SEQ ID NO: 81378
uaacuuauaagggagccag

SEQ ID NO: 81460 - RNA, 19 nt, Artificial Sequence
  Description of Artificial Sequence: Synthetic oligonucleotide
  Sense strand starting at position 3584 of SEQ ID NO: 1020
augacuuacucuggauuac

SEQ ID NO: 81461 - RNA, 19 nt, Artificial Sequence
  Description of Artificial Sequence: Synthetic oligonucleotide
  Antisense strand to SEQ ID NO: 81380
guaauccagaguaagucau

SEQ ID NO: 81462 - RNA, 19 nt, Artificial Sequence
  Description of Artificial Sequence: Synthetic oligonucleotide
  Sense strand starting at position 3596 of SEQ ID NO: 1020
ggauuacacuugugaaagu

SEQ ID NO: 81463 - RNA, 19 nt, Artificial Sequence
  Description of Artificial Sequence: Synthetic oligonucleotide
  Antisense strand to SEQ ID NO: 81382
acuuucacaaguguaaucc

SEQ ID NO: 81464 - RNA, 19 nt, Artificial Sequence
  Description of Artificial Sequence: Synthetic oligonucleotide
  Sense strand starting at position 3597 of SEQ ID NO: 1020
gauuacacuugugaaaguu

SEQ ID NO: 81465 - RNA, 19 nt, Artificial Sequence
  Description of Artificial Sequence: Synthetic oligonucleotide
  Antisense strand to SEQ ID NO: 81384
aacuuucacaaguguaauc

SEQ ID NO: 81466 - RNA, 19 nt, Artificial Sequence
  Description of Artificial Sequence: Synthetic oligonucleotide
  Sense strand starting at position 3606 of SEQ ID NO: 1020
ugugaaaguuaagcauaca

SEQ ID NO: 81467 - RNA, 19 nt, Artificial Sequence
  Description of Artificial Sequence: Synthetic oligonucleotide
  Antisense strand to SEQ ID NO: 81386
uguaugcuuaacuuucaca

SEQ ID NO: 81468 - RNA, 19 nt, Artificial Sequence
  Description of Artificial Sequence: Synthetic oligonucleotide
  Sense strand starting at position 3627 of SEQ ID NO: 1020
uugggccauucuucucaua

SEQ ID NO: 81469 - RNA, 19 nt, Artificial Sequence
  Description of Artificial Sequence: Synthetic oligonucleotide
  Antisense strand to SEQ ID NO: 81388
uaugagaagaauggcccaa

SEQ ID NO: 81470 - RNA, 19 nt, Artificial Sequence
  Description of Artificial Sequence: Synthetic oligonucleotide
  Sense strand starting at position 3713 of SEQ ID NO: 1020
gcaacccugucugcugaaa

SEQ ID NO: 81471 - RNA, 19 nt, Artificial Sequence
  Description of Artificial Sequence: Synthetic oligonucleotide
  Antisense strand to SEQ ID NO: 81390
uuucagcagacaggguugc

SEQ ID NO: 81472 - RNA, 19 nt, Artificial Sequence
  Description of Artificial Sequence: Synthetic oligonucleotide
  Sense strand starting at position 3791 of SEQ ID NO: 1020
cucaaagacuaguuugguu

SEQ ID NO: 81473 - RNA, 19 nt, Artificial Sequence
  Description of Artificial Sequence: Synthetic oligonucleotide
  Antisense strand to SEQ ID NO: 81392
aaccaaacuagucuuugag

SEQ ID NO: 81474 - RNA, 19 nt, Artificial Sequence
  Description of Artificial Sequence: Synthetic oligonucleotide
  Sense strand starting at position 3888 of SEQ ID NO: 1021
agcauaaauggguaacuuu

SEQ ID NO: 81475 - RNA, 19 nt, Artificial Sequence
  Description of Artificial Sequence: Synthetic oligonucleotide
  Antisense strand to SEQ ID NO: 81394
aaaguuacccauuuaugcu

SEQ ID NO: 81476 - RNA, 19 nt, Artificial Sequence
  Description of Artificial Sequence: Synthetic oligonucleotide
  Sense strand starting at position 3837 of SEQ ID NO: 1021
gcaccaguuuaucugucua

SEQ ID NO: 81477 - RNA, 19 nt, Artificial Sequence
  Description of Artificial Sequence: Synthetic oligonucleotide
  Antisense strand to SEQ ID NO: 81396
uagacagauaaacuggugc

SEQ ID NO: 81478 - RNA, 19 nt, Artificial Sequence
  Description of Artificial Sequence: Synthetic oligonucleotide
  Sense strand starting at position 3465 of SEQ ID NO: 1021
cugucugaacccugggaaa

SEQ ID NO: 81479 - RNA, 19 nt, Artificial Sequence
  Description of Artificial Sequence: Synthetic oligonucleotide
  Antisense strand to SEQ ID NO: 81398
uuucccaggguucagacag

SEQ ID NO: 81480 - RNA, 19 nt, Artificial Sequence
  Description of Artificial Sequence: Synthetic oligonucleotide
  Sense strand starting at position 3442 of SEQ ID NO: 1021
auuccuucccuggaacgaa

SEQ ID NO: 81481 - RNA, 19 nt, Artificial Sequence
  Description of Artificial Sequence: Synthetic oligonucleotide
  Antisense strand to SEQ ID NO: 81400
uucguuccagggaaggaau

SEQ ID NO: 81482 - RNA, 19 nt, Artificial Sequence
  Description of Artificial Sequence: Synthetic oligonucleotide
  Sense strand starting at position 3181 of SEQ ID NO: 1021
aggaauggcuuugggagua

SEQ ID NO: 81483 - RNA, 19 nt, Artificial Sequence
  Description of Artificial Sequence: Synthetic oligonucleotide
  Antisense strand to SEQ ID NO: 81402
uacucccaaagccauuccu

SEQ ID NO: 81484 - RNA, 19 nt, Artificial Sequence
  Description of Artificial Sequence: Synthetic oligonucleotide
  Sense strand starting at position 3180 of SEQ ID NO: 1021
caggaauggcuuugggagu

SEQ ID NO: 81485 - RNA, 19 nt, Artificial Sequence
  Description of Artificial Sequence: Synthetic oligonucleotide
  Antisense strand to SEQ ID NO: 81404
acucccaaagccauuccug

SEQ ID NO: 81486 - RNA, 19 nt, Artificial Sequence
  Description of Artificial Sequence: Synthetic oligonucleotide
  Sense strand starting at position 1556 of SEQ ID NO: 1021
agaggucgucccggcgaau

SEQ ID NO: 81487 - RNA, 19 nt, Artificial Sequence
  Description of Artificial Sequence: Synthetic oligonucleotide
  Antisense strand to SEQ ID NO: 81406
auucgccgggacgaccucu

SEQ ID NO: 81488 - RNA, 19 nt, Artificial Sequence
  Description of Artificial Sequence: Synthetic oligonucleotide
  Sense strand starting at position 1541 of SEQ ID NO: 1021
ggaggacuguccugaagag

SEQ ID NO: 81489 - RNA, 19 nt, Artificial Sequence
  Description of Artificial Sequence: Synthetic oligonucleotide
  Antisense strand to SEQ ID NO: 81408
cucuucaggacaguccucc

SEQ ID NO: 81490 - RNA, 19 nt, Artificial Sequence
  Description of Artificial Sequence: Synthetic oligonucleotide
  Sense strand starting at position 1511 of SEQ ID NO: 1021
cccuuaucacgguaagaga

SEQ ID NO: 81491 - RNA, 19 nt, Artificial Sequence
  Description of Artificial Sequence: Synthetic oligonucleotide
  Antisense strand to SEQ ID NO: 81410
ucucuuaccgugauaaggg

SEQ ID NO: 81492 - RNA, 19 nt, Artificial Sequence
  Description of Artificial Sequence: Synthetic oligonucleotide
  Sense strand starting at position 1509 of SEQ ID NO: 1021
gucccuuaucacgguaaga

SEQ ID NO: 81493 - RNA, 19 nt, Artificial Sequence
  Description of Artificial Sequence: Synthetic oligonucleotide
  Antisense strand to SEQ ID NO: 81412
ucuuaccgugauaagggac

SEQ ID NO: 81494 - RNA, 19 nt, Artificial Sequence
  Description of Artificial Sequence: Synthetic oligonucleotide
  Sense strand starting at position 1333 of SEQ ID NO: 1021
uucuaccucugggaggaau

SEQ ID NO: 81495 - RNA, 19 nt, Artificial Sequence
  Description of Artificial Sequence: Synthetic oligonucleotide
  Antisense strand to SEQ ID NO: 81414
auuccucccagagguagaa

SEQ ID NO: 81496 - RNA, 19 nt, Artificial Sequence
  Description of Artificial Sequence: Synthetic oligonucleotide
  Sense strand starting at position 1332 of SEQ ID NO: 1021
guucuaccucugggaggaa

SEQ ID NO: 81497 - RNA, 19 nt, Artificial Sequence
  Description of Artificial Sequence: Synthetic oligonucleotide
  Antisense strand to SEQ ID NO: 81416
uuccucccagagguagaac

SEQ ID NO: 81498 - RNA, 19 nt, Artificial Sequence
  Description of Artificial Sequence: Synthetic oligonucleotide
  Sense strand starting at position 1267 of SEQ ID NO: 1021
gcuuaucacugggaagggu

SEQ ID NO: 81499 - RNA, 19 nt, Artificial Sequence
  Description of Artificial Sequence: Synthetic oligonucleotide
  Antisense strand to SEQ ID NO: 81418
acccuucccagugauaagc

SEQ ID NO: 81500 - RNA, 19 nt, Artificial Sequence
  Description of Artificial Sequence: Synthetic oligonucleotide
  Sense strand starting at position 1264 of SEQ ID NO: 1021
aaagcuuaucacugggaag

SEQ ID NO: 81501 - RNA, 19 nt, Artificial Sequence
  Description of Artificial Sequence: Synthetic oligonucleotide
  Antisense strand to SEQ ID NO: 81420
cuucccagugauaagcuuu

SEQ ID NO: 81502 - RNA, 19 nt, Artificial Sequence
  Description of Artificial Sequence: Synthetic oligonucleotide
  Sense strand starting at position 1247 of SEQ ID NO: 1021
ugccucuuccagugagaaa

SEQ ID NO: 81503 - RNA, 19 nt, Artificial Sequence
  Description of Artificial Sequence: Synthetic oligonucleotide
  Antisense strand to SEQ ID NO: 81422
uuucucacuggaagaggca

SEQ ID NO: 81504 - RNA, 19 nt, Artificial Sequence
  Description of Artificial Sequence: Synthetic oligonucleotide
  Sense strand starting at position 1200 of SEQ ID NO: 1021
acaaguuggugaggguuaa

SEQ ID NO: 81505 - RNA, 19 nt, Artificial Sequence
  Description of Artificial Sequence: Synthetic oligonucleotide
  Antisense strand to SEQ ID NO: 81424
uuaacccucaccaacuugu

SEQ ID NO: 81506 - RNA, 19 nt, Artificial Sequence
  Description of Artificial Sequence: Synthetic oligonucleotide
  Sense strand starting at position 1187 of SEQ ID NO: 1021
caugaucuagcagacaagu

SEQ ID NO: 81507 - RNA, 19 nt, Artificial Sequence
  Description of Artificial Sequence: Synthetic oligonucleotide
  Antisense strand to SEQ ID NO: 81426
acuugucugcuagaucaug

SEQ ID NO: 81508 - RNA, 19 nt, Artificial Sequence
  Description of Artificial Sequence: Synthetic oligonucleotide
  Sense strand starting at position 1182 of SEQ ID NO: 1021
ggcaccaugaucuagcaga

SEQ ID NO: 81509 - RNA, 19 nt, Artificial Sequence
  Description of Artificial Sequence: Synthetic oligonucleotide
  Antisense strand to SEQ ID NO: 81428
ucugcuagaucauggugcc

SEQ ID NO: 81510 - RNA, 19 nt, Artificial Sequence
  Description of Artificial Sequence: Synthetic oligonucleotide
  Sense strand starting at position 1120 of SEQ ID NO: 1021
uuugccuucugagaaacaa

SEQ ID NO: 81511 - RNA, 19 nt, Artificial Sequence
  Description of Artificial Sequence: Synthetic oligonucleotide
  Antisense strand to SEQ ID NO: 81430
uuguuucucagaaggcaaa

SEQ ID NO: 81512 - RNA, 19 nt, Artificial Sequence
  Description of Artificial Sequence: Synthetic oligonucleotide
  Sense strand starting at position 854 of SEQ ID NO: 1021
cugaucuuugcagagaggu

SEQ ID NO: 81513 - RNA, 19 nt, Artificial Sequence
  Description of Artificial Sequence: Synthetic oligonucleotide
  Antisense strand to SEQ ID NO: 81432
accucucugcaaagaucag

SEQ ID NO: 81514 - RNA, 19 nt, Artificial Sequence
  Description of Artificial Sequence: Synthetic oligonucleotide
  Sense strand starting at position 852 of SEQ ID NO: 1021
cccugaucuuugcagagag

SEQ ID NO: 81515 - RNA, 19 nt, Artificial Sequence
  Description of Artificial Sequence: Synthetic oligonucleotide
  Antisense strand to SEQ ID NO: 81434
cucucugcaaagaucaggg

SEQ ID NO: 81516 - RNA, 19 nt, Artificial Sequence
  Description of Artificial Sequence: Synthetic oligonucleotide
  Sense strand starting at position 849 of SEQ ID NO: 1021
uugcccugaucuuugcaga

SEQ ID NO: 81517 - RNA, 19 nt, Artificial Sequence
  Description of Artificial Sequence: Synthetic oligonucleotide
  Antisense strand to SEQ ID NO: 81436
ucugcaaagaucagggcaa

SEQ ID NO: 81518 - RNA, 19 nt, Artificial Sequence
  Description of Artificial Sequence: Synthetic oligonucleotide
  Sense strand starting at position 698 of SEQ ID NO: 1021
gccuuagacuuuggaaacu

SEQ ID NO: 81519 - RNA, 19 nt, Artificial Sequence
  Description of Artificial Sequence: Synthetic oligonucleotide
  Antisense strand to SEQ ID NO: 81438
aguuuccaaagucuaaggc

SEQ ID NO: 81520 - RNA, 19 nt, Artificial Sequence
  Description of Artificial Sequence: Synthetic oligonucleotide
  Sense strand starting at position 697 of SEQ ID NO: 1021
agccuuagacuuuggaaac

SEQ ID NO: 81521 - RNA, 19 nt, Artificial Sequence
  Description of Artificial Sequence: Synthetic oligonucleotide
  Antisense strand to SEQ ID NO: 81440
guuuccaaagucuaaggcu

SEQ ID NO: 81522 - RNA, 19 nt, Artificial Sequence
  Description of Artificial Sequence: Synthetic oligonucleotide
  Sense strand starting at position 684 of SEQ ID NO: 1021
ugggaaauggccuagccuu

SEQ ID NO: 81523 - RNA, 19 nt, Artificial Sequence
  Description of Artificial Sequence: Synthetic oligonucleotide
  Antisense strand to SEQ ID NO: 81442
aaggcuaggccauuuccca

SEQ ID NO: 81524 - RNA, 19 nt, Artificial Sequence
  Description of Artificial Sequence: Synthetic oligonucleotide
  Sense strand starting at position 624 of SEQ ID NO: 1021
aucuguggcuucugugaag

SEQ ID NO: 81525 - RNA, 19 nt, Artificial Sequence
  Description of Artificial Sequence: Synthetic oligonucleotide
  Antisense strand to SEQ ID NO: 81444
cuucacagaagccacagau

SEQ ID NO: 81526 - RNA, 19 nt, Artificial Sequence
  Description of Artificial Sequence: Synthetic oligonucleotide
  Sense strand starting at position 503 of SEQ ID NO: 1021
agguuaguguuaccuccuu

SEQ ID NO: 81527 - RNA, 19 nt, Artificial Sequence
  Description of Artificial Sequence: Synthetic oligonucleotide
  Antisense strand to SEQ ID NO: 81446
aaggagguaacacuaaccu

SEQ ID NO: 81528 - RNA, 19 nt, Artificial Sequence
  Description of Artificial Sequence: Synthetic oligonucleotide
  Sense strand starting at position 492 of SEQ ID NO: 1021
gaaagaguuccagguuagu

SEQ ID NO: 81529 - RNA, 19 nt, Artificial Sequence
  Description of Artificial Sequence: Synthetic oligonucleotide
  Antisense strand to SEQ ID NO: 81448
acuaaccuggaacucuuuc

SEQ ID NO: 81530 - RNA, 19 nt, Artificial Sequence
  Description of Artificial Sequence: Synthetic oligonucleotide
  Sense strand starting at position 490 of SEQ ID NO: 1021
cagaaagaguuccagguua

SEQ ID NO: 81531 - RNA, 19 nt, Artificial Sequence
  Description of Artificial Sequence: Synthetic oligonucleotide
  Antisense strand to SEQ ID NO: 81450
uaaccuggaacucuuucug

SEQ ID NO: 81532 - RNA, 19 nt, Artificial Sequence
  Description of Artificial Sequence: Synthetic oligonucleotide
  Sense strand starting at position 89 of SEQ ID NO: 1022
ugagacugguucucaccau

SEQ ID NO: 81533 - RNA, 19 nt, Artificial Sequence
  Description of Artificial Sequence: Synthetic oligonucleotide
  Antisense strand to SEQ ID NO: 81452
auggugagaaccagucuca

SEQ ID NO: 81534 - RNA, 19 nt, Artificial Sequence
  Description of Artificial Sequence: Synthetic oligonucleotide
  Sense strand starting at position 204 of SEQ ID NO: 1022
agauuauuaucagaagaga

SEQ ID NO: 81535 - RNA, 19 nt, Artificial Sequence
  Description of Artificial Sequence: Synthetic oligonucleotide
  Antisense strand to SEQ ID NO: 81454
ucucuucugauaauaaucu

SEQ ID NO: 81536 - RNA, 19 nt, Artificial Sequence
  Description of Artificial Sequence: Synthetic oligonucleotide
  Sense strand starting at position 258 of SEQ ID NO: 1022
augauuauagcccaugcau

SEQ ID NO: 81537 - RNA, 19 nt, Artificial Sequence
  Description of Artificial Sequence: Synthetic oligonucleotide
  Antisense strand to SEQ ID NO: 81456
augcaugggcuauaaucau

SEQ ID NO: 81538 - RNA, 19 nt, Artificial Sequence
  Description of Artificial Sequence: Synthetic oligonucleotide
  Sense strand starting at position 307 of SEQ ID NO: 1022
ggauucuagcuaugaacua

SEQ ID NO: 81539 - RNA, 19 nt, Artificial Sequence
  Description of Artificial Sequence: Synthetic oligonucleotide
  Antisense strand to SEQ ID NO: 81458
uaguucauagcuagaaucc

SEQ ID NO: 81540 - RNA, 19 nt, Artificial Sequence
  Description of Artificial Sequence: Synthetic oligonucleotide
  Sense strand starting at position 319 of SEQ ID NO: 1022
ugaacuagaucuuaaggaa

SEQ ID NO: 81541 - RNA, 19 nt, Artificial Sequence
  Description of Artificial Sequence: Synthetic oligonucleotide
  Antisense strand to SEQ ID NO: 81460
uuccuuaagaucuaguuca

SEQ ID NO: 81542 - RNA, 19 nt, Artificial Sequence
  Description of Artificial Sequence: Synthetic oligonucleotide
  Sense strand starting at position 576 of SEQ ID NO: 1022
guuacagucucccuuaauc

SEQ ID NO: 81543 - RNA, 19 nt, Artificial Sequence
  Description of Artificial Sequence: Synthetic oligonucleotide
  Antisense strand to SEQ ID NO: 81462
gauuaagggagacuguaac

SEQ ID NO: 81544 - RNA, 19 nt, Artificial Sequence
  Description of Artificial Sequence: Synthetic oligonucleotide
  Sense strand starting at position 759 of SEQ ID NO: 1022
cccgguuguuauccuauuu

SEQ ID NO: 81545 - RNA, 19 nt, Artificial Sequence
  Description of Artificial Sequence: Synthetic oligonucleotide
  Antisense strand to SEQ ID NO: 81464
aaauaggauaacaaccggg

SEQ ID NO: 81546 - RNA, 19 nt, Artificial Sequence
  Description of Artificial Sequence: Synthetic oligonucleotide
  Sense strand starting at position 784 of SEQ ID NO: 1022
auugcauauucugcaauga

SEQ ID NO: 81547 - RNA, 19 nt, Artificial Sequence
  Description of Artificial Sequence: Synthetic oligonucleotide
  Antisense strand to SEQ ID NO: 81466
ucauugcagaauaugcaau

SEQ ID NO: 81548 - RNA, 19 nt, Artificial Sequence
  Description of Artificial Sequence: Synthetic oligonucleotide
  Sense strand starting at position 785 of SEQ ID NO: 1022
uugcauauucugcaaugau

SEQ ID NO: 81549 - RNA, 19 nt, Artificial Sequence
  Description of Artificial Sequence: Synthetic oligonucleotide
  Antisense strand to SEQ ID NO: 81468
aucauugcagaauaugcaa

SEQ ID NO: 81550 - RNA, 19 nt, Artificial Sequence
  Description of Artificial Sequence: Synthetic oligonucleotide
  Sense strand starting at position 818 of SEQ ID NO: 1022
agcuuauaugaaugagcag

SEQ ID NO: 81551 - RNA, 19 nt, Artificial Sequence
  Description of Artificial Sequence: Synthetic oligonucleotide
  Antisense strand to SEQ ID NO: 81470
cugcucauucauauaagcu

SEQ ID NO: 81552 - RNA, 19 nt, Artificial Sequence
  Description of Artificial Sequence: Synthetic oligonucleotide
  Sense strand starting at position 819 of SEQ ID NO: 1022
gcuuauaugaaugagcagu

SEQ ID NO: 81553 - RNA, 19 nt, Artificial Sequence
  Description of Artificial Sequence: Synthetic oligonucleotide
  Antisense strand to SEQ ID NO: 81472
acugcucauucauauaagc

SEQ ID NO: 81554 - RNA, 19 nt, Artificial Sequence
  Description of Artificial Sequence: Synthetic oligonucleotide
  Sense strand starting at position 821 of SEQ ID NO: 1022
uuauaugaaugagcaguua

SEQ ID NO: 81555 - RNA, 19 nt, Artificial Sequence
  Description of Artificial Sequence: Synthetic oligonucleotide
  Antisense strand to SEQ ID NO: 81474
uaacugcucauucauauaa

SEQ ID NO: 81556 - RNA, 19 nt, Artificial Sequence
  Description of Artificial Sequence: Synthetic oligonucleotide
  Sense strand starting at position 829 of SEQ ID NO: 1022
augagcaguuaaguaaauu

SEQ ID NO: 81557 - RNA, 19 nt, Artificial Sequence
  Description of Artificial Sequence: Synthetic oligonucleotide
  Antisense strand to SEQ ID NO: 81476
aauuuacuuaacugcucau

SEQ ID NO: 81558 - RNA, 19 nt, Artificial Sequence
  Description of Artificial Sequence: Synthetic oligonucleotide
  Sense strand starting at position 950 of SEQ ID NO: 1022
gaacaaguguugguuguua

SEQ ID NO: 81559 - RNA, 19 nt, Artificial Sequence
  Description of Artificial Sequence: Synthetic oligonucleotide
  Antisense strand to SEQ ID NO: 81478
uaacaaccaacacuuguuc

SEQ ID NO: 81560 - RNA, 19 nt, Artificial Sequence
  Description of Artificial Sequence: Synthetic oligonucleotide
  Sense strand starting at position 959 of SEQ ID NO: 1022
uugguuguuaagcauggaa

SEQ ID NO: 81561 - RNA, 19 nt, Artificial Sequence
  Description of Artificial Sequence: Synthetic oligonucleotide
  Antisense strand to SEQ ID NO: 81480
uuccaugcuuaacaaccaa

SEQ ID NO: 81562 - RNA, 19 nt, Artificial Sequence
  Description of Artificial Sequence: Synthetic oligonucleotide
  Sense strand starting at position 984 of SEQ ID NO: 1022
ccaguaagugaaugacauc

SEQ ID NO: 81563 - RNA, 19 nt, Artificial Sequence
  Description of Artificial Sequence: Synthetic oligonucleotide
  Antisense strand to SEQ ID NO: 81482
gaugucauucacuuacugg

SEQ ID NO: 81564 - RNA, 19 nt, Artificial Sequence
  Description of Artificial Sequence: Synthetic oligonucleotide
  Sense strand starting at position 1147 of SEQ ID NO: 1022
cauggacuuugcucuuuga

SEQ ID NO: 81565 - RNA, 19 nt, Artificial Sequence
  Description of Artificial Sequence: Synthetic oligonucleotide
  Antisense strand to SEQ ID NO: 81484
ucaaagagcaaaguccaug

SEQ ID NO: 81566 - RNA, 19 nt, Artificial Sequence
  Description of Artificial Sequence: Synthetic oligonucleotide
  Sense strand starting at position 1305 of SEQ ID NO: 1022
gggacuaccuuccucacaa

SEQ ID NO: 81567 - RNA, 19 nt, Artificial Sequence
  Description of Artificial Sequence: Synthetic oligonucleotide
  Antisense strand to SEQ ID NO: 81486
uugugaggaagguaguccc

SEQ ID NO: 81568 - RNA, 19 nt, Artificial Sequence
  Description of Artificial Sequence: Synthetic oligonucleotide
  Sense strand starting at position 1359 of SEQ ID NO: 1022
guuauaaaugcagauuaug

SEQ ID NO: 81569 - RNA, 19 nt, Artificial Sequence
  Description of Artificial Sequence: Synthetic oligonucleotide
  Antisense strand to SEQ ID NO: 81488
cauaaucugcauuuauaac

SEQ ID NO: 81570 - RNA, 19 nt, Artificial Sequence
  Description of Artificial Sequence: Synthetic oligonucleotide
  Sense strand starting at position 1531 of SEQ ID NO: 1022
gcgucuuguccgguggcau

SEQ ID NO: 81571 - RNA, 19 nt, Artificial Sequence
  Description of Artificial Sequence: Synthetic oligonucleotide
  Antisense strand to SEQ ID NO: 81490
augccaccggacaagacgc

SEQ ID NO: 81572 - RNA, 19 nt, Artificial Sequence
  Description of Artificial Sequence: Synthetic oligonucleotide
  Sense strand starting at position 1652 of SEQ ID NO: 1022
aagaaaguucuuuguaagc

SEQ ID NO: 81573 - RNA, 19 nt, Artificial Sequence
  Description of Artificial Sequence: Synthetic oligonucleotide
  Antisense strand to SEQ ID NO: 81492
gcuuacaaagaacuuucuu

SEQ ID NO: 81574 - RNA, 19 nt, Artificial Sequence
  Description of Artificial Sequence: Synthetic oligonucleotide
  Sense strand starting at position 1930 of SEQ ID NO: 1022
cuccuucuuccagguuuga

SEQ ID NO: 81575 - RNA, 19 nt, Artificial Sequence
  Description of Artificial Sequence: Synthetic oligonucleotide
  Antisense strand to SEQ ID NO: 81494
ucaaaccuggaagaaggag

SEQ ID NO: 81576 - RNA, 19 nt, Artificial Sequence
  Description of Artificial Sequence: Synthetic oligonucleotide
  Sense strand starting at position 2303 of SEQ ID NO: 1022
ugcgaaugcagagauguau

SEQ ID NO: 81577 - RNA, 19 nt, Artificial Sequence
  Description of Artificial Sequence: Synthetic oligonucleotide
  Antisense strand to SEQ ID NO: 81496
auacaucucugcauucgca

SEQ ID NO: 81578 - RNA, 19 nt, Artificial Sequence
  Description of Artificial Sequence: Synthetic oligonucleotide
  Sense strand starting at position 2315 of SEQ ID NO: 1022
gauguaugagggcagugaa

SEQ ID NO: 81579 - RNA, 19 nt, Artificial Sequence
  Description of Artificial Sequence: Synthetic oligonucleotide
  Antisense strand to SEQ ID NO: 81498
uucacugcccucauacauc

SEQ ID NO: 81580 - RNA, 19 nt, Artificial Sequence
  Description of Artificial Sequence: Synthetic oligonucleotide
  Sense strand starting at position 2385 of SEQ ID NO: 1022
uaaauuagaggucggugau

SEQ ID NO: 81581 - RNA, 19 nt, Artificial Sequence
  Description of Artificial Sequence: Synthetic oligonucleotide
  Antisense strand to SEQ ID NO: 81500
aucaccgaccucuaauuua

SEQ ID NO: 81582 - RNA, 19 nt, Artificial Sequence
  Description of Artificial Sequence: Synthetic oligonucleotide
  Sense strand starting at position 2386 of SEQ ID NO: 1022
aaauuagaggucggugaug

SEQ ID NO: 81583 - RNA, 19 nt, Artificial Sequence
  Description of Artificial Sequence: Synthetic oligonucleotide
  Antisense strand to SEQ ID NO: 81502
caucaccgaccucuaauuu

SEQ ID NO: 81584 - RNA, 19 nt, Artificial Sequence
  Description of Artificial Sequence: Synthetic oligonucleotide
  Sense strand starting at position 2417 of SEQ ID NO: 1022
gggucauugcugugaauaa

SEQ ID NO: 81585 - RNA, 19 nt, Artificial Sequence
  Description of Artificial Sequence: Synthetic oligonucleotide
  Antisense strand to SEQ ID NO: 81504
uuauucacagcaaugaccc

SEQ ID NO: 81586 - RNA, 19 nt, Artificial Sequence
  Description of Artificial Sequence: Synthetic oligonucleotide
  Sense strand starting at position 2452 of SEQ ID NO: 1022
ggaagacguccugguggaa

SEQ ID NO: 81587 - RNA, 19 nt, Artificial Sequence
  Description of Artificial Sequence: Synthetic oligonucleotide
  Antisense strand to SEQ ID NO: 81506
uuccaccaggacgucuucc

SEQ ID NO: 81588 - RNA, 19 nt, Artificial Sequence
  Description of Artificial Sequence: Synthetic oligonucleotide
  Sense strand starting at position 2567 of SEQ ID NO: 1022
aggugaguucgggaacuua

SEQ ID NO: 81589 - RNA, 19 nt, Artificial Sequence
  Description of Artificial Sequence: Synthetic oligonucleotide
  Antisense strand to SEQ ID NO: 81508
uaaguucccgaacucaccu

SEQ ID NO: 81590 - RNA, 19 nt, Artificial Sequence
  Description of Artificial Sequence: Synthetic oligonucleotide
  Sense strand starting at position 3342 of SEQ ID NO: 1022
agaggagaaugugaaagaa

SEQ ID NO: 81591 - RNA, 19 nt, Artificial Sequence
  Description of Artificial Sequence: Synthetic oligonucleotide
  Antisense strand to SEQ ID NO: 81510
uucuuucacauucuccucu

SEQ ID NO: 81592 - RNA, 19 nt, Artificial Sequence
  Description of Artificial Sequence: Synthetic oligonucleotide
  Sense strand starting at position 3507 of SEQ ID NO: 1022
acagaaucuagauguuggu

SEQ ID NO: 81593 - RNA, 19 nt, Artificial Sequence
  Description of Artificial Sequence: Synthetic oligonucleotide
  Antisense strand to SEQ ID NO: 81512
accaacaucuagauucugu

SEQ ID NO: 81594 - RNA, 19 nt, Artificial Sequence
  Description of Artificial Sequence: Synthetic oligonucleotide
  Sense strand starting at position 3548 of SEQ ID NO: 1022
auucucugcuuccuggaaa

SEQ ID NO: 81595 - RNA, 19 nt, Artificial Sequence
  Description of Artificial Sequence: Synthetic oligonucleotide
  Antisense strand to SEQ ID NO: 81514
uuuccaggaagcagagaau

SEQ ID NO: 81596 - RNA, 19 nt, Artificial Sequence
  Description of Artificial Sequence: Synthetic oligonucleotide
  Sense strand starting at position 3625 of SEQ ID NO: 1022
auagacagcuuugcagaaa

SEQ ID NO: 81597 - RNA, 19 nt, Artificial Sequence
  Description of Artificial Sequence: Synthetic oligonucleotide
  Antisense strand to SEQ ID NO: 81516
uuucugcaaagcugucuau

SEQ ID NO: 81598 - RNA, 19 nt, Artificial Sequence
  Description of Artificial Sequence: Synthetic oligonucleotide
  Sense strand starting at position 3664 of SEQ ID NO: 1022
gaaguauccgaaugaauua

SEQ ID NO: 81599 - RNA, 19 nt, Artificial Sequence
  Description of Artificial Sequence: Synthetic oligonucleotide
  Antisense strand to SEQ ID NO: 81518
uaauucauucggauacuuc

SEQ ID NO: 81600 - RNA, 19 nt, Artificial Sequence
  Description of Artificial Sequence: Synthetic oligonucleotide
  Sense strand starting at position 3731 of SEQ ID NO: 1022
gaagaaagaaggugucagu

SEQ ID NO: 81601 - RNA, 19 nt, Artificial Sequence
  Description of Artificial Sequence: Synthetic oligonucleotide
  Antisense strand to SEQ ID NO: 81520
acugacaccuucuuucuuc

SEQ ID NO: 81602 - RNA, 19 nt, Artificial Sequence
  Description of Artificial Sequence: Synthetic oligonucleotide
  Sense strand starting at position 3747 of SEQ ID NO: 1022
aguggacaccuuugugaau

SEQ ID NO: 81603 - RNA, 19 nt, Artificial Sequence
  Description of Artificial Sequence: Synthetic oligonucleotide
  Antisense strand to SEQ ID NO: 81522
auucacaaagguguccacu

SEQ ID NO: 81604 - RNA, 19 nt, Artificial Sequence
  Description of Artificial Sequence: Synthetic oligonucleotide
  Sense strand starting at position 3748 of SEQ ID NO: 1022
guggacaccuuugugaaua

SEQ ID NO: 81605 - RNA, 19 nt, Artificial Sequence
  Description of Artificial Sequence: Synthetic oligonucleotide
  Antisense strand to SEQ ID NO: 81524
uauucacaaagguguccac

SEQ ID NO: 81606 - RNA, 19 nt, Artificial Sequence
  Description of Artificial Sequence: Synthetic oligonucleotide
  Sense strand starting at position 3877 of SEQ ID NO: 1022
ccaucaucccaguggaauc

SEQ ID NO: 81607 - RNA, 19 nt, Artificial Sequence
  Description of Artificial Sequence: Synthetic oligonucleotide
  Antisense strand to SEQ ID NO: 81526
gauuccacugggaugaugg

SEQ ID NO: 81608 - RNA, 19 nt, Artificial Sequence
  Description of Artificial Sequence: Synthetic oligonucleotide
  Sense strand starting at position 3964 of SEQ ID NO: 1022
uaguguuuacuauaggaug

SEQ ID NO: 81609 - RNA, 19 nt, Artificial Sequence
  Description of Artificial Sequence: Synthetic oligonucleotide
  Antisense strand to SEQ ID NO: 81528
cauccuauaguaaacacua

SEQ ID NO: 81610 - RNA, 19 nt, Artificial Sequence
  Description of Artificial Sequence: Synthetic oligonucleotide
  Sense strand starting at position 3976 of SEQ ID NO: 1022
uaggauggguacuauauuu

SEQ ID NO: 81611 - RNA, 19 nt, Artificial Sequence
  Description of Artificial Sequence: Synthetic oligonucleotide
  Antisense strand to SEQ ID NO: 81530
aaauauaguacccauccua

SEQ ID NO: 81612 - RNA, 19 nt, Artificial Sequence
  Description of Artificial Sequence: Synthetic oligonucleotide
  Sense strand starting at position 30 of SEQ ID NO: 1023
gagugaaccugguuggcau

SEQ ID NO: 81613 - RNA, 19 nt, Artificial Sequence
  Description of Artificial Sequence: Synthetic oligonucleotide
  Antisense strand to SEQ ID NO: 81532
augccaaccagguucacuc

SEQ ID NO: 81614 - RNA, 19 nt, Artificial Sequence
  Description of Artificial Sequence: Synthetic oligonucleotide
  Sense strand starting at position 69 of SEQ ID NO: 1023
ccugcauugucugcuacua

SEQ ID NO: 81615 - RNA, 19 nt, Artificial Sequence
  Description of Artificial Sequence: Synthetic oligonucleotide
  Antisense strand to SEQ ID NO: 81534
uaguagcagacaaugcagg

SEQ ID NO: 81616 - RNA, 19 nt, Artificial Sequence
  Description of Artificial Sequence: Synthetic oligonucleotide
  Sense strand starting at position 74 of SEQ ID NO: 1023
auugucugcuacuaagauc

SEQ ID NO: 81617 - RNA, 19 nt, Artificial Sequence
  Description of Artificial Sequence: Synthetic oligonucleotide
  Antisense strand to SEQ ID NO: 81536
gaucuuaguagcagacaau

SEQ ID NO: 81618 - RNA, 19 nt, Artificial Sequence
  Description of Artificial Sequence: Synthetic oligonucleotide
  Sense strand starting at position 247 of SEQ ID NO: 1023
gggccucuccguugaucuu

SEQ ID NO: 81619 - RNA, 19 nt, Artificial Sequence
  Description of Artificial Sequence: Synthetic oligonucleotide
  Antisense strand to SEQ ID NO: 81538
aagaucaacggagaggccc

SEQ ID NO: 81620 - RNA, 19 nt, Artificial Sequence
  Description of Artificial Sequence: Synthetic oligonucleotide
  Sense strand starting at position 248 of SEQ ID NO: 1023
ggccucuccguugaucuua

SEQ ID NO: 81621 - RNA, 19 nt, Artificial Sequence
  Description of Artificial Sequence: Synthetic oligonucleotide
  Antisense strand to SEQ ID NO: 81540
uaagaucaacggagaggcc

SEQ ID NO: 81622 - RNA, 19 nt, Artificial Sequence
  Description of Artificial Sequence: Synthetic oligonucleotide
  Sense strand starting at position 551 of SEQ ID NO: 1023
aaaugacacgcuuguaacu

SEQ ID NO: 81623 - RNA, 19 nt, Artificial Sequence
  Description of Artificial Sequence: Synthetic oligonucleotide
  Antisense strand to SEQ ID NO: 81542
aguuacaagcgugucauuu

SEQ ID NO: 81624 - RNA, 19 nt, Artificial Sequence
  Description of Artificial Sequence: Synthetic oligonucleotide
  Sense strand starting at position 564 of SEQ ID NO: 1023
guaacugccuguuuguaca

SEQ ID NO: 81625 - RNA, 19 nt, Artificial Sequence
  Description of Artificial Sequence: Synthetic oligonucleotide
  Antisense strand to SEQ ID NO: 81544
uguacaaacaggcaguuac

SEQ ID NO: 81626 - RNA, 19 nt, Artificial Sequence
  Description of Artificial Sequence: Synthetic oligonucleotide
  Sense strand starting at position 602 of SEQ ID NO: 1023
guuugcacucaacauguga

SEQ ID NO: 81627 - RNA, 19 nt, Artificial Sequence
  Description of Artificial Sequence: Synthetic oligonucleotide
  Antisense strand to SEQ ID NO: 81546
ucacauguugagugcaaac

SEQ ID NO: 81628 - RNA, 19 nt, Artificial Sequence
  Description of Artificial Sequence: Synthetic oligonucleotide
  Sense strand starting at position 610 of SEQ ID NO: 1023
ucaacaugugacugcuaau

SEQ ID NO: 81629 - RNA, 19 nt, Artificial Sequence
  Description of Artificial Sequence: Synthetic oligonucleotide
  Antisense strand to SEQ ID NO: 81548
auuagcagucacauguuga

SEQ ID NO: 81630 - RNA, 19 nt, Artificial Sequence
  Description of Artificial Sequence: Synthetic oligonucleotide
  Sense strand starting at position 674 of SEQ ID NO: 1023
ccaagaaugugcugggaaa

SEQ ID NO: 81631 - RNA, 19 nt, Artificial Sequence
  Description of Artificial Sequence: Synthetic oligonucleotide
  Antisense strand to SEQ ID NO: 81550
uuucccagcacauucuugg

SEQ ID NO: 81632 - RNA, 19 nt, Artificial Sequence
  Description of Artificial Sequence: Synthetic oligonucleotide
  Sense strand starting at position 675 of SEQ ID NO: 1023
caagaaugugcugggaaag

SEQ ID NO: 81633 - RNA, 19 nt, Artificial Sequence
  Description of Artificial Sequence: Synthetic oligonucleotide
  Antisense strand to SEQ ID NO: 81552
cuuucccagcacauucuug

SEQ ID NO: 81634 - RNA, 19 nt, Artificial Sequence
  Description of Artificial Sequence: Synthetic oligonucleotide
  Sense strand starting at position 725 of SEQ ID NO: 1023
ucugacucaucucuguuau

SEQ ID NO: 81635 - RNA, 19 nt, Artificial Sequence
  Description of Artificial Sequence: Synthetic oligonucleotide
  Antisense strand to SEQ ID NO: 81554
auaacagagaugagucaga

SEQ ID NO: 81636 - RNA, 19 nt, Artificial Sequence
  Description of Artificial Sequence: Synthetic oligonucleotide
  Sense strand starting at position 726 of SEQ ID NO: 1023
cugacucaucucuguuaug

SEQ ID NO: 81637 - RNA, 19 nt, Artificial Sequence
  Description of Artificial Sequence: Synthetic oligonucleotide
  Antisense strand to SEQ ID NO: 81556
cauaacagagaugagucag

SEQ ID NO: 81638 - RNA, 19 nt, Artificial Sequence
  Description of Artificial Sequence: Synthetic oligonucleotide
  Sense strand starting at position 981 of SEQ ID NO: 1023
gccggcuccuucuuaaacu

SEQ ID NO: 81639 - RNA, 19 nt, Artificial Sequence
  Description of Artificial Sequence: Synthetic oligonucleotide
  Antisense strand to SEQ ID NO: 81558
aguuuaagaaggagccggc

SEQ ID NO: 81640 - RNA, 19 nt, Artificial Sequence
  Description of Artificial Sequence: Synthetic oligonucleotide
  Sense strand starting at position 982 of SEQ ID NO: 1023
ccggcuccuucuuaaacuu

SEQ ID NO: 81641 - RNA, 19 nt, Artificial Sequence
  Description of Artificial Sequence: Synthetic oligonucleotide
  Antisense strand to SEQ ID NO: 81560
aaguuuaagaaggagccgg

SEQ ID NO: 81642 - RNA, 19 nt, Artificial Sequence
  Description of Artificial Sequence: Synthetic oligonucleotide
  Sense strand starting at position 991 of SEQ ID NO: 1023
ucuuaaacuugcucucgaa

SEQ ID NO: 81643 - RNA, 19 nt, Artificial Sequence
  Description of Artificial Sequence: Synthetic oligonucleotide
  Antisense strand to SEQ ID NO: 81562
uucgagagcaaguuuaaga

SEQ ID NO: 81644 - RNA, 19 nt, Artificial Sequence
  Description of Artificial Sequence: Synthetic oligonucleotide
  Sense strand starting at position 1468 of SEQ ID NO: 1023
gcuccucuagcuuggagaa

SEQ ID NO: 81645 - RNA, 19 nt, Artificial Sequence
  Description of Artificial Sequence: Synthetic oligonucleotide
  Antisense strand to SEQ ID NO: 81564
uucuccaagcuagaggagc

SEQ ID NO: 81646 - RNA, 19 nt, Artificial Sequence
  Description of Artificial Sequence: Synthetic oligonucleotide
  Sense strand starting at position 1693 of SEQ ID NO: 1023
aaaggauguccuuggcgga

SEQ ID NO: 81647 - RNA, 19 nt, Artificial Sequence
  Description of Artificial Sequence: Synthetic oligonucleotide
  Antisense strand to SEQ ID NO: 81566
uccgccaaggacauccuuu

SEQ ID NO: 81648 - RNA, 19 nt, Artificial Sequence
  Description of Artificial Sequence: Synthetic oligonucleotide
  Sense strand starting at position 1801 of SEQ ID NO: 1023
gcgccgucucgaugacgaa

SEQ ID NO: 81649 - RNA, 19 nt, Artificial Sequence
  Description of Artificial Sequence: Synthetic oligonucleotide
  Antisense strand to SEQ ID NO: 81568
uucgucaucgagacggcgc

SEQ ID NO: 81650 - RNA, 19 nt, Artificial Sequence
  Description of Artificial Sequence: Synthetic oligonucleotide
  Sense strand starting at position 1871 of SEQ ID NO: 1023
ggugaagucccagaucaug

SEQ ID NO: 81651 - RNA, 19 nt, Artificial Sequence
  Description of Artificial Sequence: Synthetic oligonucleotide
  Antisense strand to SEQ ID NO: 81570
caugaucugggacuucacc

SEQ ID NO: 81652 - RNA, 19 nt, Artificial Sequence
  Description of Artificial Sequence: Synthetic oligonucleotide
  Sense strand starting at position 2653 of SEQ ID NO: 1023
cagacuugauucuucgaca

SEQ ID NO: 81653 - RNA, 19 nt, Artificial Sequence
  Description of Artificial Sequence: Synthetic oligonucleotide
  Antisense strand to SEQ ID NO: 81572
ugucgaagaaucaagucug

SEQ ID NO: 81654 - RNA, 19 nt, Artificial Sequence
  Description of Artificial Sequence: Synthetic oligonucleotide
  Sense strand starting at position 2654 of SEQ ID NO: 1023
agacuugauucuucgacag

SEQ ID NO: 81655 - RNA, 19 nt, Artificial Sequence
  Description of Artificial Sequence: Synthetic oligonucleotide
  Antisense strand to SEQ ID NO: 81574
cugucgaagaaucaagucu

SEQ ID NO: 81656 - RNA, 19 nt, Artificial Sequence
  Description of Artificial Sequence: Synthetic oligonucleotide
  Sense strand starting at position 2656 of SEQ ID NO: 1023
acuugauucuucgacaguc

SEQ ID NO: 81657 - RNA, 19 nt, Artificial Sequence
  Description of Artificial Sequence: Synthetic oligonucleotide
  Antisense strand to SEQ ID NO: 81576
gacugucgaagaaucaagu

SEQ ID NO: 81658 - RNA, 19 nt, Artificial Sequence
  Description of Artificial Sequence: Synthetic oligonucleotide
  Sense strand starting at position 2826 of SEQ ID NO: 1023
gccgguguucccuucggaa

SEQ ID NO: 81659 - RNA, 19 nt, Artificial Sequence
  Description of Artificial Sequence: Synthetic oligonucleotide
  Antisense strand to SEQ ID NO: 81578
uuccgaagggaacaccggc

SEQ ID NO: 81660 - RNA, 19 nt, Artificial Sequence
  Description of Artificial Sequence: Synthetic oligonucleotide
  Sense strand starting at position 2828 of SEQ ID NO: 1023
cgguguucccuucggaaca

SEQ ID NO: 81661 - RNA, 19 nt, Artificial Sequence
  Description of Artificial Sequence: Synthetic oligonucleotide
  Antisense strand to SEQ ID NO: 81580
uguuccgaagggaacaccg

SEQ ID NO: 81662 - RNA, 19 nt, Artificial Sequence
  Description of Artificial Sequence: Synthetic oligonucleotide
  Sense strand starting at position 2991 of SEQ ID NO: 1023
gacacuuugucacuugguu

SEQ ID NO: 81663 - RNA, 19 nt, Artificial Sequence
  Description of Artificial Sequence: Synthetic oligonucleotide
  Antisense strand to SEQ ID NO: 81582
aaccaagugacaaaguguc

SEQ ID NO: 81664 - RNA, 19 nt, Artificial Sequence
  Description of Artificial Sequence: Synthetic oligonucleotide
  Sense strand starting at position 3009 of SEQ ID NO: 1023
uuccgucagucuccugaga

SEQ ID NO: 81665 - RNA, 19 nt, Artificial Sequence
  Description of Artificial Sequence: Synthetic oligonucleotide
  Antisense strand to SEQ ID NO: 81584
ucucaggagacugacggaa

SEQ ID NO: 81666 - RNA, 19 nt, Artificial Sequence
  Description of Artificial Sequence: Synthetic oligonucleotide
  Sense strand starting at position 3071 of SEQ ID NO: 1023
aggaguuauacuugaaagc

SEQ ID NO: 81667 - RNA, 19 nt, Artificial Sequence
  Description of Artificial Sequence: Synthetic oligonucleotide
  Antisense strand to SEQ ID NO: 81586
gcuuucaaguauaacuccu

SEQ ID NO: 81668 - RNA, 19 nt, Artificial Sequence
  Description of Artificial Sequence: Synthetic oligonucleotide
  Sense strand starting at position 3072 of SEQ ID NO: 1023
ggaguuauacuugaaagcu

SEQ ID NO: 81669 - RNA, 19 nt, Artificial Sequence
  Description of Artificial Sequence: Synthetic oligonucleotide
  Antisense strand to SEQ ID NO: 81588
agcuuucaaguauaacucc

SEQ ID NO: 81670 - RNA, 19 nt, Artificial Sequence
  Description of Artificial Sequence: Synthetic oligonucleotide
  Sense strand starting at position 3082 of SEQ ID NO: 1023
uugaaagcucaaugucgga

SEQ ID NO: 81671 - RNA, 19 nt, Artificial Sequence
  Description of Artificial Sequence: Synthetic oligonucleotide
  Antisense strand to SEQ ID NO: 81590
uccgacauugagcuuucaa

SEQ ID NO: 81672 - RNA, 19 nt, Artificial Sequence
  Description of Artificial Sequence: Synthetic oligonucleotide
  Sense strand starting at position 3087 of SEQ ID NO: 1023
agcucaaugucggacacau

SEQ ID NO: 81673 - RNA, 19 nt, Artificial Sequence
  Description of Artificial Sequence: Synthetic oligonucleotide
  Antisense strand to SEQ ID NO: 81592
auguguccgacauugagcu

SEQ ID NO: 81674 - RNA, 19 nt, Artificial Sequence
  Description of Artificial Sequence: Synthetic oligonucleotide
  Sense strand starting at position 3098 of SEQ ID NO: 1023
ggacacauagcaugaaauc

SEQ ID NO: 81675 - RNA, 19 nt, Artificial Sequence
  Description of Artificial Sequence: Synthetic oligonucleotide
  Antisense strand to SEQ ID NO: 81594
gauuucaugcuaugugucc

SEQ ID NO: 81676 - RNA, 19 nt, Artificial Sequence
  Description of Artificial Sequence: Synthetic oligonucleotide
  Sense strand starting at position 3108 of SEQ ID NO: 1023
caugaaauccgucacuggu

SEQ ID NO: 81677 - RNA, 19 nt, Artificial Sequence
  Description of Artificial Sequence: Synthetic oligonucleotide
  Antisense strand to SEQ ID NO: 81596
accagugacggauuucaug

SEQ ID NO: 81678 - RNA, 19 nt, Artificial Sequence
  Description of Artificial Sequence: Synthetic oligonucleotide
  Sense strand starting at position 3130 of SEQ ID NO: 1023
uugcauuugucuuggaaag

SEQ ID NO: 81679 - RNA, 19 nt, Artificial Sequence
  Description of Artificial Sequence: Synthetic oligonucleotide
  Antisense strand to SEQ ID NO: 81598
cuuuccaagacaaaugcaa

SEQ ID NO: 81680 - RNA, 19 nt, Artificial Sequence
  Description of Artificial Sequence: Synthetic oligonucleotide
  Sense strand starting at position 3132 of SEQ ID NO: 1023
gcauuugucuuggaaagga

SEQ ID NO: 81681 - RNA, 19 nt, Artificial Sequence
  Description of Artificial Sequence: Synthetic oligonucleotide
  Antisense strand to SEQ ID NO: 81600
uccuuuccaagacaaaugc

SEQ ID NO: 81682 - RNA, 19 nt, Artificial Sequence
  Description of Artificial Sequence: Synthetic oligonucleotide
  Sense strand starting at position 3136 of SEQ ID NO: 1023
uugucuuggaaaggacaua

SEQ ID NO: 81683 - RNA, 19 nt, Artificial Sequence
  Description of Artificial Sequence: Synthetic oligonucleotide
  Antisense strand to SEQ ID NO: 81602
uauguccuuuccaagacaa

SEQ ID NO: 81684 - RNA, 19 nt, Artificial Sequence
  Description of Artificial Sequence: Synthetic oligonucleotide
  Sense strand starting at position 3180 of SEQ ID NO: 1023
uagggagacugugaauauu

SEQ ID NO: 81685 - RNA, 19 nt, Artificial Sequence
  Description of Artificial Sequence: Synthetic oligonucleotide
  Antisense strand to SEQ ID NO: 81604
aauauucacagucucccua

SEQ ID NO: 81686 - RNA, 19 nt, Artificial Sequence
  Description of Artificial Sequence: Synthetic oligonucleotide
  Sense strand starting at position 3836 of SEQ ID NO: 1023
gacugaauugaauguuuga

SEQ ID NO: 81687 - RNA, 19 nt, Artificial Sequence
  Description of Artificial Sequence: Synthetic oligonucleotide
  Antisense strand to SEQ ID NO: 81606
ucaaacauucaauucaguc

SEQ ID NO: 81688 - RNA, 19 nt, Artificial Sequence
  Description of Artificial Sequence: Synthetic oligonucleotide
  Sense strand starting at position 3914 of SEQ ID NO: 1023
ggucguuagucucccuaau

SEQ ID NO: 81689 - RNA, 19 nt, Artificial Sequence
  Description of Artificial Sequence: Synthetic oligonucleotide
  Antisense strand to SEQ ID NO: 81608
auuagggagacuaacgacc

SEQ ID NO: 81690 - RNA, 19 nt, Artificial Sequence
  Description of Artificial Sequence: Synthetic oligonucleotide
  Sense strand starting at position 3916 of SEQ ID NO: 1023
ucguuagucucccuaauac

SEQ ID NO: 81691 - RNA, 19 nt, Artificial Sequence
  Description of Artificial Sequence: Synthetic oligonucleotide
  Antisense strand to SEQ ID NO: 81610
guauuagggagacuaacga

SEQ ID NO: 81692 - RNA, 19 nt, Artificial Sequence
  Description of Artificial Sequence: Synthetic oligonucleotide
  Sense strand starting at position 17 of SEQ ID NO: 1024
cuguguaggcuuuacaauu

SEQ ID NO: 81693 - RNA, 19 nt, Artificial Sequence
  Description of Artificial Sequence: Synthetic oligonucleotide
  Antisense strand to SEQ ID NO: 81612
aauuguaaagccuacacag

SEQ ID NO: 81694 - RNA, 19 nt, Artificial Sequence
  Description of Artificial Sequence: Synthetic oligonucleotide
  Sense strand starting at position 120 of SEQ ID NO: 1024
ugaggugcuuuauuuccua

SEQ ID NO: 81695 - RNA, 19 nt, Artificial Sequence
  Description of Artificial Sequence: Synthetic oligonucleotide
  Antisense strand to SEQ ID NO: 81614
uaggaaauaaagcaccuca

SEQ ID NO: 81696 - RNA, 19 nt, Artificial Sequence
  Description of Artificial Sequence: Synthetic oligonucleotide
  Sense strand starting at position 123 of SEQ ID NO: 1024
ggugcuuuauuuccuaagu

SEQ ID NO: 81697 - RNA, 19 nt, Artificial Sequence
  Description of Artificial Sequence: Synthetic oligonucleotide
  Antisense strand to SEQ ID NO: 81616
acuuaggaaauaaagcacc

SEQ ID NO: 81698 - RNA, 19 nt, Artificial Sequence
  Description of Artificial Sequence: Synthetic oligonucleotide
  Sense strand starting at position 124 of SEQ ID NO: 1024
gugcuuuauuuccuaaguc

SEQ ID NO: 81699 - RNA, 19 nt, Artificial Sequence
  Description of Artificial Sequence: Synthetic oligonucleotide
  Antisense strand to SEQ ID NO: 81618
gacuuaggaaauaaagcac

SEQ ID NO: 81700 - RNA, 19 nt, Artificial Sequence
  Description of Artificial Sequence: Synthetic oligonucleotide
  Sense strand starting at position 255 of SEQ ID NO: 1024
gggccaauaaagugauuga

SEQ ID NO: 81701 - RNA, 19 nt, Artificial Sequence
  Description of Artificial Sequence: Synthetic oligonucleotide
  Antisense strand to SEQ ID NO: 81620
ucaaucacuuuauuggccc

SEQ ID NO: 81702 - RNA, 19 nt, Artificial Sequence
  Description of Artificial Sequence: Synthetic oligonucleotide
  Sense strand starting at position 258 of SEQ ID NO: 1024
ccaauaaagugauugaggu

SEQ ID NO: 81703 - RNA, 19 nt, Artificial Sequence
  Description of Artificial Sequence: Synthetic oligonucleotide
  Antisense strand to SEQ ID NO: 81622
accucaaucacuuuauugg

SEQ ID NO: 81704 - RNA, 19 nt, Artificial Sequence
  Description of Artificial Sequence: Synthetic oligonucleotide
  Sense strand starting at position 264 of SEQ ID NO: 1024
aagugauugagguggagac

SEQ ID NO: 81705 - RNA, 19 nt, Artificial Sequence
  Description of Artificial Sequence: Synthetic oligonucleotide
  Antisense strand to SEQ ID NO: 81624
gucuccaccucaaucacuu

SEQ ID NO: 81706 - RNA, 19 nt, Artificial Sequence
  Description of Artificial Sequence: Synthetic oligonucleotide
  Sense strand starting at position 382 of SEQ ID NO: 1024
ugaacucaucuugguaucu

SEQ ID NO: 81707 - RNA, 19 nt, Artificial Sequence
  Description of Artificial Sequence: Synthetic oligonucleotide
  Antisense strand to SEQ ID NO: 81626
agauaccaagaugaguuca

SEQ ID NO: 81708 - RNA, 19 nt, Artificial Sequence
  Description of Artificial Sequence: Synthetic oligonucleotide
  Sense strand starting at position 565 of SEQ ID NO: 1024
gggagcagguccuccauaa

SEQ ID NO: 81709 - RNA, 19 nt, Artificial Sequence
  Description of Artificial Sequence: Synthetic oligonucleotide
  Antisense strand to SEQ ID NO: 81628
uuauggaggaccugcuccc

SEQ ID NO: 81710 - RNA, 19 nt, Artificial Sequence
  Description of Artificial Sequence: Synthetic oligonucleotide
  Sense strand starting at position 650 of SEQ ID NO: 1024
ccgagauuuggccgucagu

SEQ ID NO: 81711 - RNA, 19 nt, Artificial Sequence
  Description of Artificial Sequence: Synthetic oligonucleotide
  Antisense strand to SEQ ID NO: 81630
acugacggccaaaucucgg

SEQ ID NO: 81712 - RNA, 19 nt, Artificial Sequence
  Description of Artificial Sequence: Synthetic oligonucleotide
  Sense strand starting at position 750 of SEQ ID NO: 1024
augaaaugccaucgucuaa

SEQ ID NO: 81713 - RNA, 19 nt, Artificial Sequence
  Description of Artificial Sequence: Synthetic oligonucleotide
  Antisense strand to SEQ ID NO: 81632
uuagacgauggcauuucau

SEQ ID NO: 81714 - RNA, 19 nt, Artificial Sequence
  Description of Artificial Sequence: Synthetic oligonucleotide
  Sense strand starting at position 890 of SEQ ID NO: 1024
caagguauugagugccacu

SEQ ID NO: 81715 - RNA, 19 nt, Artificial Sequence
  Description of Artificial Sequence: Synthetic oligonucleotide
  Antisense strand to SEQ ID NO: 81634
aguggcacucaauaccuug

SEQ ID NO: 81716 - RNA, 19 nt, Artificial Sequence
  Description of Artificial Sequence: Synthetic oligonucleotide
  Sense strand starting at position 1076 of SEQ ID NO: 1024
aaagcaggcucccuguaaa

SEQ ID NO: 81717 - RNA, 19 nt, Artificial Sequence
  Description of Artificial Sequence: Synthetic oligonucleotide
  Antisense strand to SEQ ID NO: 81636
uuuacagggagccugcuuu

SEQ ID NO: 81718 - RNA, 19 nt, Artificial Sequence
  Description of Artificial Sequence: Synthetic oligonucleotide
  Sense strand starting at position 1540 of SEQ ID NO: 1024
aguagacacaaguguagau

SEQ ID NO: 81719 - RNA, 19 nt, Artificial Sequence
  Description of Artificial Sequence: Synthetic oligonucleotide
  Antisense strand to SEQ ID NO: 81638
aucuacacuugugucuacu

SEQ ID NO: 81720 - RNA, 19 nt, Artificial Sequence
  Description of Artificial Sequence: Synthetic oligonucleotide
  Sense strand starting at position 1776 of SEQ ID NO: 1024
gcucaaucuguccaccaga

SEQ ID NO: 81721 - RNA, 19 nt, Artificial Sequence
  Description of Artificial Sequence: Synthetic oligonucleotide
  Antisense strand to SEQ ID NO: 81640
ucugguggacagauugagc

SEQ ID NO: 81722 - RNA, 19 nt, Artificial Sequence
  Description of Artificial Sequence: Synthetic oligonucleotide
  Sense strand starting at position 2137 of SEQ ID NO: 1024
ucuaacuccggcuaagaaa

SEQ ID NO: 81723 - RNA, 19 nt, Artificial Sequence
  Description of Artificial Sequence: Synthetic oligonucleotide
  Antisense strand to SEQ ID NO: 81642
uuucuuagccggaguuaga

SEQ ID NO: 81724 - RNA, 19 nt, Artificial Sequence
  Description of Artificial Sequence: Synthetic oligonucleotide
  Sense strand starting at position 2276 of SEQ ID NO: 1024
gcaguaugcagacaguuaa

SEQ ID NO: 81725 - RNA, 19 nt, Artificial Sequence
  Description of Artificial Sequence: Synthetic oligonucleotide
  Antisense strand to SEQ ID NO: 81644
uuaacugucugcauacugc

SEQ ID NO: 81726 - RNA, 19 nt, Artificial Sequence
  Description of Artificial Sequence: Synthetic oligonucleotide
  Sense strand starting at position 2353 of SEQ ID NO: 1024
uggaguugcacaugaagaa

SEQ ID NO: 81727 - RNA, 19 nt, Artificial Sequence
  Description of Artificial Sequence: Synthetic oligonucleotide
  Antisense strand to SEQ ID NO: 81646
uucuucaugugcaacucca

SEQ ID NO: 81728 - RNA, 19 nt, Artificial Sequence
  Description of Artificial Sequence: Synthetic oligonucleotide
  Sense strand starting at position 2385 of SEQ ID NO: 1024
cuugguccugucugggaga

SEQ ID NO: 81729 - RNA, 19 nt, Artificial Sequence
  Description of Artificial Sequence: Synthetic oligonucleotide
  Antisense strand to SEQ ID NO: 81648
ucucccagacaggaccaag

SEQ ID NO: 81730 - RNA, 19 nt, Artificial Sequence
  Description of Artificial Sequence: Synthetic oligonucleotide
  Sense strand starting at position 2850 of SEQ ID NO: 1024
gaaauauaggcauggguca

SEQ ID NO: 81731 - RNA, 19 nt, Artificial Sequence
  Description of Artificial Sequence: Synthetic oligonucleotide
  Antisense strand to SEQ ID NO: 81650
ugacccaugccuauauuuc

SEQ ID NO: 81732 - RNA, 19 nt, Artificial Sequence
  Description of Artificial Sequence: Synthetic oligonucleotide
  Sense strand starting at position 2951 of SEQ ID NO: 1024
aucacuaucguguaaugag

SEQ ID NO: 81733 - RNA, 19 nt, Artificial Sequence
  Description of Artificial Sequence: Synthetic oligonucleotide
  Antisense strand to SEQ ID NO: 81652
cucauuacacgauagugau

SEQ ID NO: 81734 - RNA, 19 nt, Artificial Sequence
  Description of Artificial Sequence: Synthetic oligonucleotide
  Sense strand starting at position 3036 of SEQ ID NO: 1024
ugggaaaguuucuuaagcu

SEQ ID NO: 81735 - RNA, 19 nt, Artificial Sequence
  Description of Artificial Sequence: Synthetic oligonucleotide
  Antisense strand to SEQ ID NO: 81654
agcuuaagaaacuuuccca

SEQ ID NO: 81736 - RNA, 19 nt, Artificial Sequence
  Description of Artificial Sequence: Synthetic oligonucleotide
  Sense strand starting at position 3066 of SEQ ID NO: 1024
ggugucuuaucuguagaaa

SEQ ID NO: 81737 - RNA, 19 nt, Artificial Sequence
  Description of Artificial Sequence: Synthetic oligonucleotide
  Antisense strand to SEQ ID NO: 81656
uuucuacagauaagacacc

SEQ ID NO: 81738 - RNA, 19 nt, Artificial Sequence
  Description of Artificial Sequence: Synthetic oligonucleotide
  Sense strand starting at position 3067 of SEQ ID NO: 1024
gugucuuaucuguagaaag

SEQ ID NO: 81739 - RNA, 19 nt, Artificial Sequence
  Description of Artificial Sequence: Synthetic oligonucleotide
  Antisense strand to SEQ ID NO: 81658
cuuucuacagauaagacac

SEQ ID NO: 81740 - RNA, 19 nt, Artificial Sequence
  Description of Artificial Sequence: Synthetic oligonucleotide
  Sense strand starting at position 3227 of SEQ ID NO: 1024
uagacagugcgucagagaa

SEQ ID NO: 81741 - RNA, 19 nt, Artificial Sequence
  Description of Artificial Sequence: Synthetic oligonucleotide
  Antisense strand to SEQ ID NO: 81660
uucucugacgcacugucua

SEQ ID NO: 81742 - RNA, 19 nt, Artificial Sequence
  Description of Artificial Sequence: Synthetic oligonucleotide
  Sense strand starting at position 3249 of SEQ ID NO: 1024
gaaggcauuccuuguuauu

SEQ ID NO: 81743 - RNA, 19 nt, Artificial Sequence
  Description of Artificial Sequence: Synthetic oligonucleotide
  Antisense strand to SEQ ID NO: 81662
aauaacaaggaaugccuuc

SEQ ID NO: 81744 - RNA, 19 nt, Artificial Sequence
  Description of Artificial Sequence: Synthetic oligonucleotide
  Sense strand starting at position 3251 of SEQ ID NO: 1024
aggcauuccuuguuauuac

SEQ ID NO: 81745 - RNA, 19 nt, Artificial Sequence
  Description of Artificial Sequence: Synthetic oligonucleotide
  Antisense strand to SEQ ID NO: 81664
guaauaacaaggaaugccu

SEQ ID NO: 81746 - RNA, 19 nt, Artificial Sequence
  Description of Artificial Sequence: Synthetic oligonucleotide
  Sense strand starting at position 3357 of SEQ ID NO: 1024
gaggcugugcaacaguaaa

SEQ ID NO: 81747 - RNA, 19 nt, Artificial Sequence
  Description of Artificial Sequence: Synthetic oligonucleotide
  Antisense strand to SEQ ID NO: 81666
uuuacuguugcacagccuc

SEQ ID NO: 81748 - RNA, 19 nt, Artificial Sequence
  Description of Artificial Sequence: Synthetic oligonucleotide
  Sense strand starting at position 3408 of SEQ ID NO: 1024
cugagcugucguaggugaa

SEQ ID NO: 81749 - RNA, 19 nt, Artificial Sequence
  Description of Artificial Sequence: Synthetic oligonucleotide
  Antisense strand to SEQ ID NO: 81668
uucaccuacgacagcucag

SEQ ID NO: 81750 - RNA, 19 nt, Artificial Sequence
  Description of Artificial Sequence: Synthetic oligonucleotide
  Sense strand starting at position 3455 of SEQ ID NO: 1024
ugguguuuaaaguaaugag

SEQ ID NO: 81751 - RNA, 19 nt, Artificial Sequence
  Description of Artificial Sequence: Synthetic oligonucleotide
  Antisense strand to SEQ ID NO: 81670
cucauuacuuuaaacacca

SEQ ID NO: 81752 - RNA, 19 nt, Artificial Sequence
  Description of Artificial Sequence: Synthetic oligonucleotide
  Sense strand starting at position 3493 of SEQ ID NO: 1024
gguacaaugaguugaacug

SEQ ID NO: 81753 - RNA, 19 nt, Artificial Sequence
  Description of Artificial Sequence: Synthetic oligonucleotide
  Antisense strand to SEQ ID NO: 81672
caguucaacucauuguacc

SEQ ID NO: 81754 - RNA, 19 nt, Artificial Sequence
  Description of Artificial Sequence: Synthetic oligonucleotide
  Sense strand starting at position 3494 of SEQ ID NO: 1024
guacaaugaguugaacugu

SEQ ID NO: 81755 - RNA, 19 nt, Artificial Sequence
  Description of Artificial Sequence: Synthetic oligonucleotide
  Antisense strand to SEQ ID NO: 81674
acaguucaacucauuguac

SEQ ID NO: 81756 - RNA, 19 nt, Artificial Sequence
  Description of Artificial Sequence: Synthetic oligonucleotide
  Sense strand starting at position 3503 of SEQ ID NO: 1024
guugaacugucacccacau

SEQ ID NO: 81757 - RNA, 19 nt, Artificial Sequence
  Description of Artificial Sequence: Synthetic oligonucleotide
  Antisense strand to SEQ ID NO: 81676
augugggugacaguucaac

SEQ ID NO: 81758 - RNA, 19 nt, Artificial Sequence
  Description of Artificial Sequence: Synthetic oligonucleotide
  Sense strand starting at position 3584 of SEQ ID NO: 1024
gucagaauaugaccuuauu

SEQ ID NO: 81759 - RNA, 19 nt, Artificial Sequence
  Description of Artificial Sequence: Synthetic oligonucleotide
  Antisense strand to SEQ ID NO: 81678
aauaaggucauauucugac

SEQ ID NO: 81760 - RNA, 19 nt, Artificial Sequence
  Description of Artificial Sequence: Synthetic oligonucleotide
  Sense strand starting at position 3612 of SEQ ID NO: 1024
gauccuuauggagguaauc

SEQ ID NO: 81761 - RNA, 19 nt, Artificial Sequence
  Description of Artificial Sequence: Synthetic oligonucleotide
  Antisense strand to SEQ ID NO: 81680
gauuaccuccauaaggauc

SEQ ID NO: 81762 - RNA, 19 nt, Artificial Sequence
  Description of Artificial Sequence: Synthetic oligonucleotide
  Sense strand starting at position 3725 of SEQ ID NO: 1024
gagggaaggugauaugaag

SEQ ID NO: 81763 - RNA, 19 nt, Artificial Sequence
  Description of Artificial Sequence: Synthetic oligonucleotide
  Antisense strand to SEQ ID NO: 81682
cuucauaucaccuucccuc

SEQ ID NO: 81764 - RNA, 19 nt, Artificial Sequence
  Description of Artificial Sequence: Synthetic oligonucleotide
  Sense strand starting at position 3935 of SEQ ID NO: 1024
cucauacaaguguguugaa

SEQ ID NO: 81765 - RNA, 19 nt, Artificial Sequence
  Description of Artificial Sequence: Synthetic oligonucleotide
  Antisense strand to SEQ ID NO: 81684
uucaacacacuuguaugag

SEQ ID NO: 81766 - RNA, 19 nt, Artificial Sequence
  Description of Artificial Sequence: Synthetic oligonucleotide
  Sense strand starting at position 3966 of SEQ ID NO: 1024
gauaauaauguaggcauga

SEQ ID NO: 81767 - RNA, 19 nt, Artificial Sequence
  Description of Artificial Sequence: Synthetic oligonucleotide
  Antisense strand to SEQ ID NO: 81686
ucaugccuacauuauuauc

SEQ ID NO: 81768 - RNA, 19 nt, Artificial Sequence
  Description of Artificial Sequence: Synthetic oligonucleotide
  Sense strand starting at position 3967 of SEQ ID NO: 1024
auaauaauguaggcaugau

SEQ ID NO: 81769 - RNA, 19 nt, Artificial Sequence
  Description of Artificial Sequence: Synthetic oligonucleotide
  Antisense strand to SEQ ID NO: 81688
aucaugccuacauuauuau

SEQ ID NO: 81770 - RNA, 19 nt, Artificial Sequence
  Description of Artificial Sequence: Synthetic oligonucleotide
  Sense strand starting at position 3971 of SEQ ID NO: 1024
uaauguaggcaugauucca

SEQ ID NO: 81771 - RNA, 19 nt, Artificial Sequence
  Description of Artificial Sequence: Synthetic oligonucleotide
  Antisense strand to SEQ ID NO: 81690
uggaaucaugccuacauua

SEQ ID NO: 81772 - RNA, 19 nt, Artificial Sequence
  Description of Artificial Sequence: Synthetic oligonucleotide
  Sense strand starting at position 3965 of SEQ ID NO: 1025
uggacaacgugguaaauaa

SEQ ID NO: 81773 - RNA, 19 nt, Artificial Sequence
  Description of Artificial Sequence: Synthetic oligonucleotide
  Antisense strand to SEQ ID NO: 81692
uuauuuaccacguugucca

SEQ ID NO: 81774 - RNA, 19 nt, Artificial Sequence
  Description of Artificial Sequence: Synthetic oligonucleotide
  Sense strand starting at position 3963 of SEQ ID NO: 1025
guuggacaacgugguaaau

SEQ ID NO: 81775 - RNA, 19 nt, Artificial Sequence
  Description of Artificial Sequence: Synthetic oligonucleotide
  Antisense strand to SEQ ID NO: 81694
auuuaccacguuguccaac

SEQ ID NO: 81776 - RNA, 19 nt, Artificial Sequence
  Description of Artificial Sequence: Synthetic oligonucleotide
  Sense strand starting at position 3928 of SEQ ID NO: 1025
gggugacaauguuucagaa

SEQ ID NO: 81777 - RNA, 19 nt, Artificial Sequence
  Description of Artificial Sequence: Synthetic oligonucleotide
  Antisense strand to SEQ ID NO: 81696
uucugaaacauugucaccc

SEQ ID NO: 81778 - RNA, 19 nt, Artificial Sequence
  Description of Artificial Sequence: Synthetic oligonucleotide
  Sense strand starting at position 3791 of SEQ ID NO: 1025
cgcagaguguugguuccau

SEQ ID NO: 81779 - RNA, 19 nt, Artificial Sequence
  Description of Artificial Sequence: Synthetic oligonucleotide
  Antisense strand to SEQ ID NO: 81698
auggaaccaacacucugcg

SEQ ID NO: 81780 - RNA, 19 nt, Artificial Sequence
  Description of Artificial Sequence: Synthetic oligonucleotide
  Sense strand starting at position 3756 of SEQ ID NO: 1025
cguuaugcuaaguggaaag

SEQ ID NO: 81781 - RNA, 19 nt, Artificial Sequence
  Description of Artificial Sequence: Synthetic oligonucleotide
  Antisense strand to SEQ ID NO: 81700
cuuuccacuuagcauaacg

SEQ ID NO: 81782 - RNA, 19 nt, Artificial Sequence
  Description of Artificial Sequence: Synthetic oligonucleotide
  Sense strand starting at position 3644 of SEQ ID NO: 1025
cauguccaucagugaugga

SEQ ID NO: 81783 - RNA, 19 nt, Artificial Sequence
  Description of Artificial Sequence: Synthetic oligonucleotide
  Antisense strand to SEQ ID NO: 81702
uccaucacugauggacaug

SEQ ID NO: 81784 - RNA, 19 nt, Artificial Sequence
  Description of Artificial Sequence: Synthetic oligonucleotide
  Sense strand starting at position 3641 of SEQ ID NO: 1025
gcacauguccaucagugau

SEQ ID NO: 81785 - RNA, 19 nt, Artificial Sequence
  Description of Artificial Sequence: Synthetic oligonucleotide
  Antisense strand to SEQ ID NO: 81704
aucacugauggacaugugc

SEQ ID NO: 81786 - RNA, 19 nt, Artificial Sequence
  Description of Artificial Sequence: Synthetic oligonucleotide
  Sense strand starting at position 3453 of SEQ ID NO: 1025
augcauugcuguugagaau

SEQ ID NO: 81787 - RNA, 19 nt, Artificial Sequence
  Description of Artificial Sequence: Synthetic oligonucleotide
  Antisense strand to SEQ ID NO: 81706
auucucaacagcaaugcau

SEQ ID NO: 81788 - RNA, 19 nt, Artificial Sequence
  Description of Artificial Sequence: Synthetic oligonucleotide
  Sense strand starting at position 3050 of SEQ ID NO: 1025
cuauuuccugcugguauga

SEQ ID NO: 81789 - RNA, 19 nt, Artificial Sequence
  Description of Artificial Sequence: Synthetic oligonucleotide
  Antisense strand to SEQ ID NO: 81708
ucauaccagcaggaaauag

SEQ ID NO: 81790 - RNA, 19 nt, Artificial Sequence
  Description of Artificial Sequence: Synthetic oligonucleotide
  Sense strand starting at position 3049 of SEQ ID NO: 1025
gcuauuuccugcugguaug

SEQ ID NO: 81791 - RNA, 19 nt, Artificial Sequence
  Description of Artificial Sequence: Synthetic oligonucleotide
  Antisense strand to SEQ ID NO: 81710
cauaccagcaggaaauagc

SEQ ID NO: 81792 - RNA, 19 nt, Artificial Sequence
  Description of Artificial Sequence: Synthetic oligonucleotide
  Sense strand starting at position 2812 of SEQ ID NO: 1025
uccauagaaugggaagaaa

SEQ ID NO: 81793 - RNA, 19 nt, Artificial Sequence
  Description of Artificial Sequence: Synthetic oligonucleotide
  Antisense strand to SEQ ID NO: 81712
uuucuucccauucuaugga

SEQ ID NO: 81794 - RNA, 19 nt, Artificial Sequence
  Description of Artificial Sequence: Synthetic oligonucleotide
  Sense strand starting at position 2781 of SEQ ID NO: 1025
cugggacacuauugagaaa

SEQ ID NO: 81795 - RNA, 19 nt, Artificial Sequence
  Description of Artificial Sequence: Synthetic oligonucleotide
  Antisense strand to SEQ ID NO: 81714
uuucucaauagugucccag

SEQ ID NO: 81796 - RNA, 19 nt, Artificial Sequence
  Description of Artificial Sequence: Synthetic oligonucleotide
  Sense strand starting at position 2717 of SEQ ID NO: 1025
cccggagccucagauuguu

SEQ ID NO: 81797 - RNA, 19 nt, Artificial Sequence
  Description of Artificial Sequence: Synthetic oligonucleotide
  Antisense strand to SEQ ID NO: 81716
aacaaucugaggcuccggg

SEQ ID NO: 81798 - RNA, 19 nt, Artificial Sequence
  Description of Artificial Sequence: Synthetic oligonucleotide
  Sense strand starting at position 2391 of SEQ ID NO: 1025
aguauuugcucagauuggu

SEQ ID NO: 81799 - RNA, 19 nt, Artificial Sequence
  Description of Artificial Sequence: Synthetic oligonucleotide
  Antisense strand to SEQ ID NO: 81718
accaaucugagcaaauacu

SEQ ID NO: 81800 - RNA, 19 nt, Artificial Sequence
  Description of Artificial Sequence: Synthetic oligonucleotide
  Sense strand starting at position 2388 of SEQ ID NO: 1025
ggcaguauuugcucagauu

SEQ ID NO: 81801 - RNA, 19 nt, Artificial Sequence
  Description of Artificial Sequence: Synthetic oligonucleotide
  Antisense strand to SEQ ID NO: 81720
aaucugagcaaauacugcc

SEQ ID NO: 81802 - RNA, 19 nt, Artificial Sequence
  Description of Artificial Sequence: Synthetic oligonucleotide
  Sense strand starting at position 2330 of SEQ ID NO: 1025
augguuaauugagaaacaa

SEQ ID NO: 81803 - RNA, 19 nt, Artificial Sequence
  Description of Artificial Sequence: Synthetic oligonucleotide
  Antisense strand to SEQ ID NO: 81722
uuguuucucaauuaaccau

SEQ ID NO: 81804 - RNA, 19 nt, Artificial Sequence
  Description of Artificial Sequence: Synthetic oligonucleotide
  Sense strand starting at position 2255 of SEQ ID NO: 1025
cugucaucacauggacuaa

SEQ ID NO: 81805 - RNA, 19 nt, Artificial Sequence
  Description of Artificial Sequence: Synthetic oligonucleotide
  Antisense strand to SEQ ID NO: 81724
uuaguccaugugaugacag

SEQ ID NO: 81806 - RNA, 19 nt, Artificial Sequence
  Description of Artificial Sequence: Synthetic oligonucleotide
  Sense strand starting at position 2212 of SEQ ID NO: 1025
cuaaauaucgcgcauucca

SEQ ID NO: 81807 - RNA, 19 nt, Artificial Sequence
  Description of Artificial Sequence: Synthetic oligonucleotide
  Antisense strand to SEQ ID NO: 81726
uggaaugcgcgauauuuag

SEQ ID NO: 81808 - RNA, 19 nt, Artificial Sequence
  Description of Artificial Sequence: Synthetic oligonucleotide
  Sense strand starting at position 1995 of SEQ ID NO: 1025
cuauuauaagccugaggca

SEQ ID NO: 81809 - RNA, 19 nt, Artificial Sequence
  Description of Artificial Sequence: Synthetic oligonucleotide
  Antisense strand to SEQ ID NO: 81728
ugccucaggcuuauaauag

SEQ ID NO: 81810 - RNA, 19 nt, Artificial Sequence
  Description of Artificial Sequence: Synthetic oligonucleotide
  Sense strand starting at position 1875 of SEQ ID NO: 1025
ugugacaucugccuuacca

SEQ ID NO: 81811 - RNA, 19 nt, Artificial Sequence
  Description of Artificial Sequence: Synthetic oligonucleotide
  Antisense strand to SEQ ID NO: 81730
ugguaaggcagaugucaca

SEQ ID NO: 81812 - RNA, 19 nt, Artificial Sequence
  Description of Artificial Sequence: Synthetic oligonucleotide
  Sense strand starting at position 1590 of SEQ ID NO: 1025
uccugucuguccucuacau

SEQ ID NO: 81813 - RNA, 19 nt, Artificial Sequence
  Description of Artificial Sequence: Synthetic oligonucleotide
  Antisense strand to SEQ ID NO: 81732
auguagaggacagacagga

SEQ ID NO: 81814 - RNA, 19 nt, Artificial Sequence
  Description of Artificial Sequence: Synthetic oligonucleotide
  Sense strand starting at position 921 of SEQ ID NO: 1025
gcggccauuucucuuuaca

SEQ ID NO: 81815 - RNA, 19 nt, Artificial Sequence
  Description of Artificial Sequence: Synthetic oligonucleotide
  Antisense strand to SEQ ID NO: 81734
uguaaagagaaauggccgc

SEQ ID NO: 81816 - RNA, 19 nt, Artificial Sequence
  Description of Artificial Sequence: Synthetic oligonucleotide
  Sense strand starting at position 223 of SEQ ID NO: 1025
gcuuguagcuuguacugaa

SEQ ID NO: 81817 - RNA, 19 nt, Artificial Sequence
  Description of Artificial Sequence: Synthetic oligonucleotide
  Antisense strand to SEQ ID NO: 81736
uucaguacaagcuacaagc

SEQ ID NO: 81818 - RNA, 19 nt, Artificial Sequence
  Description of Artificial Sequence: Synthetic oligonucleotide
  Sense strand starting at position 142 of SEQ ID NO: 1025
acagcuggcuucuaggaga

SEQ ID NO: 81819 - RNA, 19 nt, Artificial Sequence
  Description of Artificial Sequence: Synthetic oligonucleotide
  Antisense strand to SEQ ID NO: 81738
ucuccuagaagccagcugu

SEQ ID NO: 81820 - RNA, 19 nt, Artificial Sequence
  Description of Artificial Sequence: Synthetic oligonucleotide
  Sense strand starting at position 235 of SEQ ID NO: 1026
guuccaguuggacaauaua

SEQ ID NO: 81821 - RNA, 19 nt, Artificial Sequence
  Description of Artificial Sequence: Synthetic oligonucleotide
  Antisense strand to SEQ ID NO: 81740
uauauuguccaacuggaac

SEQ ID NO: 81822 - RNA, 19 nt, Artificial Sequence
  Description of Artificial Sequence: Synthetic oligonucleotide
  Sense strand starting at position 335 of SEQ ID NO: 1026
ggacgagcucuccaccuuu

SEQ ID NO: 81823 - RNA, 19 nt, Artificial Sequence
  Description of Artificial Sequence: Synthetic oligonucleotide
  Antisense strand to SEQ ID NO: 81742
aaagguggagagcucgucc

SEQ ID NO: 81824 - RNA, 19 nt, Artificial Sequence
  Description of Artificial Sequence: Synthetic oligonucleotide
  Sense strand starting at position 777 of SEQ ID NO: 1026
gaucuugaccaaugaaguu

SEQ ID NO: 81825 - RNA, 19 nt, Artificial Sequence
  Description of Artificial Sequence: Synthetic oligonucleotide
  Antisense strand to SEQ ID NO: 81744
aacuucauuggucaagauc

SEQ ID NO: 81826 - RNA, 19 nt, Artificial Sequence
  Description of Artificial Sequence: Synthetic oligonucleotide
  Sense strand starting at position 784 of SEQ ID NO: 1026
accaaugaaguuugugaca

SEQ ID NO: 81827 - RNA, 19 nt, Artificial Sequence
  Description of Artificial Sequence: Synthetic oligonucleotide
  Antisense strand to SEQ ID NO: 81746
ugucacaaacuucauuggu

SEQ ID NO: 81828 - RNA, 19 nt, Artificial Sequence
  Description of Artificial Sequence: Synthetic oligonucleotide
  Sense strand starting at position 915 of SEQ ID NO: 1026
gugauauccuuugcugaaa

SEQ ID NO: 81829 - RNA, 19 nt, Artificial Sequence
  Description of Artificial Sequence: Synthetic oligonucleotide
  Antisense strand to SEQ ID NO: 81748
uuucagcaaaggauaucac

SEQ ID NO: 81830 - RNA, 19 nt, Artificial Sequence
  Description of Artificial Sequence: Synthetic oligonucleotide
  Sense strand starting at position 1087 of SEQ ID NO: 1026
ggaagaauguacucgucau

SEQ ID NO: 81831 - RNA, 19 nt, Artificial Sequence
  Description of Artificial Sequence: Synthetic oligonucleotide
  Antisense strand to SEQ ID NO: 81750
augacgaguacauucuucc

SEQ ID NO: 81832 - RNA, 19 nt, Artificial Sequence
  Description of Artificial Sequence: Synthetic oligonucleotide
  Sense strand starting at position 1091 of SEQ ID NO: 1026
gaauguacucgucauaaag

SEQ ID NO: 81833 - RNA, 19 nt, Artificial Sequence
  Description of Artificial Sequence: Synthetic oligonucleotide
  Antisense strand to SEQ ID NO: 81752
cuuuaugacgaguacauuc

SEQ ID NO: 81834 - RNA, 19 nt, Artificial Sequence
  Description of Artificial Sequence: Synthetic oligonucleotide
  Sense strand starting at position 1108 of SEQ ID NO: 1026
agcacaucuccguuguagu

SEQ ID NO: 81835 - RNA, 19 nt, Artificial Sequence
  Description of Artificial Sequence: Synthetic oligonucleotide
  Antisense strand to SEQ ID NO: 81754
acuacaacggagaugugcu

SEQ ID NO: 81836 - RNA, 19 nt, Artificial Sequence
  Description of Artificial Sequence: Synthetic oligonucleotide
  Sense strand starting at position 1277 of SEQ ID NO: 1026
cauucuucugaggaugguu

SEQ ID NO: 81837 - RNA, 19 nt, Artificial Sequence
  Description of Artificial Sequence: Synthetic oligonucleotide
  Antisense strand to SEQ ID NO: 81756
aaccauccucagaagaaug

SEQ ID NO: 81838 - RNA, 19 nt, Artificial Sequence
  Description of Artificial Sequence: Synthetic oligonucleotide
  Sense strand starting at position 1316 of SEQ ID NO: 1026
gggagcucuucuucugaga

SEQ ID NO: 81839 - RNA, 19 nt, Artificial Sequence
  Description of Artificial Sequence: Synthetic oligonucleotide
  Antisense strand to SEQ ID NO: 81758
ucucagaagaagagcuccc

SEQ ID NO: 81840 - RNA, 19 nt, Artificial Sequence
  Description of Artificial Sequence: Synthetic oligonucleotide
  Sense strand starting at position 1337 of SEQ ID NO: 1026
ggguuggguggcuauugau

SEQ ID NO: 81841 - RNA, 19 nt, Artificial Sequence
  Description of Artificial Sequence: Synthetic oligonucleotide
  Antisense strand to SEQ ID NO: 81760
aucaauagccacccaaccc

SEQ ID NO: 81842 - RNA, 19 nt, Artificial Sequence
  Description of Artificial Sequence: Synthetic oligonucleotide
  Sense strand starting at position 1346 of SEQ ID NO: 1026
ggcuauugaucuuuggaag

SEQ ID NO: 81843 - RNA, 19 nt, Artificial Sequence
  Description of Artificial Sequence: Synthetic oligonucleotide
  Antisense strand to SEQ ID NO: 81762
cuuccaaagaucaauagcc

SEQ ID NO: 81844 - RNA, 19 nt, Artificial Sequence
  Description of Artificial Sequence: Synthetic oligonucleotide
  Sense strand starting at position 1347 of SEQ ID NO: 1026
gcuauugaucuuuggaagg

SEQ ID NO: 81845 - RNA, 19 nt, Artificial Sequence
  Description of Artificial Sequence: Synthetic oligonucleotide
  Antisense strand to SEQ ID NO: 81764
ccuuccaaagaucaauagc

SEQ ID NO: 81846 - RNA, 19 nt, Artificial Sequence
  Description of Artificial Sequence: Synthetic oligonucleotide
  Sense strand starting at position 1391 of SEQ ID NO: 1026
cuacuuuagcagcaacaga

SEQ ID NO: 81847 - RNA, 19 nt, Artificial Sequence
  Description of Artificial Sequence: Synthetic oligonucleotide
  Antisense strand to SEQ ID NO: 81766
ucuguugcugcuaaaguag

SEQ ID NO: 81848 - RNA, 19 nt, Artificial Sequence
  Description of Artificial Sequence: Synthetic oligonucleotide
  Sense strand starting at position 1712 of SEQ ID NO: 1026
aauccagauugagcaguaa

SEQ ID NO: 81849 - RNA, 19 nt, Artificial Sequence
  Description of Artificial Sequence: Synthetic oligonucleotide
  Antisense strand to SEQ ID NO: 81768
uuacugcucaaucuggauu

SEQ ID NO: 81850 - RNA, 19 nt, Artificial Sequence
  Description of Artificial Sequence: Synthetic oligonucleotide
  Sense strand starting at position 1716 of SEQ ID NO: 1026
cagauugagcaguaaagua

SEQ ID NO: 81851 - RNA, 19 nt, Artificial Sequence
  Description of Artificial Sequence: Synthetic oligonucleotide
  Antisense strand to SEQ ID NO: 81770
uacuuuacugcucaaucug

SEQ ID NO: 81852 - RNA, 19 nt, Artificial Sequence
  Description of Artificial Sequence: Synthetic oligonucleotide
  Sense strand starting at position 1754 of SEQ ID NO: 1026
gcggaagaguaguugggaa

SEQ ID NO: 81853 - RNA, 19 nt, Artificial Sequence
  Description of Artificial Sequence: Synthetic oligonucleotide
  Antisense strand to SEQ ID NO: 81772
uucccaacuacucuuccgc

SEQ ID NO: 81854 - RNA, 19 nt, Artificial Sequence
  Description of Artificial Sequence: Synthetic oligonucleotide
  Sense strand starting at position 1801 of SEQ ID NO: 1026
gggacucauucucugcuga

SEQ ID NO: 81855 - RNA, 19 nt, Artificial Sequence
  Description of Artificial Sequence: Synthetic oligonucleotide
  Antisense strand to SEQ ID NO: 81774
ucagcagagaaugaguccc

SEQ ID NO: 81856 - RNA, 19 nt, Artificial Sequence
  Description of Artificial Sequence: Synthetic oligonucleotide
  Sense strand starting at position 1802 of SEQ ID NO: 1026
ggacucauucucugcugaa

SEQ ID NO: 81857 - RNA, 19 nt, Artificial Sequence
  Description of Artificial Sequence: Synthetic oligonucleotide
  Antisense strand to SEQ ID NO: 81776
uucagcagagaaugagucc

SEQ ID NO: 81858 - RNA, 19 nt, Artificial Sequence
  Description of Artificial Sequence: Synthetic oligonucleotide
  Sense strand starting at position 1836 of SEQ ID NO: 1026
uguggaggucuguaguaca

SEQ ID NO: 81859 - RNA, 19 nt, Artificial Sequence
  Description of Artificial Sequence: Synthetic oligonucleotide
  Antisense strand to SEQ ID NO: 81778
uguacuacagaccuccaca

SEQ ID NO: 81860 - RNA, 19 nt, Artificial Sequence
  Description of Artificial Sequence: Synthetic oligonucleotide
  Sense strand starting at position 1861 of SEQ ID NO: 1026
ggaagaaagugauccuggu

SEQ ID NO: 81861 - RNA, 19 nt, Artificial Sequence
  Description of Artificial Sequence: Synthetic oligonucleotide
  Antisense strand to SEQ ID NO: 81780
accaggaucacuuucuucc

SEQ ID NO: 81862 - RNA, 19 nt, Artificial Sequence
  Description of Artificial Sequence: Synthetic oligonucleotide
  Sense strand starting at position 1865 of SEQ ID NO: 1026
gaaagugauccugguaauu

SEQ ID NO: 81863 - RNA, 19 nt, Artificial Sequence
  Description of Artificial Sequence: Synthetic oligonucleotide
  Antisense strand to SEQ ID NO: 81782
aauuaccaggaucacuuuc

SEQ ID NO: 81864 - RNA, 19 nt, Artificial Sequence
  Description of Artificial Sequence: Synthetic oligonucleotide
  Sense strand starting at position 1887 of SEQ ID NO: 1026
cuccuaggccugggagaaa

SEQ ID NO: 81865 - RNA, 19 nt, Artificial Sequence
  Description of Artificial Sequence: Synthetic oligonucleotide
  Antisense strand to SEQ ID NO: 81784
uuucucccaggccuaggag

SEQ ID NO: 81866 - RNA, 19 nt, Artificial Sequence
  Description of Artificial Sequence: Synthetic oligonucleotide
  Sense strand starting at position 1923 of SEQ ID NO: 1026
cuccguaggacuuauggaa

SEQ ID NO: 81867 - RNA, 19 nt, Artificial Sequence
  Description of Artificial Sequence: Synthetic oligonucleotide
  Antisense strand to SEQ ID NO: 81786
uuccauaaguccuacggag

SEQ ID NO: 81868 - RNA, 19 nt, Artificial Sequence
  Description of Artificial Sequence: Synthetic oligonucleotide
  Sense strand starting at position 2022 of SEQ ID NO: 1026
ccagcaagccuggauucua

SEQ ID NO: 81869 - RNA, 19 nt, Artificial Sequence
  Description of Artificial Sequence: Synthetic oligonucleotide
  Antisense strand to SEQ ID NO: 81788
uagaauccaggcuugcugg

SEQ ID NO: 81870 - RNA, 19 nt, Artificial Sequence
  Description of Artificial Sequence: Synthetic oligonucleotide
  Sense strand starting at position 2056 of SEQ ID NO: 1026
ccagccauuuggucuuagu

SEQ ID NO: 81871 - RNA, 19 nt, Artificial Sequence
  Description of Artificial Sequence: Synthetic oligonucleotide
  Antisense strand to SEQ ID NO: 81790
acuaagaccaaauggcugg

SEQ ID NO: 81872 - RNA, 19 nt, Artificial Sequence
  Description of Artificial Sequence: Synthetic oligonucleotide
  Sense strand starting at position 2096 of SEQ ID NO: 1026
guuugagucucauuuguaa

SEQ ID NO: 81873 - RNA, 19 nt, Artificial Sequence
  Description of Artificial Sequence: Synthetic oligonucleotide
  Antisense strand to SEQ ID NO: 81792
uuacaaaugagacucaaac

SEQ ID NO: 81874 - RNA, 19 nt, Artificial Sequence
  Description of Artificial Sequence: Synthetic oligonucleotide
  Sense strand starting at position 2183 of SEQ ID NO: 1026
cuauacuccgccuaggaaa

SEQ ID NO: 81875 - RNA, 19 nt, Artificial Sequence
  Description of Artificial Sequence: Synthetic oligonucleotide
  Antisense strand to SEQ ID NO: 81794
uuuccuaggcggaguauag

SEQ ID NO: 81876 - RNA, 19 nt, Artificial Sequence
  Description of Artificial Sequence: Synthetic oligonucleotide
  Sense strand starting at position 2205 of SEQ ID NO: 1026
acaucuagguaugcucaaa

SEQ ID NO: 81877 - RNA, 19 nt, Artificial Sequence
  Description of Artificial Sequence: Synthetic oligonucleotide
  Antisense strand to SEQ ID NO: 81796
uuugagcauaccuagaugu

SEQ ID NO: 81878 - RNA, 19 nt, Artificial Sequence
  Description of Artificial Sequence: Synthetic oligonucleotide
  Sense strand starting at position 2231 of SEQ ID NO: 1026
agaaguauggcguagauaa

SEQ ID NO: 81879 - RNA, 19 nt, Artificial Sequence
  Description of Artificial Sequence: Synthetic oligonucleotide
  Antisense strand to SEQ ID NO: 81798
uuaucuacgccauacuucu

SEQ ID NO: 81880 - RNA, 19 nt, Artificial Sequence
  Description of Artificial Sequence: Synthetic oligonucleotide
  Sense strand starting at position 2242 of SEQ ID NO: 1026
guagauaaccucugggcua

SEQ ID NO: 81881 - RNA, 19 nt, Artificial Sequence
  Description of Artificial Sequence: Synthetic oligonucleotide
  Antisense strand to SEQ ID NO: 81800
uagcccagagguuaucuac

SEQ ID NO: 81882 - RNA, 19 nt, Artificial Sequence
  Description of Artificial Sequence: Synthetic oligonucleotide
  Sense strand starting at position 2443 of SEQ ID NO: 1026
ggauaagcauacuucggau

SEQ ID NO: 81883 - RNA, 19 nt, Artificial Sequence
  Description of Artificial Sequence: Synthetic oligonucleotide
  Antisense strand to SEQ ID NO: 81802
auccgaaguaugcuuaucc

SEQ ID NO: 81884 - RNA, 19 nt, Artificial Sequence
  Description of Artificial Sequence: Synthetic oligonucleotide
  Sense strand starting at position 3380 of SEQ ID NO: 1026
agaauuagccucugaucuc

SEQ ID NO: 81885 - RNA, 19 nt, Artificial Sequence
  Description of Artificial Sequence: Synthetic oligonucleotide
  Antisense strand to SEQ ID NO: 81804
gagaucagaggcuaauucu

SEQ ID NO: 81886 - RNA, 19 nt, Artificial Sequence
  Description of Artificial Sequence: Synthetic oligonucleotide
  Sense strand starting at position 3582 of SEQ ID NO: 1026
cggcucacugcauaaauaa

SEQ ID NO: 81887 - RNA, 19 nt, Artificial Sequence
  Description of Artificial Sequence: Synthetic oligonucleotide
  Antisense strand to SEQ ID NO: 81806
uuauuuaugcagugagccg

SEQ ID NO: 81888 - RNA, 19 nt, Artificial Sequence
  Description of Artificial Sequence: Synthetic oligonucleotide
  Sense strand starting at position 3605 of SEQ ID NO: 1026
ucuaguaccuaccuagauu

SEQ ID NO: 81889 - RNA, 19 nt, Artificial Sequence
  Description of Artificial Sequence: Synthetic oligonucleotide
  Antisense strand to SEQ ID NO: 81808
aaucuagguagguacuaga

SEQ ID NO: 81890 - RNA, 19 nt, Artificial Sequence
  Description of Artificial Sequence: Synthetic oligonucleotide
  Sense strand starting at position 3671 of SEQ ID NO: 1026
ggaaccaugcugcaacuau

SEQ ID NO: 81891 - RNA, 19 nt, Artificial Sequence
  Description of Artificial Sequence: Synthetic oligonucleotide
  Antisense strand to SEQ ID NO: 81810
auaguugcagcaugguucc

SEQ ID NO: 81892 - RNA, 19 nt, Artificial Sequence
  Description of Artificial Sequence: Synthetic oligonucleotide
  Sense strand starting at position 3692 of SEQ ID NO: 1026
ugaacucuucuuggagcau

SEQ ID NO: 81893 - RNA, 19 nt, Artificial Sequence
  Description of Artificial Sequence: Synthetic oligonucleotide
  Antisense strand to SEQ ID NO: 81812
augcuccaagaagaguuca

SEQ ID NO: 81894 - RNA, 19 nt, Artificial Sequence
  Description of Artificial Sequence: Synthetic oligonucleotide
  Sense strand starting at position 3803 of SEQ ID NO: 1026
aaaggcuuagucuagaauc

SEQ ID NO: 81895 - RNA, 19 nt, Artificial Sequence
  Description of Artificial Sequence: Synthetic oligonucleotide
  Antisense strand to SEQ ID NO: 81814
gauucuagacuaagccuuu

SEQ ID NO: 81896 - RNA, 19 nt, Artificial Sequence
  Description of Artificial Sequence: Synthetic oligonucleotide
  Sense strand starting at position 3805 of SEQ ID NO: 1026
aggcuuagucuagaauccu

SEQ ID NO: 81897 - RNA, 19 nt, Artificial Sequence
  Description of Artificial Sequence: Synthetic oligonucleotide
  Antisense strand to SEQ ID NO: 81816
aggauucuagacuaagccu

SEQ ID NO: 81898 - RNA, 19 nt, Artificial Sequence
  Description of Artificial Sequence: Synthetic oligonucleotide
  Sense strand starting at position 3909 of SEQ ID NO: 1026
ucugaaggauuauugugaa

SEQ ID NO: 81899 - RNA, 19 nt, Artificial Sequence
  Description of Artificial Sequence: Synthetic oligonucleotide
  Antisense strand to SEQ ID NO: 81818
uucacaauaauccuucaga

SEQ ID NO: 81900 - RNA, 19 nt, Artificial Sequence
  Description of Artificial Sequence: Synthetic oligonucleotide
  Sense strand starting at position 18 of SEQ ID NO: 1027
acaaacugugagggucaaa

SEQ ID NO: 81901 - RNA, 19 nt, Artificial Sequence
  Description of Artificial Sequence: Synthetic oligonucleotide
  Antisense strand to SEQ ID NO: 81820
uuugacccucacaguuugu

SEQ ID NO: 81902 - RNA, 19 nt, Artificial Sequence
  Description of Artificial Sequence: Synthetic oligonucleotide
  Sense strand starting at position 230 of SEQ ID NO: 1027
uuggaaaucucagugguaa

SEQ ID NO: 81903 - RNA, 19 nt, Artificial Sequence
  Description of Artificial Sequence: Synthetic oligonucleotide
  Antisense strand to SEQ ID NO: 81822
uuaccacugagauuuccaa

SEQ ID NO: 81904 - RNA, 19 nt, Artificial Sequence
  Description of Artificial Sequence: Synthetic oligonucleotide
  Sense strand starting at position 231 of SEQ ID NO: 1027
uggaaaucucagugguaau

SEQ ID NO: 81905 - RNA, 19 nt, Artificial Sequence
  Description of Artificial Sequence: Synthetic oligonucleotide
  Antisense strand to SEQ ID NO: 81824
auuaccacugagauuucca

SEQ ID NO: 81906 - RNA, 19 nt, Artificial Sequence
  Description of Artificial Sequence: Synthetic oligonucleotide
  Sense strand starting at position 232 of SEQ ID NO: 1027
ggaaaucucagugguaauu

SEQ ID NO: 81907 - RNA, 19 nt, Artificial Sequence
  Description of Artificial Sequence: Synthetic oligonucleotide
  Antisense strand to SEQ ID NO: 81826
aauuaccacugagauuucc

SEQ ID NO: 81908 - RNA, 19 nt, Artificial Sequence
  Description of Artificial Sequence: Synthetic oligonucleotide
  Sense strand starting at position 654 of SEQ ID NO: 1027
ucagaaagguguuuaguau

SEQ ID NO: 81909 - RNA, 19 nt, Artificial Sequence
  Description of Artificial Sequence: Synthetic oligonucleotide
  Antisense strand to SEQ ID NO: 81828
auacuaaacaccuuucuga

SEQ ID NO: 81910 - RNA, 19 nt, Artificial Sequence
  Description of Artificial Sequence: Synthetic oligonucleotide
  Sense strand starting at position 655 of SEQ ID NO: 1027
cagaaagguguuuaguaug

SEQ ID NO: 81911 - RNA, 19 nt, Artificial Sequence
  Description of Artificial Sequence: Synthetic oligonucleotide
  Antisense strand to SEQ ID NO: 81830
cauacuaaacaccuuucug

SEQ ID NO: 81912 - RNA, 19 nt, Artificial Sequence
  Description of Artificial Sequence: Synthetic oligonucleotide
  Sense strand starting at position 702 of SEQ ID NO: 1027
agggcuguaugaccagaaa

SEQ ID NO: 81913 - RNA, 19 nt, Artificial Sequence
  Description of Artificial Sequence: Synthetic oligonucleotide
  Antisense strand to SEQ ID NO: 81832
uuucuggucauacagcccu

SEQ ID NO: 81914 - RNA, 19 nt, Artificial Sequence
  Description of Artificial Sequence: Synthetic oligonucleotide
  Sense strand starting at position 705 of SEQ ID NO: 1027
gcuguaugaccagaaacug

SEQ ID NO: 81915 - RNA, 19 nt, Artificial Sequence
  Description of Artificial Sequence: Synthetic oligonucleotide
  Antisense strand to SEQ ID NO: 81834
caguuucuggucauacagc

SEQ ID NO: 81916 - RNA, 19 nt, Artificial Sequence
  Description of Artificial Sequence: Synthetic oligonucleotide
  Sense strand starting at position 724 of SEQ ID NO: 1027
cagcucauugguuagauaa

SEQ ID NO: 81917 - RNA, 19 nt, Artificial Sequence
  Description of Artificial Sequence: Synthetic oligonucleotide
  Antisense strand to SEQ ID NO: 81836
uuaucuaaccaaugagcug

SEQ ID NO: 81918 - RNA, 19 nt, Artificial Sequence
  Description of Artificial Sequence: Synthetic oligonucleotide
  Sense strand starting at position 748 of SEQ ID NO: 1027
gaguucugaccacauaguu

SEQ ID NO: 81919 - RNA, 19 nt, Artificial Sequence
  Description of Artificial Sequence: Synthetic oligonucleotide
  Antisense strand to SEQ ID NO: 81838
aacuauguggucagaacuc

SEQ ID NO: 81920 - RNA, 19 nt, Artificial Sequence
  Description of Artificial Sequence: Synthetic oligonucleotide
  Sense strand starting at position 888 of SEQ ID NO: 1027
uagggcuuaggaugaagau

SEQ ID NO: 81921 - RNA, 19 nt, Artificial Sequence
  Description of Artificial Sequence: Synthetic oligonucleotide
  Antisense strand to SEQ ID NO: 81840
aucuucauccuaagcccua

SEQ ID NO: 81922 - RNA, 19 nt, Artificial Sequence
  Description of Artificial Sequence: Synthetic oligonucleotide
  Sense strand starting at position 1934 of SEQ ID NO: 1027
guuucuguccaguaugaga

SEQ ID NO: 81923 - RNA, 19 nt, Artificial Sequence
  Description of Artificial Sequence: Synthetic oligonucleotide
  Antisense strand to SEQ ID NO: 81842
ucucauacuggacagaaac

SEQ ID NO: 81924 - RNA, 19 nt, Artificial Sequence
  Description of Artificial Sequence: Synthetic oligonucleotide
  Sense strand starting at position 2103 of SEQ ID NO: 1027
gagcgaucuuagucuauuu

SEQ ID NO: 81925 - RNA, 19 nt, Artificial Sequence
  Description of Artificial Sequence: Synthetic oligonucleotide
  Antisense strand to SEQ ID NO: 81844
aaauagacuaagaucgcuc

SEQ ID NO: 81926 - RNA, 19 nt, Artificial Sequence
  Description of Artificial Sequence: Synthetic oligonucleotide
  Sense strand starting at position 2105 of SEQ ID NO: 1027
gcgaucuuagucuauuucu

SEQ ID NO: 81927 - RNA, 19 nt, Artificial Sequence
  Description of Artificial Sequence: Synthetic oligonucleotide
  Antisense strand to SEQ ID NO: 81846
agaaauagacuaagaucgc

SEQ ID NO: 81928 - RNA, 19 nt, Artificial Sequence
  Description of Artificial Sequence: Synthetic oligonucleotide
  Sense strand starting at position 2857 of SEQ ID NO: 1027
ggagucucaacuugugaag

SEQ ID NO: 81929 - RNA, 19 nt, Artificial Sequence
  Description of Artificial Sequence: Synthetic oligonucleotide
  Antisense strand to SEQ ID NO: 81848
cuucacaaguugagacucc

SEQ ID NO: 81930 - RNA, 19 nt, Artificial Sequence
  Description of Artificial Sequence: Synthetic oligonucleotide
  Sense strand starting at position 2954 of SEQ ID NO: 1027
cugcuucuuagagggauua

SEQ ID NO: 81931 - RNA, 19 nt, Artificial Sequence
  Description of Artificial Sequence: Synthetic oligonucleotide
  Antisense strand to SEQ ID NO: 81850
uaaucccucuaagaagcag

SEQ ID NO: 81932 - RNA, 19 nt, Artificial Sequence
  Description of Artificial Sequence: Synthetic oligonucleotide
  Sense strand starting at position 2955 of SEQ ID NO: 1027
ugcuucuuagagggauuau

SEQ ID NO: 81933 - RNA, 19 nt, Artificial Sequence
  Description of Artificial Sequence: Synthetic oligonucleotide
  Antisense strand to SEQ ID NO: 81852
auaaucccucuaagaagca

SEQ ID NO: 81934 - RNA, 19 nt, Artificial Sequence
  Description of Artificial Sequence: Synthetic oligonucleotide
  Sense strand starting at position 2975 of SEQ ID NO: 1027
ucugaacugguaugagaug

SEQ ID NO: 81935 - RNA, 19 nt, Artificial Sequence
  Description of Artificial Sequence: Synthetic oligonucleotide
  Antisense strand to SEQ ID NO: 81854
caucucauaccaguucaga

SEQ ID NO: 81936 - RNA, 19 nt, Artificial Sequence
  Description of Artificial Sequence: Synthetic oligonucleotide
  Sense strand starting at position 3070 of SEQ ID NO: 1027
acuucuuaaaguugggagu

SEQ ID NO: 81937 - RNA, 19 nt, Artificial Sequence
  Description of Artificial Sequence: Synthetic oligonucleotide
  Antisense strand to SEQ ID NO: 81856
acucccaacuuuaagaagu

SEQ ID NO: 81938 - RNA, 19 nt, Artificial Sequence
  Description of Artificial Sequence: Synthetic oligonucleotide
  Sense strand starting at position 3107 of SEQ ID NO: 1027
uuggaugcccacuaaguau

SEQ ID NO: 81939 - RNA, 19 nt, Artificial Sequence
  Description of Artificial Sequence: Synthetic oligonucleotide
  Antisense strand to SEQ ID NO: 81858
auacuuagugggcauccaa

SEQ ID NO: 81940 - RNA, 19 nt, Artificial Sequence
  Description of Artificial Sequence: Synthetic oligonucleotide
  Sense strand starting at position 3138 of SEQ ID NO: 1027
acuguaggugcucaagaaa

SEQ ID NO: 81941 - RNA, 19 nt, Artificial Sequence
  Description of Artificial Sequence: Synthetic oligonucleotide
  Antisense strand to SEQ ID NO: 81860
uuucuugagcaccuacagu

SEQ ID NO: 81942 - RNA, 19 nt, Artificial Sequence
  Description of Artificial Sequence: Synthetic oligonucleotide
  Sense strand starting at position 3156 of SEQ ID NO: 1027
aaauaaugugggugauguu

SEQ ID NO: 81943 - RNA, 19 nt, Artificial Sequence
  Description of Artificial Sequence: Synthetic oligonucleotide
  Antisense strand to SEQ ID NO: 81862
aacaucacccacauuauuu

SEQ ID NO: 81944 - RNA, 19 nt, Artificial Sequence
  Description of Artificial Sequence: Synthetic oligonucleotide
  Sense strand starting at position 3157 of SEQ ID NO: 1027
aauaaugugggugauguua

SEQ ID NO: 81945 - RNA, 19 nt, Artificial Sequence
  Description of Artificial Sequence: Synthetic oligonucleotide
  Antisense strand to SEQ ID NO: 81864
uaacaucacccacauuauu

SEQ ID NO: 81946 - RNA, 19 nt, Artificial Sequence
  Description of Artificial Sequence: Synthetic oligonucleotide
  Sense strand starting at position 3252 of SEQ ID NO: 1027
accaaaugucgaugagcaa

SEQ ID NO: 81947 - RNA, 19 nt, Artificial Sequence
  Description of Artificial Sequence: Synthetic oligonucleotide
  Antisense strand to SEQ ID NO: 81866
uugcucaucgacauuuggu

SEQ ID NO: 81948 - RNA, 19 nt, Artificial Sequence
  Description of Artificial Sequence: Synthetic oligonucleotide
  Sense strand starting at position 3253 of SEQ ID NO: 1027
ccaaaugucgaugagcaaa

SEQ ID NO: 81949 - RNA, 19 nt, Artificial Sequence
  Description of Artificial Sequence: Synthetic oligonucleotide
  Antisense strand to SEQ ID NO: 81868
uuugcucaucgacauuugg

SEQ ID NO: 81950 - RNA, 19 nt, Artificial Sequence
  Description of Artificial Sequence: Synthetic oligonucleotide
  Sense strand starting at position 3308 of SEQ ID NO: 1027
ucauuauuggcauaggcca

SEQ ID NO: 81951 - RNA, 19 nt, Artificial Sequence
  Description of Artificial Sequence: Synthetic oligonucleotide
  Antisense strand to SEQ ID NO: 81870
uggccuaugccaauaauga

SEQ ID NO: 81952 - RNA, 19 nt, Artificial Sequence
  Description of Artificial Sequence: Synthetic oligonucleotide
  Sense strand starting at position 3381 of SEQ ID NO: 1027
caucauucuggauaagcga

SEQ ID NO: 81953 - RNA, 19 nt, Artificial Sequence
  Description of Artificial Sequence: Synthetic oligonucleotide
  Antisense strand to SEQ ID NO: 81872
ucgcuuauccagaaugaug

SEQ ID NO: 81954 - RNA, 19 nt, Artificial Sequence
  Description of Artificial Sequence: Synthetic oligonucleotide
  Sense strand starting at position 3422 of SEQ ID NO: 1027
ggaauaaagcucugaaauc

SEQ ID NO: 81955 - RNA, 19 nt, Artificial Sequence
  Description of Artificial Sequence: Synthetic oligonucleotide
  Antisense strand to SEQ ID NO: 81874
gauuucagagcuuuauucc

SEQ ID NO: 81956 - RNA, 19 nt, Artificial Sequence
  Description of Artificial Sequence: Synthetic oligonucleotide
  Sense strand starting at position 3451 of SEQ ID NO: 1027
cagaaaucugaagguaggu

SEQ ID NO: 81957 - RNA, 19 nt, Artificial Sequence
  Description of Artificial Sequence: Synthetic oligonucleotide
  Antisense strand to SEQ ID NO: 81876
accuaccuucagauuucug

SEQ ID NO: 81958 - RNA, 19 nt, Artificial Sequence
  Description of Artificial Sequence: Synthetic oligonucleotide
  Sense strand starting at position 3489 of SEQ ID NO: 1027
ccaaaugaugagcgagguu

SEQ ID NO: 81959 - RNA, 19 nt, Artificial Sequence
  Description of Artificial Sequence: Synthetic oligonucleotide
  Antisense strand to SEQ ID NO: 81878
aaccucgcucaucauuugg

SEQ ID NO: 81960 - RNA, 19 nt, Artificial Sequence
  Description of Artificial Sequence: Synthetic oligonucleotide
  Sense strand starting at position 3505 of SEQ ID NO: 1027
guuggugagguagacauaa

SEQ ID NO: 81961 - RNA, 19 nt, Artificial Sequence
  Description of Artificial Sequence: Synthetic oligonucleotide
  Antisense strand to SEQ ID NO: 81880
uuaugucuaccucaccaac

SEQ ID NO: 81962 - RNA, 19 nt, Artificial Sequence
  Description of Artificial Sequence: Synthetic oligonucleotide
  Sense strand starting at position 3546 of SEQ ID NO: 1027
caacuuguggugcagagau

SEQ ID NO: 81963 - RNA, 19 nt, Artificial Sequence
  Description of Artificial Sequence: Synthetic oligonucleotide
  Antisense strand to SEQ ID NO: 81882
aucucugcaccacaaguug

SEQ ID NO: 81964 - RNA, 19 nt, Artificial Sequence
  Description of Artificial Sequence: Synthetic oligonucleotide
  Sense strand starting at position 3548 of SEQ ID NO: 1027
acuuguggugcagagauau

SEQ ID NO: 81965 - RNA, 19 nt, Artificial Sequence
  Description of Artificial Sequence: Synthetic oligonucleotide
  Antisense strand to SEQ ID NO: 81884
auaucucugcaccacaagu

SEQ ID NO: 81966 - RNA, 19 nt, Artificial Sequence
  Description of Artificial Sequence: Synthetic oligonucleotide
  Sense strand starting at position 3570 of SEQ ID NO: 1027
ggaagaguccacuggcaca

SEQ ID NO: 81967 - RNA, 19 nt, Artificial Sequence
  Description of Artificial Sequence: Synthetic oligonucleotide
  Antisense strand to SEQ ID NO: 81886
ugugccaguggacucuucc

SEQ ID NO: 81968 - RNA, 19 nt, Artificial Sequence
  Description of Artificial Sequence: Synthetic oligonucleotide
  Sense strand starting at position 3580 of SEQ ID NO: 1027
acuggcacauagucuuaaa

SEQ ID NO: 81969 - RNA, 19 nt, Artificial Sequence
  Description of Artificial Sequence: Synthetic oligonucleotide
  Antisense strand to SEQ ID NO: 81888
uuuaagacuaugugccagu

SEQ ID NO: 81970 - RNA, 19 nt, Artificial Sequence
  Description of Artificial Sequence: Synthetic oligonucleotide
  Sense strand starting at position 3603 of SEQ ID NO: 1027
auguuuggaguuugaagga

SEQ ID NO: 81971 - RNA, 19 nt, Artificial Sequence
  Description of Artificial Sequence: Synthetic oligonucleotide
  Antisense strand to SEQ ID NO: 81890
uccuucaaacuccaaacau

SEQ ID NO: 81972 - RNA, 19 nt, Artificial Sequence
  Description of Artificial Sequence: Synthetic oligonucleotide
  Sense strand starting at position 3636 of SEQ ID NO: 1027
uaagccaccucugugagaa

SEQ ID NO: 81973 - RNA, 19 nt, Artificial Sequence
  Description of Artificial Sequence: Synthetic oligonucleotide
  Antisense strand to SEQ ID NO: 81892
uucucacagagguggcuua

SEQ ID NO: 81974 - RNA, 19 nt, Artificial Sequence
  Description of Artificial Sequence: Synthetic oligonucleotide
  Sense strand starting at position 3637 of SEQ ID NO: 1027
aagccaccucugugagaaa

SEQ ID NO: 81975 - RNA, 19 nt, Artificial Sequence
  Description of Artificial Sequence: Synthetic oligonucleotide
  Antisense strand to SEQ ID NO: 81894
uuucucacagagguggcuu

SEQ ID NO: 81976 - RNA, 19 nt, Artificial Sequence
  Description of Artificial Sequence: Synthetic oligonucleotide
  Sense strand starting at position 3709 of SEQ ID NO: 1027
aguaauucugcugauuaaa

SEQ ID NO: 81977 - RNA, 19 nt, Artificial Sequence
  Description of Artificial Sequence: Synthetic oligonucleotide
  Antisense strand to SEQ ID NO: 81896
uuuaaucagcagaauuacu

SEQ ID NO: 81978 - RNA, 19 nt, Artificial Sequence
  Description of Artificial Sequence: Synthetic oligonucleotide
  Sense strand starting at position 3983 of SEQ ID NO: 1027
guagaauucgaaugaggcu

SEQ ID NO: 81979 - RNA, 19 nt, Artificial Sequence
  Description of Artificial Sequence: Synthetic oligonucleotide
  Antisense strand to SEQ ID NO: 81898
agccucauucgaauucuac

SEQ ID NO: 81980 - RNA, 19 nt, Artificial Sequence
  Description of Artificial Sequence: Synthetic oligonucleotide
  Sense strand starting at position 154 of SEQ ID NO: 1028
gugagauguuaaccucaac

SEQ ID NO: 81981 - RNA, 19 nt, Artificial Sequence
  Description of Artificial Sequence: Synthetic oligonucleotide
  Antisense strand to SEQ ID NO: 81900
guugagguuaacaucucac

SEQ ID NO: 81982 - RNA, 19 nt, Artificial Sequence
  Description of Artificial Sequence: Synthetic oligonucleotide
  Sense strand starting at position 172 of SEQ ID NO: 1028
cuuuaagguuguguauuua

SEQ ID NO: 81983 - RNA, 19 nt, Artificial Sequence
  Description of Artificial Sequence: Synthetic oligonucleotide
  Antisense strand to SEQ ID NO: 81902
uaaauacacaaccuuaaag

SEQ ID NO: 81984 - RNA, 19 nt, Artificial Sequence
  Description of Artificial Sequence: Synthetic oligonucleotide
  Sense strand starting at position 672 of SEQ ID NO: 1028
ugcagcuuuguuuauuuga

SEQ ID NO: 81985 - RNA, 19 nt, Artificial Sequence
  Description of Artificial Sequence: Synthetic oligonucleotide
  Antisense strand to SEQ ID NO: 81904
ucaaauaaacaaagcugca

SEQ ID NO: 81986 - RNA, 19 nt, Artificial Sequence
  Description of Artificial Sequence: Synthetic oligonucleotide
  Sense strand starting at position 1133 of SEQ ID NO: 1028
ggagaaauuacagguguuu

SEQ ID NO: 81987 - RNA, 19 nt, Artificial Sequence
  Description of Artificial Sequence: Synthetic oligonucleotide
  Antisense strand to SEQ ID NO: 81906
aaacaccuguaauuucucc

SEQ ID NO: 81988 - RNA, 19 nt, Artificial Sequence
  Description of Artificial Sequence: Synthetic oligonucleotide
  Sense strand starting at position 1135 of SEQ ID NO: 1028
agaaauuacagguguuuga

SEQ ID NO: 81989 - RNA, 19 nt, Artificial Sequence
  Description of Artificial Sequence: Synthetic oligonucleotide
  Antisense strand to SEQ ID NO: 81908
ucaaacaccuguaauuucu

SEQ ID NO: 81990 - RNA, 19 nt, Artificial Sequence
  Description of Artificial Sequence: Synthetic oligonucleotide
  Sense strand starting at position 1138 of SEQ ID NO: 1028
aauuacagguguuugauau

SEQ ID NO: 81991 - RNA, 19 nt, Artificial Sequence
  Description of Artificial Sequence: Synthetic oligonucleotide
  Antisense strand to SEQ ID NO: 81910
auaucaaacaccuguaauu

SEQ ID NO: 81992 - RNA, 19 nt, Artificial Sequence
  Description of Artificial Sequence: Synthetic oligonucleotide
  Sense strand starting at position 1257 of SEQ ID NO: 1028
agaugaaucuuaucuagca

SEQ ID NO: 81993 - RNA, 19 nt, Artificial Sequence
  Description of Artificial Sequence: Synthetic oligonucleotide
  Antisense strand to SEQ ID NO: 81912
ugcuagauaagauucaucu

SEQ ID NO: 81994 - RNA, 19 nt, Artificial Sequence
  Description of Artificial Sequence: Synthetic oligonucleotide
  Sense strand starting at position 1306 of SEQ ID NO: 1028
auaaucagauuauugguca

SEQ ID NO: 81995 - RNA, 19 nt, Artificial Sequence
  Description of Artificial Sequence: Synthetic oligonucleotide
  Antisense strand to SEQ ID NO: 81914
ugaccaauaaucugauuau

SEQ ID NO: 81996 - RNA, 19 nt, Artificial Sequence
  Description of Artificial Sequence: Synthetic oligonucleotide
  Sense strand starting at position 1309 of SEQ ID NO: 1028
aucagauuauuggucauag

SEQ ID NO: 81997 - RNA, 19 nt, Artificial Sequence
  Description of Artificial Sequence: Synthetic oligonucleotide
  Antisense strand to SEQ ID NO: 81916
cuaugaccaauaaucugau

SEQ ID NO: 81998 - RNA, 19 nt, Artificial Sequence
  Description of Artificial Sequence: Synthetic oligonucleotide
  Sense strand starting at position 1310 of SEQ ID NO: 1028
ucagauuauuggucauaga

SEQ ID NO: 81999 - RNA, 19 nt, Artificial Sequence
  Description of Artificial Sequence: Synthetic oligonucleotide
  Antisense strand to SEQ ID NO: 81918
ucuaugaccaauaaucuga

SEQ ID NO: 82000 - RNA, 19 nt, Artificial Sequence
  Description of Artificial Sequence: Synthetic oligonucleotide
  Sense strand starting at position 1318 of SEQ ID NO: 1028
uuggucauagaugggaauu

SEQ ID NO: 82001 - RNA, 19 nt, Artificial Sequence
  Description of Artificial Sequence: Synthetic oligonucleotide
  Antisense strand to SEQ ID NO: 81920
aauucccaucuaugaccaa

SEQ ID NO: 82002 - RNA, 19 nt, Artificial Sequence
  Description of Artificial Sequence: Synthetic oligonucleotide
  Sense strand starting at position 1320 of SEQ ID NO: 1028
ggucauagaugggaauuua

SEQ ID NO: 82003 - RNA, 19 nt, Artificial Sequence
  Description of Artificial Sequence: Synthetic oligonucleotide
  Antisense strand to SEQ ID NO: 81922
uaaauucccaucuaugacc

SEQ ID NO: 82004 - RNA, 19 nt, Artificial Sequence
  Description of Artificial Sequence: Synthetic oligonucleotide
  Sense strand starting at position 1398 of SEQ ID NO: 1028
aagugacuugcccaacagu

SEQ ID NO: 82005 - RNA, 19 nt, Artificial Sequence
  Description of Artificial Sequence: Synthetic oligonucleotide
  Antisense strand to SEQ ID NO: 81924
acuguugggcaagucacuu

SEQ ID NO: 82006 - RNA, 19 nt, Artificial Sequence
  Description of Artificial Sequence: Synthetic oligonucleotide
  Sense strand starting at position 1401 of SEQ ID NO: 1028
ugacuugcccaacagugaa

SEQ ID NO: 82007 - RNA, 19 nt, Artificial Sequence
  Description of Artificial Sequence: Synthetic oligonucleotide
  Antisense strand to SEQ ID NO: 81926
uucacuguugggcaaguca

SEQ ID NO: 82008 - RNA, 19 nt, Artificial Sequence
  Description of Artificial Sequence: Synthetic oligonucleotide
  Sense strand starting at position 1562 of SEQ ID NO: 1028
gugucaaccuuauuuaugu

SEQ ID NO: 82009 - RNA, 19 nt, Artificial Sequence
  Description of Artificial Sequence: Synthetic oligonucleotide
  Antisense strand to SEQ ID NO: 81928
acauaaauaagguugacac

SEQ ID NO: 82010 - RNA, 19 nt, Artificial Sequence
  Description of Artificial Sequence: Synthetic oligonucleotide
  Sense strand starting at position 1716 of SEQ ID NO: 1028
aagggaauugccuguggac

SEQ ID NO: 82011 - RNA, 19 nt, Artificial Sequence
  Description of Artificial Sequence: Synthetic oligonucleotide
  Antisense strand to SEQ ID NO: 81930
guccacaggcaauucccuu

SEQ ID NO: 82012 - RNA, 19 nt, Artificial Sequence
  Description of Artificial Sequence: Synthetic oligonucleotide
  Sense strand starting at position 1780 of SEQ ID NO: 1028
gcuacugggccacauaaua

SEQ ID NO: 82013 - RNA, 19 nt, Artificial Sequence
  Description of Artificial Sequence: Synthetic oligonucleotide
  Antisense strand to SEQ ID NO: 81932
uauuauguggcccaguagc

SEQ ID NO: 82014 - RNA, 19 nt, Artificial Sequence
  Description of Artificial Sequence: Synthetic oligonucleotide
  Sense strand starting at position 2056 of SEQ ID NO: 1028
gaguucuaggcccaggaca

SEQ ID NO: 82015 - RNA, 19 nt, Artificial Sequence
  Description of Artificial Sequence: Synthetic oligonucleotide
  Antisense strand to SEQ ID NO: 81934
uguccugggccuagaacuc

SEQ ID NO: 82016 - RNA, 19 nt, Artificial Sequence
  Description of Artificial Sequence: Synthetic oligonucleotide
  Sense strand starting at position 2351 of SEQ ID NO: 1028
gcuagaauuagguagcaaa

SEQ ID NO: 82017 - RNA, 19 nt, Artificial Sequence
  Description of Artificial Sequence: Synthetic oligonucleotide
  Antisense strand to SEQ ID NO: 81936
uuugcuaccuaauucuagc

SEQ ID NO: 82018 - RNA, 19 nt, Artificial Sequence
  Description of Artificial Sequence: Synthetic oligonucleotide
  Sense strand starting at position 2459 of SEQ ID NO: 1028
acauuugguccauguaugu

SEQ ID NO: 82019 - RNA, 19 nt, Artificial Sequence
  Description of Artificial Sequence: Synthetic oligonucleotide
  Antisense strand to SEQ ID NO: 81938
acauacauggaccaaaugu

SEQ ID NO: 82020 - RNA, 19 nt, Artificial Sequence
  Description of Artificial Sequence: Synthetic oligonucleotide
  Sense strand starting at position 2557 of SEQ ID NO: 1028
acgguauuucacuguguag

SEQ ID NO: 82021 - RNA, 19 nt, Artificial Sequence
  Description of Artificial Sequence: Synthetic oligonucleotide
  Antisense strand to SEQ ID NO: 81940
cuacacagugaaauaccgu

SEQ ID NO: 82022 - RNA, 19 nt, Artificial Sequence
  Description of Artificial Sequence: Synthetic oligonucleotide
  Sense strand starting at position 2619 of SEQ ID NO: 1028
aagccuuaggcgcuuguua

SEQ ID NO: 82023 - RNA, 19 nt, Artificial Sequence
  Description of Artificial Sequence: Synthetic oligonucleotide
  Antisense strand to SEQ ID NO: 81942
uaacaagcgccuaaggcuu

SEQ ID NO: 82024 - RNA, 19 nt, Artificial Sequence
  Description of Artificial Sequence: Synthetic oligonucleotide
  Sense strand starting at position 2620 of SEQ ID NO: 1028
agccuuaggcgcuuguuaa

SEQ ID NO: 82025 - RNA, 19 nt, Artificial Sequence
  Description of Artificial Sequence: Synthetic oligonucleotide
  Antisense strand to SEQ ID NO: 81944
uuaacaagcgccuaaggcu

SEQ ID NO: 82026 - RNA, 19 nt, Artificial Sequence
  Description of Artificial Sequence: Synthetic oligonucleotide
  Sense strand starting at position 2836 of SEQ ID NO: 1028
gcacauuucugccuuggga

SEQ ID NO: 82027 - RNA, 19 nt, Artificial Sequence
  Description of Artificial Sequence: Synthetic oligonucleotide
  Antisense strand to SEQ ID NO: 81946
ucccaaggcagaaaugugc

SEQ ID NO: 82028 - RNA, 19 nt, Artificial Sequence
  Description of Artificial Sequence: Synthetic oligonucleotide
  Sense strand starting at position 2994 of SEQ ID NO: 1028
aggagaugcaugcacacau

SEQ ID NO: 82029 - RNA, 19 nt, Artificial Sequence
  Description of Artificial Sequence: Synthetic oligonucleotide
  Antisense strand to SEQ ID NO: 81948
augugugcaugcaucuccu

SEQ ID NO: 82030 - RNA, 19 nt, Artificial Sequence
  Description of Artificial Sequence: Synthetic oligonucleotide
  Sense strand starting at position 3007 of SEQ ID NO: 1028
acacauauguguuuagaac

SEQ ID NO: 82031 - RNA, 19 nt, Artificial Sequence
  Description of Artificial Sequence: Synthetic oligonucleotide
  Antisense strand to SEQ ID NO: 81950
guucuaaacacauaugugu

SEQ ID NO: 82032 - RNA, 19 nt, Artificial Sequence
  Description of Artificial Sequence: Synthetic oligonucleotide
  Sense strand starting at position 3097 of SEQ ID NO: 1028
cuaaaucugguguaauaug

SEQ ID NO: 82033 - RNA, 19 nt, Artificial Sequence
  Description of Artificial Sequence: Synthetic oligonucleotide
  Antisense strand to SEQ ID NO: 81952
cauauuacaccagauuuag

SEQ ID NO: 82034 - RNA, 19 nt, Artificial Sequence
  Description of Artificial Sequence: Synthetic oligonucleotide
  Sense strand starting at position 3130 of SEQ ID NO: 1028
gcggccugcguauuauaaa

SEQ ID NO: 82035 - RNA, 19 nt, Artificial Sequence
  Description of Artificial Sequence: Synthetic oligonucleotide
  Antisense strand to SEQ ID NO: 81954
uuuauaauacgcaggccgc

SEQ ID NO: 82036 - RNA, 19 nt, Artificial Sequence
  Description of Artificial Sequence: Synthetic oligonucleotide
  Sense strand starting at position 3236 of SEQ ID NO: 1028
aggccuccugaguaggaau

SEQ ID NO: 82037 - RNA, 19 nt, Artificial Sequence
  Description of Artificial Sequence: Synthetic oligonucleotide
  Antisense strand to SEQ ID NO: 81956
auuccuacucaggaggccu

SEQ ID NO: 82038 - RNA, 19 nt, Artificial Sequence
  Description of Artificial Sequence: Synthetic oligonucleotide
  Sense strand starting at position 3345 of SEQ ID NO: 1028
gucaaagcuggguagagua

SEQ ID NO: 82039 - RNA, 19 nt, Artificial Sequence
  Description of Artificial Sequence: Synthetic oligonucleotide
  Antisense strand to SEQ ID NO: 81958
uacucuacccagcuuugac

SEQ ID NO: 82040 - RNA, 19 nt, Artificial Sequence
  Description of Artificial Sequence: Synthetic oligonucleotide
  Sense strand starting at position 3347 of SEQ ID NO: 1028
caaagcuggguagaguaau

SEQ ID NO: 82041 - RNA, 19 nt, Artificial Sequence
  Description of Artificial Sequence: Synthetic oligonucleotide
  Antisense strand to SEQ ID NO: 81960
auuacucuacccagcuuug

SEQ ID NO: 82042 - RNA, 19 nt, Artificial Sequence
  Description of Artificial Sequence: Synthetic oligonucleotide
  Sense strand starting at position 3443 of SEQ ID NO: 1028
agaagaaacuguucgugaa

SEQ ID NO: 82043 - RNA, 19 nt, Artificial Sequence
  Description of Artificial Sequence: Synthetic oligonucleotide
  Antisense strand to SEQ ID NO: 81962
uucacgaacaguuucuucu

SEQ ID NO: 82044 - RNA, 19 nt, Artificial Sequence
  Description of Artificial Sequence: Synthetic oligonucleotide
  Sense strand starting at position 3444 of SEQ ID NO: 1028
gaagaaacuguucgugaaa

SEQ ID NO: 82045 - RNA, 19 nt, Artificial Sequence
  Description of Artificial Sequence: Synthetic oligonucleotide
  Antisense strand to SEQ ID NO: 81964
uuucacgaacaguuucuuc

SEQ ID NO: 82046 - RNA, 19 nt, Artificial Sequence
  Description of Artificial Sequence: Synthetic oligonucleotide
  Sense strand starting at position 3445 of SEQ ID NO: 1028
aagaaacuguucgugaaau

SEQ ID NO: 82047 - RNA, 19 nt, Artificial Sequence
  Description of Artificial Sequence: Synthetic oligonucleotide
  Antisense strand to SEQ ID NO: 81966
auuucacgaacaguuucuu

SEQ ID NO: 82048 - RNA, 19 nt, Artificial Sequence
  Description of Artificial Sequence: Synthetic oligonucleotide
  Sense strand starting at position 3552 of SEQ ID NO: 1028
cgcuguaauagggauaaga

SEQ ID NO: 82049 - RNA, 19 nt, Artificial Sequence
  Description of Artificial Sequence: Synthetic oligonucleotide
  Antisense strand to SEQ ID NO: 81968
ucuuaucccuauuacagcg

SEQ ID NO: 82050 - RNA, 19 nt, Artificial Sequence
  Description of Artificial Sequence: Synthetic oligonucleotide
  Sense strand starting at position 3568 of SEQ ID NO: 1028
agacaagauguaugacagu

SEQ ID NO: 82051 - RNA, 19 nt, Artificial Sequence
  Description of Artificial Sequence: Synthetic oligonucleotide
  Antisense strand to SEQ ID NO: 81970
acugucauacaucuugucu

SEQ ID NO: 82052 - RNA, 19 nt, Artificial Sequence
  Description of Artificial Sequence: Synthetic oligonucleotide
  Sense strand starting at position 3756 of SEQ ID NO: 1028
uguggaagaugggugucaa

SEQ ID NO: 82053 - RNA, 19 nt, Artificial Sequence
  Description of Artificial Sequence: Synthetic oligonucleotide
  Antisense strand to SEQ ID NO: 81972
uugacacccaucuuccaca

SEQ ID NO: 82054 - RNA, 19 nt, Artificial Sequence
  Description of Artificial Sequence: Synthetic oligonucleotide
  Sense strand starting at position 3795 of SEQ ID NO: 1028
cucauuauucuggaguuuc

SEQ ID NO: 82055 - RNA, 19 nt, Artificial Sequence
  Description of Artificial Sequence: Synthetic oligonucleotide
  Antisense strand to SEQ ID NO: 81974
gaaacuccagaauaaugag

SEQ ID NO: 82056 - RNA, 19 nt, Artificial Sequence
  Description of Artificial Sequence: Synthetic oligonucleotide
  Sense strand starting at position 3823 of SEQ ID NO: 1028
gcaguuuauuuagcacuua

SEQ ID NO: 82057 - RNA, 19 nt, Artificial Sequence
  Description of Artificial Sequence: Synthetic oligonucleotide
  Antisense strand to SEQ ID NO: 81976
uaagugcuaaauaaacugc

SEQ ID NO: 82058 - RNA, 19 nt, Artificial Sequence
  Description of Artificial Sequence: Synthetic oligonucleotide
  Sense strand starting at position 3909 of SEQ ID NO: 1028
ugaagacugucaucugacu

SEQ ID NO: 82059 - RNA, 19 nt, Artificial Sequence
  Description of Artificial Sequence: Synthetic oligonucleotide
  Antisense strand to SEQ ID NO: 81978
agucagaugacagucuuca

SEQ ID NO: 82060 - RNA, 19 nt, Artificial Sequence
  Description of Artificial Sequence: Synthetic oligonucleotide
  Sense strand starting at position 1 of SEQ ID NO: 1029
ccauguuauuaaguacaga

SEQ ID NO: 82061 - RNA, 19 nt, Artificial Sequence
  Description of Artificial Sequence: Synthetic oligonucleotide
  Antisense strand to SEQ ID NO: 81980
ucuguacuuaauaacaugg

SEQ ID NO: 82062 - RNA, 19 nt, Artificial Sequence
  Description of Artificial Sequence: Synthetic oligonucleotide
  Sense strand starting at position 4 of SEQ ID NO: 1029
uguuauuaaguacagaguu

SEQ ID NO: 82063 - RNA, 19 nt, Artificial Sequence
  Description of Artificial Sequence: Synthetic oligonucleotide
  Antisense strand to SEQ ID NO: 81982
aacucuguacuuaauaaca

SEQ ID NO: 82064 - RNA, 19 nt, Artificial Sequence
  Description of Artificial Sequence: Synthetic oligonucleotide
  Sense strand starting at position 129 of SEQ ID NO: 1029
ggcaaaucuuauguaaauu

SEQ ID NO: 82065 - RNA, 19 nt, Artificial Sequence
  Description of Artificial Sequence: Synthetic oligonucleotide
  Antisense strand to SEQ ID NO: 81984
aauuuacauaagauuugcc

SEQ ID NO: 82066 - RNA, 19 nt, Artificial Sequence
  Description of Artificial Sequence: Synthetic oligonucleotide
  Sense strand starting at position 270 of SEQ ID NO: 1029
gacauucgucuuugauuuc

SEQ ID NO: 82067 - RNA, 19 nt, Artificial Sequence
  Description of Artificial Sequence: Synthetic oligonucleotide
  Antisense strand to SEQ ID NO: 81986
gaaaucaaagacgaauguc

SEQ ID NO: 82068 - RNA, 19 nt, Artificial Sequence
  Description of Artificial Sequence: Synthetic oligonucleotide
  Sense strand starting at position 279 of SEQ ID NO: 1029
cuuugauuuccuugcagcu

SEQ ID NO: 82069 - RNA, 19 nt, Artificial Sequence
  Description of Artificial Sequence: Synthetic oligonucleotide
  Antisense strand to SEQ ID NO: 81988
agcugcaaggaaaucaaag

SEQ ID NO: 82070 - RNA, 19 nt, Artificial Sequence
  Description of Artificial Sequence: Synthetic oligonucleotide
  Sense strand starting at position 324 of SEQ ID NO: 1029
agguccauuccuugaagua

SEQ ID NO: 82071 - RNA, 19 nt, Artificial Sequence
  Description of Artificial Sequence: Synthetic oligonucleotide
  Antisense strand to SEQ ID NO: 81990
uacuucaaggaauggaccu

SEQ ID NO: 82072 - RNA, 19 nt, Artificial Sequence
  Description of Artificial Sequence: Synthetic oligonucleotide
  Sense strand starting at position 325 of SEQ ID NO: 1029
gguccauuccuugaaguaa

SEQ ID NO: 82073 - RNA, 19 nt, Artificial Sequence
  Description of Artificial Sequence: Synthetic oligonucleotide
  Antisense strand to SEQ ID NO: 81992
uuacuucaaggaauggacc

SEQ ID NO: 82074 - RNA, 19 nt, Artificial Sequence
  Description of Artificial Sequence: Synthetic oligonucleotide
  Sense strand starting at position 466 of SEQ ID NO: 1029
ggugguaaggccugagaca

SEQ ID NO: 82075 - RNA, 19 nt, Artificial Sequence
  Description of Artificial Sequence: Synthetic oligonucleotide
  Antisense strand to SEQ ID NO: 81994
ugucucaggccuuaccacc

SEQ ID NO: 82076 - RNA, 19 nt, Artificial Sequence
  Description of Artificial Sequence: Synthetic oligonucleotide
  Sense strand starting at position 631 of SEQ ID NO: 1029
cuaagcacugaguaaucaa

SEQ ID NO: 82077 - RNA, 19 nt, Artificial Sequence
  Description of Artificial Sequence: Synthetic oligonucleotide
  Antisense strand to SEQ ID NO: 81996
uugauuacucagugcuuag

SEQ ID NO: 82078 - RNA, 19 nt, Artificial Sequence
  Description of Artificial Sequence: Synthetic oligonucleotide
  Sense strand starting at position 634 of SEQ ID NO: 1029
agcacugaguaaucaaaga

SEQ ID NO: 82079 - RNA, 19 nt, Artificial Sequence
  Description of Artificial Sequence: Synthetic oligonucleotide
  Antisense strand to SEQ ID NO: 81998
ucuuugauuacucagugcu

SEQ ID NO: 82080 - RNA, 19 nt, Artificial Sequence
  Description of Artificial Sequence: Synthetic oligonucleotide
  Sense strand starting at position 724 of SEQ ID NO: 1029
aagaauaaaugguagaaga

SEQ ID NO: 82081 - RNA, 19 nt, Artificial Sequence
  Description of Artificial Sequence: Synthetic oligonucleotide
  Antisense strand to SEQ ID NO: 82000
ucuucuaccauuuauucuu

SEQ ID NO: 82082 - RNA, 19 nt, Artificial Sequence
  Description of Artificial Sequence: Synthetic oligonucleotide
  Sense strand starting at position 892 of SEQ ID NO: 1029
aucuuagcuuauucugaga

SEQ ID NO: 82083 - RNA, 19 nt, Artificial Sequence
  Description of Artificial Sequence: Synthetic oligonucleotide
  Antisense strand to SEQ ID NO: 82002
ucucagaauaagcuaagau

SEQ ID NO: 82084 - RNA, 19 nt, Artificial Sequence
  Description of Artificial Sequence: Synthetic oligonucleotide
  Sense strand starting at position 996 of SEQ ID NO: 1029
agcguaguccagcuguaga

SEQ ID NO: 82085 - RNA, 19 nt, Artificial Sequence
  Description of Artificial Sequence: Synthetic oligonucleotide
  Antisense strand to SEQ ID NO: 82004
ucuacagcuggacuacgcu

SEQ ID NO: 82086 - RNA, 19 nt, Artificial Sequence
  Description of Artificial Sequence: Synthetic oligonucleotide
  Sense strand starting at position 1016 of SEQ ID NO: 1029
cuacaagcugcuuaauaug

SEQ ID NO: 82087 - RNA, 19 nt, Artificial Sequence
  Description of Artificial Sequence: Synthetic oligonucleotide
  Antisense strand to SEQ ID NO: 82006
cauauuaagcagcuuguag

SEQ ID NO: 82088 - RNA, 19 nt, Artificial Sequence
  Description of Artificial Sequence: Synthetic oligonucleotide
  Sense strand starting at position 1024 of SEQ ID NO: 1029
ugcuuaauauggcugaaac

SEQ ID NO: 82089 - RNA, 19 nt, Artificial Sequence
  Description of Artificial Sequence: Synthetic oligonucleotide
  Antisense strand to SEQ ID NO: 82008
guuucagccauauuaagca

SEQ ID NO: 82090 - RNA, 19 nt, Artificial Sequence
  Description of Artificial Sequence: Synthetic oligonucleotide
  Sense strand starting at position 1025 of SEQ ID NO: 1029
gcuuaauauggcugaaaca

SEQ ID NO: 82091 - RNA, 19 nt, Artificial Sequence
  Description of Artificial Sequence: Synthetic oligonucleotide
  Antisense strand to SEQ ID NO: 82010
uguuucagccauauuaagc

SEQ ID NO: 82092 - RNA, 19 nt, Artificial Sequence
  Description of Artificial Sequence: Synthetic oligonucleotide
  Sense strand starting at position 1063 of SEQ ID NO: 1029
uggugagacuaaucucuac

SEQ ID NO: 82093 - RNA, 19 nt, Artificial Sequence
  Description of Artificial Sequence: Synthetic oligonucleotide
  Antisense strand to SEQ ID NO: 82012
guagagauuagucucacca

SEQ ID NO: 82094 - RNA, 19 nt, Artificial Sequence
  Description of Artificial Sequence: Synthetic oligonucleotide
  Sense strand starting at position 1091 of SEQ ID NO: 1029
ucugcaaacuauucgaaca

SEQ ID NO: 82095 - RNA, 19 nt, Artificial Sequence
  Description of Artificial Sequence: Synthetic oligonucleotide
  Antisense strand to SEQ ID NO: 82014
uguucgaauaguuugcaga

SEQ ID NO: 82096 - RNA, 19 nt, Artificial Sequence
  Description of Artificial Sequence: Synthetic oligonucleotide
  Sense strand starting at position 1142 of SEQ ID NO: 1029
ugaccucaguuuccucaua

SEQ ID NO: 82097 - RNA, 19 nt, Artificial Sequence
  Description of Artificial Sequence: Synthetic oligonucleotide
  Antisense strand to SEQ ID NO: 82016
uaugaggaaacugagguca

SEQ ID NO: 82098 - RNA, 19 nt, Artificial Sequence
  Description of Artificial Sequence: Synthetic oligonucleotide
  Sense strand starting at position 1205 of SEQ ID NO: 1029
agaagauauuucgaaacag

SEQ ID NO: 82099 - RNA, 19 nt, Artificial Sequence
  Description of Artificial Sequence: Synthetic oligonucleotide
  Antisense strand to SEQ ID NO: 82018
cuguuucgaaauaucuucu

SEQ ID NO: 82100 - RNA, 19 nt, Artificial Sequence
  Description of Artificial Sequence: Synthetic oligonucleotide
  Sense strand starting at position 1288 of SEQ ID NO: 1029
auucuuguuguagagagga

SEQ ID NO: 82101 - RNA, 19 nt, Artificial Sequence
  Description of Artificial Sequence: Synthetic oligonucleotide
  Antisense strand to SEQ ID NO: 82020
uccucucuacaacaagaau

SEQ ID NO: 82102 - RNA, 19 nt, Artificial Sequence
  Description of Artificial Sequence: Synthetic oligonucleotide
  Sense strand starting at position 1347 of SEQ ID NO: 1029
uguaguucccauggaaauc

SEQ ID NO: 82103 - RNA, 19 nt, Artificial Sequence
  Description of Artificial Sequence: Synthetic oligonucleotide
  Antisense strand to SEQ ID NO: 82022
gauuuccaugggaacuaca

SEQ ID NO: 82104 - RNA, 19 nt, Artificial Sequence
  Description of Artificial Sequence: Synthetic oligonucleotide
  Sense strand starting at position 1498 of SEQ ID NO: 1029
gccagauuccgccagagac

SEQ ID NO: 82105 - RNA, 19 nt, Artificial Sequence
  Description of Artificial Sequence: Synthetic oligonucleotide
  Antisense strand to SEQ ID NO: 82024
gucucuggcggaaucuggc

SEQ ID NO: 82106 - RNA, 19 nt, Artificial Sequence
  Description of Artificial Sequence: Synthetic oligonucleotide
  Sense strand starting at position 1726 of SEQ ID NO: 1029
agaugaaggucaccaucuu

SEQ ID NO: 82107 - RNA, 19 nt, Artificial Sequence
  Description of Artificial Sequence: Synthetic oligonucleotide
  Antisense strand to SEQ ID NO: 82026
aagauggugaccuucaucu

SEQ ID NO: 82108 - RNA, 19 nt, Artificial Sequence
  Description of Artificial Sequence: Synthetic oligonucleotide
  Sense strand starting at position 1910 of SEQ ID NO: 1029
cacuuuccuuggguacaga

SEQ ID NO: 82109 - RNA, 19 nt, Artificial Sequence
  Description of Artificial Sequence: Synthetic oligonucleotide
  Antisense strand to SEQ ID NO: 82028
ucuguacccaaggaaagug

SEQ ID NO: 82110 - RNA, 19 nt, Artificial Sequence
  Description of Artificial Sequence: Synthetic oligonucleotide
  Sense strand starting at position 2003 of SEQ ID NO: 1029
uguggaaugaggugcagaa

SEQ ID NO: 82111 - RNA, 19 nt, Artificial Sequence
  Description of Artificial Sequence: Synthetic oligonucleotide
  Antisense strand to SEQ ID NO: 82030
uucugcaccucauuccaca

SEQ ID NO: 82112 - RNA, 19 nt, Artificial Sequence
  Description of Artificial Sequence: Synthetic oligonucleotide
  Sense strand starting at position 2015 of SEQ ID NO: 1029
ugcagaaagcuuuauggag

SEQ ID NO: 82113 - RNA, 19 nt, Artificial Sequence
  Description of Artificial Sequence: Synthetic oligonucleotide
  Antisense strand to SEQ ID NO: 82032
cuccauaaagcuuucugca

SEQ ID NO: 82114 - RNA, 19 nt, Artificial Sequence
  Description of Artificial Sequence: Synthetic oligonucleotide
  Sense strand starting at position 2136 of SEQ ID NO: 1029
guggaauuaacagguucua

SEQ ID NO: 82115 - RNA, 19 nt, Artificial Sequence
  Description of Artificial Sequence: Synthetic oligonucleotide
  Antisense strand to SEQ ID NO: 82034
uagaaccuguuaauuccac

SEQ ID NO: 82116 - RNA, 19 nt, Artificial Sequence
  Description of Artificial Sequence: Synthetic oligonucleotide
  Sense strand starting at position 2611 of SEQ ID NO: 1029
ugaaauuaaucauuggcca

SEQ ID NO: 82117 - RNA, 19 nt, Artificial Sequence
  Description of Artificial Sequence: Synthetic oligonucleotide
  Antisense strand to SEQ ID NO: 82036
uggccaaugauuaauuuca

SEQ ID NO: 82118 - RNA, 19 nt, Artificial Sequence
  Description of Artificial Sequence: Synthetic oligonucleotide
  Sense strand starting at position 2681 of SEQ ID NO: 1029
gugaucauuucugaauaaa

SEQ ID NO: 82119 - RNA, 19 nt, Artificial Sequence
  Description of Artificial Sequence: Synthetic oligonucleotide
  Antisense strand to SEQ ID NO: 82038
uuuauucagaaaugaucac

SEQ ID NO: 82120 - RNA, 19 nt, Artificial Sequence
  Description of Artificial Sequence: Synthetic oligonucleotide
  Sense strand starting at position 2938 of SEQ ID NO: 1029
cuccuaugucaugaaguuc

SEQ ID NO: 82121 - RNA, 19 nt, Artificial Sequence
  Description of Artificial Sequence: Synthetic oligonucleotide
  Antisense strand to SEQ ID NO: 82040
gaacuucaugacauaggag

SEQ ID NO: 82122 - RNA, 19 nt, Artificial Sequence
  Description of Artificial Sequence: Synthetic oligonucleotide
  Sense strand starting at position 2977 of SEQ ID NO: 1029
guaauagaauuacucaguu

SEQ ID NO: 82123 - RNA, 19 nt, Artificial Sequence
  Description of Artificial Sequence: Synthetic oligonucleotide
  Antisense strand to SEQ ID NO: 82042
aacugaguaauucuauuac

SEQ ID NO: 82124 - RNA, 19 nt, Artificial Sequence
  Description of Artificial Sequence: Synthetic oligonucleotide
  Sense strand starting at position 3062 of SEQ ID NO: 1029
ucuuacaaagauugugaau

SEQ ID NO: 82125 - RNA, 19 nt, Artificial Sequence
  Description of Artificial Sequence: Synthetic oligonucleotide
  Antisense strand to SEQ ID NO: 82044
auucacaaucuuuguaaga

SEQ ID NO: 82126 - RNA, 19 nt, Artificial Sequence
  Description of Artificial Sequence: Synthetic oligonucleotide
  Sense strand starting at position 3231 of SEQ ID NO: 1029
gaagcuauuugcucugugu

SEQ ID NO: 82127 - RNA, 19 nt, Artificial Sequence
  Description of Artificial Sequence: Synthetic oligonucleotide
  Antisense strand to SEQ ID NO: 82046
acacagagcaaauagcuuc

SEQ ID NO: 82128 - RNA, 19 nt, Artificial Sequence
  Description of Artificial Sequence: Synthetic oligonucleotide
  Sense strand starting at position 3235 of SEQ ID NO: 1029
cuauuugcucuguguaucu

SEQ ID NO: 82129 - RNA, 19 nt, Artificial Sequence
  Description of Artificial Sequence: Synthetic oligonucleotide
  Antisense strand to SEQ ID NO: 82048
agauacacagagcaaauag

SEQ ID NO: 82130 - RNA, 19 nt, Artificial Sequence
  Description of Artificial Sequence: Synthetic oligonucleotide
  Sense strand starting at position 3298 of SEQ ID NO: 1029
uuaacucaucaguauaggu

SEQ ID NO: 82131 - RNA, 19 nt, Artificial Sequence
  Description of Artificial Sequence: Synthetic oligonucleotide
  Antisense strand to SEQ ID NO: 82050
accuauacugaugaguuaa

SEQ ID NO: 82132 - RNA, 19 nt, Artificial Sequence
  Description of Artificial Sequence: Synthetic oligonucleotide
  Sense strand starting at position 3303 of SEQ ID NO: 1029
ucaucaguauagguaacaa

SEQ ID NO: 82133 - RNA, 19 nt, Artificial Sequence
  Description of Artificial Sequence: Synthetic oligonucleotide
  Antisense strand to SEQ ID NO: 82052
uuguuaccuauacugauga

SEQ ID NO: 82134 - RNA, 19 nt, Artificial Sequence
  Description of Artificial Sequence: Synthetic oligonucleotide
  Sense strand starting at position 3678 of SEQ ID NO: 1029
aauagaggucucuaaguuu

SEQ ID NO: 82135 - RNA, 19 nt, Artificial Sequence
  Description of Artificial Sequence: Synthetic oligonucleotide
  Antisense strand to SEQ ID NO: 82054
aaacuuagagaccucuauu

SEQ ID NO: 82136 - RNA, 19 nt, Artificial Sequence
  Description of Artificial Sequence: Synthetic oligonucleotide
  Sense strand starting at position 3681 of SEQ ID NO: 1029
agaggucucuaaguuuaca

SEQ ID NO: 82137 - RNA, 19 nt, Artificial Sequence
  Description of Artificial Sequence: Synthetic oligonucleotide
  Antisense strand to SEQ ID NO: 82056
uguaaacuuagagaccucu

SEQ ID NO: 82138 - RNA, 19 nt, Artificial Sequence
  Description of Artificial Sequence: Synthetic oligonucleotide
  Sense strand starting at position 3940 of SEQ ID NO: 1029
gcaucucauccuuaauggu

SEQ ID NO: 82139 - RNA, 19 nt, Artificial Sequence
  Description of Artificial Sequence: Synthetic oligonucleotide
  Antisense strand to SEQ ID NO: 82058
accauuaaggaugagaugc

SEQ ID NO: 82140 - RNA, 19 nt, Artificial Sequence
  Description of Artificial Sequence: Synthetic oligonucleotide
  Sense strand starting at position 48 of SEQ ID NO: 1030
agggauucccuaugcuaag

SEQ ID NO: 82141 - RNA, 19 nt, Artificial Sequence
  Description of Artificial Sequence: Synthetic oligonucleotide
  Antisense strand to SEQ ID NO: 82060
cuuagcauagggaaucccu

SEQ ID NO: 82142 - RNA, 19 nt, Artificial Sequence
  Description of Artificial Sequence: Synthetic oligonucleotide
  Sense strand starting at position 49 of SEQ ID NO: 1030
gggauucccuaugcuaaga

SEQ ID NO: 82143 - RNA, 19 nt, Artificial Sequence
  Description of Artificial Sequence: Synthetic oligonucleotide
  Antisense strand to SEQ ID NO: 82062
ucuuagcauagggaauccc

SEQ ID NO: 82144 - RNA, 19 nt, Artificial Sequence
  Description of Artificial Sequence: Synthetic oligonucleotide
  Sense strand starting at position 62 of SEQ ID NO: 1030
cuaagacggucugauccaa

SEQ ID NO: 82145 - RNA, 19 nt, Artificial Sequence
  Description of Artificial Sequence: Synthetic oligonucleotide
  Antisense strand to SEQ ID NO: 82064
uuggaucagaccgucuuag

SEQ ID NO: 82146 - RNA, 19 nt, Artificial Sequence
  Description of Artificial Sequence: Synthetic oligonucleotide
  Sense strand starting at position 80 of SEQ ID NO: 1030
acagcugguauagguuaaa

SEQ ID NO: 82147 - RNA, 19 nt, Artificial Sequence
  Description of Artificial Sequence: Synthetic oligonucleotide
  Antisense strand to SEQ ID NO: 82066
uuuaaccuauaccagcugu

SEQ ID NO: 82148 - RNA, 19 nt, Artificial Sequence
  Description of Artificial Sequence: Synthetic oligonucleotide
  Sense strand starting at position 92 of SEQ ID NO: 1030
gguuaaacaccuggaaucu

SEQ ID NO: 82149 - RNA, 19 nt, Artificial Sequence
  Description of Artificial Sequence: Synthetic oligonucleotide
  Antisense strand to SEQ ID NO: 82068
agauuccagguguuuaacc

SEQ ID NO: 82150 - RNA, 19 nt, Artificial Sequence
  Description of Artificial Sequence: Synthetic oligonucleotide
  Sense strand starting at position 134 of SEQ ID NO: 1030
auaccuacugugugaacua

SEQ ID NO: 82151 - RNA, 19 nt, Artificial Sequence
  Description of Artificial Sequence: Synthetic oligonucleotide
  Antisense strand to SEQ ID NO: 82070
uaguucacacaguagguau

SEQ ID NO: 82152 - RNA, 19 nt, Artificial Sequence
  Description of Artificial Sequence: Synthetic oligonucleotide
  Sense strand starting at position 465 of SEQ ID NO: 1030
gcuuauuguggcuggaaca

SEQ ID NO: 82153 - RNA, 19 nt, Artificial Sequence
  Description of Artificial Sequence: Synthetic oligonucleotide
  Antisense strand to SEQ ID NO: 82072
uguuccagccacaauaagc

SEQ ID NO: 82154 - RNA, 19 nt, Artificial Sequence
  Description of Artificial Sequence: Synthetic oligonucleotide
  Sense strand starting at position 466 of SEQ ID NO: 1030
cuuauuguggcuggaacau

SEQ ID NO: 82155 - RNA, 19 nt, Artificial Sequence
  Description of Artificial Sequence: Synthetic oligonucleotide
  Antisense strand to SEQ ID NO: 82074
auguuccagccacaauaag

SEQ ID NO: 82156 - RNA, 19 nt, Artificial Sequence
  Description of Artificial Sequence: Synthetic oligonucleotide
  Sense strand starting at position 475 of SEQ ID NO: 1030
gcuggaacauauguuguaa

SEQ ID NO: 82157 - RNA, 19 nt, Artificial Sequence
  Description of Artificial Sequence: Synthetic oligonucleotide
  Antisense strand to SEQ ID NO: 82076
uuacaacauauguuccagc

SEQ ID NO: 82158 - RNA, 19 nt, Artificial Sequence
  Description of Artificial Sequence: Synthetic oligonucleotide
  Sense strand starting at position 542 of SEQ ID NO: 1030
gaugaagggccauguauau

SEQ ID NO: 82159 - RNA, 19 nt, Artificial Sequence
  Description of Artificial Sequence: Synthetic oligonucleotide
  Antisense strand to SEQ ID NO: 82078
auauacauggcccuucauc

SEQ ID NO: 82160 - RNA, 19 nt, Artificial Sequence
  Description of Artificial Sequence: Synthetic oligonucleotide
  Sense strand starting at position 548 of SEQ ID NO: 1030
gggccauguauauaagucu

SEQ ID NO: 82161 - RNA, 19 nt, Artificial Sequence
  Description of Artificial Sequence: Synthetic oligonucleotide
  Antisense strand to SEQ ID NO: 82080
agacuuauauacauggccc

SEQ ID NO: 82162 - RNA, 19 nt, Artificial Sequence
  Description of Artificial Sequence: Synthetic oligonucleotide
  Sense strand starting at position 551 of SEQ ID NO: 1030
ccauguauauaagucuaaa

SEQ ID NO: 82163 - RNA, 19 nt, Artificial Sequence
  Description of Artificial Sequence: Synthetic oligonucleotide
  Antisense strand to SEQ ID NO: 82082
uuuagacuuauauacaugg

SEQ ID NO: 82164 - RNA, 19 nt, Artificial Sequence
  Description of Artificial Sequence: Synthetic oligonucleotide
  Sense strand starting at position 948 of SEQ ID NO: 1030
gacaaacccugaugacagu

SEQ ID NO: 82165 - RNA, 19 nt, Artificial Sequence
  Description of Artificial Sequence: Synthetic oligonucleotide
  Antisense strand to SEQ ID NO: 82084
acugucaucaggguuuguc

SEQ ID NO: 82166 - RNA, 19 nt, Artificial Sequence
  Description of Artificial Sequence: Synthetic oligonucleotide
  Sense strand starting at position 1034 of SEQ ID NO: 1030
ucuuuauacgcauggagau

SEQ ID NO: 82167 - RNA, 19 nt, Artificial Sequence
  Description of Artificial Sequence: Synthetic oligonucleotide
  Antisense strand to SEQ ID NO: 82086
aucuccaugcguauaaaga

SEQ ID NO: 82168 - RNA, 19 nt, Artificial Sequence
  Description of Artificial Sequence: Synthetic oligonucleotide
  Sense strand starting at position 1035 of SEQ ID NO: 1030
cuuuauacgcauggagauc

SEQ ID NO: 82169 - RNA, 19 nt, Artificial Sequence
  Description of Artificial Sequence: Synthetic oligonucleotide
  Antisense strand to SEQ ID NO: 82088
gaucuccaugcguauaaag

SEQ ID NO: 82170 - RNA, 19 nt, Artificial Sequence
  Description of Artificial Sequence: Synthetic oligonucleotide
  Sense strand starting at position 1048 of SEQ ID NO: 1030
gagaucaaaugagaugaca

SEQ ID NO: 82171 - RNA, 19 nt, Artificial Sequence
  Description of Artificial Sequence: Synthetic oligonucleotide
  Antisense strand to SEQ ID NO: 82090
ugucaucucauuugaucuc

SEQ ID NO: 82172 - RNA, 19 nt, Artificial Sequence
  Description of Artificial Sequence: Synthetic oligonucleotide
  Sense strand starting at position 1136 of SEQ ID NO: 1030
cacuauugugccuacugga

SEQ ID NO: 82173 - RNA, 19 nt, Artificial Sequence
  Description of Artificial Sequence: Synthetic oligonucleotide
  Antisense strand to SEQ ID NO: 82092
uccaguaggcacaauagug

SEQ ID NO: 82174 - RNA, 19 nt, Artificial Sequence
  Description of Artificial Sequence: Synthetic oligonucleotide
  Sense strand starting at position 1141 of SEQ ID NO: 1030
uugugccuacuggaagaau

SEQ ID NO: 82175 - RNA, 19 nt, Artificial Sequence
  Description of Artificial Sequence: Synthetic oligonucleotide
  Antisense strand to SEQ ID NO: 82094
auucuuccaguaggcacaa

SEQ ID NO: 82176 - RNA, 19 nt, Artificial Sequence
  Description of Artificial Sequence: Synthetic oligonucleotide
  Sense strand starting at position 1155 of SEQ ID NO: 1030
agaauagaauugugaggau

SEQ ID NO: 82177 - RNA, 19 nt, Artificial Sequence
  Description of Artificial Sequence: Synthetic oligonucleotide
  Antisense strand to SEQ ID NO: 82096
auccucacaauucuauucu

SEQ ID NO: 82178 - RNA, 19 nt, Artificial Sequence
  Description of Artificial Sequence: Synthetic oligonucleotide
  Sense strand starting at position 1158 of SEQ ID NO: 1030
auagaauugugaggauucu

SEQ ID NO: 82179 - RNA, 19 nt, Artificial Sequence
  Description of Artificial Sequence: Synthetic oligonucleotide
  Antisense strand to SEQ ID NO: 82098
agaauccucacaauucuau

SEQ ID NO: 82180 - RNA, 19 nt, Artificial Sequence
  Description of Artificial Sequence: Synthetic oligonucleotide
  Sense strand starting at position 1167 of SEQ ID NO: 1030
ugaggauucuauucucaca

SEQ ID NO: 82181 - RNA, 19 nt, Artificial Sequence
  Description of Artificial Sequence: Synthetic oligonucleotide
  Antisense strand to SEQ ID NO: 82100
ugugagaauagaauccuca

SEQ ID NO: 82182 - RNA, 19 nt, Artificial Sequence
  Description of Artificial Sequence: Synthetic oligonucleotide
  Sense strand starting at position 1183 of SEQ ID NO: 1030
acaauauccuccucugcga

SEQ ID NO: 82183 - RNA, 19 nt, Artificial Sequence
  Description of Artificial Sequence: Synthetic oligonucleotide
  Antisense strand to SEQ ID NO: 82102
ucgcagaggaggauauugu

SEQ ID NO: 82184 - RNA, 19 nt, Artificial Sequence
  Description of Artificial Sequence: Synthetic oligonucleotide
  Sense strand starting at position 1630 of SEQ ID NO: 1030
agcagagucuggucauugu

SEQ ID NO: 82185 - RNA, 19 nt, Artificial Sequence
  Description of Artificial Sequence: Synthetic oligonucleotide
  Antisense strand to SEQ ID NO: 82104
acaaugaccagacucugcu

SEQ ID NO: 82186 - RNA, 19 nt, Artificial Sequence
  Description of Artificial Sequence: Synthetic oligonucleotide
  Sense strand starting at position 1637 of SEQ ID NO: 1030
ucuggucauuguccucuaa

SEQ ID NO: 82187 - RNA, 19 nt, Artificial Sequence
  Description of Artificial Sequence: Synthetic oligonucleotide
  Antisense strand to SEQ ID NO: 82106
uuagaggacaaugaccaga

SEQ ID NO: 82188 - RNA, 19 nt, Artificial Sequence
  Description of Artificial Sequence: Synthetic oligonucleotide
  Sense strand starting at position 1641 of SEQ ID NO: 1030
gucauuguccucuaaggaa

SEQ ID NO: 82189 - RNA, 19 nt, Artificial Sequence
  Description of Artificial Sequence: Synthetic oligonucleotide
  Antisense strand to SEQ ID NO: 82108
uuccuuagaggacaaugac

SEQ ID NO: 82190 - RNA, 19 nt, Artificial Sequence
  Description of Artificial Sequence: Synthetic oligonucleotide
  Sense strand starting at position 1721 of SEQ ID NO: 1030
uaaccuuucugagucagga

SEQ ID NO: 82191 - RNA, 19 nt, Artificial Sequence
  Description of Artificial Sequence: Synthetic oligonucleotide
  Antisense strand to SEQ ID NO: 82110
uccugacucagaaagguua

SEQ ID NO: 82192 - RNA, 19 nt, Artificial Sequence
  Description of Artificial Sequence: Synthetic oligonucleotide
  Sense strand starting at position 1749 of SEQ ID NO: 1030
uggaaagugaugggcucau

SEQ ID NO: 82193 - RNA, 19 nt, Artificial Sequence
  Description of Artificial Sequence: Synthetic oligonucleotide
  Antisense strand to SEQ ID NO: 82112
augagcccaucacuuucca

SEQ ID NO: 82194 - RNA, 19 nt, Artificial Sequence
  Description of Artificial Sequence: Synthetic oligonucleotide
  Sense strand starting at position 1882 of SEQ ID NO: 1030
uggcaucauugcucccaca

SEQ ID NO: 82195 - RNA, 19 nt, Artificial Sequence
  Description of Artificial Sequence: Synthetic oligonucleotide
  Antisense strand to SEQ ID NO: 82114
ugugggagcaaugaugcca

SEQ ID NO: 82196 - RNA, 19 nt, Artificial Sequence
  Description of Artificial Sequence: Synthetic oligonucleotide
  Sense strand starting at position 1933 of SEQ ID NO: 1030
uggacagcauccuuacaga

SEQ ID NO: 82197 - RNA, 19 nt, Artificial Sequence
  Description of Artificial Sequence: Synthetic oligonucleotide
  Antisense strand to SEQ ID NO: 82116
ucuguaaggaugcugucca

SEQ ID NO: 82198 - RNA, 19 nt, Artificial Sequence
  Description of Artificial Sequence: Synthetic oligonucleotide
  Sense strand starting at position 2200 of SEQ ID NO: 1030
agcuguguuccuggccaca

SEQ ID NO: 82199 - RNA, 19 nt, Artificial Sequence
  Description of Artificial Sequence: Synthetic oligonucleotide
  Antisense strand to SEQ ID NO: 82118
uguggccaggaacacagcu

SEQ ID NO: 82200 - RNA, 19 nt, Artificial Sequence
  Description of Artificial Sequence: Synthetic oligonucleotide
  Sense strand starting at position 2202 of SEQ ID NO: 1030
cuguguuccuggccacaca

SEQ ID NO: 82201 - RNA, 19 nt, Artificial Sequence
  Description of Artificial Sequence: Synthetic oligonucleotide
  Antisense strand to SEQ ID NO: 82120
uguguggccaggaacacag

SEQ ID NO: 82202 - RNA, 19 nt, Artificial Sequence
  Description of Artificial Sequence: Synthetic oligonucleotide
  Sense strand starting at position 2280 of SEQ ID NO: 1030
agcaguaucuaaucagauu

SEQ ID NO: 82203 - RNA, 19 nt, Artificial Sequence
  Description of Artificial Sequence: Synthetic oligonucleotide
  Antisense strand to SEQ ID NO: 82122
aaucugauuagauacugcu

SEQ ID NO: 82204 - RNA, 19 nt, Artificial Sequence
  Description of Artificial Sequence: Synthetic oligonucleotide
  Sense strand starting at position 2287 of SEQ ID NO: 1030
ucuaaucagauucguggau

SEQ ID NO: 82205 - RNA, 19 nt, Artificial Sequence
  Description of Artificial Sequence: Synthetic oligonucleotide
  Antisense strand to SEQ ID NO: 82124
auccacgaaucugauuaga

SEQ ID NO: 82206 - RNA, 19 nt, Artificial Sequence
  Description of Artificial Sequence: Synthetic oligonucleotide
  Sense strand starting at position 2288 of SEQ ID NO: 1030
cuaaucagauucguggaua

SEQ ID NO: 82207 - RNA, 19 nt, Artificial Sequence
  Description of Artificial Sequence: Synthetic oligonucleotide
  Antisense strand to SEQ ID NO: 82126
uauccacgaaucugauuag

SEQ ID NO: 82208 - RNA, 19 nt, Artificial Sequence
  Description of Artificial Sequence: Synthetic oligonucleotide
  Sense strand starting at position 2291 of SEQ ID NO: 1030
aucagauucguggauaggu

SEQ ID NO: 82209 - RNA, 19 nt, Artificial Sequence
  Description of Artificial Sequence: Synthetic oligonucleotide
  Antisense strand to SEQ ID NO: 82128
accuauccacgaaucugau

SEQ ID NO: 82210 - RNA, 19 nt, Artificial Sequence
  Description of Artificial Sequence: Synthetic oligonucleotide
  Sense strand starting at position 2293 of SEQ ID NO: 1030
cagauucguggauagguca

SEQ ID NO: 82211 - RNA, 19 nt, Artificial Sequence
  Description of Artificial Sequence: Synthetic oligonucleotide
  Antisense strand to SEQ ID NO: 82130
ugaccuauccacgaaucug

SEQ ID NO: 82212 - RNA, 19 nt, Artificial Sequence
  Description of Artificial Sequence: Synthetic oligonucleotide
  Sense strand starting at position 3041 of SEQ ID NO: 1030
uugcuuuaucuuucguguu

SEQ ID NO: 82213 - RNA, 19 nt, Artificial Sequence
  Description of Artificial Sequence: Synthetic oligonucleotide
  Antisense strand to SEQ ID NO: 82132
aacacgaaagauaaagcaa

SEQ ID NO: 82214 - RNA, 19 nt, Artificial Sequence
  Description of Artificial Sequence: Synthetic oligonucleotide
  Sense strand starting at position 3176 of SEQ ID NO: 1030
uaaauaaaugcguaugggu

SEQ ID NO: 82215 - RNA, 19 nt, Artificial Sequence
  Description of Artificial Sequence: Synthetic oligonucleotide
  Antisense strand to SEQ ID NO: 82134
acccauacgcauuuauuua

SEQ ID NO: 82216 - RNA, 19 nt, Artificial Sequence
  Description of Artificial Sequence: Synthetic oligonucleotide
  Sense strand starting at position 3178 of SEQ ID NO: 1030
aauaaaugcguauggguuu

SEQ ID NO: 82217 - RNA, 19 nt, Artificial Sequence
  Description of Artificial Sequence: Synthetic oligonucleotide
  Antisense strand to SEQ ID NO: 82136
aaacccauacgcauuuauu

SEQ ID NO: 82218 - RNA, 19 nt, Artificial Sequence
  Description of Artificial Sequence: Synthetic oligonucleotide
  Sense strand starting at position 3517 of SEQ ID NO: 1030
auaggaauaugucauguau

SEQ ID NO: 82219 - RNA, 19 nt, Artificial Sequence
  Description of Artificial Sequence: Synthetic oligonucleotide
  Antisense strand to SEQ ID NO: 82138
auacaugacauauuccuau

SEQ ID NO: 82220 - RNA, 19 nt, Artificial Sequence
  Description of Artificial Sequence: Synthetic oligonucleotide
  Sense strand starting at position 241 of SEQ ID NO: 1031
ucaugaucaccaggcuauu

SEQ ID NO: 82221 - RNA, 19 nt, Artificial Sequence
  Description of Artificial Sequence: Synthetic oligonucleotide
  Antisense strand to SEQ ID NO: 82140
aauagccuggugaucauga

SEQ ID NO: 82222 - RNA, 19 nt, Artificial Sequence
  Description of Artificial Sequence: Synthetic oligonucleotide
  Sense strand starting at position 716 of SEQ ID NO: 1031
cugcgaugcgcuuuaugag

SEQ ID NO: 82223 - RNA, 19 nt, Artificial Sequence
  Description of Artificial Sequence: Synthetic oligonucleotide
  Antisense strand to SEQ ID NO: 82142
cucauaaagcgcaucgcag

SEQ ID NO: 82224 - RNA, 19 nt, Artificial Sequence
  Description of Artificial Sequence: Synthetic oligonucleotide
  Sense strand starting at position 1169 of SEQ ID NO: 1031
gucgccuaucccuagacaa

SEQ ID NO: 82225 - RNA, 19 nt, Artificial Sequence
  Description of Artificial Sequence: Synthetic oligonucleotide
  Antisense strand to SEQ ID NO: 82144
uugucuagggauaggcgac

SEQ ID NO: 82226 - RNA, 19 nt, Artificial Sequence
  Description of Artificial Sequence: Synthetic oligonucleotide
  Sense strand starting at position 1171 of SEQ ID NO: 1031
cgccuaucccuagacaagu

SEQ ID NO: 82227 - RNA, 19 nt, Artificial Sequence
  Description of Artificial Sequence: Synthetic oligonucleotide
  Antisense strand to SEQ ID NO: 82146
acuugucuagggauaggcg

SEQ ID NO: 82228 - RNA, 19 nt, Artificial Sequence
  Description of Artificial Sequence: Synthetic oligonucleotide
  Sense strand starting at position 1220 of SEQ ID NO: 1031
acacguucucuuuaccgga

SEQ ID NO: 82229 - RNA, 19 nt, Artificial Sequence
  Description of Artificial Sequence: Synthetic oligonucleotide
  Antisense strand to SEQ ID NO: 82148
uccgguaaagagaacgugu

SEQ ID NO: 82230 - RNA, 19 nt, Artificial Sequence
  Description of Artificial Sequence: Synthetic oligonucleotide
  Sense strand starting at position 1786 of SEQ ID NO: 1031
cgagauucgcuccagagca

SEQ ID NO: 82231 - RNA, 19 nt, Artificial Sequence
  Description of Artificial Sequence: Synthetic oligonucleotide
  Antisense strand to SEQ ID NO: 82150
ugcucuggagcgaaucucg

SEQ ID NO: 82232 - RNA, 19 nt, Artificial Sequence
  Description of Artificial Sequence: Synthetic oligonucleotide
  Sense strand starting at position 1831 of SEQ ID NO: 1031
agaggcgagagccauuaaa

SEQ ID NO: 82233 - RNA, 19 nt, Artificial Sequence
  Description of Artificial Sequence: Synthetic oligonucleotide
  Antisense strand to SEQ ID NO: 82152
uuuaauggcucucgccucu

SEQ ID NO: 82234 - RNA, 19 nt, Artificial Sequence
  Description of Artificial Sequence: Synthetic oligonucleotide
  Sense strand starting at position 1864 of SEQ ID NO: 1031
accugcaguuucucagauu

SEQ ID NO: 82235 - RNA, 19 nt, Artificial Sequence
  Description of Artificial Sequence: Synthetic oligonucleotide
  Antisense strand to SEQ ID NO: 82154
aaucugagaaacugcaggu

SEQ ID NO: 82236 - RNA, 19 nt, Artificial Sequence
  Description of Artificial Sequence: Synthetic oligonucleotide
  Sense strand starting at position 1884 of SEQ ID NO: 1031
ucagguccuguguagacua

SEQ ID NO: 82237 - RNA, 19 nt, Artificial Sequence
  Description of Artificial Sequence: Synthetic oligonucleotide
  Antisense strand to SEQ ID NO: 82156
uagucuacacaggaccuga

SEQ ID NO: 82238 - RNA, 19 nt, Artificial Sequence
  Description of Artificial Sequence: Synthetic oligonucleotide
  Sense strand starting at position 1971 of SEQ ID NO: 1031
ucucacaagcuauggaaga

SEQ ID NO: 82239 - RNA, 19 nt, Artificial Sequence
  Description of Artificial Sequence: Synthetic oligonucleotide
  Antisense strand to SEQ ID NO: 82158
ucuuccauagcuugugaga

SEQ ID NO: 82240 - RNA, 19 nt, Artificial Sequence
  Description of Artificial Sequence: Synthetic oligonucleotide
  Sense strand starting at position 2015 of SEQ ID NO: 1031
gggaaagcucuucgguuca

SEQ ID NO: 82241 - RNA, 19 nt, Artificial Sequence
  Description of Artificial Sequence: Synthetic oligonucleotide
  Antisense strand to SEQ ID NO: 82160
ugaaccgaagagcuuuccc

SEQ ID NO: 82242 - RNA, 19 nt, Artificial Sequence
  Description of Artificial Sequence: Synthetic oligonucleotide
  Sense strand starting at position 2276 of SEQ ID NO: 1031
gguugaacucagcggaaca

SEQ ID NO: 82243 - RNA, 19 nt, Artificial Sequence
  Description of Artificial Sequence: Synthetic oligonucleotide
  Antisense strand to SEQ ID NO: 82162
uguuccgcugaguucaacc

SEQ ID NO: 82244 - RNA, 19 nt, Artificial Sequence
  Description of Artificial Sequence: Synthetic oligonucleotide
  Sense strand starting at position 2277 of SEQ ID NO: 1031
guugaacucagcggaacaa

SEQ ID NO: 82245 - RNA, 19 nt, Artificial Sequence
  Description of Artificial Sequence: Synthetic oligonucleotide
  Antisense strand to SEQ ID NO: 82164
uuguuccgcugaguucaac

SEQ ID NO: 82246 - RNA, 19 nt, Artificial Sequence
  Description of Artificial Sequence: Synthetic oligonucleotide
  Sense strand starting at position 2322 of SEQ ID NO: 1031
uuucuauugcuuggcaaga

SEQ ID NO: 82247 - RNA, 19 nt, Artificial Sequence
  Description of Artificial Sequence: Synthetic oligonucleotide
  Antisense strand to SEQ ID NO: 82166
ucuugccaagcaauagaaa

SEQ ID NO: 82248 - RNA, 19 nt, Artificial Sequence
  Description of Artificial Sequence: Synthetic oligonucleotide
  Sense strand starting at position 2406 of SEQ ID NO: 1031
acuucugcgguuuaaagau

SEQ ID NO: 82249 - RNA, 19 nt, Artificial Sequence
  Description of Artificial Sequence: Synthetic oligonucleotide
  Antisense strand to SEQ ID NO: 82168
aucuuuaaaccgcagaagu

SEQ ID NO: 82250 - RNA, 19 nt, Artificial Sequence
  Description of Artificial Sequence: Synthetic oligonucleotide
  Sense strand starting at position 2412 of SEQ ID NO: 1031
gcgguuuaaagauauacaa

SEQ ID NO: 82251 - RNA, 19 nt, Artificial Sequence
  Description of Artificial Sequence: Synthetic oligonucleotide
  Antisense strand to SEQ ID NO: 82170
uuguauaucuuuaaaccgc

SEQ ID NO: 82252 - RNA, 19 nt, Artificial Sequence
  Description of Artificial Sequence: Synthetic oligonucleotide
  Sense strand starting at position 2461 of SEQ ID NO: 1031
ugaugugucuagcuuuaug

SEQ ID NO: 82253 - RNA, 19 nt, Artificial Sequence
  Description of Artificial Sequence: Synthetic oligonucleotide
  Antisense strand to SEQ ID NO: 82172
cauaaagcuagacacauca

SEQ ID NO: 82254 - RNA, 19 nt, Artificial Sequence
  Description of Artificial Sequence: Synthetic oligonucleotide
  Sense strand starting at position 2464 of SEQ ID NO: 1031
ugugucuagcuuuaugaaa

SEQ ID NO: 82255 - RNA, 19 nt, Artificial Sequence
  Description of Artificial Sequence: Synthetic oligonucleotide
  Antisense strand to SEQ ID NO: 82174
uuucauaaagcuagacaca

SEQ ID NO: 82256 - RNA, 19 nt, Artificial Sequence
  Description of Artificial Sequence: Synthetic oligonucleotide
  Sense strand starting at position 2513 of SEQ ID NO: 1031
uugaguguaugucuuaaac

SEQ ID NO: 82257 - RNA, 19 nt, Artificial Sequence
  Description of Artificial Sequence: Synthetic oligonucleotide
  Antisense strand to SEQ ID NO: 82176
guuuaagacauacacucaa

SEQ ID NO: 82258 - RNA, 19 nt, Artificial Sequence
  Description of Artificial Sequence: Synthetic oligonucleotide
  Sense strand starting at position 2581 of SEQ ID NO: 1031
guauaaacaguuuguguuc

SEQ ID NO: 82259 - RNA, 19 nt, Artificial Sequence
  Description of Artificial Sequence: Synthetic oligonucleotide
  Antisense strand to SEQ ID NO: 82178
gaacacaaacuguuuauac

SEQ ID NO: 82260 - RNA, 19 nt, Artificial Sequence
  Description of Artificial Sequence: Synthetic oligonucleotide
  Sense strand starting at position 2593 of SEQ ID NO: 1031
uguguucuuguacacaguu

SEQ ID NO: 82261 - RNA, 19 nt, Artificial Sequence
  Description of Artificial Sequence: Synthetic oligonucleotide
  Antisense strand to SEQ ID NO: 82180
aacuguguacaagaacaca

SEQ ID NO: 82262 - RNA, 19 nt, Artificial Sequence
  Description of Artificial Sequence: Synthetic oligonucleotide
  Sense strand starting at position 2668 of SEQ ID NO: 1031
agugcaucacaguaguauu

SEQ ID NO: 82263 - RNA, 19 nt, Artificial Sequence
  Description of Artificial Sequence: Synthetic oligonucleotide
  Antisense strand to SEQ ID NO: 82182
aauacuacugugaugcacu

SEQ ID NO: 82264 - RNA, 19 nt, Artificial Sequence
  Description of Artificial Sequence: Synthetic oligonucleotide
  Sense strand starting at position 2689 of SEQ ID NO: 1031
ggaagacugguuggucuau

SEQ ID NO: 82265 - RNA, 19 nt, Artificial Sequence
  Description of Artificial Sequence: Synthetic oligonucleotide
  Antisense strand to SEQ ID NO: 82184
auagaccaaccagucuucc

SEQ ID NO: 82266 - RNA, 19 nt, Artificial Sequence
  Description of Artificial Sequence: Synthetic oligonucleotide
  Sense strand starting at position 2691 of SEQ ID NO: 1031
aagacugguuggucuauga

SEQ ID NO: 82267 - RNA, 19 nt, Artificial Sequence
  Description of Artificial Sequence: Synthetic oligonucleotide
  Antisense strand to SEQ ID NO: 82186
ucauagaccaaccagucuu

SEQ ID NO: 82268 - RNA, 19 nt, Artificial Sequence
  Description of Artificial Sequence: Synthetic oligonucleotide
  Sense strand starting at position 2724 of SEQ ID NO: 1031
ugcagugcaauugguagau

SEQ ID NO: 82269 - RNA, 19 nt, Artificial Sequence
  Description of Artificial Sequence: Synthetic oligonucleotide
  Antisense strand to SEQ ID NO: 82188
aucuaccaauugcacugca

SEQ ID NO: 82270 - RNA, 19 nt, Artificial Sequence
  Description of Artificial Sequence: Synthetic oligonucleotide
  Sense strand starting at position 2728 of SEQ ID NO: 1031
gugcaauugguagauauau

SEQ ID NO: 82271 - RNA, 19 nt, Artificial Sequence
  Description of Artificial Sequence: Synthetic oligonucleotide
  Antisense strand to SEQ ID NO: 82190
auauaucuaccaauugcac

SEQ ID NO: 82272 - RNA, 19 nt, Artificial Sequence
  Description of Artificial Sequence: Synthetic oligonucleotide
  Sense strand starting at position 2921 of SEQ ID NO: 1031
uccuguagacuggaucauu

SEQ ID NO: 82273 - RNA, 19 nt, Artificial Sequence
  Description of Artificial Sequence: Synthetic oligonucleotide
  Antisense strand to SEQ ID NO: 82192
aaugauccagucuacagga

SEQ ID NO: 82274 - RNA, 19 nt, Artificial Sequence
  Description of Artificial Sequence: Synthetic oligonucleotide
  Sense strand starting at position 3140 of SEQ ID NO: 1031
cugaauugguccuuauauc

SEQ ID NO: 82275 - RNA, 19 nt, Artificial Sequence
  Description of Artificial Sequence: Synthetic oligonucleotide
  Antisense strand to SEQ ID NO: 82194
gauauaaggaccaauucag

SEQ ID NO: 82276 - RNA, 19 nt, Artificial Sequence
  Description of Artificial Sequence: Synthetic oligonucleotide
  Sense strand starting at position 3141 of SEQ ID NO: 1031
ugaauugguccuuauauca

SEQ ID NO: 82277 - RNA, 19 nt, Artificial Sequence
  Description of Artificial Sequence: Synthetic oligonucleotide
  Antisense strand to SEQ ID NO: 82196
ugauauaaggaccaauuca

SEQ ID NO: 82278 - RNA, 19 nt, Artificial Sequence
  Description of Artificial Sequence: Synthetic oligonucleotide
  Sense strand starting at position 3154 of SEQ ID NO: 1031
auaucaugauuagcugaaa

SEQ ID NO: 82279 - RNA, 19 nt, Artificial Sequence
  Description of Artificial Sequence: Synthetic oligonucleotide
  Antisense strand to SEQ ID NO: 82198
uuucagcuaaucaugauau

SEQ ID NO: 82280 - RNA, 19 nt, Artificial Sequence
  Description of Artificial Sequence: Synthetic oligonucleotide
  Sense strand starting at position 3157 of SEQ ID NO: 1031
ucaugauuagcugaaauuc

SEQ ID NO: 82281 - RNA, 19 nt, Artificial Sequence
  Description of Artificial Sequence: Synthetic oligonucleotide
  Antisense strand to SEQ ID NO: 82200
gaauuucagcuaaucauga

SEQ ID NO: 82282 - RNA, 19 nt, Artificial Sequence
  Description of Artificial Sequence: Synthetic oligonucleotide
  Sense strand starting at position 3193 of SEQ ID NO: 1031
uuacuuguagcacacagau

SEQ ID NO: 82283 - RNA, 19 nt, Artificial Sequence
  Description of Artificial Sequence: Synthetic oligonucleotide
  Antisense strand to SEQ ID NO: 82202
aucugugugcuacaaguaa

SEQ ID NO: 82284 - RNA, 19 nt, Artificial Sequence
  Description of Artificial Sequence: Synthetic oligonucleotide
  Sense strand starting at position 3206 of SEQ ID NO: 1031
acagaucucuugcuuguuu

SEQ ID NO: 82285 - RNA, 19 nt, Artificial Sequence
  Description of Artificial Sequence: Synthetic oligonucleotide
  Antisense strand to SEQ ID NO: 82204
aaacaagcaagagaucugu

SEQ ID NO: 82286 - RNA, 19 nt, Artificial Sequence
  Description of Artificial Sequence: Synthetic oligonucleotide
  Sense strand starting at position 3208 of SEQ ID NO: 1031
agaucucuugcuuguuuau

SEQ ID NO: 82287 - RNA, 19 nt, Artificial Sequence
  Description of Artificial Sequence: Synthetic oligonucleotide
  Antisense strand to SEQ ID NO: 82206
auaaacaagcaagagaucu

SEQ ID NO: 82288 - RNA, 19 nt, Artificial Sequence
  Description of Artificial Sequence: Synthetic oligonucleotide
  Sense strand starting at position 3215 of SEQ ID NO: 1031
uugcuuguuuauguaacaa

SEQ ID NO: 82289 - RNA, 19 nt, Artificial Sequence
  Description of Artificial Sequence: Synthetic oligonucleotide
  Antisense strand to SEQ ID NO: 82208
uuguuacauaaacaagcaa

SEQ ID NO: 82290 - RNA, 19 nt, Artificial Sequence
  Description of Artificial Sequence: Synthetic oligonucleotide
  Sense strand starting at position 3729 of SEQ ID NO: 1031
ucaggucucugagcaguua

SEQ ID NO: 82291 - RNA, 19 nt, Artificial Sequence
  Description of Artificial Sequence: Synthetic oligonucleotide
  Antisense strand to SEQ ID NO: 82210
uaacugcucagagaccuga

SEQ ID NO: 82292 - RNA, 19 nt, Artificial Sequence
  Description of Artificial Sequence: Synthetic oligonucleotide
  Sense strand starting at position 3730 of SEQ ID NO: 1031
caggucucugagcaguuau

SEQ ID NO: 82293 - RNA, 19 nt, Artificial Sequence
  Description of Artificial Sequence: Synthetic oligonucleotide
  Antisense strand to SEQ ID NO: 82212
auaacugcucagagaccug

SEQ ID NO: 82294 - RNA, 19 nt, Artificial Sequence
  Description of Artificial Sequence: Synthetic oligonucleotide
  Sense strand starting at position 3847 of SEQ ID NO: 1031
agacccagucauuggaguu

SEQ ID NO: 82295 - RNA, 19 nt, Artificial Sequence
  Description of Artificial Sequence: Synthetic oligonucleotide
  Antisense strand to SEQ ID NO: 82214
aacuccaaugacugggucu

SEQ ID NO: 82296 - RNA, 19 nt, Artificial Sequence
  Description of Artificial Sequence: Synthetic oligonucleotide
  Sense strand starting at position 3911 of SEQ ID NO: 1031
aggugucaugguggaagaa

SEQ ID NO: 82297 - RNA, 19 nt, Artificial Sequence
  Description of Artificial Sequence: Synthetic oligonucleotide
  Antisense strand to SEQ ID NO: 82216
uucuuccaccaugacaccu

SEQ ID NO: 82298 - RNA, 19 nt, Artificial Sequence
  Description of Artificial Sequence: Synthetic oligonucleotide
  Sense strand starting at position 3973 of SEQ ID NO: 1031
cuucccaaucccugggaaa

SEQ ID NO: 82299 - RNA, 19 nt, Artificial Sequence
  Description of Artificial Sequence: Synthetic oligonucleotide
  Antisense strand to SEQ ID NO: 82218
uuucccagggauugggaag

SEQ ID NO: 82300 - RNA, 19 nt, Artificial Sequence
  Description of Artificial Sequence: Synthetic oligonucleotide
  Sense strand starting at position 3929 of SEQ ID NO: 1032
cccacucugcccugaagaa

SEQ ID NO: 82301 - RNA, 19 nt, Artificial Sequence
  Description of Artificial Sequence: Synthetic oligonucleotide
  Antisense strand to SEQ ID NO: 82220
uucuucagggcagaguggg

SEQ ID NO: 82302 - RNA, 19 nt, Artificial Sequence
  Description of Artificial Sequence: Synthetic oligonucleotide
  Sense strand starting at position 3806 of SEQ ID NO: 1032
uugguuucugcagugcuau

SEQ ID NO: 82303 - RNA, 19 nt, Artificial Sequence
  Description of Artificial Sequence: Synthetic oligonucleotide
  Antisense strand to SEQ ID NO: 82222
auagcacugcagaaaccaa

SEQ ID NO: 82304 - RNA, 19 nt, Artificial Sequence
  Description of Artificial Sequence: Synthetic oligonucleotide
  Sense strand starting at position 3751 of SEQ ID NO: 1032
ugucauguuccuggaucau

SEQ ID NO: 82305 - RNA, 19 nt, Artificial Sequence
  Description of Artificial Sequence: Synthetic oligonucleotide
  Antisense strand to SEQ ID NO: 82224
augauccaggaacaugaca

SEQ ID NO: 82306 - RNA, 19 nt, Artificial Sequence
  Description of Artificial Sequence: Synthetic oligonucleotide
  Sense strand starting at position 3562 of SEQ ID NO: 1032
guuggcuaauaacuuauua

SEQ ID NO: 82307 - RNA, 19 nt, Artificial Sequence
  Description of Artificial Sequence: Synthetic oligonucleotide
  Antisense strand to SEQ ID NO: 82226
uaauaaguuauuagccaac

SEQ ID NO: 82308 - RNA, 19 nt, Artificial Sequence
  Description of Artificial Sequence: Synthetic oligonucleotide
  Sense strand starting at position 3555 of SEQ ID NO: 1032
uuuaaugguuggcuaauaa

SEQ ID NO: 82309 - RNA, 19 nt, Artificial Sequence
  Description of Artificial Sequence: Synthetic oligonucleotide
  Antisense strand to SEQ ID NO: 82228
uuauuagccaaccauuaaa

SEQ ID NO: 82310 - RNA, 19 nt, Artificial Sequence
  Description of Artificial Sequence: Synthetic oligonucleotide
  Sense strand starting at position 3482 of SEQ ID NO: 1032
guugaucaauguuuauaug

SEQ ID NO: 82311 - RNA, 19 nt, Artificial Sequence
  Description of Artificial Sequence: Synthetic oligonucleotide
  Antisense strand to SEQ ID NO: 82230
cauauaaacauugaucaac

SEQ ID NO: 82312 - RNA, 19 nt, Artificial Sequence
  Description of Artificial Sequence: Synthetic oligonucleotide
  Sense strand starting at position 3479 of SEQ ID NO: 1032
aguguugaucaauguuuau

SEQ ID NO: 82313 - RNA, 19 nt, Artificial Sequence
  Description of Artificial Sequence: Synthetic oligonucleotide
  Antisense strand to SEQ ID NO: 82232
auaaacauugaucaacacu

SEQ ID NO: 82314 - RNA, 19 nt, Artificial Sequence
  Description of Artificial Sequence: Synthetic oligonucleotide
  Sense strand starting at position 3406 of SEQ ID NO: 1032
auaugugcucuacaaguau

SEQ ID NO: 82315 - RNA, 19 nt, Artificial Sequence
  Description of Artificial Sequence: Synthetic oligonucleotide
  Antisense strand to SEQ ID NO: 82234
auacuuguagagcacauau

SEQ ID NO: 82316 - RNA, 19 nt, Artificial Sequence
  Description of Artificial Sequence: Synthetic oligonucleotide
  Sense strand starting at position 3239 of SEQ ID NO: 1032
ucuaaaggauugguacuua

SEQ ID NO: 82317 - RNA, 19 nt, Artificial Sequence
  Description of Artificial Sequence: Synthetic oligonucleotide
  Antisense strand to SEQ ID NO: 82236
uaaguaccaauccuuuaga

SEQ ID NO: 82318 - RNA, 19 nt, Artificial Sequence
  Description of Artificial Sequence: Synthetic oligonucleotide
  Sense strand starting at position 3237 of SEQ ID NO: 1032
uaucuaaaggauugguacu

SEQ ID NO: 82319 - RNA, 19 nt, Artificial Sequence
  Description of Artificial Sequence: Synthetic oligonucleotide
  Antisense strand to SEQ ID NO: 82238
aguaccaauccuuuagaua

SEQ ID NO: 82320 - RNA, 19 nt, Artificial Sequence
  Description of Artificial Sequence: Synthetic oligonucleotide
  Sense strand starting at position 3225 of SEQ ID NO: 1032
cucuguguaccauaucuaa

SEQ ID NO: 82321 - RNA, 19 nt, Artificial Sequence
  Description of Artificial Sequence: Synthetic oligonucleotide
  Antisense strand to SEQ ID NO: 82240
uuagauaugguacacagag

SEQ ID NO: 82322 - RNA, 19 nt, Artificial Sequence
  Description of Artificial Sequence: Synthetic oligonucleotide
  Sense strand starting at position 3220 of SEQ ID NO: 1032
uccuucucuguguaccaua

SEQ ID NO: 82323 - RNA, 19 nt, Artificial Sequence
  Description of Artificial Sequence: Synthetic oligonucleotide
  Antisense strand to SEQ ID NO: 82242
uaugguacacagagaagga

SEQ ID NO: 82324 - RNA, 19 nt, Artificial Sequence
  Description of Artificial Sequence: Synthetic oligonucleotide
  Sense strand starting at position 3215 of SEQ ID NO: 1032
agagauccuucucugugua

SEQ ID NO: 82325 - RNA, 19 nt, Artificial Sequence
  Description of Artificial Sequence: Synthetic oligonucleotide
  Antisense strand to SEQ ID NO: 82244
uacacagagaaggaucucu

SEQ ID NO: 82326 - RNA, 19 nt, Artificial Sequence
  Description of Artificial Sequence: Synthetic oligonucleotide
  Sense strand starting at position 3214 of SEQ ID NO: 1032
cagagauccuucucugugu

SEQ ID NO: 82327 - RNA, 19 nt, Artificial Sequence
  Description of Artificial Sequence: Synthetic oligonucleotide
  Antisense strand to SEQ ID NO: 82246
acacagagaaggaucucug

SEQ ID NO: 82328 - RNA, 19 nt, Artificial Sequence
  Description of Artificial Sequence: Synthetic oligonucleotide
  Sense strand starting at position 3206 of SEQ ID NO: 1032
gggucugucagagauccuu

SEQ ID NO: 82329 - RNA, 19 nt, Artificial Sequence
  Description of Artificial Sequence: Synthetic oligonucleotide
  Antisense strand to SEQ ID NO: 82248
aaggaucucugacagaccc

SEQ ID NO: 82330 - RNA, 19 nt, Artificial Sequence
  Description of Artificial Sequence: Synthetic oligonucleotide
  Sense strand starting at position 3056 of SEQ ID NO: 1032
gguauauucuuaccucacu

SEQ ID NO: 82331 - RNA, 19 nt, Artificial Sequence
  Description of Artificial Sequence: Synthetic oligonucleotide
  Antisense strand to SEQ ID NO: 82250
agugagguaagaauauacc

SEQ ID NO: 82332 - RNA, 19 nt, Artificial Sequence
  Description of Artificial Sequence: Synthetic oligonucleotide
  Sense strand starting at position 3048 of SEQ ID NO: 1032
cccugagagguauauucuu

SEQ ID NO: 82333 - RNA, 19 nt, Artificial Sequence
  Description of Artificial Sequence: Synthetic oligonucleotide
  Antisense strand to SEQ ID NO: 82252
aagaauauaccucucaggg

SEQ ID NO: 82334 - RNA, 19 nt, Artificial Sequence
  Description of Artificial Sequence: Synthetic oligonucleotide
  Sense strand starting at position 3040 of SEQ ID NO: 1032
caaucucucccugagaggu

SEQ ID NO: 82335 - RNA, 19 nt, Artificial Sequence
  Description of Artificial Sequence: Synthetic oligonucleotide
  Antisense strand to SEQ ID NO: 82254
accucucagggagagauug

SEQ ID NO: 82336 - RNA, 19 nt, Artificial Sequence
  Description of Artificial Sequence: Synthetic oligonucleotide
  Sense strand starting at position 3038 of SEQ ID NO: 1032
gucaaucucucccugagag

SEQ ID NO: 82337 - RNA, 19 nt, Artificial Sequence
  Description of Artificial Sequence: Synthetic oligonucleotide
  Antisense strand to SEQ ID NO: 82256
cucucagggagagauugac

SEQ ID NO: 82338 - RNA, 19 nt, Artificial Sequence
  Description of Artificial Sequence: Synthetic oligonucleotide
  Sense strand starting at position 2681 of SEQ ID NO: 1032
ucaggaaugccaugcucau

SEQ ID NO: 82339 - RNA, 19 nt, Artificial Sequence
  Description of Artificial Sequence: Synthetic oligonucleotide
  Antisense strand to SEQ ID NO: 82258
augagcauggcauuccuga

SEQ ID NO: 82340 - RNA, 19 nt, Artificial Sequence
  Description of Artificial Sequence: Synthetic oligonucleotide
  Sense strand starting at position 2572 of SEQ ID NO: 1032
ggaguuugacuuuaggcca

SEQ ID NO: 82341 - RNA, 19 nt, Artificial Sequence
  Description of Artificial Sequence: Synthetic oligonucleotide
  Antisense strand to SEQ ID NO: 82260
uggccuaaagucaaacucc

SEQ ID NO: 82342 - RNA, 19 nt, Artificial Sequence
  Description of Artificial Sequence: Synthetic oligonucleotide
  Sense strand starting at position 2546 of SEQ ID NO: 1032
ggaaauaaacucugucuuu

SEQ ID NO: 82343 - RNA, 19 nt, Artificial Sequence
  Description of Artificial Sequence: Synthetic oligonucleotide
  Antisense strand to SEQ ID NO: 82262
aaagacagaguuuauuucc

SEQ ID NO: 82344 - RNA, 19 nt, Artificial Sequence
  Description of Artificial Sequence: Synthetic oligonucleotide
  Sense strand starting at position 2532 of SEQ ID NO: 1032
acuccauccuauguggaaa

SEQ ID NO: 82345 - RNA, 19 nt, Artificial Sequence
  Description of Artificial Sequence: Synthetic oligonucleotide
  Antisense strand to SEQ ID NO: 82264
uuuccacauaggauggagu

SEQ ID NO: 82346 - RNA, 19 nt, Artificial Sequence
  Description of Artificial Sequence: Synthetic oligonucleotide
  Sense strand starting at position 2430 of SEQ ID NO: 1032
ggguuauauguuugaagau

SEQ ID NO: 82347 - RNA, 19 nt, Artificial Sequence
  Description of Artificial Sequence: Synthetic oligonucleotide
  Antisense strand to SEQ ID NO: 82266
aucuucaaacauauaaccc

SEQ ID NO: 82348 - RNA, 19 nt, Artificial Sequence
  Description of Artificial Sequence: Synthetic oligonucleotide
  Sense strand starting at position 2429 of SEQ ID NO: 1032
uggguuauauguuugaaga

SEQ ID NO: 82349 - RNA, 19 nt, Artificial Sequence
  Description of Artificial Sequence: Synthetic oligonucleotide
  Antisense strand to SEQ ID NO: 82268
ucuucaaacauauaaccca

SEQ ID NO: 82350 - RNA, 19 nt, Artificial Sequence
  Description of Artificial Sequence: Synthetic oligonucleotide
  Sense strand starting at position 2394 of SEQ ID NO: 1032
auggaaaguuaugugucuu

SEQ ID NO: 82351 - RNA, 19 nt, Artificial Sequence
  Description of Artificial Sequence: Synthetic oligonucleotide
  Antisense strand to SEQ ID NO: 82270
aagacacauaacuuuccau

SEQ ID NO: 82352 - RNA, 19 nt, Artificial Sequence
  Description of Artificial Sequence: Synthetic oligonucleotide
  Sense strand starting at position 2347 of SEQ ID NO: 1032
guuuguucucauuauuagg

SEQ ID NO: 82353 - RNA, 19 nt, Artificial Sequence
  Description of Artificial Sequence: Synthetic oligonucleotide
  Antisense strand to SEQ ID NO: 82272
ccuaauaaugagaacaaac

SEQ ID NO: 82354 - RNA, 19 nt, Artificial Sequence
  Description of Artificial Sequence: Synthetic oligonucleotide
  Sense strand starting at position 2343 of SEQ ID NO: 1032
augaguuuguucucauuau

SEQ ID NO: 82355 - RNA, 19 nt, Artificial Sequence
  Description of Artificial Sequence: Synthetic oligonucleotide
  Antisense strand to SEQ ID NO: 82274
auaaugagaacaaacucau

SEQ ID NO: 82356 - RNA, 19 nt, Artificial Sequence
  Description of Artificial Sequence: Synthetic oligonucleotide
  Sense strand starting at position 2301 of SEQ ID NO: 1032
agucaaacuucugcucuga

SEQ ID NO: 82357 - RNA, 19 nt, Artificial Sequence
  Description of Artificial Sequence: Synthetic oligonucleotide
  Antisense strand to SEQ ID NO: 82276
ucagagcagaaguuugacu

SEQ ID NO: 82358 - RNA, 19 nt, Artificial Sequence
  Description of Artificial Sequence: Synthetic oligonucleotide
  Sense strand starting at position 2291 of SEQ ID NO: 1032
uugugaccuuagucaaacu

SEQ ID NO: 82359 - RNA, 19 nt, Artificial Sequence
  Description of Artificial Sequence: Synthetic oligonucleotide
  Antisense strand to SEQ ID NO: 82278
aguuugacuaaggucacaa

SEQ ID NO: 82360 - RNA, 19 nt, Artificial Sequence
  Description of Artificial Sequence: Synthetic oligonucleotide
  Sense strand starting at position 2267 of SEQ ID NO: 1032
agcugagugaggcauccua

SEQ ID NO: 82361 - RNA, 19 nt, Artificial Sequence
  Description of Artificial Sequence: Synthetic oligonucleotide
  Antisense strand to SEQ ID NO: 82280
uaggaugccucacucagcu

SEQ ID NO: 82362 - RNA, 19 nt, Artificial Sequence
  Description of Artificial Sequence: Synthetic oligonucleotide
  Sense strand starting at position 2225 of SEQ ID NO: 1032
gcucaacuauuccugugau

SEQ ID NO: 82363 - RNA, 19 nt, Artificial Sequence
  Description of Artificial Sequence: Synthetic oligonucleotide
  Antisense strand to SEQ ID NO: 82282
aucacaggaauaguugagc

SEQ ID NO: 82364 - RNA, 19 nt, Artificial Sequence
  Description of Artificial Sequence: Synthetic oligonucleotide
  Sense strand starting at position 1607 of SEQ ID NO: 1032
gguagaagcucuucccuga

SEQ ID NO: 82365 - RNA, 19 nt, Artificial Sequence
  Description of Artificial Sequence: Synthetic oligonucleotide
  Antisense strand to SEQ ID NO: 82284
ucagggaagagcuucuacc

SEQ ID NO: 82366 - RNA, 19 nt, Artificial Sequence
  Description of Artificial Sequence: Synthetic oligonucleotide
  Sense strand starting at position 1506 of SEQ ID NO: 1032
uuauacuucuaaguugagu

SEQ ID NO: 82367 - RNA, 19 nt, Artificial Sequence
  Description of Artificial Sequence: Synthetic oligonucleotide
  Antisense strand to SEQ ID NO: 82286
acucaacuuagaaguauaa

SEQ ID NO: 82368 - RNA, 19 nt, Artificial Sequence
  Description of Artificial Sequence: Synthetic oligonucleotide
  Sense strand starting at position 1477 of SEQ ID NO: 1032
cugagaguuggagguuguu

SEQ ID NO: 82369 - RNA, 19 nt, Artificial Sequence
  Description of Artificial Sequence: Synthetic oligonucleotide
  Antisense strand to SEQ ID NO: 82288
aacaaccuccaacucucag

SEQ ID NO: 82370 - RNA, 19 nt, Artificial Sequence
  Description of Artificial Sequence: Synthetic oligonucleotide
  Sense strand starting at position 1330 of SEQ ID NO: 1032
gucacuuagucuccuggga

SEQ ID NO: 82371 - RNA, 19 nt, Artificial Sequence
  Description of Artificial Sequence: Synthetic oligonucleotide
  Antisense strand to SEQ ID NO: 82290
ucccaggagacuaagugac

SEQ ID NO: 82372 - RNA, 19 nt, Artificial Sequence
  Description of Artificial Sequence: Synthetic oligonucleotide
  Sense strand starting at position 1239 of SEQ ID NO: 1032
cuaagaggucaugguguga

SEQ ID NO: 82373 - RNA, 19 nt, Artificial Sequence
  Description of Artificial Sequence: Synthetic oligonucleotide
  Antisense strand to SEQ ID NO: 82292
ucacaccaugaccucuuag

SEQ ID NO: 82374 - RNA, 19 nt, Artificial Sequence
  Description of Artificial Sequence: Synthetic oligonucleotide
  Sense strand starting at position 1167 of SEQ ID NO: 1032
ggccuuagggaaugaaaug

SEQ ID NO: 82375 - RNA, 19 nt, Artificial Sequence
  Description of Artificial Sequence: Synthetic oligonucleotide
  Antisense strand to SEQ ID NO: 82294
cauuucauucccuaaggcc

SEQ ID NO: 82376 - RNA, 19 nt, Artificial Sequence
  Description of Artificial Sequence: Synthetic oligonucleotide
  Sense strand starting at position 1146 of SEQ ID NO: 1032
uuaugucacagugaggagu

SEQ ID NO: 82377 - RNA, 19 nt, Artificial Sequence
  Description of Artificial Sequence: Synthetic oligonucleotide
  Antisense strand to SEQ ID NO: 82296
acuccucacugugacauaa

SEQ ID NO: 82378 - RNA, 19 nt, Artificial Sequence
  Description of Artificial Sequence: Synthetic oligonucleotide
  Sense strand starting at position 793 of SEQ ID NO: 1032
acagaagaggucugaugca

SEQ ID NO: 82379 - RNA, 19 nt, Artificial Sequence
  Description of Artificial Sequence: Synthetic oligonucleotide
  Antisense strand to SEQ ID NO: 82298
ugcaucagaccucuucugu

SEQ ID NO: 82380 - RNA, 19 nt, Artificial Sequence
  Description of Artificial Sequence: Synthetic oligonucleotide
  Sense strand starting at position 104 of SEQ ID NO: 1033
aguaucuauuaguuaacca

SEQ ID NO: 82381 - RNA, 19 nt, Artificial Sequence
  Description of Artificial Sequence: Synthetic oligonucleotide
  Antisense strand to SEQ ID NO: 82300
ugguuaacuaauagauacu

SEQ ID NO: 82382 - RNA, 19 nt, Artificial Sequence
  Description of Artificial Sequence: Synthetic oligonucleotide
  Sense strand starting at position 108 of SEQ ID NO: 1033
ucuauuaguuaaccagaga

SEQ ID NO: 82383 - RNA, 19 nt, Artificial Sequence
  Description of Artificial Sequence: Synthetic oligonucleotide
  Antisense strand to SEQ ID NO: 82302
ucucugguuaacuaauaga

SEQ ID NO: 82384 - RNA, 19 nt, Artificial Sequence
  Description of Artificial Sequence: Synthetic oligonucleotide
  Sense strand starting at position 235 of SEQ ID NO: 1033
cugccagcuggcguuaaau

SEQ ID NO: 82385 - RNA, 19 nt, Artificial Sequence
  Description of Artificial Sequence: Synthetic oligonucleotide
  Antisense strand to SEQ ID NO: 82304
auuuaacgccagcuggcag

SEQ ID NO: 82386 - RNA, 19 nt, Artificial Sequence
  Description of Artificial Sequence: Synthetic oligonucleotide
  Sense strand starting at position 273 of SEQ ID NO: 1033
uucuaaaguccauguuuac

SEQ ID NO: 82387 - RNA, 19 nt, Artificial Sequence
  Description of Artificial Sequence: Synthetic oligonucleotide
  Antisense strand to SEQ ID NO: 82306
guaaacauggacuuuagaa

SEQ ID NO: 82388 - RNA, 19 nt, Artificial Sequence
  Description of Artificial Sequence: Synthetic oligonucleotide
  Sense strand starting at position 290 of SEQ ID NO: 1033
accucacguccagacuuaa

SEQ ID NO: 82389 - RNA, 19 nt, Artificial Sequence
  Description of Artificial Sequence: Synthetic oligonucleotide
  Antisense strand to SEQ ID NO: 82308
uuaagucuggacgugaggu

SEQ ID NO: 82390 - RNA, 19 nt, Artificial Sequence
  Description of Artificial Sequence: Synthetic oligonucleotide
  Sense strand starting at position 470 of SEQ ID NO: 1033
aucuguuaagagugguacu

SEQ ID NO: 82391 - RNA, 19 nt, Artificial Sequence
  Description of Artificial Sequence: Synthetic oligonucleotide
  Antisense strand to SEQ ID NO: 82310
aguaccacucuuaacagau

SEQ ID NO: 82392 - RNA, 19 nt, Artificial Sequence
  Description of Artificial Sequence: Synthetic oligonucleotide
  Sense strand starting at position 471 of SEQ ID NO: 1033
ucuguuaagagugguacua

SEQ ID NO: 82393 - RNA, 19 nt, Artificial Sequence
  Description of Artificial Sequence: Synthetic oligonucleotide
  Antisense strand to SEQ ID NO: 82312
uaguaccacucuuaacaga

SEQ ID NO: 82394 - RNA, 19 nt, Artificial Sequence
  Description of Artificial Sequence: Synthetic oligonucleotide
  Sense strand starting at position 492 of SEQ ID NO: 1033
cuuccagaguugucaucua

SEQ ID NO: 82395 - RNA, 19 nt, Artificial Sequence
  Description of Artificial Sequence: Synthetic oligonucleotide
  Antisense strand to SEQ ID NO: 82314
uagaugacaacucuggaag

SEQ ID NO: 82396 - RNA, 19 nt, Artificial Sequence
  Description of Artificial Sequence: Synthetic oligonucleotide
  Sense strand starting at position 497 of SEQ ID NO: 1033
agaguugucaucuauuagu

SEQ ID NO: 82397 - RNA, 19 nt, Artificial Sequence
  Description of Artificial Sequence: Synthetic oligonucleotide
  Antisense strand to SEQ ID NO: 82316
acuaauagaugacaacucu

SEQ ID NO: 82398 - RNA, 19 nt, Artificial Sequence
  Description of Artificial Sequence: Synthetic oligonucleotide
  Sense strand starting at position 502 of SEQ ID NO: 1033
ugucaucuauuaguagaca

SEQ ID NO: 82399 - RNA, 19 nt, Artificial Sequence
  Description of Artificial Sequence: Synthetic oligonucleotide
  Antisense strand to SEQ ID NO: 82318
ugucuacuaauagaugaca

SEQ ID NO: 82400 - RNA, 19 nt, Artificial Sequence
  Description of Artificial Sequence: Synthetic oligonucleotide
  Sense strand starting at position 1588 of SEQ ID NO: 1033
cccucaucugucguucgua

SEQ ID NO: 82401 - RNA, 19 nt, Artificial Sequence
  Description of Artificial Sequence: Synthetic oligonucleotide
  Antisense strand to SEQ ID NO: 82320
uacgaacgacagaugaggg

SEQ ID NO: 82402 - RNA, 19 nt, Artificial Sequence
  Description of Artificial Sequence: Synthetic oligonucleotide
  Sense strand starting at position 1590 of SEQ ID NO: 1033
cucaucugucguucguaga

SEQ ID NO: 82403 - RNA, 19 nt, Artificial Sequence
  Description of Artificial Sequence: Synthetic oligonucleotide
  Antisense strand to SEQ ID NO: 82322
ucuacgaacgacagaugag

SEQ ID NO: 82404 - RNA, 19 nt, Artificial Sequence
  Description of Artificial Sequence: Synthetic oligonucleotide
  Sense strand starting at position 1992 of SEQ ID NO: 1033
gcccgcuuccgucucgaau

SEQ ID NO: 82405 - RNA, 19 nt, Artificial Sequence
  Description of Artificial Sequence: Synthetic oligonucleotide
  Antisense strand to SEQ ID NO: 82324
auucgagacggaagcgggc

SEQ ID NO: 82406 - RNA, 19 nt, Artificial Sequence
  Description of Artificial Sequence: Synthetic oligonucleotide
  Sense strand starting at position 2006 of SEQ ID NO: 1033
cgaauccaucugcaaauca

SEQ ID NO: 82407 - RNA, 19 nt, Artificial Sequence
  Description of Artificial Sequence: Synthetic oligonucleotide
  Antisense strand to SEQ ID NO: 82326
ugauuugcagauggauucg

SEQ ID NO: 82408 - RNA, 19 nt, Artificial Sequence
  Description of Artificial Sequence: Synthetic oligonucleotide
  Sense strand starting at position 2026 of SEQ ID NO: 1033
aggcgagcuccauaaagau

SEQ ID NO: 82409 - RNA, 19 nt, Artificial Sequence
  Description of Artificial Sequence: Synthetic oligonucleotide
  Antisense strand to SEQ ID NO: 82328
aucuuuauggagcucgccu

SEQ ID NO: 82410 - RNA, 19 nt, Artificial Sequence
  Description of Artificial Sequence: Synthetic oligonucleotide
  Sense strand starting at position 2322 of SEQ ID NO: 1033
ggcacaauagccugagaga

SEQ ID NO: 82411 - RNA, 19 nt, Artificial Sequence
  Description of Artificial Sequence: Synthetic oligonucleotide
  Antisense strand to SEQ ID NO: 82330
ucucucaggcuauugugcc

SEQ ID NO: 82412 - RNA, 19 nt, Artificial Sequence
  Description of Artificial Sequence: Synthetic oligonucleotide
  Sense strand starting at position 2323 of SEQ ID NO: 1033
gcacaauagccugagagau

SEQ ID NO: 82413 - RNA, 19 nt, Artificial Sequence
  Description of Artificial Sequence: Synthetic oligonucleotide
  Antisense strand to SEQ ID NO: 82332
aucucucaggcuauugugc

SEQ ID NO: 82414 - RNA, 19 nt, Artificial Sequence
  Description of Artificial Sequence: Synthetic oligonucleotide
  Sense strand starting at position 2337 of SEQ ID NO: 1033
gagaucagacgugggagau

SEQ ID NO: 82415 - RNA, 19 nt, Artificial Sequence
  Description of Artificial Sequence: Synthetic oligonucleotide
  Antisense strand to SEQ ID NO: 82334
aucucccacgucugaucuc

SEQ ID NO: 82416 - RNA, 19 nt, Artificial Sequence
  Description of Artificial Sequence: Synthetic oligonucleotide
  Sense strand starting at position 2338 of SEQ ID NO: 1033
agaucagacgugggagauu

SEQ ID NO: 82417 - RNA, 19 nt, Artificial Sequence
  Description of Artificial Sequence: Synthetic oligonucleotide
  Antisense strand to SEQ ID NO: 82336
aaucucccacgucugaucu

SEQ ID NO: 82418 - RNA, 19 nt, Artificial Sequence
  Description of Artificial Sequence: Synthetic oligonucleotide
  Sense strand starting at position 2423 of SEQ ID NO: 1033
uuaggaucuaguugggcau

SEQ ID NO: 82419 - RNA, 19 nt, Artificial Sequence
  Description of Artificial Sequence: Synthetic oligonucleotide
  Antisense strand to SEQ ID NO: 82338
augcccaacuagauccuaa

SEQ ID NO: 82420 - RNA, 19 nt, Artificial Sequence
  Description of Artificial Sequence: Synthetic oligonucleotide
  Sense strand starting at position 2556 of SEQ ID NO: 1033
ggccugguuugggugagaa

SEQ ID NO: 82421 - RNA, 19 nt, Artificial Sequence
  Description of Artificial Sequence: Synthetic oligonucleotide
  Antisense strand to SEQ ID NO: 82340
uucucacccaaaccaggcc

SEQ ID NO: 82422 - RNA, 19 nt, Artificial Sequence
  Description of Artificial Sequence: Synthetic oligonucleotide
  Sense strand starting at position 2557 of SEQ ID NO: 1033
gccugguuugggugagaag

SEQ ID NO: 82423 - RNA, 19 nt, Artificial Sequence
  Description of Artificial Sequence: Synthetic oligonucleotide
  Antisense strand to SEQ ID NO: 82342
cuucucacccaaaccaggc

SEQ ID NO: 82424 - RNA, 19 nt, Artificial Sequence
  Description of Artificial Sequence: Synthetic oligonucleotide
  Sense strand starting at position 2566 of SEQ ID NO: 1033
gggugagaagauugaguca

SEQ ID NO: 82425 - RNA, 19 nt, Artificial Sequence
  Description of Artificial Sequence: Synthetic oligonucleotide
  Antisense strand to SEQ ID NO: 82344
ugacucaaucuucucaccc

SEQ ID NO: 82426 - RNA, 19 nt, Artificial Sequence
  Description of Artificial Sequence: Synthetic oligonucleotide
  Sense strand starting at position 2569 of SEQ ID NO: 1033
ugagaagauugagucacuu

SEQ ID NO: 82427 - RNA, 19 nt, Artificial Sequence
  Description of Artificial Sequence: Synthetic oligonucleotide
  Antisense strand to SEQ ID NO: 82346
aagugacucaaucuucuca

SEQ ID NO: 82428 - RNA, 19 nt, Artificial Sequence
  Description of Artificial Sequence: Synthetic oligonucleotide
  Sense strand starting at position 2606 of SEQ ID NO: 1033
gaagucagagaagguguaa

SEQ ID NO: 82429 - RNA, 19 nt, Artificial Sequence
  Description of Artificial Sequence: Synthetic oligonucleotide
  Antisense strand to SEQ ID NO: 82348
uuacaccuucucugacuuc

SEQ ID NO: 82430 - RNA, 19 nt, Artificial Sequence
  Description of Artificial Sequence: Synthetic oligonucleotide
  Sense strand starting at position 2716 of SEQ ID NO: 1033
gagucaguucucuacuggu

SEQ ID NO: 82431 - RNA, 19 nt, Artificial Sequence
  Description of Artificial Sequence: Synthetic oligonucleotide
  Antisense strand to SEQ ID NO: 82350
accaguagagaacugacuc

SEQ ID NO: 82432 - RNA, 19 nt, Artificial Sequence
  Description of Artificial Sequence: Synthetic oligonucleotide
  Sense strand starting at position 2852 of SEQ ID NO: 1033
gagggagaucugugaaagc

SEQ ID NO: 82433 - RNA, 19 nt, Artificial Sequence
  Description of Artificial Sequence: Synthetic oligonucleotide
  Antisense strand to SEQ ID NO: 82352
gcuuucacagaucucccuc

SEQ ID NO: 82434 - RNA, 19 nt, Artificial Sequence
  Description of Artificial Sequence: Synthetic oligonucleotide
  Sense strand starting at position 2875 of SEQ ID NO: 1033
cgugauuuaagcugggauc

SEQ ID NO: 82435 - RNA, 19 nt, Artificial Sequence
  Description of Artificial Sequence: Synthetic oligonucleotide
  Antisense strand to SEQ ID NO: 82354
gaucccagcuuaaaucacg

SEQ ID NO: 82436 - RNA, 19 nt, Artificial Sequence
  Description of Artificial Sequence: Synthetic oligonucleotide
  Sense strand starting at position 2941 of SEQ ID NO: 1033
gauugaaggugagggauuu

SEQ ID NO: 82437 - RNA, 19 nt, Artificial Sequence
  Description of Artificial Sequence: Synthetic oligonucleotide
  Antisense strand to SEQ ID NO: 82356
aaaucccucaccuucaauc

SEQ ID NO: 82438 - RNA, 19 nt, Artificial Sequence
  Description of Artificial Sequence: Synthetic oligonucleotide
  Sense strand starting at position 2979 of SEQ ID NO: 1033
caaauuagaguuugguaaa

SEQ ID NO: 82439 - RNA, 19 nt, Artificial Sequence
  Description of Artificial Sequence: Synthetic oligonucleotide
  Antisense strand to SEQ ID NO: 82358
uuuaccaaacucuaauuug

SEQ ID NO: 82440 - RNA, 19 nt, Artificial Sequence
  Description of Artificial Sequence: Synthetic oligonucleotide
  Sense strand starting at position 3064 of SEQ ID NO: 1033
cuaaccuuguguuugauca

SEQ ID NO: 82441 - RNA, 19 nt, Artificial Sequence
  Description of Artificial Sequence: Synthetic oligonucleotide
  Antisense strand to SEQ ID NO: 82360
ugaucaaacacaagguuag

SEQ ID NO: 82442 - RNA, 19 nt, Artificial Sequence
  Description of Artificial Sequence: Synthetic oligonucleotide
  Sense strand starting at position 3196 of SEQ ID NO: 1033
cugcaauagguuuacaacu

SEQ ID NO: 82443 - RNA, 19 nt, Artificial Sequence
  Description of Artificial Sequence: Synthetic oligonucleotide
  Antisense strand to SEQ ID NO: 82362
aguuguaaaccuauugcag

SEQ ID NO: 82444 - RNA, 19 nt, Artificial Sequence
  Description of Artificial Sequence: Synthetic oligonucleotide
  Sense strand starting at position 3322 of SEQ ID NO: 1033
cggacaauuaauuguagga

SEQ ID NO: 82445 - RNA, 19 nt, Artificial Sequence
  Description of Artificial Sequence: Synthetic oligonucleotide
  Antisense strand to SEQ ID NO: 82364
uccuacaauuaauuguccg

SEQ ID NO: 82446 - RNA, 19 nt, Artificial Sequence
  Description of Artificial Sequence: Synthetic oligonucleotide
  Sense strand starting at position 3350 of SEQ ID NO: 1033
aacuaagaugucuauucga

SEQ ID NO: 82447 - RNA, 19 nt, Artificial Sequence
  Description of Artificial Sequence: Synthetic oligonucleotide
  Antisense strand to SEQ ID NO: 82366
ucgaauagacaucuuaguu

SEQ ID NO: 82448 - RNA, 19 nt, Artificial Sequence
  Description of Artificial Sequence: Synthetic oligonucleotide
  Sense strand starting at position 3353 of SEQ ID NO: 1033
uaagaugucuauucgagug

SEQ ID NO: 82449 - RNA, 19 nt, Artificial Sequence
  Description of Artificial Sequence: Synthetic oligonucleotide
  Antisense strand to SEQ ID NO: 82368
cacucgaauagacaucuua

SEQ ID NO: 82450 - RNA, 19 nt, Artificial Sequence
  Description of Artificial Sequence: Synthetic oligonucleotide
  Sense strand starting at position 3505 of SEQ ID NO: 1033
ucuuuaauacaauggguuu

SEQ ID NO: 82451 - RNA, 19 nt, Artificial Sequence
  Description of Artificial Sequence: Synthetic oligonucleotide
  Antisense strand to SEQ ID NO: 82370
aaacccauuguauuaaaga

SEQ ID NO: 82452 - RNA, 19 nt, Artificial Sequence
  Description of Artificial Sequence: Synthetic oligonucleotide
  Sense strand starting at position 3523 of SEQ ID NO: 1033
ucauccuuccagugggaga

SEQ ID NO: 82453 - RNA, 19 nt, Artificial Sequence
  Description of Artificial Sequence: Synthetic oligonucleotide
  Antisense strand to SEQ ID NO: 82372
ucucccacuggaaggauga

SEQ ID NO: 82454 - RNA, 19 nt, Artificial Sequence
  Description of Artificial Sequence: Synthetic oligonucleotide
  Sense strand starting at position 3614 of SEQ ID NO: 1033
uaaauagugucuuugugac

SEQ ID NO: 82455 - RNA, 19 nt, Artificial Sequence
  Description of Artificial Sequence: Synthetic oligonucleotide
  Antisense strand to SEQ ID NO: 82374
gucacaaagacacuauuua

SEQ ID NO: 82456 - RNA, 19 nt, Artificial Sequence
  Description of Artificial Sequence: Synthetic oligonucleotide
  Sense strand starting at position 3669 of SEQ ID NO: 1033
gcccacacucauuguauuu

SEQ ID NO: 82457 - RNA, 19 nt, Artificial Sequence
  Description of Artificial Sequence: Synthetic oligonucleotide
  Antisense strand to SEQ ID NO: 82376
aaauacaaugagugugggc

SEQ ID NO: 82458 - RNA, 19 nt, Artificial Sequence
  Description of Artificial Sequence: Synthetic oligonucleotide
  Sense strand starting at position 3803 of SEQ ID NO: 1033
guaacacauuauguuguaa

SEQ ID NO: 82459 - RNA, 19 nt, Artificial Sequence
  Description of Artificial Sequence: Synthetic oligonucleotide
  Antisense strand to SEQ ID NO: 82378
uuacaacauaauguguuac

SEQ ID NO: 82460 - RNA, 19 nt, Artificial Sequence
  Description of Artificial Sequence: Synthetic oligonucleotide
  Sense strand starting at position 129 of SEQ ID NO: 1034
ggaguaucacacugcaauc

SEQ ID NO: 82461 - RNA, 19 nt, Artificial Sequence
  Description of Artificial Sequence: Synthetic oligonucleotide
  Antisense strand to SEQ ID NO: 82380
gauugcagugugauacucc

SEQ ID NO: 82462 - RNA, 19 nt, Artificial Sequence
  Description of Artificial Sequence: Synthetic oligonucleotide
  Sense strand starting at position 239 of SEQ ID NO: 1034
agguuaugauuauuccuau

SEQ ID NO: 82463 - RNA, 19 nt, Artificial Sequence
  Description of Artificial Sequence: Synthetic oligonucleotide
  Antisense strand to SEQ ID NO: 82382
auaggaauaaucauaaccu

SEQ ID NO: 82464 - RNA, 19 nt, Artificial Sequence
  Description of Artificial Sequence: Synthetic oligonucleotide
  Sense strand starting at position 240 of SEQ ID NO: 1034
gguuaugauuauuccuauu

SEQ ID NO: 82465 - RNA, 19 nt, Artificial Sequence
  Description of Artificial Sequence: Synthetic oligonucleotide
  Antisense strand to SEQ ID NO: 82384
aauaggaauaaucauaacc

SEQ ID NO: 82466 - RNA, 19 nt, Artificial Sequence
  Description of Artificial Sequence: Synthetic oligonucleotide
  Sense strand starting at position 270 of SEQ ID NO: 1034
aagucauuccaguaugaug

SEQ ID NO: 82467 - RNA, 19 nt, Artificial Sequence
  Description of Artificial Sequence: Synthetic oligonucleotide
  Antisense strand to SEQ ID NO: 82386
caucauacuggaaugacuu

SEQ ID NO: 82468 - RNA, 19 nt, Artificial Sequence
  Description of Artificial Sequence: Synthetic oligonucleotide
  Sense strand starting at position 298 of SEQ ID NO: 1034
cuuuaaaugugaucuggau

SEQ ID NO: 82469 - RNA, 19 nt, Artificial Sequence
  Description of Artificial Sequence: Synthetic oligonucleotide
  Antisense strand to SEQ ID NO: 82388
auccagaucacauuuaaag

SEQ ID NO: 82470 - RNA, 19 nt, Artificial Sequence
  Description of Artificial Sequence: Synthetic oligonucleotide
  Sense strand starting at position 378 of SEQ ID NO: 1034
ccugguggucuccauuaau

SEQ ID NO: 82471 - RNA, 19 nt, Artificial Sequence
  Description of Artificial Sequence: Synthetic oligonucleotide
  Antisense strand to SEQ ID NO: 82390
auuaauggagaccaccagg

SEQ ID NO: 82472 - RNA, 19 nt, Artificial Sequence
  Description of Artificial Sequence: Synthetic oligonucleotide
  Sense strand starting at position 381 of SEQ ID NO: 1034
gguggucuccauuaaucuu

SEQ ID NO: 82473 - RNA, 19 nt, Artificial Sequence
  Description of Artificial Sequence: Synthetic oligonucleotide
  Antisense strand to SEQ ID NO: 82392
aagauuaauggagaccacc

SEQ ID NO: 82474 - RNA, 19 nt, Artificial Sequence
  Description of Artificial Sequence: Synthetic oligonucleotide
  Sense strand starting at position 540 of SEQ ID NO: 1034
auacgaauugcucaucuua

SEQ ID NO: 82475 - RNA, 19 nt, Artificial Sequence
  Description of Artificial Sequence: Synthetic oligonucleotide
  Antisense strand to SEQ ID NO: 82394
uaagaugagcaauucguau

SEQ ID NO: 82476 - RNA, 19 nt, Artificial Sequence
  Description of Artificial Sequence: Synthetic oligonucleotide
  Sense strand starting at position 542 of SEQ ID NO: 1034
acgaauugcucaucuuaaa

SEQ ID NO: 82477 - RNA, 19 nt, Artificial Sequence
  Description of Artificial Sequence: Synthetic oligonucleotide
  Antisense strand to SEQ ID NO: 82396
uuuaagaugagcaauucgu

SEQ ID NO: 82478 - RNA, 19 nt, Artificial Sequence
  Description of Artificial Sequence: Synthetic oligonucleotide
  Sense strand starting at position 733 of SEQ ID NO: 1034
aauuccugccagugagaga

SEQ ID NO: 82479 - RNA, 19 nt, Artificial Sequence
  Description of Artificial Sequence: Synthetic oligonucleotide
  Antisense strand to SEQ ID NO: 82398
ucucucacuggcaggaauu

SEQ ID NO: 82480 - RNA, 19 nt, Artificial Sequence
  Description of Artificial Sequence: Synthetic oligonucleotide
  Sense strand starting at position 734 of SEQ ID NO: 1034
auuccugccagugagagaa

SEQ ID NO: 82481 - RNA, 19 nt, Artificial Sequence
  Description of Artificial Sequence: Synthetic oligonucleotide
  Antisense strand to SEQ ID NO: 82400
uucucucacuggcaggaau

SEQ ID NO: 82482 - RNA, 19 nt, Artificial Sequence
  Description of Artificial Sequence: Synthetic oligonucleotide
  Sense strand starting at position 777 of SEQ ID NO: 1034
gugucaaugacauguauag

SEQ ID NO: 82483 - RNA, 19 nt, Artificial Sequence
  Description of Artificial Sequence: Synthetic oligonucleotide
  Antisense strand to SEQ ID NO: 82402
cuauacaugucauugacac

SEQ ID NO: 82484 - RNA, 19 nt, Artificial Sequence
  Description of Artificial Sequence: Synthetic oligonucleotide
  Sense strand starting at position 781 of SEQ ID NO: 1034
caaugacauguauagcgau

SEQ ID NO: 82485 - RNA, 19 nt, Artificial Sequence
  Description of Artificial Sequence: Synthetic oligonucleotide
  Antisense strand to SEQ ID NO: 82404
aucgcuauacaugucauug

SEQ ID NO: 82486 - RNA, 19 nt, Artificial Sequence
  Description of Artificial Sequence: Synthetic oligonucleotide
  Sense strand starting at position 789 of SEQ ID NO: 1034
uguauagcgauguacucaa

SEQ ID NO: 82487 - RNA, 19 nt, Artificial Sequence
  Description of Artificial Sequence: Synthetic oligonucleotide
  Antisense strand to SEQ ID NO: 82406
uugaguacaucgcuauaca

SEQ ID NO: 82488 - RNA, 19 nt, Artificial Sequence
  Description of Artificial Sequence: Synthetic oligonucleotide
  Sense strand starting at position 1106 of SEQ ID NO: 1034
cccaguuucgguuaaucag

SEQ ID NO: 82489 - RNA, 19 nt, Artificial Sequence
  Description of Artificial Sequence: Synthetic oligonucleotide
  Antisense strand to SEQ ID NO: 82408
cugauuaaccgaaacuggg

SEQ ID NO: 82490 - RNA, 19 nt, Artificial Sequence
  Description of Artificial Sequence: Synthetic oligonucleotide
  Sense strand starting at position 1116 of SEQ ID NO: 1034
guuaaucagucccuuucca

SEQ ID NO: 82491 - RNA, 19 nt, Artificial Sequence
  Description of Artificial Sequence: Synthetic oligonucleotide
  Antisense strand to SEQ ID NO: 82410
uggaaagggacugauuaac

SEQ ID NO: 82492 - RNA, 19 nt, Artificial Sequence
  Description of Artificial Sequence: Synthetic oligonucleotide
  Sense strand starting at position 1493 of SEQ ID NO: 1034
guauaaacaggaugucaga

SEQ ID NO: 82493 - RNA, 19 nt, Artificial Sequence
  Description of Artificial Sequence: Synthetic oligonucleotide
  Antisense strand to SEQ ID NO: 82412
ucugacauccuguuuauac

SEQ ID NO: 82494 - RNA, 19 nt, Artificial Sequence
  Description of Artificial Sequence: Synthetic oligonucleotide
  Sense strand starting at position 2324 of SEQ ID NO: 1034
aggauucgcccguagauug

SEQ ID NO: 82495 - RNA, 19 nt, Artificial Sequence
  Description of Artificial Sequence: Synthetic oligonucleotide
  Antisense strand to SEQ ID NO: 82414
caaucuacgggcgaauccu

SEQ ID NO: 82496 - RNA, 19 nt, Artificial Sequence
  Description of Artificial Sequence: Synthetic oligonucleotide
  Sense strand starting at position 2325 of SEQ ID NO: 1034
ggauucgcccguagauuga

SEQ ID NO: 82497 - RNA, 19 nt, Artificial Sequence
  Description of Artificial Sequence: Synthetic oligonucleotide
  Antisense strand to SEQ ID NO: 82416
ucaaucuacgggcgaaucc

SEQ ID NO: 82498 - RNA, 19 nt, Artificial Sequence
  Description of Artificial Sequence: Synthetic oligonucleotide
  Sense strand starting at position 2665 of SEQ ID NO: 1034
ucaucuuauccaugaggaa

SEQ ID NO: 82499 - RNA, 19 nt, Artificial Sequence
  Description of Artificial Sequence: Synthetic oligonucleotide
  Antisense strand to SEQ ID NO: 82418
uuccucauggauaagauga

SEQ ID NO: 82500 - RNA, 19 nt, Artificial Sequence
  Description of Artificial Sequence: Synthetic oligonucleotide
  Sense strand starting at position 2700 of SEQ ID NO: 1034
ugucuuaaucaaggucaca

SEQ ID NO: 82501 - RNA, 19 nt, Artificial Sequence
  Description of Artificial Sequence: Synthetic oligonucleotide
  Antisense strand to SEQ ID NO: 82420
ugugaccuugauuaagaca

SEQ ID NO: 82502 - RNA, 19 nt, Artificial Sequence
  Description of Artificial Sequence: Synthetic oligonucleotide
  Sense strand starting at position 2985 of SEQ ID NO: 1034
ccugacaaucccuggauga

SEQ ID NO: 82503 - RNA, 19 nt, Artificial Sequence
  Description of Artificial Sequence: Synthetic oligonucleotide
  Antisense strand to SEQ ID NO: 82422
ucauccagggauugucagg

SEQ ID NO: 82504 - RNA, 19 nt, Artificial Sequence
  Description of Artificial Sequence: Synthetic oligonucleotide
  Sense strand starting at position 3015 of SEQ ID NO: 1034
ggccgugcacggucagaau

SEQ ID NO: 82505 - RNA, 19 nt, Artificial Sequence
  Description of Artificial Sequence: Synthetic oligonucleotide
  Antisense strand to SEQ ID NO: 82424
auucugaccgugcacggcc

SEQ ID NO: 82506 - RNA, 19 nt, Artificial Sequence
  Description of Artificial Sequence: Synthetic oligonucleotide
  Sense strand starting at position 3026 of SEQ ID NO: 1034
gucagaauucugcagcuuc

SEQ ID NO: 82507 - RNA, 19 nt, Artificial Sequence
  Description of Artificial Sequence: Synthetic oligonucleotide
  Antisense strand to SEQ ID NO: 82426
gaagcugcagaauucugac

SEQ ID NO: 82508 - RNA, 19 nt, Artificial Sequence
  Description of Artificial Sequence: Synthetic oligonucleotide
  Sense strand starting at position 3095 of SEQ ID NO: 1034
uggacaguuccugaucacu

SEQ ID NO: 82509 - RNA, 19 nt, Artificial Sequence
  Description of Artificial Sequence: Synthetic oligonucleotide
  Antisense strand to SEQ ID NO: 82428
agugaucaggaacugucca

SEQ ID NO: 82510 - RNA, 19 nt, Artificial Sequence
  Description of Artificial Sequence: Synthetic oligonucleotide
  Sense strand starting at position 3097 of SEQ ID NO: 1034
gacaguuccugaucacuug

SEQ ID NO: 82511 - RNA, 19 nt, Artificial Sequence
  Description of Artificial Sequence: Synthetic oligonucleotide
  Antisense strand to SEQ ID NO: 82430
caagugaucaggaacuguc

SEQ ID NO: 82512 - RNA, 19 nt, Artificial Sequence
  Description of Artificial Sequence: Synthetic oligonucleotide
  Sense strand starting at position 3100 of SEQ ID NO: 1034
aguuccugaucacuugagu

SEQ ID NO: 82513 - RNA, 19 nt, Artificial Sequence
  Description of Artificial Sequence: Synthetic oligonucleotide
  Antisense strand to SEQ ID NO: 82432
acucaagugaucaggaacu

SEQ ID NO: 82514 - RNA, 19 nt, Artificial Sequence
  Description of Artificial Sequence: Synthetic oligonucleotide
  Sense strand starting at position 3103 of SEQ ID NO: 1034
uccugaucacuugaguuac

SEQ ID NO: 82515 - RNA, 19 nt, Artificial Sequence
  Description of Artificial Sequence: Synthetic oligonucleotide
  Antisense strand to SEQ ID NO: 82434
guaacucaagugaucagga

SEQ ID NO: 82516 - RNA, 19 nt, Artificial Sequence
  Description of Artificial Sequence: Synthetic oligonucleotide
  Sense strand starting at position 3139 of SEQ ID NO: 1034
aagauauucugggugugga

SEQ ID NO: 82517 - RNA, 19 nt, Artificial Sequence
  Description of Artificial Sequence: Synthetic oligonucleotide
  Antisense strand to SEQ ID NO: 82436
uccacacccagaauaucuu

SEQ ID NO: 82518 - RNA, 19 nt, Artificial Sequence
  Description of Artificial Sequence: Synthetic oligonucleotide
  Sense strand starting at position 3140 of SEQ ID NO: 1034
agauauucuggguguggaa

SEQ ID NO: 82519 - RNA, 19 nt, Artificial Sequence
  Description of Artificial Sequence: Synthetic oligonucleotide
  Antisense strand to SEQ ID NO: 82438
uuccacacccagaauaucu

SEQ ID NO: 82520 - RNA, 19 nt, Artificial Sequence
  Description of Artificial Sequence: Synthetic oligonucleotide
  Sense strand starting at position 3142 of SEQ ID NO: 1034
auauucuggguguggaaua

SEQ ID NO: 82521 - RNA, 19 nt, Artificial Sequence
  Description of Artificial Sequence: Synthetic oligonucleotide
  Antisense strand to SEQ ID NO: 82440
uauuccacacccagaauau

SEQ ID NO: 82522 - RNA, 19 nt, Artificial Sequence
  Description of Artificial Sequence: Synthetic oligonucleotide
  Sense strand starting at position 3153 of SEQ ID NO: 1034
guggaauaaagucaagcau

SEQ ID NO: 82523 - RNA, 19 nt, Artificial Sequence
  Description of Artificial Sequence: Synthetic oligonucleotide
  Antisense strand to SEQ ID NO: 82442
augcuugacuuuauuccac

SEQ ID NO: 82524 - RNA, 19 nt, Artificial Sequence
  Description of Artificial Sequence: Synthetic oligonucleotide
  Sense strand starting at position 3248 of SEQ ID NO: 1034
cucaauucucaguggagca

SEQ ID NO: 82525 - RNA, 19 nt, Artificial Sequence
  Description of Artificial Sequence: Synthetic oligonucleotide
  Antisense strand to SEQ ID NO: 82444
ugcuccacugagaauugag

SEQ ID NO: 82526 - RNA, 19 nt, Artificial Sequence
  Description of Artificial Sequence: Synthetic oligonucleotide
  Sense strand starting at position 3550 of SEQ ID NO: 1034
uuuauugagcuggaccaua

SEQ ID NO: 82527 - RNA, 19 nt, Artificial Sequence
  Description of Artificial Sequence: Synthetic oligonucleotide
  Antisense strand to SEQ ID NO: 82446
uaugguccagcucaauaaa

SEQ ID NO: 82528 - RNA, 19 nt, Artificial Sequence
  Description of Artificial Sequence: Synthetic oligonucleotide
  Sense strand starting at position 3694 of SEQ ID NO: 1034
ggcuguucacaggguggaa

SEQ ID NO: 82529 - RNA, 19 nt, Artificial Sequence
  Description of Artificial Sequence: Synthetic oligonucleotide
  Antisense strand to SEQ ID NO: 82448
uuccacccugugaacagcc

SEQ ID NO: 82530 - RNA, 19 nt, Artificial Sequence
  Description of Artificial Sequence: Synthetic oligonucleotide
  Sense strand starting at position 3744 of SEQ ID NO: 1034
ucuguucgucuauaacaga

SEQ ID NO: 82531 - RNA, 19 nt, Artificial Sequence
  Description of Artificial Sequence: Synthetic oligonucleotide
  Antisense strand to SEQ ID NO: 82450
ucuguuauagacgaacaga

SEQ ID NO: 82532 - RNA, 19 nt, Artificial Sequence
  Description of Artificial Sequence: Synthetic oligonucleotide
  Sense strand starting at position 3763 of SEQ ID NO: 1034
cauugugcuaggugaugaa

SEQ ID NO: 82533 - RNA, 19 nt, Artificial Sequence
  Description of Artificial Sequence: Synthetic oligonucleotide
  Antisense strand to SEQ ID NO: 82452
uucaucaccuagcacaaug

SEQ ID NO: 82534 - RNA, 19 nt, Artificial Sequence
  Description of Artificial Sequence: Synthetic oligonucleotide
  Sense strand starting at position 3767 of SEQ ID NO: 1034
gugcuaggugaugaagauu

SEQ ID NO: 82535 - RNA, 19 nt, Artificial Sequence
  Description of Artificial Sequence: Synthetic oligonucleotide
  Antisense strand to SEQ ID NO: 82454
aaucuucaucaccuagcac

SEQ ID NO: 82536 - RNA, 19 nt, Artificial Sequence
  Description of Artificial Sequence: Synthetic oligonucleotide
  Sense strand starting at position 3875 of SEQ ID NO: 1034
uccuguaauggugaucaca

SEQ ID NO: 82537 - RNA, 19 nt, Artificial Sequence
  Description of Artificial Sequence: Synthetic oligonucleotide
  Antisense strand to SEQ ID NO: 82456
ugugaucaccauuacagga

SEQ ID NO: 82538 - RNA, 19 nt, Artificial Sequence
  Description of Artificial Sequence: Synthetic oligonucleotide
  Sense strand starting at position 3877 of SEQ ID NO: 1034
cuguaauggugaucacaga

SEQ ID NO: 82539 - RNA, 19 nt, Artificial Sequence
  Description of Artificial Sequence: Synthetic oligonucleotide
  Antisense strand to SEQ ID NO: 82458
ucugugaucaccauuacag

SEQ ID NO: 82540 - RNA, 19 nt, Artificial Sequence
  Description of Artificial Sequence: Synthetic oligonucleotide
  Sense strand starting at position 976 of SEQ ID NO: 1035
ggagacgccuuccuguaau

SEQ ID NO: 82541 - RNA, 19 nt, Artificial Sequence
  Description of Artificial Sequence: Synthetic oligonucleotide
  Antisense strand to SEQ ID NO: 82460
auuacaggaaggcgucucc

SEQ ID NO: 82542 - RNA, 19 nt, Artificial Sequence
  Description of Artificial Sequence: Synthetic oligonucleotide
  Sense strand starting at position 1247 of SEQ ID NO: 1035
agugccagucuuugaggua

SEQ ID NO: 82543 - RNA, 19 nt, Artificial Sequence
  Description of Artificial Sequence: Synthetic oligonucleotide
  Antisense strand to SEQ ID NO: 82462
uaccucaaagacuggcacu

SEQ ID NO: 82544 - RNA, 19 nt, Artificial Sequence
  Description of Artificial Sequence: Synthetic oligonucleotide
  Sense strand starting at position 1250 of SEQ ID NO: 1035
gccagucuuugagguagag

SEQ ID NO: 82545 - RNA, 19 nt, Artificial Sequence
  Description of Artificial Sequence: Synthetic oligonucleotide
  Antisense strand to SEQ ID NO: 82464
cucuaccucaaagacuggc

SEQ ID NO: 82546 - RNA, 19 nt, Artificial Sequence
  Description of Artificial Sequence: Synthetic oligonucleotide
  Sense strand starting at position 1252 of SEQ ID NO: 1035
cagucuuugagguagagac

SEQ ID NO: 82547 - RNA, 19 nt, Artificial Sequence
  Description of Artificial Sequence: Synthetic oligonucleotide
  Antisense strand to SEQ ID NO: 82466
gucucuaccucaaagacug

SEQ ID NO: 82548 - RNA, 19 nt, Artificial Sequence
  Description of Artificial Sequence: Synthetic oligonucleotide
  Sense strand starting at position 1303 of SEQ ID NO: 1035
uacucuuuccaguagguga

SEQ ID NO: 82549 - RNA, 19 nt, Artificial Sequence
  Description of Artificial Sequence: Synthetic oligonucleotide
  Antisense strand to SEQ ID NO: 82468
ucaccuacuggaaagagua

SEQ ID NO: 82550 - RNA, 19 nt, Artificial Sequence
  Description of Artificial Sequence: Synthetic oligonucleotide
  Sense strand starting at position 1307 of SEQ ID NO: 1035
cuuuccaguaggugaugua

SEQ ID NO: 82551 - RNA, 19 nt, Artificial Sequence
  Description of Artificial Sequence: Synthetic oligonucleotide
  Antisense strand to SEQ ID NO: 82470
uacaucaccuacuggaaag

SEQ ID NO: 82552 - RNA, 19 nt, Artificial Sequence
  Description of Artificial Sequence: Synthetic oligonucleotide
  Sense strand starting at position 1319 of SEQ ID NO: 1035
ugauguagucucugagagu

SEQ ID NO: 82553 - RNA, 19 nt, Artificial Sequence
  Description of Artificial Sequence: Synthetic oligonucleotide
  Antisense strand to SEQ ID NO: 82472
acucucagagacuacauca

SEQ ID NO: 82554 - RNA, 19 nt, Artificial Sequence
  Description of Artificial Sequence: Synthetic oligonucleotide
  Sense strand starting at position 1320 of SEQ ID NO: 1035
gauguagucucugagaguc

SEQ ID NO: 82555 - RNA, 19 nt, Artificial Sequence
  Description of Artificial Sequence: Synthetic oligonucleotide
  Antisense strand to SEQ ID NO: 82474
gacucucagagacuacauc

SEQ ID NO: 82556 - RNA, 19 nt, Artificial Sequence
  Description of Artificial Sequence: Synthetic oligonucleotide
  Sense strand starting at position 1322 of SEQ ID NO: 1035
uguagucucugagagucau

SEQ ID NO: 82557 - RNA, 19 nt, Artificial Sequence
  Description of Artificial Sequence: Synthetic oligonucleotide
  Antisense strand to SEQ ID NO: 82476
augacucucagagacuaca

SEQ ID NO: 82558 - RNA, 19 nt, Artificial Sequence
  Description of Artificial Sequence: Synthetic oligonucleotide
  Sense strand starting at position 1330 of SEQ ID NO: 1035
cugagagucaugugcucuu

SEQ ID NO: 82559 - RNA, 19 nt, Artificial Sequence
  Description of Artificial Sequence: Synthetic oligonucleotide
  Antisense strand to SEQ ID NO: 82478
aagagcacaugacucucag

SEQ ID NO: 82560 - RNA, 19 nt, Artificial Sequence
  Description of Artificial Sequence: Synthetic oligonucleotide
  Sense strand starting at position 1351 of SEQ ID NO: 1035
ggguucgaguuguauuccu

SEQ ID NO: 82561 - RNA, 19 nt, Artificial Sequence
  Description of Artificial Sequence: Synthetic oligonucleotide
  Antisense strand to SEQ ID NO: 82480
aggaauacaacucgaaccc

SEQ ID NO: 82562 - RNA, 19 nt, Artificial Sequence
  Description of Artificial Sequence: Synthetic oligonucleotide
  Sense strand starting at position 1393 of SEQ ID NO: 1035
acaaccacgucuccugaaa

SEQ ID NO: 82563 - RNA, 19 nt, Artificial Sequence
  Description of Artificial Sequence: Synthetic oligonucleotide
  Antisense strand to SEQ ID NO: 82482
uuucaggagacgugguugu

SEQ ID NO: 82564 - RNA, 19 nt, Artificial Sequence
  Description of Artificial Sequence: Synthetic oligonucleotide
  Sense strand starting at position 1395 of SEQ ID NO: 1035
aaccacgucuccugaaaug

SEQ ID NO: 82565 - RNA, 19 nt, Artificial Sequence
  Description of Artificial Sequence: Synthetic oligonucleotide
  Antisense strand to SEQ ID NO: 82484
cauuucaggagacgugguu

SEQ ID NO: 82566 - RNA, 19 nt, Artificial Sequence
  Description of Artificial Sequence: Synthetic oligonucleotide
  Sense strand starting at position 2356 of SEQ ID NO: 1035
ggugggaucuagcggagau

SEQ ID NO: 82567 - RNA, 19 nt, Artificial Sequence
  Description of Artificial Sequence: Synthetic oligonucleotide
  Antisense strand to SEQ ID NO: 82486
aucuccgcuagaucccacc

SEQ ID NO: 82568 - RNA, 19 nt, Artificial Sequence
  Description of Artificial Sequence: Synthetic oligonucleotide
  Sense strand starting at position 2360 of SEQ ID NO: 1035
ggaucuagcggagauggua

SEQ ID NO: 82569 - RNA, 19 nt, Artificial Sequence
  Description of Artificial Sequence: Synthetic oligonucleotide
  Antisense strand to SEQ ID NO: 82488
uaccaucuccgcuagaucc

SEQ ID NO: 82570 - RNA, 19 nt, Artificial Sequence
  Description of Artificial Sequence: Synthetic oligonucleotide
  Sense strand starting at position 2656 of SEQ ID NO: 1035
aguggguuccuggagggau

SEQ ID NO: 82571 - RNA, 19 nt, Artificial Sequence
  Description of Artificial Sequence: Synthetic oligonucleotide
  Antisense strand to SEQ ID NO: 82490
aucccuccaggaacccacu

SEQ ID NO: 82572 - RNA, 19 nt, Artificial Sequence
  Description of Artificial Sequence: Synthetic oligonucleotide
  Sense strand starting at position 2657 of SEQ ID NO: 1035
guggguuccuggagggauc

SEQ ID NO: 82573 - RNA, 19 nt, Artificial Sequence
  Description of Artificial Sequence: Synthetic oligonucleotide
  Antisense strand to SEQ ID NO: 82492
gaucccuccaggaacccac

SEQ ID NO: 82574 - RNA, 19 nt, Artificial Sequence
  Description of Artificial Sequence: Synthetic oligonucleotide
  Sense strand starting at position 3063 of SEQ ID NO: 1035
gugcuaaaugcaugguaag

SEQ ID NO: 82575 - RNA, 19 nt, Artificial Sequence
  Description of Artificial Sequence: Synthetic oligonucleotide
  Antisense strand to SEQ ID NO: 82494
cuuaccaugcauuuagcac

SEQ ID NO: 82576 - RNA, 19 nt, Artificial Sequence
  Description of Artificial Sequence: Synthetic oligonucleotide
  Sense strand starting at position 3171 of SEQ ID NO: 1035
ccuccugggcuugaugaau

SEQ ID NO: 82577 - RNA, 19 nt, Artificial Sequence
  Description of Artificial Sequence: Synthetic oligonucleotide
  Antisense strand to SEQ ID NO: 82496
auucaucaagcccaggagg

SEQ ID NO: 82578 - RNA, 19 nt, Artificial Sequence
  Description of Artificial Sequence: Synthetic oligonucleotide
  Sense strand starting at position 3489 of SEQ ID NO: 1035
ggauguccucccuagguau

SEQ ID NO: 82579 - RNA, 19 nt, Artificial Sequence
  Description of Artificial Sequence: Synthetic oligonucleotide
  Antisense strand to SEQ ID NO: 82498
auaccuagggaggacaucc

SEQ ID NO: 82580 - RNA, 19 nt, Artificial Sequence
  Description of Artificial Sequence: Synthetic oligonucleotide
  Sense strand starting at position 3500 of SEQ ID NO: 1035
cuagguaugucucuuggaa

SEQ ID NO: 82581 - RNA, 19 nt, Artificial Sequence
  Description of Artificial Sequence: Synthetic oligonucleotide
  Antisense strand to SEQ ID NO: 82500
uuccaagagacauaccuag

SEQ ID NO: 82582 - RNA, 19 nt, Artificial Sequence
  Description of Artificial Sequence: Synthetic oligonucleotide
  Sense strand starting at position 3502 of SEQ ID NO: 1035
agguaugucucuuggaagg

SEQ ID NO: 82583 - RNA, 19 nt, Artificial Sequence
  Description of Artificial Sequence: Synthetic oligonucleotide
  Antisense strand to SEQ ID NO: 82502
ccuuccaagagacauaccu

SEQ ID NO: 82584 - RNA, 19 nt, Artificial Sequence
  Description of Artificial Sequence: Synthetic oligonucleotide
  Sense strand starting at position 3520 of SEQ ID NO: 1035
ggguguggguuauggaguu

SEQ ID NO: 82585 - RNA, 19 nt, Artificial Sequence
  Description of Artificial Sequence: Synthetic oligonucleotide
  Antisense strand to SEQ ID NO: 82504
aacuccauaacccacaccc

SEQ ID NO: 82586 - RNA, 19 nt, Artificial Sequence
  Description of Artificial Sequence: Synthetic oligonucleotide
  Sense strand starting at position 3532 of SEQ ID NO: 1035
uggaguuuauaggaagguu

SEQ ID NO: 82587 - RNA, 19 nt, Artificial Sequence
  Description of Artificial Sequence: Synthetic oligonucleotide
  Antisense strand to SEQ ID NO: 82506
aaccuuccuauaaacucca

SEQ ID NO: 82588 - RNA, 19 nt, Artificial Sequence
  Description of Artificial Sequence: Synthetic oligonucleotide
  Sense strand starting at position 3587 of SEQ ID NO: 1035
guaguaaaccuagauacuu

SEQ ID NO: 82589 - RNA, 19 nt, Artificial Sequence
  Description of Artificial Sequence: Synthetic oligonucleotide
  Antisense strand to SEQ ID NO: 82508
aaguaucuagguuuacuac

SEQ ID NO: 82590 - RNA, 19 nt, Artificial Sequence
  Description of Artificial Sequence: Synthetic oligonucleotide
  Sense strand starting at position 3605 of SEQ ID NO: 1035
uucuuccaugccuggaaau

SEQ ID NO: 82591 - RNA, 19 nt, Artificial Sequence
  Description of Artificial Sequence: Synthetic oligonucleotide
  Antisense strand to SEQ ID NO: 82510
auuuccaggcauggaagaa

SEQ ID NO: 82592 - RNA, 19 nt, Artificial Sequence
  Description of Artificial Sequence: Synthetic oligonucleotide
  Sense strand starting at position 3607 of SEQ ID NO: 1035
cuuccaugccuggaaaugu

SEQ ID NO: 82593 - RNA, 19 nt, Artificial Sequence
  Description of Artificial Sequence: Synthetic oligonucleotide
  Antisense strand to SEQ ID NO: 82512
acauuuccaggcauggaag

SEQ ID NO: 82594 - RNA, 19 nt, Artificial Sequence
  Description of Artificial Sequence: Synthetic oligonucleotide
  Sense strand starting at position 3737 of SEQ ID NO: 1035
gacccuaugugauguaugu

SEQ ID NO: 82595 - RNA, 19 nt, Artificial Sequence
  Description of Artificial Sequence: Synthetic oligonucleotide
  Antisense strand to SEQ ID NO: 82514
acauacaucacauaggguc

SEQ ID NO: 82596 - RNA, 19 nt, Artificial Sequence
  Description of Artificial Sequence: Synthetic oligonucleotide
  Sense strand starting at position 3746 of SEQ ID NO: 1035
ugauguaugucuuggugug

SEQ ID NO: 82597 - RNA, 19 nt, Artificial Sequence
  Description of Artificial Sequence: Synthetic oligonucleotide
  Antisense strand to SEQ ID NO: 82516
cacaccaagacauacauca

SEQ ID NO: 82598 - RNA, 19 nt, Artificial Sequence
  Description of Artificial Sequence: Synthetic oligonucleotide
  Sense strand starting at position 3756 of SEQ ID NO: 1035
cuuggugugcuggagaaau

SEQ ID NO: 82599 - RNA, 19 nt, Artificial Sequence
  Description of Artificial Sequence: Synthetic oligonucleotide
  Antisense strand to SEQ ID NO: 82518
auuucuccagcacaccaag

SEQ ID NO: 82600 - RNA, 19 nt, Artificial Sequence
  Description of Artificial Sequence: Synthetic oligonucleotide
  Sense strand starting at position 3758 of SEQ ID NO: 1035
uggugugcuggagaaauca

SEQ ID NO: 82601 - RNA, 19 nt, Artificial Sequence
  Description of Artificial Sequence: Synthetic oligonucleotide
  Antisense strand to SEQ ID NO: 82520
ugauuucuccagcacacca

SEQ ID NO: 82602 - RNA, 19 nt, Artificial Sequence
  Description of Artificial Sequence: Synthetic oligonucleotide
  Sense strand starting at position 3803 of SEQ ID NO: 1035
aaggaaagauagcagauuu

SEQ ID NO: 82603 - RNA, 19 nt, Artificial Sequence
  Description of Artificial Sequence: Synthetic oligonucleotide
  Antisense strand to SEQ ID NO: 82522
aaaucugcuaucuuuccuu

SEQ ID NO: 82604 - RNA, 19 nt, Artificial Sequence
  Description of Artificial Sequence: Synthetic oligonucleotide
  Sense strand starting at position 3854 of SEQ ID NO: 1035
auaggugcucugcgagaga

SEQ ID NO: 82605 - RNA, 19 nt, Artificial Sequence
  Description of Artificial Sequence: Synthetic oligonucleotide
  Antisense strand to SEQ ID NO: 82524
ucucucgcagagcaccuau

SEQ ID NO: 82606 - RNA, 19 nt, Artificial Sequence
  Description of Artificial Sequence: Synthetic oligonucleotide
  Sense strand starting at position 3856 of SEQ ID NO: 1035
aggugcucugcgagagagu

SEQ ID NO: 82607 - RNA, 19 nt, Artificial Sequence
  Description of Artificial Sequence: Synthetic oligonucleotide
  Antisense strand to SEQ ID NO: 82526
acucucucgcagagcaccu

SEQ ID NO: 82608 - RNA, 19 nt, Artificial Sequence
  Description of Artificial Sequence: Synthetic oligonucleotide
  Sense strand starting at position 3931 of SEQ ID NO: 1035
guuagaaccgcucaucucu

SEQ ID NO: 82609 - RNA, 19 nt, Artificial Sequence
  Description of Artificial Sequence: Synthetic oligonucleotide
  Antisense strand to SEQ ID NO: 82528
agagaugagcgguucuaac

SEQ ID NO: 82610 - RNA, 19 nt, Artificial Sequence
  Description of Artificial Sequence: Synthetic oligonucleotide
  Sense strand starting at position 3940 of SEQ ID NO: 1035
gcucaucucucccagagaa

SEQ ID NO: 82611 - RNA, 19 nt, Artificial Sequence
  Description of Artificial Sequence: Synthetic oligonucleotide
  Antisense strand to SEQ ID NO: 82530
uucucugggagagaugagc

SEQ ID NO: 82612 - RNA, 19 nt, Artificial Sequence
  Description of Artificial Sequence: Synthetic oligonucleotide
  Sense strand starting at position 94 of SEQ ID NO: 1036
caugauuacgaauguaugu

SEQ ID NO: 82613 - RNA, 19 nt, Artificial Sequence
  Description of Artificial Sequence: Synthetic oligonucleotide
  Antisense strand to SEQ ID NO: 82532
acauacauucguaaucaug

SEQ ID NO: 82614 - RNA, 19 nt, Artificial Sequence
  Description of Artificial Sequence: Synthetic oligonucleotide
  Sense strand starting at position 96 of SEQ ID NO: 1036
ugauuacgaauguauguua

SEQ ID NO: 82615 - RNA, 19 nt, Artificial Sequence
  Description of Artificial Sequence: Synthetic oligonucleotide
  Antisense strand to SEQ ID NO: 82534
uaacauacauucguaauca

SEQ ID NO: 82616 - RNA, 19 nt, Artificial Sequence
  Description of Artificial Sequence: Synthetic oligonucleotide
  Sense strand starting at position 99 of SEQ ID NO: 1036
uuacgaauguauguuagaa

SEQ ID NO: 82617 - RNA, 19 nt, Artificial Sequence
  Description of Artificial Sequence: Synthetic oligonucleotide
  Antisense strand to SEQ ID NO: 82536
uucuaacauacauucguaa

SEQ ID NO: 82618 - RNA, 19 nt, Artificial Sequence
  Description of Artificial Sequence: Synthetic oligonucleotide
  Sense strand starting at position 523 of SEQ ID NO: 1036
cugccauuagcuuggaaag

SEQ ID NO: 82619 - RNA, 19 nt, Artificial Sequence
  Description of Artificial Sequence: Synthetic oligonucleotide
  Antisense strand to SEQ ID NO: 82538
cuuuccaagcuaauggcag

SEQ ID NO: 82620 - RNA, 19 nt, Artificial Sequence
  Description of Artificial Sequence: Synthetic oligonucleotide
  Sense strand starting at position 524 of SEQ ID NO: 1036
ugccauuagcuuggaaaga

SEQ ID NO: 82621 - RNA, 19 nt, Artificial Sequence
  Description of Artificial Sequence: Synthetic oligonucleotide
  Antisense strand to SEQ ID NO: 82540
ucuuuccaagcuaauggca

SEQ ID NO: 82622 - RNA, 19 nt, Artificial Sequence
  Description of Artificial Sequence: Synthetic oligonucleotide
  Sense strand starting at position 569 of SEQ ID NO: 1036
aaguacagauuuggacaua

SEQ ID NO: 82623 - RNA, 19 nt, Artificial Sequence
  Description of Artificial Sequence: Synthetic oligonucleotide
  Antisense strand to SEQ ID NO: 82542
uauguccaaaucuguacuu

SEQ ID NO: 82624 - RNA, 19 nt, Artificial Sequence
  Description of Artificial Sequence: Synthetic oligonucleotide
  Sense strand starting at position 634 of SEQ ID NO: 1036
uuaauaagacuuggauguu

SEQ ID NO: 82625 - RNA, 19 nt, Artificial Sequence
  Description of Artificial Sequence: Synthetic oligonucleotide
  Antisense strand to SEQ ID NO: 82544
aacauccaagucuuauuaa

SEQ ID NO: 82626 - RNA, 19 nt, Artificial Sequence
  Description of Artificial Sequence: Synthetic oligonucleotide
  Sense strand starting at position 712 of SEQ ID NO: 1036
acucacagcccggaaauua

SEQ ID NO: 82627 - RNA, 19 nt, Artificial Sequence
  Description of Artificial Sequence: Synthetic oligonucleotide
  Antisense strand to SEQ ID NO: 82546
uaauuuccgggcugugagu

SEQ ID NO: 82628 - RNA, 19 nt, Artificial Sequence
  Description of Artificial Sequence: Synthetic oligonucleotide
  Sense strand starting at position 787 of SEQ ID NO: 1036
auuugaggugcuugcugaa

SEQ ID NO: 82629 - RNA, 19 nt, Artificial Sequence
  Description of Artificial Sequence: Synthetic oligonucleotide
  Antisense strand to SEQ ID NO: 82548
uucagcaagcaccucaaau

SEQ ID NO: 82630 - RNA, 19 nt, Artificial Sequence
  Description of Artificial Sequence: Synthetic oligonucleotide
  Sense strand starting at position 1197 of SEQ ID NO: 1036
gagcuuuaaggugaaagca

SEQ ID NO: 82631 - RNA, 19 nt, Artificial Sequence
  Description of Artificial Sequence: Synthetic oligonucleotide
  Antisense strand to SEQ ID NO: 82550
ugcuuucaccuuaaagcuc

SEQ ID NO: 82632 - RNA, 19 nt, Artificial Sequence
  Description of Artificial Sequence: Synthetic oligonucleotide
  Sense strand starting at position 1976 of SEQ ID NO: 1036
cgaugauccaguggagaag

SEQ ID NO: 82633 - RNA, 19 nt, Artificial Sequence
  Description of Artificial Sequence: Synthetic oligonucleotide
  Antisense strand to SEQ ID NO: 82552
cuucuccacuggaucaucg

SEQ ID NO: 82634 - RNA, 19 nt, Artificial Sequence
  Description of Artificial Sequence: Synthetic oligonucleotide
  Sense strand starting at position 2058 of SEQ ID NO: 1036
auccgagacacaugacgaa

SEQ ID NO: 82635 - RNA, 19 nt, Artificial Sequence
  Description of Artificial Sequence: Synthetic oligonucleotide
  Antisense strand to SEQ ID NO: 82554
uucgucaugugucucggau

SEQ ID NO: 82636 - RNA, 19 nt, Artificial Sequence
  Description of Artificial Sequence: Synthetic oligonucleotide
  Sense strand starting at position 2131 of SEQ ID NO: 1036
guuaccuucccucauguua

SEQ ID NO: 82637 - RNA, 19 nt, Artificial Sequence
  Description of Artificial Sequence: Synthetic oligonucleotide
  Antisense strand to SEQ ID NO: 82556
uaacaugagggaagguaac

SEQ ID NO: 82638 - RNA, 19 nt, Artificial Sequence
  Description of Artificial Sequence: Synthetic oligonucleotide
  Sense strand starting at position 2232 of SEQ ID NO: 1036
gaguaaucauaagugcaau

SEQ ID NO: 82639 - RNA, 19 nt, Artificial Sequence
  Description of Artificial Sequence: Synthetic oligonucleotide
  Antisense strand to SEQ ID NO: 82558
auugcacuuaugauuacuc

SEQ ID NO: 82640 - RNA, 19 nt, Artificial Sequence
  Description of Artificial Sequence: Synthetic oligonucleotide
  Sense strand starting at position 2238 of SEQ ID NO: 1036
ucauaagugcaaugagaaa

SEQ ID NO: 82641 - RNA, 19 nt, Artificial Sequence
  Description of Artificial Sequence: Synthetic oligonucleotide
  Antisense strand to SEQ ID NO: 82560
uuucucauugcacuuauga

SEQ ID NO: 82642 - RNA, 19 nt, Artificial Sequence
  Description of Artificial Sequence: Synthetic oligonucleotide
  Sense strand starting at position 2266 of SEQ ID NO: 1036
uuugaaguuccauaaguau

SEQ ID NO: 82643 - RNA, 19 nt, Artificial Sequence
  Description of Artificial Sequence: Synthetic oligonucleotide
  Antisense strand to SEQ ID NO: 82562
auacuuauggaacuucaaa

SEQ ID NO: 82644 - RNA, 19 nt, Artificial Sequence
  Description of Artificial Sequence: Synthetic oligonucleotide
  Sense strand starting at position 2269 of SEQ ID NO: 1036
gaaguuccauaaguauuga

SEQ ID NO: 82645 - RNA, 19 nt, Artificial Sequence
  Description of Artificial Sequence: Synthetic oligonucleotide
  Antisense strand to SEQ ID NO: 82564
ucaauacuuauggaacuuc

SEQ ID NO: 82646 - RNA, 19 nt, Artificial Sequence
  Description of Artificial Sequence: Synthetic oligonucleotide
  Sense strand starting at position 2293 of SEQ ID NO: 1036
gguucuggugguuauuaac

SEQ ID NO: 82647 - RNA, 19 nt, Artificial Sequence
  Description of Artificial Sequence: Synthetic oligonucleotide
  Antisense strand to SEQ ID NO: 82566
guuaauaaccaccagaacc

SEQ ID NO: 82648 - RNA, 19 nt, Artificial Sequence
  Description of Artificial Sequence: Synthetic oligonucleotide
  Sense strand starting at position 2302 of SEQ ID NO: 1036
gguuauuaacuccaugauc

SEQ ID NO: 82649 - RNA, 19 nt, Artificial Sequence
  Description of Artificial Sequence: Synthetic oligonucleotide
  Antisense strand to SEQ ID NO: 82568
gaucauggaguuaauaacc

SEQ ID NO: 82650 - RNA, 19 nt, Artificial Sequence
  Description of Artificial Sequence: Synthetic oligonucleotide
  Sense strand starting at position 2323 of SEQ ID NO: 1036
aggaaaguaucugucagug

SEQ ID NO: 82651 - RNA, 19 nt, Artificial Sequence
  Description of Artificial Sequence: Synthetic oligonucleotide
  Antisense strand to SEQ ID NO: 82570
cacugacagauacuuuccu

SEQ ID NO: 82652 - RNA, 19 nt, Artificial Sequence
  Description of Artificial Sequence: Synthetic oligonucleotide
  Sense strand starting at position 2329 of SEQ ID NO: 1036
guaucugucaguguucugu

SEQ ID NO: 82653 - RNA, 19 nt, Artificial Sequence
  Description of Artificial Sequence: Synthetic oligonucleotide
  Antisense strand to SEQ ID NO: 82572
acagaacacugacagauac

SEQ ID NO: 82654 - RNA, 19 nt, Artificial Sequence
  Description of Artificial Sequence: Synthetic oligonucleotide
  Sense strand starting at position 2332 of SEQ ID NO: 1036
ucugucaguguucugugua

SEQ ID NO: 82655 - RNA, 19 nt, Artificial Sequence
  Description of Artificial Sequence: Synthetic oligonucleotide
  Antisense strand to SEQ ID NO: 82574
uacacagaacacugacaga

SEQ ID NO: 82656 - RNA, 19 nt, Artificial Sequence
  Description of Artificial Sequence: Synthetic oligonucleotide
  Sense strand starting at position 2464 of SEQ ID NO: 1036
caagcuaaugagugggaaa

SEQ ID NO: 82657 - RNA, 19 nt, Artificial Sequence
  Description of Artificial Sequence: Synthetic oligonucleotide
  Antisense strand to SEQ ID NO: 82576
uuucccacucauuagcuug

SEQ ID NO: 82658 - RNA, 19 nt, Artificial Sequence
  Description of Artificial Sequence: Synthetic oligonucleotide
  Sense strand starting at position 2548 of SEQ ID NO: 1036
ggaguuaaaccuugauaca

SEQ ID NO: 82659 - RNA, 19 nt, Artificial Sequence
  Description of Artificial Sequence: Synthetic oligonucleotide
  Antisense strand to SEQ ID NO: 82578
uguaucaagguuuaacucc

SEQ ID NO: 82660 - RNA, 19 nt, Artificial Sequence
  Description of Artificial Sequence: Synthetic oligonucleotide
  Sense strand starting at position 2742 of SEQ ID NO: 1036
cgagauggacucuggcuau

SEQ ID NO: 82661 - RNA, 19 nt, Artificial Sequence
  Description of Artificial Sequence: Synthetic oligonucleotide
  Antisense strand to SEQ ID NO: 82580
auagccagaguccaucucg

SEQ ID NO: 82662 - RNA, 19 nt, Artificial Sequence
  Description of Artificial Sequence: Synthetic oligonucleotide
  Sense strand starting at position 2745 of SEQ ID NO: 1036
gauggacucuggcuauguu

SEQ ID NO: 82663 - RNA, 19 nt, Artificial Sequence
  Description of Artificial Sequence: Synthetic oligonucleotide
  Antisense strand to SEQ ID NO: 82582
aacauagccagaguccauc

SEQ ID NO: 82664 - RNA, 19 nt, Artificial Sequence
  Description of Artificial Sequence: Synthetic oligonucleotide
  Sense strand starting at position 2913 of SEQ ID NO: 1036
uauuauuuguguuugcuga

SEQ ID NO: 82665 - RNA, 19 nt, Artificial Sequence
  Description of Artificial Sequence: Synthetic oligonucleotide
  Antisense strand to SEQ ID NO: 82584
ucagcaaacacaaauaaua

SEQ ID NO: 82666 - RNA, 19 nt, Artificial Sequence
  Description of Artificial Sequence: Synthetic oligonucleotide
  Sense strand starting at position 2914 of SEQ ID NO: 1036
auuauuuguguuugcugaa

SEQ ID NO: 82667 - RNA, 19 nt, Artificial Sequence
  Description of Artificial Sequence: Synthetic oligonucleotide
  Antisense strand to SEQ ID NO: 82586
uucagcaaacacaaauaau

SEQ ID NO: 82668 - RNA, 19 nt, Artificial Sequence
  Description of Artificial Sequence: Synthetic oligonucleotide
  Sense strand starting at position 2915 of SEQ ID NO: 1036
uuauuuguguuugcugaaa

SEQ ID NO: 82669 - RNA, 19 nt, Artificial Sequence
  Description of Artificial Sequence: Synthetic oligonucleotide
  Antisense strand to SEQ ID NO: 82588
uuucagcaaacacaaauaa

SEQ ID NO: 82670 - RNA, 19 nt, Artificial Sequence
  Description of Artificial Sequence: Synthetic oligonucleotide
  Sense strand starting at position 2964 of SEQ ID NO: 1036
ugaguaguuauauguuaca

SEQ ID NO: 82671 - RNA, 19 nt, Artificial Sequence
  Description of Artificial Sequence: Synthetic oligonucleotide
  Antisense strand to SEQ ID NO: 82590
uguaacauauaacuacuca

SEQ ID NO: 82672 - RNA, 19 nt, Artificial Sequence
  Description of Artificial Sequence: Synthetic oligonucleotide
  Sense strand starting at position 3005 of SEQ ID NO: 1036
uccaguaauguuuagcuau

SEQ ID NO: 82673 - RNA, 19 nt, Artificial Sequence
  Description of Artificial Sequence: Synthetic oligonucleotide
  Antisense strand to SEQ ID NO: 82592
auagcuaaacauuacugga

SEQ ID NO: 82674 - RNA, 19 nt, Artificial Sequence
  Description of Artificial Sequence: Synthetic oligonucleotide
  Sense strand starting at position 3025 of SEQ ID NO: 1036
auugaaguuugggccgaaa

SEQ ID NO: 82675 - RNA, 19 nt, Artificial Sequence
  Description of Artificial Sequence: Synthetic oligonucleotide
  Antisense strand to SEQ ID NO: 82594
uuucggcccaaacuucaau

SEQ ID NO: 82676 - RNA, 19 nt, Artificial Sequence
  Description of Artificial Sequence: Synthetic oligonucleotide
  Sense strand starting at position 3028 of SEQ ID NO: 1036
gaaguuugggccgaaaucu

SEQ ID NO: 82677 - RNA, 19 nt, Artificial Sequence
  Description of Artificial Sequence: Synthetic oligonucleotide
  Antisense strand to SEQ ID NO: 82596
agauuucggcccaaacuuc

SEQ ID NO: 82678 - RNA, 19 nt, Artificial Sequence
  Description of Artificial Sequence: Synthetic oligonucleotide
  Sense strand starting at position 3148 of SEQ ID NO: 1036
gggucucuacucugaaauu

SEQ ID NO: 82679 - RNA, 19 nt, Artificial Sequence
  Description of Artificial Sequence: Synthetic oligonucleotide
  Antisense strand to SEQ ID NO: 82598
aauuucagaguagagaccc

SEQ ID NO: 82680 - RNA, 19 nt, Artificial Sequence
  Description of Artificial Sequence: Synthetic oligonucleotide
  Sense strand starting at position 3174 of SEQ ID NO: 1036
ugccauaagguauguugaa

SEQ ID NO: 82681 - RNA, 19 nt, Artificial Sequence
  Description of Artificial Sequence: Synthetic oligonucleotide
  Antisense strand to SEQ ID NO: 82600
uucaacauaccuuauggca

SEQ ID NO: 82682 - RNA, 19 nt, Artificial Sequence
  Description of Artificial Sequence: Synthetic oligonucleotide
  Sense strand starting at position 3175 of SEQ ID NO: 1036
gccauaagguauguugaag

SEQ ID NO: 82683 - RNA, 19 nt, Artificial Sequence
  Description of Artificial Sequence: Synthetic oligonucleotide
  Antisense strand to SEQ ID NO: 82602
cuucaacauaccuuauggc

SEQ ID NO: 82684 - RNA, 19 nt, Artificial Sequence
  Description of Artificial Sequence: Synthetic oligonucleotide
  Sense strand starting at position 3181 of SEQ ID NO: 1036
agguauguugaagacguua

SEQ ID NO: 82685 - RNA, 19 nt, Artificial Sequence
  Description of Artificial Sequence: Synthetic oligonucleotide
  Antisense strand to SEQ ID NO: 82604
uaacgucuucaacauaccu

SEQ ID NO: 82686 - RNA, 19 nt, Artificial Sequence
  Description of Artificial Sequence: Synthetic oligonucleotide
  Sense strand starting at position 3614 of SEQ ID NO: 1036
gguuuaucauuaccucauc

SEQ ID NO: 82687 - RNA, 19 nt, Artificial Sequence
  Description of Artificial Sequence: Synthetic oligonucleotide
  Antisense strand to SEQ ID NO: 82606
gaugagguaaugauaaacc

SEQ ID NO: 82688 - RNA, 19 nt, Artificial Sequence
  Description of Artificial Sequence: Synthetic oligonucleotide
  Sense strand starting at position 3626 of SEQ ID NO: 1036
ccucaucaaugcuuggaua

SEQ ID NO: 82689 - RNA, 19 nt, Artificial Sequence
  Description of Artificial Sequence: Synthetic oligonucleotide
  Antisense strand to SEQ ID NO: 82608
uauccaagcauugaugagg

SEQ ID NO: 82690 - RNA, 19 nt, Artificial Sequence
  Description of Artificial Sequence: Synthetic oligonucleotide
  Sense strand starting at position 3628 of SEQ ID NO: 1036
ucaucaaugcuuggauacu

SEQ ID NO: 82691 - RNA, 19 nt, Artificial Sequence
  Description of Artificial Sequence: Synthetic oligonucleotide
  Antisense strand to SEQ ID NO: 82610
aguauccaagcauugauga

SEQ ID NO: 82692 - RNA, 19 nt, Artificial Sequence
  Description of Artificial Sequence: Synthetic oligonucleotide
  Sense strand starting at position 5 of SEQ ID NO: 1037
cuguuaacgugguucauga

SEQ ID NO: 82693 - RNA, 19 nt, Artificial Sequence
  Description of Artificial Sequence: Synthetic oligonucleotide
  Antisense strand to SEQ ID NO: 82612
ucaugaaccacguuaacag

SEQ ID NO: 82694 - RNA, 19 nt, Artificial Sequence
  Description of Artificial Sequence: Synthetic oligonucleotide
  Sense strand starting at position 18 of SEQ ID NO: 1037
ucaugacuuucuguuuaag

SEQ ID NO: 82695 - RNA, 19 nt, Artificial Sequence
  Description of Artificial Sequence: Synthetic oligonucleotide
  Antisense strand to SEQ ID NO: 82614
cuuaaacagaaagucauga

SEQ ID NO: 82696 - RNA, 19 nt, Artificial Sequence
  Description of Artificial Sequence: Synthetic oligonucleotide
  Sense strand starting at position 20 of SEQ ID NO: 1037
augacuuucuguuuaagcu

SEQ ID NO: 82697 - RNA, 19 nt, Artificial Sequence
  Description of Artificial Sequence: Synthetic oligonucleotide
  Antisense strand to SEQ ID NO: 82616
agcuuaaacagaaagucau

SEQ ID NO: 82698 - RNA, 19 nt, Artificial Sequence
  Description of Artificial Sequence: Synthetic oligonucleotide
  Sense strand starting at position 42 of SEQ ID NO: 1037
ccaccuguucccugagcau

SEQ ID NO: 82699 - RNA, 19 nt, Artificial Sequence
  Description of Artificial Sequence: Synthetic oligonucleotide
  Antisense strand to SEQ ID NO: 82618
augcucagggaacaggugg

SEQ ID NO: 82700 - RNA, 19 nt, Artificial Sequence
  Description of Artificial Sequence: Synthetic oligonucleotide
  Sense strand starting at position 162 of SEQ ID NO: 1037
cagcgaugcgguuccucau

SEQ ID NO: 82701 - RNA, 19 nt, Artificial Sequence
  Description of Artificial Sequence: Synthetic oligonucleotide
  Antisense strand to SEQ ID NO: 82620
augaggaaccgcaucgcug

SEQ ID NO: 82702 - RNA, 19 nt, Artificial Sequence
  Description of Artificial Sequence: Synthetic oligonucleotide
  Sense strand starting at position 427 of SEQ ID NO: 1037
guugaaguugcugagguuu

SEQ ID NO: 82703 - RNA, 19 nt, Artificial Sequence
  Description of Artificial Sequence: Synthetic oligonucleotide
  Antisense strand to SEQ ID NO: 82622
aaaccucagcaacuucaac

SEQ ID NO: 82704 - RNA, 19 nt, Artificial Sequence
  Description of Artificial Sequence: Synthetic oligonucleotide
  Sense strand starting at position 866 of SEQ ID NO: 1037
ggguuacuguagccauaag

SEQ ID NO: 82705 - RNA, 19 nt, Artificial Sequence
  Description of Artificial Sequence: Synthetic oligonucleotide
  Antisense strand to SEQ ID NO: 82624
cuuauggcuacaguaaccc

SEQ ID NO: 82706 - RNA, 19 nt, Artificial Sequence
  Description of Artificial Sequence: Synthetic oligonucleotide
  Sense strand starting at position 927 of SEQ ID NO: 1037
cauagaaggucguuuccau

SEQ ID NO: 82707 - RNA, 19 nt, Artificial Sequence
  Description of Artificial Sequence: Synthetic oligonucleotide
  Antisense strand to SEQ ID NO: 82626
auggaaacgaccuucuaug

SEQ ID NO: 82708 - RNA, 19 nt, Artificial Sequence
  Description of Artificial Sequence: Synthetic oligonucleotide
  Sense strand starting at position 934 of SEQ ID NO: 1037
ggucguuuccaucuuugca

SEQ ID NO: 82709 - RNA, 19 nt, Artificial Sequence
  Description of Artificial Sequence: Synthetic oligonucleotide
  Antisense strand to SEQ ID NO: 82628
ugcaaagauggaaacgacc

SEQ ID NO: 82710 - RNA, 19 nt, Artificial Sequence
  Description of Artificial Sequence: Synthetic oligonucleotide
  Sense strand starting at position 956 of SEQ ID NO: 1037
auagaacaguccgucacuu

SEQ ID NO: 82711 - RNA, 19 nt, Artificial Sequence
  Description of Artificial Sequence: Synthetic oligonucleotide
  Antisense strand to SEQ ID NO: 82630
aagugacggacuguucuau

SEQ ID NO: 82712 - RNA, 19 nt, Artificial Sequence
  Description of Artificial Sequence: Synthetic oligonucleotide
  Sense strand starting at position 968 of SEQ ID NO: 1037
gucacuucacgugagguua

SEQ ID NO: 82713 - RNA, 19 nt, Artificial Sequence
  Description of Artificial Sequence: Synthetic oligonucleotide
  Antisense strand to SEQ ID NO: 82632
uaaccucacgugaagugac

SEQ ID NO: 82714 - RNA, 19 nt, Artificial Sequence
  Description of Artificial Sequence: Synthetic oligonucleotide
  Sense strand starting at position 1058 of SEQ ID NO: 1037
gagccuuugacagggaaag

SEQ ID NO: 82715 - RNA, 19 nt, Artificial Sequence
  Description of Artificial Sequence: Synthetic oligonucleotide
  Antisense strand to SEQ ID NO: 82634
cuuucccugucaaaggcuc

SEQ ID NO: 82716 - RNA, 19 nt, Artificial Sequence
  Description of Artificial Sequence: Synthetic oligonucleotide
  Sense strand starting at position 1059 of SEQ ID NO: 1037
agccuuugacagggaaagu

SEQ ID NO: 82717 - RNA, 19 nt, Artificial Sequence
  Description of Artificial Sequence: Synthetic oligonucleotide
  Antisense strand to SEQ ID NO: 82636
acuuucccugucaaaggcu

SEQ ID NO: 82718 - RNA, 19 nt, Artificial Sequence
  Description of Artificial Sequence: Synthetic oligonucleotide
  Sense strand starting at position 1060 of SEQ ID NO: 1037
gccuuugacagggaaaguu

SEQ ID NO: 82719 - RNA, 19 nt, Artificial Sequence
  Description of Artificial Sequence: Synthetic oligonucleotide
  Antisense strand to SEQ ID NO: 82638
aacuuucccugucaaaggc

SEQ ID NO: 82720 - RNA, 19 nt, Artificial Sequence
  Description of Artificial Sequence: Synthetic oligonucleotide
  Sense strand starting at position 1068 of SEQ ID NO: 1037
cagggaaaguuucucuaag

SEQ ID NO: 82721 - RNA, 19 nt, Artificial Sequence
  Description of Artificial Sequence: Synthetic oligonucleotide
  Antisense strand to SEQ ID NO: 82640
cuuagagaaacuuucccug

SEQ ID NO: 82722 - RNA, 19 nt, Artificial Sequence
  Description of Artificial Sequence: Synthetic oligonucleotide
  Sense strand starting at position 1142 of SEQ ID NO: 1037
cagggagcgcaggguuaau

SEQ ID NO: 82723 - RNA, 19 nt, Artificial Sequence
  Description of Artificial Sequence: Synthetic oligonucleotide
  Antisense strand to SEQ ID NO: 82642
auuaacccugcgcucccug

SEQ ID NO: 82724 - RNA, 19 nt, Artificial Sequence
  Description of Artificial Sequence: Synthetic oligonucleotide
  Sense strand starting at position 1198 of SEQ ID NO: 1037
gcgcuacccggcuuugaaa

SEQ ID NO: 82725 - RNA, 19 nt, Artificial Sequence
  Description of Artificial Sequence: Synthetic oligonucleotide
  Antisense strand to SEQ ID NO: 82644
uuucaaagccggguagcgc

SEQ ID NO: 82726 - RNA, 19 nt, Artificial Sequence
  Description of Artificial Sequence: Synthetic oligonucleotide
  Sense strand starting at position 1944 of SEQ ID NO: 1037
gcccgagcucaacacuuau

SEQ ID NO: 82727 - RNA, 19 nt, Artificial Sequence
  Description of Artificial Sequence: Synthetic oligonucleotide
  Antisense strand to SEQ ID NO: 82646
auaaguguugagcucgggc

SEQ ID NO: 82728 - RNA, 19 nt, Artificial Sequence
  Description of Artificial Sequence: Synthetic oligonucleotide
  Sense strand starting at position 2261 of SEQ ID NO: 1037
ggguuugacugucuaguga

SEQ ID NO: 82729 - RNA, 19 nt, Artificial Sequence
  Description of Artificial Sequence: Synthetic oligonucleotide
  Antisense strand to SEQ ID NO: 82648
ucacuagacagucaaaccc

SEQ ID NO: 82730 - RNA, 19 nt, Artificial Sequence
  Description of Artificial Sequence: Synthetic oligonucleotide
  Sense strand starting at position 2559 of SEQ ID NO: 1037
uaagguggcucugugaagu

SEQ ID NO: 82731 - RNA, 19 nt, Artificial Sequence
  Description of Artificial Sequence: Synthetic oligonucleotide
  Antisense strand to SEQ ID NO: 82650
acuucacagagccaccuua

SEQ ID NO: 82732 - RNA, 19 nt, Artificial Sequence
  Description of Artificial Sequence: Synthetic oligonucleotide
  Sense strand starting at position 2645 of SEQ ID NO: 1037
uugagaacacuccgaaguu

SEQ ID NO: 82733 - RNA, 19 nt, Artificial Sequence
  Description of Artificial Sequence: Synthetic oligonucleotide
  Antisense strand to SEQ ID NO: 82652
aacuucggaguguucucaa

SEQ ID NO: 82734 - RNA, 19 nt, Artificial Sequence
  Description of Artificial Sequence: Synthetic oligonucleotide
  Sense strand starting at position 2713 of SEQ ID NO: 1037
cucguagaagccgagagau

SEQ ID NO: 82735 - RNA, 19 nt, Artificial Sequence
  Description of Artificial Sequence: Synthetic oligonucleotide
  Antisense strand to SEQ ID NO: 82654
aucucucggcuucuacgag

SEQ ID NO: 82736 - RNA, 19 nt, Artificial Sequence
  Description of Artificial Sequence: Synthetic oligonucleotide
  Sense strand starting at position 2730 of SEQ ID NO: 1037
auuuguauugcccgaaacu

SEQ ID NO: 82737 - RNA, 19 nt, Artificial Sequence
  Description of Artificial Sequence: Synthetic oligonucleotide
  Antisense strand to SEQ ID NO: 82656
aguuucgggcaauacaaau

SEQ ID NO: 82738 - RNA, 19 nt, Artificial Sequence
  Description of Artificial Sequence: Synthetic oligonucleotide
  Sense strand starting at position 2731 of SEQ ID NO: 1037
uuuguauugcccgaaacug

SEQ ID NO: 82739 - RNA, 19 nt, Artificial Sequence
  Description of Artificial Sequence: Synthetic oligonucleotide
  Antisense strand to SEQ ID NO: 82658
caguuucgggcaauacaaa

SEQ ID NO: 82740 - RNA, 19 nt, Artificial Sequence
  Description of Artificial Sequence: Synthetic oligonucleotide
  Sense strand starting at position 2893 of SEQ ID NO: 1037
gcguguaggcgauccgaaa

SEQ ID NO: 82741 - RNA, 19 nt, Artificial Sequence
  Description of Artificial Sequence: Synthetic oligonucleotide
  Antisense strand to SEQ ID NO: 82660
uuucggaucgccuacacgc

SEQ ID NO: 82742 - RNA, 19 nt, Artificial Sequence
  Description of Artificial Sequence: Synthetic oligonucleotide
  Sense strand starting at position 3189 of SEQ ID NO: 1037
acauguaagugguuccuuu

SEQ ID NO: 82743 - RNA, 19 nt, Artificial Sequence
  Description of Artificial Sequence: Synthetic oligonucleotide
  Antisense strand to SEQ ID NO: 82662
aaaggaaccacuuacaugu

SEQ ID NO: 82744 - RNA, 19 nt, Artificial Sequence
  Description of Artificial Sequence: Synthetic oligonucleotide
  Sense strand starting at position 3255 of SEQ ID NO: 1037
aagugugugguggaaagaa

SEQ ID NO: 82745 - RNA, 19 nt, Artificial Sequence
  Description of Artificial Sequence: Synthetic oligonucleotide
  Antisense strand to SEQ ID NO: 82664
uucuuuccaccacacacuu

SEQ ID NO: 82746 - RNA, 19 nt, Artificial Sequence
  Description of Artificial Sequence: Synthetic oligonucleotide
  Sense strand starting at position 3283 of SEQ ID NO: 1037
cgggaauccugguucuuuc

SEQ ID NO: 82747 - RNA, 19 nt, Artificial Sequence
  Description of Artificial Sequence: Synthetic oligonucleotide
  Antisense strand to SEQ ID NO: 82666
gaaagaaccaggauucccg

SEQ ID NO: 82748 - RNA, 19 nt, Artificial Sequence
  Description of Artificial Sequence: Synthetic oligonucleotide
  Sense strand starting at position 3519 of SEQ ID NO: 1037
aggauauaagagugcgauu

SEQ ID NO: 82749 - RNA, 19 nt, Artificial Sequence
  Description of Artificial Sequence: Synthetic oligonucleotide
  Antisense strand to SEQ ID NO: 82668
aaucgcacucuuauauccu

SEQ ID NO: 82750 - RNA, 19 nt, Artificial Sequence
  Description of Artificial Sequence: Synthetic oligonucleotide
  Sense strand starting at position 3551 of SEQ ID NO: 1037
uguacuuuccugugagaag

SEQ ID NO: 82751 - RNA, 19 nt, Artificial Sequence
  Description of Artificial Sequence: Synthetic oligonucleotide
  Antisense strand to SEQ ID NO: 82670
cuucucacaggaaaguaca

SEQ ID NO: 82752 - RNA, 19 nt, Artificial Sequence
  Description of Artificial Sequence: Synthetic oligonucleotide
  Sense strand starting at position 3597 of SEQ ID NO: 1037
cggguuagaagucagaucu

SEQ ID NO: 82753 - RNA, 19 nt, Artificial Sequence
  Description of Artificial Sequence: Synthetic oligonucleotide
  Antisense strand to SEQ ID NO: 82672
agaucugacuucuaacccg

SEQ ID NO: 82754 - RNA, 19 nt, Artificial Sequence
  Description of Artificial Sequence: Synthetic oligonucleotide
  Sense strand starting at position 3662 of SEQ ID NO: 1037
caguuuaaguuccuagguu

SEQ ID NO: 82755 - RNA, 19 nt, Artificial Sequence
  Description of Artificial Sequence: Synthetic oligonucleotide
  Antisense strand to SEQ ID NO: 82674
aaccuaggaacuuaaacug

SEQ ID NO: 82756 - RNA, 19 nt, Artificial Sequence
  Description of Artificial Sequence: Synthetic oligonucleotide
  Sense strand starting at position 3666 of SEQ ID NO: 1037
uuaaguuccuagguucuaa

SEQ ID NO: 82757 - RNA, 19 nt, Artificial Sequence
  Description of Artificial Sequence: Synthetic oligonucleotide
  Antisense strand to SEQ ID NO: 82676
uuagaaccuaggaacuuaa

SEQ ID NO: 82758 - RNA, 19 nt, Artificial Sequence
  Description of Artificial Sequence: Synthetic oligonucleotide
  Sense strand starting at position 3756 of SEQ ID NO: 1037
ggcuuugaguguucagaaa

SEQ ID NO: 82759 - RNA, 19 nt, Artificial Sequence
  Description of Artificial Sequence: Synthetic oligonucleotide
  Antisense strand to SEQ ID NO: 82678
uuucugaacacucaaagcc

SEQ ID NO: 82760 - RNA, 19 nt, Artificial Sequence
  Description of Artificial Sequence: Synthetic oligonucleotide
  Sense strand starting at position 3784 of SEQ ID NO: 1037
gcugguaucagugggaaac

SEQ ID NO: 82761 - RNA, 19 nt, Artificial Sequence
  Description of Artificial Sequence: Synthetic oligonucleotide
  Antisense strand to SEQ ID NO: 82680
guuucccacugauaccagc

SEQ ID NO: 82762 - RNA, 19 nt, Artificial Sequence
  Description of Artificial Sequence: Synthetic oligonucleotide
  Sense strand starting at position 3842 of SEQ ID NO: 1037
cacugaucugcagagggua

SEQ ID NO: 82763 - RNA, 19 nt, Artificial Sequence
  Description of Artificial Sequence: Synthetic oligonucleotide
  Antisense strand to SEQ ID NO: 82682
uacccucugcagaucagug

SEQ ID NO: 82764 - RNA, 19 nt, Artificial Sequence
  Description of Artificial Sequence: Synthetic oligonucleotide
  Sense strand starting at position 3912 of SEQ ID NO: 1037
guagguauacagugaugac

SEQ ID NO: 82765 - RNA, 19 nt, Artificial Sequence
  Description of Artificial Sequence: Synthetic oligonucleotide
  Antisense strand to SEQ ID NO: 82684
gucaucacuguauaccuac

SEQ ID NO: 82766 - RNA, 19 nt, Artificial Sequence
  Description of Artificial Sequence: Synthetic oligonucleotide
  Sense strand starting at position 3936 of SEQ ID NO: 1037
ccaguugcuuccucaagga

SEQ ID NO: 82767 - RNA, 19 nt, Artificial Sequence
  Description of Artificial Sequence: Synthetic oligonucleotide
  Antisense strand to SEQ ID NO: 82686
uccuugaggaagcaacugg

SEQ ID NO: 82768 - RNA, 19 nt, Artificial Sequence
  Description of Artificial Sequence: Synthetic oligonucleotide
  Sense strand starting at position 3940 of SEQ ID NO: 1037
uugcuuccucaaggagaga

SEQ ID NO: 82769 - RNA, 19 nt, Artificial Sequence
  Description of Artificial Sequence: Synthetic oligonucleotide
  Antisense strand to SEQ ID NO: 82688
ucucuccuugaggaagcaa

SEQ ID NO: 82770 - RNA, 19 nt, Artificial Sequence
  Description of Artificial Sequence: Synthetic oligonucleotide
  Sense strand starting at position 3971 of SEQ ID NO: 1037
gucuguugcccugaaucau

SEQ ID NO: 82771 - RNA, 19 nt, Artificial Sequence
  Description of Artificial Sequence: Synthetic oligonucleotide
  Antisense strand to SEQ ID NO: 82690
augauucagggcaacagac

SEQ ID NO: 82772 - RNA, 19 nt, Artificial Sequence
  Description of Artificial Sequence: Synthetic oligonucleotide
  Sense strand starting at position 1 of SEQ ID NO: 1038
aggugcuauuggucuaucu

SEQ ID NO: 82773 - RNA, 19 nt, Artificial Sequence
  Description of Artificial Sequence: Synthetic oligonucleotide
  Antisense strand to SEQ ID NO: 82692
agauagaccaauagcaccu

SEQ ID NO: 82774 - RNA, 19 nt, Artificial Sequence
  Description of Artificial Sequence: Synthetic oligonucleotide
  Sense strand starting at position 3 of SEQ ID NO: 1038
gugcuauuggucuaucucu

SEQ ID NO: 82775 - RNA, 19 nt, Artificial Sequence
  Description of Artificial Sequence: Synthetic oligonucleotide
  Antisense strand to SEQ ID NO: 82694
agagauagaccaauagcac

SEQ ID NO: 82776 - RNA, 19 nt, Artificial Sequence
  Description of Artificial Sequence: Synthetic oligonucleotide
  Sense strand starting at position 150 of SEQ ID NO: 1038
gguaguaacucagccaaca

SEQ ID NO: 82777 - RNA, 19 nt, Artificial Sequence
  Description of Artificial Sequence: Synthetic oligonucleotide
  Antisense strand to SEQ ID NO: 82696
uguuggcugaguuacuacc

SEQ ID NO: 82778 - RNA, 19 nt, Artificial Sequence
  Description of Artificial Sequence: Synthetic oligonucleotide
  Sense strand starting at position 225 of SEQ ID NO: 1038
ggcuacuucugccuagaag

SEQ ID NO: 82779 - RNA, 19 nt, Artificial Sequence
  Description of Artificial Sequence: Synthetic oligonucleotide
  Antisense strand to SEQ ID NO: 82698
cuucuaggcagaaguagcc

SEQ ID NO: 82780 - RNA, 19 nt, Artificial Sequence
  Description of Artificial Sequence: Synthetic oligonucleotide
  Sense strand starting at position 237 of SEQ ID NO: 1038
cuagaaggcucauuccacu

SEQ ID NO: 82781 - RNA, 19 nt, Artificial Sequence
  Description of Artificial Sequence: Synthetic oligonucleotide
  Antisense strand to SEQ ID NO: 82700
aguggaaugagccuucuag

SEQ ID NO: 82782 - RNA, 19 nt, Artificial Sequence
  Description of Artificial Sequence: Synthetic oligonucleotide
  Sense strand starting at position 259 of SEQ ID NO: 1038
uccugucauucugcagacu

SEQ ID NO: 82783 - RNA, 19 nt, Artificial Sequence
  Description of Artificial Sequence: Synthetic oligonucleotide
  Antisense strand to SEQ ID NO: 82702
agucugcagaaugacagga

SEQ ID NO: 82784 - RNA, 19 nt, Artificial Sequence
  Description of Artificial Sequence: Synthetic oligonucleotide
  Sense strand starting at position 344 of SEQ ID NO: 1038
auucucuauuuaugugagu

SEQ ID NO: 82785 - RNA, 19 nt, Artificial Sequence
  Description of Artificial Sequence: Synthetic oligonucleotide
  Antisense strand to SEQ ID NO: 82704
acucacauaaauagagaau

SEQ ID NO: 82786 - RNA, 19 nt, Artificial Sequence
  Description of Artificial Sequence: Synthetic oligonucleotide
  Sense strand starting at position 347 of SEQ ID NO: 1038
cucuauuuaugugagugau

SEQ ID NO: 82787 - RNA, 19 nt, Artificial Sequence
  Description of Artificial Sequence: Synthetic oligonucleotide
  Antisense strand to SEQ ID NO: 82706
aucacucacauaaauagag

SEQ ID NO: 82788 - RNA, 19 nt, Artificial Sequence
  Description of Artificial Sequence: Synthetic oligonucleotide
  Sense strand starting at position 469 of SEQ ID NO: 1038
cagagcauuuguugauuga

SEQ ID NO: 82789 - RNA, 19 nt, Artificial Sequence
  Description of Artificial Sequence: Synthetic oligonucleotide
  Antisense strand to SEQ ID NO: 82708
ucaaucaacaaaugcucug

SEQ ID NO: 82790 - RNA, 19 nt, Artificial Sequence
  Description of Artificial Sequence: Synthetic oligonucleotide
  Sense strand starting at position 486 of SEQ ID NO: 1038
gaaucagucuggucugauc

SEQ ID NO: 82791 - RNA, 19 nt, Artificial Sequence
  Description of Artificial Sequence: Synthetic oligonucleotide
  Antisense strand to SEQ ID NO: 82710
gaucagaccagacugauuc

SEQ ID NO: 82792 - RNA, 19 nt, Artificial Sequence
  Description of Artificial Sequence: Synthetic oligonucleotide
  Sense strand starting at position 540 of SEQ ID NO: 1038
cacauuaugguccagugaa

SEQ ID NO: 82793 - RNA, 19 nt, Artificial Sequence
  Description of Artificial Sequence: Synthetic oligonucleotide
  Antisense strand to SEQ ID NO: 82712
uucacuggaccauaaugug

SEQ ID NO: 82794 - RNA, 19 nt, Artificial Sequence
  Description of Artificial Sequence: Synthetic oligonucleotide
  Sense strand starting at position 617 of SEQ ID NO: 1038
guagcuuuccugugucaca

SEQ ID NO: 82795 - RNA, 19 nt, Artificial Sequence
  Description of Artificial Sequence: Synthetic oligonucleotide
  Antisense strand to SEQ ID NO: 82714
ugugacacaggaaagcuac

SEQ ID NO: 82796 - RNA, 19 nt, Artificial Sequence
  Description of Artificial Sequence: Synthetic oligonucleotide
  Sense strand starting at position 673 of SEQ ID NO: 1038
caagcagguccuugggaau

SEQ ID NO: 82797 - RNA, 19 nt, Artificial Sequence
  Description of Artificial Sequence: Synthetic oligonucleotide
  Antisense strand to SEQ ID NO: 82716
auucccaaggaccugcuug

SEQ ID NO: 82798 - RNA, 19 nt, Artificial Sequence
  Description of Artificial Sequence: Synthetic oligonucleotide
  Sense strand starting at position 680 of SEQ ID NO: 1038
guccuugggaaucguguuu

SEQ ID NO: 82799 - RNA, 19 nt, Artificial Sequence
  Description of Artificial Sequence: Synthetic oligonucleotide
  Antisense strand to SEQ ID NO: 82718
aaacacgauucccaaggac

SEQ ID NO: 82800 - RNA, 19 nt, Artificial Sequence
  Description of Artificial Sequence: Synthetic oligonucleotide
  Sense strand starting at position 685 of SEQ ID NO: 1038
ugggaaucguguuuaacuc

SEQ ID NO: 82801 - RNA, 19 nt, Artificial Sequence
  Description of Artificial Sequence: Synthetic oligonucleotide
  Antisense strand to SEQ ID NO: 82720
gaguuaaacacgauuccca

SEQ ID NO: 82802 - RNA, 19 nt, Artificial Sequence
  Description of Artificial Sequence: Synthetic oligonucleotide
  Sense strand starting at position 686 of SEQ ID NO: 1038
gggaaucguguuuaacuca

SEQ ID NO: 82803 - RNA, 19 nt, Artificial Sequence
  Description of Artificial Sequence: Synthetic oligonucleotide
  Antisense strand to SEQ ID NO: 82722
ugaguuaaacacgauuccc

SEQ ID NO: 82804 - RNA, 19 nt, Artificial Sequence
  Description of Artificial Sequence: Synthetic oligonucleotide
  Sense strand starting at position 689 of SEQ ID NO: 1038
aaucguguuuaacucaaga

SEQ ID NO: 82805 - RNA, 19 nt, Artificial Sequence
  Description of Artificial Sequence: Synthetic oligonucleotide
  Antisense strand to SEQ ID NO: 82724
ucuugaguuaaacacgauu

SEQ ID NO: 82806 - RNA, 19 nt, Artificial Sequence
  Description of Artificial Sequence: Synthetic oligonucleotide
  Sense strand starting at position 691 of SEQ ID NO: 1038
ucguguuuaacucaagaug

SEQ ID NO: 82807 - RNA, 19 nt, Artificial Sequence
  Description of Artificial Sequence: Synthetic oligonucleotide
  Antisense strand to SEQ ID NO: 82726
caucuugaguuaaacacga

SEQ ID NO: 82808 - RNA, 19 nt, Artificial Sequence
  Description of Artificial Sequence: Synthetic oligonucleotide
  Sense strand starting at position 694 of SEQ ID NO: 1038
uguuuaacucaagaugcuu

SEQ ID NO: 82809 - RNA, 19 nt, Artificial Sequence
  Description of Artificial Sequence: Synthetic oligonucleotide
  Antisense strand to SEQ ID NO: 82728
aagcaucuugaguuaaaca

SEQ ID NO: 82810 - RNA, 19 nt, Artificial Sequence
  Description of Artificial Sequence: Synthetic oligonucleotide
  Sense strand starting at position 760 of SEQ ID NO: 1038
ggcccuauuugguagauag

SEQ ID NO: 82811 - RNA, 19 nt, Artificial Sequence
  Description of Artificial Sequence: Synthetic oligonucleotide
  Antisense strand to SEQ ID NO: 82730
cuaucuaccaaauagggcc

SEQ ID NO: 82812 - RNA, 19 nt, Artificial Sequence
  Description of Artificial Sequence: Synthetic oligonucleotide
  Sense strand starting at position 859 of SEQ ID NO: 1038
gcgcuuaggaacuaagacu

SEQ ID NO: 82813 - RNA, 19 nt, Artificial Sequence
  Description of Artificial Sequence: Synthetic oligonucleotide
  Antisense strand to SEQ ID NO: 82732
agucuuaguuccuaagcgc

SEQ ID NO: 82814 - RNA, 19 nt, Artificial Sequence
  Description of Artificial Sequence: Synthetic oligonucleotide
  Sense strand starting at position 866 of SEQ ID NO: 1038
ggaacuaagacuugaguuu

SEQ ID NO: 82815 - RNA, 19 nt, Artificial Sequence
  Description of Artificial Sequence: Synthetic oligonucleotide
  Antisense strand to SEQ ID NO: 82734
aaacucaagucuuaguucc

SEQ ID NO: 82816 - RNA, 19 nt, Artificial Sequence
  Description of Artificial Sequence: Synthetic oligonucleotide
  Sense strand starting at position 1212 of SEQ ID NO: 1038
gacuaagagcucgauucca

SEQ ID NO: 82817 - RNA, 19 nt, Artificial Sequence
  Description of Artificial Sequence: Synthetic oligonucleotide
  Antisense strand to SEQ ID NO: 82736
uggaaucgagcucuuaguc

SEQ ID NO: 82818 - RNA, 19 nt, Artificial Sequence
  Description of Artificial Sequence: Synthetic oligonucleotide
  Sense strand starting at position 2049 of SEQ ID NO: 1038
cggacuuugguguguagga

SEQ ID NO: 82819 - RNA, 19 nt, Artificial Sequence
  Description of Artificial Sequence: Synthetic oligonucleotide
  Antisense strand to SEQ ID NO: 82738
uccuacacaccaaaguccg

SEQ ID NO: 82820 - RNA, 19 nt, Artificial Sequence
  Description of Artificial Sequence: Synthetic oligonucleotide
  Sense strand starting at position 2050 of SEQ ID NO: 1038
ggacuuugguguguaggaa

SEQ ID NO: 82821 - RNA, 19 nt, Artificial Sequence
  Description of Artificial Sequence: Synthetic oligonucleotide
  Antisense strand to SEQ ID NO: 82740
uuccuacacaccaaagucc

SEQ ID NO: 82822 - RNA, 19 nt, Artificial Sequence
  Description of Artificial Sequence: Synthetic oligonucleotide
  Sense strand starting at position 2095 of SEQ ID NO: 1038
gggucuuagccucgauaaa

SEQ ID NO: 82823 - RNA, 19 nt, Artificial Sequence
  Description of Artificial Sequence: Synthetic oligonucleotide
  Antisense strand to SEQ ID NO: 82742
uuuaucgaggcuaagaccc

SEQ ID NO: 82824 - RNA, 19 nt, Artificial Sequence
  Description of Artificial Sequence: Synthetic oligonucleotide
  Sense strand starting at position 2096 of SEQ ID NO: 1038
ggucuuagccucgauaaac

SEQ ID NO: 82825 - RNA, 19 nt, Artificial Sequence
  Description of Artificial Sequence: Synthetic oligonucleotide
  Antisense strand to SEQ ID NO: 82744
guuuaucgaggcuaagacc

SEQ ID NO: 82826 - RNA, 19 nt, Artificial Sequence
  Description of Artificial Sequence: Synthetic oligonucleotide
  Sense strand starting at position 2203 of SEQ ID NO: 1038
uucccaaagugcuuucgua

SEQ ID NO: 82827 - RNA, 19 nt, Artificial Sequence
  Description of Artificial Sequence: Synthetic oligonucleotide
  Antisense strand to SEQ ID NO: 82746
uacgaaagcacuuugggaa

SEQ ID NO: 82828 - RNA, 19 nt, Artificial Sequence
  Description of Artificial Sequence: Synthetic oligonucleotide
  Sense strand starting at position 2541 of SEQ ID NO: 1038
ugcuguuugagacggaauc

SEQ ID NO: 82829 - RNA, 19 nt, Artificial Sequence
  Description of Artificial Sequence: Synthetic oligonucleotide
  Antisense strand to SEQ ID NO: 82748
gauuccgucucaaacagca

SEQ ID NO: 82830 - RNA, 19 nt, Artificial Sequence
  Description of Artificial Sequence: Synthetic oligonucleotide
  Sense strand starting at position 2542 of SEQ ID NO: 1038
gcuguuugagacggaaucu

SEQ ID NO: 82831 - RNA, 19 nt, Artificial Sequence
  Description of Artificial Sequence: Synthetic oligonucleotide
  Antisense strand to SEQ ID NO: 82750
agauuccgucucaaacagc

SEQ ID NO: 82832 - RNA, 19 nt, Artificial Sequence
  Description of Artificial Sequence: Synthetic oligonucleotide
  Sense strand starting at position 2862 of SEQ ID NO: 1038
accgcuaaccuugaaugaa

SEQ ID NO: 82833 - RNA, 19 nt, Artificial Sequence
  Description of Artificial Sequence: Synthetic oligonucleotide
  Antisense strand to SEQ ID NO: 82752
uucauucaagguuagcggu

SEQ ID NO: 82834 - RNA, 19 nt, Artificial Sequence
  Description of Artificial Sequence: Synthetic oligonucleotide
  Sense strand starting at position 3093 of SEQ ID NO: 1038
uugacauugugacccagau

SEQ ID NO: 82835 - RNA, 19 nt, Artificial Sequence
  Description of Artificial Sequence: Synthetic oligonucleotide
  Antisense strand to SEQ ID NO: 82754
aucugggucacaaugucaa

SEQ ID NO: 82836 - RNA, 19 nt, Artificial Sequence
  Description of Artificial Sequence: Synthetic oligonucleotide
  Sense strand starting at position 3114 of SEQ ID NO: 1038
gggaguacuuucuaggacu

SEQ ID NO: 82837 - RNA, 19 nt, Artificial Sequence
  Description of Artificial Sequence: Synthetic oligonucleotide
  Antisense strand to SEQ ID NO: 82756
aguccuagaaaguacuccc

SEQ ID NO: 82838 - RNA, 19 nt, Artificial Sequence
  Description of Artificial Sequence: Synthetic oligonucleotide
  Sense strand starting at position 3282 of SEQ ID NO: 1038
uguggugagcuugauagca

SEQ ID NO: 82839 - RNA, 19 nt, Artificial Sequence
  Description of Artificial Sequence: Synthetic oligonucleotide
  Antisense strand to SEQ ID NO: 82758
ugcuaucaagcucaccaca

SEQ ID NO: 82840 - RNA, 19 nt, Artificial Sequence
  Description of Artificial Sequence: Synthetic oligonucleotide
  Sense strand starting at position 3371 of SEQ ID NO: 1038
ggauucauguggccagauc

SEQ ID NO: 82841 - RNA, 19 nt, Artificial Sequence
  Description of Artificial Sequence: Synthetic oligonucleotide
  Antisense strand to SEQ ID NO: 82760
gaucuggccacaugaaucc

SEQ ID NO: 82842 - RNA, 19 nt, Artificial Sequence
  Description of Artificial Sequence: Synthetic oligonucleotide
  Sense strand starting at position 3707 of SEQ ID NO: 1038
agccauaagucagauauuu

SEQ ID NO: 82843 - RNA, 19 nt, Artificial Sequence
  Description of Artificial Sequence: Synthetic oligonucleotide
  Antisense strand to SEQ ID NO: 82762
aaauaucugacuuauggcu

SEQ ID NO: 82844 - RNA, 19 nt, Artificial Sequence
  Description of Artificial Sequence: Synthetic oligonucleotide
  Sense strand starting at position 3738 of SEQ ID NO: 1038
caaauuuguuaggagcuca

SEQ ID NO: 82845 - RNA, 19 nt, Artificial Sequence
  Description of Artificial Sequence: Synthetic oligonucleotide
  Antisense strand to SEQ ID NO: 82764
ugagcuccuaacaaauuug

SEQ ID NO: 82846 - RNA, 19 nt, Artificial Sequence
  Description of Artificial Sequence: Synthetic oligonucleotide
  Sense strand starting at position 3749 of SEQ ID NO: 1038
ggagcucauuuguauaaug

SEQ ID NO: 82847 - RNA, 19 nt, Artificial Sequence
  Description of Artificial Sequence: Synthetic oligonucleotide
  Antisense strand to SEQ ID NO: 82766
cauuauacaaaugagcucc

SEQ ID NO: 82848 - RNA, 19 nt, Artificial Sequence
  Description of Artificial Sequence: Synthetic oligonucleotide
  Sense strand starting at position 3847 of SEQ ID NO: 1038
ggguuugugcucuccuguu

SEQ ID NO: 82849 - RNA, 19 nt, Artificial Sequence
  Description of Artificial Sequence: Synthetic oligonucleotide
  Antisense strand to SEQ ID NO: 82768
aacaggagagcacaaaccc

SEQ ID NO: 82850 - RNA, 19 nt, Artificial Sequence
  Description of Artificial Sequence: Synthetic oligonucleotide
  Sense strand starting at position 3900 of SEQ ID NO: 1038
ccaacaucccugugggaua

SEQ ID NO: 82851 - RNA, 19 nt, Artificial Sequence
  Description of Artificial Sequence: Synthetic oligonucleotide
  Antisense strand to SEQ ID NO: 82770
uaucccacagggauguugg

SEQ ID NO: 82852 - RNA, 19 nt, Artificial Sequence
  Description of Artificial Sequence: Synthetic oligonucleotide
  Sense strand starting at position 3890 of SEQ ID NO: 1040
gagaucucagcucaguaca

SEQ ID NO: 82853 - RNA, 19 nt, Artificial Sequence
  Description of Artificial Sequence: Synthetic oligonucleotide
  Antisense strand to SEQ ID NO: 82772
uguacugagcugagaucuc

SEQ ID NO: 82854 - RNA, 19 nt, Artificial Sequence
  Description of Artificial Sequence: Synthetic oligonucleotide
  Sense strand starting at position 3786 of SEQ ID NO: 1040
acucgacccugacauagaa

SEQ ID NO: 82855 - RNA, 19 nt, Artificial Sequence
  Description of Artificial Sequence: Synthetic oligonucleotide
  Antisense strand to SEQ ID NO: 82774
uucuaugucagggucgagu

SEQ ID NO: 82856 - RNA, 19 nt, Artificial Sequence
  Description of Artificial Sequence: Synthetic oligonucleotide
  Sense strand starting at position 3743 of SEQ ID NO: 1040
uuaccuuuaugucugaaga

SEQ ID NO: 82857 - RNA, 19 nt, Artificial Sequence
  Description of Artificial Sequence: Synthetic oligonucleotide
  Antisense strand to SEQ ID NO: 82776
ucuucagacauaaagguaa

SEQ ID NO: 82858 - RNA, 19 nt, Artificial Sequence
  Description of Artificial Sequence: Synthetic oligonucleotide
  Sense strand starting at position 3738 of SEQ ID NO: 1040
ccgaguuaccuuuaugucu

SEQ ID NO: 82859 - RNA, 19 nt, Artificial Sequence
  Description of Artificial Sequence: Synthetic oligonucleotide
  Antisense strand to SEQ ID NO: 82778
agacauaaagguaacucgg

SEQ ID NO: 82860 - RNA, 19 nt, Artificial Sequence
  Description of Artificial Sequence: Synthetic oligonucleotide
  Sense strand starting at position 3621 of SEQ ID NO: 1040
caguuuagucugugaacca

SEQ ID NO: 82861 - RNA, 19 nt, Artificial Sequence
  Description of Artificial Sequence: Synthetic oligonucleotide
  Antisense strand to SEQ ID NO: 82780
ugguucacagacuaaacug

SEQ ID NO: 82862 - RNA, 19 nt, Artificial Sequence
  Description of Artificial Sequence: Synthetic oligonucleotide
  Sense strand starting at position 3620 of SEQ ID NO: 1040
gcaguuuagucugugaacc

SEQ ID NO: 82863 - RNA, 19 nt, Artificial Sequence
  Description of Artificial Sequence: Synthetic oligonucleotide
  Antisense strand to SEQ ID NO: 82782
gguucacagacuaaacugc

SEQ ID NO: 82864 - RNA, 19 nt, Artificial Sequence
  Description of Artificial Sequence: Synthetic oligonucleotide
  Sense strand starting at position 3619 of SEQ ID NO: 1040
agcaguuuagucugugaac

SEQ ID NO: 82865 - RNA, 19 nt, Artificial Sequence
  Description of Artificial Sequence: Synthetic oligonucleotide
  Antisense strand to SEQ ID NO: 82784
guucacagacuaaacugcu

SEQ ID NO: 82866 - RNA, 19 nt, Artificial Sequence
  Description of Artificial Sequence: Synthetic oligonucleotide
  Sense strand starting at position 3617 of SEQ ID NO: 1040
ucagcaguuuagucuguga

SEQ ID NO: 82867 - RNA, 19 nt, Artificial Sequence
  Description of Artificial Sequence: Synthetic oligonucleotide
  Antisense strand to SEQ ID NO: 82786
ucacagacuaaacugcuga

SEQ ID NO: 82868 - RNA, 19 nt, Artificial Sequence
  Description of Artificial Sequence: Synthetic oligonucleotide
  Sense strand starting at position 3435 of SEQ ID NO: 1040
ccugcaauuccagaauggu

SEQ ID NO: 82869 - RNA, 19 nt, Artificial Sequence
  Description of Artificial Sequence: Synthetic oligonucleotide
  Antisense strand to SEQ ID NO: 82788
accauucuggaauugcagg

SEQ ID NO: 82870 - RNA, 19 nt, Artificial Sequence
  Description of Artificial Sequence: Synthetic oligonucleotide
  Sense strand starting at position 3412 of SEQ ID NO: 1040
ugccuauucgaaggcgaga

SEQ ID NO: 82871 - RNA, 19 nt, Artificial Sequence
  Description of Artificial Sequence: Synthetic oligonucleotide
  Antisense strand to SEQ ID NO: 82790
ucucgccuucgaauaggca

SEQ ID NO: 82872 - RNA, 19 nt, Artificial Sequence
  Description of Artificial Sequence: Synthetic oligonucleotide
  Sense strand starting at position 3144 of SEQ ID NO: 1040
ugcucacuucucuguuuau

SEQ ID NO: 82873 - RNA, 19 nt, Artificial Sequence
  Description of Artificial Sequence: Synthetic oligonucleotide
  Antisense strand to SEQ ID NO: 82792
auaaacagagaagugagca

SEQ ID NO: 82874 - RNA, 19 nt, Artificial Sequence
  Description of Artificial Sequence: Synthetic oligonucleotide
  Sense strand starting at position 3143 of SEQ ID NO: 1040
gugcucacuucucuguuua

SEQ ID NO: 82875 - RNA, 19 nt, Artificial Sequence
  Description of Artificial Sequence: Synthetic oligonucleotide
  Antisense strand to SEQ ID NO: 82794
uaaacagagaagugagcac

SEQ ID NO: 82876 - RNA, 19 nt, Artificial Sequence
  Description of Artificial Sequence: Synthetic oligonucleotide
  Sense strand starting at position 3087 of SEQ ID NO: 1040
gcugauauugcugauauug

SEQ ID NO: 82877 - RNA, 19 nt, Artificial Sequence
  Description of Artificial Sequence: Synthetic oligonucleotide
  Antisense strand to SEQ ID NO: 82796
caauaucagcaauaucagc

SEQ ID NO: 82878 - RNA, 19 nt, Artificial Sequence
  Description of Artificial Sequence: Synthetic oligonucleotide
  Sense strand starting at position 2974 of SEQ ID NO: 1040
gaauguaacucggaaggaa

SEQ ID NO: 82879 - RNA, 19 nt, Artificial Sequence
  Description of Artificial Sequence: Synthetic oligonucleotide
  Antisense strand to SEQ ID NO: 82798
uuccuuccgaguuacauuc

SEQ ID NO: 82880 - RNA, 19 nt, Artificial Sequence
  Description of Artificial Sequence: Synthetic oligonucleotide
  Sense strand starting at position 2921 of SEQ ID NO: 1040
ccaggaugcuguucugaau

SEQ ID NO: 82881 - RNA, 19 nt, Artificial Sequence
  Description of Artificial Sequence: Synthetic oligonucleotide
  Antisense strand to SEQ ID NO: 82800
auucagaacagcauccugg

SEQ ID NO: 82882 - RNA, 19 nt, Artificial Sequence
  Description of Artificial Sequence: Synthetic oligonucleotide
  Sense strand starting at position 2792 of SEQ ID NO: 1040
ucaguccuacuugacagau

SEQ ID NO: 82883 - RNA, 19 nt, Artificial Sequence
  Description of Artificial Sequence: Synthetic oligonucleotide
  Antisense strand to SEQ ID NO: 82802
aucugucaaguaggacuga

SEQ ID NO: 82884 - RNA, 19 nt, Artificial Sequence
  Description of Artificial Sequence: Synthetic oligonucleotide
  Sense strand starting at position 2620 of SEQ ID NO: 1040
auuaccuugggcugagaaa

SEQ ID NO: 82885 - RNA, 19 nt, Artificial Sequence
  Description of Artificial Sequence: Synthetic oligonucleotide
  Antisense strand to SEQ ID NO: 82804
uuucucagcccaagguaau

SEQ ID NO: 82886 - RNA, 19 nt, Artificial Sequence
  Description of Artificial Sequence: Synthetic oligonucleotide
  Sense strand starting at position 2618 of SEQ ID NO: 1040
aaauuaccuugggcugaga

SEQ ID NO: 82887 - RNA, 19 nt, Artificial Sequence
  Description of Artificial Sequence: Synthetic oligonucleotide
  Antisense strand to SEQ ID NO: 82806
ucucagcccaagguaauuu

SEQ ID NO: 82888 - RNA, 19 nt, Artificial Sequence
  Description of Artificial Sequence: Synthetic oligonucleotide
  Sense strand starting at position 2596 of SEQ ID NO: 1040
ccagccaauugaguuaauu

SEQ ID NO: 82889 - RNA, 19 nt, Artificial Sequence
  Description of Artificial Sequence: Synthetic oligonucleotide
  Antisense strand to SEQ ID NO: 82808
aauuaacucaauuggcugg

SEQ ID NO: 82890 - RNA, 19 nt, Artificial Sequence
  Description of Artificial Sequence: Synthetic oligonucleotide
  Sense strand starting at position 2589 of SEQ ID NO: 1040
ccgguuuccagccaauuga

SEQ ID NO: 82891 - RNA, 19 nt, Artificial Sequence
  Description of Artificial Sequence: Synthetic oligonucleotide
  Antisense strand to SEQ ID NO: 82810
ucaauuggcuggaaaccgg

SEQ ID NO: 82892 - RNA, 19 nt, Artificial Sequence
  Description of Artificial Sequence: Synthetic oligonucleotide
  Sense strand starting at position 2478 of SEQ ID NO: 1040
ggugucccgaugugaaacu

SEQ ID NO: 82893 - RNA, 19 nt, Artificial Sequence
  Description of Artificial Sequence: Synthetic oligonucleotide
  Antisense strand to SEQ ID NO: 82812
aguuucacaucgggacacc

SEQ ID NO: 82894 - RNA, 19 nt, Artificial Sequence
  Description of Artificial Sequence: Synthetic oligonucleotide
  Sense strand starting at position 2291 of SEQ ID NO: 1040
gcaauaaagucacuaacga

SEQ ID NO: 82895 - RNA, 19 nt, Artificial Sequence
  Description of Artificial Sequence: Synthetic oligonucleotide
  Antisense strand to SEQ ID NO: 82814
ucguuagugacuuuauugc

SEQ ID NO: 82896 - RNA, 19 nt, Artificial Sequence
  Description of Artificial Sequence: Synthetic oligonucleotide
  Sense strand starting at position 2283 of SEQ ID NO: 1040
auuguuuagcaauaaaguc

SEQ ID NO: 82897 - RNA, 19 nt, Artificial Sequence
  Description of Artificial Sequence: Synthetic oligonucleotide
  Antisense strand to SEQ ID NO: 82816
gacuuuauugcuaaacaau

SEQ ID NO: 82898 - RNA, 19 nt, Artificial Sequence
  Description of Artificial Sequence: Synthetic oligonucleotide
  Sense strand starting at position 2267 of SEQ ID NO: 1040
agggcugccuuucuaaauu

SEQ ID NO: 82899 - RNA, 19 nt, Artificial Sequence
  Description of Artificial Sequence: Synthetic oligonucleotide
  Antisense strand to SEQ ID NO: 82818
aauuuagaaaggcagcccu

SEQ ID NO: 82900 - RNA, 19 nt, Artificial Sequence
  Description of Artificial Sequence: Synthetic oligonucleotide
  Sense strand starting at position 2200 of SEQ ID NO: 1040
gcagcugcuccaggaagaa

SEQ ID NO: 82901 - RNA, 19 nt, Artificial Sequence
  Description of Artificial Sequence: Synthetic oligonucleotide
  Antisense strand to SEQ ID NO: 82820
uucuuccuggagcagcugc

SEQ ID NO: 82902 - RNA, 19 nt, Artificial Sequence
  Description of Artificial Sequence: Synthetic oligonucleotide
  Sense strand starting at position 2121 of SEQ ID NO: 1040
ggccguggagcuugaaagu

SEQ ID NO: 82903 - RNA, 19 nt, Artificial Sequence
  Description of Artificial Sequence: Synthetic oligonucleotide
  Antisense strand to SEQ ID NO: 82822
acuuucaagcuccacggcc

SEQ ID NO: 82904 - RNA, 19 nt, Artificial Sequence
  Description of Artificial Sequence: Synthetic oligonucleotide
  Sense strand starting at position 1699 of SEQ ID NO: 1040
gggcguuuccggcaaucac

SEQ ID NO: 82905 - RNA, 19 nt, Artificial Sequence
  Description of Artificial Sequence: Synthetic oligonucleotide
  Antisense strand to SEQ ID NO: 82824
gugauugccggaaacgccc

SEQ ID NO: 82906 - RNA, 19 nt, Artificial Sequence
  Description of Artificial Sequence: Synthetic oligonucleotide
  Sense strand starting at position 1208 of SEQ ID NO: 1040
uaauucugcuaagaggaga

SEQ ID NO: 82907 - RNA, 19 nt, Artificial Sequence
  Description of Artificial Sequence: Synthetic oligonucleotide
  Antisense strand to SEQ ID NO: 82826
ucuccucuuagcagaauua

SEQ ID NO: 82908 - RNA, 19 nt, Artificial Sequence
  Description of Artificial Sequence: Synthetic oligonucleotide
  Sense strand starting at position 1203 of SEQ ID NO: 1040
guaaauaauucugcuaaga

SEQ ID NO: 82909 - RNA, 19 nt, Artificial Sequence
  Description of Artificial Sequence: Synthetic oligonucleotide
  Antisense strand to SEQ ID NO: 82828
ucuuagcagaauuauuuac

SEQ ID NO: 82910 - RNA, 19 nt, Artificial Sequence
  Description of Artificial Sequence: Synthetic oligonucleotide
  Sense strand starting at position 1184 of SEQ ID NO: 1040
gcugacagucccugcagau

SEQ ID NO: 82911 - RNA, 19 nt, Artificial Sequence
  Description of Artificial Sequence: Synthetic oligonucleotide
  Antisense strand to SEQ ID NO: 82830
aucugcagggacugucagc

SEQ ID NO: 82912 - RNA, 19 nt, Artificial Sequence
  Description of Artificial Sequence: Synthetic oligonucleotide
  Sense strand starting at position 1152 of SEQ ID NO: 1040
ucggguuaaaugcagcaaa

SEQ ID NO: 82913 - RNA, 19 nt, Artificial Sequence
  Description of Artificial Sequence: Synthetic oligonucleotide
  Antisense strand to SEQ ID NO: 82832
uuugcugcauuuaacccga

SEQ ID NO: 82914 - RNA, 19 nt, Artificial Sequence
  Description of Artificial Sequence: Synthetic oligonucleotide
  Sense strand starting at position 1126 of SEQ ID NO: 1040
augcuaagccaguaucaga

SEQ ID NO: 82915 - RNA, 19 nt, Artificial Sequence
  Description of Artificial Sequence: Synthetic oligonucleotide
  Antisense strand to SEQ ID NO: 82834
ucugauacuggcuuagcau

SEQ ID NO: 82916 - RNA, 19 nt, Artificial Sequence
  Description of Artificial Sequence: Synthetic oligonucleotide
  Sense strand starting at position 969 of SEQ ID NO: 1040
cuaacuuucugagaagacu

SEQ ID NO: 82917 - RNA, 19 nt, Artificial Sequence
  Description of Artificial Sequence: Synthetic oligonucleotide
  Antisense strand to SEQ ID NO: 82836
agucuucucagaaaguuag

SEQ ID NO: 82918 - RNA, 19 nt, Artificial Sequence
  Description of Artificial Sequence: Synthetic oligonucleotide
  Sense strand starting at position 967 of SEQ ID NO: 1040
agcuaacuuucugagaaga

SEQ ID NO: 82919 - RNA, 19 nt, Artificial Sequence
  Description of Artificial Sequence: Synthetic oligonucleotide
  Antisense strand to SEQ ID NO: 82838
ucuucucagaaaguuagcu

SEQ ID NO: 82920 - RNA, 19 nt, Artificial Sequence
  Description of Artificial Sequence: Synthetic oligonucleotide
  Sense strand starting at position 965 of SEQ ID NO: 1040
agagcuaacuuucugagaa

SEQ ID NO: 82921 - RNA, 19 nt, Artificial Sequence
  Description of Artificial Sequence: Synthetic oligonucleotide
  Antisense strand to SEQ ID NO: 82840
uucucagaaaguuagcucu

SEQ ID NO: 82922 - RNA, 19 nt, Artificial Sequence
  Description of Artificial Sequence: Synthetic oligonucleotide
  Sense strand starting at position 934 of SEQ ID NO: 1040
gcagguucucccgugucua

SEQ ID NO: 82923 - RNA, 19 nt, Artificial Sequence
  Description of Artificial Sequence: Synthetic oligonucleotide
  Antisense strand to SEQ ID NO: 82842
uagacacgggagaaccugc

SEQ ID NO: 82924 - RNA, 19 nt, Artificial Sequence
  Description of Artificial Sequence: Synthetic oligonucleotide
  Sense strand starting at position 832 of SEQ ID NO: 1040
gagugugacucagcagcau

SEQ ID NO: 82925 - RNA, 19 nt, Artificial Sequence
  Description of Artificial Sequence: Synthetic oligonucleotide
  Antisense strand to SEQ ID NO: 82844
augcugcugagucacacuc

SEQ ID NO: 82926 - RNA, 19 nt, Artificial Sequence
  Description of Artificial Sequence: Synthetic oligonucleotide
  Sense strand starting at position 743 of SEQ ID NO: 1040
cccaaagcucacugcagau

SEQ ID NO: 82927 - RNA, 19 nt, Artificial Sequence
  Description of Artificial Sequence: Synthetic oligonucleotide
  Antisense strand to SEQ ID NO: 82846
aucugcagugagcuuuggg

SEQ ID NO: 82928 - RNA, 19 nt, Artificial Sequence
  Description of Artificial Sequence: Synthetic oligonucleotide
  Sense strand starting at position 213 of SEQ ID NO: 1040
ggcaguaauggaggcuuca

SEQ ID NO: 82929 - RNA, 19 nt, Artificial Sequence
  Description of Artificial Sequence: Synthetic oligonucleotide
  Antisense strand to SEQ ID NO: 82848
ugaagccuccauuacugcc

SEQ ID NO: 82930 - RNA, 19 nt, Artificial Sequence
  Description of Artificial Sequence: Synthetic oligonucleotide
  Sense strand starting at position 186 of SEQ ID NO: 1040
gugcuagcauucucuccau

SEQ ID NO: 82931 - RNA, 19 nt, Artificial Sequence
  Description of Artificial Sequence: Synthetic oligonucleotide
  Antisense strand to SEQ ID NO: 82850
auggagagaaugcuagcac

SEQ ID NO: 82932 - RNA, 19 nt, Artificial Sequence
  Description of Artificial Sequence: Synthetic oligonucleotide
  Sense strand starting at position 3940 of SEQ ID NO: 1041
gggcauuuauguuauauua

SEQ ID NO: 82933 - RNA, 19 nt, Artificial Sequence
  Description of Artificial Sequence: Synthetic oligonucleotide
  Antisense strand to SEQ ID NO: 82852
uaauauaacauaaaugccc

SEQ ID NO: 82934 - RNA, 19 nt, Artificial Sequence
  Description of Artificial Sequence: Synthetic oligonucleotide
  Sense strand starting at position 3916 of SEQ ID NO: 1041
gggcuacugugguuuauuu

SEQ ID NO: 82935 - RNA, 19 nt, Artificial Sequence
  Description of Artificial Sequence: Synthetic oligonucleotide
  Antisense strand to SEQ ID NO: 82854
aaauaaaccacaguagccc

SEQ ID NO: 82936 - RNA, 19 nt, Artificial Sequence
  Description of Artificial Sequence: Synthetic oligonucleotide
  Sense strand starting at position 3244 of SEQ ID NO: 1041
ucaccuucccaaugaugga

SEQ ID NO: 82937 - RNA, 19 nt, Artificial Sequence
  Description of Artificial Sequence: Synthetic oligonucleotide
  Antisense strand to SEQ ID NO: 82856
uccaucauugggaagguga

SEQ ID NO: 82938 - RNA, 19 nt, Artificial Sequence
  Description of Artificial Sequence: Synthetic oligonucleotide
  Sense strand starting at position 3096 of SEQ ID NO: 1041
gugagaaccuaauuacuuu

SEQ ID NO: 82939 - RNA, 19 nt, Artificial Sequence
  Description of Artificial Sequence: Synthetic oligonucleotide
  Antisense strand to SEQ ID NO: 82858
aaaguaauuagguucucac

SEQ ID NO: 82940 - RNA, 19 nt, Artificial Sequence
  Description of Artificial Sequence: Synthetic oligonucleotide
  Sense strand starting at position 3083 of SEQ ID NO: 1041
uguccaacaagcugugaga

SEQ ID NO: 82941 - RNA, 19 nt, Artificial Sequence
  Description of Artificial Sequence: Synthetic oligonucleotide
  Antisense strand to SEQ ID NO: 82860
ucucacagcuuguuggaca

SEQ ID NO: 82942 - RNA, 19 nt, Artificial Sequence
  Description of Artificial Sequence: Synthetic oligonucleotide
  Sense strand starting at position 3074 of SEQ ID NO: 1041
gccuauggcuguccaacaa

SEQ ID NO: 82943 - RNA, 19 nt, Artificial Sequence
  Description of Artificial Sequence: Synthetic oligonucleotide
  Antisense strand to SEQ ID NO: 82862
uuguuggacagccauaggc

SEQ ID NO: 82944 - RNA, 19 nt, Artificial Sequence
  Description of Artificial Sequence: Synthetic oligonucleotide
  Sense strand starting at position 3042 of SEQ ID NO: 1041
aggccugagaugugcaaau

SEQ ID NO: 82945 - RNA, 19 nt, Artificial Sequence
  Description of Artificial Sequence: Synthetic oligonucleotide
  Antisense strand to SEQ ID NO: 82864
auuugcacaucucaggccu

SEQ ID NO: 82946 - RNA, 19 nt, Artificial Sequence
  Description of Artificial Sequence: Synthetic oligonucleotide
  Sense strand starting at position 3012 of SEQ ID NO: 1041
ggcucuauaaucugaggcu

SEQ ID NO: 82947 - RNA, 19 nt, Artificial Sequence
  Description of Artificial Sequence: Synthetic oligonucleotide
  Antisense strand to SEQ ID NO: 82866
agccucagauuauagagcc

SEQ ID NO: 82948 - RNA, 19 nt, Artificial Sequence
  Description of Artificial Sequence: Synthetic oligonucleotide
  Sense strand starting at position 2827 of SEQ ID NO: 1041
uuacgaugcuguuuagaaa

SEQ ID NO: 82949 - RNA, 19 nt, Artificial Sequence
  Description of Artificial Sequence: Synthetic oligonucleotide
  Antisense strand to SEQ ID NO: 82868
uuucuaaacagcaucguaa

SEQ ID NO: 82950 - RNA, 19 nt, Artificial Sequence
  Description of Artificial Sequence: Synthetic oligonucleotide
  Sense strand starting at position 2587 of SEQ ID NO: 1041
cccacuguccauuaucagu

SEQ ID NO: 82951 - RNA, 19 nt, Artificial Sequence
  Description of Artificial Sequence: Synthetic oligonucleotide
  Antisense strand to SEQ ID NO: 82870
acugauaauggacaguggg

SEQ ID NO: 82952 - RNA, 19 nt, Artificial Sequence
  Description of Artificial Sequence: Synthetic oligonucleotide
  Sense strand starting at position 2566 of SEQ ID NO: 1041
ugaguuaggcauuaguaau

SEQ ID NO: 82953 - RNA, 19 nt, Artificial Sequence
  Description of Artificial Sequence: Synthetic oligonucleotide
  Antisense strand to SEQ ID NO: 82872
auuacuaaugccuaacuca

SEQ ID NO: 82954 - RNA, 19 nt, Artificial Sequence
  Description of Artificial Sequence: Synthetic oligonucleotide
  Sense strand starting at position 2563 of SEQ ID NO: 1041
cuaugaguuaggcauuagu

SEQ ID NO: 82955 - RNA, 19 nt, Artificial Sequence
  Description of Artificial Sequence: Synthetic oligonucleotide
  Antisense strand to SEQ ID NO: 82874
acuaaugccuaacucauag

SEQ ID NO: 82956 - RNA, 19 nt, Artificial Sequence
  Description of Artificial Sequence: Synthetic oligonucleotide
  Sense strand starting at position 2404 of SEQ ID NO: 1041
ggaccuuuccuucgcucau

SEQ ID NO: 82957 - RNA, 19 nt, Artificial Sequence
  Description of Artificial Sequence: Synthetic oligonucleotide
  Antisense strand to SEQ ID NO: 82876
augagcgaaggaaaggucc

SEQ ID NO: 82958 - RNA, 19 nt, Artificial Sequence
  Description of Artificial Sequence: Synthetic oligonucleotide
  Sense strand starting at position 1114 of SEQ ID NO: 1041
gcaucaauuucgccucgga

SEQ ID NO: 82959 - RNA, 19 nt, Artificial Sequence
  Description of Artificial Sequence: Synthetic oligonucleotide
  Antisense strand to SEQ ID NO: 82878
uccgaggcgaaauugaugc

SEQ ID NO: 82960 - RNA, 19 nt, Artificial Sequence
  Description of Artificial Sequence: Synthetic oligonucleotide
  Sense strand starting at position 1103 of SEQ ID NO: 1041
gcaaaugcgaggcaucaau

SEQ ID NO: 82961 - RNA, 19 nt, Artificial Sequence
  Description of Artificial Sequence: Synthetic oligonucleotide
  Antisense strand to SEQ ID NO: 82880
auugaugccucgcauuugc

SEQ ID NO: 82962 - RNA, 19 nt, Artificial Sequence
  Description of Artificial Sequence: Synthetic oligonucleotide
  Sense strand starting at position 1071 of SEQ ID NO: 1041
guaugagaaacgcagcaau

SEQ ID NO: 82963 - RNA, 19 nt, Artificial Sequence
  Description of Artificial Sequence: Synthetic oligonucleotide
  Antisense strand to SEQ ID NO: 82882
auugcugcguuucucauac

SEQ ID NO: 82964 - RNA, 19 nt, Artificial Sequence
  Description of Artificial Sequence: Synthetic oligonucleotide
  Sense strand starting at position 1060 of SEQ ID NO: 1041
ggaguucaaguguaugaga

SEQ ID NO: 82965 - RNA, 19 nt, Artificial Sequence
  Description of Artificial Sequence: Synthetic oligonucleotide
  Antisense strand to SEQ ID NO: 82884
ucucauacacuugaacucc

SEQ ID NO: 82966 - RNA, 19 nt, Artificial Sequence
  Description of Artificial Sequence: Synthetic oligonucleotide
  Sense strand starting at position 1003 of SEQ ID NO: 1041
caauuagaucacugcguuu

SEQ ID NO: 82967 - RNA, 19 nt, Artificial Sequence
  Description of Artificial Sequence: Synthetic oligonucleotide
  Antisense strand to SEQ ID NO: 82886
aaacgcagugaucuaauug

SEQ ID NO: 82968 - RNA, 19 nt, Artificial Sequence
  Description of Artificial Sequence: Synthetic oligonucleotide
  Sense strand starting at position 945 of SEQ ID NO: 1041
ggaacacuuuaacaguaaa

SEQ ID NO: 82969 - RNA, 19 nt, Artificial Sequence
  Description of Artificial Sequence: Synthetic oligonucleotide
  Antisense strand to SEQ ID NO: 82888
uuuacuguuaaaguguucc

SEQ ID NO: 82970 - RNA, 19 nt, Artificial Sequence
  Description of Artificial Sequence: Synthetic oligonucleotide
  Sense strand starting at position 758 of SEQ ID NO: 1041
agaacuuggaccuggugau

SEQ ID NO: 82971 - RNA, 19 nt, Artificial Sequence
  Description of Artificial Sequence: Synthetic oligonucleotide
  Antisense strand to SEQ ID NO: 82890
aucaccagguccaaguucu

SEQ ID NO: 82972 - RNA, 19 nt, Artificial Sequence
  Description of Artificial Sequence: Synthetic oligonucleotide
  Sense strand starting at position 692 of SEQ ID NO: 1041
guguucgaugaauaaggaa

SEQ ID NO: 82973 - RNA, 19 nt, Artificial Sequence
  Description of Artificial Sequence: Synthetic oligonucleotide
  Antisense strand to SEQ ID NO: 82892
uuccuuauucaucgaacac

SEQ ID NO: 82974 - RNA, 19 nt, Artificial Sequence
  Description of Artificial Sequence: Synthetic oligonucleotide
  Sense strand starting at position 688 of SEQ ID NO: 1041
auagguguucgaugaauaa

SEQ ID NO: 82975 - RNA, 19 nt, Artificial Sequence
  Description of Artificial Sequence: Synthetic oligonucleotide
  Antisense strand to SEQ ID NO: 82894
uuauucaucgaacaccuau

SEQ ID NO: 82976 - RNA, 19 nt, Artificial Sequence
  Description of Artificial Sequence: Synthetic oligonucleotide
  Sense strand starting at position 685 of SEQ ID NO: 1041
acaauagguguucgaugaa

SEQ ID NO: 82977 - RNA, 19 nt, Artificial Sequence
  Description of Artificial Sequence: Synthetic oligonucleotide
  Antisense strand to SEQ ID NO: 82896
uucaucgaacaccuauugu

SEQ ID NO: 82978 - RNA, 19 nt, Artificial Sequence
  Description of Artificial Sequence: Synthetic oligonucleotide
  Sense strand starting at position 684 of SEQ ID NO: 1041
cacaauagguguucgauga

SEQ ID NO: 82979 - RNA, 19 nt, Artificial Sequence
  Description of Artificial Sequence: Synthetic oligonucleotide
  Antisense strand to SEQ ID NO: 82898
ucaucgaacaccuauugug

SEQ ID NO: 82980 - RNA, 19 nt, Artificial Sequence
  Description of Artificial Sequence: Synthetic oligonucleotide
  Sense strand starting at position 666 of SEQ ID NO: 1041
gcaugugaauuacuagaac

SEQ ID NO: 82981 - RNA, 19 nt, Artificial Sequence
  Description of Artificial Sequence: Synthetic oligonucleotide
  Antisense strand to SEQ ID NO: 82900
guucuaguaauucacaugc

SEQ ID NO: 82982 - RNA, 19 nt, Artificial Sequence
  Description of Artificial Sequence: Synthetic oligonucleotide
  Sense strand starting at position 659 of SEQ ID NO: 1041
auguguugcaugugaauua

SEQ ID NO: 82983 - RNA, 19 nt, Artificial Sequence
  Description of Artificial Sequence: Synthetic oligonucleotide
  Antisense strand to SEQ ID NO: 82902
uaauucacaugcaacacau

SEQ ID NO: 82984 - RNA, 19 nt, Artificial Sequence
  Description of Artificial Sequence: Synthetic oligonucleotide
  Sense strand starting at position 657 of SEQ ID NO: 1041
ggauguguugcaugugaau

SEQ ID NO: 82985 - RNA, 19 nt, Artificial Sequence
  Description of Artificial Sequence: Synthetic oligonucleotide
  Antisense strand to SEQ ID NO: 82904
auucacaugcaacacaucc

SEQ ID NO: 82986 - RNA, 19 nt, Artificial Sequence
  Description of Artificial Sequence: Synthetic oligonucleotide
  Sense strand starting at position 629 of SEQ ID NO: 1041
cacucccaggguugugaua

SEQ ID NO: 82987 - RNA, 19 nt, Artificial Sequence
  Description of Artificial Sequence: Synthetic oligonucleotide
  Antisense strand to SEQ ID NO: 82906
uaucacaacccugggagug

SEQ ID NO: 82988 - RNA, 19 nt, Artificial Sequence
  Description of Artificial Sequence: Synthetic oligonucleotide
  Sense strand starting at position 601 of SEQ ID NO: 1041
ccucaucugcauggagaua

SEQ ID NO: 82989 - RNA, 19 nt, Artificial Sequence
  Description of Artificial Sequence: Synthetic oligonucleotide
  Antisense strand to SEQ ID NO: 82908
uaucuccaugcagaugagg

SEQ ID NO: 82990 - RNA, 19 nt, Artificial Sequence
  Description of Artificial Sequence: Synthetic oligonucleotide
  Sense strand starting at position 600 of SEQ ID NO: 1041
uccucaucugcauggagau

SEQ ID NO: 82991 - RNA, 19 nt, Artificial Sequence
  Description of Artificial Sequence: Synthetic oligonucleotide
  Antisense strand to SEQ ID NO: 82910
aucuccaugcagaugagga

SEQ ID NO: 82992 - RNA, 19 nt, Artificial Sequence
  Description of Artificial Sequence: Synthetic oligonucleotide
  Sense strand starting at position 477 of SEQ ID NO: 1041
cugccugggagagguauua

SEQ ID NO: 82993 - RNA, 19 nt, Artificial Sequence
  Description of Artificial Sequence: Synthetic oligonucleotide
  Antisense strand to SEQ ID NO: 82912
uaauaccucucccaggcag

SEQ ID NO: 82994 - RNA, 19 nt, Artificial Sequence
  Description of Artificial Sequence: Synthetic oligonucleotide
  Sense strand starting at position 470 of SEQ ID NO: 1041
gagcuugcugccugggaga

SEQ ID NO: 82995 - RNA, 19 nt, Artificial Sequence
  Description of Artificial Sequence: Synthetic oligonucleotide
  Antisense strand to SEQ ID NO: 82914
ucucccaggcagcaagcuc

SEQ ID NO: 82996 - RNA, 19 nt, Artificial Sequence
  Description of Artificial Sequence: Synthetic oligonucleotide
  Sense strand starting at position 317 of SEQ ID NO: 1041
ggacuacucugcccugaca

SEQ ID NO: 82997 - RNA, 19 nt, Artificial Sequence
  Description of Artificial Sequence: Synthetic oligonucleotide
  Antisense strand to SEQ ID NO: 82916
ugucagggcagaguagucc

SEQ ID NO: 82998 - RNA, 19 nt, Artificial Sequence
  Description of Artificial Sequence: Synthetic oligonucleotide
  Sense strand starting at position 161 of SEQ ID NO: 1041
uggguaaauugagucucaa

SEQ ID NO: 82999 - RNA, 19 nt, Artificial Sequence
  Description of Artificial Sequence: Synthetic oligonucleotide
  Antisense strand to SEQ ID NO: 82918
uugagacucaauuuaccca

SEQ ID NO: 83000 - RNA, 19 nt, Artificial Sequence
  Description of Artificial Sequence: Synthetic oligonucleotide
  Sense strand starting at position 152 of SEQ ID NO: 1041
cuguacagauggguaaauu

SEQ ID NO: 83001 - RNA, 19 nt, Artificial Sequence
  Description of Artificial Sequence: Synthetic oligonucleotide
  Antisense strand to SEQ ID NO: 82920
aauuuacccaucuguacag

SEQ ID NO: 83002 - RNA, 19 nt, Artificial Sequence
  Description of Artificial Sequence: Synthetic oligonucleotide
  Sense strand starting at position 122 of SEQ ID NO: 1041
gaucuuuaguugguacuau

SEQ ID NO: 83003 - RNA, 19 nt, Artificial Sequence
  Description of Artificial Sequence: Synthetic oligonucleotide
  Antisense strand to SEQ ID NO: 82922
auaguaccaacuaaagauc

SEQ ID NO: 83004 - RNA, 19 nt, Artificial Sequence
  Description of Artificial Sequence: Synthetic oligonucleotide
  Sense strand starting at position 121 of SEQ ID NO: 1041
agaucuuuaguugguacua

SEQ ID NO: 83005 - RNA, 19 nt, Artificial Sequence
  Description of Artificial Sequence: Synthetic oligonucleotide
  Antisense strand to SEQ ID NO: 82924
uaguaccaacuaaagaucu

SEQ ID NO: 83006 - RNA, 19 nt, Artificial Sequence
  Description of Artificial Sequence: Synthetic oligonucleotide
  Sense strand starting at position 118 of SEQ ID NO: 1041
gacagaucuuuaguuggua

SEQ ID NO: 83007 - RNA, 19 nt, Artificial Sequence
  Description of Artificial Sequence: Synthetic oligonucleotide
  Antisense strand to SEQ ID NO: 82926
uaccaacuaaagaucuguc

SEQ ID NO: 83008 - RNA, 19 nt, Artificial Sequence
  Description of Artificial Sequence: Synthetic oligonucleotide
  Sense strand starting at position 66 of SEQ ID NO: 1041
aagcauuuauggugaauga

SEQ ID NO: 83009 - RNA, 19 nt, Artificial Sequence
  Description of Artificial Sequence: Synthetic oligonucleotide
  Antisense strand to SEQ ID NO: 82928
ucauucaccauaaaugcuu

SEQ ID NO: 83010 - RNA, 19 nt, Artificial Sequence
  Description of Artificial Sequence: Synthetic oligonucleotide
  Sense strand starting at position 64 of SEQ ID NO: 1041
uuaagcauuuauggugaau

SEQ ID NO: 83011 - RNA, 19 nt, Artificial Sequence
  Description of Artificial Sequence: Synthetic oligonucleotide
  Antisense strand to SEQ ID NO: 82930
auucaccauaaaugcuuaa

SEQ ID NO: 83012 - RNA, 19 nt, Artificial Sequence
  Description of Artificial Sequence: Synthetic oligonucleotide
  Sense strand starting at position 3776 of SEQ ID NO: 1042
ccaucuguggaugggauua

SEQ ID NO: 83013 - RNA, 19 nt, Artificial Sequence
  Description of Artificial Sequence: Synthetic oligonucleotide
  Antisense strand to SEQ ID NO: 82932
uaaucccauccacagaugg

SEQ ID NO: 83014 - RNA, 19 nt, Artificial Sequence
  Description of Artificial Sequence: Synthetic oligonucleotide
  Sense strand starting at position 3690 of SEQ ID NO: 1042
uacggucugggauaaauuc

SEQ ID NO: 83015 - RNA, 19 nt, Artificial Sequence
  Description of Artificial Sequence: Synthetic oligonucleotide
  Antisense strand to SEQ ID NO: 82934
gaauuuaucccagaccgua

SEQ ID NO: 83016 - RNA, 19 nt, Artificial Sequence
  Description of Artificial Sequence: Synthetic oligonucleotide
  Sense strand starting at position 3687 of SEQ ID NO: 1042
gucuacggucugggauaaa

SEQ ID NO: 83017 - RNA, 19 nt, Artificial Sequence
  Description of Artificial Sequence: Synthetic oligonucleotide
  Antisense strand to SEQ ID NO: 82936
uuuaucccagaccguagac

SEQ ID NO: 83018 - RNA, 19 nt, Artificial Sequence
  Description of Artificial Sequence: Synthetic oligonucleotide
  Sense strand starting at position 3685 of SEQ ID NO: 1042
aggucuacggucugggaua

SEQ ID NO: 83019 - RNA, 19 nt, Artificial Sequence
  Description of Artificial Sequence: Synthetic oligonucleotide
  Antisense strand to SEQ ID NO: 82938
uaucccagaccguagaccu

SEQ ID NO: 83020 - RNA, 19 nt, Artificial Sequence
  Description of Artificial Sequence: Synthetic oligonucleotide
  Sense strand starting at position 3662 of SEQ ID NO: 1042
cgugaagucuuuccauacu

SEQ ID NO: 83021 - RNA, 19 nt, Artificial Sequence
  Description of Artificial Sequence: Synthetic oligonucleotide
  Antisense strand to SEQ ID NO: 82940
aguauggaaagacuucacg

SEQ ID NO: 83022 - RNA, 19 nt, Artificial Sequence
  Description of Artificial Sequence: Synthetic oligonucleotide
  Sense strand starting at position 3640 of SEQ ID NO: 1042
gggucuacuuucuuaagag

SEQ ID NO: 83023 - RNA, 19 nt, Artificial Sequence
  Description of Artificial Sequence: Synthetic oligonucleotide
  Antisense strand to SEQ ID NO: 82942
cucuuaagaaaguagaccc

SEQ ID NO: 83024 - RNA, 19 nt, Artificial Sequence
  Description of Artificial Sequence: Synthetic oligonucleotide
  Sense strand starting at position 3639 of SEQ ID NO: 1042
ugggucuacuuucuuaaga

SEQ ID NO: 83025 - RNA, 19 nt, Artificial Sequence
  Description of Artificial Sequence: Synthetic oligonucleotide
  Antisense strand to SEQ ID NO: 82944
ucuuaagaaaguagaccca

SEQ ID NO: 83026 - RNA, 19 nt, Artificial Sequence
  Description of Artificial Sequence: Synthetic oligonucleotide
  Sense strand starting at position 3630 of SEQ ID NO: 1042
gccauaaugugggucuacu

SEQ ID NO: 83027 - RNA, 19 nt, Artificial Sequence
  Description of Artificial Sequence: Synthetic oligonucleotide
  Antisense strand to SEQ ID NO: 82946
aguagacccacauuauggc

SEQ ID NO: 83028 - RNA, 19 nt, Artificial Sequence
  Description of Artificial Sequence: Synthetic oligonucleotide
  Sense strand starting at position 3311 of SEQ ID NO: 1042
gaaacaaugugggucuacu

SEQ ID NO: 83029 - RNA, 19 nt, Artificial Sequence
  Description of Artificial Sequence: Synthetic oligonucleotide
  Antisense strand to SEQ ID NO: 82948
aguagacccacauuguuuc

SEQ ID NO: 83030 - RNA, 19 nt, Artificial Sequence
  Description of Artificial Sequence: Synthetic oligonucleotide
  Sense strand starting at position 3225 of SEQ ID NO: 1042
aaugcuugcguugcuuaaa

SEQ ID NO: 83031 - RNA, 19 nt, Artificial Sequence
  Description of Artificial Sequence: Synthetic oligonucleotide
  Antisense strand to SEQ ID NO: 82950
uuuaagcaacgcaagcauu

SEQ ID NO: 83032 - RNA, 19 nt, Artificial Sequence
  Description of Artificial Sequence: Synthetic oligonucleotide
  Sense strand starting at position 3150 of SEQ ID NO: 1042
agcacaaguucuucucaga

SEQ ID NO: 83033 - RNA, 19 nt, Artificial Sequence
  Description of Artificial Sequence: Synthetic oligonucleotide
  Antisense strand to SEQ ID NO: 82952
ucugagaagaacuugugcu

SEQ ID NO: 83034 - RNA, 19 nt, Artificial Sequence
  Description of Artificial Sequence: Synthetic oligonucleotide
  Sense strand starting at position 3114 of SEQ ID NO: 1042
auuccaagcaguggagauu

SEQ ID NO: 83035 - RNA, 19 nt, Artificial Sequence
  Description of Artificial Sequence: Synthetic oligonucleotide
  Antisense strand to SEQ ID NO: 82954
aaucuccacugcuuggaau

SEQ ID NO: 83036 - RNA, 19 nt, Artificial Sequence
  Description of Artificial Sequence: Synthetic oligonucleotide
  Sense strand starting at position 2946 of SEQ ID NO: 1042
gguugagacuccucaggga

SEQ ID NO: 83037 - RNA, 19 nt, Artificial Sequence
  Description of Artificial Sequence: Synthetic oligonucleotide
  Antisense strand to SEQ ID NO: 82956
ucccugaggagucucaacc

SEQ ID NO: 83038 - RNA, 19 nt, Artificial Sequence
  Description of Artificial Sequence: Synthetic oligonucleotide
  Sense strand starting at position 2697 of SEQ ID NO: 1042
cucugagguggguaauaca

SEQ ID NO: 83039 - RNA, 19 nt, Artificial Sequence
  Description of Artificial Sequence: Synthetic oligonucleotide
  Antisense strand to SEQ ID NO: 82958
uguauuacccaccucagag

SEQ ID NO: 83040 - RNA, 19 nt, Artificial Sequence
  Description of Artificial Sequence: Synthetic oligonucleotide
  Sense strand starting at position 2695 of SEQ ID NO: 1042
aacucugagguggguaaua

SEQ ID NO: 83041 - RNA, 19 nt, Artificial Sequence
  Description of Artificial Sequence: Synthetic oligonucleotide
  Antisense strand to SEQ ID NO: 82960
uauuacccaccucagaguu

SEQ ID NO: 83042 - RNA, 19 nt, Artificial Sequence
  Description of Artificial Sequence: Synthetic oligonucleotide
  Sense strand starting at position 2693 of SEQ ID NO: 1042
acaacucugagguggguaa

SEQ ID NO: 83043 - RNA, 19 nt, Artificial Sequence
  Description of Artificial Sequence: Synthetic oligonucleotide
  Antisense strand to SEQ ID NO: 82962
uuacccaccucagaguugu

SEQ ID NO: 83044 - RNA, 19 nt, Artificial Sequence
  Description of Artificial Sequence: Synthetic oligonucleotide
  Sense strand starting at position 2495 of SEQ ID NO: 1042
ucaccuguuugaguaaauc

SEQ ID NO: 83045 - RNA, 19 nt, Artificial Sequence
  Description of Artificial Sequence: Synthetic oligonucleotide
  Antisense strand to SEQ ID NO: 82964
gauuuacucaaacagguga

SEQ ID NO: 83046 - RNA, 19 nt, Artificial Sequence
  Description of Artificial Sequence: Synthetic oligonucleotide
  Sense strand starting at position 2492 of SEQ ID NO: 1042
gagucaccuguuugaguaa

SEQ ID NO: 83047 - RNA, 19 nt, Artificial Sequence
  Description of Artificial Sequence: Synthetic oligonucleotide
  Antisense strand to SEQ ID NO: 82966
uuacucaaacaggugacuc

SEQ ID NO: 83048 - RNA, 19 nt, Artificial Sequence
  Description of Artificial Sequence: Synthetic oligonucleotide
  Sense strand starting at position 2491 of SEQ ID NO: 1042
ggagucaccuguuugagua

SEQ ID NO: 83049 - RNA, 19 nt, Artificial Sequence
  Description of Artificial Sequence: Synthetic oligonucleotide
  Antisense strand to SEQ ID NO: 82968
uacucaaacaggugacucc

SEQ ID NO: 83050 - RNA, 19 nt, Artificial Sequence
  Description of Artificial Sequence: Synthetic oligonucleotide
  Sense strand starting at position 2396 of SEQ ID NO: 1042
acuggaguauuacaaagaa

SEQ ID NO: 83051 - RNA, 19 nt, Artificial Sequence
  Description of Artificial Sequence: Synthetic oligonucleotide
  Antisense strand to SEQ ID NO: 82970
uucuuuguaauacuccagu

SEQ ID NO: 83052 - RNA, 19 nt, Artificial Sequence
  Description of Artificial Sequence: Synthetic oligonucleotide
  Sense strand starting at position 2197 of SEQ ID NO: 1042
gcuuaucugcugggacuaa

SEQ ID NO: 83053 - RNA, 19 nt, Artificial Sequence
  Description of Artificial Sequence: Synthetic oligonucleotide
  Antisense strand to SEQ ID NO: 82972
uuagucccagcagauaagc

SEQ ID NO: 83054 - RNA, 19 nt, Artificial Sequence
  Description of Artificial Sequence: Synthetic oligonucleotide
  Sense strand starting at position 2196 of SEQ ID NO: 1042
ugcuuaucugcugggacua

SEQ ID NO: 83055 - RNA, 19 nt, Artificial Sequence
  Description of Artificial Sequence: Synthetic oligonucleotide
  Antisense strand to SEQ ID NO: 82974
uagucccagcagauaagca

SEQ ID NO: 83056 - RNA, 19 nt, Artificial Sequence
  Description of Artificial Sequence: Synthetic oligonucleotide
  Sense strand starting at position 2164 of SEQ ID NO: 1042
ggcuucggccggguuuaau

SEQ ID NO: 83057 - RNA, 19 nt, Artificial Sequence
  Description of Artificial Sequence: Synthetic oligonucleotide
  Antisense strand to SEQ ID NO: 82976
auuaaacccggccgaagcc

SEQ ID NO: 83058 - RNA, 19 nt, Artificial Sequence
  Description of Artificial Sequence: Synthetic oligonucleotide
  Sense strand starting at position 2037 of SEQ ID NO: 1042
cgcacucacggagaguaaa

SEQ ID NO: 83059 - RNA, 19 nt, Artificial Sequence
  Description of Artificial Sequence: Synthetic oligonucleotide
  Antisense strand to SEQ ID NO: 82978
uuuacucuccgugagugcg

SEQ ID NO: 83060 - RNA, 19 nt, Artificial Sequence
  Description of Artificial Sequence: Synthetic oligonucleotide
  Sense strand starting at position 1545 of SEQ ID NO: 1042
cuccgaauccaagaagcaa

SEQ ID NO: 83061 - RNA, 19 nt, Artificial Sequence
  Description of Artificial Sequence: Synthetic oligonucleotide
  Antisense strand to SEQ ID NO: 82980
uugcuucuuggauucggag

SEQ ID NO: 83062 - RNA, 19 nt, Artificial Sequence
  Description of Artificial Sequence: Synthetic oligonucleotide
  Sense strand starting at position 1491 of SEQ ID NO: 1042
agugaaugccugugauaaa

SEQ ID NO: 83063 - RNA, 19 nt, Artificial Sequence
  Description of Artificial Sequence: Synthetic oligonucleotide
  Antisense strand to SEQ ID NO: 82982
uuuaucacaggcauucacu

SEQ ID NO: 83064 - RNA, 19 nt, Artificial Sequence
  Description of Artificial Sequence: Synthetic oligonucleotide
  Sense strand starting at position 1168 of SEQ ID NO: 1042
uggucucacccguaagaug

SEQ ID NO: 83065 - RNA, 19 nt, Artificial Sequence
  Description of Artificial Sequence: Synthetic oligonucleotide
  Antisense strand to SEQ ID NO: 82984
caucuuacgggugagacca

SEQ ID NO: 83066 - RNA, 19 nt, Artificial Sequence
  Description of Artificial Sequence: Synthetic oligonucleotide
  Sense strand starting at position 1166 of SEQ ID NO: 1042
aguggucucacccguaaga

SEQ ID NO: 83067 - RNA, 19 nt, Artificial Sequence
  Description of Artificial Sequence: Synthetic oligonucleotide
  Antisense strand to SEQ ID NO: 82986
ucuuacgggugagaccacu

SEQ ID NO: 83068 - RNA, 19 nt, Artificial Sequence
  Description of Artificial Sequence: Synthetic oligonucleotide
  Sense strand starting at position 1059 of SEQ ID NO: 1042
ggaaucgucagcugacaag

SEQ ID NO: 83069 - RNA, 19 nt, Artificial Sequence
  Description of Artificial Sequence: Synthetic oligonucleotide
  Antisense strand to SEQ ID NO: 82988
cuugucagcugacgauucc

SEQ ID NO: 83070 - RNA, 19 nt, Artificial Sequence
  Description of Artificial Sequence: Synthetic oligonucleotide
  Sense strand starting at position 706 of SEQ ID NO: 1042
ggaguauggucccuuccca

SEQ ID NO: 83071 - RNA, 19 nt, Artificial Sequence
  Description of Artificial Sequence: Synthetic oligonucleotide
  Antisense strand to SEQ ID NO: 82990
ugggaagggaccauacucc

SEQ ID NO: 83072 - RNA, 19 nt, Artificial Sequence
  Description of Artificial Sequence: Synthetic oligonucleotide
  Sense strand starting at position 694 of SEQ ID NO: 1042
gugugacacccuggaguau

SEQ ID NO: 83073 - RNA, 19 nt, Artificial Sequence
  Description of Artificial Sequence: Synthetic oligonucleotide
  Antisense strand to SEQ ID NO: 82992
auacuccagggugucacac

SEQ ID NO: 83074 - RNA, 19 nt, Artificial Sequence
  Description of Artificial Sequence: Synthetic oligonucleotide
  Sense strand starting at position 683 of SEQ ID NO: 1042
gaagccucccugugugaca

SEQ ID NO: 83075 - RNA, 19 nt, Artificial Sequence
  Description of Artificial Sequence: Synthetic oligonucleotide
  Antisense strand to SEQ ID NO: 82994
ugucacacagggaggcuuc

SEQ ID NO: 83076 - RNA, 19 nt, Artificial Sequence
  Description of Artificial Sequence: Synthetic oligonucleotide
  Sense strand starting at position 257 of SEQ ID NO: 1042
ccuccuugaaugggucaga

SEQ ID NO: 83077 - RNA, 19 nt, Artificial Sequence
  Description of Artificial Sequence: Synthetic oligonucleotide
  Antisense strand to SEQ ID NO: 82996
ucugacccauucaaggagg

SEQ ID NO: 83078 - RNA, 19 nt, Artificial Sequence
  Description of Artificial Sequence: Synthetic oligonucleotide
  Sense strand starting at position 250 of SEQ ID NO: 1042
cugagacccuccuugaaug

SEQ ID NO: 83079 - RNA, 19 nt, Artificial Sequence
  Description of Artificial Sequence: Synthetic oligonucleotide
  Antisense strand to SEQ ID NO: 82998
cauucaaggagggucucag

SEQ ID NO: 83080 - RNA, 19 nt, Artificial Sequence
  Description of Artificial Sequence: Synthetic oligonucleotide
  Sense strand starting at position 233 of SEQ ID NO: 1042
gcugcaaucccugaagucu

SEQ ID NO: 83081 - RNA, 19 nt, Artificial Sequence
  Description of Artificial Sequence: Synthetic oligonucleotide
  Antisense strand to SEQ ID NO: 83000
agacuucagggauugcagc

SEQ ID NO: 83082 - RNA, 19 nt, Artificial Sequence
  Description of Artificial Sequence: Synthetic oligonucleotide
  Sense strand starting at position 126 of SEQ ID NO: 1042
ugaucuguggaaugccaaa

SEQ ID NO: 83083 - RNA, 19 nt, Artificial Sequence
  Description of Artificial Sequence: Synthetic oligonucleotide
  Antisense strand to SEQ ID NO: 83002
uuuggcauuccacagauca

SEQ ID NO: 83084 - RNA, 19 nt, Artificial Sequence
  Description of Artificial Sequence: Synthetic oligonucleotide
  Sense strand starting at position 121 of SEQ ID NO: 1042
augucugaucuguggaaug

SEQ ID NO: 83085 - RNA, 19 nt, Artificial Sequence
  Description of Artificial Sequence: Synthetic oligonucleotide
  Antisense strand to SEQ ID NO: 83004
cauuccacagaucagacau

SEQ ID NO: 83086 - RNA, 19 nt, Artificial Sequence
  Description of Artificial Sequence: Synthetic oligonucleotide
  Sense strand starting at position 120 of SEQ ID NO: 1042
aaugucugaucuguggaau

SEQ ID NO: 83087 - RNA, 19 nt, Artificial Sequence
  Description of Artificial Sequence: Synthetic oligonucleotide
  Antisense strand to SEQ ID NO: 83006
auuccacagaucagacauu

SEQ ID NO: 83088 - RNA, 19 nt, Artificial Sequence
  Description of Artificial Sequence: Synthetic oligonucleotide
  Sense strand starting at position 110 of SEQ ID NO: 1042
agagguucucaaugucuga

SEQ ID NO: 83089 - RNA, 19 nt, Artificial Sequence
  Description of Artificial Sequence: Synthetic oligonucleotide
  Antisense strand to SEQ ID NO: 83008
ucagacauugagaaccucu

SEQ ID NO: 83090 - RNA, 19 nt, Artificial Sequence
  Description of Artificial Sequence: Synthetic oligonucleotide
  Sense strand starting at position 59 of SEQ ID NO: 1042
cuggguuucuuacucuaaa

SEQ ID NO: 83091 - RNA, 19 nt, Artificial Sequence
  Description of Artificial Sequence: Synthetic oligonucleotide
  Antisense strand to SEQ ID NO: 83010
uuuagaguaagaaacccag

SEQ ID NO: 83092 - RNA, 19 nt, Artificial Sequence
  Description of Artificial Sequence: Synthetic oligonucleotide
  Sense strand starting at position 3975 of SEQ ID NO: 1039
acauuauguuaguugaaag

SEQ ID NO: 83093 - RNA, 19 nt, Artificial Sequence
  Description of Artificial Sequence: Synthetic oligonucleotide
  Antisense strand to SEQ ID NO: 83012
cuuucaacuaacauaaugu

SEQ ID NO: 83094 - RNA, 19 nt, Artificial Sequence
  Description of Artificial Sequence: Synthetic oligonucleotide
  Sense strand starting at position 3948 of SEQ ID NO: 1039
cuacuacuacguggaugaa

SEQ ID NO: 83095 - RNA, 19 nt, Artificial Sequence
  Description of Artificial Sequence: Synthetic oligonucleotide
  Antisense strand to SEQ ID NO: 83014
uucauccacguaguaguag

SEQ ID NO: 83096 - RNA, 19 nt, Artificial Sequence
  Description of Artificial Sequence: Synthetic oligonucleotide
  Sense strand starting at position 3918 of SEQ ID NO: 1039
uuacucagccgugaagagu

SEQ ID NO: 83097 - RNA, 19 nt, Artificial Sequence
  Description of Artificial Sequence: Synthetic oligonucleotide
  Antisense strand to SEQ ID NO: 83016
acucuucacggcugaguaa

SEQ ID NO: 83098 - RNA, 19 nt, Artificial Sequence
  Description of Artificial Sequence: Synthetic oligonucleotide
  Sense strand starting at position 3917 of SEQ ID NO: 1039
auuacucagccgugaagag

SEQ ID NO: 83099 - RNA, 19 nt, Artificial Sequence
  Description of Artificial Sequence: Synthetic oligonucleotide
  Antisense strand to SEQ ID NO: 83018
cucuucacggcugaguaau

SEQ ID NO: 83100 - RNA, 19 nt, Artificial Sequence
  Description of Artificial Sequence: Synthetic oligonucleotide
  Sense strand starting at position 3915 of SEQ ID NO: 1039
auauuacucagccgugaag

SEQ ID NO: 83101 - RNA, 19 nt, Artificial Sequence
  Description of Artificial Sequence: Synthetic oligonucleotide
  Antisense strand to SEQ ID NO: 83020
cuucacggcugaguaauau

SEQ ID NO: 83102 - RNA, 19 nt, Artificial Sequence
  Description of Artificial Sequence: Synthetic oligonucleotide
  Sense strand starting at position 3900 of SEQ ID NO: 1039
gcaguaugcaauggaauau

SEQ ID NO: 83103 - RNA, 19 nt, Artificial Sequence
  Description of Artificial Sequence: Synthetic oligonucleotide
  Antisense strand to SEQ ID NO: 83022
auauuccauugcauacugc

SEQ ID NO: 83104 - RNA, 19 nt, Artificial Sequence
  Description of Artificial Sequence: Synthetic oligonucleotide
  Sense strand starting at position 3899 of SEQ ID NO: 1039
ugcaguaugcaauggaaua

SEQ ID NO: 83105 - RNA, 19 nt, Artificial Sequence
  Description of Artificial Sequence: Synthetic oligonucleotide
  Antisense strand to SEQ ID NO: 83024
uauuccauugcauacugca

SEQ ID NO: 83106 - RNA, 19 nt, Artificial Sequence
  Description of Artificial Sequence: Synthetic oligonucleotide
  Sense strand starting at position 3711 of SEQ ID NO: 1039
uuagcaguuccuugaacag

SEQ ID NO: 83107 - RNA, 19 nt, Artificial Sequence
  Description of Artificial Sequence: Synthetic oligonucleotide
  Antisense strand to SEQ ID NO: 83026
cuguucaaggaacugcuaa

SEQ ID NO: 83108 - RNA, 19 nt, Artificial Sequence
  Description of Artificial Sequence: Synthetic oligonucleotide
  Sense strand starting at position 3710 of SEQ ID NO: 1039
auuagcaguuccuugaaca

SEQ ID NO: 83109 - RNA, 19 nt, Artificial Sequence
  Description of Artificial Sequence: Synthetic oligonucleotide
  Antisense strand to SEQ ID NO: 83028
uguucaaggaacugcuaau

SEQ ID NO: 83110 - RNA, 19 nt, Artificial Sequence
  Description of Artificial Sequence: Synthetic oligonucleotide
  Sense strand starting at position 3612 of SEQ ID NO: 1039
gcagucuuucaguuacguu

SEQ ID NO: 83111 - RNA, 19 nt, Artificial Sequence
  Description of Artificial Sequence: Synthetic oligonucleotide
  Antisense strand to SEQ ID NO: 83030
aacguaacugaaagacugc

SEQ ID NO: 83112 - RNA, 19 nt, Artificial Sequence
  Description of Artificial Sequence: Synthetic oligonucleotide
  Sense strand starting at position 3568 of SEQ ID NO: 1039
cuuagaacugcuuagugua

SEQ ID NO: 83113 - RNA, 19 nt, Artificial Sequence
  Description of Artificial Sequence: Synthetic oligonucleotide
  Antisense strand to SEQ ID NO: 83032
uacacuaagcaguucuaag

SEQ ID NO: 83114 - RNA, 19 nt, Artificial Sequence
  Description of Artificial Sequence: Synthetic oligonucleotide
  Sense strand starting at position 3328 of SEQ ID NO: 1039
ggccuuggaugauagauuu

SEQ ID NO: 83115 - RNA, 19 nt, Artificial Sequence
  Description of Artificial Sequence: Synthetic oligonucleotide
  Antisense strand to SEQ ID NO: 83034
aaaucuaucauccaaggcc

SEQ ID NO: 83116 - RNA, 19 nt, Artificial Sequence
  Description of Artificial Sequence: Synthetic oligonucleotide
  Sense strand starting at position 3325 of SEQ ID NO: 1039
ggaggccuuggaugauaga

SEQ ID NO: 83117 - RNA, 19 nt, Artificial Sequence
  Description of Artificial Sequence: Synthetic oligonucleotide
  Antisense strand to SEQ ID NO: 83036
ucuaucauccaaggccucc

SEQ ID NO: 83118 - RNA, 19 nt, Artificial Sequence
  Description of Artificial Sequence: Synthetic oligonucleotide
  Sense strand starting at position 3322 of SEQ ID NO: 1039
ucaggaggccuuggaugau

SEQ ID NO: 83119 - RNA, 19 nt, Artificial Sequence
  Description of Artificial Sequence: Synthetic oligonucleotide
  Antisense strand to SEQ ID NO: 83038
aucauccaaggccuccuga

SEQ ID NO: 83120 - RNA, 19 nt, Artificial Sequence
  Description of Artificial Sequence: Synthetic oligonucleotide
  Sense strand starting at position 3286 of SEQ ID NO: 1039
guaaucaucugauugcaag

SEQ ID NO: 83121 - RNA, 19 nt, Artificial Sequence
  Description of Artificial Sequence: Synthetic oligonucleotide
  Antisense strand to SEQ ID NO: 83040
cuugcaaucagaugauuac

SEQ ID NO: 83122 - RNA, 19 nt, Artificial Sequence
  Description of Artificial Sequence: Synthetic oligonucleotide
  Sense strand starting at position 3218 of SEQ ID NO: 1039
ucugcauaggguuaagcaa

SEQ ID NO: 83123 - RNA, 19 nt, Artificial Sequence
  Description of Artificial Sequence: Synthetic oligonucleotide
  Antisense strand to SEQ ID NO: 83042
uugcuuaacccuaugcaga

SEQ ID NO: 83124 - RNA, 19 nt, Artificial Sequence
  Description of Artificial Sequence: Synthetic oligonucleotide
  Sense strand starting at position 3171 of SEQ ID NO: 1039
gugagugaggauuauuauu

SEQ ID NO: 83125 - RNA, 19 nt, Artificial Sequence
  Description of Artificial Sequence: Synthetic oligonucleotide
  Antisense strand to SEQ ID NO: 83044
aauaauaauccucacucac

SEQ ID NO: 83126 - RNA, 19 nt, Artificial Sequence
  Description of Artificial Sequence: Synthetic oligonucleotide
  Sense strand starting at position 3165 of SEQ ID NO: 1039
ucucuugugagugaggauu

SEQ ID NO: 83127 - RNA, 19 nt, Artificial Sequence
  Description of Artificial Sequence: Synthetic oligonucleotide
  Antisense strand to SEQ ID NO: 83046
aauccucacucacaagaga

SEQ ID NO: 83128 - RNA, 19 nt, Artificial Sequence
  Description of Artificial Sequence: Synthetic oligonucleotide
  Sense strand starting at position 3164 of SEQ ID NO: 1039
aucucuugugagugaggau

SEQ ID NO: 83129 - RNA, 19 nt, Artificial Sequence
  Description of Artificial Sequence: Synthetic oligonucleotide
  Antisense strand to SEQ ID NO: 83048
auccucacucacaagagau

SEQ ID NO: 83130 - RNA, 19 nt, Artificial Sequence
  Description of Artificial Sequence: Synthetic oligonucleotide
  Sense strand starting at position 3163 of SEQ ID NO: 1039
uaucucuugugagugagga

SEQ ID NO: 83131 - RNA, 19 nt, Artificial Sequence
  Description of Artificial Sequence: Synthetic oligonucleotide
  Antisense strand to SEQ ID NO: 83050
uccucacucacaagagaua

SEQ ID NO: 83132 - RNA, 19 nt, Artificial Sequence
  Description of Artificial Sequence: Synthetic oligonucleotide
  Sense strand starting at position 2825 of SEQ ID NO: 1039
guaaccugacguugauaug

SEQ ID NO: 83133 - RNA, 19 nt, Artificial Sequence
  Description of Artificial Sequence: Synthetic oligonucleotide
  Antisense strand to SEQ ID NO: 83052
cauaucaacgucagguuac

SEQ ID NO: 83134 - RNA, 19 nt, Artificial Sequence
  Description of Artificial Sequence: Synthetic oligonucleotide
  Sense strand starting at position 2702 of SEQ ID NO: 1039
agaugagguugagagauaa

SEQ ID NO: 83135 - RNA, 19 nt, Artificial Sequence
  Description of Artificial Sequence: Synthetic oligonucleotide
  Antisense strand to SEQ ID NO: 83054
uuaucucucaaccucaucu

SEQ ID NO: 83136 - RNA, 19 nt, Artificial Sequence
  Description of Artificial Sequence: Synthetic oligonucleotide
  Sense strand starting at position 2454 of SEQ ID NO: 1039
uuaaacugcgaguacgaaa

SEQ ID NO: 83137 - RNA, 19 nt, Artificial Sequence
  Description of Artificial Sequence: Synthetic oligonucleotide
  Antisense strand to SEQ ID NO: 83056
uuucguacucgcaguuuaa

SEQ ID NO: 83138 - RNA, 19 nt, Artificial Sequence
  Description of Artificial Sequence: Synthetic oligonucleotide
  Sense strand starting at position 2346 of SEQ ID NO: 1039
aagagagggugcuuggaaa

SEQ ID NO: 83139 - RNA, 19 nt, Artificial Sequence
  Description of Artificial Sequence: Synthetic oligonucleotide
  Antisense strand to SEQ ID NO: 83058
uuuccaagcacccucucuu

SEQ ID NO: 83140 - RNA, 19 nt, Artificial Sequence
  Description of Artificial Sequence: Synthetic oligonucleotide
  Sense strand starting at position 2059 of SEQ ID NO: 1039
uuaaauggagccuaccauu

SEQ ID NO: 83141 - RNA, 19 nt, Artificial Sequence
  Description of Artificial Sequence: Synthetic oligonucleotide
  Antisense strand to SEQ ID NO: 83060
aaugguaggcuccauuuaa

SEQ ID NO: 83142 - RNA, 19 nt, Artificial Sequence
  Description of Artificial Sequence: Synthetic oligonucleotide
  Sense strand starting at position 948 of SEQ ID NO: 1039
gauuccaaugccugagaga

SEQ ID NO: 83143 - RNA, 19 nt, Artificial Sequence
  Description of Artificial Sequence: Synthetic oligonucleotide
  Antisense strand to SEQ ID NO: 83062
ucucucaggcauuggaauc

SEQ ID NO: 83144 - RNA, 19 nt, Artificial Sequence
  Description of Artificial Sequence: Synthetic oligonucleotide
  Sense strand starting at position 886 of SEQ ID NO: 1039
guguuuauauuugcggaaa

SEQ ID NO: 83145 - RNA, 19 nt, Artificial Sequence
  Description of Artificial Sequence: Synthetic oligonucleotide
  Antisense strand to SEQ ID NO: 83064
uuuccgcaaauauaaacac

SEQ ID NO: 83146 - RNA, 19 nt, Artificial Sequence
  Description of Artificial Sequence: Synthetic oligonucleotide
  Sense strand starting at position 885 of SEQ ID NO: 1039
gguguuuauauuugcggaa

SEQ ID NO: 83147 - RNA, 19 nt, Artificial Sequence
  Description of Artificial Sequence: Synthetic oligonucleotide
  Antisense strand to SEQ ID NO: 83066
uuccgcaaauauaaacacc

SEQ ID NO: 83148 - RNA, 19 nt, Artificial Sequence
  Description of Artificial Sequence: Synthetic oligonucleotide
  Sense strand starting at position 877 of SEQ ID NO: 1039
gugcucucgguguuuauau

SEQ ID NO: 83149 - RNA, 19 nt, Artificial Sequence
  Description of Artificial Sequence: Synthetic oligonucleotide
  Antisense strand to SEQ ID NO: 83068
auauaaacaccgagagcac

SEQ ID NO: 83150 - RNA, 19 nt, Artificial Sequence
  Description of Artificial Sequence: Synthetic oligonucleotide
  Sense strand starting at position 876 of SEQ ID NO: 1039
agugcucucgguguuuaua

SEQ ID NO: 83151 - RNA, 19 nt, Artificial Sequence
  Description of Artificial Sequence: Synthetic oligonucleotide
  Antisense strand to SEQ ID NO: 83070
uauaaacaccgagagcacu

SEQ ID NO: 83152 - RNA, 19 nt, Artificial Sequence
  Description of Artificial Sequence: Synthetic oligonucleotide
  Sense strand starting at position 848 of SEQ ID NO: 1039
cuuugaggucuacaguauc

SEQ ID NO: 83153 - RNA, 19 nt, Artificial Sequence
  Description of Artificial Sequence: Synthetic oligonucleotide
  Antisense strand to SEQ ID NO: 83072
gauacuguagaccucaaag

SEQ ID NO: 83154 - RNA, 19 nt, Artificial Sequence
  Description of Artificial Sequence: Synthetic oligonucleotide
  Sense strand starting at position 846 of SEQ ID NO: 1039
accuuugaggucuacagua

SEQ ID NO: 83155 - RNA, 19 nt, Artificial Sequence
  Description of Artificial Sequence: Synthetic oligonucleotide
  Antisense strand to SEQ ID NO: 83074
uacuguagaccucaaaggu

SEQ ID NO: 83156 - RNA, 19 nt, Artificial Sequence
  Description of Artificial Sequence: Synthetic oligonucleotide
  Sense strand starting at position 720 of SEQ ID NO: 1039
agcuuaaucucugucaaug

SEQ ID NO: 83157 - RNA, 19 nt, Artificial Sequence
  Description of Artificial Sequence: Synthetic oligonucleotide
  Antisense strand to SEQ ID NO: 83076
cauugacagagauuaagcu

SEQ ID NO: 83158 - RNA, 19 nt, Artificial Sequence
  Description of Artificial Sequence: Synthetic oligonucleotide
  Sense strand starting at position 718 of SEQ ID NO: 1039
agagcuuaaucucugucaa

SEQ ID NO: 83159 - RNA, 19 nt, Artificial Sequence
  Description of Artificial Sequence: Synthetic oligonucleotide
  Antisense strand to SEQ ID NO: 83078
uugacagagauuaagcucu

SEQ ID NO: 83160 - RNA, 19 nt, Artificial Sequence
  Description of Artificial Sequence: Synthetic oligonucleotide
  Sense strand starting at position 571 of SEQ ID NO: 1039
gugauacuguuucuuaaag

SEQ ID NO: 83161 - RNA, 19 nt, Artificial Sequence
  Description of Artificial Sequence: Synthetic oligonucleotide
  Antisense strand to SEQ ID NO: 83080
cuuuaagaaacaguaucac

SEQ ID NO: 83162 - RNA, 19 nt, Artificial Sequence
  Description of Artificial Sequence: Synthetic oligonucleotide
  Sense strand starting at position 531 of SEQ ID NO: 1039
ucagcaguuuaauuugcaa

SEQ ID NO: 83163 - RNA, 19 nt, Artificial Sequence
  Description of Artificial Sequence: Synthetic oligonucleotide
  Antisense strand to SEQ ID NO: 83082
uugcaaauuaaacugcuga

SEQ ID NO: 83164 - RNA, 19 nt, Artificial Sequence
  Description of Artificial Sequence: Synthetic oligonucleotide
  Sense strand starting at position 469 of SEQ ID NO: 1039
gugacauauuuagacaagu

SEQ ID NO: 83165 - RNA, 19 nt, Artificial Sequence
  Description of Artificial Sequence: Synthetic oligonucleotide
  Antisense strand to SEQ ID NO: 83084
acuugucuaaauaugucac

SEQ ID NO: 83166 - RNA, 19 nt, Artificial Sequence
  Description of Artificial Sequence: Synthetic oligonucleotide
  Sense strand starting at position 249 of SEQ ID NO: 1039
ugacuuggaauucgacaua

SEQ ID NO: 83167 - RNA, 19 nt, Artificial Sequence
  Description of Artificial Sequence: Synthetic oligonucleotide
  Antisense strand to SEQ ID NO: 83086
uaugucgaauuccaaguca

SEQ ID NO: 83168 - RNA, 19 nt, Artificial Sequence
  Description of Artificial Sequence: Synthetic oligonucleotide
  Sense strand starting at position 72 of SEQ ID NO: 1039
uguucuuucgcacacaaug

SEQ ID NO: 83169 - RNA, 19 nt, Artificial Sequence
  Description of Artificial Sequence: Synthetic oligonucleotide
  Antisense strand to SEQ ID NO: 83088
cauugugugcgaaagaaca

SEQ ID NO: 83170 - RNA, 19 nt, Artificial Sequence
  Description of Artificial Sequence: Synthetic oligonucleotide
  Sense strand starting at position 54 of SEQ ID NO: 1039
acagguuccaguggagaau

SEQ ID NO: 83171 - RNA, 19 nt, Artificial Sequence
  Description of Artificial Sequence: Synthetic oligonucleotide
  Antisense strand to SEQ ID NO: 83090
auucuccacuggaaccugu

SEQ ID NO: 83172 - RNA, 19 nt, Artificial Sequence
  Description of Artificial Sequence: Synthetic oligonucleotide
  Sense strand starting at position 83 of SEQ ID NO: 1043
ccuagacuucucuguggaa

SEQ ID NO: 83173 - RNA, 19 nt, Artificial Sequence
  Description of Artificial Sequence: Synthetic oligonucleotide
  Antisense strand to SEQ ID NO: 83092
uuccacagagaagucuagg

SEQ ID NO: 83174 - RNA, 19 nt, Artificial Sequence
  Description of Artificial Sequence: Synthetic oligonucleotide
  Sense strand starting at position 84 of SEQ ID NO: 1043
cuagacuucucuguggaac

SEQ ID NO: 83175 - RNA, 19 nt, Artificial Sequence
  Description of Artificial Sequence: Synthetic oligonucleotide
  Antisense strand to SEQ ID NO: 83094
guuccacagagaagucuag

SEQ ID NO: 83176 - RNA, 19 nt, Artificial Sequence
  Description of Artificial Sequence: Synthetic oligonucleotide
  Sense strand starting at position 85 of SEQ ID NO: 1043
uagacuucucuguggaaca

SEQ ID NO: 83177 - RNA, 19 nt, Artificial Sequence
  Description of Artificial Sequence: Synthetic oligonucleotide
  Antisense strand to SEQ ID NO: 83096
uguuccacagagaagucua

SEQ ID NO: 83178 - RNA, 19 nt, Artificial Sequence
  Description of Artificial Sequence: Synthetic oligonucleotide
  Sense strand starting at position 149 of SEQ ID NO: 1043
gccuacacuguugaggauu

SEQ ID NO: 83179 - RNA, 19 nt, Artificial Sequence
  Description of Artificial Sequence: Synthetic oligonucleotide
  Antisense strand to SEQ ID NO: 83098
aauccucaacaguguaggc

SEQ ID NO: 83180 - RNA, 19 nt, Artificial Sequence
  Description of Artificial Sequence: Synthetic oligonucleotide
  Sense strand starting at position 227 of SEQ ID NO: 1043
guaauugaaguuggagaca

SEQ ID NO: 83181 - RNA, 19 nt, Artificial Sequence
  Description of Artificial Sequence: Synthetic oligonucleotide
  Antisense strand to SEQ ID NO: 83100
ugucuccaacuucaauuac

SEQ ID NO: 83182 - RNA, 19 nt, Artificial Sequence
  Description of Artificial Sequence: Synthetic oligonucleotide
  Sense strand starting at position 580 of SEQ ID NO: 1043
ggcggaugauccucaggau

SEQ ID NO: 83183 - RNA, 19 nt, Artificial Sequence
  Description of Artificial Sequence: Synthetic oligonucleotide
  Antisense strand to SEQ ID NO: 83102
auccugaggaucauccgcc

SEQ ID NO: 83184 - RNA, 19 nt, Artificial Sequence
  Description of Artificial Sequence: Synthetic oligonucleotide
  Sense strand starting at position 581 of SEQ ID NO: 1043
gcggaugauccucaggaug

SEQ ID NO: 83185 - RNA, 19 nt, Artificial Sequence
  Description of Artificial Sequence: Synthetic oligonucleotide
  Antisense strand to SEQ ID NO: 83104
cauccugaggaucauccgc

SEQ ID NO: 83186 - RNA, 19 nt, Artificial Sequence
  Description of Artificial Sequence: Synthetic oligonucleotide
  Sense strand starting at position 682 of SEQ ID NO: 1043
agaugaugucaaugauguu

SEQ ID NO: 83187 - RNA, 19 nt, Artificial Sequence
  Description of Artificial Sequence: Synthetic oligonucleotide
  Antisense strand to SEQ ID NO: 83106
aacaucauugacaucaucu

SEQ ID NO: 83188 - RNA, 19 nt, Artificial Sequence
  Description of Artificial Sequence: Synthetic oligonucleotide
  Sense strand starting at position 796 of SEQ ID NO: 1043
ugaagaaagggucggugaa

SEQ ID NO: 83189 - RNA, 19 nt, Artificial Sequence
  Description of Artificial Sequence: Synthetic oligonucleotide
  Antisense strand to SEQ ID NO: 83108
uucaccgacccuuucuuca

SEQ ID NO: 83190 - RNA, 19 nt, Artificial Sequence
  Description of Artificial Sequence: Synthetic oligonucleotide
  Sense strand starting at position 798 of SEQ ID NO: 1043
aagaaagggucggugaaca

SEQ ID NO: 83191 - RNA, 19 nt, Artificial Sequence
  Description of Artificial Sequence: Synthetic oligonucleotide
  Antisense strand to SEQ ID NO: 83110
uguucaccgacccuuucuu

SEQ ID NO: 83192 - RNA, 19 nt, Artificial Sequence
  Description of Artificial Sequence: Synthetic oligonucleotide
  Sense strand starting at position 810 of SEQ ID NO: 1043
gugaacauggucugggaga

SEQ ID NO: 83193 - RNA, 19 nt, Artificial Sequence
  Description of Artificial Sequence: Synthetic oligonucleotide
  Antisense strand to SEQ ID NO: 83112
ucucccagaccauguucac

SEQ ID NO: 83194 - RNA, 19 nt, Artificial Sequence
  Description of Artificial Sequence: Synthetic oligonucleotide
  Sense strand starting at position 900 of SEQ ID NO: 1043
agugucuccaggcagaaga

SEQ ID NO: 83195 - RNA, 19 nt, Artificial Sequence
  Description of Artificial Sequence: Synthetic oligonucleotide
  Antisense strand to SEQ ID NO: 83114
ucuucugccuggagacacu

SEQ ID NO: 83196 - RNA, 19 nt, Artificial Sequence
  Description of Artificial Sequence: Synthetic oligonucleotide
  Sense strand starting at position 1164 of SEQ ID NO: 1043
uucccaccagauugguaau

SEQ ID NO: 83197 - RNA, 19 nt, Artificial Sequence
  Description of Artificial Sequence: Synthetic oligonucleotide
  Antisense strand to SEQ ID NO: 83116
auuaccaaucuggugggaa

SEQ ID NO: 83198 - RNA, 19 nt, Artificial Sequence
  Description of Artificial Sequence: Synthetic oligonucleotide
  Sense strand starting at position 1166 of SEQ ID NO: 1043
cccaccagauugguaauaa

SEQ ID NO: 83199 - RNA, 19 nt, Artificial Sequence
  Description of Artificial Sequence: Synthetic oligonucleotide
  Antisense strand to SEQ ID NO: 83118
uuauuaccaaucugguggg

SEQ ID NO: 83200 - RNA, 19 nt, Artificial Sequence
  Description of Artificial Sequence: Synthetic oligonucleotide
  Sense strand starting at position 1459 of SEQ ID NO: 1043
ggaucuucccguuggagaa

SEQ ID NO: 83201 - RNA, 19 nt, Artificial Sequence
  Description of Artificial Sequence: Synthetic oligonucleotide
  Antisense strand to SEQ ID NO: 83120
uucuccaacgggaagaucc

SEQ ID NO: 83202 - RNA, 19 nt, Artificial Sequence
  Description of Artificial Sequence: Synthetic oligonucleotide
  Sense strand starting at position 1726 of SEQ ID NO: 1043
uguuuauugagguaaggua

SEQ ID NO: 83203 - RNA, 19 nt, Artificial Sequence
  Description of Artificial Sequence: Synthetic oligonucleotide
  Antisense strand to SEQ ID NO: 83122
uaccuuaccucaauaaaca

SEQ ID NO: 83204 - RNA, 19 nt, Artificial Sequence
  Description of Artificial Sequence: Synthetic oligonucleotide
  Sense strand starting at position 1751 of SEQ ID NO: 1043
ugggcuaaucaaugacuua

SEQ ID NO: 83205 - RNA, 19 nt, Artificial Sequence
  Description of Artificial Sequence: Synthetic oligonucleotide
  Antisense strand to SEQ ID NO: 83124
uaagucauugauuagccca

SEQ ID NO: 83206 - RNA, 19 nt, Artificial Sequence
  Description of Artificial Sequence: Synthetic oligonucleotide
  Sense strand starting at position 1915 of SEQ ID NO: 1043
aaaggauggucuccauaug

SEQ ID NO: 83207 - RNA, 19 nt, Artificial Sequence
  Description of Artificial Sequence: Synthetic oligonucleotide
  Antisense strand to SEQ ID NO: 83126
cauauggagaccauccuuu

SEQ ID NO: 83208 - RNA, 19 nt, Artificial Sequence
  Description of Artificial Sequence: Synthetic oligonucleotide
  Sense strand starting at position 1916 of SEQ ID NO: 1043
aaggauggucuccauaugu

SEQ ID NO: 83209 - RNA, 19 nt, Artificial Sequence
  Description of Artificial Sequence: Synthetic oligonucleotide
  Antisense strand to SEQ ID NO: 83128
acauauggagaccauccuu

SEQ ID NO: 83210 - RNA, 19 nt, Artificial Sequence
  Description of Artificial Sequence: Synthetic oligonucleotide
  Sense strand starting at position 2332 of SEQ ID NO: 1043
uauggaaugcuugguggaa

SEQ ID NO: 83211 - RNA, 19 nt, Artificial Sequence
  Description of Artificial Sequence: Synthetic oligonucleotide
  Antisense strand to SEQ ID NO: 83130
uuccaccaagcauuccaua

SEQ ID NO: 83212 - RNA, 19 nt, Artificial Sequence
  Description of Artificial Sequence: Synthetic oligonucleotide
  Sense strand starting at position 2333 of SEQ ID NO: 1043
auggaaugcuugguggaaa

SEQ ID NO: 83213 - RNA, 19 nt, Artificial Sequence
  Description of Artificial Sequence: Synthetic oligonucleotide
  Antisense strand to SEQ ID NO: 83132
uuuccaccaagcauuccau

SEQ ID NO: 83214 - RNA, 19 nt, Artificial Sequence
  Description of Artificial Sequence: Synthetic oligonucleotide
  Sense strand starting at position 2768 of SEQ ID NO: 1043
uggagagguuuccuuuaca

SEQ ID NO: 83215 - RNA, 19 nt, Artificial Sequence
  Description of Artificial Sequence: Synthetic oligonucleotide
  Antisense strand to SEQ ID NO: 83134
uguaaaggaaaccucucca

SEQ ID NO: 83216 - RNA, 19 nt, Artificial Sequence
  Description of Artificial Sequence: Synthetic oligonucleotide
  Sense strand starting at position 2863 of SEQ ID NO: 1043
caauaaucacgugagguua

SEQ ID NO: 83217 - RNA, 19 nt, Artificial Sequence
  Description of Artificial Sequence: Synthetic oligonucleotide
  Antisense strand to SEQ ID NO: 83136
uaaccucacgugauuauug

SEQ ID NO: 83218 - RNA, 19 nt, Artificial Sequence
  Description of Artificial Sequence: Synthetic oligonucleotide
  Sense strand starting at position 2922 of SEQ ID NO: 1043
gggacaaagugacuuccua

SEQ ID NO: 83219 - RNA, 19 nt, Artificial Sequence
  Description of Artificial Sequence: Synthetic oligonucleotide
  Antisense strand to SEQ ID NO: 83138
uaggaagucacuuuguccc

SEQ ID NO: 83220 - RNA, 19 nt, Artificial Sequence
  Description of Artificial Sequence: Synthetic oligonucleotide
  Sense strand starting at position 2926 of SEQ ID NO: 1043
caaagugacuuccuaaggu

SEQ ID NO: 83221 - RNA, 19 nt, Artificial Sequence
  Description of Artificial Sequence: Synthetic oligonucleotide
  Antisense strand to SEQ ID NO: 83140
accuuaggaagucacuuug

SEQ ID NO: 83222 - RNA, 19 nt, Artificial Sequence
  Description of Artificial Sequence: Synthetic oligonucleotide
  Sense strand starting at position 3002 of SEQ ID NO: 1043
ggccuuucccacuagacca

SEQ ID NO: 83223 - RNA, 19 nt, Artificial Sequence
  Description of Artificial Sequence: Synthetic oligonucleotide
  Antisense strand to SEQ ID NO: 83142
uggucuagugggaaaggcc

SEQ ID NO: 83224 - RNA, 19 nt, Artificial Sequence
  Description of Artificial Sequence: Synthetic oligonucleotide
  Sense strand starting at position 3061 of SEQ ID NO: 1043
aggcuagggccacagaauu

SEQ ID NO: 83225 - RNA, 19 nt, Artificial Sequence
  Description of Artificial Sequence: Synthetic oligonucleotide
  Antisense strand to SEQ ID NO: 83144
aauucuguggcccuagccu

SEQ ID NO: 83226 - RNA, 19 nt, Artificial Sequence
  Description of Artificial Sequence: Synthetic oligonucleotide
  Sense strand starting at position 3133 of SEQ ID NO: 1043
ccauguguugaaugaugag

SEQ ID NO: 83227 - RNA, 19 nt, Artificial Sequence
  Description of Artificial Sequence: Synthetic oligonucleotide
  Antisense strand to SEQ ID NO: 83146
cucaucauucaacacaugg

SEQ ID NO: 83228 - RNA, 19 nt, Artificial Sequence
  Description of Artificial Sequence: Synthetic oligonucleotide
  Sense strand starting at position 3139 of SEQ ID NO: 1043
guugaaugaugagcucaag

SEQ ID NO: 83229 - RNA, 19 nt, Artificial Sequence
  Description of Artificial Sequence: Synthetic oligonucleotide
  Antisense strand to SEQ ID NO: 83148
cuugagcucaucauucaac

SEQ ID NO: 83230 - RNA, 19 nt, Artificial Sequence
  Description of Artificial Sequence: Synthetic oligonucleotide
  Sense strand starting at position 3142 of SEQ ID NO: 1043
gaaugaugagcucaagucu

SEQ ID NO: 83231 - RNA, 19 nt, Artificial Sequence
  Description of Artificial Sequence: Synthetic oligonucleotide
  Antisense strand to SEQ ID NO: 83150
agacuugagcucaucauuc

SEQ ID NO: 83232 - RNA, 19 nt, Artificial Sequence
  Description of Artificial Sequence: Synthetic oligonucleotide
  Sense strand starting at position 3250 of SEQ ID NO: 1043
ucaguuguggaaugaggaa

SEQ ID NO: 83233 - RNA, 19 nt, Artificial Sequence
  Description of Artificial Sequence: Synthetic oligonucleotide
  Antisense strand to SEQ ID NO: 83152
uuccucauuccacaacuga

SEQ ID NO: 83234 - RNA, 19 nt, Artificial Sequence
  Description of Artificial Sequence: Synthetic oligonucleotide
  Sense strand starting at position 3402 of SEQ ID NO: 1043
augguaaagcccuggagaa

SEQ ID NO: 83235 - RNA, 19 nt, Artificial Sequence
  Description of Artificial Sequence: Synthetic oligonucleotide
  Antisense strand to SEQ ID NO: 83154
uucuccagggcuuuaccau

SEQ ID NO: 83236 - RNA, 19 nt, Artificial Sequence
  Description of Artificial Sequence: Synthetic oligonucleotide
  Sense strand starting at position 3403 of SEQ ID NO: 1043
ugguaaagcccuggagaaa

SEQ ID NO: 83237 - RNA, 19 nt, Artificial Sequence
  Description of Artificial Sequence: Synthetic oligonucleotide
  Antisense strand to SEQ ID NO: 83156
uuucuccagggcuuuacca

SEQ ID NO: 83238 - RNA, 19 nt, Artificial Sequence
  Description of Artificial Sequence: Synthetic oligonucleotide
  Sense strand starting at position 3433 of SEQ ID NO: 1043
aguaauucgcaugaugauu

SEQ ID NO: 83239 - RNA, 19 nt, Artificial Sequence
  Description of Artificial Sequence: Synthetic oligonucleotide
  Antisense strand to SEQ ID NO: 83158
aaucaucaugcgaauuacu

SEQ ID NO: 83240 - RNA, 19 nt, Artificial Sequence
  Description of Artificial Sequence: Synthetic oligonucleotide
  Sense strand starting at position 3597 of SEQ ID NO: 1043
gugugaaucagucccgcuu

SEQ ID NO: 83241 - RNA, 19 nt, Artificial Sequence
  Description of Artificial Sequence: Synthetic oligonucleotide
  Antisense strand to SEQ ID NO: 83160
aagcgggacugauucacac

SEQ ID NO: 83242 - RNA, 19 nt, Artificial Sequence
  Description of Artificial Sequence: Synthetic oligonucleotide
  Sense strand starting at position 3611 of SEQ ID NO: 1043
cgcuuucugagaggaauga

SEQ ID NO: 83243 - RNA, 19 nt, Artificial Sequence
  Description of Artificial Sequence: Synthetic oligonucleotide
  Antisense strand to SEQ ID NO: 83162
ucauuccucucagaaagcg

SEQ ID NO: 83244 - RNA, 19 nt, Artificial Sequence
  Description of Artificial Sequence: Synthetic oligonucleotide
  Sense strand starting at position 3691 of SEQ ID NO: 1043
gagugacccuuaucaggaa

SEQ ID NO: 83245 - RNA, 19 nt, Artificial Sequence
  Description of Artificial Sequence: Synthetic oligonucleotide
  Antisense strand to SEQ ID NO: 83164
uuccugauaagggucacuc

SEQ ID NO: 83246 - RNA, 19 nt, Artificial Sequence
  Description of Artificial Sequence: Synthetic oligonucleotide
  Sense strand starting at position 3754 of SEQ ID NO: 1043
agcuucuuuggccaaauaa

SEQ ID NO: 83247 - RNA, 19 nt, Artificial Sequence
  Description of Artificial Sequence: Synthetic oligonucleotide
  Antisense strand to SEQ ID NO: 83166
uuauuuggccaaagaagcu

SEQ ID NO: 83248 - RNA, 19 nt, Artificial Sequence
  Description of Artificial Sequence: Synthetic oligonucleotide
  Sense strand starting at position 3863 of SEQ ID NO: 1043
guaggaggguguuugauga

SEQ ID NO: 83249 - RNA, 19 nt, Artificial Sequence
  Description of Artificial Sequence: Synthetic oligonucleotide
  Antisense strand to SEQ ID NO: 83168
ucaucaaacacccuccuac

SEQ ID NO: 83250 - RNA, 19 nt, Artificial Sequence
  Description of Artificial Sequence: Synthetic oligonucleotide
  Sense strand starting at position 3929 of SEQ ID NO: 1043
uauuccguggucuacagaa

SEQ ID NO: 83251 - RNA, 19 nt, Artificial Sequence
  Description of Artificial Sequence: Synthetic oligonucleotide
  Antisense strand to SEQ ID NO: 83170
uucuguagaccacggaaua

SEQ ID NO: 83252 - RNA, 19 nt, Artificial Sequence
  Description of Artificial Sequence: Synthetic oligonucleotide
  Sense strand starting at position 27 of SEQ ID NO: 1045
uguagacuacccugagaag

SEQ ID NO: 83253 - RNA, 19 nt, Artificial Sequence
  Description of Artificial Sequence: Synthetic oligonucleotide
  Antisense strand to SEQ ID NO: 83172
cuucucaggguagucuaca

SEQ ID NO: 83254 - RNA, 19 nt, Artificial Sequence
  Description of Artificial Sequence: Synthetic oligonucleotide
  Sense strand starting at position 165 of SEQ ID NO: 1045
gcaggaacuguguaucuau

SEQ ID NO: 83255 - RNA, 19 nt, Artificial Sequence
  Description of Artificial Sequence: Synthetic oligonucleotide
  Antisense strand to SEQ ID NO: 83174
auagauacacaguuccugc

SEQ ID NO: 83256 - RNA, 19 nt, Artificial Sequence
  Description of Artificial Sequence: Synthetic oligonucleotide
  Sense strand starting at position 231 of SEQ ID NO: 1045
cuguuuguggcauaaaugu

SEQ ID NO: 83257 - RNA, 19 nt, Artificial Sequence
  Description of Artificial Sequence: Synthetic oligonucleotide
  Antisense strand to SEQ ID NO: 83176
acauuuaugccacaaacag

SEQ ID NO: 83258 - RNA, 19 nt, Artificial Sequence
  Description of Artificial Sequence: Synthetic oligonucleotide
  Sense strand starting at position 242 of SEQ ID NO: 1045
auaaaugugucagugaauu

SEQ ID NO: 83259 - RNA, 19 nt, Artificial Sequence
  Description of Artificial Sequence: Synthetic oligonucleotide
  Antisense strand to SEQ ID NO: 83178
aauucacugacacauuuau

SEQ ID NO: 83260 - RNA, 19 nt, Artificial Sequence
  Description of Artificial Sequence: Synthetic oligonucleotide
  Sense strand starting at position 289 of SEQ ID NO: 1045
aaaugaugauaguaacaga

SEQ ID NO: 83261 - RNA, 19 nt, Artificial Sequence
  Description of Artificial Sequence: Synthetic oligonucleotide
  Antisense strand to SEQ ID NO: 83180
ucuguuacuaucaucauuu

SEQ ID NO: 83262 - RNA, 19 nt, Artificial Sequence
  Description of Artificial Sequence: Synthetic oligonucleotide
  Sense strand starting at position 306 of SEQ ID NO: 1045
gacagaaauguaugguauu

SEQ ID NO: 83263 - RNA, 19 nt, Artificial Sequence
  Description of Artificial Sequence: Synthetic oligonucleotide
  Antisense strand to SEQ ID NO: 83182
aauaccauacauuucuguc

SEQ ID NO: 83264 - RNA, 19 nt, Artificial Sequence
  Description of Artificial Sequence: Synthetic oligonucleotide
  Sense strand starting at position 313 of SEQ ID NO: 1045
auguaugguauuggcagaa

SEQ ID NO: 83265 - RNA, 19 nt, Artificial Sequence
  Description of Artificial Sequence: Synthetic oligonucleotide
  Antisense strand to SEQ ID NO: 83184
uucugccaauaccauacau

SEQ ID NO: 83266 - RNA, 19 nt, Artificial Sequence
  Description of Artificial Sequence: Synthetic oligonucleotide
  Sense strand starting at position 459 of SEQ ID NO: 1045
guagguuugacuggaagaa

SEQ ID NO: 83267 - RNA, 19 nt, Artificial Sequence
  Description of Artificial Sequence: Synthetic oligonucleotide
  Antisense strand to SEQ ID NO: 83186
uucuuccagucaaaccuac

SEQ ID NO: 83268 - RNA, 19 nt, Artificial Sequence
  Description of Artificial Sequence: Synthetic oligonucleotide
  Sense strand starting at position 509 of SEQ ID NO: 1045
gaguuaacaucucuaagug

SEQ ID NO: 83269 - RNA, 19 nt, Artificial Sequence
  Description of Artificial Sequence: Synthetic oligonucleotide
  Antisense strand to SEQ ID NO: 83188
cacuuagagauguuaacuc

SEQ ID NO: 83270 - RNA, 19 nt, Artificial Sequence
  Description of Artificial Sequence: Synthetic oligonucleotide
  Sense strand starting at position 939 of SEQ ID NO: 1045
uuccaaguucuagaaaguc

SEQ ID NO: 83271 - RNA, 19 nt, Artificial Sequence
  Description of Artificial Sequence: Synthetic oligonucleotide
  Antisense strand to SEQ ID NO: 83190
gacuuucuagaacuuggaa

SEQ ID NO: 83272 - RNA, 19 nt, Artificial Sequence
  Description of Artificial Sequence: Synthetic oligonucleotide
  Sense strand starting at position 1013 of SEQ ID NO: 1045
cagaaugggugcucaguaa

SEQ ID NO: 83273 - RNA, 19 nt, Artificial Sequence
  Description of Artificial Sequence: Synthetic oligonucleotide
  Antisense strand to SEQ ID NO: 83192
uuacugagcacccauucug

SEQ ID NO: 83274 - RNA, 19 nt, Artificial Sequence
  Description of Artificial Sequence: Synthetic oligonucleotide
  Sense strand starting at position 1107 of SEQ ID NO: 1045
aucucaaaguuguuaugaa

SEQ ID NO: 83275 - RNA, 19 nt, Artificial Sequence
  Description of Artificial Sequence: Synthetic oligonucleotide
  Antisense strand to SEQ ID NO: 83194
uucauaacaacuuugagau

SEQ ID NO: 83276 - RNA, 19 nt, Artificial Sequence
  Description of Artificial Sequence: Synthetic oligonucleotide
  Sense strand starting at position 1550 of SEQ ID NO: 1045
cuguuugggaguuacacuu

SEQ ID NO: 83277 - RNA, 19 nt, Artificial Sequence
  Description of Artificial Sequence: Synthetic oligonucleotide
  Antisense strand to SEQ ID NO: 83196
aaguguaacucccaaacag

SEQ ID NO: 83278 - RNA, 19 nt, Artificial Sequence
  Description of Artificial Sequence: Synthetic oligonucleotide
  Sense strand starting at position 1556 of SEQ ID NO: 1045
gggaguuacacuuaaugcu

SEQ ID NO: 83279 - RNA, 19 nt, Artificial Sequence
  Description of Artificial Sequence: Synthetic oligonucleotide
  Antisense strand to SEQ ID NO: 83198
agcauuaaguguaacuccc

SEQ ID NO: 83280 - RNA, 19 nt, Artificial Sequence
  Description of Artificial Sequence: Synthetic oligonucleotide
  Sense strand starting at position 1576 of SEQ ID NO: 1045
ugggauuggucccuuccuu

SEQ ID NO: 83281 - RNA, 19 nt, Artificial Sequence
  Description of Artificial Sequence: Synthetic oligonucleotide
  Antisense strand to SEQ ID NO: 83200
aaggaagggaccaauccca

SEQ ID NO: 83282 - RNA, 19 nt, Artificial Sequence
  Description of Artificial Sequence: Synthetic oligonucleotide
  Sense strand starting at position 1866 of SEQ ID NO: 1045
gccuguuauguccacacau

SEQ ID NO: 83283 - RNA, 19 nt, Artificial Sequence
  Description of Artificial Sequence: Synthetic oligonucleotide
  Antisense strand to SEQ ID NO: 83202
auguguggacauaacaggc

SEQ ID NO: 83284 - RNA, 19 nt, Artificial Sequence
  Description of Artificial Sequence: Synthetic oligonucleotide
  Sense strand starting at position 2173 of SEQ ID NO: 1045
ggguuagccaugcagaguu

SEQ ID NO: 83285 - RNA, 19 nt, Artificial Sequence
  Description of Artificial Sequence: Synthetic oligonucleotide
  Antisense strand to SEQ ID NO: 83204
aacucugcauggcuaaccc

SEQ ID NO: 83286 - RNA, 19 nt, Artificial Sequence
  Description of Artificial Sequence: Synthetic oligonucleotide
  Sense strand starting at position 2244 of SEQ ID NO: 1045
aagggaguugcguacaagu

SEQ ID NO: 83287 - RNA, 19 nt, Artificial Sequence
  Description of Artificial Sequence: Synthetic oligonucleotide
  Antisense strand to SEQ ID NO: 83206
acuuguacgcaacucccuu

SEQ ID NO: 83288 - RNA, 19 nt, Artificial Sequence
  Description of Artificial Sequence: Synthetic oligonucleotide
  Sense strand starting at position 2246 of SEQ ID NO: 1045
gggaguugcguacaaguaa

SEQ ID NO: 83289 - RNA, 19 nt, Artificial Sequence
  Description of Artificial Sequence: Synthetic oligonucleotide
  Antisense strand to SEQ ID NO: 83208
uuacuuguacgcaacuccc

SEQ ID NO: 83290 - RNA, 19 nt, Artificial Sequence
  Description of Artificial Sequence: Synthetic oligonucleotide
  Sense strand starting at position 2266 of SEQ ID NO: 1045
ucauuaugacuggagcuca

SEQ ID NO: 83291 - RNA, 19 nt, Artificial Sequence
  Description of Artificial Sequence: Synthetic oligonucleotide
  Antisense strand to SEQ ID NO: 83210
ugagcuccagucauaauga

SEQ ID NO: 83292 - RNA, 19 nt, Artificial Sequence
  Description of Artificial Sequence: Synthetic oligonucleotide
  Sense strand starting at position 2360 of SEQ ID NO: 1045
caacguuauuuggacuuua

SEQ ID NO: 83293 - RNA, 19 nt, Artificial Sequence
  Description of Artificial Sequence: Synthetic oligonucleotide
  Antisense strand to SEQ ID NO: 83212
uaaaguccaaauaacguug

SEQ ID NO: 83294 - RNA, 19 nt, Artificial Sequence
  Description of Artificial Sequence: Synthetic oligonucleotide
  Sense strand starting at position 2592 of SEQ ID NO: 1045
gagucaguaggcuaaacaa

SEQ ID NO: 83295 - RNA, 19 nt, Artificial Sequence
  Description of Artificial Sequence: Synthetic oligonucleotide
  Antisense strand to SEQ ID NO: 83214
uuguuuagccuacugacuc

SEQ ID NO: 83296 - RNA, 19 nt, Artificial Sequence
  Description of Artificial Sequence: Synthetic oligonucleotide
  Sense strand starting at position 2718 of SEQ ID NO: 1045
ucuagaagucuguacggau

SEQ ID NO: 83297 - RNA, 19 nt, Artificial Sequence
  Description of Artificial Sequence: Synthetic oligonucleotide
  Antisense strand to SEQ ID NO: 83216
auccguacagacuucuaga

SEQ ID NO: 83298 - RNA, 19 nt, Artificial Sequence
  Description of Artificial Sequence: Synthetic oligonucleotide
  Sense strand starting at position 2733 of SEQ ID NO: 1045
ggaugaggccucugagaug

SEQ ID NO: 83299 - RNA, 19 nt, Artificial Sequence
  Description of Artificial Sequence: Synthetic oligonucleotide
  Antisense strand to SEQ ID NO: 83218
caucucagaggccucaucc

SEQ ID NO: 83300 - RNA, 19 nt, Artificial Sequence
  Description of Artificial Sequence: Synthetic oligonucleotide
  Sense strand starting at position 2738 of SEQ ID NO: 1045
aggccucugagauguauga

SEQ ID NO: 83301 - RNA, 19 nt, Artificial Sequence
  Description of Artificial Sequence: Synthetic oligonucleotide
  Antisense strand to SEQ ID NO: 83220
ucauacaucucagaggccu

SEQ ID NO: 83302 - RNA, 19 nt, Artificial Sequence
  Description of Artificial Sequence: Synthetic oligonucleotide
  Sense strand starting at position 2740 of SEQ ID NO: 1045
gccucugagauguaugaga

SEQ ID NO: 83303 - RNA, 19 nt, Artificial Sequence
  Description of Artificial Sequence: Synthetic oligonucleotide
  Antisense strand to SEQ ID NO: 83222
ucucauacaucucagaggc

SEQ ID NO: 83304 - RNA, 19 nt, Artificial Sequence
  Description of Artificial Sequence: Synthetic oligonucleotide
  Sense strand starting at position 2742 of SEQ ID NO: 1045
cucugagauguaugagauu

SEQ ID NO: 83305 - RNA, 19 nt, Artificial Sequence
  Description of Artificial Sequence: Synthetic oligonucleotide
  Antisense strand to SEQ ID NO: 83224
aaucucauacaucucagag

SEQ ID NO: 83306 - RNA, 19 nt, Artificial Sequence
  Description of Artificial Sequence: Synthetic oligonucleotide
  Sense strand starting at position 2890 of SEQ ID NO: 1045
gagugaugucuuggaagcc

SEQ ID NO: 83307 - RNA, 19 nt, Artificial Sequence
  Description of Artificial Sequence: Synthetic oligonucleotide
  Antisense strand to SEQ ID NO: 83226
ggcuuccaagacaucacuc

SEQ ID NO: 83308 - RNA, 19 nt, Artificial Sequence
  Description of Artificial Sequence: Synthetic oligonucleotide
  Sense strand starting at position 2947 of SEQ ID NO: 1045
gcaagaagagacugaaugu

SEQ ID NO: 83309 - RNA, 19 nt, Artificial Sequence
  Description of Artificial Sequence: Synthetic oligonucleotide
  Antisense strand to SEQ ID NO: 83228
acauucagucucuucuugc

SEQ ID NO: 83310 - RNA, 19 nt, Artificial Sequence
  Description of Artificial Sequence: Synthetic oligonucleotide
  Sense strand starting at position 2953 of SEQ ID NO: 1045
agagacugaaugugucauu

SEQ ID NO: 83311 - RNA, 19 nt, Artificial Sequence
  Description of Artificial Sequence: Synthetic oligonucleotide
  Antisense strand to SEQ ID NO: 83230
aaugacacauucagucucu

SEQ ID NO: 83312 - RNA, 19 nt, Artificial Sequence
  Description of Artificial Sequence: Synthetic oligonucleotide
  Sense strand starting at position 2962 of SEQ ID NO: 1045
augugucauuuggaggaag

SEQ ID NO: 83313 - RNA, 19 nt, Artificial Sequence
  Description of Artificial Sequence: Synthetic oligonucleotide
  Antisense strand to SEQ ID NO: 83232
cuuccuccaaaugacacau

SEQ ID NO: 83314 - RNA, 19 nt, Artificial Sequence
  Description of Artificial Sequence: Synthetic oligonucleotide
  Sense strand starting at position 3037 of SEQ ID NO: 1045
gguugagugagugggcaau

SEQ ID NO: 83315 - RNA, 19 nt, Artificial Sequence
  Description of Artificial Sequence: Synthetic oligonucleotide
  Antisense strand to SEQ ID NO: 83234
auugcccacucacucaacc

SEQ ID NO: 83316 - RNA, 19 nt, Artificial Sequence
  Description of Artificial Sequence: Synthetic oligonucleotide
  Sense strand starting at position 3072 of SEQ ID NO: 1045
gcuuauagguacucuuuga

SEQ ID NO: 83317 - RNA, 19 nt, Artificial Sequence
  Description of Artificial Sequence: Synthetic oligonucleotide
  Antisense strand to SEQ ID NO: 83236
ucaaagaguaccuauaagc

SEQ ID NO: 83318 - RNA, 19 nt, Artificial Sequence
  Description of Artificial Sequence: Synthetic oligonucleotide
  Sense strand starting at position 3076 of SEQ ID NO: 1045
auagguacucuuugaagac

SEQ ID NO: 83319 - RNA, 19 nt, Artificial Sequence
  Description of Artificial Sequence: Synthetic oligonucleotide
  Antisense strand to SEQ ID NO: 83238
gucuucaaagaguaccuau

SEQ ID NO: 83320 - RNA, 19 nt, Artificial Sequence
  Description of Artificial Sequence: Synthetic oligonucleotide
  Sense strand starting at position 3135 of SEQ ID NO: 1045
aagggaauguaggauuaaa

SEQ ID NO: 83321 - RNA, 19 nt, Artificial Sequence
  Description of Artificial Sequence: Synthetic oligonucleotide
  Antisense strand to SEQ ID NO: 83240
uuuaauccuacauucccuu

SEQ ID NO: 83322 - RNA, 19 nt, Artificial Sequence
  Description of Artificial Sequence: Synthetic oligonucleotide
  Sense strand starting at position 3195 of SEQ ID NO: 1045
ggaagaaacuuauggagag

SEQ ID NO: 83323 - RNA, 19 nt, Artificial Sequence
  Description of Artificial Sequence: Synthetic oligonucleotide
  Antisense strand to SEQ ID NO: 83242
cucuccauaaguuucuucc

SEQ ID NO: 83324 - RNA, 19 nt, Artificial Sequence
  Description of Artificial Sequence: Synthetic oligonucleotide
  Sense strand starting at position 3196 of SEQ ID NO: 1045
gaagaaacuuauggagaga

SEQ ID NO: 83325 - RNA, 19 nt, Artificial Sequence
  Description of Artificial Sequence: Synthetic oligonucleotide
  Antisense strand to SEQ ID NO: 83244
ucucuccauaaguuucuuc

SEQ ID NO: 83326 - RNA, 19 nt, Artificial Sequence
  Description of Artificial Sequence: Synthetic oligonucleotide
  Sense strand starting at position 3653 of SEQ ID NO: 1045
gggacacuucuuugauggu

SEQ ID NO: 83327 - RNA, 19 nt, Artificial Sequence
  Description of Artificial Sequence: Synthetic oligonucleotide
  Antisense strand to SEQ ID NO: 83246
accaucaaagaaguguccc

SEQ ID NO: 83328 - RNA, 19 nt, Artificial Sequence
  Description of Artificial Sequence: Synthetic oligonucleotide
  Sense strand starting at position 3694 of SEQ ID NO: 1045
uuggcuuuggcugagagua

SEQ ID NO: 83329 - RNA, 19 nt, Artificial Sequence
  Description of Artificial Sequence: Synthetic oligonucleotide
  Antisense strand to SEQ ID NO: 83248
uacucucagccaaagccaa

SEQ ID NO: 83330 - RNA, 19 nt, Artificial Sequence
  Description of Artificial Sequence: Synthetic oligonucleotide
  Sense strand starting at position 3784 of SEQ ID NO: 1045
ugcccagauccuggugaaa

SEQ ID NO: 83331 - RNA, 19 nt, Artificial Sequence
  Description of Artificial Sequence: Synthetic oligonucleotide
  Antisense strand to SEQ ID NO: 83250
uuucaccaggaucugggca

SEQ ID NO: 83332 - RNA, 19 nt, Artificial Sequence
  Description of Artificial Sequence: Synthetic oligonucleotide
  Sense strand starting at position 18 of SEQ ID NO: 1044
gcucuuccuccuugaugua

SEQ ID NO: 83333 - RNA, 19 nt, Artificial Sequence
  Description of Artificial Sequence: Synthetic oligonucleotide
  Antisense strand to SEQ ID NO: 83252
uacaucaaggaggaagagc

SEQ ID NO: 83334 - RNA, 19 nt, Artificial Sequence
  Description of Artificial Sequence: Synthetic oligonucleotide
  Sense strand starting at position 280 of SEQ ID NO: 1044
ggucuuuagcugggucuca

SEQ ID NO: 83335 - RNA, 19 nt, Artificial Sequence
  Description of Artificial Sequence: Synthetic oligonucleotide
  Antisense strand to SEQ ID NO: 83254
ugagacccagcuaaagacc

SEQ ID NO: 83336 - RNA, 19 nt, Artificial Sequence
  Description of Artificial Sequence: Synthetic oligonucleotide
  Sense strand starting at position 303 of SEQ ID NO: 1044
gcagcccugagauguugau

SEQ ID NO: 83337 - RNA, 19 nt, Artificial Sequence
  Description of Artificial Sequence: Synthetic oligonucleotide
  Antisense strand to SEQ ID NO: 83256
aucaacaucucagggcugc

SEQ ID NO: 83338 - RNA, 19 nt, Artificial Sequence
  Description of Artificial Sequence: Synthetic oligonucleotide
  Sense strand starting at position 309 of SEQ ID NO: 1044
cugagauguugaucaccac

SEQ ID NO: 83339 - RNA, 19 nt, Artificial Sequence
  Description of Artificial Sequence: Synthetic oligonucleotide
  Antisense strand to SEQ ID NO: 83258
guggugaucaacaucucag

SEQ ID NO: 83340 - RNA, 19 nt, Artificial Sequence
  Description of Artificial Sequence: Synthetic oligonucleotide
  Sense strand starting at position 412 of SEQ ID NO: 1044
uccgguggccacugucaua

SEQ ID NO: 83341 - RNA, 19 nt, Artificial Sequence
  Description of Artificial Sequence: Synthetic oligonucleotide
  Antisense strand to SEQ ID NO: 83260
uaugacaguggccaccgga

SEQ ID NO: 83342 - RNA, 19 nt, Artificial Sequence
  Description of Artificial Sequence: Synthetic oligonucleotide
  Sense strand starting at position 423 of SEQ ID NO: 1044
cugucauaauugggacuga

SEQ ID NO: 83343 - RNA, 19 nt, Artificial Sequence
  Description of Artificial Sequence: Synthetic oligonucleotide
  Antisense strand to SEQ ID NO: 83262
ucagucccaauuaugacag

SEQ ID NO: 83344 - RNA, 19 nt, Artificial Sequence
  Description of Artificial Sequence: Synthetic oligonucleotide
  Sense strand starting at position 531 of SEQ ID NO: 1044
ccuggucuccugcaggaga

SEQ ID NO: 83345 - RNA, 19 nt, Artificial Sequence
  Description of Artificial Sequence: Synthetic oligonucleotide
  Antisense strand to SEQ ID NO: 83264
ucuccugcaggagaccagg

SEQ ID NO: 83346 - RNA, 19 nt, Artificial Sequence
  Description of Artificial Sequence: Synthetic oligonucleotide
  Sense strand starting at position 608 of SEQ ID NO: 1044
aguuauugacaugaggcua

SEQ ID NO: 83347 - RNA, 19 nt, Artificial Sequence
  Description of Artificial Sequence: Synthetic oligonucleotide
  Antisense strand to SEQ ID NO: 83266
uagccucaugucaauaacu

SEQ ID NO: 83348 - RNA, 19 nt, Artificial Sequence
  Description of Artificial Sequence: Synthetic oligonucleotide
  Sense strand starting at position 771 of SEQ ID NO: 1044
guagcaaucucuccaggaa

SEQ ID NO: 83349 - RNA, 19 nt, Artificial Sequence
  Description of Artificial Sequence: Synthetic oligonucleotide
  Antisense strand to SEQ ID NO: 83268
uuccuggagagauugcuac

SEQ ID NO: 83350 - RNA, 19 nt, Artificial Sequence
  Description of Artificial Sequence: Synthetic oligonucleotide
  Sense strand starting at position 906 of SEQ ID NO: 1044
cugcacuaaugucucagau

SEQ ID NO: 83351 - RNA, 19 nt, Artificial Sequence
  Description of Artificial Sequence: Synthetic oligonucleotide
  Antisense strand to SEQ ID NO: 83270
aucugagacauuagugcag

SEQ ID NO: 83352 - RNA, 19 nt, Artificial Sequence
  Description of Artificial Sequence: Synthetic oligonucleotide
  Sense strand starting at position 908 of SEQ ID NO: 1044
gcacuaaugucucagauac

SEQ ID NO: 83353 - RNA, 19 nt, Artificial Sequence
  Description of Artificial Sequence: Synthetic oligonucleotide
  Antisense strand to SEQ ID NO: 83272
guaucugagacauuagugc

SEQ ID NO: 83354 - RNA, 19 nt, Artificial Sequence
  Description of Artificial Sequence: Synthetic oligonucleotide
  Sense strand starting at position 925 of SEQ ID NO: 1044
acucauacccagggaggua

SEQ ID NO: 83355 - RNA, 19 nt, Artificial Sequence
  Description of Artificial Sequence: Synthetic oligonucleotide
  Antisense strand to SEQ ID NO: 83274
uaccucccuggguaugagu

SEQ ID NO: 83356 - RNA, 19 nt, Artificial Sequence
  Description of Artificial Sequence: Synthetic oligonucleotide
  Sense strand starting at position 1003 of SEQ ID NO: 1044
acacaaggcuguuauuaaa

SEQ ID NO: 83357 - RNA, 19 nt, Artificial Sequence
  Description of Artificial Sequence: Synthetic oligonucleotide
  Antisense strand to SEQ ID NO: 83276
uuuaauaacagccuugugu

SEQ ID NO: 83358 - RNA, 19 nt, Artificial Sequence
  Description of Artificial Sequence: Synthetic oligonucleotide
  Sense strand starting at position 1006 of SEQ ID NO: 1044
caaggcuguuauuaaauga

SEQ ID NO: 83359 - RNA, 19 nt, Artificial Sequence
  Description of Artificial Sequence: Synthetic oligonucleotide
  Antisense strand to SEQ ID NO: 83278
ucauuuaauaacagccuug

SEQ ID NO: 83360 - RNA, 19 nt, Artificial Sequence
  Description of Artificial Sequence: Synthetic oligonucleotide
  Sense strand starting at position 1048 of SEQ ID NO: 1044
acgugaagcucucuuccuu

SEQ ID NO: 83361 - RNA, 19 nt, Artificial Sequence
  Description of Artificial Sequence: Synthetic oligonucleotide
  Antisense strand to SEQ ID NO: 83280
aaggaagagagcuucacgu

SEQ ID NO: 83362 - RNA, 19 nt, Artificial Sequence
  Description of Artificial Sequence: Synthetic oligonucleotide
  Sense strand starting at position 1086 of SEQ ID NO: 1044
gcaggaaucugagaugcac

SEQ ID NO: 83363 - RNA, 19 nt, Artificial Sequence
  Description of Artificial Sequence: Synthetic oligonucleotide
  Antisense strand to SEQ ID NO: 83282
gugcaucucagauuccugc

SEQ ID NO: 83364 - RNA, 19 nt, Artificial Sequence
  Description of Artificial Sequence: Synthetic oligonucleotide
  Sense strand starting at position 1130 of SEQ ID NO: 1044
cgucuucucacucgagcua

SEQ ID NO: 83365 - RNA, 19 nt, Artificial Sequence
  Description of Artificial Sequence: Synthetic oligonucleotide
  Antisense strand to SEQ ID NO: 83284
uagcucgagugagaagacg

SEQ ID NO: 83366 - RNA, 19 nt, Artificial Sequence
  Description of Artificial Sequence: Synthetic oligonucleotide
  Sense strand starting at position 1137 of SEQ ID NO: 1044
ucacucgagcuagaaauaa

SEQ ID NO: 83367 - RNA, 19 nt, Artificial Sequence
  Description of Artificial Sequence: Synthetic oligonucleotide
  Antisense strand to SEQ ID NO: 83286
uuauuucuagcucgaguga

SEQ ID NO: 83368 - RNA, 19 nt, Artificial Sequence
  Description of Artificial Sequence: Synthetic oligonucleotide
  Sense strand starting at position 1145 of SEQ ID NO: 1044
gcuagaaauaauggugagu

SEQ ID NO: 83369 - RNA, 19 nt, Artificial Sequence
  Description of Artificial Sequence: Synthetic oligonucleotide
  Antisense strand to SEQ ID NO: 83288
acucaccauuauuucuagc

SEQ ID NO: 83370 - RNA, 19 nt, Artificial Sequence
  Description of Artificial Sequence: Synthetic oligonucleotide
  Sense strand starting at position 1147 of SEQ ID NO: 1044
uagaaauaauggugaguca

SEQ ID NO: 83371 - RNA, 19 nt, Artificial Sequence
  Description of Artificial Sequence: Synthetic oligonucleotide
  Antisense strand to SEQ ID NO: 83290
ugacucaccauuauuucua

SEQ ID NO: 83372 - RNA, 19 nt, Artificial Sequence
  Description of Artificial Sequence: Synthetic oligonucleotide
  Sense strand starting at position 1159 of SEQ ID NO: 1044
ugagucauucugggcagaa

SEQ ID NO: 83373 - RNA, 19 nt, Artificial Sequence
  Description of Artificial Sequence: Synthetic oligonucleotide
  Antisense strand to SEQ ID NO: 83292
uucugcccagaaugacuca

SEQ ID NO: 83374 - RNA, 19 nt, Artificial Sequence
  Description of Artificial Sequence: Synthetic oligonucleotide
  Sense strand starting at position 1196 of SEQ ID NO: 1044
ggaggugagcucuaggauu

SEQ ID NO: 83375 - RNA, 19 nt, Artificial Sequence
  Description of Artificial Sequence: Synthetic oligonucleotide
  Antisense strand to SEQ ID NO: 83294
aauccuagagcucaccucc

SEQ ID NO: 83376 - RNA, 19 nt, Artificial Sequence
  Description of Artificial Sequence: Synthetic oligonucleotide
  Sense strand starting at position 1357 of SEQ ID NO: 1044
ggugugacguugccuggaa

SEQ ID NO: 83377 - RNA, 19 nt, Artificial Sequence
  Description of Artificial Sequence: Synthetic oligonucleotide
  Antisense strand to SEQ ID NO: 83296
uuccaggcaacgucacacc

SEQ ID NO: 83378 - RNA, 19 nt, Artificial Sequence
  Description of Artificial Sequence: Synthetic oligonucleotide
  Sense strand starting at position 1358 of SEQ ID NO: 1044
gugugacguugccuggaaa

SEQ ID NO: 83379 - RNA, 19 nt, Artificial Sequence
  Description of Artificial Sequence: Synthetic oligonucleotide
  Antisense strand to SEQ ID NO: 83298
uuuccaggcaacgucacac

SEQ ID NO: 83380 - RNA, 19 nt, Artificial Sequence
  Description of Artificial Sequence: Synthetic oligonucleotide
  Sense strand starting at position 1841 of SEQ ID NO: 1044
aagucugcacuguacgaaa

SEQ ID NO: 83381 - RNA, 19 nt, Artificial Sequence
  Description of Artificial Sequence: Synthetic oligonucleotide
  Antisense strand to SEQ ID NO: 83300
uuucguacagugcagacuu

SEQ ID NO: 83382 - RNA, 19 nt, Artificial Sequence
  Description of Artificial Sequence: Synthetic oligonucleotide
  Sense strand starting at position 2486 of SEQ ID NO: 1044
gcagcaaagccguuuguua

SEQ ID NO: 83383 - RNA, 19 nt, Artificial Sequence
  Description of Artificial Sequence: Synthetic oligonucleotide
  Antisense strand to SEQ ID NO: 83302
uaacaaacggcuuugcugc

SEQ ID NO: 83384 - RNA, 19 nt, Artificial Sequence
  Description of Artificial Sequence: Synthetic oligonucleotide
  Sense strand starting at position 2487 of SEQ ID NO: 1044
cagcaaagccguuuguuau

SEQ ID NO: 83385 - RNA, 19 nt, Artificial Sequence
  Description of Artificial Sequence: Synthetic oligonucleotide
  Antisense strand to SEQ ID NO: 83304
auaacaaacggcuuugcug

SEQ ID NO: 83386 - RNA, 19 nt, Artificial Sequence
  Description of Artificial Sequence: Synthetic oligonucleotide
  Sense strand starting at position 2488 of SEQ ID NO: 1044
agcaaagccguuuguuauu

SEQ ID NO: 83387 - RNA, 19 nt, Artificial Sequence
  Description of Artificial Sequence: Synthetic oligonucleotide
  Antisense strand to SEQ ID NO: 83306
aauaacaaacggcuuugcu

SEQ ID NO: 83388 - RNA, 19 nt, Artificial Sequence
  Description of Artificial Sequence: Synthetic oligonucleotide
  Sense strand starting at position 2497 of SEQ ID NO: 1044
guuuguuauucugugccga

SEQ ID NO: 83389 - RNA, 19 nt, Artificial Sequence
  Description of Artificial Sequence: Synthetic oligonucleotide
  Antisense strand to SEQ ID NO: 83308
ucggcacagaauaacaaac

SEQ ID NO: 83390 - RNA, 19 nt, Artificial Sequence
  Description of Artificial Sequence: Synthetic oligonucleotide
  Sense strand starting at position 2498 of SEQ ID NO: 1044
uuuguuauucugugccgaa

SEQ ID NO: 83391 - RNA, 19 nt, Artificial Sequence
  Description of Artificial Sequence: Synthetic oligonucleotide
  Antisense strand to SEQ ID NO: 83310
uucggcacagaauaacaaa

SEQ ID NO: 83392 - RNA, 19 nt, Artificial Sequence
  Description of Artificial Sequence: Synthetic oligonucleotide
  Sense strand starting at position 2499 of SEQ ID NO: 1044
uuguuauucugugccgaag

SEQ ID NO: 83393 - RNA, 19 nt, Artificial Sequence
  Description of Artificial Sequence: Synthetic oligonucleotide
  Antisense strand to SEQ ID NO: 83312
cuucggcacagaauaacaa

SEQ ID NO: 83394 - RNA, 19 nt, Artificial Sequence
  Description of Artificial Sequence: Synthetic oligonucleotide
  Sense strand starting at position 2565 of SEQ ID NO: 1044
cgcgcuauuuaccagacau

SEQ ID NO: 83395 - RNA, 19 nt, Artificial Sequence
  Description of Artificial Sequence: Synthetic oligonucleotide
  Antisense strand to SEQ ID NO: 83314
augucugguaaauagcgcg

SEQ ID NO: 83396 - RNA, 19 nt, Artificial Sequence
  Description of Artificial Sequence: Synthetic oligonucleotide
  Sense strand starting at position 3088 of SEQ ID NO: 1044
gacggcgaacucgaauuaa

SEQ ID NO: 83397 - RNA, 19 nt, Artificial Sequence
  Description of Artificial Sequence: Synthetic oligonucleotide
  Antisense strand to SEQ ID NO: 83316
uuaauucgaguucgccguc

SEQ ID NO: 83398 - RNA, 19 nt, Artificial Sequence
  Description of Artificial Sequence: Synthetic oligonucleotide
  Sense strand starting at position 3413 of SEQ ID NO: 1044
agagacguguugcuauuau

SEQ ID NO: 83399 - RNA, 19 nt, Artificial Sequence
  Description of Artificial Sequence: Synthetic oligonucleotide
  Antisense strand to SEQ ID NO: 83318
auaauagcaacacgucucu

SEQ ID NO: 83400 - RNA, 19 nt, Artificial Sequence
  Description of Artificial Sequence: Synthetic oligonucleotide
  Sense strand starting at position 3520 of SEQ ID NO: 1044
ccuguuacccagcaaagau

SEQ ID NO: 83401 - RNA, 19 nt, Artificial Sequence
  Description of Artificial Sequence: Synthetic oligonucleotide
  Antisense strand to SEQ ID NO: 83320
aucuuugcuggguaacagg

SEQ ID NO: 83402 - RNA, 19 nt, Artificial Sequence
  Description of Artificial Sequence: Synthetic oligonucleotide
  Sense strand starting at position 3535 of SEQ ID NO: 1044
agauuuggcuucgcaggga

SEQ ID NO: 83403 - RNA, 19 nt, Artificial Sequence
  Description of Artificial Sequence: Synthetic oligonucleotide
  Antisense strand to SEQ ID NO: 83322
ucccugcgaagccaaaucu

SEQ ID NO: 83404 - RNA, 19 nt, Artificial Sequence
  Description of Artificial Sequence: Synthetic oligonucleotide
  Sense strand starting at position 3538 of SEQ ID NO: 1044
uuuggcuucgcagggaaau

SEQ ID NO: 83405 - RNA, 19 nt, Artificial Sequence
  Description of Artificial Sequence: Synthetic oligonucleotide
  Antisense strand to SEQ ID NO: 83324
auuucccugcgaagccaaa

SEQ ID NO: 83406 - RNA, 19 nt, Artificial Sequence
  Description of Artificial Sequence: Synthetic oligonucleotide
  Sense strand starting at position 3785 of SEQ ID NO: 1044
gggcucugaacuuaggagu

SEQ ID NO: 83407 - RNA, 19 nt, Artificial Sequence
  Description of Artificial Sequence: Synthetic oligonucleotide
  Antisense strand to SEQ ID NO: 83326
acuccuaaguucagagccc

SEQ ID NO: 83408 - RNA, 19 nt, Artificial Sequence
  Description of Artificial Sequence: Synthetic oligonucleotide
  Sense strand starting at position 3842 of SEQ ID NO: 1044
cuuugcuuucgggaaaugu

SEQ ID NO: 83409 - RNA, 19 nt, Artificial Sequence
  Description of Artificial Sequence: Synthetic oligonucleotide
  Antisense strand to SEQ ID NO: 83328
acauuucccgaaagcaaag

SEQ ID NO: 83410 - RNA, 19 nt, Artificial Sequence
  Description of Artificial Sequence: Synthetic oligonucleotide
  Sense strand starting at position 3877 of SEQ ID NO: 1044
cuacuuucugccuagauag

SEQ ID NO: 83411 - RNA, 19 nt, Artificial Sequence
  Description of Artificial Sequence: Synthetic oligonucleotide
  Antisense strand to SEQ ID NO: 83330
cuaucuaggcagaaaguag

SEQ ID NO: 83412 - RNA, 19 nt, Artificial Sequence
  Description of Artificial Sequence: Synthetic oligonucleotide
  Sense strand starting at position 45 of SEQ ID NO: 1046
cauauuaaacaucggugaa

SEQ ID NO: 83413 - RNA, 19 nt, Artificial Sequence
  Description of Artificial Sequence: Synthetic oligonucleotide
  Antisense strand to SEQ ID NO: 83332
uucaccgauguuuaauaug

SEQ ID NO: 83414 - RNA, 19 nt, Artificial Sequence
  Description of Artificial Sequence: Synthetic oligonucleotide
  Sense strand starting at position 47 of SEQ ID NO: 1046
uauuaaacaucggugaaua

SEQ ID NO: 83415 - RNA, 19 nt, Artificial Sequence
  Description of Artificial Sequence: Synthetic oligonucleotide
  Antisense strand to SEQ ID NO: 83334
uauucaccgauguuuaaua

SEQ ID NO: 83416 - RNA, 19 nt, Artificial Sequence
  Description of Artificial Sequence: Synthetic oligonucleotide
  Sense strand starting at position 48 of SEQ ID NO: 1046
auuaaacaucggugaauau

SEQ ID NO: 83417 - RNA, 19 nt, Artificial Sequence
  Description of Artificial Sequence: Synthetic oligonucleotide
  Antisense strand to SEQ ID NO: 83336
auauucaccgauguuuaau

SEQ ID NO: 83418 - RNA, 19 nt, Artificial Sequence
  Description of Artificial Sequence: Synthetic oligonucleotide
  Sense strand starting at position 49 of SEQ ID NO: 1046
uuaaacaucggugaauauc

SEQ ID NO: 83419 - RNA, 19 nt, Artificial Sequence
  Description of Artificial Sequence: Synthetic oligonucleotide
  Antisense strand to SEQ ID NO: 83338
gauauucaccgauguuuaa

SEQ ID NO: 83420 - RNA, 19 nt, Artificial Sequence
  Description of Artificial Sequence: Synthetic oligonucleotide
  Sense strand starting at position 84 of SEQ ID NO: 1046
aagaguugggauuauuguu

SEQ ID NO: 83421 - RNA, 19 nt, Artificial Sequence
  Description of Artificial Sequence: Synthetic oligonucleotide
  Antisense strand to SEQ ID NO: 83340
aacaauaaucccaacucuu

SEQ ID NO: 83422 - RNA, 19 nt, Artificial Sequence
  Description of Artificial Sequence: Synthetic oligonucleotide
  Sense strand starting at position 199 of SEQ ID NO: 1046
cuuacucagagucgaguua

SEQ ID NO: 83423 - RNA, 19 nt, Artificial Sequence
  Description of Artificial Sequence: Synthetic oligonucleotide
  Antisense strand to SEQ ID NO: 83342
uaacucgacucugaguaag

SEQ ID NO: 83424 - RNA, 19 nt, Artificial Sequence
  Description of Artificial Sequence: Synthetic oligonucleotide
  Sense strand starting at position 322 of SEQ ID NO: 1046
guaauugaaguuggaaaca

SEQ ID NO: 83425 - RNA, 19 nt, Artificial Sequence
  Description of Artificial Sequence: Synthetic oligonucleotide
  Antisense strand to SEQ ID NO: 83344
uguuuccaacuucaauuac

SEQ ID NO: 83426 - RNA, 19 nt, Artificial Sequence
  Description of Artificial Sequence: Synthetic oligonucleotide
  Sense strand starting at position 376 of SEQ ID NO: 1046
ggcgauggcacagagagau

SEQ ID NO: 83427 - RNA, 19 nt, Artificial Sequence
  Description of Artificial Sequence: Synthetic oligonucleotide
  Antisense strand to SEQ ID NO: 83346
aucucucugugccaucgcc

SEQ ID NO: 83428 - RNA, 19 nt, Artificial Sequence
  Description of Artificial Sequence: Synthetic oligonucleotide
  Sense strand starting at position 605 of SEQ ID NO: 1046
agcguuugcccgaggaucu

SEQ ID NO: 83429 - RNA, 19 nt, Artificial Sequence
  Description of Artificial Sequence: Synthetic oligonucleotide
  Antisense strand to SEQ ID NO: 83348
agauccucgggcaaacgcu

SEQ ID NO: 83430 - RNA, 19 nt, Artificial Sequence
  Description of Artificial Sequence: Synthetic oligonucleotide
  Sense strand starting at position 741 of SEQ ID NO: 1046
cgguacccagagugauaaa

SEQ ID NO: 83431 - RNA, 19 nt, Artificial Sequence
  Description of Artificial Sequence: Synthetic oligonucleotide
  Antisense strand to SEQ ID NO: 83350
uuuaucacucuggguaccg

SEQ ID NO: 83432 - RNA, 19 nt, Artificial Sequence
  Description of Artificial Sequence: Synthetic oligonucleotide
  Sense strand starting at position 765 of SEQ ID NO: 1046
gaaugauggccacaauguc

SEQ ID NO: 83433 - RNA, 19 nt, Artificial Sequence
  Description of Artificial Sequence: Synthetic oligonucleotide
  Antisense strand to SEQ ID NO: 83352
gacauuguggccaucauuc

SEQ ID NO: 83434 - RNA, 19 nt, Artificial Sequence
  Description of Artificial Sequence: Synthetic oligonucleotide
  Sense strand starting at position 795 of SEQ ID NO: 1046
ugauguuucgcgagaaggu

SEQ ID NO: 83435 - RNA, 19 nt, Artificial Sequence
  Description of Artificial Sequence: Synthetic oligonucleotide
  Antisense strand to SEQ ID NO: 83354
accuucucgcgaaacauca

SEQ ID NO: 83436 - RNA, 19 nt, Artificial Sequence
  Description of Artificial Sequence: Synthetic oligonucleotide
  Sense strand starting at position 1222 of SEQ ID NO: 1046
gcggaucuccucggagaaa

SEQ ID NO: 83437 - RNA, 19 nt, Artificial Sequence
  Description of Artificial Sequence: Synthetic oligonucleotide
  Antisense strand to SEQ ID NO: 83356
uuucuccgaggagauccgc

SEQ ID NO: 83438 - RNA, 19 nt, Artificial Sequence
  Description of Artificial Sequence: Synthetic oligonucleotide
  Sense strand starting at position 1316 of SEQ ID NO: 1046
ggccgguugcggucgaaga

SEQ ID NO: 83439 - RNA, 19 nt, Artificial Sequence
  Description of Artificial Sequence: Synthetic oligonucleotide
  Antisense strand to SEQ ID NO: 83358
ucuucgaccgcaaccggcc

SEQ ID NO: 83440 - RNA, 19 nt, Artificial Sequence
  Description of Artificial Sequence: Synthetic oligonucleotide
  Sense strand starting at position 1320 of SEQ ID NO: 1046
gguugcggucgaagaagua

SEQ ID NO: 83441 - RNA, 19 nt, Artificial Sequence
  Description of Artificial Sequence: Synthetic oligonucleotide
  Antisense strand to SEQ ID NO: 83360
uacuucuucgaccgcaacc

SEQ ID NO: 83442 - RNA, 19 nt, Artificial Sequence
  Description of Artificial Sequence: Synthetic oligonucleotide
  Sense strand starting at position 2523 of SEQ ID NO: 1046
gggaguaaugggugcugau

SEQ ID NO: 83443 - RNA, 19 nt, Artificial Sequence
  Description of Artificial Sequence: Synthetic oligonucleotide
  Antisense strand to SEQ ID NO: 83362
aucagcacccauuacuccc

SEQ ID NO: 83444 - RNA, 19 nt, Artificial Sequence
  Description of Artificial Sequence: Synthetic oligonucleotide
  Sense strand starting at position 2664 of SEQ ID NO: 1046
ccaaguuucugauugggau

SEQ ID NO: 83445 - RNA, 19 nt, Artificial Sequence
  Description of Artificial Sequence: Synthetic oligonucleotide
  Antisense strand to SEQ ID NO: 83364
aucccaaucagaaacuugg

SEQ ID NO: 83446 - RNA, 19 nt, Artificial Sequence
  Description of Artificial Sequence: Synthetic oligonucleotide
  Sense strand starting at position 2665 of SEQ ID NO: 1046
caaguuucugauugggauu

SEQ ID NO: 83447 - RNA, 19 nt, Artificial Sequence
  Description of Artificial Sequence: Synthetic oligonucleotide
  Antisense strand to SEQ ID NO: 83366
aaucccaaucagaaacuug

SEQ ID NO: 83448 - RNA, 19 nt, Artificial Sequence
  Description of Artificial Sequence: Synthetic oligonucleotide
  Sense strand starting at position 2773 of SEQ ID NO: 1046
gaaguugugugguuagaaa

SEQ ID NO: 83449 - RNA, 19 nt, Artificial Sequence
  Description of Artificial Sequence: Synthetic oligonucleotide
  Antisense strand to SEQ ID NO: 83368
uuucuaaccacacaacuuc

SEQ ID NO: 83450 - RNA, 19 nt, Artificial Sequence
  Description of Artificial Sequence: Synthetic oligonucleotide
  Sense strand starting at position 2775 of SEQ ID NO: 1046
aguugugugguuagaaagu

SEQ ID NO: 83451 - RNA, 19 nt, Artificial Sequence
  Description of Artificial Sequence: Synthetic oligonucleotide
  Antisense strand to SEQ ID NO: 83370
acuuucuaaccacacaacu

SEQ ID NO: 83452 - RNA, 19 nt, Artificial Sequence
  Description of Artificial Sequence: Synthetic oligonucleotide
  Sense strand starting at position 2887 of SEQ ID NO: 1046
gggaauuugcagcgcucua

SEQ ID NO: 83453 - RNA, 19 nt, Artificial Sequence
  Description of Artificial Sequence: Synthetic oligonucleotide
  Antisense strand to SEQ ID NO: 83372
uagagcgcugcaaauuccc

SEQ ID NO: 83454 - RNA, 19 nt, Artificial Sequence
  Description of Artificial Sequence: Synthetic oligonucleotide
  Sense strand starting at position 2894 of SEQ ID NO: 1046
ugcagcgcucuaguuguua

SEQ ID NO: 83455 - RNA, 19 nt, Artificial Sequence
  Description of Artificial Sequence: Synthetic oligonucleotide
  Antisense strand to SEQ ID NO: 83374
uaacaacuagagcgcugca

SEQ ID NO: 83456 - RNA, 19 nt, Artificial Sequence
  Description of Artificial Sequence: Synthetic oligonucleotide
  Sense strand starting at position 2905 of SEQ ID NO: 1046
aguuguuaaacuggaagga

SEQ ID NO: 83457 - RNA, 19 nt, Artificial Sequence
  Description of Artificial Sequence: Synthetic oligonucleotide
  Antisense strand to SEQ ID NO: 83376
uccuuccaguuuaacaacu

SEQ ID NO: 83458 - RNA, 19 nt, Artificial Sequence
  Description of Artificial Sequence: Synthetic oligonucleotide
  Sense strand starting at position 2952 of SEQ ID NO: 1046
uugaucugggcccagagau

SEQ ID NO: 83459 - RNA, 19 nt, Artificial Sequence
  Description of Artificial Sequence: Synthetic oligonucleotide
  Antisense strand to SEQ ID NO: 83378
aucucugggcccagaucaa

SEQ ID NO: 83460 - RNA, 19 nt, Artificial Sequence
  Description of Artificial Sequence: Synthetic oligonucleotide
  Sense strand starting at position 3124 of SEQ ID NO: 1046
gaggaacuauugucuagac

SEQ ID NO: 83461 - RNA, 19 nt, Artificial Sequence
  Description of Artificial Sequence: Synthetic oligonucleotide
  Antisense strand to SEQ ID NO: 83380
gucuagacaauaguuccuc

SEQ ID NO: 83462 - RNA, 19 nt, Artificial Sequence
  Description of Artificial Sequence: Synthetic oligonucleotide
  Sense strand starting at position 3125 of SEQ ID NO: 1046
aggaacuauugucuagaca

SEQ ID NO: 83463 - RNA, 19 nt, Artificial Sequence
  Description of Artificial Sequence: Synthetic oligonucleotide
  Antisense strand to SEQ ID NO: 83382
ugucuagacaauaguuccu

SEQ ID NO: 83464 - RNA, 19 nt, Artificial Sequence
  Description of Artificial Sequence: Synthetic oligonucleotide
  Sense strand starting at position 3283 of SEQ ID NO: 1046
accaaagugccuuguaaau

SEQ ID NO: 83465 - RNA, 19 nt, Artificial Sequence
  Description of Artificial Sequence: Synthetic oligonucleotide
  Antisense strand to SEQ ID NO: 83384
auuuacaaggcacuuuggu

SEQ ID NO: 83466 - RNA, 19 nt, Artificial Sequence
  Description of Artificial Sequence: Synthetic oligonucleotide
  Sense strand starting at position 3293 of SEQ ID NO: 1046
cuuguaaaugguggagacu

SEQ ID NO: 83467 - RNA, 19 nt, Artificial Sequence
  Description of Artificial Sequence: Synthetic oligonucleotide
  Antisense strand to SEQ ID NO: 83386
agucuccaccauuuacaag

SEQ ID NO: 83468 - RNA, 19 nt, Artificial Sequence
  Description of Artificial Sequence: Synthetic oligonucleotide
  Sense strand starting at position 3294 of SEQ ID NO: 1046
uuguaaaugguggagacuu

SEQ ID NO: 83469 - RNA, 19 nt, Artificial Sequence
  Description of Artificial Sequence: Synthetic oligonucleotide
  Antisense strand to SEQ ID NO: 83388
aagucuccaccauuuacaa

SEQ ID NO: 83470 - RNA, 19 nt, Artificial Sequence
  Description of Artificial Sequence: Synthetic oligonucleotide
  Sense strand starting at position 3302 of SEQ ID NO: 1046
gguggagacuugguacaua

SEQ ID NO: 83471 - RNA, 19 nt, Artificial Sequence
  Description of Artificial Sequence: Synthetic oligonucleotide
  Antisense strand to SEQ ID NO: 83390
uauguaccaagucuccacc

SEQ ID NO: 83472 - RNA, 19 nt, Artificial Sequence
  Description of Artificial Sequence: Synthetic oligonucleotide
  Sense strand starting at position 3313 of SEQ ID NO: 1046
gguacauacuugucagauu

SEQ ID NO: 83473 - RNA, 19 nt, Artificial Sequence
  Description of Artificial Sequence: Synthetic oligonucleotide
  Antisense strand to SEQ ID NO: 83392
aaucugacaaguauguacc

SEQ ID NO: 83474 - RNA, 19 nt, Artificial Sequence
  Description of Artificial Sequence: Synthetic oligonucleotide
  Sense strand starting at position 3347 of SEQ ID NO: 1046
ugucucuuugcguugcuau

SEQ ID NO: 83475 - RNA, 19 nt, Artificial Sequence
  Description of Artificial Sequence: Synthetic oligonucleotide
  Antisense strand to SEQ ID NO: 83394
auagcaacgcaaagagaca

SEQ ID NO: 83476 - RNA, 19 nt, Artificial Sequence
  Description of Artificial Sequence: Synthetic oligonucleotide
  Sense strand starting at position 3467 of SEQ ID NO: 1046
gcucauuuauuccauagga

SEQ ID NO: 83477 - RNA, 19 nt, Artificial Sequence
  Description of Artificial Sequence: Synthetic oligonucleotide
  Antisense strand to SEQ ID NO: 83396
uccuauggaauaaaugagc

SEQ ID NO: 83478 - RNA, 19 nt, Artificial Sequence
  Description of Artificial Sequence: Synthetic oligonucleotide
  Sense strand starting at position 3593 of SEQ ID NO: 1046
uauguuguggaauggcaaa

SEQ ID NO: 83479 - RNA, 19 nt, Artificial Sequence
  Description of Artificial Sequence: Synthetic oligonucleotide
  Antisense strand to SEQ ID NO: 83398
uuugccauuccacaacaua

SEQ ID NO: 83480 - RNA, 19 nt, Artificial Sequence
  Description of Artificial Sequence: Synthetic oligonucleotide
  Sense strand starting at position 3698 of SEQ ID NO: 1046
uugagcuggugauuagagu

SEQ ID NO: 83481 - RNA, 19 nt, Artificial Sequence
  Description of Artificial Sequence: Synthetic oligonucleotide
  Antisense strand to SEQ ID NO: 83400
acucuaaucaccagcucaa

SEQ ID NO: 83482 - RNA, 19 nt, Artificial Sequence
  Description of Artificial Sequence: Synthetic oligonucleotide
  Sense strand starting at position 3699 of SEQ ID NO: 1046
ugagcuggugauuagagua

SEQ ID NO: 83483 - RNA, 19 nt, Artificial Sequence
  Description of Artificial Sequence: Synthetic oligonucleotide
  Antisense strand to SEQ ID NO: 83402
uacucuaaucaccagcuca

SEQ ID NO: 83484 - RNA, 19 nt, Artificial Sequence
  Description of Artificial Sequence: Synthetic oligonucleotide
  Sense strand starting at position 3704 of SEQ ID NO: 1046
uggugauuagaguagcagu

SEQ ID NO: 83485 - RNA, 19 nt, Artificial Sequence
  Description of Artificial Sequence: Synthetic oligonucleotide
  Antisense strand to SEQ ID NO: 83404
acugcuacucuaaucacca

SEQ ID NO: 83486 - RNA, 19 nt, Artificial Sequence
  Description of Artificial Sequence: Synthetic oligonucleotide
  Sense strand starting at position 3712 of SEQ ID NO: 1046
agaguagcaguauaaucaa

SEQ ID NO: 83487 - RNA, 19 nt, Artificial Sequence
  Description of Artificial Sequence: Synthetic oligonucleotide
  Antisense strand to SEQ ID NO: 83406
uugauuauacugcuacucu

SEQ ID NO: 83488 - RNA, 19 nt, Artificial Sequence
  Description of Artificial Sequence: Synthetic oligonucleotide
  Sense strand starting at position 3715 of SEQ ID NO: 1046
guagcaguauaaucaauca

SEQ ID NO: 83489 - RNA, 19 nt, Artificial Sequence
  Description of Artificial Sequence: Synthetic oligonucleotide
  Antisense strand to SEQ ID NO: 83408
ugauugauuauacugcuac

SEQ ID NO: 83490 - RNA, 19 nt, Artificial Sequence
  Description of Artificial Sequence: Synthetic oligonucleotide
  Sense strand starting at position 3927 of SEQ ID NO: 1046
aggauaguccugugacaaa

SEQ ID NO: 83491 - RNA, 19 nt, Artificial Sequence
  Description of Artificial Sequence: Synthetic oligonucleotide
  Antisense strand to SEQ ID NO: 83410
uuugucacaggacuauccu

SEQ ID NO: 83492 - RNA, 19 nt, Artificial Sequence
  Description of Artificial Sequence: Synthetic oligonucleotide
  Sense strand starting at position 3597 of SEQ ID NO: 1051
uggugucugccagggcaua

SEQ ID NO: 83493 - RNA, 19 nt, Artificial Sequence
  Description of Artificial Sequence: Synthetic oligonucleotide
  Antisense strand to SEQ ID NO: 83412
uaugcccuggcagacacca

SEQ ID NO: 83494 - RNA, 19 nt, Artificial Sequence
  Description of Artificial Sequence: Synthetic oligonucleotide
  Sense strand starting at position 3456 of SEQ ID NO: 1051
ggauuugucugauuguagc

SEQ ID NO: 83495 - RNA, 19 nt, Artificial Sequence
  Description of Artificial Sequence: Synthetic oligonucleotide
  Antisense strand to SEQ ID NO: 83414
gcuacaaucagacaaaucc

SEQ ID NO: 83496 - RNA, 19 nt, Artificial Sequence
  Description of Artificial Sequence: Synthetic oligonucleotide
  Sense strand starting at position 3454 of SEQ ID NO: 1051
uuggauuugucugauugua

SEQ ID NO: 83497 - RNA, 19 nt, Artificial Sequence
  Description of Artificial Sequence: Synthetic oligonucleotide
  Antisense strand to SEQ ID NO: 83416
uacaaucagacaaauccaa

SEQ ID NO: 83498 - RNA, 19 nt, Artificial Sequence
  Description of Artificial Sequence: Synthetic oligonucleotide
  Sense strand starting at position 3450 of SEQ ID NO: 1051
ugcuuuggauuugucugau

SEQ ID NO: 83499 - RNA, 19 nt, Artificial Sequence
  Description of Artificial Sequence: Synthetic oligonucleotide
  Antisense strand to SEQ ID NO: 83418
aucagacaaauccaaagca

SEQ ID NO: 83500 - RNA, 19 nt, Artificial Sequence
  Description of Artificial Sequence: Synthetic oligonucleotide
  Sense strand starting at position 3449 of SEQ ID NO: 1051
uugcuuuggauuugucuga

SEQ ID NO: 83501 - RNA, 19 nt, Artificial Sequence
  Description of Artificial Sequence: Synthetic oligonucleotide
  Antisense strand to SEQ ID NO: 83420
ucagacaaauccaaagcaa

SEQ ID NO: 83502 - RNA, 19 nt, Artificial Sequence
  Description of Artificial Sequence: Synthetic oligonucleotide
  Sense strand starting at position 3318 of SEQ ID NO: 1051
cacaaauggcauugguuau

SEQ ID NO: 83503 - RNA, 19 nt, Artificial Sequence
  Description of Artificial Sequence: Synthetic oligonucleotide
  Antisense strand to SEQ ID NO: 83422
auaaccaaugccauuugug

SEQ ID NO: 83504 - RNA, 19 nt, Artificial Sequence
  Description of Artificial Sequence: Synthetic oligonucleotide
  Sense strand starting at position 3245 of SEQ ID NO: 1051
ucuauuagguguucccaau

SEQ ID NO: 83505 - RNA, 19 nt, Artificial Sequence
  Description of Artificial Sequence: Synthetic oligonucleotide
  Antisense strand to SEQ ID NO: 83424
auugggaacaccuaauaga

SEQ ID NO: 83506 - RNA, 19 nt, Artificial Sequence
  Description of Artificial Sequence: Synthetic oligonucleotide
  Sense strand starting at position 3233 of SEQ ID NO: 1051
aucgccugauccucuauua

SEQ ID NO: 83507 - RNA, 19 nt, Artificial Sequence
  Description of Artificial Sequence: Synthetic oligonucleotide
  Antisense strand to SEQ ID NO: 83426
uaauagaggaucaggcgau

SEQ ID NO: 83508 - RNA, 19 nt, Artificial Sequence
  Description of Artificial Sequence: Synthetic oligonucleotide
  Sense strand starting at position 3202 of SEQ ID NO: 1051
ccagcauuguaccuaagau

SEQ ID NO: 83509 - RNA, 19 nt, Artificial Sequence
  Description of Artificial Sequence: Synthetic oligonucleotide
  Antisense strand to SEQ ID NO: 83428
aucuuagguacaaugcugg

SEQ ID NO: 83510 - RNA, 19 nt, Artificial Sequence
  Description of Artificial Sequence: Synthetic oligonucleotide
  Sense strand starting at position 3121 of SEQ ID NO: 1051
uuugaaagugcguagcaau

SEQ ID NO: 83511 - RNA, 19 nt, Artificial Sequence
  Description of Artificial Sequence: Synthetic oligonucleotide
  Antisense strand to SEQ ID NO: 83430
auugcuacgcacuuucaaa

SEQ ID NO: 83512 - RNA, 19 nt, Artificial Sequence
  Description of Artificial Sequence: Synthetic oligonucleotide
  Sense strand starting at position 3120 of SEQ ID NO: 1051
guuugaaagugcguagcaa

SEQ ID NO: 83513 - RNA, 19 nt, Artificial Sequence
  Description of Artificial Sequence: Synthetic oligonucleotide
  Antisense strand to SEQ ID NO: 83432
uugcuacgcacuuucaaac

SEQ ID NO: 83514 - RNA, 19 nt, Artificial Sequence
  Description of Artificial Sequence: Synthetic oligonucleotide
  Sense strand starting at position 3111 of SEQ ID NO: 1051
cucugaacuguuugaaagu

SEQ ID NO: 83515 - RNA, 19 nt, Artificial Sequence
  Description of Artificial Sequence: Synthetic oligonucleotide
  Antisense strand to SEQ ID NO: 83434
acuuucaaacaguucagag

SEQ ID NO: 83516 - RNA, 19 nt, Artificial Sequence
  Description of Artificial Sequence: Synthetic oligonucleotide
  Sense strand starting at position 2724 of SEQ ID NO: 1051
uugucucacuuguaugcau

SEQ ID NO: 83517 - RNA, 19 nt, Artificial Sequence
  Description of Artificial Sequence: Synthetic oligonucleotide
  Antisense strand to SEQ ID NO: 83436
augcauacaagugagacaa

SEQ ID NO: 83518 - RNA, 19 nt, Artificial Sequence
  Description of Artificial Sequence: Synthetic oligonucleotide
  Sense strand starting at position 2720 of SEQ ID NO: 1051
ccucuugucucacuuguau

SEQ ID NO: 83519 - RNA, 19 nt, Artificial Sequence
  Description of Artificial Sequence: Synthetic oligonucleotide
  Antisense strand to SEQ ID NO: 83438
auacaagugagacaagagg

SEQ ID NO: 83520 - RNA, 19 nt, Artificial Sequence
  Description of Artificial Sequence: Synthetic oligonucleotide
  Sense strand starting at position 2713 of SEQ ID NO: 1051
uuguuuaccucuugucuca

SEQ ID NO: 83521 - RNA, 19 nt, Artificial Sequence
  Description of Artificial Sequence: Synthetic oligonucleotide
  Antisense strand to SEQ ID NO: 83440
ugagacaagagguaaacaa

SEQ ID NO: 83522 - RNA, 19 nt, Artificial Sequence
  Description of Artificial Sequence: Synthetic oligonucleotide
  Sense strand starting at position 2684 of SEQ ID NO: 1051
auauacucuugaucgcaau

SEQ ID NO: 83523 - RNA, 19 nt, Artificial Sequence
  Description of Artificial Sequence: Synthetic oligonucleotide
  Antisense strand to SEQ ID NO: 83442
auugcgaucaagaguauau

SEQ ID NO: 83524 - RNA, 19 nt, Artificial Sequence
  Description of Artificial Sequence: Synthetic oligonucleotide
  Sense strand starting at position 2682 of SEQ ID NO: 1051
ccauauacucuugaucgca

SEQ ID NO: 83525 - RNA, 19 nt, Artificial Sequence
  Description of Artificial Sequence: Synthetic oligonucleotide
  Antisense strand to SEQ ID NO: 83444
ugcgaucaagaguauaugg

SEQ ID NO: 83526 - RNA, 19 nt, Artificial Sequence
  Description of Artificial Sequence: Synthetic oligonucleotide
  Sense strand starting at position 2505 of SEQ ID NO: 1051
ggaauccggucauuaaauc

SEQ ID NO: 83527 - RNA, 19 nt, Artificial Sequence
  Description of Artificial Sequence: Synthetic oligonucleotide
  Antisense strand to SEQ ID NO: 83446
gauuuaaugaccggauucc

SEQ ID NO: 83528 - RNA, 19 nt, Artificial Sequence
  Description of Artificial Sequence: Synthetic oligonucleotide
  Sense strand starting at position 2449 of SEQ ID NO: 1051
ccaacuucucacggagcaa

SEQ ID NO: 83529 - RNA, 19 nt, Artificial Sequence
  Description of Artificial Sequence: Synthetic oligonucleotide
  Antisense strand to SEQ ID NO: 83448
uugcuccgugagaaguugg

SEQ ID NO: 83530 - RNA, 19 nt, Artificial Sequence
  Description of Artificial Sequence: Synthetic oligonucleotide
  Sense strand starting at position 2388 of SEQ ID NO: 1051
agcaaaucuuccggauuua

SEQ ID NO: 83531 - RNA, 19 nt, Artificial Sequence
  Description of Artificial Sequence: Synthetic oligonucleotide
  Antisense strand to SEQ ID NO: 83450
uaaauccggaagauuugcu

SEQ ID NO: 83532 - RNA, 19 nt, Artificial Sequence
  Description of Artificial Sequence: Synthetic oligonucleotide
  Sense strand starting at position 2387 of SEQ ID NO: 1051
gagcaaaucuuccggauuu

SEQ ID NO: 83533 - RNA, 19 nt, Artificial Sequence
  Description of Artificial Sequence: Synthetic oligonucleotide
  Antisense strand to SEQ ID NO: 83452
aaauccggaagauuugcuc

SEQ ID NO: 83534 - RNA, 19 nt, Artificial Sequence
  Description of Artificial Sequence: Synthetic oligonucleotide
  Sense strand starting at position 2375 of SEQ ID NO: 1051
gcgugugaccuggagcaaa

SEQ ID NO: 83535 - RNA, 19 nt, Artificial Sequence
  Description of Artificial Sequence: Synthetic oligonucleotide
  Antisense strand to SEQ ID NO: 83454
uuugcuccaggucacacgc

SEQ ID NO: 83536 - RNA, 19 nt, Artificial Sequence
  Description of Artificial Sequence: Synthetic oligonucleotide
  Sense strand starting at position 2364 of SEQ ID NO: 1051
ccacuuggucugcguguga

SEQ ID NO: 83537 - RNA, 19 nt, Artificial Sequence
  Description of Artificial Sequence: Synthetic oligonucleotide
  Antisense strand to SEQ ID NO: 83456
ucacacgcagaccaagugg

SEQ ID NO: 83538 - RNA, 19 nt, Artificial Sequence
  Description of Artificial Sequence: Synthetic oligonucleotide
  Sense strand starting at position 1486 of SEQ ID NO: 1051
gauggauaccucugugacc

SEQ ID NO: 83539 - RNA, 19 nt, Artificial Sequence
  Description of Artificial Sequence: Synthetic oligonucleotide
  Antisense strand to SEQ ID NO: 83458
ggucacagagguauccauc

SEQ ID NO: 83540 - RNA, 19 nt, Artificial Sequence
  Description of Artificial Sequence: Synthetic oligonucleotide
  Sense strand starting at position 1347 of SEQ ID NO: 1051
caccuacucgucucgcuua

SEQ ID NO: 83541 - RNA, 19 nt, Artificial Sequence
  Description of Artificial Sequence: Synthetic oligonucleotide
  Antisense strand to SEQ ID NO: 83460
uaagcgagacgaguaggug

SEQ ID NO: 83542 - RNA, 19 nt, Artificial Sequence
  Description of Artificial Sequence: Synthetic oligonucleotide
  Sense strand starting at position 929 of SEQ ID NO: 1051
gucagauuaugucacugcu

SEQ ID NO: 83543 - RNA, 19 nt, Artificial Sequence
  Description of Artificial Sequence: Synthetic oligonucleotide
  Antisense strand to SEQ ID NO: 83462
agcagugacauaaucugac

SEQ ID NO: 83544 - RNA, 19 nt, Artificial Sequence
  Description of Artificial Sequence: Synthetic oligonucleotide
  Sense strand starting at position 921 of SEQ ID NO: 1051
gaacauaagucagauuaug

SEQ ID NO: 83545 - RNA, 19 nt, Artificial Sequence
  Description of Artificial Sequence: Synthetic oligonucleotide
  Antisense strand to SEQ ID NO: 83464
cauaaucugacuuauguuc

SEQ ID NO: 83546 - RNA, 19 nt, Artificial Sequence
  Description of Artificial Sequence: Synthetic oligonucleotide
  Sense strand starting at position 907 of SEQ ID NO: 1051
gggugauccucccagaaca

SEQ ID NO: 83547 - RNA, 19 nt, Artificial Sequence
  Description of Artificial Sequence: Synthetic oligonucleotide
  Antisense strand to SEQ ID NO: 83466
uguucugggaggaucaccc

SEQ ID NO: 83548 - RNA, 19 nt, Artificial Sequence
  Description of Artificial Sequence: Synthetic oligonucleotide
  Sense strand starting at position 603 of SEQ ID NO: 1051
cucggauuccugggucaga

SEQ ID NO: 83549 - RNA, 19 nt, Artificial Sequence
  Description of Artificial Sequence: Synthetic oligonucleotide
  Antisense strand to SEQ ID NO: 83468
ucugacccaggaauccgag

SEQ ID NO: 83550 - RNA, 19 nt, Artificial Sequence
  Description of Artificial Sequence: Synthetic oligonucleotide
  Sense strand starting at position 567 of SEQ ID NO: 1051
cuguguggcucagcuauga

SEQ ID NO: 83551 - RNA, 19 nt, Artificial Sequence
  Description of Artificial Sequence: Synthetic oligonucleotide
  Antisense strand to SEQ ID NO: 83470
ucauagcugagccacacag

SEQ ID NO: 83552 - RNA, 19 nt, Artificial Sequence
  Description of Artificial Sequence: Synthetic oligonucleotide
  Sense strand starting at position 565 of SEQ ID NO: 1051
gccuguguggcucagcuau

SEQ ID NO: 83553 - RNA, 19 nt, Artificial Sequence
  Description of Artificial Sequence: Synthetic oligonucleotide
  Antisense strand to SEQ ID NO: 83472
auagcugagccacacaggc

SEQ ID NO: 83554 - RNA, 19 nt, Artificial Sequence
  Description of Artificial Sequence: Synthetic oligonucleotide
  Sense strand starting at position 423 of SEQ ID NO: 1051
ugcucagcucuugaauaua

SEQ ID NO: 83555 - RNA, 19 nt, Artificial Sequence
  Description of Artificial Sequence: Synthetic oligonucleotide
  Antisense strand to SEQ ID NO: 83474
uauauucaagagcugagca

SEQ ID NO: 83556 - RNA, 19 nt, Artificial Sequence
  Description of Artificial Sequence: Synthetic oligonucleotide
  Sense strand starting at position 422 of SEQ ID NO: 1051
uugcucagcucuugaauau

SEQ ID NO: 83557 - RNA, 19 nt, Artificial Sequence
  Description of Artificial Sequence: Synthetic oligonucleotide
  Antisense strand to SEQ ID NO: 83476
auauucaagagcugagcaa

SEQ ID NO: 83558 - RNA, 19 nt, Artificial Sequence
  Description of Artificial Sequence: Synthetic oligonucleotide
  Sense strand starting at position 173 of SEQ ID NO: 1051
cuucuuccggcuuauaaac

SEQ ID NO: 83559 - RNA, 19 nt, Artificial Sequence
  Description of Artificial Sequence: Synthetic oligonucleotide
  Antisense strand to SEQ ID NO: 83478
guuuauaagccggaagaag

SEQ ID NO: 83560 - RNA, 19 nt, Artificial Sequence
  Description of Artificial Sequence: Synthetic oligonucleotide
  Sense strand starting at position 151 of SEQ ID NO: 1051
ucacuuaucugcgauuccu

SEQ ID NO: 83561 - RNA, 19 nt, Artificial Sequence
  Description of Artificial Sequence: Synthetic oligonucleotide
  Antisense strand to SEQ ID NO: 83480
aggaaucgcagauaaguga

SEQ ID NO: 83562 - RNA, 19 nt, Artificial Sequence
  Description of Artificial Sequence: Synthetic oligonucleotide
  Sense strand starting at position 3892 of SEQ ID NO: 1047
ccuggagccuucucgauuu

SEQ ID NO: 83563 - RNA, 19 nt, Artificial Sequence
  Description of Artificial Sequence: Synthetic oligonucleotide
  Antisense strand to SEQ ID NO: 83482
aaaucgagaaggcuccagg

SEQ ID NO: 83564 - RNA, 19 nt, Artificial Sequence
  Description of Artificial Sequence: Synthetic oligonucleotide
  Sense strand starting at position 3779 of SEQ ID NO: 1047
gaaugugaguuccugucuu

SEQ ID NO: 83565 - RNA, 19 nt, Artificial Sequence
  Description of Artificial Sequence: Synthetic oligonucleotide
  Antisense strand to SEQ ID NO: 83484
aagacaggaacucacauuc

SEQ ID NO: 83566 - RNA, 19 nt, Artificial Sequence
  Description of Artificial Sequence: Synthetic oligonucleotide
  Sense strand starting at position 3770 of SEQ ID NO: 1047
guaaccauagaaugugagu

SEQ ID NO: 83567 - RNA, 19 nt, Artificial Sequence
  Description of Artificial Sequence: Synthetic oligonucleotide
  Antisense strand to SEQ ID NO: 83486
acucacauucuaugguuac

SEQ ID NO: 83568 - RNA, 19 nt, Artificial Sequence
  Description of Artificial Sequence: Synthetic oligonucleotide
  Sense strand starting at position 3752 of SEQ ID NO: 1047
ggcagaguuguuggaauag

SEQ ID NO: 83569 - RNA, 19 nt, Artificial Sequence
  Description of Artificial Sequence: Synthetic oligonucleotide
  Antisense strand to SEQ ID NO: 83488
cuauuccaacaacucugcc

SEQ ID NO: 83570 - RNA, 19 nt, Artificial Sequence
  Description of Artificial Sequence: Synthetic oligonucleotide
  Sense strand starting at position 3750 of SEQ ID NO: 1047
uuggcagaguuguuggaau

SEQ ID NO: 83571 - RNA, 19 nt, Artificial Sequence
  Description of Artificial Sequence: Synthetic oligonucleotide
  Antisense strand to SEQ ID NO: 83490
auuccaacaacucugccaa

SEQ ID NO: 83572 - RNA, 19 nt, Artificial Sequence
  Description of Artificial Sequence: Synthetic oligonucleotide
  Sense strand starting at position 3731 of SEQ ID NO: 1047
cgauaaugaugauucucau

SEQ ID NO: 83573 - RNA, 19 nt, Artificial Sequence
  Description of Artificial Sequence: Synthetic oligonucleotide
  Antisense strand to SEQ ID NO: 83492
augagaaucaucauuaucg

SEQ ID NO: 83574 - RNA, 19 nt, Artificial Sequence
  Description of Artificial Sequence: Synthetic oligonucleotide
  Sense strand starting at position 3722 of SEQ ID NO: 1047
guaagauggcgauaaugau

SEQ ID NO: 83575 - RNA, 19 nt, Artificial Sequence
  Description of Artificial Sequence: Synthetic oligonucleotide
  Antisense strand to SEQ ID NO: 83494
aucauuaucgccaucuuac

SEQ ID NO: 83576 - RNA, 19 nt, Artificial Sequence
  Description of Artificial Sequence: Synthetic oligonucleotide
  Sense strand starting at position 3720 of SEQ ID NO: 1047
cuguaagauggcgauaaug

SEQ ID NO: 83577 - RNA, 19 nt, Artificial Sequence
  Description of Artificial Sequence: Synthetic oligonucleotide
  Antisense strand to SEQ ID NO: 83496
cauuaucgccaucuuacag

SEQ ID NO: 83578 - RNA, 19 nt, Artificial Sequence
  Description of Artificial Sequence: Synthetic oligonucleotide
  Sense strand starting at position 3688 of SEQ ID NO: 1047
uguuuauccuuucugaguc

SEQ ID NO: 83579 - RNA, 19 nt, Artificial Sequence
  Description of Artificial Sequence: Synthetic oligonucleotide
  Antisense strand to SEQ ID NO: 83498
gacucagaaaggauaaaca

SEQ ID NO: 83580 - RNA, 19 nt, Artificial Sequence
  Description of Artificial Sequence: Synthetic oligonucleotide
  Sense strand starting at position 3685 of SEQ ID NO: 1047
ggcuguuuauccuuucuga

SEQ ID NO: 83581 - RNA, 19 nt, Artificial Sequence
  Description of Artificial Sequence: Synthetic oligonucleotide
  Antisense strand to SEQ ID NO: 83500
ucagaaaggauaaacagcc

SEQ ID NO: 83582 - RNA, 19 nt, Artificial Sequence
  Description of Artificial Sequence: Synthetic oligonucleotide
  Sense strand starting at position 3657 of SEQ ID NO: 1047
auaauagcuagcuguguga

SEQ ID NO: 83583 - RNA, 19 nt, Artificial Sequence
  Description of Artificial Sequence: Synthetic oligonucleotide
  Antisense strand to SEQ ID NO: 83502
ucacacagcuagcuauuau

SEQ ID NO: 83584 - RNA, 19 nt, Artificial Sequence
  Description of Artificial Sequence: Synthetic oligonucleotide
  Sense strand starting at position 3606 of SEQ ID NO: 1047
guuauaauagcuuacagua

SEQ ID NO: 83585 - RNA, 19 nt, Artificial Sequence
  Description of Artificial Sequence: Synthetic oligonucleotide
  Antisense strand to SEQ ID NO: 83504
uacuguaagcuauuauaac

SEQ ID NO: 83586 - RNA, 19 nt, Artificial Sequence
  Description of Artificial Sequence: Synthetic oligonucleotide
  Sense strand starting at position 3596 of SEQ ID NO: 1047
gugggagguaguuauaaua

SEQ ID NO: 83587 - RNA, 19 nt, Artificial Sequence
  Description of Artificial Sequence: Synthetic oligonucleotide
  Antisense strand to SEQ ID NO: 83506
uauuauaacuaccucccac

SEQ ID NO: 83588 - RNA, 19 nt, Artificial Sequence
  Description of Artificial Sequence: Synthetic oligonucleotide
  Sense strand starting at position 3592 of SEQ ID NO: 1047
gguagugggagguaguuau

SEQ ID NO: 83589 - RNA, 19 nt, Artificial Sequence
  Description of Artificial Sequence: Synthetic oligonucleotide
  Antisense strand to SEQ ID NO: 83508
auaacuaccucccacuacc

SEQ ID NO: 83590 - RNA, 19 nt, Artificial Sequence
  Description of Artificial Sequence: Synthetic oligonucleotide
  Sense strand starting at position 3577 of SEQ ID NO: 1047
ggccuccuugauugaggua

SEQ ID NO: 83591 - RNA, 19 nt, Artificial Sequence
  Description of Artificial Sequence: Synthetic oligonucleotide
  Antisense strand to SEQ ID NO: 83510
uaccucaaucaaggaggcc

SEQ ID NO: 83592 - RNA, 19 nt, Artificial Sequence
  Description of Artificial Sequence: Synthetic oligonucleotide
  Sense strand starting at position 3476 of SEQ ID NO: 1047
cgaaucuguccugaaguua

SEQ ID NO: 83593 - RNA, 19 nt, Artificial Sequence
  Description of Artificial Sequence: Synthetic oligonucleotide
  Antisense strand to SEQ ID NO: 83512
uaacuucaggacagauucg

SEQ ID NO: 83594 - RNA, 19 nt, Artificial Sequence
  Description of Artificial Sequence: Synthetic oligonucleotide
  Sense strand starting at position 3473 of SEQ ID NO: 1047
cugcgaaucuguccugaag

SEQ ID NO: 83595 - RNA, 19 nt, Artificial Sequence
  Description of Artificial Sequence: Synthetic oligonucleotide
  Antisense strand to SEQ ID NO: 83514
cuucaggacagauucgcag

SEQ ID NO: 83596 - RNA, 19 nt, Artificial Sequence
  Description of Artificial Sequence: Synthetic oligonucleotide
  Sense strand starting at position 3393 of SEQ ID NO: 1047
ugcugaauagaucagcaga

SEQ ID NO: 83597 - RNA, 19 nt, Artificial Sequence
  Description of Artificial Sequence: Synthetic oligonucleotide
  Antisense strand to SEQ ID NO: 83516
ucugcugaucuauucagca

SEQ ID NO: 83598 - RNA, 19 nt, Artificial Sequence
  Description of Artificial Sequence: Synthetic oligonucleotide
  Sense strand starting at position 3388 of SEQ ID NO: 1047
auaguugcugaauagauca

SEQ ID NO: 83599 - RNA, 19 nt, Artificial Sequence
  Description of Artificial Sequence: Synthetic oligonucleotide
  Antisense strand to SEQ ID NO: 83518
ugaucuauucagcaacuau

SEQ ID NO: 83600 - RNA, 19 nt, Artificial Sequence
  Description of Artificial Sequence: Synthetic oligonucleotide
  Sense strand starting at position 3383 of SEQ ID NO: 1047
gggaaauaguugcugaaua

SEQ ID NO: 83601 - RNA, 19 nt, Artificial Sequence
  Description of Artificial Sequence: Synthetic oligonucleotide
  Antisense strand to SEQ ID NO: 83520
uauucagcaacuauuuccc

SEQ ID NO: 83602 - RNA, 19 nt, Artificial Sequence
  Description of Artificial Sequence: Synthetic oligonucleotide
  Sense strand starting at position 3381 of SEQ ID NO: 1047
ucgggaaauaguugcugaa

SEQ ID NO: 83603 - RNA, 19 nt, Artificial Sequence
  Description of Artificial Sequence: Synthetic oligonucleotide
  Antisense strand to SEQ ID NO: 83522
uucagcaacuauuucccga

SEQ ID NO: 83604 - RNA, 19 nt, Artificial Sequence
  Description of Artificial Sequence: Synthetic oligonucleotide
  Sense strand starting at position 3373 of SEQ ID NO: 1047
acaagugcucgggaaauag

SEQ ID NO: 83605 - RNA, 19 nt, Artificial Sequence
  Description of Artificial Sequence: Synthetic oligonucleotide
  Antisense strand to SEQ ID NO: 83524
cuauuucccgagcacuugu

SEQ ID NO: 83606 - RNA, 19 nt, Artificial Sequence
  Description of Artificial Sequence: Synthetic oligonucleotide
  Sense strand starting at position 3371 of SEQ ID NO: 1047
acacaagugcucgggaaau

SEQ ID NO: 83607 - RNA, 19 nt, Artificial Sequence
  Description of Artificial Sequence: Synthetic oligonucleotide
  Antisense strand to SEQ ID NO: 83526
auuucccgagcacuugugu

SEQ ID NO: 83608 - RNA, 19 nt, Artificial Sequence
  Description of Artificial Sequence: Synthetic oligonucleotide
  Sense strand starting at position 3370 of SEQ ID NO: 1047
aacacaagugcucgggaaa

SEQ ID NO: 83609 - RNA, 19 nt, Artificial Sequence
  Description of Artificial Sequence: Synthetic oligonucleotide
  Antisense strand to SEQ ID NO: 83528
uuucccgagcacuuguguu

SEQ ID NO: 83610 - RNA, 19 nt, Artificial Sequence
  Description of Artificial Sequence: Synthetic oligonucleotide
  Sense strand starting at position 3369 of SEQ ID NO: 1047
gaacacaagugcucgggaa

SEQ ID NO: 83611 - RNA, 19 nt, Artificial Sequence
  Description of Artificial Sequence: Synthetic oligonucleotide
  Antisense strand to SEQ ID NO: 83530
uucccgagcacuuguguuc

SEQ ID NO: 83612 - RNA, 19 nt, Artificial Sequence
  Description of Artificial Sequence: Synthetic oligonucleotide
  Sense strand starting at position 3355 of SEQ ID NO: 1047
cuucuuaugcacuggaaca

SEQ ID NO: 83613 - RNA, 19 nt, Artificial Sequence
  Description of Artificial Sequence: Synthetic oligonucleotide
  Antisense strand to SEQ ID NO: 83532
uguuccagugcauaagaag

SEQ ID NO: 83614 - RNA, 19 nt, Artificial Sequence
  Description of Artificial Sequence: Synthetic oligonucleotide
  Sense strand starting at position 3321 of SEQ ID NO: 1047
uuucuagaugcuugaagac

SEQ ID NO: 83615 - RNA, 19 nt, Artificial Sequence
  Description of Artificial Sequence: Synthetic oligonucleotide
  Antisense strand to SEQ ID NO: 83534
gucuucaagcaucuagaaa

SEQ ID NO: 83616 - RNA, 19 nt, Artificial Sequence
  Description of Artificial Sequence: Synthetic oligonucleotide
  Sense strand starting at position 3320 of SEQ ID NO: 1047
cuuucuagaugcuugaaga

SEQ ID NO: 83617 - RNA, 19 nt, Artificial Sequence
  Description of Artificial Sequence: Synthetic oligonucleotide
  Antisense strand to SEQ ID NO: 83536
ucuucaagcaucuagaaag

SEQ ID NO: 83618 - RNA, 19 nt, Artificial Sequence
  Description of Artificial Sequence: Synthetic oligonucleotide
  Sense strand starting at position 3317 of SEQ ID NO: 1047
uggcuuucuagaugcuuga

SEQ ID NO: 83619 - RNA, 19 nt, Artificial Sequence
  Description of Artificial Sequence: Synthetic oligonucleotide
  Antisense strand to SEQ ID NO: 83538
ucaagcaucuagaaagcca

SEQ ID NO: 83620 - RNA, 19 nt, Artificial Sequence
  Description of Artificial Sequence: Synthetic oligonucleotide
  Sense strand starting at position 3160 of SEQ ID NO: 1047
ggucucaggcauuacacau

SEQ ID NO: 83621 - RNA, 19 nt, Artificial Sequence
  Description of Artificial Sequence: Synthetic oligonucleotide
  Antisense strand to SEQ ID NO: 83540
auguguaaugccugagacc

SEQ ID NO: 83622 - RNA, 19 nt, Artificial Sequence
  Description of Artificial Sequence: Synthetic oligonucleotide
  Sense strand starting at position 3157 of SEQ ID NO: 1047
cugggucucaggcauuaca

SEQ ID NO: 83623 - RNA, 19 nt, Artificial Sequence
  Description of Artificial Sequence: Synthetic oligonucleotide
  Antisense strand to SEQ ID NO: 83542
uguaaugccugagacccag

SEQ ID NO: 83624 - RNA, 19 nt, Artificial Sequence
  Description of Artificial Sequence: Synthetic oligonucleotide
  Sense strand starting at position 2826 of SEQ ID NO: 1047
ggacgucugugaaggaaau

SEQ ID NO: 83625 - RNA, 19 nt, Artificial Sequence
  Description of Artificial Sequence: Synthetic oligonucleotide
  Antisense strand to SEQ ID NO: 83544
auuuccuucacagacgucc

SEQ ID NO: 83626 - RNA, 19 nt, Artificial Sequence
  Description of Artificial Sequence: Synthetic oligonucleotide
  Sense strand starting at position 2823 of SEQ ID NO: 1047
gguggacgucugugaagga

SEQ ID NO: 83627 - RNA, 19 nt, Artificial Sequence
  Description of Artificial Sequence: Synthetic oligonucleotide
  Antisense strand to SEQ ID NO: 83546
uccuucacagacguccacc

SEQ ID NO: 83628 - RNA, 19 nt, Artificial Sequence
  Description of Artificial Sequence: Synthetic oligonucleotide
  Sense strand starting at position 2763 of SEQ ID NO: 1047
gugucuaacuucuuaggag

SEQ ID NO: 83629 - RNA, 19 nt, Artificial Sequence
  Description of Artificial Sequence: Synthetic oligonucleotide
  Antisense strand to SEQ ID NO: 83548
cuccuaagaaguuagacac

SEQ ID NO: 83630 - RNA, 19 nt, Artificial Sequence
  Description of Artificial Sequence: Synthetic oligonucleotide
  Sense strand starting at position 1044 of SEQ ID NO: 1047
acggaugagccuugagaag

SEQ ID NO: 83631 - RNA, 19 nt, Artificial Sequence
  Description of Artificial Sequence: Synthetic oligonucleotide
  Antisense strand to SEQ ID NO: 83550
cuucucaaggcucauccgu

SEQ ID NO: 83632 - RNA, 19 nt, Artificial Sequence
  Description of Artificial Sequence: Synthetic oligonucleotide
  Sense strand starting at position 827 of SEQ ID NO: 1047
ggagaagcuuaagauagga

SEQ ID NO: 83633 - RNA, 19 nt, Artificial Sequence
  Description of Artificial Sequence: Synthetic oligonucleotide
  Antisense strand to SEQ ID NO: 83552
uccuaucuuaagcuucucc

SEQ ID NO: 83634 - RNA, 19 nt, Artificial Sequence
  Description of Artificial Sequence: Synthetic oligonucleotide
  Sense strand starting at position 622 of SEQ ID NO: 1047
aagcacagucccuguaaga

SEQ ID NO: 83635 - RNA, 19 nt, Artificial Sequence
  Description of Artificial Sequence: Synthetic oligonucleotide
  Antisense strand to SEQ ID NO: 83554
ucuuacagggacugugcuu

SEQ ID NO: 83636 - RNA, 19 nt, Artificial Sequence
  Description of Artificial Sequence: Synthetic oligonucleotide
  Sense strand starting at position 584 of SEQ ID NO: 1047
gggcuuuccaccuggagca

SEQ ID NO: 83637 - RNA, 19 nt, Artificial Sequence
  Description of Artificial Sequence: Synthetic oligonucleotide
  Antisense strand to SEQ ID NO: 83556
ugcuccagguggaaagccc

SEQ ID NO: 83638 - RNA, 19 nt, Artificial Sequence
  Description of Artificial Sequence: Synthetic oligonucleotide
  Sense strand starting at position 267 of SEQ ID NO: 1047
gcuauuacuuaugucaucu

SEQ ID NO: 83639 - RNA, 19 nt, Artificial Sequence
  Description of Artificial Sequence: Synthetic oligonucleotide
  Antisense strand to SEQ ID NO: 83558
agaugacauaaguaauagc

SEQ ID NO: 83640 - RNA, 19 nt, Artificial Sequence
  Description of Artificial Sequence: Synthetic oligonucleotide
  Sense strand starting at position 213 of SEQ ID NO: 1047
cucggauguggauguauua

SEQ ID NO: 83641 - RNA, 19 nt, Artificial Sequence
  Description of Artificial Sequence: Synthetic oligonucleotide
  Antisense strand to SEQ ID NO: 83560
uaauacauccacauccgag

SEQ ID NO: 83642 - RNA, 19 nt, Artificial Sequence
  Description of Artificial Sequence: Synthetic oligonucleotide
  Sense strand starting at position 3925 of SEQ ID NO: 1048
ccaguuaagcaugggaaga

SEQ ID NO: 83643 - RNA, 19 nt, Artificial Sequence
  Description of Artificial Sequence: Synthetic oligonucleotide
  Antisense strand to SEQ ID NO: 83562
ucuucccaugcuuaacugg

SEQ ID NO: 83644 - RNA, 19 nt, Artificial Sequence
  Description of Artificial Sequence: Synthetic oligonucleotide
  Sense strand starting at position 3842 of SEQ ID NO: 1048
aaccauaggccguaagaga

SEQ ID NO: 83645 - RNA, 19 nt, Artificial Sequence
  Description of Artificial Sequence: Synthetic oligonucleotide
  Antisense strand to SEQ ID NO: 83564
ucucuuacggccuaugguu

SEQ ID NO: 83646 - RNA, 19 nt, Artificial Sequence
  Description of Artificial Sequence: Synthetic oligonucleotide
  Sense strand starting at position 3712 of SEQ ID NO: 1048
uuugccaugugacuuuaua

SEQ ID NO: 83647 - RNA, 19 nt, Artificial Sequence
  Description of Artificial Sequence: Synthetic oligonucleotide
  Antisense strand to SEQ ID NO: 83566
uauaaagucacauggcaaa

SEQ ID NO: 83648 - RNA, 19 nt, Artificial Sequence
  Description of Artificial Sequence: Synthetic oligonucleotide
  Sense strand starting at position 3665 of SEQ ID NO: 1048
auggaaguauugcucccaa

SEQ ID NO: 83649 - RNA, 19 nt, Artificial Sequence
  Description of Artificial Sequence: Synthetic oligonucleotide
  Antisense strand to SEQ ID NO: 83568
uugggagcaauacuuccau

SEQ ID NO: 83650 - RNA, 19 nt, Artificial Sequence
  Description of Artificial Sequence: Synthetic oligonucleotide
  Sense strand starting at position 3631 of SEQ ID NO: 1048
ggagaucaucagggcuauu

SEQ ID NO: 83651 - RNA, 19 nt, Artificial Sequence
  Description of Artificial Sequence: Synthetic oligonucleotide
  Antisense strand to SEQ ID NO: 83570
aauagcccugaugaucucc

SEQ ID NO: 83652 - RNA, 19 nt, Artificial Sequence
  Description of Artificial Sequence: Synthetic oligonucleotide
  Sense strand starting at position 3540 of SEQ ID NO: 1048
gaagucuucuuggcucuca

SEQ ID NO: 83653 - RNA, 19 nt, Artificial Sequence
  Description of Artificial Sequence: Synthetic oligonucleotide
  Antisense strand to SEQ ID NO: 83572
ugagagccaagaagacuuc

SEQ ID NO: 83654 - RNA, 19 nt, Artificial Sequence
  Description of Artificial Sequence: Synthetic oligonucleotide
  Sense strand starting at position 3528 of SEQ ID NO: 1048
ugccuucuccgugaagucu

SEQ ID NO: 83655 - RNA, 19 nt, Artificial Sequence
  Description of Artificial Sequence: Synthetic oligonucleotide
  Antisense strand to SEQ ID NO: 83574
agacuucacggagaaggca

SEQ ID NO: 83656 - RNA, 19 nt, Artificial Sequence
  Description of Artificial Sequence: Synthetic oligonucleotide
  Sense strand starting at position 3461 of SEQ ID NO: 1048
ggaauaugcuucccagccu

SEQ ID NO: 83657 - RNA, 19 nt, Artificial Sequence
  Description of Artificial Sequence: Synthetic oligonucleotide
  Antisense strand to SEQ ID NO: 83576
aggcugggaagcauauucc

SEQ ID NO: 83658 - RNA, 19 nt, Artificial Sequence
  Description of Artificial Sequence: Synthetic oligonucleotide
  Sense strand starting at position 3445 of SEQ ID NO: 1048
ggcuguuguaucuacugga

SEQ ID NO: 83659 - RNA, 19 nt, Artificial Sequence
  Description of Artificial Sequence: Synthetic oligonucleotide
  Antisense strand to SEQ ID NO: 83578
uccaguagauacaacagcc

SEQ ID NO: 83660 - RNA, 19 nt, Artificial Sequence
  Description of Artificial Sequence: Synthetic oligonucleotide
  Sense strand starting at position 3219 of SEQ ID NO: 1048
gcuuccuuccuagagcaga

SEQ ID NO: 83661 - RNA, 19 nt, Artificial Sequence
  Description of Artificial Sequence: Synthetic oligonucleotide
  Antisense strand to SEQ ID NO: 83580
ucugcucuaggaaggaagc

SEQ ID NO: 83662 - RNA, 19 nt, Artificial Sequence
  Description of Artificial Sequence: Synthetic oligonucleotide
  Sense strand starting at position 2966 of SEQ ID NO: 1048
ccuaacaugcuccgaauga

SEQ ID NO: 83663 - RNA, 19 nt, Artificial Sequence
  Description of Artificial Sequence: Synthetic oligonucleotide
  Antisense strand to SEQ ID NO: 83582
ucauucggagcauguuagg

SEQ ID NO: 83664 - RNA, 19 nt, Artificial Sequence
  Description of Artificial Sequence: Synthetic oligonucleotide
  Sense strand starting at position 2964 of SEQ ID NO: 1048
agccuaacaugcuccgaau

SEQ ID NO: 83665 - RNA, 19 nt, Artificial Sequence
  Description of Artificial Sequence: Synthetic oligonucleotide
  Antisense strand to SEQ ID NO: 83584
auucggagcauguuaggcu

SEQ ID NO: 83666 - RNA, 19 nt, Artificial Sequence
  Description of Artificial Sequence: Synthetic oligonucleotide
  Sense strand starting at position 2854 of SEQ ID NO: 1048
ggccuuggcaauugaaaug

SEQ ID NO: 83667 - RNA, 19 nt, Artificial Sequence
  Description of Artificial Sequence: Synthetic oligonucleotide
  Antisense strand to SEQ ID NO: 83586
cauuucaauugccaaggcc

SEQ ID NO: 83668 - RNA, 19 nt, Artificial Sequence
  Description of Artificial Sequence: Synthetic oligonucleotide
  Sense strand starting at position 2770 of SEQ ID NO: 1048
cgcaguguggaagguaaau

SEQ ID NO: 83669 - RNA, 19 nt, Artificial Sequence
  Description of Artificial Sequence: Synthetic oligonucleotide
  Antisense strand to SEQ ID NO: 83588
auuuaccuuccacacugcg

SEQ ID NO: 83670 - RNA, 19 nt, Artificial Sequence
  Description of Artificial Sequence: Synthetic oligonucleotide
  Sense strand starting at position 2635 of SEQ ID NO: 1048
ucaucuuccggcugagaaa

SEQ ID NO: 83671 - RNA, 19 nt, Artificial Sequence
  Description of Artificial Sequence: Synthetic oligonucleotide
  Antisense strand to SEQ ID NO: 83590
uuucucagccggaagauga

SEQ ID NO: 83672 - RNA, 19 nt, Artificial Sequence
  Description of Artificial Sequence: Synthetic oligonucleotide
  Sense strand starting at position 2503 of SEQ ID NO: 1048
gggaaaugcuuugagacua

SEQ ID NO: 83673 - RNA, 19 nt, Artificial Sequence
  Description of Artificial Sequence: Synthetic oligonucleotide
  Antisense strand to SEQ ID NO: 83592
uagucucaaagcauuuccc

SEQ ID NO: 83674 - RNA, 19 nt, Artificial Sequence
  Description of Artificial Sequence: Synthetic oligonucleotide
  Sense strand starting at position 2502 of SEQ ID NO: 1048
ugggaaaugcuuugagacu

SEQ ID NO: 83675 - RNA, 19 nt, Artificial Sequence
  Description of Artificial Sequence: Synthetic oligonucleotide
  Antisense strand to SEQ ID NO: 83594
agucucaaagcauuuccca

SEQ ID NO: 83676 - RNA, 19 nt, Artificial Sequence
  Description of Artificial Sequence: Synthetic oligonucleotide
  Sense strand starting at position 2376 of SEQ ID NO: 1048
ugauacuaccgguagcuau

SEQ ID NO: 83677 - RNA, 19 nt, Artificial Sequence
  Description of Artificial Sequence: Synthetic oligonucleotide
  Antisense strand to SEQ ID NO: 83596
auagcuaccgguaguauca

SEQ ID NO: 83678 - RNA, 19 nt, Artificial Sequence
  Description of Artificial Sequence: Synthetic oligonucleotide
  Sense strand starting at position 2360 of SEQ ID NO: 1048
ccgagauggguauaucuga

SEQ ID NO: 83679 - RNA, 19 nt, Artificial Sequence
  Description of Artificial Sequence: Synthetic oligonucleotide
  Antisense strand to SEQ ID NO: 83598
ucagauauacccaucucgg

SEQ ID NO: 83680 - RNA, 19 nt, Artificial Sequence
  Description of Artificial Sequence: Synthetic oligonucleotide
  Sense strand starting at position 2358 of SEQ ID NO: 1048
acccgagauggguauaucu

SEQ ID NO: 83681 - RNA, 19 nt, Artificial Sequence
  Description of Artificial Sequence: Synthetic oligonucleotide
  Antisense strand to SEQ ID NO: 83600
agauauacccaucucgggu

SEQ ID NO: 83682 - RNA, 19 nt, Artificial Sequence
  Description of Artificial Sequence: Synthetic oligonucleotide
  Sense strand starting at position 2168 of SEQ ID NO: 1048
aggccuugcucuuugguau

SEQ ID NO: 83683 - RNA, 19 nt, Artificial Sequence
  Description of Artificial Sequence: Synthetic oligonucleotide
  Antisense strand to SEQ ID NO: 83602
auaccaaagagcaaggccu

SEQ ID NO: 83684 - RNA, 19 nt, Artificial Sequence
  Description of Artificial Sequence: Synthetic oligonucleotide
  Sense strand starting at position 1649 of SEQ ID NO: 1048
auggucuccucuguuauuu

SEQ ID NO: 83685 - RNA, 19 nt, Artificial Sequence
  Description of Artificial Sequence: Synthetic oligonucleotide
  Antisense strand to SEQ ID NO: 83604
aaauaacagaggagaccau

SEQ ID NO: 83686 - RNA, 19 nt, Artificial Sequence
  Description of Artificial Sequence: Synthetic oligonucleotide
  Sense strand starting at position 1613 of SEQ ID NO: 1048
ggucuaauuccggaucaga

SEQ ID NO: 83687 - RNA, 19 nt, Artificial Sequence
  Description of Artificial Sequence: Synthetic oligonucleotide
  Antisense strand to SEQ ID NO: 83606
ucugauccggaauuagacc

SEQ ID NO: 83688 - RNA, 19 nt, Artificial Sequence
  Description of Artificial Sequence: Synthetic oligonucleotide
  Sense strand starting at position 1584 of SEQ ID NO: 1048
aaggucuucugcuuugcaa

SEQ ID NO: 83689 - RNA, 19 nt, Artificial Sequence
  Description of Artificial Sequence: Synthetic oligonucleotide
  Antisense strand to SEQ ID NO: 83608
uugcaaagcagaagaccuu

SEQ ID NO: 83690 - RNA, 19 nt, Artificial Sequence
  Description of Artificial Sequence: Synthetic oligonucleotide
  Sense strand starting at position 1316 of SEQ ID NO: 1048
gugcuuccugcacagacau

SEQ ID NO: 83691 - RNA, 19 nt, Artificial Sequence
  Description of Artificial Sequence: Synthetic oligonucleotide
  Antisense strand to SEQ ID NO: 83610
augucugugcaggaagcac

SEQ ID NO: 83692 - RNA, 19 nt, Artificial Sequence
  Description of Artificial Sequence: Synthetic oligonucleotide
  Sense strand starting at position 1124 of SEQ ID NO: 1048
ggugacaccuguccagaga

SEQ ID NO: 83693 - RNA, 19 nt, Artificial Sequence
  Description of Artificial Sequence: Synthetic oligonucleotide
  Antisense strand to SEQ ID NO: 83612
ucucuggacaggugucacc

SEQ ID NO: 83694 - RNA, 19 nt, Artificial Sequence
  Description of Artificial Sequence: Synthetic oligonucleotide
  Sense strand starting at position 1084 of SEQ ID NO: 1048
accugagauugagaaggaa

SEQ ID NO: 83695 - RNA, 19 nt, Artificial Sequence
  Description of Artificial Sequence: Synthetic oligonucleotide
  Antisense strand to SEQ ID NO: 83614
uuccuucucaaucucaggu

SEQ ID NO: 83696 - RNA, 19 nt, Artificial Sequence
  Description of Artificial Sequence: Synthetic oligonucleotide
  Sense strand starting at position 1045 of SEQ ID NO: 1048
cugaauuguucuguuuacu

SEQ ID NO: 83697 - RNA, 19 nt, Artificial Sequence
  Description of Artificial Sequence: Synthetic oligonucleotide
  Antisense strand to SEQ ID NO: 83616
aguaaacagaacaauucag

SEQ ID NO: 83698 - RNA, 19 nt, Artificial Sequence
  Description of Artificial Sequence: Synthetic oligonucleotide
  Sense strand starting at position 1035 of SEQ ID NO: 1048
ccuggaauuucugaauugu

SEQ ID NO: 83699 - RNA, 19 nt, Artificial Sequence
  Description of Artificial Sequence: Synthetic oligonucleotide
  Antisense strand to SEQ ID NO: 83618
acaauucagaaauuccagg

SEQ ID NO: 83700 - RNA, 19 nt, Artificial Sequence
  Description of Artificial Sequence: Synthetic oligonucleotide
  Sense strand starting at position 1024 of SEQ ID NO: 1048
agacuccucuaccuggaau

SEQ ID NO: 83701 - RNA, 19 nt, Artificial Sequence
  Description of Artificial Sequence: Synthetic oligonucleotide
  Antisense strand to SEQ ID NO: 83620
auuccagguagaggagucu

SEQ ID NO: 83702 - RNA, 19 nt, Artificial Sequence
  Description of Artificial Sequence: Synthetic oligonucleotide
  Sense strand starting at position 990 of SEQ ID NO: 1048
cucauuaagucaguaggaa

SEQ ID NO: 83703 - RNA, 19 nt, Artificial Sequence
  Description of Artificial Sequence: Synthetic oligonucleotide
  Antisense strand to SEQ ID NO: 83622
uuccuacugacuuaaugag

SEQ ID NO: 83704 - RNA, 19 nt, Artificial Sequence
  Description of Artificial Sequence: Synthetic oligonucleotide
  Sense strand starting at position 983 of SEQ ID NO: 1048
uguuaaccucauuaaguca

SEQ ID NO: 83705 - RNA, 19 nt, Artificial Sequence
  Description of Artificial Sequence: Synthetic oligonucleotide
  Antisense strand to SEQ ID NO: 83624
ugacuuaaugagguuaaca

SEQ ID NO: 83706 - RNA, 19 nt, Artificial Sequence
  Description of Artificial Sequence: Synthetic oligonucleotide
  Sense strand starting at position 982 of SEQ ID NO: 1048
auguuaaccucauuaaguc

SEQ ID NO: 83707 - RNA, 19 nt, Artificial Sequence
  Description of Artificial Sequence: Synthetic oligonucleotide
  Antisense strand to SEQ ID NO: 83626
gacuuaaugagguuaacau

SEQ ID NO: 83708 - RNA, 19 nt, Artificial Sequence
  Description of Artificial Sequence: Synthetic oligonucleotide
  Sense strand starting at position 977 of SEQ ID NO: 1048
ggaagauguuaaccucauu

SEQ ID NO: 83709 - RNA, 19 nt, Artificial Sequence
  Description of Artificial Sequence: Synthetic oligonucleotide
  Antisense strand to SEQ ID NO: 83628
aaugagguuaacaucuucc

SEQ ID NO: 83710 - RNA, 19 nt, Artificial Sequence
  Description of Artificial Sequence: Synthetic oligonucleotide
  Sense strand starting at position 947 of SEQ ID NO: 1048
gaauuaacaccgugacaug

SEQ ID NO: 83711 - RNA, 19 nt, Artificial Sequence
  Description of Artificial Sequence: Synthetic oligonucleotide
  Antisense strand to SEQ ID NO: 83630
caugucacgguguuaauuc

SEQ ID NO: 83712 - RNA, 19 nt, Artificial Sequence
  Description of Artificial Sequence: Synthetic oligonucleotide
  Sense strand starting at position 945 of SEQ ID NO: 1048
gugaauuaacaccgugaca

SEQ ID NO: 83713 - RNA, 19 nt, Artificial Sequence
  Description of Artificial Sequence: Synthetic oligonucleotide
  Antisense strand to SEQ ID NO: 83632
ugucacgguguuaauucac

SEQ ID NO: 83714 - RNA, 19 nt, Artificial Sequence
  Description of Artificial Sequence: Synthetic oligonucleotide
  Sense strand starting at position 904 of SEQ ID NO: 1048
gcaaaucuauuccuguaga

SEQ ID NO: 83715 - RNA, 19 nt, Artificial Sequence
  Description of Artificial Sequence: Synthetic oligonucleotide
  Antisense strand to SEQ ID NO: 83634
ucuacaggaauagauuugc

SEQ ID NO: 83716 - RNA, 19 nt, Artificial Sequence
  Description of Artificial Sequence: Synthetic oligonucleotide
  Sense strand starting at position 902 of SEQ ID NO: 1048
gugcaaaucuauuccugua

SEQ ID NO: 83717 - RNA, 19 nt, Artificial Sequence
  Description of Artificial Sequence: Synthetic oligonucleotide
  Antisense strand to SEQ ID NO: 83636
uacaggaauagauuugcac

SEQ ID NO: 83718 - RNA, 19 nt, Artificial Sequence
  Description of Artificial Sequence: Synthetic oligonucleotide
  Sense strand starting at position 291 of SEQ ID NO: 1048
gggcuauaccugggcauuu

SEQ ID NO: 83719 - RNA, 19 nt, Artificial Sequence
  Description of Artificial Sequence: Synthetic oligonucleotide
  Antisense strand to SEQ ID NO: 83638
aaaugcccagguauagccc

SEQ ID NO: 83720 - RNA, 19 nt, Artificial Sequence
  Description of Artificial Sequence: Synthetic oligonucleotide
  Sense strand starting at position 239 of SEQ ID NO: 1048
cucagauauuuguagaaca

SEQ ID NO: 83721 - RNA, 19 nt, Artificial Sequence
  Description of Artificial Sequence: Synthetic oligonucleotide
  Antisense strand to SEQ ID NO: 83640
uguucuacaaauaucugag

SEQ ID NO: 83722 - RNA, 19 nt, Artificial Sequence
  Description of Artificial Sequence: Synthetic oligonucleotide
  Sense strand starting at position 3905 of SEQ ID NO: 1049
uuugccaugugacuuuaua

SEQ ID NO: 83723 - RNA, 19 nt, Artificial Sequence
  Description of Artificial Sequence: Synthetic oligonucleotide
  Antisense strand to SEQ ID NO: 83642
uauaaagucacauggcaaa

SEQ ID NO: 83724 - RNA, 19 nt, Artificial Sequence
  Description of Artificial Sequence: Synthetic oligonucleotide
  Sense strand starting at position 3858 of SEQ ID NO: 1049
auggaaguauugcucccaa

SEQ ID NO: 83725 - RNA, 19 nt, Artificial Sequence
  Description of Artificial Sequence: Synthetic oligonucleotide
  Antisense strand to SEQ ID NO: 83644
uugggagcaauacuuccau

SEQ ID NO: 83726 - RNA, 19 nt, Artificial Sequence
  Description of Artificial Sequence: Synthetic oligonucleotide
  Sense strand starting at position 3824 of SEQ ID NO: 1049
ggagaucaucagggcuauu

SEQ ID NO: 83727 - RNA, 19 nt, Artificial Sequence
  Description of Artificial Sequence: Synthetic oligonucleotide
  Antisense strand to SEQ ID NO: 83646
aauagcccugaugaucucc

SEQ ID NO: 83728 - RNA, 19 nt, Artificial Sequence
  Description of Artificial Sequence: Synthetic oligonucleotide
  Sense strand starting at position 3733 of SEQ ID NO: 1049
gaagucuucuuggcucuca

SEQ ID NO: 83729 - RNA, 19 nt, Artificial Sequence
  Description of Artificial Sequence: Synthetic oligonucleotide
  Antisense strand to SEQ ID NO: 83648
ugagagccaagaagacuuc

SEQ ID NO: 83730 - RNA, 19 nt, Artificial Sequence
  Description of Artificial Sequence: Synthetic oligonucleotide
  Sense strand starting at position 3721 of SEQ ID NO: 1049
ugccuucuccgugaagucu

SEQ ID NO: 83731 - RNA, 19 nt, Artificial Sequence
  Description of Artificial Sequence: Synthetic oligonucleotide
  Antisense strand to SEQ ID NO: 83650
agacuucacggagaaggca

SEQ ID NO: 83732 - RNA, 19 nt, Artificial Sequence
  Description of Artificial Sequence: Synthetic oligonucleotide
  Sense strand starting at position 3654 of SEQ ID NO: 1049
ggaauaugcuucccagccu

SEQ ID NO: 83733 - RNA, 19 nt, Artificial Sequence
  Description of Artificial Sequence: Synthetic oligonucleotide
  Antisense strand to SEQ ID NO: 83652
aggcugggaagcauauucc

SEQ ID NO: 83734 - RNA, 19 nt, Artificial Sequence
  Description of Artificial Sequence: Synthetic oligonucleotide
  Sense strand starting at position 3638 of SEQ ID NO: 1049
ggcuguuguaucuacugga

SEQ ID NO: 83735 - RNA, 19 nt, Artificial Sequence
  Description of Artificial Sequence: Synthetic oligonucleotide
  Antisense strand to SEQ ID NO: 83654
uccaguagauacaacagcc

SEQ ID NO: 83736 - RNA, 19 nt, Artificial Sequence
  Description of Artificial Sequence: Synthetic oligonucleotide
  Sense strand starting at position 3412 of SEQ ID NO: 1049
gcuuccuuccuagagcaga

SEQ ID NO: 83737 - RNA, 19 nt, Artificial Sequence
  Description of Artificial Sequence: Synthetic oligonucleotide
  Antisense strand to SEQ ID NO: 83656
ucugcucuaggaaggaagc

SEQ ID NO: 83738 - RNA, 19 nt, Artificial Sequence
  Description of Artificial Sequence: Synthetic oligonucleotide
  Sense strand starting at position 3159 of SEQ ID NO: 1049
ccuaacaugcuccgaauga

SEQ ID NO: 83739 - RNA, 19 nt, Artificial Sequence
  Description of Artificial Sequence: Synthetic oligonucleotide
  Antisense strand to SEQ ID NO: 83658
ucauucggagcauguuagg

SEQ ID NO: 83740 - RNA, 19 nt, Artificial Sequence
  Description of Artificial Sequence: Synthetic oligonucleotide
  Sense strand starting at position 3157 of SEQ ID NO: 1049
agccuaacaugcuccgaau

SEQ ID NO: 83741 - RNA, 19 nt, Artificial Sequence
  Description of Artificial Sequence: Synthetic oligonucleotide
  Antisense strand to SEQ ID NO: 83660
auucggagcauguuaggcu

SEQ ID NO: 83742 - RNA, 19 nt, Artificial Sequence
  Description of Artificial Sequence: Synthetic oligonucleotide
  Sense strand starting at position 3047 of SEQ ID NO: 1049
ggccuuggcaauugaaaug

SEQ ID NO: 83743 - RNA, 19 nt, Artificial Sequence
  Description of Artificial Sequence: Synthetic oligonucleotide
  Antisense strand to SEQ ID NO: 83662
cauuucaauugccaaggcc

SEQ ID NO: 83744 - RNA, 19 nt, Artificial Sequence
  Description of Artificial Sequence: Synthetic oligonucleotide
  Sense strand starting at position 2963 of SEQ ID NO: 1049
cgcaguguggaagguaaau

SEQ ID NO: 83745 - RNA, 19 nt, Artificial Sequence
  Description of Artificial Sequence: Synthetic oligonucleotide
  Antisense strand to SEQ ID NO: 83664
auuuaccuuccacacugcg

SEQ ID NO: 83746 - RNA, 19 nt, Artificial Sequence
  Description of Artificial Sequence: Synthetic oligonucleotide
  Sense strand starting at position 2828 of SEQ ID NO: 1049
ucaucuuccggcugagaaa

SEQ ID NO: 83747 - RNA, 19 nt, Artificial Sequence
  Description of Artificial Sequence: Synthetic oligonucleotide
  Antisense strand to SEQ ID NO: 83666
uuucucagccggaagauga

SEQ ID NO: 83748 - RNA, 19 nt, Artificial Sequence
  Description of Artificial Sequence: Synthetic oligonucleotide
  Sense strand starting at position 2696 of SEQ ID NO: 1049
gggaaaugcuuugagacua

SEQ ID NO: 83749 - RNA, 19 nt, Artificial Sequence
  Description of Artificial Sequence: Synthetic oligonucleotide
  Antisense strand to SEQ ID NO: 83668
uagucucaaagcauuuccc

SEQ ID NO: 83750 - RNA, 19 nt, Artificial Sequence
  Description of Artificial Sequence: Synthetic oligonucleotide
  Sense strand starting at position 2695 of SEQ ID NO: 1049
ugggaaaugcuuugagacu

SEQ ID NO: 83751 - RNA, 19 nt, Artificial Sequence
  Description of Artificial Sequence: Synthetic oligonucleotide
  Antisense strand to SEQ ID NO: 83670
agucucaaagcauuuccca

SEQ ID NO: 83752 - RNA, 19 nt, Artificial Sequence
  Description of Artificial Sequence: Synthetic oligonucleotide
  Sense strand starting at position 2569 of SEQ ID NO: 1049
ugauacuaccgguagcuau

SEQ ID NO: 83753 - RNA, 19 nt, Artificial Sequence
  Description of Artificial Sequence: Synthetic oligonucleotide
  Antisense strand to SEQ ID NO: 83672
auagcuaccgguaguauca

SEQ ID NO: 83754 - RNA, 19 nt, Artificial Sequence
  Description of Artificial Sequence: Synthetic oligonucleotide
  Sense strand starting at position 2558 of SEQ ID NO: 1049
auggguauaucugauacua

SEQ ID NO: 83755 - RNA, 19 nt, Artificial Sequence
  Description of Artificial Sequence: Synthetic oligonucleotide
  Antisense strand to SEQ ID NO: 83674
uaguaucagauauacccau

SEQ ID NO: 83756 - RNA, 19 nt, Artificial Sequence
  Description of Artificial Sequence: Synthetic oligonucleotide
  Sense strand starting at position 2553 of SEQ ID NO: 1049
ccgagauggguauaucuga

SEQ ID NO: 83757 - RNA, 19 nt, Artificial Sequence
  Description of Artificial Sequence: Synthetic oligonucleotide
  Antisense strand to SEQ ID NO: 83676
ucagauauacccaucucgg

SEQ ID NO: 83758 - RNA, 19 nt, Artificial Sequence
  Description of Artificial Sequence: Synthetic oligonucleotide
  Sense strand starting at position 2551 of SEQ ID NO: 1049
acccgagauggguauaucu

SEQ ID NO: 83759 - RNA, 19 nt, Artificial Sequence
  Description of Artificial Sequence: Synthetic oligonucleotide
  Antisense strand to SEQ ID NO: 83678
agauauacccaucucgggu

SEQ ID NO: 83760 - RNA, 19 nt, Artificial Sequence
  Description of Artificial Sequence: Synthetic oligonucleotide
  Sense strand starting at position 2361 of SEQ ID NO: 1049
aggccuugcucuuugguau

SEQ ID NO: 83761 - RNA, 19 nt, Artificial Sequence
  Description of Artificial Sequence: Synthetic oligonucleotide
  Antisense strand to SEQ ID NO: 83680
auaccaaagagcaaggccu

SEQ ID NO: 83762 - RNA, 19 nt, Artificial Sequence
  Description of Artificial Sequence: Synthetic oligonucleotide
  Sense strand starting at position 1842 of SEQ ID NO: 1049
auggucuccucuguuauuu

SEQ ID NO: 83763 - RNA, 19 nt, Artificial Sequence
  Description of Artificial Sequence: Synthetic oligonucleotide
  Antisense strand to SEQ ID NO: 83682
aaauaacagaggagaccau

SEQ ID NO: 83764 - RNA, 19 nt, Artificial Sequence
  Description of Artificial Sequence: Synthetic oligonucleotide
  Sense strand starting at position 1806 of SEQ ID NO: 1049
ggucuaauuccggaucaga

SEQ ID NO: 83765 - RNA, 19 nt, Artificial Sequence
  Description of Artificial Sequence: Synthetic oligonucleotide
  Antisense strand to SEQ ID NO: 83684
ucugauccggaauuagacc

SEQ ID NO: 83766 - RNA, 19 nt, Artificial Sequence
  Description of Artificial Sequence: Synthetic oligonucleotide
  Sense strand starting at position 1777 of SEQ ID NO: 1049
aaggucuucugcuuugcaa

SEQ ID NO: 83767 - RNA, 19 nt, Artificial Sequence
  Description of Artificial Sequence: Synthetic oligonucleotide
  Antisense strand to SEQ ID NO: 83686
uugcaaagcagaagaccuu

SEQ ID NO: 83768 - RNA, 19 nt, Artificial Sequence
  Description of Artificial Sequence: Synthetic oligonucleotide
  Sense strand starting at position 1509 of SEQ ID NO: 1049
gugcuuccugcacagacau

SEQ ID NO: 83769 - RNA, 19 nt, Artificial Sequence
  Description of Artificial Sequence: Synthetic oligonucleotide
  Antisense strand to SEQ ID NO: 83688
augucugugcaggaagcac

SEQ ID NO: 83770 - RNA, 19 nt, Artificial Sequence
  Description of Artificial Sequence: Synthetic oligonucleotide
  Sense strand starting at position 1317 of SEQ ID NO: 1049
ggugacaccuguccagaga

SEQ ID NO: 83771 - RNA, 19 nt, Artificial Sequence
  Description of Artificial Sequence: Synthetic oligonucleotide
  Antisense strand to SEQ ID NO: 83690
ucucuggacaggugucacc

SEQ ID NO: 83772 - RNA, 19 nt, Artificial Sequence
  Description of Artificial Sequence: Synthetic oligonucleotide
  Sense strand starting at position 1277 of SEQ ID NO: 1049
accugagauugagaaggaa

SEQ ID NO: 83773 - RNA, 19 nt, Artificial Sequence
  Description of Artificial Sequence: Synthetic oligonucleotide
  Antisense strand to SEQ ID NO: 83692
uuccuucucaaucucaggu

SEQ ID NO: 83774 - RNA, 19 nt, Artificial Sequence
  Description of Artificial Sequence: Synthetic oligonucleotide
  Sense strand starting at position 1238 of SEQ ID NO: 1049
cugaauuguucuguuuacu

SEQ ID NO: 83775 - RNA, 19 nt, Artificial Sequence
  Description of Artificial Sequence: Synthetic oligonucleotide
  Antisense strand to SEQ ID NO: 83694
aguaaacagaacaauucag

SEQ ID NO: 83776 - RNA, 19 nt, Artificial Sequence
  Description of Artificial Sequence: Synthetic oligonucleotide
  Sense strand starting at position 1228 of SEQ ID NO: 1049
ccuggaauuucugaauugu

SEQ ID NO: 83777 - RNA, 19 nt, Artificial Sequence
  Description of Artificial Sequence: Synthetic oligonucleotide
  Antisense strand to SEQ ID NO: 83696
acaauucagaaauuccagg

SEQ ID NO: 83778 - RNA, 19 nt, Artificial Sequence
  Description of Artificial Sequence: Synthetic oligonucleotide
  Sense strand starting at position 1217 of SEQ ID NO: 1049
agacuccucuaccuggaau

SEQ ID NO: 83779 - RNA, 19 nt, Artificial Sequence
  Description of Artificial Sequence: Synthetic oligonucleotide
  Antisense strand to SEQ ID NO: 83698
auuccagguagaggagucu

SEQ ID NO: 83780 - RNA, 19 nt, Artificial Sequence
  Description of Artificial Sequence: Synthetic oligonucleotide
  Sense strand starting at position 1183 of SEQ ID NO: 1049
cucauuaagucaguaggaa

SEQ ID NO: 83781 - RNA, 19 nt, Artificial Sequence
  Description of Artificial Sequence: Synthetic oligonucleotide
  Antisense strand to SEQ ID NO: 83700
uuccuacugacuuaaugag

SEQ ID NO: 83782 - RNA, 19 nt, Artificial Sequence
  Description of Artificial Sequence: Synthetic oligonucleotide
  Sense strand starting at position 1176 of SEQ ID NO: 1049
uguuaaccucauuaaguca

SEQ ID NO: 83783 - RNA, 19 nt, Artificial Sequence
  Description of Artificial Sequence: Synthetic oligonucleotide
  Antisense strand to SEQ ID NO: 83702
ugacuuaaugagguuaaca

SEQ ID NO: 83784 - RNA, 19 nt, Artificial Sequence
  Description of Artificial Sequence: Synthetic oligonucleotide
  Sense strand starting at position 1175 of SEQ ID NO: 1049
auguuaaccucauuaaguc

SEQ ID NO: 83785 - RNA, 19 nt, Artificial Sequence
  Description of Artificial Sequence: Synthetic oligonucleotide
  Antisense strand to SEQ ID NO: 83704
gacuuaaugagguuaacau

SEQ ID NO: 83786 - RNA, 19 nt, Artificial Sequence
  Description of Artificial Sequence: Synthetic oligonucleotide
  Sense strand starting at position 1170 of SEQ ID NO: 1049
ggaagauguuaaccucauu

SEQ ID NO: 83787 - RNA, 19 nt, Artificial Sequence
  Description of Artificial Sequence: Synthetic oligonucleotide
  Antisense strand to SEQ ID NO: 83706
aaugagguuaacaucuucc

SEQ ID NO: 83788 - RNA, 19 nt, Artificial Sequence
  Description of Artificial Sequence: Synthetic oligonucleotide
  Sense strand starting at position 1140 of SEQ ID NO: 1049
gaauuaacaccgugacaug

SEQ ID NO: 83789 - RNA, 19 nt, Artificial Sequence
  Description of Artificial Sequence: Synthetic oligonucleotide
  Antisense strand to SEQ ID NO: 83708
caugucacgguguuaauuc

SEQ ID NO: 83790 - RNA, 19 nt, Artificial Sequence
  Description of Artificial Sequence: Synthetic oligonucleotide
  Sense strand starting at position 1138 of SEQ ID NO: 1049
gugaauuaacaccgugaca

SEQ ID NO: 83791 - RNA, 19 nt, Artificial Sequence
  Description of Artificial Sequence: Synthetic oligonucleotide
  Antisense strand to SEQ ID NO: 83710
ugucacgguguuaauucac

SEQ ID NO: 83792 - RNA, 19 nt, Artificial Sequence
  Description of Artificial Sequence: Synthetic oligonucleotide
  Sense strand starting at position 1097 of SEQ ID NO: 1049
gcaaaucuauuccuguaga

SEQ ID NO: 83793 - RNA, 19 nt, Artificial Sequence
  Description of Artificial Sequence: Synthetic oligonucleotide
  Antisense strand to SEQ ID NO: 83712
ucuacaggaauagauuugc

SEQ ID NO: 83794 - RNA, 19 nt, Artificial Sequence
  Description of Artificial Sequence: Synthetic oligonucleotide
  Sense strand starting at position 1095 of SEQ ID NO: 1049
gugcaaaucuauuccugua

SEQ ID NO: 83795 - RNA, 19 nt, Artificial Sequence
  Description of Artificial Sequence: Synthetic oligonucleotide
  Antisense strand to SEQ ID NO: 83714
uacaggaauagauuugcac

SEQ ID NO: 83796 - RNA, 19 nt, Artificial Sequence
  Description of Artificial Sequence: Synthetic oligonucleotide
  Sense strand starting at position 484 of SEQ ID NO: 1049
gggcuauaccugggcauuu

SEQ ID NO: 83797 - RNA, 19 nt, Artificial Sequence
  Description of Artificial Sequence: Synthetic oligonucleotide
  Antisense strand to SEQ ID NO: 83716
aaaugcccagguauagccc

SEQ ID NO: 83798 - RNA, 19 nt, Artificial Sequence
  Description of Artificial Sequence: Synthetic oligonucleotide
  Sense strand starting at position 432 of SEQ ID NO: 1049
cucagauauuuguagaaca

SEQ ID NO: 83799 - RNA, 19 nt, Artificial Sequence
  Description of Artificial Sequence: Synthetic oligonucleotide
  Antisense strand to SEQ ID NO: 83718
uguucuacaaauaucugag

SEQ ID NO: 83800 - RNA, 19 nt, Artificial Sequence
  Description of Artificial Sequence: Synthetic oligonucleotide
  Sense strand starting at position 109 of SEQ ID NO: 1049
gcaaucuuuccuuagagcu

SEQ ID NO: 83801 - RNA, 19 nt, Artificial Sequence
  Description of Artificial Sequence: Synthetic oligonucleotide
  Antisense strand to SEQ ID NO: 83720
agcucuaaggaaagauugc

SEQ ID NO: 83802 - RNA, 19 nt, Artificial Sequence
  Description of Artificial Sequence: Synthetic oligonucleotide
  Sense strand starting at position 3581 of SEQ ID NO: 1050
guaaaugcugaguggcaaa

SEQ ID NO: 83803 - RNA, 19 nt, Artificial Sequence
  Description of Artificial Sequence: Synthetic oligonucleotide
  Antisense strand to SEQ ID NO: 83722
uuugccacucagcauuuac

SEQ ID NO: 83804 - RNA, 19 nt, Artificial Sequence
  Description of Artificial Sequence: Synthetic oligonucleotide
  Sense strand starting at position 3580 of SEQ ID NO: 1050
gguaaaugcugaguggcaa

SEQ ID NO: 83805 - RNA, 19 nt, Artificial Sequence
  Description of Artificial Sequence: Synthetic oligonucleotide
  Antisense strand to SEQ ID NO: 83724
uugccacucagcauuuacc

SEQ ID NO: 83806 - RNA, 19 nt, Artificial Sequence
  Description of Artificial Sequence: Synthetic oligonucleotide
  Sense strand starting at position 3567 of SEQ ID NO: 1050
aaggcaggugacugguaaa

SEQ ID NO: 83807 - RNA, 19 nt, Artificial Sequence
  Description of Artificial Sequence: Synthetic oligonucleotide
  Antisense strand to SEQ ID NO: 83726
uuuaccagucaccugccuu

SEQ ID NO: 83808 - RNA, 19 nt, Artificial Sequence
  Description of Artificial Sequence: Synthetic oligonucleotide
  Sense strand starting at position 3441 of SEQ ID NO: 1050
gcugcuucgcaguuucaga

SEQ ID NO: 83809 - RNA, 19 nt, Artificial Sequence
  Description of Artificial Sequence: Synthetic oligonucleotide
  Antisense strand to SEQ ID NO: 83728
ucugaaacugcgaagcagc

SEQ ID NO: 83810 - RNA, 19 nt, Artificial Sequence
  Description of Artificial Sequence: Synthetic oligonucleotide
  Sense strand starting at position 3387 of SEQ ID NO: 1050
gcugaaucucacgagcaga

SEQ ID NO: 83811 - RNA, 19 nt, Artificial Sequence
  Description of Artificial Sequence: Synthetic oligonucleotide
  Antisense strand to SEQ ID NO: 83730
ucugcucgugagauucagc

SEQ ID NO: 83812 - RNA, 19 nt, Artificial Sequence
  Description of Artificial Sequence: Synthetic oligonucleotide
  Sense strand starting at position 3311 of SEQ ID NO: 1050
cggagauguugcccugacu

SEQ ID NO: 83813 - RNA, 19 nt, Artificial Sequence
  Description of Artificial Sequence: Synthetic oligonucleotide
  Antisense strand to SEQ ID NO: 83732
agucagggcaacaucuccg

SEQ ID NO: 83814 - RNA, 19 nt, Artificial Sequence
  Description of Artificial Sequence: Synthetic oligonucleotide
  Sense strand starting at position 3184 of SEQ ID NO: 1050
ggguucuuuccucacacau

SEQ ID NO: 83815 - RNA, 19 nt, Artificial Sequence
  Description of Artificial Sequence: Synthetic oligonucleotide
  Antisense strand to SEQ ID NO: 83734
augugugaggaaagaaccc

SEQ ID NO: 83816 - RNA, 19 nt, Artificial Sequence
  Description of Artificial Sequence: Synthetic oligonucleotide
  Sense strand starting at position 3164 of SEQ ID NO: 1050
guguguccagcucgaaauu

SEQ ID NO: 83817 - RNA, 19 nt, Artificial Sequence
  Description of Artificial Sequence: Synthetic oligonucleotide
  Antisense strand to SEQ ID NO: 83736
aauuucgagcuggacacac

SEQ ID NO: 83818 - RNA, 19 nt, Artificial Sequence
  Description of Artificial Sequence: Synthetic oligonucleotide
  Sense strand starting at position 3130 of SEQ ID NO: 1050
ugaaauuaguggcaaagcu

SEQ ID NO: 83819 - RNA, 19 nt, Artificial Sequence
  Description of Artificial Sequence: Synthetic oligonucleotide
  Antisense strand to SEQ ID NO: 83738
agcuuugccacuaauuuca

SEQ ID NO: 83820 - RNA, 19 nt, Artificial Sequence
  Description of Artificial Sequence: Synthetic oligonucleotide
  Sense strand starting at position 3128 of SEQ ID NO: 1050
ggugaaauuaguggcaaag

SEQ ID NO: 83821 - RNA, 19 nt, Artificial Sequence
  Description of Artificial Sequence: Synthetic oligonucleotide
  Antisense strand to SEQ ID NO: 83740
cuuugccacuaauuucacc

SEQ ID NO: 83822 - RNA, 19 nt, Artificial Sequence
  Description of Artificial Sequence: Synthetic oligonucleotide
  Sense strand starting at position 3127 of SEQ ID NO: 1050
uggugaaauuaguggcaaa

SEQ ID NO: 83823 - RNA, 19 nt, Artificial Sequence
  Description of Artificial Sequence: Synthetic oligonucleotide
  Antisense strand to SEQ ID NO: 83742
uuugccacuaauuucacca

SEQ ID NO: 83824 - RNA, 19 nt, Artificial Sequence
  Description of Artificial Sequence: Synthetic oligonucleotide
  Sense strand starting at position 3118 of SEQ ID NO: 1050
aaggucgcuuggugaaauu

SEQ ID NO: 83825 - RNA, 19 nt, Artificial Sequence
  Description of Artificial Sequence: Synthetic oligonucleotide
  Antisense strand to SEQ ID NO: 83744
aauuucaccaagcgaccuu

SEQ ID NO: 83826 - RNA, 19 nt, Artificial Sequence
  Description of Artificial Sequence: Synthetic oligonucleotide
  Sense strand starting at position 3117 of SEQ ID NO: 1050
caaggucgcuuggugaaau

SEQ ID NO: 83827 - RNA, 19 nt, Artificial Sequence
  Description of Artificial Sequence: Synthetic oligonucleotide
  Antisense strand to SEQ ID NO: 83746
auuucaccaagcgaccuug

SEQ ID NO: 83828 - RNA, 19 nt, Artificial Sequence
  Description of Artificial Sequence: Synthetic oligonucleotide
  Sense strand starting at position 2891 of SEQ ID NO: 1050
ggugcucacuaggaaagua

SEQ ID NO: 83829 - RNA, 19 nt, Artificial Sequence
  Description of Artificial Sequence: Synthetic oligonucleotide
  Antisense strand to SEQ ID NO: 83748
uacuuuccuagugagcacc

SEQ ID NO: 83830 - RNA, 19 nt, Artificial Sequence
  Description of Artificial Sequence: Synthetic oligonucleotide
  Sense strand starting at position 2890 of SEQ ID NO: 1050
gggugcucacuaggaaagu

SEQ ID NO: 83831 - RNA, 19 nt, Artificial Sequence
  Description of Artificial Sequence: Synthetic oligonucleotide
  Antisense strand to SEQ ID NO: 83750
acuuuccuagugagcaccc

SEQ ID NO: 83832 - RNA, 19 nt, Artificial Sequence
  Description of Artificial Sequence: Synthetic oligonucleotide
  Sense strand starting at position 2888 of SEQ ID NO: 1050
cugggugcucacuaggaaa

SEQ ID NO: 83833 - RNA, 19 nt, Artificial Sequence
  Description of Artificial Sequence: Synthetic oligonucleotide
  Antisense strand to SEQ ID NO: 83752
uuuccuagugagcacccag

SEQ ID NO: 83834 - RNA, 19 nt, Artificial Sequence
  Description of Artificial Sequence: Synthetic oligonucleotide
  Sense strand starting at position 2809 of SEQ ID NO: 1050
guguguucccggcaggaua

SEQ ID NO: 83835 - RNA, 19 nt, Artificial Sequence
  Description of Artificial Sequence: Synthetic oligonucleotide
  Antisense strand to SEQ ID NO: 83754
uauccugccgggaacacac

SEQ ID NO: 83836 - RNA, 19 nt, Artificial Sequence
  Description of Artificial Sequence: Synthetic oligonucleotide
  Sense strand starting at position 2807 of SEQ ID NO: 1050
cuguguguucccggcagga

SEQ ID NO: 83837 - RNA, 19 nt, Artificial Sequence
  Description of Artificial Sequence: Synthetic oligonucleotide
  Antisense strand to SEQ ID NO: 83756
uccugccgggaacacacag

SEQ ID NO: 83838 - RNA, 19 nt, Artificial Sequence
  Description of Artificial Sequence: Synthetic oligonucleotide
  Sense strand starting at position 2378 of SEQ ID NO: 1050
aacuuugugccaggacaca

SEQ ID NO: 83839 - RNA, 19 nt, Artificial Sequence
  Description of Artificial Sequence: Synthetic oligonucleotide
  Antisense strand to SEQ ID NO: 83758
uguguccuggcacaaaguu

SEQ ID NO: 83840 - RNA, 19 nt, Artificial Sequence
  Description of Artificial Sequence: Synthetic oligonucleotide
  Sense strand starting at position 2376 of SEQ ID NO: 1050
ccaacuuugugccaggaca

SEQ ID NO: 83841 - RNA, 19 nt, Artificial Sequence
  Description of Artificial Sequence: Synthetic oligonucleotide
  Antisense strand to SEQ ID NO: 83760
uguccuggcacaaaguugg

SEQ ID NO: 83842 - RNA, 19 nt, Artificial Sequence
  Description of Artificial Sequence: Synthetic oligonucleotide
  Sense strand starting at position 2310 of SEQ ID NO: 1050
acucuaaagugugcucuga

SEQ ID NO: 83843 - RNA, 19 nt, Artificial Sequence
  Description of Artificial Sequence: Synthetic oligonucleotide
  Antisense strand to SEQ ID NO: 83762
ucagagcacacuuuagagu

SEQ ID NO: 83844 - RNA, 19 nt, Artificial Sequence
  Description of Artificial Sequence: Synthetic oligonucleotide
  Sense strand starting at position 1989 of SEQ ID NO: 1050
ggguucuggugauguugaa

SEQ ID NO: 83845 - RNA, 19 nt, Artificial Sequence
  Description of Artificial Sequence: Synthetic oligonucleotide
  Antisense strand to SEQ ID NO: 83764
uucaacaucaccagaaccc

SEQ ID NO: 83846 - RNA, 19 nt, Artificial Sequence
  Description of Artificial Sequence: Synthetic oligonucleotide
  Sense strand starting at position 1440 of SEQ ID NO: 1050
gguucaggcuggcacaauu

SEQ ID NO: 83847 - RNA, 19 nt, Artificial Sequence
  Description of Artificial Sequence: Synthetic oligonucleotide
  Antisense strand to SEQ ID NO: 83766
aauugugccagccugaacc

SEQ ID NO: 83848 - RNA, 19 nt, Artificial Sequence
  Description of Artificial Sequence: Synthetic oligonucleotide
  Sense strand starting at position 1241 of SEQ ID NO: 1050
ucaacaucaucccagggau

SEQ ID NO: 83849 - RNA, 19 nt, Artificial Sequence
  Description of Artificial Sequence: Synthetic oligonucleotide
  Antisense strand to SEQ ID NO: 83768
aucccugggaugauguuga

SEQ ID NO: 83850 - RNA, 19 nt, Artificial Sequence
  Description of Artificial Sequence: Synthetic oligonucleotide
  Sense strand starting at position 1088 of SEQ ID NO: 1050
gcgccuuccacucagagau

SEQ ID NO: 83851 - RNA, 19 nt, Artificial Sequence
  Description of Artificial Sequence: Synthetic oligonucleotide
  Antisense strand to SEQ ID NO: 83770
aucucugaguggaaggcgc

SEQ ID NO: 83852 - RNA, 19 nt, Artificial Sequence
  Description of Artificial Sequence: Synthetic oligonucleotide
  Sense strand starting at position 670 of SEQ ID NO: 1050
gcaggagcccucgacaguu

SEQ ID NO: 83853 - RNA, 19 nt, Artificial Sequence
  Description of Artificial Sequence: Synthetic oligonucleotide
  Antisense strand to SEQ ID NO: 83772
aacugucgagggcuccugc

SEQ ID NO: 83854 - RNA, 19 nt, Artificial Sequence
  Description of Artificial Sequence: Synthetic oligonucleotide
  Sense strand starting at position 388 of SEQ ID NO: 1050
auacgacaggucuagacuu

SEQ ID NO: 83855 - RNA, 19 nt, Artificial Sequence
  Description of Artificial Sequence: Synthetic oligonucleotide
  Antisense strand to SEQ ID NO: 83774
aagucuagaccugucguau

SEQ ID NO: 83856 - RNA, 19 nt, Artificial Sequence
  Description of Artificial Sequence: Synthetic oligonucleotide
  Sense strand starting at position 367 of SEQ ID NO: 1050
augccuguucccugauuac

SEQ ID NO: 83857 - RNA, 19 nt, Artificial Sequence
  Description of Artificial Sequence: Synthetic oligonucleotide
  Antisense strand to SEQ ID NO: 83776
guaaucagggaacaggcau

SEQ ID NO: 83858 - RNA, 19 nt, Artificial Sequence
  Description of Artificial Sequence: Synthetic oligonucleotide
  Sense strand starting at position 318 of SEQ ID NO: 1050
ucaagaagaucacaagcua

SEQ ID NO: 83859 - RNA, 19 nt, Artificial Sequence
  Description of Artificial Sequence: Synthetic oligonucleotide
  Antisense strand to SEQ ID NO: 83778
uagcuugugaucuucuuga

SEQ ID NO: 83860 - RNA, 19 nt, Artificial Sequence
  Description of Artificial Sequence: Synthetic oligonucleotide
  Sense strand starting at position 276 of SEQ ID NO: 1050
agcauuugaugguacauca

SEQ ID NO: 83861 - RNA, 19 nt, Artificial Sequence
  Description of Artificial Sequence: Synthetic oligonucleotide
  Antisense strand to SEQ ID NO: 83780
ugauguaccaucaaaugcu

SEQ ID NO: 83862 - RNA, 19 nt, Artificial Sequence
  Description of Artificial Sequence: Synthetic oligonucleotide
  Sense strand starting at position 273 of SEQ ID NO: 1050
cggagcauuugaugguaca

SEQ ID NO: 83863 - RNA, 19 nt, Artificial Sequence
  Description of Artificial Sequence: Synthetic oligonucleotide
  Antisense strand to SEQ ID NO: 83782
uguaccaucaaaugcuccg

SEQ ID NO: 83864 - RNA, 19 nt, Artificial Sequence
  Description of Artificial Sequence: Synthetic oligonucleotide
  Sense strand starting at position 112 of SEQ ID NO: 1050
caggauucccuguguuugu

SEQ ID NO: 83865 - RNA, 19 nt, Artificial Sequence
  Description of Artificial Sequence: Synthetic oligonucleotide
  Antisense strand to SEQ ID NO: 83784
acaaacacagggaauccug

SEQ ID NO: 83866 - RNA, 19 nt, Artificial Sequence
  Description of Artificial Sequence: Synthetic oligonucleotide
  Sense strand starting at position 80 of SEQ ID NO: 1050
ugcaaaccuuacuagagau

SEQ ID NO: 83867 - RNA, 19 nt, Artificial Sequence
  Description of Artificial Sequence: Synthetic oligonucleotide
  Antisense strand to SEQ ID NO: 83786
aucucuaguaagguuugca

SEQ ID NO: 83868 - RNA, 19 nt, Artificial Sequence
  Description of Artificial Sequence: Synthetic oligonucleotide
  Sense strand starting at position 79 of SEQ ID NO: 1050
gugcaaaccuuacuagaga

SEQ ID NO: 83869 - RNA, 19 nt, Artificial Sequence
  Description of Artificial Sequence: Synthetic oligonucleotide
  Antisense strand to SEQ ID NO: 83788
ucucuaguaagguuugcac

SEQ ID NO: 83870 - RNA, 19 nt, Artificial Sequence
  Description of Artificial Sequence: Synthetic oligonucleotide
  Sense strand starting at position 77 of SEQ ID NO: 1050
cugugcaaaccuuacuaga

SEQ ID NO: 83871 - RNA, 19 nt, Artificial Sequence
  Description of Artificial Sequence: Synthetic oligonucleotide
  Antisense strand to SEQ ID NO: 83790
ucuaguaagguuugcacag

SEQ ID NO: 83872 - RNA, 19 nt, Artificial Sequence
  Description of Artificial Sequence: Synthetic oligonucleotide
  Sense strand starting at position 68 of SEQ ID NO: 1050
ggagaagaacugugcaaac

SEQ ID NO: 83873 - RNA, 19 nt, Artificial Sequence
  Description of Artificial Sequence: Synthetic oligonucleotide
  Antisense strand to SEQ ID NO: 83792
guuugcacaguucuucucc

SEQ ID NO: 83874 - RNA, 19 nt, Artificial Sequence
  Description of Artificial Sequence: Synthetic oligonucleotide
  Sense strand starting at position 31 of SEQ ID NO: 1050
uccagacuuuggcucagau

SEQ ID NO: 83875 - RNA, 19 nt, Artificial Sequence
  Description of Artificial Sequence: Synthetic oligonucleotide
  Antisense strand to SEQ ID NO: 83794
aucugagccaaagucugga

SEQ ID NO: 83876 - RNA, 19 nt, Artificial Sequence
  Description of Artificial Sequence: Synthetic oligonucleotide
  Sense strand starting at position 3925 of SEQ ID NO: 1052
aagugugacugggaagaga

SEQ ID NO: 83877 - RNA, 19 nt, Artificial Sequence
  Description of Artificial Sequence: Synthetic oligonucleotide
  Antisense strand to SEQ ID NO: 83796
ucucuucccagucacacuu

SEQ ID NO: 83878 - RNA, 19 nt, Artificial Sequence
  Description of Artificial Sequence: Synthetic oligonucleotide
  Sense strand starting at position 3923 of SEQ ID NO: 1052
ccaagugugacugggaaga

SEQ ID NO: 83879 - RNA, 19 nt, Artificial Sequence
  Description of Artificial Sequence: Synthetic oligonucleotide
  Antisense strand to SEQ ID NO: 83798
ucuucccagucacacuugg

SEQ ID NO: 83880 - RNA, 19 nt, Artificial Sequence
  Description of Artificial Sequence: Synthetic oligonucleotide
  Sense strand starting at position 3883 of SEQ ID NO: 1052
uuuagcugucuuugaguuu

SEQ ID NO: 83881 - RNA, 19 nt, Artificial Sequence
  Description of Artificial Sequence: Synthetic oligonucleotide
  Antisense strand to SEQ ID NO: 83800
aaacucaaagacagcuaaa

SEQ ID NO: 83882 - RNA, 19 nt, Artificial Sequence
  Description of Artificial Sequence: Synthetic oligonucleotide
  Sense strand starting at position 3880 of SEQ ID NO: 1052
gaguuuagcugucuuugag

SEQ ID NO: 83883 - RNA, 19 nt, Artificial Sequence
  Description of Artificial Sequence: Synthetic oligonucleotide
  Antisense strand to SEQ ID NO: 83802
cucaaagacagcuaaacuc

SEQ ID NO: 83884 - RNA, 19 nt, Artificial Sequence
  Description of Artificial Sequence: Synthetic oligonucleotide
  Sense strand starting at position 3858 of SEQ ID NO: 1052
cgaaacugauguuuguauu

SEQ ID NO: 83885 - RNA, 19 nt, Artificial Sequence
  Description of Artificial Sequence: Synthetic oligonucleotide
  Antisense strand to SEQ ID NO: 83804
aauacaaacaucaguuucg

SEQ ID NO: 83886 - RNA, 19 nt, Artificial Sequence
  Description of Artificial Sequence: Synthetic oligonucleotide
  Sense strand starting at position 3855 of SEQ ID NO: 1052
ccucgaaacugauguuugu

SEQ ID NO: 83887 - RNA, 19 nt, Artificial Sequence
  Description of Artificial Sequence: Synthetic oligonucleotide
  Antisense strand to SEQ ID NO: 83806
acaaacaucaguuucgagg

SEQ ID NO: 83888 - RNA, 19 nt, Artificial Sequence
  Description of Artificial Sequence: Synthetic oligonucleotide
  Sense strand starting at position 3799 of SEQ ID NO: 1052
gugaguuaaucagaaacac

SEQ ID NO: 83889 - RNA, 19 nt, Artificial Sequence
  Description of Artificial Sequence: Synthetic oligonucleotide
  Antisense strand to SEQ ID NO: 83808
guguuucugauuaacucac

SEQ ID NO: 83890 - RNA, 19 nt, Artificial Sequence
  Description of Artificial Sequence: Synthetic oligonucleotide
  Sense strand starting at position 3768 of SEQ ID NO: 1052
cuuugaugaucuguacuga

SEQ ID NO: 83891 - RNA, 19 nt, Artificial Sequence
  Description of Artificial Sequence: Synthetic oligonucleotide
  Antisense strand to SEQ ID NO: 83810
ucaguacagaucaucaaag

SEQ ID NO: 83892 - RNA, 19 nt, Artificial Sequence
  Description of Artificial Sequence: Synthetic oligonucleotide
  Sense strand starting at position 3765 of SEQ ID NO: 1052
gaucuuugaugaucuguac

SEQ ID NO: 83893 - RNA, 19 nt, Artificial Sequence
  Description of Artificial Sequence: Synthetic oligonucleotide
  Antisense strand to SEQ ID NO: 83812
guacagaucaucaaagauc

SEQ ID NO: 83894 - RNA, 19 nt, Artificial Sequence
  Description of Artificial Sequence: Synthetic oligonucleotide
  Sense strand starting at position 3670 of SEQ ID NO: 1052
ugucucaggaaagguuaaa

SEQ ID NO: 83895 - RNA, 19 nt, Artificial Sequence
  Description of Artificial Sequence: Synthetic oligonucleotide
  Antisense strand to SEQ ID NO: 83814
uuuaaccuuuccugagaca

SEQ ID NO: 83896 - RNA, 19 nt, Artificial Sequence
  Description of Artificial Sequence: Synthetic oligonucleotide
  Sense strand starting at position 3663 of SEQ ID NO: 1052
cuaugugugucucaggaaa

SEQ ID NO: 83897 - RNA, 19 nt, Artificial Sequence
  Description of Artificial Sequence: Synthetic oligonucleotide
  Antisense strand to SEQ ID NO: 83816
uuuccugagacacacauag

SEQ ID NO: 83898 - RNA, 19 nt, Artificial Sequence
  Description of Artificial Sequence: Synthetic oligonucleotide
  Sense strand starting at position 3661 of SEQ ID NO: 1052
gccuaugugugucucagga

SEQ ID NO: 83899 - RNA, 19 nt, Artificial Sequence
  Description of Artificial Sequence: Synthetic oligonucleotide
  Antisense strand to SEQ ID NO: 83818
uccugagacacacauaggc

SEQ ID NO: 83900 - RNA, 19 nt, Artificial Sequence
  Description of Artificial Sequence: Synthetic oligonucleotide
  Sense strand starting at position 3546 of SEQ ID NO: 1052
aagagaucuugaggcagaa

SEQ ID NO: 83901 - RNA, 19 nt, Artificial Sequence
  Description of Artificial Sequence: Synthetic oligonucleotide
  Antisense strand to SEQ ID NO: 83820
uucugccucaagaucucuu

SEQ ID NO: 83902 - RNA, 19 nt, Artificial Sequence
  Description of Artificial Sequence: Synthetic oligonucleotide
  Sense strand starting at position 3528 of SEQ ID NO: 1052
gccugucuggaugauguaa

SEQ ID NO: 83903 - RNA, 19 nt, Artificial Sequence
  Description of Artificial Sequence: Synthetic oligonucleotide
  Antisense strand to SEQ ID NO: 83822
uuacaucauccagacaggc

SEQ ID NO: 83904 - RNA, 19 nt, Artificial Sequence
  Description of Artificial Sequence: Synthetic oligonucleotide
  Sense strand starting at position 3524 of SEQ ID NO: 1052
ccaugccugucuggaugau

SEQ ID NO: 83905 - RNA, 19 nt, Artificial Sequence
  Description of Artificial Sequence: Synthetic oligonucleotide
  Antisense strand to SEQ ID NO: 83824
aucauccagacaggcaugg

SEQ ID NO: 83906 - RNA, 19 nt, Artificial Sequence
  Description of Artificial Sequence: Synthetic oligonucleotide
  Sense strand starting at position 3442 of SEQ ID NO: 1052
uuguuaaguccagaaccua

SEQ ID NO: 83907 - RNA, 19 nt, Artificial Sequence
  Description of Artificial Sequence: Synthetic oligonucleotide
  Antisense strand to SEQ ID NO: 83826
uagguucuggacuuaacaa

SEQ ID NO: 83908 - RNA, 19 nt, Artificial Sequence
  Description of Artificial Sequence: Synthetic oligonucleotide
  Sense strand starting at position 3405 of SEQ ID NO: 1052
gcccuaucccaagagcaau

SEQ ID NO: 83909 - RNA, 19 nt, Artificial Sequence
  Description of Artificial Sequence: Synthetic oligonucleotide
  Antisense strand to SEQ ID NO: 83828
auugcucuugggauagggc

SEQ ID NO: 83910 - RNA, 19 nt, Artificial Sequence
  Description of Artificial Sequence: Synthetic oligonucleotide
  Sense strand starting at position 3346 of SEQ ID NO: 1052
uugcuaagugauugagaag

SEQ ID NO: 83911 - RNA, 19 nt, Artificial Sequence
  Description of Artificial Sequence: Synthetic oligonucleotide
  Antisense strand to SEQ ID NO: 83830
cuucucaaucacuuagcaa

SEQ ID NO: 83912 - RNA, 19 nt, Artificial Sequence
  Description of Artificial Sequence: Synthetic oligonucleotide
  Sense strand starting at position 3345 of SEQ ID NO: 1052
uuugcuaagugauugagaa

SEQ ID NO: 83913 - RNA, 19 nt, Artificial Sequence
  Description of Artificial Sequence: Synthetic oligonucleotide
  Antisense strand to SEQ ID NO: 83832
uucucaaucacuuagcaaa

SEQ ID NO: 83914 - RNA, 19 nt, Artificial Sequence
  Description of Artificial Sequence: Synthetic oligonucleotide
  Sense strand starting at position 3342 of SEQ ID NO: 1052
cuguuugcuaagugauuga

SEQ ID NO: 83915 - RNA, 19 nt, Artificial Sequence
  Description of Artificial Sequence: Synthetic oligonucleotide
  Antisense strand to SEQ ID NO: 83834
ucaaucacuuagcaaacag

SEQ ID NO: 83916 - RNA, 19 nt, Artificial Sequence
  Description of Artificial Sequence: Synthetic oligonucleotide
  Sense strand starting at position 3336 of SEQ ID NO: 1052
gagaaccuguuugcuaagu

SEQ ID NO: 83917 - RNA, 19 nt, Artificial Sequence
  Description of Artificial Sequence: Synthetic oligonucleotide
  Antisense strand to SEQ ID NO: 83836
acuuagcaaacagguucuc

SEQ ID NO: 83918 - RNA, 19 nt, Artificial Sequence
  Description of Artificial Sequence: Synthetic oligonucleotide
  Sense strand starting at position 3335 of SEQ ID NO: 1052
ugagaaccuguuugcuaag

SEQ ID NO: 83919 - RNA, 19 nt, Artificial Sequence
  Description of Artificial Sequence: Synthetic oligonucleotide
  Antisense strand to SEQ ID NO: 83838
cuuagcaaacagguucuca

SEQ ID NO: 83920 - RNA, 19 nt, Artificial Sequence
  Description of Artificial Sequence: Synthetic oligonucleotide
  Sense strand starting at position 3334 of SEQ ID NO: 1052
cugagaaccuguuugcuaa

SEQ ID NO: 83921 - RNA, 19 nt, Artificial Sequence
  Description of Artificial Sequence: Synthetic oligonucleotide
  Antisense strand to SEQ ID NO: 83840
uuagcaaacagguucucag

SEQ ID NO: 83922 - RNA, 19 nt, Artificial Sequence
  Description of Artificial Sequence: Synthetic oligonucleotide
  Sense strand starting at position 3233 of SEQ ID NO: 1052
ugacuuugccuguguauau

SEQ ID NO: 83923 - RNA, 19 nt, Artificial Sequence
  Description of Artificial Sequence: Synthetic oligonucleotide
  Antisense strand to SEQ ID NO: 83842
auauacacaggcaaaguca

SEQ ID NO: 83924 - RNA, 19 nt, Artificial Sequence
  Description of Artificial Sequence: Synthetic oligonucleotide
  Sense strand starting at position 3231 of SEQ ID NO: 1052
uuugacuuugccuguguau

SEQ ID NO: 83925 - RNA, 19 nt, Artificial Sequence
  Description of Artificial Sequence: Synthetic oligonucleotide
  Antisense strand to SEQ ID NO: 83844
auacacaggcaaagucaaa

SEQ ID NO: 83926 - RNA, 19 nt, Artificial Sequence
  Description of Artificial Sequence: Synthetic oligonucleotide
  Sense strand starting at position 3230 of SEQ ID NO: 1052
auuugacuuugccugugua

SEQ ID NO: 83927 - RNA, 19 nt, Artificial Sequence
  Description of Artificial Sequence: Synthetic oligonucleotide
  Antisense strand to SEQ ID NO: 83846
uacacaggcaaagucaaau

SEQ ID NO: 83928 - RNA, 19 nt, Artificial Sequence
  Description of Artificial Sequence: Synthetic oligonucleotide
  Sense strand starting at position 3132 of SEQ ID NO: 1052
aaagccuuugcucgucauu

SEQ ID NO: 83929 - RNA, 19 nt, Artificial Sequence
  Description of Artificial Sequence: Synthetic oligonucleotide
  Antisense strand to SEQ ID NO: 83848
aaugacgagcaaaggcuuu

SEQ ID NO: 83930 - RNA, 19 nt, Artificial Sequence
  Description of Artificial Sequence: Synthetic oligonucleotide
  Sense strand starting at position 3068 of SEQ ID NO: 1052
uguguucaucgcgaaaugu

SEQ ID NO: 83931 - RNA, 19 nt, Artificial Sequence
  Description of Artificial Sequence: Synthetic oligonucleotide
  Antisense strand to SEQ ID NO: 83850
acauuucgcgaugaacaca

SEQ ID NO: 83932 - RNA, 19 nt, Artificial Sequence
  Description of Artificial Sequence: Synthetic oligonucleotide
  Sense strand starting at position 3065 of SEQ ID NO: 1052
ggcuguguucaucgcgaaa

SEQ ID NO: 83933 - RNA, 19 nt, Artificial Sequence
  Description of Artificial Sequence: Synthetic oligonucleotide
  Antisense strand to SEQ ID NO: 83852
uuucgcgaugaacacagcc

SEQ ID NO: 83934 - RNA, 19 nt, Artificial Sequence
  Description of Artificial Sequence: Synthetic oligonucleotide
  Sense strand starting at position 3031 of SEQ ID NO: 1052
cuucuugugccggauggaa

SEQ ID NO: 83935 - RNA, 19 nt, Artificial Sequence
  Description of Artificial Sequence: Synthetic oligonucleotide
  Antisense strand to SEQ ID NO: 83854
uuccauccggcacaagaag

SEQ ID NO: 83936 - RNA, 19 nt, Artificial Sequence
  Description of Artificial Sequence: Synthetic oligonucleotide
  Sense strand starting at position 3030 of SEQ ID NO: 1052
gcuucuugugccggaugga

SEQ ID NO: 83937 - RNA, 19 nt, Artificial Sequence
  Description of Artificial Sequence: Synthetic oligonucleotide
  Antisense strand to SEQ ID NO: 83856
uccauccggcacaagaagc

SEQ ID NO: 83938 - RNA, 19 nt, Artificial Sequence
  Description of Artificial Sequence: Synthetic oligonucleotide
  Sense strand starting at position 416 of SEQ ID NO: 1052
ggaacaaucugcgguggua

SEQ ID NO: 83939 - RNA, 19 nt, Artificial Sequence
  Description of Artificial Sequence: Synthetic oligonucleotide
  Antisense strand to SEQ ID NO: 83858
uaccaccgcagauuguucc

SEQ ID NO: 83940 - RNA, 19 nt, Artificial Sequence
  Description of Artificial Sequence: Synthetic oligonucleotide
  Sense strand starting at position 360 of SEQ ID NO: 1052
agggugggaguguguaauu

SEQ ID NO: 83941 - RNA, 19 nt, Artificial Sequence
  Description of Artificial Sequence: Synthetic oligonucleotide
  Antisense strand to SEQ ID NO: 83860
aauuacacacucccacccu

SEQ ID NO: 83942 - RNA, 19 nt, Artificial Sequence
  Description of Artificial Sequence: Synthetic oligonucleotide
  Sense strand starting at position 329 of SEQ ID NO: 1052
gugcaaucuccugauggag

SEQ ID NO: 83943 - RNA, 19 nt, Artificial Sequence
  Description of Artificial Sequence: Synthetic oligonucleotide
  Antisense strand to SEQ ID NO: 83862
cuccaucaggagauugcac

SEQ ID NO: 83944 - RNA, 19 nt, Artificial Sequence
  Description of Artificial Sequence: Synthetic oligonucleotide
  Sense strand starting at position 328 of SEQ ID NO: 1052
ugugcaaucuccugaugga

SEQ ID NO: 83945 - RNA, 19 nt, Artificial Sequence
  Description of Artificial Sequence: Synthetic oligonucleotide
  Antisense strand to SEQ ID NO: 83864
uccaucaggagauugcaca

SEQ ID NO: 83946 - RNA, 19 nt, Artificial Sequence
  Description of Artificial Sequence: Synthetic oligonucleotide
  Sense strand starting at position 316 of SEQ ID NO: 1052
guaagucaagugugugcaa

SEQ ID NO: 83947 - RNA, 19 nt, Artificial Sequence
  Description of Artificial Sequence: Synthetic oligonucleotide
  Antisense strand to SEQ ID NO: 83866
uugcacacacuugacuuac

SEQ ID NO: 83948 - RNA, 19 nt, Artificial Sequence
  Description of Artificial Sequence: Synthetic oligonucleotide
  Sense strand starting at position 299 of SEQ ID NO: 1052
gggacuggguccaaguagu

SEQ ID NO: 83949 - RNA, 19 nt, Artificial Sequence
  Description of Artificial Sequence: Synthetic oligonucleotide
  Antisense strand to SEQ ID NO: 83868
acuacuuggacccaguccc

SEQ ID NO: 83950 - RNA, 19 nt, Artificial Sequence
  Description of Artificial Sequence: Synthetic oligonucleotide
  Sense strand starting at position 175 of SEQ ID NO: 1052
ccguaguccuguguggagu

SEQ ID NO: 83951 - RNA, 19 nt, Artificial Sequence
  Description of Artificial Sequence: Synthetic oligonucleotide
  Antisense strand to SEQ ID NO: 83870
acuccacacaggacuacgg

SEQ ID NO: 83952 - RNA, 19 nt, Artificial Sequence
  Description of Artificial Sequence: Synthetic oligonucleotide
  Sense strand starting at position 174 of SEQ ID NO: 1052
accguaguccuguguggag

SEQ ID NO: 83953 - RNA, 19 nt, Artificial Sequence
  Description of Artificial Sequence: Synthetic oligonucleotide
  Antisense strand to SEQ ID NO: 83872
cuccacacaggacuacggu

SEQ ID NO: 83954 - RNA, 19 nt, Artificial Sequence
  Description of Artificial Sequence: Synthetic oligonucleotide
  Sense strand starting at position 30 of SEQ ID NO: 1052
gugcauaguugugagcaca

SEQ ID NO: 83955 - RNA, 19 nt, Artificial Sequence
  Description of Artificial Sequence: Synthetic oligonucleotide
  Antisense strand to SEQ ID NO: 83874
ugugcucacaacuaugcac

SEQ ID NO: 83956 - RNA, 19 nt, Artificial Sequence
  Description of Artificial Sequence: Synthetic oligonucleotide
  Sense strand starting at position 17 of SEQ ID NO: 1053
gcuuuaaugccagguaccu

SEQ ID NO: 83957 - RNA, 19 nt, Artificial Sequence
  Description of Artificial Sequence: Synthetic oligonucleotide
  Antisense strand to SEQ ID NO: 83876
agguaccuggcauuaaagc

SEQ ID NO: 83958 - RNA, 19 nt, Artificial Sequence
  Description of Artificial Sequence: Synthetic oligonucleotide
  Sense strand starting at position 124 of SEQ ID NO: 1053
augaauaauugagagcuca

SEQ ID NO: 83959 - RNA, 19 nt, Artificial Sequence
  Description of Artificial Sequence: Synthetic oligonucleotide
  Antisense strand to SEQ ID NO: 83878
ugagcucucaauuauucau

SEQ ID NO: 83960 - RNA, 19 nt, Artificial Sequence
  Description of Artificial Sequence: Synthetic oligonucleotide
  Sense strand starting at position 164 of SEQ ID NO: 1053
ucccuaucuugggaccaua

SEQ ID NO: 83961 - RNA, 19 nt, Artificial Sequence
  Description of Artificial Sequence: Synthetic oligonucleotide
  Antisense strand to SEQ ID NO: 83880
uauggucccaagauaggga

SEQ ID NO: 83962 - RNA, 19 nt, Artificial Sequence
  Description of Artificial Sequence: Synthetic oligonucleotide
  Sense strand starting at position 219 of SEQ ID NO: 1053
gcgugaauccagggcaauc

SEQ ID NO: 83963 - RNA, 19 nt, Artificial Sequence
  Description of Artificial Sequence: Synthetic oligonucleotide
  Antisense strand to SEQ ID NO: 83882
gauugcccuggauucacgc

SEQ ID NO: 83964 - RNA, 19 nt, Artificial Sequence
  Description of Artificial Sequence: Synthetic oligonucleotide
  Sense strand starting at position 229 of SEQ ID NO: 1053
agggcaaucuuccuaaaga

SEQ ID NO: 83965 - RNA, 19 nt, Artificial Sequence
  Description of Artificial Sequence: Synthetic oligonucleotide
  Antisense strand to SEQ ID NO: 83884
ucuuuaggaagauugcccu

SEQ ID NO: 83966 - RNA, 19 nt, Artificial Sequence
  Description of Artificial Sequence: Synthetic oligonucleotide
  Sense strand starting at position 230 of SEQ ID NO: 1053
gggcaaucuuccuaaagaa

SEQ ID NO: 83967 - RNA, 19 nt, Artificial Sequence
  Description of Artificial Sequence: Synthetic oligonucleotide
  Antisense strand to SEQ ID NO: 83886
uucuuuaggaagauugccc

SEQ ID NO: 83968 - RNA, 19 nt, Artificial Sequence
  Description of Artificial Sequence: Synthetic oligonucleotide
  Sense strand starting at position 375 of SEQ ID NO: 1053
ggacaagugucccaccaga

SEQ ID NO: 83969 - RNA, 19 nt, Artificial Sequence
  Description of Artificial Sequence: Synthetic oligonucleotide
  Antisense strand to SEQ ID NO: 83888
ucuggugggacacuugucc

SEQ ID NO: 83970 - RNA, 19 nt, Artificial Sequence
  Description of Artificial Sequence: Synthetic oligonucleotide
  Sense strand starting at position 529 of SEQ ID NO: 1053
ggguaugaauuccugcaac

SEQ ID NO: 83971 - RNA, 19 nt, Artificial Sequence
  Description of Artificial Sequence: Synthetic oligonucleotide
  Antisense strand to SEQ ID NO: 83890
guugcaggaauucauaccc

SEQ ID NO: 83972 - RNA, 19 nt, Artificial Sequence
  Description of Artificial Sequence: Synthetic oligonucleotide
  Sense strand starting at position 665 of SEQ ID NO: 1053
ggcagaagaguuugacagu

SEQ ID NO: 83973 - RNA, 19 nt, Artificial Sequence
  Description of Artificial Sequence: Synthetic oligonucleotide
  Antisense strand to SEQ ID NO: 83892
acugucaaacucuucugcc

SEQ ID NO: 83974 - RNA, 19 nt, Artificial Sequence
  Description of Artificial Sequence: Synthetic oligonucleotide
  Sense strand starting at position 666 of SEQ ID NO: 1053
gcagaagaguuugacagug

SEQ ID NO: 83975 - RNA, 19 nt, Artificial Sequence
  Description of Artificial Sequence: Synthetic oligonucleotide
  Antisense strand to SEQ ID NO: 83894
cacugucaaacucuucugc

SEQ ID NO: 83976 - RNA, 19 nt, Artificial Sequence
  Description of Artificial Sequence: Synthetic oligonucleotide
  Sense strand starting at position 672 of SEQ ID NO: 1053
gaguuugacagugggaaag

SEQ ID NO: 83977 - RNA, 19 nt, Artificial Sequence
  Description of Artificial Sequence: Synthetic oligonucleotide
  Antisense strand to SEQ ID NO: 83896
cuuucccacugucaaacuc

SEQ ID NO: 83978 - RNA, 19 nt, Artificial Sequence
  Description of Artificial Sequence: Synthetic oligonucleotide
  Sense strand starting at position 674 of SEQ ID NO: 1053
guuugacagugggaaagau

SEQ ID NO: 83979 - RNA, 19 nt, Artificial Sequence
  Description of Artificial Sequence: Synthetic oligonucleotide
  Antisense strand to SEQ ID NO: 83898
aucuuucccacugucaaac

SEQ ID NO: 83980 - RNA, 19 nt, Artificial Sequence
  Description of Artificial Sequence: Synthetic oligonucleotide
  Sense strand starting at position 729 of SEQ ID NO: 1053
acagguaagcucugaaaug

SEQ ID NO: 83981 - RNA, 19 nt, Artificial Sequence
  Description of Artificial Sequence: Synthetic oligonucleotide
  Antisense strand to SEQ ID NO: 83900
cauuucagagcuuaccugu

SEQ ID NO: 83982 - RNA, 19 nt, Artificial Sequence
  Description of Artificial Sequence: Synthetic oligonucleotide
  Sense strand starting at position 730 of SEQ ID NO: 1053
cagguaagcucugaaauga

SEQ ID NO: 83983 - RNA, 19 nt, Artificial Sequence
  Description of Artificial Sequence: Synthetic oligonucleotide
  Antisense strand to SEQ ID NO: 83902
ucauuucagagcuuaccug

SEQ ID NO: 83984 - RNA, 19 nt, Artificial Sequence
  Description of Artificial Sequence: Synthetic oligonucleotide
  Sense strand starting at position 753 of SEQ ID NO: 1053
ggugacaaauccuggcaaa

SEQ ID NO: 83985 - RNA, 19 nt, Artificial Sequence
  Description of Artificial Sequence: Synthetic oligonucleotide
  Antisense strand to SEQ ID NO: 83904
uuugccaggauuugucacc

SEQ ID NO: 83986 - RNA, 19 nt, Artificial Sequence
  Description of Artificial Sequence: Synthetic oligonucleotide
  Sense strand starting at position 754 of SEQ ID NO: 1053
gugacaaauccuggcaaag

SEQ ID NO: 83987 - RNA, 19 nt, Artificial Sequence
  Description of Artificial Sequence: Synthetic oligonucleotide
  Antisense strand to SEQ ID NO: 83906
cuuugccaggauuugucac

SEQ ID NO: 83988 - RNA, 19 nt, Artificial Sequence
  Description of Artificial Sequence: Synthetic oligonucleotide
  Sense strand starting at position 756 of SEQ ID NO: 1053
gacaaauccuggcaaagga

SEQ ID NO: 83989 - RNA, 19 nt, Artificial Sequence
  Description of Artificial Sequence: Synthetic oligonucleotide
  Antisense strand to SEQ ID NO: 83908
uccuuugccaggauuuguc

SEQ ID NO: 83990 - RNA, 19 nt, Artificial Sequence
  Description of Artificial Sequence: Synthetic oligonucleotide
  Sense strand starting at position 878 of SEQ ID NO: 1053
ggguuugacaccuagcuga

SEQ ID NO: 83991 - RNA, 19 nt, Artificial Sequence
  Description of Artificial Sequence: Synthetic oligonucleotide
  Antisense strand to SEQ ID NO: 83910
ucagcuaggugucaaaccc

SEQ ID NO: 83992 - RNA, 19 nt, Artificial Sequence
  Description of Artificial Sequence: Synthetic oligonucleotide
  Sense strand starting at position 1198 of SEQ ID NO: 1053
gggcacuuuccugaacucu

SEQ ID NO: 83993 - RNA, 19 nt, Artificial Sequence
  Description of Artificial Sequence: Synthetic oligonucleotide
  Antisense strand to SEQ ID NO: 83912
agaguucaggaaagugccc

SEQ ID NO: 83994 - RNA, 19 nt, Artificial Sequence
  Description of Artificial Sequence: Synthetic oligonucleotide
  Sense strand starting at position 1370 of SEQ ID NO: 1053
gggaaauguacacaugcuu

SEQ ID NO: 83995 - RNA, 19 nt, Artificial Sequence
  Description of Artificial Sequence: Synthetic oligonucleotide
  Antisense strand to SEQ ID NO: 83914
aagcauguguacauuuccc

SEQ ID NO: 83996 - RNA, 19 nt, Artificial Sequence
  Description of Artificial Sequence: Synthetic oligonucleotide
  Sense strand starting at position 1379 of SEQ ID NO: 1053
acacaugcuuuguauugaa

SEQ ID NO: 83997 - RNA, 19 nt, Artificial Sequence
  Description of Artificial Sequence: Synthetic oligonucleotide
  Antisense strand to SEQ ID NO: 83916
uucaauacaaagcaugugu

SEQ ID NO: 83998 - RNA, 19 nt, Artificial Sequence
  Description of Artificial Sequence: Synthetic oligonucleotide
  Sense strand starting at position 1389 of SEQ ID NO: 1053
uguauugaauucguggaca

SEQ ID NO: 83999 - RNA, 19 nt, Artificial Sequence
  Description of Artificial Sequence: Synthetic oligonucleotide
  Antisense strand to SEQ ID NO: 83918
uguccacgaauucaauaca

SEQ ID NO: 84000 - RNA, 19 nt, Artificial Sequence
  Description of Artificial Sequence: Synthetic oligonucleotide
  Sense strand starting at position 1508 of SEQ ID NO: 1053
caacgcaugccuggucuua

SEQ ID NO: 84001 - RNA, 19 nt, Artificial Sequence
  Description of Artificial Sequence: Synthetic oligonucleotide
  Antisense strand to SEQ ID NO: 83920
uaagaccaggcaugcguug

SEQ ID NO: 84002 - RNA, 19 nt, Artificial Sequence
  Description of Artificial Sequence: Synthetic oligonucleotide
  Sense strand starting at position 1510 of SEQ ID NO: 1053
acgcaugccuggucuuaca

SEQ ID NO: 84003 - RNA, 19 nt, Artificial Sequence
  Description of Artificial Sequence: Synthetic oligonucleotide
  Antisense strand to SEQ ID NO: 83922
uguaagaccaggcaugcgu

SEQ ID NO: 84004 - RNA, 19 nt, Artificial Sequence
  Description of Artificial Sequence: Synthetic oligonucleotide
  Sense strand starting at position 1628 of SEQ ID NO: 1053
ucagccuguugcugacaua

SEQ ID NO: 84005 - RNA, 19 nt, Artificial Sequence
  Description of Artificial Sequence: Synthetic oligonucleotide
  Antisense strand to SEQ ID NO: 83924
uaugucagcaacaggcuga

SEQ ID NO: 84006 - RNA, 19 nt, Artificial Sequence
  Description of Artificial Sequence: Synthetic oligonucleotide
  Sense strand starting at position 1629 of SEQ ID NO: 1053
cagccuguugcugacauau

SEQ ID NO: 84007 - RNA, 19 nt, Artificial Sequence
  Description of Artificial Sequence: Synthetic oligonucleotide
  Antisense strand to SEQ ID NO: 83926
auaugucagcaacaggcug

SEQ ID NO: 84008 - RNA, 19 nt, Artificial Sequence
  Description of Artificial Sequence: Synthetic oligonucleotide
  Sense strand starting at position 1631 of SEQ ID NO: 1053
gccuguugcugacauauca

SEQ ID NO: 84009 - RNA, 19 nt, Artificial Sequence
  Description of Artificial Sequence: Synthetic oligonucleotide
  Antisense strand to SEQ ID NO: 83928
ugauaugucagcaacaggc

SEQ ID NO: 84010 - RNA, 19 nt, Artificial Sequence
  Description of Artificial Sequence: Synthetic oligonucleotide
  Sense strand starting at position 1648 of SEQ ID NO: 1053
cagggcugcccgggauaaa

SEQ ID NO: 84011 - RNA, 19 nt, Artificial Sequence
  Description of Artificial Sequence: Synthetic oligonucleotide
  Antisense strand to SEQ ID NO: 83930
uuuaucccgggcagcccug

SEQ ID NO: 84012 - RNA, 19 nt, Artificial Sequence
  Description of Artificial Sequence: Synthetic oligonucleotide
  Sense strand starting at position 1719 of SEQ ID NO: 1053
uuuaguugaguccagguaa

SEQ ID NO: 84013 - RNA, 19 nt, Artificial Sequence
  Description of Artificial Sequence: Synthetic oligonucleotide
  Antisense strand to SEQ ID NO: 83932
uuaccuggacucaacuaaa

SEQ ID NO: 84014 - RNA, 19 nt, Artificial Sequence
  Description of Artificial Sequence: Synthetic oligonucleotide
  Sense strand starting at position 1785 of SEQ ID NO: 1053
cagagugagucuuucgauc

SEQ ID NO: 84015 - RNA, 19 nt, Artificial Sequence
  Description of Artificial Sequence: Synthetic oligonucleotide
  Antisense strand to SEQ ID NO: 83934
gaucgaaagacucacucug

SEQ ID NO: 84016 - RNA, 19 nt, Artificial Sequence
  Description of Artificial Sequence: Synthetic oligonucleotide
  Sense strand starting at position 1938 of SEQ ID NO: 1053
gcuggagaacuuugcgaag

SEQ ID NO: 84017 - RNA, 19 nt, Artificial Sequence
  Description of Artificial Sequence: Synthetic oligonucleotide
  Antisense strand to SEQ ID NO: 83936
cuucgcaaaguucuccagc

SEQ ID NO: 84018 - RNA, 19 nt, Artificial Sequence
  Description of Artificial Sequence: Synthetic oligonucleotide
  Sense strand starting at position 3146 of SEQ ID NO: 1053
ggaggaauccuagggugug

SEQ ID NO: 84019 - RNA, 19 nt, Artificial Sequence
  Description of Artificial Sequence: Synthetic oligonucleotide
  Antisense strand to SEQ ID NO: 83938
cacacccuaggauuccucc

SEQ ID NO: 84020 - RNA, 19 nt, Artificial Sequence
  Description of Artificial Sequence: Synthetic oligonucleotide
  Sense strand starting at position 3374 of SEQ ID NO: 1053
caccuagcugugugucuau

SEQ ID NO: 84021 - RNA, 19 nt, Artificial Sequence
  Description of Artificial Sequence: Synthetic oligonucleotide
  Antisense strand to SEQ ID NO: 83940
auagacacacagcuaggug

SEQ ID NO: 84022 - RNA, 19 nt, Artificial Sequence
  Description of Artificial Sequence: Synthetic oligonucleotide
  Sense strand starting at position 3388 of SEQ ID NO: 1053
ucuauuucucgcugacugu

SEQ ID NO: 84023 - RNA, 19 nt, Artificial Sequence
  Description of Artificial Sequence: Synthetic oligonucleotide
  Antisense strand to SEQ ID NO: 83942
acagucagcgagaaauaga

SEQ ID NO: 84024 - RNA, 19 nt, Artificial Sequence
  Description of Artificial Sequence: Synthetic oligonucleotide
  Sense strand starting at position 81 of SEQ ID NO: 1054
guuggugucacugacaaug

SEQ ID NO: 84025 - RNA, 19 nt, Artificial Sequence
  Description of Artificial Sequence: Synthetic oligonucleotide
  Antisense strand to SEQ ID NO: 83944
cauugucagugacaccaac

SEQ ID NO: 84026 - RNA, 19 nt, Artificial Sequence
  Description of Artificial Sequence: Synthetic oligonucleotide
  Sense strand starting at position 86 of SEQ ID NO: 1054
ugucacugacaaugggaua

SEQ ID NO: 84027 - RNA, 19 nt, Artificial Sequence
  Description of Artificial Sequence: Synthetic oligonucleotide
  Antisense strand to SEQ ID NO: 83946
uaucccauugucagugaca

SEQ ID NO: 84028 - RNA, 19 nt, Artificial Sequence
  Description of Artificial Sequence: Synthetic oligonucleotide
  Sense strand starting at position 274 of SEQ ID NO: 1054
agguaaugacugugaccuu

SEQ ID NO: 84029 - RNA, 19 nt, Artificial Sequence
  Description of Artificial Sequence: Synthetic oligonucleotide
  Antisense strand to SEQ ID NO: 83948
aaggucacagucauuaccu

SEQ ID NO: 84030 - RNA, 19 nt, Artificial Sequence
  Description of Artificial Sequence: Synthetic oligonucleotide
  Sense strand starting at position 412 of SEQ ID NO: 1054
auacgugauuauuugcuau

SEQ ID NO: 84031 - RNA, 19 nt, Artificial Sequence
  Description of Artificial Sequence: Synthetic oligonucleotide
  Antisense strand to SEQ ID NO: 83950
auagcaaauaaucacguau

SEQ ID NO: 84032 - RNA, 19 nt, Artificial Sequence
  Description of Artificial Sequence: Synthetic oligonucleotide
  Sense strand starting at position 418 of SEQ ID NO: 1054
gauuauuugcuaugcuagu

SEQ ID NO: 84033 - RNA, 19 nt, Artificial Sequence
  Description of Artificial Sequence: Synthetic oligonucleotide
  Antisense strand to SEQ ID NO: 83952
acuagcauagcaaauaauc

SEQ ID NO: 84034 - RNA, 19 nt, Artificial Sequence
  Description of Artificial Sequence: Synthetic oligonucleotide
  Sense strand starting at position 419 of SEQ ID NO: 1054
auuauuugcuaugcuaguu

SEQ ID NO: 84035 - RNA, 19 nt, Artificial Sequence
  Description of Artificial Sequence: Synthetic oligonucleotide
  Antisense strand to SEQ ID NO: 83954
aacuagcauagcaaauaau

SEQ ID NO: 84036 - RNA, 19 nt, Artificial Sequence
  Description of Artificial Sequence: Synthetic oligonucleotide
  Sense strand starting at position 489 of SEQ ID NO: 1054
uuauuaguagcauaaguca

SEQ ID NO: 84037 - RNA, 19 nt, Artificial Sequence
  Description of Artificial Sequence: Synthetic oligonucleotide
  Antisense strand to SEQ ID NO: 83956
ugacuuaugcuacuaauaa

SEQ ID NO: 84038 - RNA, 19 nt, Artificial Sequence
  Description of Artificial Sequence: Synthetic oligonucleotide
  Sense strand starting at position 580 of SEQ ID NO: 1054
agacucugaaaucgugaua

SEQ ID NO: 84039 - RNA, 19 nt, Artificial Sequence
  Description of Artificial Sequence: Synthetic oligonucleotide
  Antisense strand to SEQ ID NO: 83958
uaucacgauuucagagucu

SEQ ID NO: 84040 - RNA, 19 nt, Artificial Sequence
  Description of Artificial Sequence: Synthetic oligonucleotide
  Sense strand starting at position 641 of SEQ ID NO: 1054
gucucccugguagaagaau

SEQ ID NO: 84041 - RNA, 19 nt, Artificial Sequence
  Description of Artificial Sequence: Synthetic oligonucleotide
  Antisense strand to SEQ ID NO: 83960
auucuucuaccagggagac

SEQ ID NO: 84042 - RNA, 19 nt, Artificial Sequence
  Description of Artificial Sequence: Synthetic oligonucleotide
  Sense strand starting at position 652 of SEQ ID NO: 1054
agaagaaugucaucuguuu

SEQ ID NO: 84043 - RNA, 19 nt, Artificial Sequence
  Description of Artificial Sequence: Synthetic oligonucleotide
  Antisense strand to SEQ ID NO: 83962
aaacagaugacauucuucu

SEQ ID NO: 84044 - RNA, 19 nt, Artificial Sequence
  Description of Artificial Sequence: Synthetic oligonucleotide
  Sense strand starting at position 825 of SEQ ID NO: 1054
uguuaaguccgaaaggcgu

SEQ ID NO: 84045 - RNA, 19 nt, Artificial Sequence
  Description of Artificial Sequence: Synthetic oligonucleotide
  Antisense strand to SEQ ID NO: 83964
acgccuuucggacuuaaca

SEQ ID NO: 84046 - RNA, 19 nt, Artificial Sequence
  Description of Artificial Sequence: Synthetic oligonucleotide
  Sense strand starting at position 926 of SEQ ID NO: 1054
gaaacagaugagugcugau

SEQ ID NO: 84047 - RNA, 19 nt, Artificial Sequence
  Description of Artificial Sequence: Synthetic oligonucleotide
  Antisense strand to SEQ ID NO: 83966
aucagcacucaucuguuuc

SEQ ID NO: 84048 - RNA, 19 nt, Artificial Sequence
  Description of Artificial Sequence: Synthetic oligonucleotide
  Sense strand starting at position 971 of SEQ ID NO: 1054
uuuauagguuuggugagau

SEQ ID NO: 84049 - RNA, 19 nt, Artificial Sequence
  Description of Artificial Sequence: Synthetic oligonucleotide
  Antisense strand to SEQ ID NO: 83968
aucucaccaaaccuauaaa

SEQ ID NO: 84050 - RNA, 19 nt, Artificial Sequence
  Description of Artificial Sequence: Synthetic oligonucleotide
  Sense strand starting at position 979 of SEQ ID NO: 1054
uuuggugagauugggaauu

SEQ ID NO: 84051 - RNA, 19 nt, Artificial Sequence
  Description of Artificial Sequence: Synthetic oligonucleotide
  Antisense strand to SEQ ID NO: 83970
aauucccaaucucaccaaa

SEQ ID NO: 84052 - RNA, 19 nt, Artificial Sequence
  Description of Artificial Sequence: Synthetic oligonucleotide
  Sense strand starting at position 981 of SEQ ID NO: 1054
uggugagauugggaauuua

SEQ ID NO: 84053 - RNA, 19 nt, Artificial Sequence
  Description of Artificial Sequence: Synthetic oligonucleotide
  Antisense strand to SEQ ID NO: 83972
uaaauucccaaucucacca

SEQ ID NO: 84054 - RNA, 19 nt, Artificial Sequence
  Description of Artificial Sequence: Synthetic oligonucleotide
  Sense strand starting at position 1009 of SEQ ID NO: 1054
aacacuuaaggguggcaua

SEQ ID NO: 84055 - RNA, 19 nt, Artificial Sequence
  Description of Artificial Sequence: Synthetic oligonucleotide
  Antisense strand to SEQ ID NO: 83974
uaugccacccuuaaguguu

SEQ ID NO: 84056 - RNA, 19 nt, Artificial Sequence
  Description of Artificial Sequence: Synthetic oligonucleotide
  Sense strand starting at position 1010 of SEQ ID NO: 1054
acacuuaaggguggcauaa

SEQ ID NO: 84057 - RNA, 19 nt, Artificial Sequence
  Description of Artificial Sequence: Synthetic oligonucleotide
  Antisense strand to SEQ ID NO: 83976
uuaugccacccuuaagugu

SEQ ID NO: 84058 - RNA, 19 nt, Artificial Sequence
  Description of Artificial Sequence: Synthetic oligonucleotide
  Sense strand starting at position 1052 of SEQ ID NO: 1054
ggaaauauaacagguuugu

SEQ ID NO: 84059 - RNA, 19 nt, Artificial Sequence
  Description of Artificial Sequence: Synthetic oligonucleotide
  Antisense strand to SEQ ID NO: 83978
acaaaccuguuauauuucc

SEQ ID NO: 84060 - RNA, 19 nt, Artificial Sequence
  Description of Artificial Sequence: Synthetic oligonucleotide
  Sense strand starting at position 1152 of SEQ ID NO: 1054
gaaggugagccuuaacuuc

SEQ ID NO: 84061 - RNA, 19 nt, Artificial Sequence
  Description of Artificial Sequence: Synthetic oligonucleotide
  Antisense strand to SEQ ID NO: 83980
gaaguuaaggcucaccuuc

SEQ ID NO: 84062 - RNA, 19 nt, Artificial Sequence
  Description of Artificial Sequence: Synthetic oligonucleotide
  Sense strand starting at position 1481 of SEQ ID NO: 1054
cgcauccuuggagauaaga

SEQ ID NO: 84063 - RNA, 19 nt, Artificial Sequence
  Description of Artificial Sequence: Synthetic oligonucleotide
  Antisense strand to SEQ ID NO: 83982
ucuuaucuccaaggaugcg

SEQ ID NO: 84064 - RNA, 19 nt, Artificial Sequence
  Description of Artificial Sequence: Synthetic oligonucleotide
  Sense strand starting at position 1696 of SEQ ID NO: 1054
gcaauaaaggcacggauaa

SEQ ID NO: 84065 - RNA, 19 nt, Artificial Sequence
  Description of Artificial Sequence: Synthetic oligonucleotide
  Antisense strand to SEQ ID NO: 83984
uuauccgugccuuuauugc

SEQ ID NO: 84066 - RNA, 19 nt, Artificial Sequence
  Description of Artificial Sequence: Synthetic oligonucleotide
  Sense strand starting at position 1763 of SEQ ID NO: 1054
cgaacaauauucuccagaa

SEQ ID NO: 84067 - RNA, 19 nt, Artificial Sequence
  Description of Artificial Sequence: Synthetic oligonucleotide
  Antisense strand to SEQ ID NO: 83986
uucuggagaauauuguucg

SEQ ID NO: 84068 - RNA, 19 nt, Artificial Sequence
  Description of Artificial Sequence: Synthetic oligonucleotide
  Sense strand starting at position 2423 of SEQ ID NO: 1054
uaagguuagccugacuagu

SEQ ID NO: 84069 - RNA, 19 nt, Artificial Sequence
  Description of Artificial Sequence: Synthetic oligonucleotide
  Antisense strand to SEQ ID NO: 83988
acuagucaggcuaaccuua

SEQ ID NO: 84070 - RNA, 19 nt, Artificial Sequence
  Description of Artificial Sequence: Synthetic oligonucleotide
  Sense strand starting at position 2597 of SEQ ID NO: 1054
uugguaugaucaguaucaa

SEQ ID NO: 84071 - RNA, 19 nt, Artificial Sequence
  Description of Artificial Sequence: Synthetic oligonucleotide
  Antisense strand to SEQ ID NO: 83990
uugauacugaucauaccaa

SEQ ID NO: 84072 - RNA, 19 nt, Artificial Sequence
  Description of Artificial Sequence: Synthetic oligonucleotide
  Sense strand starting at position 2609 of SEQ ID NO: 1054
guaucaaacugccugacaa

SEQ ID NO: 84073 - RNA, 19 nt, Artificial Sequence
  Description of Artificial Sequence: Synthetic oligonucleotide
  Antisense strand to SEQ ID NO: 83992
uugucaggcaguuugauac

SEQ ID NO: 84074 - RNA, 19 nt, Artificial Sequence
  Description of Artificial Sequence: Synthetic oligonucleotide
  Sense strand starting at position 2911 of SEQ ID NO: 1054
gccuaugucccacaggaga

SEQ ID NO: 84075 - RNA, 19 nt, Artificial Sequence
  Description of Artificial Sequence: Synthetic oligonucleotide
  Antisense strand to SEQ ID NO: 83994
ucuccugugggacauaggc

SEQ ID NO: 84076 - RNA, 19 nt, Artificial Sequence
  Description of Artificial Sequence: Synthetic oligonucleotide
  Sense strand starting at position 3009 of SEQ ID NO: 1054
aaauuaauugucuggguua

SEQ ID NO: 84077 - RNA, 19 nt, Artificial Sequence
  Description of Artificial Sequence: Synthetic oligonucleotide
  Antisense strand to SEQ ID NO: 83996
uaacccagacaauuaauuu

SEQ ID NO: 84078 - RNA, 19 nt, Artificial Sequence
  Description of Artificial Sequence: Synthetic oligonucleotide
  Sense strand starting at position 3024 of SEQ ID NO: 1054
guuagccauccugacauau

SEQ ID NO: 84079 - RNA, 19 nt, Artificial Sequence
  Description of Artificial Sequence: Synthetic oligonucleotide
  Antisense strand to SEQ ID NO: 83998
auaugucaggauggcuaac

SEQ ID NO: 84080 - RNA, 19 nt, Artificial Sequence
  Description of Artificial Sequence: Synthetic oligonucleotide
  Sense strand starting at position 3192 of SEQ ID NO: 1054
aaggucagacgucauuauu

SEQ ID NO: 84081 - RNA, 19 nt, Artificial Sequence
  Description of Artificial Sequence: Synthetic oligonucleotide
  Antisense strand to SEQ ID NO: 84000
aauaaugacgucugaccuu

SEQ ID NO: 84082 - RNA, 19 nt, Artificial Sequence
  Description of Artificial Sequence: Synthetic oligonucleotide
  Sense strand starting at position 3195 of SEQ ID NO: 1054
gucagacgucauuauugga

SEQ ID NO: 84083 - RNA, 19 nt, Artificial Sequence
  Description of Artificial Sequence: Synthetic oligonucleotide
  Antisense strand to SEQ ID NO: 84002
uccaauaaugacgucugac

SEQ ID NO: 84084 - RNA, 19 nt, Artificial Sequence
  Description of Artificial Sequence: Synthetic oligonucleotide
  Sense strand starting at position 3203 of SEQ ID NO: 1054
ucauuauuggagugacuaa

SEQ ID NO: 84085 - RNA, 19 nt, Artificial Sequence
  Description of Artificial Sequence: Synthetic oligonucleotide
  Antisense strand to SEQ ID NO: 84004
uuagucacuccaauaauga

SEQ ID NO: 84086 - RNA, 19 nt, Artificial Sequence
  Description of Artificial Sequence: Synthetic oligonucleotide
  Sense strand starting at position 3248 of SEQ ID NO: 1054
ccuuuaucucgucuugugu

SEQ ID NO: 84087 - RNA, 19 nt, Artificial Sequence
  Description of Artificial Sequence: Synthetic oligonucleotide
  Antisense strand to SEQ ID NO: 84006
acacaagacgagauaaagg

SEQ ID NO: 84088 - RNA, 19 nt, Artificial Sequence
  Description of Artificial Sequence: Synthetic oligonucleotide
  Sense strand starting at position 3249 of SEQ ID NO: 1054
cuuuaucucgucuugugua

SEQ ID NO: 84089 - RNA, 19 nt, Artificial Sequence
  Description of Artificial Sequence: Synthetic oligonucleotide
  Antisense strand to SEQ ID NO: 84008
uacacaagacgagauaaag

SEQ ID NO: 84090 - RNA, 19 nt, Artificial Sequence
  Description of Artificial Sequence: Synthetic oligonucleotide
  Sense strand starting at position 3291 of SEQ ID NO: 1054
uuagcagagaguuggauaa

SEQ ID NO: 84091 - RNA, 19 nt, Artificial Sequence
  Description of Artificial Sequence: Synthetic oligonucleotide
  Antisense strand to SEQ ID NO: 84010
uuauccaacucucugcuaa

SEQ ID NO: 84092 - RNA, 19 nt, Artificial Sequence
  Description of Artificial Sequence: Synthetic oligonucleotide
  Sense strand starting at position 3301 of SEQ ID NO: 1054
guuggauaagacugucaua

SEQ ID NO: 84093 - RNA, 19 nt, Artificial Sequence
  Description of Artificial Sequence: Synthetic oligonucleotide
  Antisense strand to SEQ ID NO: 84012
uaugacagucuuauccaac

SEQ ID NO: 84094 - RNA, 19 nt, Artificial Sequence
  Description of Artificial Sequence: Synthetic oligonucleotide
  Sense strand starting at position 3379 of SEQ ID NO: 1054
uguuaccuagucuagaaca

SEQ ID NO: 84095 - RNA, 19 nt, Artificial Sequence
  Description of Artificial Sequence: Synthetic oligonucleotide
  Antisense strand to SEQ ID NO: 84014
uguucuagacuagguaaca

SEQ ID NO: 84096 - RNA, 19 nt, Artificial Sequence
  Description of Artificial Sequence: Synthetic oligonucleotide
  Sense strand starting at position 3381 of SEQ ID NO: 1054
uuaccuagucuagaacagu

SEQ ID NO: 84097 - RNA, 19 nt, Artificial Sequence
  Description of Artificial Sequence: Synthetic oligonucleotide
  Antisense strand to SEQ ID NO: 84016
acuguucuagacuagguaa

SEQ ID NO: 84098 - RNA, 19 nt, Artificial Sequence
  Description of Artificial Sequence: Synthetic oligonucleotide
  Sense strand starting at position 3420 of SEQ ID NO: 1054
cgucuagugguucuuuguu

SEQ ID NO: 84099 - RNA, 19 nt, Artificial Sequence
  Description of Artificial Sequence: Synthetic oligonucleotide
  Antisense strand to SEQ ID NO: 84018
aacaaagaaccacuagacg

SEQ ID NO: 84100 - RNA, 19 nt, Artificial Sequence
  Description of Artificial Sequence: Synthetic oligonucleotide
  Sense strand starting at position 3641 of SEQ ID NO: 1054
cugcuugugaaaggaagau

SEQ ID NO: 84101 - RNA, 19 nt, Artificial Sequence
  Description of Artificial Sequence: Synthetic oligonucleotide
  Antisense strand to SEQ ID NO: 84020
aucuuccuuucacaagcag

SEQ ID NO: 84102 - RNA, 19 nt, Artificial Sequence
  Description of Artificial Sequence: Synthetic oligonucleotide
  Sense strand starting at position 3763 of SEQ ID NO: 1054
augauauuaguuugagauc

SEQ ID NO: 84103 - RNA, 19 nt, Artificial Sequence
  Description of Artificial Sequence: Synthetic oligonucleotide
  Antisense strand to SEQ ID NO: 84022
gaucucaaacuaauaucau

SEQ ID NO: 84104 - RNA, 19 nt, Artificial Sequence
  Description of Artificial Sequence: Synthetic oligonucleotide
  Sense strand starting at position 52 of SEQ ID NO: 1055
gccauuugauauccgcuga

SEQ ID NO: 84105 - RNA, 19 nt, Artificial Sequence
  Description of Artificial Sequence: Synthetic oligonucleotide
  Antisense strand to SEQ ID NO: 84024
ucagcggauaucaaauggc

SEQ ID NO: 84106 - RNA, 19 nt, Artificial Sequence
  Description of Artificial Sequence: Synthetic oligonucleotide
  Sense strand starting at position 56 of SEQ ID NO: 1055
uuugauauccgcugagaca

SEQ ID NO: 84107 - RNA, 19 nt, Artificial Sequence
  Description of Artificial Sequence: Synthetic oligonucleotide
  Antisense strand to SEQ ID NO: 84026
ugucucagcggauaucaaa

SEQ ID NO: 84108 - RNA, 19 nt, Artificial Sequence
  Description of Artificial Sequence: Synthetic oligonucleotide
  Sense strand starting at position 57 of SEQ ID NO: 1055
uugauauccgcugagacaa

SEQ ID NO: 84109 - RNA, 19 nt, Artificial Sequence
  Description of Artificial Sequence: Synthetic oligonucleotide
  Antisense strand to SEQ ID NO: 84028
uugucucagcggauaucaa

SEQ ID NO: 84110 - RNA, 19 nt, Artificial Sequence
  Description of Artificial Sequence: Synthetic oligonucleotide
  Sense strand starting at position 352 of SEQ ID NO: 1055
guuucuuccucccugaaga

SEQ ID NO: 84111 - RNA, 19 nt, Artificial Sequence
  Description of Artificial Sequence: Synthetic oligonucleotide
  Antisense strand to SEQ ID NO: 84030
ucuucagggaggaagaaac

SEQ ID NO: 84112 - RNA, 19 nt, Artificial Sequence
  Description of Artificial Sequence: Synthetic oligonucleotide
  Sense strand starting at position 478 of SEQ ID NO: 1055
accaucaugccaggaauau

SEQ ID NO: 84113 - RNA, 19 nt, Artificial Sequence
  Description of Artificial Sequence: Synthetic oligonucleotide
  Antisense strand to SEQ ID NO: 84032
auauuccuggcaugauggu

SEQ ID NO: 84114 - RNA, 19 nt, Artificial Sequence
  Description of Artificial Sequence: Synthetic oligonucleotide
  Sense strand starting at position 747 of SEQ ID NO: 1055
gccagacaucuuuagucag

SEQ ID NO: 84115 - RNA, 19 nt, Artificial Sequence
  Description of Artificial Sequence: Synthetic oligonucleotide
  Antisense strand to SEQ ID NO: 84034
cugacuaaagaugucuggc

SEQ ID NO: 84116 - RNA, 19 nt, Artificial Sequence
  Description of Artificial Sequence: Synthetic oligonucleotide
  Sense strand starting at position 750 of SEQ ID NO: 1055
agacaucuuuagucagaau

SEQ ID NO: 84117 - RNA, 19 nt, Artificial Sequence
  Description of Artificial Sequence: Synthetic oligonucleotide
  Antisense strand to SEQ ID NO: 84036
auucugacuaaagaugucu

SEQ ID NO: 84118 - RNA, 19 nt, Artificial Sequence
  Description of Artificial Sequence: Synthetic oligonucleotide
  Sense strand starting at position 770 of SEQ ID NO: 1055
uguauugguaagcaacaga

SEQ ID NO: 84119 - RNA, 19 nt, Artificial Sequence
  Description of Artificial Sequence: Synthetic oligonucleotide
  Antisense strand to SEQ ID NO: 84038
ucuguugcuuaccaauaca

SEQ ID NO: 84120 - RNA, 19 nt, Artificial Sequence
  Description of Artificial Sequence: Synthetic oligonucleotide
  Sense strand starting at position 1058 of SEQ ID NO: 1055
ucuggagggugaguuuaua

SEQ ID NO: 84121 - RNA, 19 nt, Artificial Sequence
  Description of Artificial Sequence: Synthetic oligonucleotide
  Antisense strand to SEQ ID NO: 84040
uauaaacucacccuccaga

SEQ ID NO: 84122 - RNA, 19 nt, Artificial Sequence
  Description of Artificial Sequence: Synthetic oligonucleotide
  Sense strand starting at position 1130 of SEQ ID NO: 1055
uggaaaucccagugcgaaa

SEQ ID NO: 84123 - RNA, 19 nt, Artificial Sequence
  Description of Artificial Sequence: Synthetic oligonucleotide
  Antisense strand to SEQ ID NO: 84042
uuucgcacugggauuucca

SEQ ID NO: 84124 - RNA, 19 nt, Artificial Sequence
  Description of Artificial Sequence: Synthetic oligonucleotide
  Sense strand starting at position 1268 of SEQ ID NO: 1055
cgguuuaagcugccaguau

SEQ ID NO: 84125 - RNA, 19 nt, Artificial Sequence
  Description of Artificial Sequence: Synthetic oligonucleotide
  Antisense strand to SEQ ID NO: 84044
auacuggcagcuuaaaccg

SEQ ID NO: 84126 - RNA, 19 nt, Artificial Sequence
  Description of Artificial Sequence: Synthetic oligonucleotide
  Sense strand starting at position 1372 of SEQ ID NO: 1055
augggaguaaccuguccau

SEQ ID NO: 84127 - RNA, 19 nt, Artificial Sequence
  Description of Artificial Sequence: Synthetic oligonucleotide
  Antisense strand to SEQ ID NO: 84046
auggacagguuacucccau

SEQ ID NO: 84128 - RNA, 19 nt, Artificial Sequence
  Description of Artificial Sequence: Synthetic oligonucleotide
  Sense strand starting at position 1375 of SEQ ID NO: 1055
ggaguaaccuguccauaug

SEQ ID NO: 84129 - RNA, 19 nt, Artificial Sequence
  Description of Artificial Sequence: Synthetic oligonucleotide
  Antisense strand to SEQ ID NO: 84048
cauauggacagguuacucc

SEQ ID NO: 84130 - RNA, 19 nt, Artificial Sequence
  Description of Artificial Sequence: Synthetic oligonucleotide
  Sense strand starting at position 1988 of SEQ ID NO: 1055
ggagccaaacuuuguguga

SEQ ID NO: 84131 - RNA, 19 nt, Artificial Sequence
  Description of Artificial Sequence: Synthetic oligonucleotide
  Antisense strand to SEQ ID NO: 84050
ucacacaaaguuuggcucc

SEQ ID NO: 84132 - RNA, 19 nt, Artificial Sequence
  Description of Artificial Sequence: Synthetic oligonucleotide
  Sense strand starting at position 1989 of SEQ ID NO: 1055
gagccaaacuuugugugaa

SEQ ID NO: 84133 - RNA, 19 nt, Artificial Sequence
  Description of Artificial Sequence: Synthetic oligonucleotide
  Antisense strand to SEQ ID NO: 84052
uucacacaaaguuuggcuc

SEQ ID NO: 84134 - RNA, 19 nt, Artificial Sequence
  Description of Artificial Sequence: Synthetic oligonucleotide
  Sense strand starting at position 2353 of SEQ ID NO: 1055
gaguuaacgaaguggaaau

SEQ ID NO: 84135 - RNA, 19 nt, Artificial Sequence
  Description of Artificial Sequence: Synthetic oligonucleotide
  Antisense strand to SEQ ID NO: 84054
auuuccacuucguuaacuc

SEQ ID NO: 84136 - RNA, 19 nt, Artificial Sequence
  Description of Artificial Sequence: Synthetic oligonucleotide
  Sense strand starting at position 2471 of SEQ ID NO: 1055
cuguaucuuugggcacaau

SEQ ID NO: 84137 - RNA, 19 nt, Artificial Sequence
  Description of Artificial Sequence: Synthetic oligonucleotide
  Antisense strand to SEQ ID NO: 84056
auugugcccaaagauacag

SEQ ID NO: 84138 - RNA, 19 nt, Artificial Sequence
  Description of Artificial Sequence: Synthetic oligonucleotide
  Sense strand starting at position 2472 of SEQ ID NO: 1055
uguaucuuugggcacaauu

SEQ ID NO: 84139 - RNA, 19 nt, Artificial Sequence
  Description of Artificial Sequence: Synthetic oligonucleotide
  Antisense strand to SEQ ID NO: 84058
aauugugcccaaagauaca

SEQ ID NO: 84140 - RNA, 19 nt, Artificial Sequence
  Description of Artificial Sequence: Synthetic oligonucleotide
  Sense strand starting at position 2482 of SEQ ID NO: 1055
ggcacaauucccguguugu

SEQ ID NO: 84141 - RNA, 19 nt, Artificial Sequence
  Description of Artificial Sequence: Synthetic oligonucleotide
  Antisense strand to SEQ ID NO: 84060
acaacacgggaauugugcc

SEQ ID NO: 84142 - RNA, 19 nt, Artificial Sequence
  Description of Artificial Sequence: Synthetic oligonucleotide
  Sense strand starting at position 2569 of SEQ ID NO: 1055
cggcuuucucuguaaggaa

SEQ ID NO: 84143 - RNA, 19 nt, Artificial Sequence
  Description of Artificial Sequence: Synthetic oligonucleotide
  Antisense strand to SEQ ID NO: 84062
uuccuuacagagaaagccg

SEQ ID NO: 84144 - RNA, 19 nt, Artificial Sequence
  Description of Artificial Sequence: Synthetic oligonucleotide
  Sense strand starting at position 2690 of SEQ ID NO: 1055
gguaacaucugauuagggu

SEQ ID NO: 84145 - RNA, 19 nt, Artificial Sequence
  Description of Artificial Sequence: Synthetic oligonucleotide
  Antisense strand to SEQ ID NO: 84064
acccuaaucagauguuacc

SEQ ID NO: 84146 - RNA, 19 nt, Artificial Sequence
  Description of Artificial Sequence: Synthetic oligonucleotide
  Sense strand starting at position 2914 of SEQ ID NO: 1055
uucugaaucuauguguuga

SEQ ID NO: 84147 - RNA, 19 nt, Artificial Sequence
  Description of Artificial Sequence: Synthetic oligonucleotide
  Antisense strand to SEQ ID NO: 84066
ucaacacauagauucagaa

SEQ ID NO: 84148 - RNA, 19 nt, Artificial Sequence
  Description of Artificial Sequence: Synthetic oligonucleotide
  Sense strand starting at position 2915 of SEQ ID NO: 1055
ucugaaucuauguguugag

SEQ ID NO: 84149 - RNA, 19 nt, Artificial Sequence
  Description of Artificial Sequence: Synthetic oligonucleotide
  Antisense strand to SEQ ID NO: 84068
cucaacacauagauucaga

SEQ ID NO: 84150 - RNA, 19 nt, Artificial Sequence
  Description of Artificial Sequence: Synthetic oligonucleotide
  Sense strand starting at position 2916 of SEQ ID NO: 1055
cugaaucuauguguugaga

SEQ ID NO: 84151 - RNA, 19 nt, Artificial Sequence
  Description of Artificial Sequence: Synthetic oligonucleotide
  Antisense strand to SEQ ID NO: 84070
ucucaacacauagauucag

SEQ ID NO: 84152 - RNA, 19 nt, Artificial Sequence
  Description of Artificial Sequence: Synthetic oligonucleotide
  Sense strand starting at position 2919 of SEQ ID NO: 1055
aaucuauguguugagaggu

SEQ ID NO: 84153 - RNA, 19 nt, Artificial Sequence
  Description of Artificial Sequence: Synthetic oligonucleotide
  Antisense strand to SEQ ID NO: 84072
accucucaacacauagauu

SEQ ID NO: 84154 - RNA, 19 nt, Artificial Sequence
  Description of Artificial Sequence: Synthetic oligonucleotide
  Sense strand starting at position 3075 of SEQ ID NO: 1055
gaaagaaacuaggaaugua

SEQ ID NO: 84155 - RNA, 19 nt, Artificial Sequence
  Description of Artificial Sequence: Synthetic oligonucleotide
  Antisense strand to SEQ ID NO: 84074
uacauuccuaguuucuuuc

SEQ ID NO: 84156 - RNA, 19 nt, Artificial Sequence
  Description of Artificial Sequence: Synthetic oligonucleotide
  Sense strand starting at position 3085 of SEQ ID NO: 1055
aggaauguagcuuaguuua

SEQ ID NO: 84157 - RNA, 19 nt, Artificial Sequence
  Description of Artificial Sequence: Synthetic oligonucleotide
  Antisense strand to SEQ ID NO: 84076
uaaacuaagcuacauuccu

SEQ ID NO: 84158 - RNA, 19 nt, Artificial Sequence
  Description of Artificial Sequence: Synthetic oligonucleotide
  Sense strand starting at position 3087 of SEQ ID NO: 1055
gaauguagcuuaguuuaac

SEQ ID NO: 84159 - RNA, 19 nt, Artificial Sequence
  Description of Artificial Sequence: Synthetic oligonucleotide
  Antisense strand to SEQ ID NO: 84078
guuaaacuaagcuacauuc

SEQ ID NO: 84160 - RNA, 19 nt, Artificial Sequence
  Description of Artificial Sequence: Synthetic oligonucleotide
  Sense strand starting at position 3114 of SEQ ID NO: 1055
gccauaagauaaguaaaug

SEQ ID NO: 84161 - RNA, 19 nt, Artificial Sequence
  Description of Artificial Sequence: Synthetic oligonucleotide
  Antisense strand to SEQ ID NO: 84080
cauuuacuuaucuuauggc

SEQ ID NO: 84162 - RNA, 19 nt, Artificial Sequence
  Description of Artificial Sequence: Synthetic oligonucleotide
  Sense strand starting at position 3231 of SEQ ID NO: 1055
cagaguugugcugauuugu

SEQ ID NO: 84163 - RNA, 19 nt, Artificial Sequence
  Description of Artificial Sequence: Synthetic oligonucleotide
  Antisense strand to SEQ ID NO: 84082
acaaaucagcacaacucug

SEQ ID NO: 84164 - RNA, 19 nt, Artificial Sequence
  Description of Artificial Sequence: Synthetic oligonucleotide
  Sense strand starting at position 3312 of SEQ ID NO: 1055
aggagaaagcuauggcauu

SEQ ID NO: 84165 - RNA, 19 nt, Artificial Sequence
  Description of Artificial Sequence: Synthetic oligonucleotide
  Antisense strand to SEQ ID NO: 84084
aaugccauagcuuucuccu

SEQ ID NO: 84166 - RNA, 19 nt, Artificial Sequence
  Description of Artificial Sequence: Synthetic oligonucleotide
  Sense strand starting at position 3338 of SEQ ID NO: 1055
aauuaaucgggaggugaca

SEQ ID NO: 84167 - RNA, 19 nt, Artificial Sequence
  Description of Artificial Sequence: Synthetic oligonucleotide
  Antisense strand to SEQ ID NO: 84086
ugucaccucccgauuaauu

SEQ ID NO: 84168 - RNA, 19 nt, Artificial Sequence
  Description of Artificial Sequence: Synthetic oligonucleotide
  Sense strand starting at position 3362 of SEQ ID NO: 1055
guuugaaccaaguggauau

SEQ ID NO: 84169 - RNA, 19 nt, Artificial Sequence
  Description of Artificial Sequence: Synthetic oligonucleotide
  Antisense strand to SEQ ID NO: 84088
auauccacuugguucaaac

SEQ ID NO: 84170 - RNA, 19 nt, Artificial Sequence
  Description of Artificial Sequence: Synthetic oligonucleotide
  Sense strand starting at position 3374 of SEQ ID NO: 1055
uggauauaguaggcaagua

SEQ ID NO: 84171 - RNA, 19 nt, Artificial Sequence
  Description of Artificial Sequence: Synthetic oligonucleotide
  Antisense strand to SEQ ID NO: 84090
uacuugccuacuauaucca

SEQ ID NO: 84172 - RNA, 19 nt, Artificial Sequence
  Description of Artificial Sequence: Synthetic oligonucleotide
  Sense strand starting at position 3410 of SEQ ID NO: 1055
gcaauaauauaagcaugaa

SEQ ID NO: 84173 - RNA, 19 nt, Artificial Sequence
  Description of Artificial Sequence: Synthetic oligonucleotide
  Antisense strand to SEQ ID NO: 84092
uucaugcuuauauuauugc

SEQ ID NO: 84174 - RNA, 19 nt, Artificial Sequence
  Description of Artificial Sequence: Synthetic oligonucleotide
  Sense strand starting at position 3531 of SEQ ID NO: 1055
acuugacauguugagcaaa

SEQ ID NO: 84175 - RNA, 19 nt, Artificial Sequence
  Description of Artificial Sequence: Synthetic oligonucleotide
  Antisense strand to SEQ ID NO: 84094
uuugcucaacaugucaagu

SEQ ID NO: 84176 - RNA, 19 nt, Artificial Sequence
  Description of Artificial Sequence: Synthetic oligonucleotide
  Sense strand starting at position 3756 of SEQ ID NO: 1055
gugaguugaagcuaugaga

SEQ ID NO: 84177 - RNA, 19 nt, Artificial Sequence
  Description of Artificial Sequence: Synthetic oligonucleotide
  Antisense strand to SEQ ID NO: 84096
ucucauagcuucaacucac

SEQ ID NO: 84178 - RNA, 19 nt, Artificial Sequence
  Description of Artificial Sequence: Synthetic oligonucleotide
  Sense strand starting at position 3831 of SEQ ID NO: 1055
gaggaacaccuauguuuag

SEQ ID NO: 84179 - RNA, 19 nt, Artificial Sequence
  Description of Artificial Sequence: Synthetic oligonucleotide
  Antisense strand to SEQ ID NO: 84098
cuaaacauagguguuccuc

SEQ ID NO: 84180 - RNA, 19 nt, Artificial Sequence
  Description of Artificial Sequence: Synthetic oligonucleotide
  Sense strand starting at position 3922 of SEQ ID NO: 1055
gugagaugucauggagcua

SEQ ID NO: 84181 - RNA, 19 nt, Artificial Sequence
  Description of Artificial Sequence: Synthetic oligonucleotide
  Antisense strand to SEQ ID NO: 84100
uagcuccaugacaucucac

SEQ ID NO: 84182 - RNA, 19 nt, Artificial Sequence
  Description of Artificial Sequence: Synthetic oligonucleotide
  Sense strand starting at position 3960 of SEQ ID NO: 1055
ggaggagguucuaacagug

SEQ ID NO: 84183 - RNA, 19 nt, Artificial Sequence
  Description of Artificial Sequence: Synthetic oligonucleotide
  Antisense strand to SEQ ID NO: 84102
cacuguuagaaccuccucc

SEQ ID NO: 84184 - RNA, 19 nt, Artificial Sequence
  Description of Artificial Sequence: Synthetic oligonucleotide
  Sense strand starting at position 3981 of SEQ ID NO: 1056
guaauaucuguggaauauu

SEQ ID NO: 84185 - RNA, 19 nt, Artificial Sequence
  Description of Artificial Sequence: Synthetic oligonucleotide
  Antisense strand to SEQ ID NO: 84104
aauauuccacagauauuac

SEQ ID NO: 84186 - RNA, 19 nt, Artificial Sequence
  Description of Artificial Sequence: Synthetic oligonucleotide
  Sense strand starting at position 3979 of SEQ ID NO: 1056
auguaauaucuguggaaua

SEQ ID NO: 84187 - RNA, 19 nt, Artificial Sequence
  Description of Artificial Sequence: Synthetic oligonucleotide
  Antisense strand to SEQ ID NO: 84106
uauuccacagauauuacau

SEQ ID NO: 84188 - RNA, 19 nt, Artificial Sequence
  Description of Artificial Sequence: Synthetic oligonucleotide
  Sense strand starting at position 3978 of SEQ ID NO: 1056
aauguaauaucuguggaau

SEQ ID NO: 84189 - RNA, 19 nt, Artificial Sequence
  Description of Artificial Sequence: Synthetic oligonucleotide
  Antisense strand to SEQ ID NO: 84108
auuccacagauauuacauu

SEQ ID NO: 84190 - RNA, 19 nt, Artificial Sequence
  Description of Artificial Sequence: Synthetic oligonucleotide
  Sense strand starting at position 3803 of SEQ ID NO: 1056
gcaugauuccuggaucgua

SEQ ID NO: 84191 - RNA, 19 nt, Artificial Sequence
  Description of Artificial Sequence: Synthetic oligonucleotide
  Antisense strand to SEQ ID NO: 84110
uacgauccaggaaucaugc

SEQ ID NO: 84192 - RNA, 19 nt, Artificial Sequence
  Description of Artificial Sequence: Synthetic oligonucleotide
  Sense strand starting at position 3800 of SEQ ID NO: 1056
ggagcaugauuccuggauc

SEQ ID NO: 84193 - RNA, 19 nt, Artificial Sequence
  Description of Artificial Sequence: Synthetic oligonucleotide
  Antisense strand to SEQ ID NO: 84112
gauccaggaaucaugcucc

SEQ ID NO: 84194 - RNA, 19 nt, Artificial Sequence
  Description of Artificial Sequence: Synthetic oligonucleotide
  Sense strand starting at position 3424 of SEQ ID NO: 1056
cuaugcucugccuagucaa

SEQ ID NO: 84195 - RNA, 19 nt, Artificial Sequence
  Description of Artificial Sequence: Synthetic oligonucleotide
  Antisense strand to SEQ ID NO: 84114
uugacuaggcagagcauag

SEQ ID NO: 84196 - RNA, 19 nt, Artificial Sequence
  Description of Artificial Sequence: Synthetic oligonucleotide
  Sense strand starting at position 3399 of SEQ ID NO: 1056
auagucucauugcuguaaa

SEQ ID NO: 84197 - RNA, 19 nt, Artificial Sequence
  Description of Artificial Sequence: Synthetic oligonucleotide
  Antisense strand to SEQ ID NO: 84116
uuuacagcaaugagacuau

SEQ ID NO: 84198 - RNA, 19 nt, Artificial Sequence
  Description of Artificial Sequence: Synthetic oligonucleotide
  Sense strand starting at position 3273 of SEQ ID NO: 1056
guuacaagugaugaagcua

SEQ ID NO: 84199 - RNA, 19 nt, Artificial Sequence
  Description of Artificial Sequence: Synthetic oligonucleotide
  Antisense strand to SEQ ID NO: 84118
uagcuucaucacuuguaac

SEQ ID NO: 84200 - RNA, 19 nt, Artificial Sequence
  Description of Artificial Sequence: Synthetic oligonucleotide
  Sense strand starting at position 3207 of SEQ ID NO: 1056
agaggaaaguuauagagau

SEQ ID NO: 84201 - RNA, 19 nt, Artificial Sequence
  Description of Artificial Sequence: Synthetic oligonucleotide
  Antisense strand to SEQ ID NO: 84120
aucucuauaacuuuccucu

SEQ ID NO: 84202 - RNA, 19 nt, Artificial Sequence
  Description of Artificial Sequence: Synthetic oligonucleotide
  Sense strand starting at position 3129 of SEQ ID NO: 1056
ucuguaucaccucaugcuu

SEQ ID NO: 84203 - RNA, 19 nt, Artificial Sequence
  Description of Artificial Sequence: Synthetic oligonucleotide
  Antisense strand to SEQ ID NO: 84122
aagcaugaggugauacaga

SEQ ID NO: 84204 - RNA, 19 nt, Artificial Sequence
  Description of Artificial Sequence: Synthetic oligonucleotide
  Sense strand starting at position 2981 of SEQ ID NO: 1056
agacacaugccucauguca

SEQ ID NO: 84205 - RNA, 19 nt, Artificial Sequence
  Description of Artificial Sequence: Synthetic oligonucleotide
  Antisense strand to SEQ ID NO: 84124
ugacaugaggcaugugucu

SEQ ID NO: 84206 - RNA, 19 nt, Artificial Sequence
  Description of Artificial Sequence: Synthetic oligonucleotide
  Sense strand starting at position 2712 of SEQ ID NO: 1056
cacaaagggcuuugaaaug

SEQ ID NO: 84207 - RNA, 19 nt, Artificial Sequence
  Description of Artificial Sequence: Synthetic oligonucleotide
  Antisense strand to SEQ ID NO: 84126
cauuucaaagcccuuugug

SEQ ID NO: 84208 - RNA, 19 nt, Artificial Sequence
  Description of Artificial Sequence: Synthetic oligonucleotide
  Sense strand starting at position 2559 of SEQ ID NO: 1056
cacugugucccauaggagu

SEQ ID NO: 84209 - RNA, 19 nt, Artificial Sequence
  Description of Artificial Sequence: Synthetic oligonucleotide
  Antisense strand to SEQ ID NO: 84128
acuccuaugggacacagug

SEQ ID NO: 84210 - RNA, 19 nt, Artificial Sequence
  Description of Artificial Sequence: Synthetic oligonucleotide
  Sense strand starting at position 2481 of SEQ ID NO: 1056
ggcgguagcuagaaggaaa

SEQ ID NO: 84211 - RNA, 19 nt, Artificial Sequence
  Description of Artificial Sequence: Synthetic oligonucleotide
  Antisense strand to SEQ ID NO: 84130
uuuccuucuagcuaccgcc

SEQ ID NO: 84212 - RNA, 19 nt, Artificial Sequence
  Description of Artificial Sequence: Synthetic oligonucleotide
  Sense strand starting at position 2439 of SEQ ID NO: 1056
ugaccaucauggucuaguu

SEQ ID NO: 84213 - RNA, 19 nt, Artificial Sequence
  Description of Artificial Sequence: Synthetic oligonucleotide
  Antisense strand to SEQ ID NO: 84132
aacuagaccaugaugguca

SEQ ID NO: 84214 - RNA, 19 nt, Artificial Sequence
  Description of Artificial Sequence: Synthetic oligonucleotide
  Sense strand starting at position 2321 of SEQ ID NO: 1056
ucauguauuugagaauaag

SEQ ID NO: 84215 - RNA, 19 nt, Artificial Sequence
  Description of Artificial Sequence: Synthetic oligonucleotide
  Antisense strand to SEQ ID NO: 84134
cuuauucucaaauacauga

SEQ ID NO: 84216 - RNA, 19 nt, Artificial Sequence
  Description of Artificial Sequence: Synthetic oligonucleotide
  Sense strand starting at position 2319 of SEQ ID NO: 1056
ccucauguauuugagaaua

SEQ ID NO: 84217 - RNA, 19 nt, Artificial Sequence
  Description of Artificial Sequence: Synthetic oligonucleotide
  Antisense strand to SEQ ID NO: 84136
uauucucaaauacaugagg

SEQ ID NO: 84218 - RNA, 19 nt, Artificial Sequence
  Description of Artificial Sequence: Synthetic oligonucleotide
  Sense strand starting at position 2274 of SEQ ID NO: 1056
gcuggcucuuuccuaagaa

SEQ ID NO: 84219 - RNA, 19 nt, Artificial Sequence
  Description of Artificial Sequence: Synthetic oligonucleotide
  Antisense strand to SEQ ID NO: 84138
uucuuaggaaagagccagc

SEQ ID NO: 84220 - RNA, 19 nt, Artificial Sequence
  Description of Artificial Sequence: Synthetic oligonucleotide
  Sense strand starting at position 1818 of SEQ ID NO: 1056
cccacuugccuuggaaaua

SEQ ID NO: 84221 - RNA, 19 nt, Artificial Sequence
  Description of Artificial Sequence: Synthetic oligonucleotide
  Antisense strand to SEQ ID NO: 84140
uauuuccaaggcaaguggg

SEQ ID NO: 84222 - RNA, 19 nt, Artificial Sequence
  Description of Artificial Sequence: Synthetic oligonucleotide
  Sense strand starting at position 1685 of SEQ ID NO: 1056
uuugcagaagauugcaaua

SEQ ID NO: 84223 - RNA, 19 nt, Artificial Sequence
  Description of Artificial Sequence: Synthetic oligonucleotide
  Antisense strand to SEQ ID NO: 84142
uauugcaaucuucugcaaa

SEQ ID NO: 84224 - RNA, 19 nt, Artificial Sequence
  Description of Artificial Sequence: Synthetic oligonucleotide
  Sense strand starting at position 1659 of SEQ ID NO: 1056
ucauuucuugugcaugcua

SEQ ID NO: 84225 - RNA, 19 nt, Artificial Sequence
  Description of Artificial Sequence: Synthetic oligonucleotide
  Antisense strand to SEQ ID NO: 84144
uagcaugcacaagaaauga

SEQ ID NO: 84226 - RNA, 19 nt, Artificial Sequence
  Description of Artificial Sequence: Synthetic oligonucleotide
  Sense strand starting at position 1575 of SEQ ID NO: 1056
gugaaauuguuaccucuau

SEQ ID NO: 84227 - RNA, 19 nt, Artificial Sequence
  Description of Artificial Sequence: Synthetic oligonucleotide
  Antisense strand to SEQ ID NO: 84146
auagagguaacaauuucac

SEQ ID NO: 84228 - RNA, 19 nt, Artificial Sequence
  Description of Artificial Sequence: Synthetic oligonucleotide
  Sense strand starting at position 1411 of SEQ ID NO: 1056
gaucucucugcccagggau

SEQ ID NO: 84229 - RNA, 19 nt, Artificial Sequence
  Description of Artificial Sequence: Synthetic oligonucleotide
  Antisense strand to SEQ ID NO: 84148
aucccugggcagagagauc

SEQ ID NO: 84230 - RNA, 19 nt, Artificial Sequence
  Description of Artificial Sequence: Synthetic oligonucleotide
  Sense strand starting at position 1395 of SEQ ID NO: 1056
ucggcuugccuagacagau

SEQ ID NO: 84231 - RNA, 19 nt, Artificial Sequence
  Description of Artificial Sequence: Synthetic oligonucleotide
  Antisense strand to SEQ ID NO: 84150
aucugucuaggcaagccga

SEQ ID NO: 84232 - RNA, 19 nt, Artificial Sequence
  Description of Artificial Sequence: Synthetic oligonucleotide
  Sense strand starting at position 1359 of SEQ ID NO: 1056
auguucucucagggucuua

SEQ ID NO: 84233 - RNA, 19 nt, Artificial Sequence
  Description of Artificial Sequence: Synthetic oligonucleotide
  Antisense strand to SEQ ID NO: 84152
uaagacccugagagaacau

SEQ ID NO: 84234 - RNA, 19 nt, Artificial Sequence
  Description of Artificial Sequence: Synthetic oligonucleotide
  Sense strand starting at position 1323 of SEQ ID NO: 1056
ccauuauccuagcuuuagu

SEQ ID NO: 84235 - RNA, 19 nt, Artificial Sequence
  Description of Artificial Sequence: Synthetic oligonucleotide
  Antisense strand to SEQ ID NO: 84154
acuaaagcuaggauaaugg

SEQ ID NO: 84236 - RNA, 19 nt, Artificial Sequence
  Description of Artificial Sequence: Synthetic oligonucleotide
  Sense strand starting at position 1270 of SEQ ID NO: 1056
guaagcauugacuggcuca

SEQ ID NO: 84237 - RNA, 19 nt, Artificial Sequence
  Description of Artificial Sequence: Synthetic oligonucleotide
  Antisense strand to SEQ ID NO: 84156
ugagccagucaaugcuuac

SEQ ID NO: 84238 - RNA, 19 nt, Artificial Sequence
  Description of Artificial Sequence: Synthetic oligonucleotide
  Sense strand starting at position 1143 of SEQ ID NO: 1056
uuuauuguccauggaguca

SEQ ID NO: 84239 - RNA, 19 nt, Artificial Sequence
  Description of Artificial Sequence: Synthetic oligonucleotide
  Antisense strand to SEQ ID NO: 84158
ugacuccauggacaauaaa

SEQ ID NO: 84240 - RNA, 19 nt, Artificial Sequence
  Description of Artificial Sequence: Synthetic oligonucleotide
  Sense strand starting at position 1108 of SEQ ID NO: 1056
augaaauggcuuugagcuu

SEQ ID NO: 84241 - RNA, 19 nt, Artificial Sequence
  Description of Artificial Sequence: Synthetic oligonucleotide
  Antisense strand to SEQ ID NO: 84160
aagcucaaagccauuucau

SEQ ID NO: 84242 - RNA, 19 nt, Artificial Sequence
  Description of Artificial Sequence: Synthetic oligonucleotide
  Sense strand starting at position 970 of SEQ ID NO: 1056
cuggguaugugacucuaaa

SEQ ID NO: 84243 - RNA, 19 nt, Artificial Sequence
  Description of Artificial Sequence: Synthetic oligonucleotide
  Antisense strand to SEQ ID NO: 84162
uuuagagucacauacccag

SEQ ID NO: 84244 - RNA, 19 nt, Artificial Sequence
  Description of Artificial Sequence: Synthetic oligonucleotide
  Sense strand starting at position 959 of SEQ ID NO: 1056
ggagaaacugccuggguau

SEQ ID NO: 84245 - RNA, 19 nt, Artificial Sequence
  Description of Artificial Sequence: Synthetic oligonucleotide
  Antisense strand to SEQ ID NO: 84164
auacccaggcaguuucucc

SEQ ID NO: 84246 - RNA, 19 nt, Artificial Sequence
  Description of Artificial Sequence: Synthetic oligonucleotide
  Sense strand starting at position 958 of SEQ ID NO: 1056
gggagaaacugccugggua

SEQ ID NO: 84247 - RNA, 19 nt, Artificial Sequence
  Description of Artificial Sequence: Synthetic oligonucleotide
  Antisense strand to SEQ ID NO: 84166
uacccaggcaguuucuccc

SEQ ID NO: 84248 - RNA, 19 nt, Artificial Sequence
  Description of Artificial Sequence: Synthetic oligonucleotide
  Sense strand starting at position 907 of SEQ ID NO: 1056
aggagugugccauaggaac

SEQ ID NO: 84249 - RNA, 19 nt, Artificial Sequence
  Description of Artificial Sequence: Synthetic oligonucleotide
  Antisense strand to SEQ ID NO: 84168
guuccuauggcacacuccu

SEQ ID NO: 84250 - RNA, 19 nt, Artificial Sequence
  Description of Artificial Sequence: Synthetic oligonucleotide
  Sense strand starting at position 902 of SEQ ID NO: 1056
gauggaggagugugccaua

SEQ ID NO: 84251 - RNA, 19 nt, Artificial Sequence
  Description of Artificial Sequence: Synthetic oligonucleotide
  Antisense strand to SEQ ID NO: 84170
uauggcacacuccuccauc

SEQ ID NO: 84252 - RNA, 19 nt, Artificial Sequence
  Description of Artificial Sequence: Synthetic oligonucleotide
  Sense strand starting at position 836 of SEQ ID NO: 1056
uucucuuuccugggaauga

SEQ ID NO: 84253 - RNA, 19 nt, Artificial Sequence
  Description of Artificial Sequence: Synthetic oligonucleotide
  Antisense strand to SEQ ID NO: 84172
ucauucccaggaaagagaa

SEQ ID NO: 84254 - RNA, 19 nt, Artificial Sequence
  Description of Artificial Sequence: Synthetic oligonucleotide
  Sense strand starting at position 764 of SEQ ID NO: 1056
caggguccucuaggagaua

SEQ ID NO: 84255 - RNA, 19 nt, Artificial Sequence
  Description of Artificial Sequence: Synthetic oligonucleotide
  Antisense strand to SEQ ID NO: 84174
uaucuccuagaggacccug

SEQ ID NO: 84256 - RNA, 19 nt, Artificial Sequence
  Description of Artificial Sequence: Synthetic oligonucleotide
  Sense strand starting at position 719 of SEQ ID NO: 1056
ugcaaucugcucugagaga

SEQ ID NO: 84257 - RNA, 19 nt, Artificial Sequence
  Description of Artificial Sequence: Synthetic oligonucleotide
  Antisense strand to SEQ ID NO: 84176
ucucucagagcagauugca

SEQ ID NO: 84258 - RNA, 19 nt, Artificial Sequence
  Description of Artificial Sequence: Synthetic oligonucleotide
  Sense strand starting at position 589 of SEQ ID NO: 1056
gccucuuacuucccaugga

SEQ ID NO: 84259 - RNA, 19 nt, Artificial Sequence
  Description of Artificial Sequence: Synthetic oligonucleotide
  Antisense strand to SEQ ID NO: 84178
uccaugggaaguaagaggc

SEQ ID NO: 84260 - RNA, 19 nt, Artificial Sequence
  Description of Artificial Sequence: Synthetic oligonucleotide
  Sense strand starting at position 255 of SEQ ID NO: 1056
guggaaagucaguggaaac

SEQ ID NO: 84261 - RNA, 19 nt, Artificial Sequence
  Description of Artificial Sequence: Synthetic oligonucleotide
  Antisense strand to SEQ ID NO: 84180
guuuccacugacuuuccac

SEQ ID NO: 84262 - RNA, 19 nt, Artificial Sequence
  Description of Artificial Sequence: Synthetic oligonucleotide
  Sense strand starting at position 254 of SEQ ID NO: 1056
uguggaaagucaguggaaa

SEQ ID NO: 84263 - RNA, 19 nt, Artificial Sequence
  Description of Artificial Sequence: Synthetic oligonucleotide
  Antisense strand to SEQ ID NO: 84182
uuuccacugacuuuccaca

SEQ ID NO: 84264 - RNA, 19 nt, Artificial Sequence
  Description of Artificial Sequence: Synthetic oligonucleotide
  Sense strand starting at position 3942 of SEQ ID NO: 1057
ccugccugucaugaucauu

SEQ ID NO: 84265 - RNA, 19 nt, Artificial Sequence
  Description of Artificial Sequence: Synthetic oligonucleotide
  Antisense strand to SEQ ID NO: 84184
aaugaucaugacaggcagg

SEQ ID NO: 84266 - RNA, 19 nt, Artificial Sequence
  Description of Artificial Sequence: Synthetic oligonucleotide
  Sense strand starting at position 3918 of SEQ ID NO: 1057
guagcagacccucagaauu

SEQ ID NO: 84267 - RNA, 19 nt, Artificial Sequence
  Description of Artificial Sequence: Synthetic oligonucleotide
  Antisense strand to SEQ ID NO: 84186
aauucugagggucugcuac

SEQ ID NO: 84268 - RNA, 19 nt, Artificial Sequence
  Description of Artificial Sequence: Synthetic oligonucleotide
  Sense strand starting at position 3617 of SEQ ID NO: 1057
uuuacucaucgguaaucca

SEQ ID NO: 84269 - RNA, 19 nt, Artificial Sequence
  Description of Artificial Sequence: Synthetic oligonucleotide
  Antisense strand to SEQ ID NO: 84188
uggauuaccgaugaguaaa

SEQ ID NO: 84270 - RNA, 19 nt, Artificial Sequence
  Description of Artificial Sequence: Synthetic oligonucleotide
  Sense strand starting at position 3500 of SEQ ID NO: 1057
ugugcaaaugucuaacaua

SEQ ID NO: 84271 - RNA, 19 nt, Artificial Sequence
  Description of Artificial Sequence: Synthetic oligonucleotide
  Antisense strand to SEQ ID NO: 84190
uauguuagacauuugcaca

SEQ ID NO: 84272 - RNA, 19 nt, Artificial Sequence
  Description of Artificial Sequence: Synthetic oligonucleotide
  Sense strand starting at position 3499 of SEQ ID NO: 1057
uugugcaaaugucuaacau

SEQ ID NO: 84273 - RNA, 19 nt, Artificial Sequence
  Description of Artificial Sequence: Synthetic oligonucleotide
  Antisense strand to SEQ ID NO: 84192
auguuagacauuugcacaa

SEQ ID NO: 84274 - RNA, 19 nt, Artificial Sequence
  Description of Artificial Sequence: Synthetic oligonucleotide
  Sense strand starting at position 3282 of SEQ ID NO: 1057
uggguaauaguagaguaua

SEQ ID NO: 84275 - RNA, 19 nt, Artificial Sequence
  Description of Artificial Sequence: Synthetic oligonucleotide
  Antisense strand to SEQ ID NO: 84194
uauacucuacuauuaccca

SEQ ID NO: 84276 - RNA, 19 nt, Artificial Sequence
  Description of Artificial Sequence: Synthetic oligonucleotide
  Sense strand starting at position 3274 of SEQ ID NO: 1057
guugucuuuggguaauagu

SEQ ID NO: 84277 - RNA, 19 nt, Artificial Sequence
  Description of Artificial Sequence: Synthetic oligonucleotide
  Antisense strand to SEQ ID NO: 84196
acuauuacccaaagacaac

SEQ ID NO: 84278 - RNA, 19 nt, Artificial Sequence
  Description of Artificial Sequence: Synthetic oligonucleotide
  Sense strand starting at position 3273 of SEQ ID NO: 1057
aguugucuuuggguaauag

SEQ ID NO: 84279 - RNA, 19 nt, Artificial Sequence
  Description of Artificial Sequence: Synthetic oligonucleotide
  Antisense strand to SEQ ID NO: 84198
cuauuacccaaagacaacu

SEQ ID NO: 84280 - RNA, 19 nt, Artificial Sequence
  Description of Artificial Sequence: Synthetic oligonucleotide
  Sense strand starting at position 3139 of SEQ ID NO: 1057
uaaaguugugucuaaagac

SEQ ID NO: 84281 - RNA, 19 nt, Artificial Sequence
  Description of Artificial Sequence: Synthetic oligonucleotide
  Antisense strand to SEQ ID NO: 84200
gucuuuagacacaacuuua

SEQ ID NO: 84282 - RNA, 19 nt, Artificial Sequence
  Description of Artificial Sequence: Synthetic oligonucleotide
  Sense strand starting at position 2957 of SEQ ID NO: 1057
acauacauguaguuguaua

SEQ ID NO: 84283 - RNA, 19 nt, Artificial Sequence
  Description of Artificial Sequence: Synthetic oligonucleotide
  Antisense strand to SEQ ID NO: 84202
uauacaacuacauguaugu

SEQ ID NO: 84284 - RNA, 19 nt, Artificial Sequence
  Description of Artificial Sequence: Synthetic oligonucleotide
  Sense strand starting at position 2937 of SEQ ID NO: 1057
cauagacgguaucuauaua

SEQ ID NO: 84285 - RNA, 19 nt, Artificial Sequence
  Description of Artificial Sequence: Synthetic oligonucleotide
  Antisense strand to SEQ ID NO: 84204
uauauagauaccgucuaug

SEQ ID NO: 84286 - RNA, 19 nt, Artificial Sequence
  Description of Artificial Sequence: Synthetic oligonucleotide
  Sense strand starting at position 2934 of SEQ ID NO: 1057
ggucauagacgguaucuau

SEQ ID NO: 84287 - RNA, 19 nt, Artificial Sequence
  Description of Artificial Sequence: Synthetic oligonucleotide
  Antisense strand to SEQ ID NO: 84206
auagauaccgucuaugacc

SEQ ID NO: 84288 - RNA, 19 nt, Artificial Sequence
  Description of Artificial Sequence: Synthetic oligonucleotide
  Sense strand starting at position 2911 of SEQ ID NO: 1057
agaggcacuuacuuacaaa

SEQ ID NO: 84289 - RNA, 19 nt, Artificial Sequence
  Description of Artificial Sequence: Synthetic oligonucleotide
  Antisense strand to SEQ ID NO: 84208
uuuguaaguaagugccucu

SEQ ID NO: 84290 - RNA, 19 nt, Artificial Sequence
  Description of Artificial Sequence: Synthetic oligonucleotide
  Sense strand starting at position 2829 of SEQ ID NO: 1057
gcaauuuagcgacacgucu

SEQ ID NO: 84291 - RNA, 19 nt, Artificial Sequence
  Description of Artificial Sequence: Synthetic oligonucleotide
  Antisense strand to SEQ ID NO: 84210
agacgugucgcuaaauugc

SEQ ID NO: 84292 - RNA, 19 nt, Artificial Sequence
  Description of Artificial Sequence: Synthetic oligonucleotide
  Sense strand starting at position 2809 of SEQ ID NO: 1057
gguacacccuuucuggaaa

SEQ ID NO: 84293 - RNA, 19 nt, Artificial Sequence
  Description of Artificial Sequence: Synthetic oligonucleotide
  Antisense strand to SEQ ID NO: 84212
uuuccagaaaggguguacc

SEQ ID NO: 84294 - RNA, 19 nt, Artificial Sequence
  Description of Artificial Sequence: Synthetic oligonucleotide
  Sense strand starting at position 2611 of SEQ ID NO: 1057
aaaggagagucucagagaa

SEQ ID NO: 84295 - RNA, 19 nt, Artificial Sequence
  Description of Artificial Sequence: Synthetic oligonucleotide
  Antisense strand to SEQ ID NO: 84214
uucucugagacucuccuuu

SEQ ID NO: 84296 - RNA, 19 nt, Artificial Sequence
  Description of Artificial Sequence: Synthetic oligonucleotide
  Sense strand starting at position 2545 of SEQ ID NO: 1057
uuggaaggcuccuugaauc

SEQ ID NO: 84297 - RNA, 19 nt, Artificial Sequence
  Description of Artificial Sequence: Synthetic oligonucleotide
  Antisense strand to SEQ ID NO: 84216
gauucaaggagccuuccaa

SEQ ID NO: 84298 - RNA, 19 nt, Artificial Sequence
  Description of Artificial Sequence: Synthetic oligonucleotide
  Sense strand starting at position 2509 of SEQ ID NO: 1057
gccaguaaugacggugaaa

SEQ ID NO: 84299 - RNA, 19 nt, Artificial Sequence
  Description of Artificial Sequence: Synthetic oligonucleotide
  Antisense strand to SEQ ID NO: 84218
uuucaccgucauuacuggc

SEQ ID NO: 84300 - RNA, 19 nt, Artificial Sequence
  Description of Artificial Sequence: Synthetic oligonucleotide
  Sense strand starting at position 2485 of SEQ ID NO: 1057
ggucgaaggauugagcaau

SEQ ID NO: 84301 - RNA, 19 nt, Artificial Sequence
  Description of Artificial Sequence: Synthetic oligonucleotide
  Antisense strand to SEQ ID NO: 84220
auugcucaauccuucgacc

SEQ ID NO: 84302 - RNA, 19 nt, Artificial Sequence
  Description of Artificial Sequence: Synthetic oligonucleotide
  Sense strand starting at position 2477 of SEQ ID NO: 1057
gucuuauuggucgaaggau

SEQ ID NO: 84303 - RNA, 19 nt, Artificial Sequence
  Description of Artificial Sequence: Synthetic oligonucleotide
  Antisense strand to SEQ ID NO: 84222
auccuucgaccaauaagac

SEQ ID NO: 84304 - RNA, 19 nt, Artificial Sequence
  Description of Artificial Sequence: Synthetic oligonucleotide
  Sense strand starting at position 2476 of SEQ ID NO: 1057
ugucuuauuggucgaagga

SEQ ID NO: 84305 - RNA, 19 nt, Artificial Sequence
  Description of Artificial Sequence: Synthetic oligonucleotide
  Antisense strand to SEQ ID NO: 84224
uccuucgaccaauaagaca

SEQ ID NO: 84306 - RNA, 19 nt, Artificial Sequence
  Description of Artificial Sequence: Synthetic oligonucleotide
  Sense strand starting at position 1037 of SEQ ID NO: 1057
gguggugaguuuccaucau

SEQ ID NO: 84307 - RNA, 19 nt, Artificial Sequence
  Description of Artificial Sequence: Synthetic oligonucleotide
  Antisense strand to SEQ ID NO: 84226
augauggaaacucaccacc

SEQ ID NO: 84308 - RNA, 19 nt, Artificial Sequence
  Description of Artificial Sequence: Synthetic oligonucleotide
  Sense strand starting at position 987 of SEQ ID NO: 1057
guauuauuaccagacugca

SEQ ID NO: 84309 - RNA, 19 nt, Artificial Sequence
  Description of Artificial Sequence: Synthetic oligonucleotide
  Antisense strand to SEQ ID NO: 84228
ugcagucugguaauaauac

SEQ ID NO: 84310 - RNA, 19 nt, Artificial Sequence
  Description of Artificial Sequence: Synthetic oligonucleotide
  Sense strand starting at position 974 of SEQ ID NO: 1057
gacccuuuagaagguauua

SEQ ID NO: 84311 - RNA, 19 nt, Artificial Sequence
  Description of Artificial Sequence: Synthetic oligonucleotide
  Antisense strand to SEQ ID NO: 84230
uaauaccuucuaaaggguc

SEQ ID NO: 84312 - RNA, 19 nt, Artificial Sequence
  Description of Artificial Sequence: Synthetic oligonucleotide
  Sense strand starting at position 929 of SEQ ID NO: 1057
ggaauaucugugcaugguc

SEQ ID NO: 84313 - RNA, 19 nt, Artificial Sequence
  Description of Artificial Sequence: Synthetic oligonucleotide
  Antisense strand to SEQ ID NO: 84232
gaccaugcacagauauucc

SEQ ID NO: 84314 - RNA, 19 nt, Artificial Sequence
  Description of Artificial Sequence: Synthetic oligonucleotide
  Sense strand starting at position 928 of SEQ ID NO: 1057
uggaauaucugugcauggu

SEQ ID NO: 84315 - RNA, 19 nt, Artificial Sequence
  Description of Artificial Sequence: Synthetic oligonucleotide
  Antisense strand to SEQ ID NO: 84234
accaugcacagauauucca

SEQ ID NO: 84316 - RNA, 19 nt, Artificial Sequence
  Description of Artificial Sequence: Synthetic oligonucleotide
  Sense strand starting at position 926 of SEQ ID NO: 1057
gcuggaauaucugugcaug

SEQ ID NO: 84317 - RNA, 19 nt, Artificial Sequence
  Description of Artificial Sequence: Synthetic oligonucleotide
  Antisense strand to SEQ ID NO: 84236
caugcacagauauuccagc

SEQ ID NO: 84318 - RNA, 19 nt, Artificial Sequence
  Description of Artificial Sequence: Synthetic oligonucleotide
  Sense strand starting at position 536 of SEQ ID NO: 1057
cuggguaugugccuuacua

SEQ ID NO: 84319 - RNA, 19 nt, Artificial Sequence
  Description of Artificial Sequence: Synthetic oligonucleotide
  Antisense strand to SEQ ID NO: 84238
uaguaaggcacauacccag

SEQ ID NO: 84320 - RNA, 19 nt, Artificial Sequence
  Description of Artificial Sequence: Synthetic oligonucleotide
  Sense strand starting at position 422 of SEQ ID NO: 1057
gcaugacgagauggauuau

SEQ ID NO: 84321 - RNA, 19 nt, Artificial Sequence
  Description of Artificial Sequence: Synthetic oligonucleotide
  Antisense strand to SEQ ID NO: 84240
auaauccaucucgucaugc

SEQ ID NO: 84322 - RNA, 19 nt, Artificial Sequence
  Description of Artificial Sequence: Synthetic oligonucleotide
  Sense strand starting at position 419 of SEQ ID NO: 1057
ugugcaugacgagauggau

SEQ ID NO: 84323 - RNA, 19 nt, Artificial Sequence
  Description of Artificial Sequence: Synthetic oligonucleotide
  Antisense strand to SEQ ID NO: 84242
auccaucucgucaugcaca

SEQ ID NO: 84324 - RNA, 19 nt, Artificial Sequence
  Description of Artificial Sequence: Synthetic oligonucleotide
  Sense strand starting at position 414 of SEQ ID NO: 1057
gaccuugugcaugacgaga

SEQ ID NO: 84325 - RNA, 19 nt, Artificial Sequence
  Description of Artificial Sequence: Synthetic oligonucleotide
  Antisense strand to SEQ ID NO: 84244
ucucgucaugcacaagguc

SEQ ID NO: 84326 - RNA, 19 nt, Artificial Sequence
  Description of Artificial Sequence: Synthetic oligonucleotide
  Sense strand starting at position 349 of SEQ ID NO: 1057
gugguccuggcagagaaau

SEQ ID NO: 84327 - RNA, 19 nt, Artificial Sequence
  Description of Artificial Sequence: Synthetic oligonucleotide
  Antisense strand to SEQ ID NO: 84246
auuucucugccaggaccac

SEQ ID NO: 84328 - RNA, 19 nt, Artificial Sequence
  Description of Artificial Sequence: Synthetic oligonucleotide
  Sense strand starting at position 177 of SEQ ID NO: 1057
guguauuauuacucauuac

SEQ ID NO: 84329 - RNA, 19 nt, Artificial Sequence
  Description of Artificial Sequence: Synthetic oligonucleotide
  Antisense strand to SEQ ID NO: 84248
guaaugaguaauaauacac

SEQ ID NO: 84330 - RNA, 19 nt, Artificial Sequence
  Description of Artificial Sequence: Synthetic oligonucleotide
  Sense strand starting at position 160 of SEQ ID NO: 1057
ugugaucuacaugaauagu

SEQ ID NO: 84331 - RNA, 19 nt, Artificial Sequence
  Description of Artificial Sequence: Synthetic oligonucleotide
  Antisense strand to SEQ ID NO: 84250
acuauucauguagaucaca

SEQ ID NO: 84332 - RNA, 19 nt, Artificial Sequence
  Description of Artificial Sequence: Synthetic oligonucleotide
  Sense strand starting at position 104 of SEQ ID NO: 1057
aggguagauuuacaucagu

SEQ ID NO: 84333 - RNA, 19 nt, Artificial Sequence
  Description of Artificial Sequence: Synthetic oligonucleotide
  Antisense strand to SEQ ID NO: 84252
acugauguaaaucuacccu

SEQ ID NO: 84334 - RNA, 19 nt, Artificial Sequence
  Description of Artificial Sequence: Synthetic oligonucleotide
  Sense strand starting at position 34 of SEQ ID NO: 1057
ugucuagcgcuacauuuaa

SEQ ID NO: 84335 - RNA, 19 nt, Artificial Sequence
  Description of Artificial Sequence: Synthetic oligonucleotide
  Antisense strand to SEQ ID NO: 84254
uuaaauguagcgcuagaca

SEQ ID NO: 84336 - RNA, 19 nt, Artificial Sequence
  Description of Artificial Sequence: Synthetic oligonucleotide
  Sense strand starting at position 32 of SEQ ID NO: 1057
cuugucuagcgcuacauuu

SEQ ID NO: 84337 - RNA, 19 nt, Artificial Sequence
  Description of Artificial Sequence: Synthetic oligonucleotide
  Antisense strand to SEQ ID NO: 84256
aaauguagcgcuagacaag

SEQ ID NO: 84338 - RNA, 19 nt, Artificial Sequence
  Description of Artificial Sequence: Synthetic oligonucleotide
  Sense strand starting at position 31 of SEQ ID NO: 1057
ucuugucuagcgcuacauu

SEQ ID NO: 84339 - RNA, 19 nt, Artificial Sequence
  Description of Artificial Sequence: Synthetic oligonucleotide
  Antisense strand to SEQ ID NO: 84258
aauguagcgcuagacaaga

SEQ ID NO: 84340 - RNA, 19 nt, Artificial Sequence
  Description of Artificial Sequence: Synthetic oligonucleotide
  Sense strand starting at position 6 of SEQ ID NO: 1057
uuuggaaagugagauaaca

SEQ ID NO: 84341 - RNA, 19 nt, Artificial Sequence
  Description of Artificial Sequence: Synthetic oligonucleotide
  Antisense strand to SEQ ID NO: 84260
uguuaucucacuuuccaaa

SEQ ID NO: 84342 - RNA, 19 nt, Artificial Sequence
  Description of Artificial Sequence: Synthetic oligonucleotide
  Sense strand starting at position 3 of SEQ ID NO: 1057
uucuuuggaaagugagaua

SEQ ID NO: 84343 - RNA, 19 nt, Artificial Sequence
  Description of Artificial Sequence: Synthetic oligonucleotide
  Antisense strand to SEQ ID NO: 84262
uaucucacuuuccaaagaa

SEQ ID NO: 84344 - RNA, 19 nt, Artificial Sequence
  Description of Artificial Sequence: Synthetic oligonucleotide
  Sense strand starting at position 3968 of SEQ ID NO: 1058
uagugagaugagugaaaug

SEQ ID NO: 84345 - RNA, 19 nt, Artificial Sequence
  Description of Artificial Sequence: Synthetic oligonucleotide
  Antisense strand to SEQ ID NO: 84264
cauuucacucaucucacua

SEQ ID NO: 84346 - RNA, 19 nt, Artificial Sequence
  Description of Artificial Sequence: Synthetic oligonucleotide
  Sense strand starting at position 3964 of SEQ ID NO: 1058
gcaauagugagaugaguga

SEQ ID NO: 84347 - RNA, 19 nt, Artificial Sequence
  Description of Artificial Sequence: Synthetic oligonucleotide
  Antisense strand to SEQ ID NO: 84266
ucacucaucucacuauugc

SEQ ID NO: 84348 - RNA, 19 nt, Artificial Sequence
  Description of Artificial Sequence: Synthetic oligonucleotide
  Sense strand starting at position 3960 of SEQ ID NO: 1058
guaugcaauagugagauga

SEQ ID NO: 84349 - RNA, 19 nt, Artificial Sequence
  Description of Artificial Sequence: Synthetic oligonucleotide
  Antisense strand to SEQ ID NO: 84268
ucaucucacuauugcauac

SEQ ID NO: 84350 - RNA, 19 nt, Artificial Sequence
  Description of Artificial Sequence: Synthetic oligonucleotide
  Sense strand starting at position 3864 of SEQ ID NO: 1058
caagauuaagggugaguuu

SEQ ID NO: 84351 - RNA, 19 nt, Artificial Sequence
  Description of Artificial Sequence: Synthetic oligonucleotide
  Antisense strand to SEQ ID NO: 84270
aaacucacccuuaaucuug

SEQ ID NO: 84352 - RNA, 19 nt, Artificial Sequence
  Description of Artificial Sequence: Synthetic oligonucleotide
  Sense strand starting at position 3712 of SEQ ID NO: 1058
ugguguauugcacaaucca

SEQ ID NO: 84353 - RNA, 19 nt, Artificial Sequence
  Description of Artificial Sequence: Synthetic oligonucleotide
  Antisense strand to SEQ ID NO: 84272
uggauugugcaauacacca

SEQ ID NO: 84354 - RNA, 19 nt, Artificial Sequence
  Description of Artificial Sequence: Synthetic oligonucleotide
  Sense strand starting at position 3634 of SEQ ID NO: 1058
guauuugguugagagauaa

SEQ ID NO: 84355 - RNA, 19 nt, Artificial Sequence
  Description of Artificial Sequence: Synthetic oligonucleotide
  Antisense strand to SEQ ID NO: 84274
uuaucucucaaccaaauac

SEQ ID NO: 84356 - RNA, 19 nt, Artificial Sequence
  Description of Artificial Sequence: Synthetic oligonucleotide
  Sense strand starting at position 3602 of SEQ ID NO: 1058
cagucaugucgggaaugac

SEQ ID NO: 84357 - RNA, 19 nt, Artificial Sequence
  Description of Artificial Sequence: Synthetic oligonucleotide
  Antisense strand to SEQ ID NO: 84276
gucauucccgacaugacug

SEQ ID NO: 84358 - RNA, 19 nt, Artificial Sequence
  Description of Artificial Sequence: Synthetic oligonucleotide
  Sense strand starting at position 3500 of SEQ ID NO: 1058
guacuauuccaugagcauu

SEQ ID NO: 84359 - RNA, 19 nt, Artificial Sequence
  Description of Artificial Sequence: Synthetic oligonucleotide
  Antisense strand to SEQ ID NO: 84278
aaugcucauggaauaguac

SEQ ID NO: 84360 - RNA, 19 nt, Artificial Sequence
  Description of Artificial Sequence: Synthetic oligonucleotide
  Sense strand starting at position 3499 of SEQ ID NO: 1058
aguacuauuccaugagcau

SEQ ID NO: 84361 - RNA, 19 nt, Artificial Sequence
  Description of Artificial Sequence: Synthetic oligonucleotide
  Antisense strand to SEQ ID NO: 84280
augcucauggaauaguacu

SEQ ID NO: 84362 - RNA, 19 nt, Artificial Sequence
  Description of Artificial Sequence: Synthetic oligonucleotide
  Sense strand starting at position 3254 of SEQ ID NO: 1058
ugaccuuugccucaucagu

SEQ ID NO: 84363 - RNA, 19 nt, Artificial Sequence
  Description of Artificial Sequence: Synthetic oligonucleotide
  Antisense strand to SEQ ID NO: 84282
acugaugaggcaaagguca

SEQ ID NO: 84364 - RNA, 19 nt, Artificial Sequence
  Description of Artificial Sequence: Synthetic oligonucleotide
  Sense strand starting at position 3173 of SEQ ID NO: 1058
aaauuuggcugagauugag

SEQ ID NO: 84365 - RNA, 19 nt, Artificial Sequence
  Description of Artificial Sequence: Synthetic oligonucleotide
  Antisense strand to SEQ ID NO: 84284
cucaaucucagccaaauuu

SEQ ID NO: 84366 - RNA, 19 nt, Artificial Sequence
  Description of Artificial Sequence: Synthetic oligonucleotide
  Sense strand starting at position 3160 of SEQ ID NO: 1058
acuaaucuguaggaaauuu

SEQ ID NO: 84367 - RNA, 19 nt, Artificial Sequence
  Description of Artificial Sequence: Synthetic oligonucleotide
  Antisense strand to SEQ ID NO: 84286
aaauuuccuacagauuagu

SEQ ID NO: 84368 - RNA, 19 nt, Artificial Sequence
  Description of Artificial Sequence: Synthetic oligonucleotide
  Sense strand starting at position 3157 of SEQ ID NO: 1058
ugcacuaaucuguaggaaa

SEQ ID NO: 84369 - RNA, 19 nt, Artificial Sequence
  Description of Artificial Sequence: Synthetic oligonucleotide
  Antisense strand to SEQ ID NO: 84288
uuuccuacagauuagugca

SEQ ID NO: 84370 - RNA, 19 nt, Artificial Sequence
  Description of Artificial Sequence: Synthetic oligonucleotide
  Sense strand starting at position 3156 of SEQ ID NO: 1058
uugcacuaaucuguaggaa

SEQ ID NO: 84371 - RNA, 19 nt, Artificial Sequence
  Description of Artificial Sequence: Synthetic oligonucleotide
  Antisense strand to SEQ ID NO: 84290
uuccuacagauuagugcaa

SEQ ID NO: 84372 - RNA, 19 nt, Artificial Sequence
  Description of Artificial Sequence: Synthetic oligonucleotide
  Sense strand starting at position 2819 of SEQ ID NO: 1058
acacaaucuguaugaugga

SEQ ID NO: 84373 - RNA, 19 nt, Artificial Sequence
  Description of Artificial Sequence: Synthetic oligonucleotide
  Antisense strand to SEQ ID NO: 84292
uccaucauacagauugugu

SEQ ID NO: 84374 - RNA, 19 nt, Artificial Sequence
  Description of Artificial Sequence: Synthetic oligonucleotide
  Sense strand starting at position 2816 of SEQ ID NO: 1058
guaacacaaucuguaugau

SEQ ID NO: 84375 - RNA, 19 nt, Artificial Sequence
  Description of Artificial Sequence: Synthetic oligonucleotide
  Antisense strand to SEQ ID NO: 84294
aucauacagauuguguuac

SEQ ID NO: 84376 - RNA, 19 nt, Artificial Sequence
  Description of Artificial Sequence: Synthetic oligonucleotide
  Sense strand starting at position 2474 of SEQ ID NO: 1058
agaugcugccucuggaaga

SEQ ID NO: 84377 - RNA, 19 nt, Artificial Sequence
  Description of Artificial Sequence: Synthetic oligonucleotide
  Antisense strand to SEQ ID NO: 84296
ucuuccagaggcagcaucu

SEQ ID NO: 84378 - RNA, 19 nt, Artificial Sequence
  Description of Artificial Sequence: Synthetic oligonucleotide
  Sense strand starting at position 2459 of SEQ ID NO: 1058
uuaguaauuagagguagau

SEQ ID NO: 84379 - RNA, 19 nt, Artificial Sequence
  Description of Artificial Sequence: Synthetic oligonucleotide
  Antisense strand to SEQ ID NO: 84298
aucuaccucuaauuacuaa

SEQ ID NO: 84380 - RNA, 19 nt, Artificial Sequence
  Description of Artificial Sequence: Synthetic oligonucleotide
  Sense strand starting at position 2362 of SEQ ID NO: 1058
ucagauuucugagcaugcu

SEQ ID NO: 84381 - RNA, 19 nt, Artificial Sequence
  Description of Artificial Sequence: Synthetic oligonucleotide
  Antisense strand to SEQ ID NO: 84300
agcaugcucagaaaucuga

SEQ ID NO: 84382 - RNA, 19 nt, Artificial Sequence
  Description of Artificial Sequence: Synthetic oligonucleotide
  Sense strand starting at position 2350 of SEQ ID NO: 1058
ucagaaauguuaucagauu

SEQ ID NO: 84383 - RNA, 19 nt, Artificial Sequence
  Description of Artificial Sequence: Synthetic oligonucleotide
  Antisense strand to SEQ ID NO: 84302
aaucugauaacauuucuga

SEQ ID NO: 84384 - RNA, 19 nt, Artificial Sequence
  Description of Artificial Sequence: Synthetic oligonucleotide
  Sense strand starting at position 2320 of SEQ ID NO: 1058
ucuaaauugcaucgauaau

SEQ ID NO: 84385 - RNA, 19 nt, Artificial Sequence
  Description of Artificial Sequence: Synthetic oligonucleotide
  Antisense strand to SEQ ID NO: 84304
auuaucgaugcaauuuaga

SEQ ID NO: 84386 - RNA, 19 nt, Artificial Sequence
  Description of Artificial Sequence: Synthetic oligonucleotide
  Sense strand starting at position 2276 of SEQ ID NO: 1058
guuggcugcguuccauaua

SEQ ID NO: 84387 - RNA, 19 nt, Artificial Sequence
  Description of Artificial Sequence: Synthetic oligonucleotide
  Antisense strand to SEQ ID NO: 84306
uauauggaacgcagccaac

SEQ ID NO: 84388 - RNA, 19 nt, Artificial Sequence
  Description of Artificial Sequence: Synthetic oligonucleotide
  Sense strand starting at position 2183 of SEQ ID NO: 1058
gcucaugugcuugcuaagu

SEQ ID NO: 84389 - RNA, 19 nt, Artificial Sequence
  Description of Artificial Sequence: Synthetic oligonucleotide
  Antisense strand to SEQ ID NO: 84308
acuuagcaagcacaugagc

SEQ ID NO: 84390 - RNA, 19 nt, Artificial Sequence
  Description of Artificial Sequence: Synthetic oligonucleotide
  Sense strand starting at position 2151 of SEQ ID NO: 1058
agagaucugcauugucaaa

SEQ ID NO: 84391 - RNA, 19 nt, Artificial Sequence
  Description of Artificial Sequence: Synthetic oligonucleotide
  Antisense strand to SEQ ID NO: 84310
uuugacaaugcagaucucu

SEQ ID NO: 84392 - RNA, 19 nt, Artificial Sequence
  Description of Artificial Sequence: Synthetic oligonucleotide
  Sense strand starting at position 2148 of SEQ ID NO: 1058
caaagagaucugcauuguc

SEQ ID NO: 84393 - RNA, 19 nt, Artificial Sequence
  Description of Artificial Sequence: Synthetic oligonucleotide
  Antisense strand to SEQ ID NO: 84312
gacaaugcagaucucuuug

SEQ ID NO: 84394 - RNA, 19 nt, Artificial Sequence
  Description of Artificial Sequence: Synthetic oligonucleotide
  Sense strand starting at position 1572 of SEQ ID NO: 1058
uugcaaagauacucacagu

SEQ ID NO: 84395 - RNA, 19 nt, Artificial Sequence
  Description of Artificial Sequence: Synthetic oligonucleotide
  Antisense strand to SEQ ID NO: 84314
acugugaguaucuuugcaa

SEQ ID NO: 84396 - RNA, 19 nt, Artificial Sequence
  Description of Artificial Sequence: Synthetic oligonucleotide
  Sense strand starting at position 1560 of SEQ ID NO: 1058
gguacuugauuauugcaaa

SEQ ID NO: 84397 - RNA, 19 nt, Artificial Sequence
  Description of Artificial Sequence: Synthetic oligonucleotide
  Antisense strand to SEQ ID NO: 84316
uuugcaauaaucaaguacc

SEQ ID NO: 84398 - RNA, 19 nt, Artificial Sequence
  Description of Artificial Sequence: Synthetic oligonucleotide
  Sense strand starting at position 1502 of SEQ ID NO: 1058
aucaaauacuugcuuggaa

SEQ ID NO: 84399 - RNA, 19 nt, Artificial Sequence
  Description of Artificial Sequence: Synthetic oligonucleotide
  Antisense strand to SEQ ID NO: 84318
uuccaagcaaguauuugau

SEQ ID NO: 84400 - RNA, 19 nt, Artificial Sequence
  Description of Artificial Sequence: Synthetic oligonucleotide
  Sense strand starting at position 1449 of SEQ ID NO: 1058
ggaaccacccaaugaguuu

SEQ ID NO: 84401 - RNA, 19 nt, Artificial Sequence
  Description of Artificial Sequence: Synthetic oligonucleotide
  Antisense strand to SEQ ID NO: 84320
aaacucauugggugguucc

SEQ ID NO: 84402 - RNA, 19 nt, Artificial Sequence
  Description of Artificial Sequence: Synthetic oligonucleotide
  Sense strand starting at position 1310 of SEQ ID NO: 1058
uuuacauugccagaaguaa

SEQ ID NO: 84403 - RNA, 19 nt, Artificial Sequence
  Description of Artificial Sequence: Synthetic oligonucleotide
  Antisense strand to SEQ ID NO: 84322
uuacuucuggcaauguaaa

SEQ ID NO: 84404 - RNA, 19 nt, Artificial Sequence
  Description of Artificial Sequence: Synthetic oligonucleotide
  Sense strand starting at position 1267 of SEQ ID NO: 1058
aucuaaaugcaauggaauu

SEQ ID NO: 84405 - RNA, 19 nt, Artificial Sequence
  Description of Artificial Sequence: Synthetic oligonucleotide
  Antisense strand to SEQ ID NO: 84324
aauuccauugcauuuagau

SEQ ID NO: 84406 - RNA, 19 nt, Artificial Sequence
  Description of Artificial Sequence: Synthetic oligonucleotide
  Sense strand starting at position 1192 of SEQ ID NO: 1058
uguaaaucuguauaugaac

SEQ ID NO: 84407 - RNA, 19 nt, Artificial Sequence
  Description of Artificial Sequence: Synthetic oligonucleotide
  Antisense strand to SEQ ID NO: 84326
guucauauacagauuuaca

SEQ ID NO: 84408 - RNA, 19 nt, Artificial Sequence
  Description of Artificial Sequence: Synthetic oligonucleotide
  Sense strand starting at position 1190 of SEQ ID NO: 1058
uguguaaaucuguauauga

SEQ ID NO: 84409 - RNA, 19 nt, Artificial Sequence
  Description of Artificial Sequence: Synthetic oligonucleotide
  Antisense strand to SEQ ID NO: 84328
ucauauacagauuuacaca

SEQ ID NO: 84410 - RNA, 19 nt, Artificial Sequence
  Description of Artificial Sequence: Synthetic oligonucleotide
  Sense strand starting at position 1189 of SEQ ID NO: 1058
auguguaaaucuguauaug

SEQ ID NO: 84411 - RNA, 19 nt, Artificial Sequence
  Description of Artificial Sequence: Synthetic oligonucleotide
  Antisense strand to SEQ ID NO: 84330
cauauacagauuuacacau

SEQ ID NO: 84412 - RNA, 19 nt, Artificial Sequence
  Description of Artificial Sequence: Synthetic oligonucleotide
  Sense strand starting at position 1050 of SEQ ID NO: 1058
aggucuuaguucucaagau

SEQ ID NO: 84413 - RNA, 19 nt, Artificial Sequence
  Description of Artificial Sequence: Synthetic oligonucleotide
  Antisense strand to SEQ ID NO: 84332
aucuugagaacuaagaccu

SEQ ID NO: 84414 - RNA, 19 nt, Artificial Sequence
  Description of Artificial Sequence: Synthetic oligonucleotide
  Sense strand starting at position 956 of SEQ ID NO: 1058
auucuugugaagugagaag

SEQ ID NO: 84415 - RNA, 19 nt, Artificial Sequence
  Description of Artificial Sequence: Synthetic oligonucleotide
  Antisense strand to SEQ ID NO: 84334
cuucucacuucacaagaau

SEQ ID NO: 84416 - RNA, 19 nt, Artificial Sequence
  Description of Artificial Sequence: Synthetic oligonucleotide
  Sense strand starting at position 948 of SEQ ID NO: 1058
acaacaguauucuugugaa

SEQ ID NO: 84417 - RNA, 19 nt, Artificial Sequence
  Description of Artificial Sequence: Synthetic oligonucleotide
  Antisense strand to SEQ ID NO: 84336
uucacaagaauacuguugu

SEQ ID NO: 84418 - RNA, 19 nt, Artificial Sequence
  Description of Artificial Sequence: Synthetic oligonucleotide
  Sense strand starting at position 788 of SEQ ID NO: 1058
caggaaacguguccuauua

SEQ ID NO: 84419 - RNA, 19 nt, Artificial Sequence
  Description of Artificial Sequence: Synthetic oligonucleotide
  Antisense strand to SEQ ID NO: 84338
uaauaggacacguuuccug

SEQ ID NO: 84420 - RNA, 19 nt, Artificial Sequence
  Description of Artificial Sequence: Synthetic oligonucleotide
  Sense strand starting at position 585 of SEQ ID NO: 1058
ggaacaaacucuucuguau

SEQ ID NO: 84421 - RNA, 19 nt, Artificial Sequence
  Description of Artificial Sequence: Synthetic oligonucleotide
  Antisense strand to SEQ ID NO: 84340
auacagaagaguuuguucc

SEQ ID NO: 84422 - RNA, 19 nt, Artificial Sequence
  Description of Artificial Sequence: Synthetic oligonucleotide
  Sense strand starting at position 570 of SEQ ID NO: 1058
auacccuuccaauguggaa

SEQ ID NO: 84423 - RNA, 19 nt, Artificial Sequence
  Description of Artificial Sequence: Synthetic oligonucleotide
  Antisense strand to SEQ ID NO: 84342
uuccacauuggaaggguau

SEQ ID NO: 84424 - RNA, 19 nt, Artificial Sequence
  Description of Artificial Sequence: Synthetic oligonucleotide
  Sense strand starting at position 3967 of SEQ ID NO: 1059
uuacaugacuaagguauuu

SEQ ID NO: 84425 - RNA, 19 nt, Artificial Sequence
  Description of Artificial Sequence: Synthetic oligonucleotide
  Antisense strand to SEQ ID NO: 84344
aaauaccuuagucauguaa

SEQ ID NO: 84426 - RNA, 19 nt, Artificial Sequence
  Description of Artificial Sequence: Synthetic oligonucleotide
  Sense strand starting at position 3912 of SEQ ID NO: 1059
aagucuuccugggcaguua

SEQ ID NO: 84427 - RNA, 19 nt, Artificial Sequence
  Description of Artificial Sequence: Synthetic oligonucleotide
  Antisense strand to SEQ ID NO: 84346
uaacugcccaggaagacuu

SEQ ID NO: 84428 - RNA, 19 nt, Artificial Sequence
  Description of Artificial Sequence: Synthetic oligonucleotide
  Sense strand starting at position 3883 of SEQ ID NO: 1059
uccugaucuggcuaaaucu

SEQ ID NO: 84429 - RNA, 19 nt, Artificial Sequence
  Description of Artificial Sequence: Synthetic oligonucleotide
  Antisense strand to SEQ ID NO: 84348
agauuuagccagaucagga

SEQ ID NO: 84430 - RNA, 19 nt, Artificial Sequence
  Description of Artificial Sequence: Synthetic oligonucleotide
  Sense strand starting at position 3870 of SEQ ID NO: 1059
ccuauaaugugcuuccuga

SEQ ID NO: 84431 - RNA, 19 nt, Artificial Sequence
  Description of Artificial Sequence: Synthetic oligonucleotide
  Antisense strand to SEQ ID NO: 84350
ucaggaagcacauuauagg

SEQ ID NO: 84432 - RNA, 19 nt, Artificial Sequence
  Description of Artificial Sequence: Synthetic oligonucleotide
  Sense strand starting at position 3858 of SEQ ID NO: 1059
gucucuaggucaccuauaa

SEQ ID NO: 84433 - RNA, 19 nt, Artificial Sequence
  Description of Artificial Sequence: Synthetic oligonucleotide
  Antisense strand to SEQ ID NO: 84352
uuauaggugaccuagagac

SEQ ID NO: 84434 - RNA, 19 nt, Artificial Sequence
  Description of Artificial Sequence: Synthetic oligonucleotide
  Sense strand starting at position 3851 of SEQ ID NO: 1059
uuacaaagucucuagguca

SEQ ID NO: 84435 - RNA, 19 nt, Artificial Sequence
  Description of Artificial Sequence: Synthetic oligonucleotide
  Antisense strand to SEQ ID NO: 84354
ugaccuagagacuuuguaa

SEQ ID NO: 84436 - RNA, 19 nt, Artificial Sequence
  Description of Artificial Sequence: Synthetic oligonucleotide
  Sense strand starting at position 3657 of SEQ ID NO: 1059
uguuaccgucaaugauaaa

SEQ ID NO: 84437 - RNA, 19 nt, Artificial Sequence
  Description of Artificial Sequence: Synthetic oligonucleotide
  Antisense strand to SEQ ID NO: 84356
uuuaucauugacgguaaca

SEQ ID NO: 84438 - RNA, 19 nt, Artificial Sequence
  Description of Artificial Sequence: Synthetic oligonucleotide
  Sense strand starting at position 3654 of SEQ ID NO: 1059
aacuguuaccgucaaugau

SEQ ID NO: 84439 - RNA, 19 nt, Artificial Sequence
  Description of Artificial Sequence: Synthetic oligonucleotide
  Antisense strand to SEQ ID NO: 84358
aucauugacgguaacaguu

SEQ ID NO: 84440 - RNA, 19 nt, Artificial Sequence
  Description of Artificial Sequence: Synthetic oligonucleotide
  Sense strand starting at position 3550 of SEQ ID NO: 1059
acugcugcucggccagauu

SEQ ID NO: 84441 - RNA, 19 nt, Artificial Sequence
  Description of Artificial Sequence: Synthetic oligonucleotide
  Antisense strand to SEQ ID NO: 84360
aaucuggccgagcagcagu

SEQ ID NO: 84442 - RNA, 19 nt, Artificial Sequence
  Description of Artificial Sequence: Synthetic oligonucleotide
  Sense strand starting at position 3472 of SEQ ID NO: 1059
ccacuuucucagcgggaau

SEQ ID NO: 84443 - RNA, 19 nt, Artificial Sequence
  Description of Artificial Sequence: Synthetic oligonucleotide
  Antisense strand to SEQ ID NO: 84362
auucccgcugagaaagugg

SEQ ID NO: 84444 - RNA, 19 nt, Artificial Sequence
  Description of Artificial Sequence: Synthetic oligonucleotide
  Sense strand starting at position 3471 of SEQ ID NO: 1059
cccacuuucucagcgggaa

SEQ ID NO: 84445 - RNA, 19 nt, Artificial Sequence
  Description of Artificial Sequence: Synthetic oligonucleotide
  Antisense strand to SEQ ID NO: 84364
uucccgcugagaaaguggg

SEQ ID NO: 84446 - RNA, 19 nt, Artificial Sequence
  Description of Artificial Sequence: Synthetic oligonucleotide
  Sense strand starting at position 3426 of SEQ ID NO: 1059
acgugauguaguggaacuu

SEQ ID NO: 84447 - RNA, 19 nt, Artificial Sequence
  Description of Artificial Sequence: Synthetic oligonucleotide
  Antisense strand to SEQ ID NO: 84366
aaguuccacuacaucacgu

SEQ ID NO: 84448 - RNA, 19 nt, Artificial Sequence
  Description of Artificial Sequence: Synthetic oligonucleotide
  Sense strand starting at position 3405 of SEQ ID NO: 1059
aggcgaauucucuaacaac

SEQ ID NO: 84449 - RNA, 19 nt, Artificial Sequence
  Description of Artificial Sequence: Synthetic oligonucleotide
  Antisense strand to SEQ ID NO: 84368
guuguuagagaauucgccu

SEQ ID NO: 84450 - RNA, 19 nt, Artificial Sequence
  Description of Artificial Sequence: Synthetic oligonucleotide
  Sense strand starting at position 3403 of SEQ ID NO: 1059
auaggcgaauucucuaaca

SEQ ID NO: 84451 - RNA, 19 nt, Artificial Sequence
  Description of Artificial Sequence: Synthetic oligonucleotide
  Antisense strand to SEQ ID NO: 84370
uguuagagaauucgccuau

SEQ ID NO: 84452 - RNA, 19 nt, Artificial Sequence
  Description of Artificial Sequence: Synthetic oligonucleotide
  Sense strand starting at position 3388 of SEQ ID NO: 1059
guugcugucgucguaauag

SEQ ID NO: 84453 - RNA, 19 nt, Artificial Sequence
  Description of Artificial Sequence: Synthetic oligonucleotide
  Antisense strand to SEQ ID NO: 84372
cuauuacgacgacagcaac

SEQ ID NO: 84454 - RNA, 19 nt, Artificial Sequence
  Description of Artificial Sequence: Synthetic oligonucleotide
  Sense strand starting at position 3159 of SEQ ID NO: 1059
cuggaaacauagguuucua

SEQ ID NO: 84455 - RNA, 19 nt, Artificial Sequence
  Description of Artificial Sequence: Synthetic oligonucleotide
  Antisense strand to SEQ ID NO: 84374
uagaaaccuauguuuccag

SEQ ID NO: 84456 - RNA, 19 nt, Artificial Sequence
  Description of Artificial Sequence: Synthetic oligonucleotide
  Sense strand starting at position 3158 of SEQ ID NO: 1059
gcuggaaacauagguuucu

SEQ ID NO: 84457 - RNA, 19 nt, Artificial Sequence
  Description of Artificial Sequence: Synthetic oligonucleotide
  Antisense strand to SEQ ID NO: 84376
agaaaccuauguuuccagc

SEQ ID NO: 84458 - RNA, 19 nt, Artificial Sequence
  Description of Artificial Sequence: Synthetic oligonucleotide
  Sense strand starting at position 3127 of SEQ ID NO: 1059
cgguuagguucucucagag

SEQ ID NO: 84459 - RNA, 19 nt, Artificial Sequence
  Description of Artificial Sequence: Synthetic oligonucleotide
  Antisense strand to SEQ ID NO: 84378
cucugagagaaccuaaccg

SEQ ID NO: 84460 - RNA, 19 nt, Artificial Sequence
  Description of Artificial Sequence: Synthetic oligonucleotide
  Sense strand starting at position 2901 of SEQ ID NO: 1059
ccuugagagcccuggagua

SEQ ID NO: 84461 - RNA, 19 nt, Artificial Sequence
  Description of Artificial Sequence: Synthetic oligonucleotide
  Antisense strand to SEQ ID NO: 84380
uacuccagggcucucaagg

SEQ ID NO: 84462 - RNA, 19 nt, Artificial Sequence
  Description of Artificial Sequence: Synthetic oligonucleotide
  Sense strand starting at position 2590 of SEQ ID NO: 1059
gcaagaugcucccuucuaa

SEQ ID NO: 84463 - RNA, 19 nt, Artificial Sequence
  Description of Artificial Sequence: Synthetic oligonucleotide
  Antisense strand to SEQ ID NO: 84382
uuagaagggagcaucuugc

SEQ ID NO: 84464 - RNA, 19 nt, Artificial Sequence
  Description of Artificial Sequence: Synthetic oligonucleotide
  Sense strand starting at position 1508 of SEQ ID NO: 1059
ccuccuucuccaugggaaa

SEQ ID NO: 84465 - RNA, 19 nt, Artificial Sequence
  Description of Artificial Sequence: Synthetic oligonucleotide
  Antisense strand to SEQ ID NO: 84384
uuucccauggagaaggagg

SEQ ID NO: 84466 - RNA, 19 nt, Artificial Sequence
  Description of Artificial Sequence: Synthetic oligonucleotide
  Sense strand starting at position 1346 of SEQ ID NO: 1059
uguucucacccagauaugu

SEQ ID NO: 84467 - RNA, 19 nt, Artificial Sequence
  Description of Artificial Sequence: Synthetic oligonucleotide
  Antisense strand to SEQ ID NO: 84386
acauaucugggugagaaca

SEQ ID NO: 84468 - RNA, 19 nt, Artificial Sequence
  Description of Artificial Sequence: Synthetic oligonucleotide
  Sense strand starting at position 1315 of SEQ ID NO: 1059
ucaucacagucuucuguua

SEQ ID NO: 84469 - RNA, 19 nt, Artificial Sequence
  Description of Artificial Sequence: Synthetic oligonucleotide
  Antisense strand to SEQ ID NO: 84388
uaacagaagacugugauga

SEQ ID NO: 84470 - RNA, 19 nt, Artificial Sequence
  Description of Artificial Sequence: Synthetic oligonucleotide
  Sense strand starting at position 1237 of SEQ ID NO: 1059
uuugauguaugaucaggga

SEQ ID NO: 84471 - RNA, 19 nt, Artificial Sequence
  Description of Artificial Sequence: Synthetic oligonucleotide
  Antisense strand to SEQ ID NO: 84390
ucccugaucauacaucaaa

SEQ ID NO: 84472 - RNA, 19 nt, Artificial Sequence
  Description of Artificial Sequence: Synthetic oligonucleotide
  Sense strand starting at position 1101 of SEQ ID NO: 1059
gcagaaauauauguaaugu

SEQ ID NO: 84473 - RNA, 19 nt, Artificial Sequence
  Description of Artificial Sequence: Synthetic oligonucleotide
  Antisense strand to SEQ ID NO: 84392
acauuacauauauuucugc

SEQ ID NO: 84474 - RNA, 19 nt, Artificial Sequence
  Description of Artificial Sequence: Synthetic oligonucleotide
  Sense strand starting at position 946 of SEQ ID NO: 1059
uugccacauggccauuaua

SEQ ID NO: 84475 - RNA, 19 nt, Artificial Sequence
  Description of Artificial Sequence: Synthetic oligonucleotide
  Antisense strand to SEQ ID NO: 84394
uauaauggccauguggcaa

SEQ ID NO: 84476 - RNA, 19 nt, Artificial Sequence
  Description of Artificial Sequence: Synthetic oligonucleotide
  Sense strand starting at position 863 of SEQ ID NO: 1059
gguuuacacucugcagaac

SEQ ID NO: 84477 - RNA, 19 nt, Artificial Sequence
  Description of Artificial Sequence: Synthetic oligonucleotide
  Antisense strand to SEQ ID NO: 84396
guucugcagaguguaaacc

SEQ ID NO: 84478 - RNA, 19 nt, Artificial Sequence
  Description of Artificial Sequence: Synthetic oligonucleotide
  Sense strand starting at position 862 of SEQ ID NO: 1059
ugguuuacacucugcagaa

SEQ ID NO: 84479 - RNA, 19 nt, Artificial Sequence
  Description of Artificial Sequence: Synthetic oligonucleotide
  Antisense strand to SEQ ID NO: 84398
uucugcagaguguaaacca

SEQ ID NO: 84480 - RNA, 19 nt, Artificial Sequence
  Description of Artificial Sequence: Synthetic oligonucleotide
  Sense strand starting at position 831 of SEQ ID NO: 1059
gugcucuccuauuugugau

SEQ ID NO: 84481 - RNA, 19 nt, Artificial Sequence
  Description of Artificial Sequence: Synthetic oligonucleotide
  Antisense strand to SEQ ID NO: 84400
aucacaaauaggagagcac

SEQ ID NO: 84482 - RNA, 19 nt, Artificial Sequence
  Description of Artificial Sequence: Synthetic oligonucleotide
  Sense strand starting at position 731 of SEQ ID NO: 1059
uuuagccaucuuuggaaca

SEQ ID NO: 84483 - RNA, 19 nt, Artificial Sequence
  Description of Artificial Sequence: Synthetic oligonucleotide
  Antisense strand to SEQ ID NO: 84402
uguuccaaagauggcuaaa

SEQ ID NO: 84484 - RNA, 19 nt, Artificial Sequence
  Description of Artificial Sequence: Synthetic oligonucleotide
  Sense strand starting at position 532 of SEQ ID NO: 1059
gcuaguagauaccuuuaaa

SEQ ID NO: 84485 - RNA, 19 nt, Artificial Sequence
  Description of Artificial Sequence: Synthetic oligonucleotide
  Antisense strand to SEQ ID NO: 84404
uuuaaagguaucuacuagc

SEQ ID NO: 84486 - RNA, 19 nt, Artificial Sequence
  Description of Artificial Sequence: Synthetic oligonucleotide
  Sense strand starting at position 488 of SEQ ID NO: 1059
uguuucucuccugauacau

SEQ ID NO: 84487 - RNA, 19 nt, Artificial Sequence
  Description of Artificial Sequence: Synthetic oligonucleotide
  Antisense strand to SEQ ID NO: 84406
auguaucaggagagaaaca

SEQ ID NO: 84488 - RNA, 19 nt, Artificial Sequence
  Description of Artificial Sequence: Synthetic oligonucleotide
  Sense strand starting at position 485 of SEQ ID NO: 1059
acauguuucucuccugaua

SEQ ID NO: 84489 - RNA, 19 nt, Artificial Sequence
  Description of Artificial Sequence: Synthetic oligonucleotide
  Antisense strand to SEQ ID NO: 84408
uaucaggagagaaacaugu

SEQ ID NO: 84490 - RNA, 19 nt, Artificial Sequence
  Description of Artificial Sequence: Synthetic oligonucleotide
  Sense strand starting at position 443 of SEQ ID NO: 1059
acagcaauuuccuaagguu

SEQ ID NO: 84491 - RNA, 19 nt, Artificial Sequence
  Description of Artificial Sequence: Synthetic oligonucleotide
  Antisense strand to SEQ ID NO: 84410
aaccuuaggaaauugcugu

SEQ ID NO: 84492 - RNA, 19 nt, Artificial Sequence
  Description of Artificial Sequence: Synthetic oligonucleotide
  Sense strand starting at position 427 of SEQ ID NO: 1059
guacauauagcuuauuaca

SEQ ID NO: 84493 - RNA, 19 nt, Artificial Sequence
  Description of Artificial Sequence: Synthetic oligonucleotide
  Antisense strand to SEQ ID NO: 84412
uguaauaagcuauauguac

SEQ ID NO: 84494 - RNA, 19 nt, Artificial Sequence
  Description of Artificial Sequence: Synthetic oligonucleotide
  Sense strand starting at position 373 of SEQ ID NO: 1059
aaauuagagcugugaugag

SEQ ID NO: 84495 - RNA, 19 nt, Artificial Sequence
  Description of Artificial Sequence: Synthetic oligonucleotide
  Antisense strand to SEQ ID NO: 84414
cucaucacagcucuaauuu

SEQ ID NO: 84496 - RNA, 19 nt, Artificial Sequence
  Description of Artificial Sequence: Synthetic oligonucleotide
  Sense strand starting at position 371 of SEQ ID NO: 1059
ugaaauuagagcugugaug

SEQ ID NO: 84497 - RNA, 19 nt, Artificial Sequence
  Description of Artificial Sequence: Synthetic oligonucleotide
  Antisense strand to SEQ ID NO: 84416
caucacagcucuaauuuca

SEQ ID NO: 84498 - RNA, 19 nt, Artificial Sequence
  Description of Artificial Sequence: Synthetic oligonucleotide
  Sense strand starting at position 322 of SEQ ID NO: 1059
gcaggauccucagucagca

SEQ ID NO: 84499 - RNA, 19 nt, Artificial Sequence
  Description of Artificial Sequence: Synthetic oligonucleotide
  Antisense strand to SEQ ID NO: 84418
ugcugacugaggauccugc

SEQ ID NO: 84500 - RNA, 19 nt, Artificial Sequence
  Description of Artificial Sequence: Synthetic oligonucleotide
  Sense strand starting at position 196 of SEQ ID NO: 1059
uuaauuguaggcuaccaua

SEQ ID NO: 84501 - RNA, 19 nt, Artificial Sequence
  Description of Artificial Sequence: Synthetic oligonucleotide
  Antisense strand to SEQ ID NO: 84420
uaugguagccuacaauuaa

SEQ ID NO: 84502 - RNA, 19 nt, Artificial Sequence
  Description of Artificial Sequence: Synthetic oligonucleotide
  Sense strand starting at position 183 of SEQ ID NO: 1059
cuaacacugugaguuaauu

SEQ ID NO: 84503 - RNA, 19 nt, Artificial Sequence
  Description of Artificial Sequence: Synthetic oligonucleotide
  Antisense strand to SEQ ID NO: 84422
aauuaacucacaguguuag

SEQ ID NO: 84504 - RNA, 19 nt, Artificial Sequence
  Description of Artificial Sequence: Synthetic oligonucleotide
  Sense strand starting at position 24 of SEQ ID NO: 1060
gguuuauucugaguccucu

SEQ ID NO: 84505 - RNA, 19 nt, Artificial Sequence
  Description of Artificial Sequence: Synthetic oligonucleotide
  Antisense strand to SEQ ID NO: 84424
agaggacucagaauaaacc

SEQ ID NO: 84506 - RNA, 19 nt, Artificial Sequence
  Description of Artificial Sequence: Synthetic oligonucleotide
  Sense strand starting at position 36 of SEQ ID NO: 1060
guccucucuccugagggaa

SEQ ID NO: 84507 - RNA, 19 nt, Artificial Sequence
  Description of Artificial Sequence: Synthetic oligonucleotide
  Antisense strand to SEQ ID NO: 84426
uucccucaggagagaggac

SEQ ID NO: 84508 - RNA, 19 nt, Artificial Sequence
  Description of Artificial Sequence: Synthetic oligonucleotide
  Sense strand starting at position 132 of SEQ ID NO: 1060
gcccgagacucucugagaa

SEQ ID NO: 84509 - RNA, 19 nt, Artificial Sequence
  Description of Artificial Sequence: Synthetic oligonucleotide
  Antisense strand to SEQ ID NO: 84428
uucucagagagucucgggc

SEQ ID NO: 84510 - RNA, 19 nt, Artificial Sequence
  Description of Artificial Sequence: Synthetic oligonucleotide
  Sense strand starting at position 161 of SEQ ID NO: 1060
acagaaacuugggaagaga

SEQ ID NO: 84511 - RNA, 19 nt, Artificial Sequence
  Description of Artificial Sequence: Synthetic oligonucleotide
  Antisense strand to SEQ ID NO: 84430
ucucuucccaaguuucugu

SEQ ID NO: 84512 - RNA, 19 nt, Artificial Sequence
  Description of Artificial Sequence: Synthetic oligonucleotide
  Sense strand starting at position 329 of SEQ ID NO: 1060
gaaggcggaguguaauuaa

SEQ ID NO: 84513 - RNA, 19 nt, Artificial Sequence
  Description of Artificial Sequence: Synthetic oligonucleotide
  Antisense strand to SEQ ID NO: 84432
uuaauuacacuccgccuuc

SEQ ID NO: 84514 - RNA, 19 nt, Artificial Sequence
  Description of Artificial Sequence: Synthetic oligonucleotide
  Sense strand starting at position 332 of SEQ ID NO: 1060
ggcggaguguaauuaauug

SEQ ID NO: 84515 - RNA, 19 nt, Artificial Sequence
  Description of Artificial Sequence: Synthetic oligonucleotide
  Antisense strand to SEQ ID NO: 84434
caauuaauuacacuccgcc

SEQ ID NO: 84516 - RNA, 19 nt, Artificial Sequence
  Description of Artificial Sequence: Synthetic oligonucleotide
  Sense strand starting at position 342 of SEQ ID NO: 1060
aauuaauuggugcguuaag

SEQ ID NO: 84517 - RNA, 19 nt, Artificial Sequence
  Description of Artificial Sequence: Synthetic oligonucleotide
  Antisense strand to SEQ ID NO: 84436
cuuaacgcaccaauuaauu

SEQ ID NO: 84518 - RNA, 19 nt, Artificial Sequence
  Description of Artificial Sequence: Synthetic oligonucleotide
  Sense strand starting at position 344 of SEQ ID NO: 1060
uuaauuggugcguuaagcu

SEQ ID NO: 84519 - RNA, 19 nt, Artificial Sequence
  Description of Artificial Sequence: Synthetic oligonucleotide
  Antisense strand to SEQ ID NO: 84438
agcuuaacgcaccaauuaa

SEQ ID NO: 84520 - RNA, 19 nt, Artificial Sequence
  Description of Artificial Sequence: Synthetic oligonucleotide
  Sense strand starting at position 401 of SEQ ID NO: 1060
agcgauuucucagaaggga

SEQ ID NO: 84521 - RNA, 19 nt, Artificial Sequence
  Description of Artificial Sequence: Synthetic oligonucleotide
  Antisense strand to SEQ ID NO: 84440
ucccuucugagaaaucgcu

SEQ ID NO: 84522 - RNA, 19 nt, Artificial Sequence
  Description of Artificial Sequence: Synthetic oligonucleotide
  Sense strand starting at position 436 of SEQ ID NO: 1060
aacagagagucugcaaauu

SEQ ID NO: 84523 - RNA, 19 nt, Artificial Sequence
  Description of Artificial Sequence: Synthetic oligonucleotide
  Antisense strand to SEQ ID NO: 84442
aauuugcagacucucuguu

SEQ ID NO: 84524 - RNA, 19 nt, Artificial Sequence
  Description of Artificial Sequence: Synthetic oligonucleotide
  Sense strand starting at position 488 of SEQ ID NO: 1060
agaggaagcuaggaaugaa

SEQ ID NO: 84525 - RNA, 19 nt, Artificial Sequence
  Description of Artificial Sequence: Synthetic oligonucleotide
  Antisense strand to SEQ ID NO: 84444
uucauuccuagcuuccucu

SEQ ID NO: 84526 - RNA, 19 nt, Artificial Sequence
  Description of Artificial Sequence: Synthetic oligonucleotide
  Sense strand starting at position 502 of SEQ ID NO: 1060
augaauucucccgggauca

SEQ ID NO: 84527 - RNA, 19 nt, Artificial Sequence
  Description of Artificial Sequence: Synthetic oligonucleotide
  Antisense strand to SEQ ID NO: 84446
ugaucccgggagaauucau

SEQ ID NO: 84528 - RNA, 19 nt, Artificial Sequence
  Description of Artificial Sequence: Synthetic oligonucleotide
  Sense strand starting at position 503 of SEQ ID NO: 1060
ugaauucucccgggaucaa

SEQ ID NO: 84529 - RNA, 19 nt, Artificial Sequence
  Description of Artificial Sequence: Synthetic oligonucleotide
  Antisense strand to SEQ ID NO: 84448
uugaucccgggagaauuca

SEQ ID NO: 84530 - RNA, 19 nt, Artificial Sequence
  Description of Artificial Sequence: Synthetic oligonucleotide
  Sense strand starting at position 968 of SEQ ID NO: 1060
guggcauuagggugaugga

SEQ ID NO: 84531 - RNA, 19 nt, Artificial Sequence
  Description of Artificial Sequence: Synthetic oligonucleotide
  Antisense strand to SEQ ID NO: 84450
uccaucacccuaaugccac

SEQ ID NO: 84532 - RNA, 19 nt, Artificial Sequence
  Description of Artificial Sequence: Synthetic oligonucleotide
  Sense strand starting at position 1243 of SEQ ID NO: 1060
cccacuuguagcuguggaa

SEQ ID NO: 84533 - RNA, 19 nt, Artificial Sequence
  Description of Artificial Sequence: Synthetic oligonucleotide
  Antisense strand to SEQ ID NO: 84452
uuccacagcuacaaguggg

SEQ ID NO: 84534 - RNA, 19 nt, Artificial Sequence
  Description of Artificial Sequence: Synthetic oligonucleotide
  Sense strand starting at position 1274 of SEQ ID NO: 1060
ccaagcaaguggucauuga

SEQ ID NO: 84535 - RNA, 19 nt, Artificial Sequence
  Description of Artificial Sequence: Synthetic oligonucleotide
  Antisense strand to SEQ ID NO: 84454
ucaaugaccacuugcuugg

SEQ ID NO: 84536 - RNA, 19 nt, Artificial Sequence
  Description of Artificial Sequence: Synthetic oligonucleotide
  Sense strand starting at position 1278 of SEQ ID NO: 1060
gcaaguggucauugagauu

SEQ ID NO: 84537 - RNA, 19 nt, Artificial Sequence
  Description of Artificial Sequence: Synthetic oligonucleotide
  Antisense strand to SEQ ID NO: 84456
aaucucaaugaccacuugc

SEQ ID NO: 84538 - RNA, 19 nt, Artificial Sequence
  Description of Artificial Sequence: Synthetic oligonucleotide
  Sense strand starting at position 1699 of SEQ ID NO: 1060
cuguauucccugcagcaca

SEQ ID NO: 84539 - RNA, 19 nt, Artificial Sequence
  Description of Artificial Sequence: Synthetic oligonucleotide
  Antisense strand to SEQ ID NO: 84458
ugugcugcagggaauacag

SEQ ID NO: 84540 - RNA, 19 nt, Artificial Sequence
  Description of Artificial Sequence: Synthetic oligonucleotide
  Sense strand starting at position 1734 of SEQ ID NO: 1060
ccacccucgcuccaaagau

SEQ ID NO: 84541 - RNA, 19 nt, Artificial Sequence
  Description of Artificial Sequence: Synthetic oligonucleotide
  Antisense strand to SEQ ID NO: 84460
aucuuuggagcgagggugg

SEQ ID NO: 84542 - RNA, 19 nt, Artificial Sequence
  Description of Artificial Sequence: Synthetic oligonucleotide
  Sense strand starting at position 1863 of SEQ ID NO: 1060
ucaagaaugcauuguauug

SEQ ID NO: 84543 - RNA, 19 nt, Artificial Sequence
  Description of Artificial Sequence: Synthetic oligonucleotide
  Antisense strand to SEQ ID NO: 84462
caauacaaugcauucuuga

SEQ ID NO: 84544 - RNA, 19 nt, Artificial Sequence
  Description of Artificial Sequence: Synthetic oligonucleotide
  Sense strand starting at position 2229 of SEQ ID NO: 1060
uguccucuuuccucugaca

SEQ ID NO: 84545 - RNA, 19 nt, Artificial Sequence
  Description of Artificial Sequence: Synthetic oligonucleotide
  Antisense strand to SEQ ID NO: 84464
ugucagaggaaagaggaca

SEQ ID NO: 84546 - RNA, 19 nt, Artificial Sequence
  Description of Artificial Sequence: Synthetic oligonucleotide
  Sense strand starting at position 2419 of SEQ ID NO: 1060
ucacauauauuauccggau

SEQ ID NO: 84547 - RNA, 19 nt, Artificial Sequence
  Description of Artificial Sequence: Synthetic oligonucleotide
  Antisense strand to SEQ ID NO: 84466
auccggauaauauauguga

SEQ ID NO: 84548 - RNA, 19 nt, Artificial Sequence
  Description of Artificial Sequence: Synthetic oligonucleotide
  Sense strand starting at position 2425 of SEQ ID NO: 1060
auauuauccggauacaguc

SEQ ID NO: 84549 - RNA, 19 nt, Artificial Sequence
  Description of Artificial Sequence: Synthetic oligonucleotide
  Antisense strand to SEQ ID NO: 84468
gacuguauccggauaauau

SEQ ID NO: 84550 - RNA, 19 nt, Artificial Sequence
  Description of Artificial Sequence: Synthetic oligonucleotide
  Sense strand starting at position 2433 of SEQ ID NO: 1060
cggauacagucuccaaaca

SEQ ID NO: 84551 - RNA, 19 nt, Artificial Sequence
  Description of Artificial Sequence: Synthetic oligonucleotide
  Antisense strand to SEQ ID NO: 84470
uguuuggagacuguauccg

SEQ ID NO: 84552 - RNA, 19 nt, Artificial Sequence
  Description of Artificial Sequence: Synthetic oligonucleotide
  Sense strand starting at position 2498 of SEQ ID NO: 1060
agagguguugaguaacaac

SEQ ID NO: 84553 - RNA, 19 nt, Artificial Sequence
  Description of Artificial Sequence: Synthetic oligonucleotide
  Antisense strand to SEQ ID NO: 84472
guuguuacucaacaccucu

SEQ ID NO: 84554 - RNA, 19 nt, Artificial Sequence
  Description of Artificial Sequence: Synthetic oligonucleotide
  Sense strand starting at position 2608 of SEQ ID NO: 1060
caggguccucucuguuauu

SEQ ID NO: 84555 - RNA, 19 nt, Artificial Sequence
  Description of Artificial Sequence: Synthetic oligonucleotide
  Antisense strand to SEQ ID NO: 84474
aauaacagagaggacccug

SEQ ID NO: 84556 - RNA, 19 nt, Artificial Sequence
  Description of Artificial Sequence: Synthetic oligonucleotide
  Sense strand starting at position 2609 of SEQ ID NO: 1060
aggguccucucuguuauuu

SEQ ID NO: 84557 - RNA, 19 nt, Artificial Sequence
  Description of Artificial Sequence: Synthetic oligonucleotide
  Antisense strand to SEQ ID NO: 84476
aaauaacagagaggacccu

SEQ ID NO: 84558 - RNA, 19 nt, Artificial Sequence
  Description of Artificial Sequence: Synthetic oligonucleotide
  Sense strand starting at position 2764 of SEQ ID NO: 1060
auagauauguaacuuguca

SEQ ID NO: 84559 - RNA, 19 nt, Artificial Sequence
  Description of Artificial Sequence: Synthetic oligonucleotide
  Antisense strand to SEQ ID NO: 84478
ugacaaguuacauaucuau

SEQ ID NO: 84560 - RNA, 19 nt, Artificial Sequence
  Description of Artificial Sequence: Synthetic oligonucleotide
  Sense strand starting at position 2768 of SEQ ID NO: 1060
auauguaacuugucagaug

SEQ ID NO: 84561 - RNA, 19 nt, Artificial Sequence
  Description of Artificial Sequence: Synthetic oligonucleotide
  Antisense strand to SEQ ID NO: 84480
caucugacaaguuacauau

SEQ ID NO: 84562 - RNA, 19 nt, Artificial Sequence
  Description of Artificial Sequence: Synthetic oligonucleotide
  Sense strand starting at position 2790 of SEQ ID NO: 1060
ucccgcuuguaauuaaaga

SEQ ID NO: 84563 - RNA, 19 nt, Artificial Sequence
  Description of Artificial Sequence: Synthetic oligonucleotide
  Antisense strand to SEQ ID NO: 84482
ucuuuaauuacaagcggga

SEQ ID NO: 84564 - RNA, 19 nt, Artificial Sequence
  Description of Artificial Sequence: Synthetic oligonucleotide
  Sense strand starting at position 2803 of SEQ ID NO: 1060
uaaagaugcugggauuuga

SEQ ID NO: 84565 - RNA, 19 nt, Artificial Sequence
  Description of Artificial Sequence: Synthetic oligonucleotide
  Antisense strand to SEQ ID NO: 84484
ucaaaucccagcaucuuua

SEQ ID NO: 84566 - RNA, 19 nt, Artificial Sequence
  Description of Artificial Sequence: Synthetic oligonucleotide
  Sense strand starting at position 2888 of SEQ ID NO: 1060
guacaaagugguuguucaa

SEQ ID NO: 84567 - RNA, 19 nt, Artificial Sequence
  Description of Artificial Sequence: Synthetic oligonucleotide
  Antisense strand to SEQ ID NO: 84486
uugaacaaccacuuuguac

SEQ ID NO: 84568 - RNA, 19 nt, Artificial Sequence
  Description of Artificial Sequence: Synthetic oligonucleotide
  Sense strand starting at position 3076 of SEQ ID NO: 1060
gucauucccugccugauuu

SEQ ID NO: 84569 - RNA, 19 nt, Artificial Sequence
  Description of Artificial Sequence: Synthetic oligonucleotide
  Antisense strand to SEQ ID NO: 84488
aaaucaggcagggaaugac

SEQ ID NO: 84570 - RNA, 19 nt, Artificial Sequence
  Description of Artificial Sequence: Synthetic oligonucleotide
  Sense strand starting at position 3104 of SEQ ID NO: 1060
ggcucugagagucagaacu

SEQ ID NO: 84571 - RNA, 19 nt, Artificial Sequence
  Description of Artificial Sequence: Synthetic oligonucleotide
  Antisense strand to SEQ ID NO: 84490
aguucugacucucagagcc

SEQ ID NO: 84572 - RNA, 19 nt, Artificial Sequence
  Description of Artificial Sequence: Synthetic oligonucleotide
  Sense strand starting at position 3453 of SEQ ID NO: 1060
gguggacauaugugcacau

SEQ ID NO: 84573 - RNA, 19 nt, Artificial Sequence
  Description of Artificial Sequence: Synthetic oligonucleotide
  Antisense strand to SEQ ID NO: 84492
augugcacauauguccacc

SEQ ID NO: 84574 - RNA, 19 nt, Artificial Sequence
  Description of Artificial Sequence: Synthetic oligonucleotide
  Sense strand starting at position 3548 of SEQ ID NO: 1060
agcauuccugacugguaag

SEQ ID NO: 84575 - RNA, 19 nt, Artificial Sequence
  Description of Artificial Sequence: Synthetic oligonucleotide
  Antisense strand to SEQ ID NO: 84494
cuuaccagucaggaaugcu

SEQ ID NO: 84576 - RNA, 19 nt, Artificial Sequence
  Description of Artificial Sequence: Synthetic oligonucleotide
  Sense strand starting at position 3624 of SEQ ID NO: 1060
cucuguauaucaguucuca

SEQ ID NO: 84577 - RNA, 19 nt, Artificial Sequence
  Description of Artificial Sequence: Synthetic oligonucleotide
  Antisense strand to SEQ ID NO: 84496
ugagaacugauauacagag

SEQ ID NO: 84578 - RNA, 19 nt, Artificial Sequence
  Description of Artificial Sequence: Synthetic oligonucleotide
  Sense strand starting at position 3742 of SEQ ID NO: 1060
ucuugauucuggccaggca

SEQ ID NO: 84579 - RNA, 19 nt, Artificial Sequence
  Description of Artificial Sequence: Synthetic oligonucleotide
  Antisense strand to SEQ ID NO: 84498
ugccuggccagaaucaaga

SEQ ID NO: 84580 - RNA, 19 nt, Artificial Sequence
  Description of Artificial Sequence: Synthetic oligonucleotide
  Sense strand starting at position 3743 of SEQ ID NO: 1060
cuugauucuggccaggcau

SEQ ID NO: 84581 - RNA, 19 nt, Artificial Sequence
  Description of Artificial Sequence: Synthetic oligonucleotide
  Antisense strand to SEQ ID NO: 84500
augccuggccagaaucaag

SEQ ID NO: 84582 - RNA, 19 nt, Artificial Sequence
  Description of Artificial Sequence: Synthetic oligonucleotide
  Sense strand starting at position 3811 of SEQ ID NO: 1060
guugauugaagucaggagu

SEQ ID NO: 84583 - RNA, 19 nt, Artificial Sequence
  Description of Artificial Sequence: Synthetic oligonucleotide
  Antisense strand to SEQ ID NO: 84502
acuccugacuucaaucaac

SEQ ID NO: 84584 - RNA, 19 nt, Artificial Sequence
  Description of Artificial Sequence: Synthetic oligonucleotide
  Sense strand starting at position 26 of SEQ ID NO: 1061
uggagucauucuuacggaa

SEQ ID NO: 84585 - RNA, 19 nt, Artificial Sequence
  Description of Artificial Sequence: Synthetic oligonucleotide
  Antisense strand to SEQ ID NO: 84504
uuccguaagaaugacucca

SEQ ID NO: 84586 - RNA, 19 nt, Artificial Sequence
  Description of Artificial Sequence: Synthetic oligonucleotide
  Sense strand starting at position 103 of SEQ ID NO: 1061
aggcuuucuuucuauauga

SEQ ID NO: 84587 - RNA, 19 nt, Artificial Sequence
  Description of Artificial Sequence: Synthetic oligonucleotide
  Antisense strand to SEQ ID NO: 84506
ucauauagaaagaaagccu

SEQ ID NO: 84588 - RNA, 19 nt, Artificial Sequence
  Description of Artificial Sequence: Synthetic oligonucleotide
  Sense strand starting at position 137 of SEQ ID NO: 1061
aggaaacccucaugacuca

SEQ ID NO: 84589 - RNA, 19 nt, Artificial Sequence
  Description of Artificial Sequence: Synthetic oligonucleotide
  Antisense strand to SEQ ID NO: 84508
ugagucaugaggguuuccu

SEQ ID NO: 84590 - RNA, 19 nt, Artificial Sequence
  Description of Artificial Sequence: Synthetic oligonucleotide
  Sense strand starting at position 392 of SEQ ID NO: 1061
gcaugaucccaaggccacu

SEQ ID NO: 84591 - RNA, 19 nt, Artificial Sequence
  Description of Artificial Sequence: Synthetic oligonucleotide
  Antisense strand to SEQ ID NO: 84510
aguggccuugggaucaugc

SEQ ID NO: 84592 - RNA, 19 nt, Artificial Sequence
  Description of Artificial Sequence: Synthetic oligonucleotide
  Sense strand starting at position 611 of SEQ ID NO: 1061
gaaagccugugcucucuua

SEQ ID NO: 84593 - RNA, 19 nt, Artificial Sequence
  Description of Artificial Sequence: Synthetic oligonucleotide
  Antisense strand to SEQ ID NO: 84512
uaagagagcacaggcuuuc

SEQ ID NO: 84594 - RNA, 19 nt, Artificial Sequence
  Description of Artificial Sequence: Synthetic oligonucleotide
  Sense strand starting at position 679 of SEQ ID NO: 1061
gagucuguaaggcacagau

SEQ ID NO: 84595 - RNA, 19 nt, Artificial Sequence
  Description of Artificial Sequence: Synthetic oligonucleotide
  Antisense strand to SEQ ID NO: 84514
aucugugccuuacagacuc

SEQ ID NO: 84596 - RNA, 19 nt, Artificial Sequence
  Description of Artificial Sequence: Synthetic oligonucleotide
  Sense strand starting at position 738 of SEQ ID NO: 1061
guggguguucaggauaugu

SEQ ID NO: 84597 - RNA, 19 nt, Artificial Sequence
  Description of Artificial Sequence: Synthetic oligonucleotide
  Antisense strand to SEQ ID NO: 84516
acauauccugaacacccac

SEQ ID NO: 84598 - RNA, 19 nt, Artificial Sequence
  Description of Artificial Sequence: Synthetic oligonucleotide
  Sense strand starting at position 740 of SEQ ID NO: 1061
ggguguucaggauauguuu

SEQ ID NO: 84599 - RNA, 19 nt, Artificial Sequence
  Description of Artificial Sequence: Synthetic oligonucleotide
  Antisense strand to SEQ ID NO: 84518
aaacauauccugaacaccc

SEQ ID NO: 84600 - RNA, 19 nt, Artificial Sequence
  Description of Artificial Sequence: Synthetic oligonucleotide
  Sense strand starting at position 748 of SEQ ID NO: 1061
aggauauguuuccagaaga

SEQ ID NO: 84601 - RNA, 19 nt, Artificial Sequence
  Description of Artificial Sequence: Synthetic oligonucleotide
  Antisense strand to SEQ ID NO: 84520
ucuucuggaaacauauccu

SEQ ID NO: 84602 - RNA, 19 nt, Artificial Sequence
  Description of Artificial Sequence: Synthetic oligonucleotide
  Sense strand starting at position 1121 of SEQ ID NO: 1061
uacagagcuuggccaucua

SEQ ID NO: 84603 - RNA, 19 nt, Artificial Sequence
  Description of Artificial Sequence: Synthetic oligonucleotide
  Antisense strand to SEQ ID NO: 84522
uagauggccaagcucugua

SEQ ID NO: 84604 - RNA, 19 nt, Artificial Sequence
  Description of Artificial Sequence: Synthetic oligonucleotide
  Sense strand starting at position 1220 of SEQ ID NO: 1061
guggcucaacccugagcaa

SEQ ID NO: 84605 - RNA, 19 nt, Artificial Sequence
  Description of Artificial Sequence: Synthetic oligonucleotide
  Antisense strand to SEQ ID NO: 84524
uugcucaggguugagccac

SEQ ID NO: 84606 - RNA, 19 nt, Artificial Sequence
  Description of Artificial Sequence: Synthetic oligonucleotide
  Sense strand starting at position 1303 of SEQ ID NO: 1061
uucccauguaugggagauu

SEQ ID NO: 84607 - RNA, 19 nt, Artificial Sequence
  Description of Artificial Sequence: Synthetic oligonucleotide
  Antisense strand to SEQ ID NO: 84526
aaucucccauacaugggaa

SEQ ID NO: 84608 - RNA, 19 nt, Artificial Sequence
  Description of Artificial Sequence: Synthetic oligonucleotide
  Sense strand starting at position 1304 of SEQ ID NO: 1061
ucccauguaugggagauuu

SEQ ID NO: 84609 - RNA, 19 nt, Artificial Sequence
  Description of Artificial Sequence: Synthetic oligonucleotide
  Antisense strand to SEQ ID NO: 84528
aaaucucccauacauggga

SEQ ID NO: 84610 - RNA, 19 nt, Artificial Sequence
  Description of Artificial Sequence: Synthetic oligonucleotide
  Sense strand starting at position 1952 of SEQ ID NO: 1061
caaggaguguccuuuaagc

SEQ ID NO: 84611 - RNA, 19 nt, Artificial Sequence
  Description of Artificial Sequence: Synthetic oligonucleotide
  Antisense strand to SEQ ID NO: 84530
gcuuaaaggacacuccuug

SEQ ID NO: 84612 - RNA, 19 nt, Artificial Sequence
  Description of Artificial Sequence: Synthetic oligonucleotide
  Sense strand starting at position 1954 of SEQ ID NO: 1061
aggaguguccuuuaagcug

SEQ ID NO: 84613 - RNA, 19 nt, Artificial Sequence
  Description of Artificial Sequence: Synthetic oligonucleotide
  Antisense strand to SEQ ID NO: 84532
cagcuuaaaggacacuccu

SEQ ID NO: 84614 - RNA, 19 nt, Artificial Sequence
  Description of Artificial Sequence: Synthetic oligonucleotide
  Sense strand starting at position 1971 of SEQ ID NO: 1061
ugacuuuccuguuaauuug

SEQ ID NO: 84615 - RNA, 19 nt, Artificial Sequence
  Description of Artificial Sequence: Synthetic oligonucleotide
  Antisense strand to SEQ ID NO: 84534
caaauuaacaggaaaguca

SEQ ID NO: 84616 - RNA, 19 nt, Artificial Sequence
  Description of Artificial Sequence: Synthetic oligonucleotide
  Sense strand starting at position 2000 of SEQ ID NO: 1061
gcacuccuguccuuuaaga

SEQ ID NO: 84617 - RNA, 19 nt, Artificial Sequence
  Description of Artificial Sequence: Synthetic oligonucleotide
  Antisense strand to SEQ ID NO: 84536
ucuuaaaggacaggagugc

SEQ ID NO: 84618 - RNA, 19 nt, Artificial Sequence
  Description of Artificial Sequence: Synthetic oligonucleotide
  Sense strand starting at position 2076 of SEQ ID NO: 1061
acaucauuugcaugcuguu

SEQ ID NO: 84619 - RNA, 19 nt, Artificial Sequence
  Description of Artificial Sequence: Synthetic oligonucleotide
  Antisense strand to SEQ ID NO: 84538
aacagcaugcaaaugaugu

SEQ ID NO: 84620 - RNA, 19 nt, Artificial Sequence
  Description of Artificial Sequence: Synthetic oligonucleotide
  Sense strand starting at position 2143 of SEQ ID NO: 1061
gugcccagggcuugugaaa

SEQ ID NO: 84621 - RNA, 19 nt, Artificial Sequence
  Description of Artificial Sequence: Synthetic oligonucleotide
  Antisense strand to SEQ ID NO: 84540
uuucacaagcccugggcac

SEQ ID NO: 84622 - RNA, 19 nt, Artificial Sequence
  Description of Artificial Sequence: Synthetic oligonucleotide
  Sense strand starting at position 2154 of SEQ ID NO: 1061
uugugaaacagauauggcu

SEQ ID NO: 84623 - RNA, 19 nt, Artificial Sequence
  Description of Artificial Sequence: Synthetic oligonucleotide
  Antisense strand to SEQ ID NO: 84542
agccauaucuguuucacaa

SEQ ID NO: 84624 - RNA, 19 nt, Artificial Sequence
  Description of Artificial Sequence: Synthetic oligonucleotide
  Sense strand starting at position 2163 of SEQ ID NO: 1061
agauauggcuuccacaaag

SEQ ID NO: 84625 - RNA, 19 nt, Artificial Sequence
  Description of Artificial Sequence: Synthetic oligonucleotide
  Antisense strand to SEQ ID NO: 84544
cuuuguggaagccauaucu

SEQ ID NO: 84626 - RNA, 19 nt, Artificial Sequence
  Description of Artificial Sequence: Synthetic oligonucleotide
  Sense strand starting at position 2308 of SEQ ID NO: 1061
ucuuuagaauucuaggaag

SEQ ID NO: 84627 - RNA, 19 nt, Artificial Sequence
  Description of Artificial Sequence: Synthetic oligonucleotide
  Antisense strand to SEQ ID NO: 84546
cuuccuagaauucuaaaga

SEQ ID NO: 84628 - RNA, 19 nt, Artificial Sequence
  Description of Artificial Sequence: Synthetic oligonucleotide
  Sense strand starting at position 2310 of SEQ ID NO: 1061
uuuagaauucuaggaagca

SEQ ID NO: 84629 - RNA, 19 nt, Artificial Sequence
  Description of Artificial Sequence: Synthetic oligonucleotide
  Antisense strand to SEQ ID NO: 84548
ugcuuccuagaauucuaaa

SEQ ID NO: 84630 - RNA, 19 nt, Artificial Sequence
  Description of Artificial Sequence: Synthetic oligonucleotide
  Sense strand starting at position 2311 of SEQ ID NO: 1061
uuagaauucuaggaagcac

SEQ ID NO: 84631 - RNA, 19 nt, Artificial Sequence
  Description of Artificial Sequence: Synthetic oligonucleotide
  Antisense strand to SEQ ID NO: 84550
gugcuuccuagaauucuaa

SEQ ID NO: 84632 - RNA, 19 nt, Artificial Sequence
  Description of Artificial Sequence: Synthetic oligonucleotide
  Sense strand starting at position 2351 of SEQ ID NO: 1061
gaaauuguguucucuugac

SEQ ID NO: 84633 - RNA, 19 nt, Artificial Sequence
  Description of Artificial Sequence: Synthetic oligonucleotide
  Antisense strand to SEQ ID NO: 84552
gucaagagaacacaauuuc

SEQ ID NO: 84634 - RNA, 19 nt, Artificial Sequence
  Description of Artificial Sequence: Synthetic oligonucleotide
  Sense strand starting at position 2564 of SEQ ID NO: 1061
guccgauuugcauguccac

SEQ ID NO: 84635 - RNA, 19 nt, Artificial Sequence
  Description of Artificial Sequence: Synthetic oligonucleotide
  Antisense strand to SEQ ID NO: 84554
guggacaugcaaaucggac

SEQ ID NO: 84636 - RNA, 19 nt, Artificial Sequence
  Description of Artificial Sequence: Synthetic oligonucleotide
  Sense strand starting at position 2585 of SEQ ID NO: 1061
ccgguuagcucugcccaga

SEQ ID NO: 84637 - RNA, 19 nt, Artificial Sequence
  Description of Artificial Sequence: Synthetic oligonucleotide
  Antisense strand to SEQ ID NO: 84556
ucugggcagagcuaaccgg

SEQ ID NO: 84638 - RNA, 19 nt, Artificial Sequence
  Description of Artificial Sequence: Synthetic oligonucleotide
  Sense strand starting at position 2610 of SEQ ID NO: 1061
auugcuaacugaguguaga

SEQ ID NO: 84639 - RNA, 19 nt, Artificial Sequence
  Description of Artificial Sequence: Synthetic oligonucleotide
  Antisense strand to SEQ ID NO: 84558
ucuacacucaguuagcaau

SEQ ID NO: 84640 - RNA, 19 nt, Artificial Sequence
  Description of Artificial Sequence: Synthetic oligonucleotide
  Sense strand starting at position 2611 of SEQ ID NO: 1061
uugcuaacugaguguagaa

SEQ ID NO: 84641 - RNA, 19 nt, Artificial Sequence
  Description of Artificial Sequence: Synthetic oligonucleotide
  Antisense strand to SEQ ID NO: 84560
uucuacacucaguuagcaa

SEQ ID NO: 84642 - RNA, 19 nt, Artificial Sequence
  Description of Artificial Sequence: Synthetic oligonucleotide
  Sense strand starting at position 2613 of SEQ ID NO: 1061
gcuaacugaguguagaaua

SEQ ID NO: 84643 - RNA, 19 nt, Artificial Sequence
  Description of Artificial Sequence: Synthetic oligonucleotide
  Antisense strand to SEQ ID NO: 84562
uauucuacacucaguuagc

SEQ ID NO: 84644 - RNA, 19 nt, Artificial Sequence
  Description of Artificial Sequence: Synthetic oligonucleotide
  Sense strand starting at position 2647 of SEQ ID NO: 1061
guaagaaggcuccagaagu

SEQ ID NO: 84645 - RNA, 19 nt, Artificial Sequence
  Description of Artificial Sequence: Synthetic oligonucleotide
  Antisense strand to SEQ ID NO: 84564
acuucuggagccuucuuac

SEQ ID NO: 84646 - RNA, 19 nt, Artificial Sequence
  Description of Artificial Sequence: Synthetic oligonucleotide
  Sense strand starting at position 2790 of SEQ ID NO: 1061
ccauuuggcucaugagaaa

SEQ ID NO: 84647 - RNA, 19 nt, Artificial Sequence
  Description of Artificial Sequence: Synthetic oligonucleotide
  Antisense strand to SEQ ID NO: 84566
uuucucaugagccaaaugg

SEQ ID NO: 84648 - RNA, 19 nt, Artificial Sequence
  Description of Artificial Sequence: Synthetic oligonucleotide
  Sense strand starting at position 2996 of SEQ ID NO: 1061
acagccaguaguugugauu

SEQ ID NO: 84649 - RNA, 19 nt, Artificial Sequence
  Description of Artificial Sequence: Synthetic oligonucleotide
  Antisense strand to SEQ ID NO: 84568
aaucacaacuacuggcugu

SEQ ID NO: 84650 - RNA, 19 nt, Artificial Sequence
  Description of Artificial Sequence: Synthetic oligonucleotide
  Sense strand starting at position 3005 of SEQ ID NO: 1061
aguugugauucccucuuaa

SEQ ID NO: 84651 - RNA, 19 nt, Artificial Sequence
  Description of Artificial Sequence: Synthetic oligonucleotide
  Antisense strand to SEQ ID NO: 84570
uuaagagggaaucacaacu

SEQ ID NO: 84652 - RNA, 19 nt, Artificial Sequence
  Description of Artificial Sequence: Synthetic oligonucleotide
  Sense strand starting at position 3015 of SEQ ID NO: 1061
cccucuuaacacugaggaa

SEQ ID NO: 84653 - RNA, 19 nt, Artificial Sequence
  Description of Artificial Sequence: Synthetic oligonucleotide
  Antisense strand to SEQ ID NO: 84572
uuccucaguguuaagaggg

SEQ ID NO: 84654 - RNA, 19 nt, Artificial Sequence
  Description of Artificial Sequence: Synthetic oligonucleotide
  Sense strand starting at position 3018 of SEQ ID NO: 1061
ucuuaacacugaggaaaua

SEQ ID NO: 84655 - RNA, 19 nt, Artificial Sequence
  Description of Artificial Sequence: Synthetic oligonucleotide
  Antisense strand to SEQ ID NO: 84574
uauuuccucaguguuaaga

SEQ ID NO: 84656 - RNA, 19 nt, Artificial Sequence
  Description of Artificial Sequence: Synthetic oligonucleotide
  Sense strand starting at position 3483 of SEQ ID NO: 1061
gguuacugaugcuaccaaa

SEQ ID NO: 84657 - RNA, 19 nt, Artificial Sequence
  Description of Artificial Sequence: Synthetic oligonucleotide
  Antisense strand to SEQ ID NO: 84576
uuugguagcaucaguaacc

SEQ ID NO: 84658 - RNA, 19 nt, Artificial Sequence
  Description of Artificial Sequence: Synthetic oligonucleotide
  Sense strand starting at position 3567 of SEQ ID NO: 1061
acgagacagucuccucuuu

SEQ ID NO: 84659 - RNA, 19 nt, Artificial Sequence
  Description of Artificial Sequence: Synthetic oligonucleotide
  Antisense strand to SEQ ID NO: 84578
aaagaggagacugucucgu

SEQ ID NO: 84660 - RNA, 19 nt, Artificial Sequence
  Description of Artificial Sequence: Synthetic oligonucleotide
  Sense strand starting at position 3916 of SEQ ID NO: 1061
gcucauccucgugaugaaa

SEQ ID NO: 84661 - RNA, 19 nt, Artificial Sequence
  Description of Artificial Sequence: Synthetic oligonucleotide
  Antisense strand to SEQ ID NO: 84580
uuucaucacgaggaugagc

SEQ ID NO: 84662 - RNA, 19 nt, Artificial Sequence
  Description of Artificial Sequence: Synthetic oligonucleotide
  Sense strand starting at position 3919 of SEQ ID NO: 1061
cauccucgugaugaaacau

SEQ ID NO: 84663 - RNA, 19 nt, Artificial Sequence
  Description of Artificial Sequence: Synthetic oligonucleotide
  Antisense strand to SEQ ID NO: 84582
auguuucaucacgaggaug

SEQ ID NO: 84664 - RNA, 19 nt, Artificial Sequence
  Description of Artificial Sequence: Synthetic oligonucleotide
  Sense strand starting at position 3964 of SEQ ID NO: 1062
cuuguucuguagcagaaau

SEQ ID NO: 84665 - RNA, 19 nt, Artificial Sequence
  Description of Artificial Sequence: Synthetic oligonucleotide
  Antisense strand to SEQ ID NO: 84584
auuucugcuacagaacaag

SEQ ID NO: 84666 - RNA, 19 nt, Artificial Sequence
  Description of Artificial Sequence: Synthetic oligonucleotide
  Sense strand starting at position 3961 of SEQ ID NO: 1062
gcucuuguucuguagcaga

SEQ ID NO: 84667 - RNA, 19 nt, Artificial Sequence
  Description of Artificial Sequence: Synthetic oligonucleotide
  Antisense strand to SEQ ID NO: 84586
ucugcuacagaacaagagc

SEQ ID NO: 84668 - RNA, 19 nt, Artificial Sequence
  Description of Artificial Sequence: Synthetic oligonucleotide
  Sense strand starting at position 3846 of SEQ ID NO: 1062
gcugguucuucucaaucau

SEQ ID NO: 84669 - RNA, 19 nt, Artificial Sequence
  Description of Artificial Sequence: Synthetic oligonucleotide
  Antisense strand to SEQ ID NO: 84588
augauugagaagaaccagc

SEQ ID NO: 84670 - RNA, 19 nt, Artificial Sequence
  Description of Artificial Sequence: Synthetic oligonucleotide
  Sense strand starting at position 3843 of SEQ ID NO: 1062
cuggcugguucuucucaau

SEQ ID NO: 84671 - RNA, 19 nt, Artificial Sequence
  Description of Artificial Sequence: Synthetic oligonucleotide
  Antisense strand to SEQ ID NO: 84590
auugagaagaaccagccag

SEQ ID NO: 84672 - RNA, 19 nt, Artificial Sequence
  Description of Artificial Sequence: Synthetic oligonucleotide
  Sense strand starting at position 3456 of SEQ ID NO: 1062
gcagcauugaucugcugag

SEQ ID NO: 84673 - RNA, 19 nt, Artificial Sequence
  Description of Artificial Sequence: Synthetic oligonucleotide
  Antisense strand to SEQ ID NO: 84592
cucagcagaucaaugcugc

SEQ ID NO: 84674 - RNA, 19 nt, Artificial Sequence
  Description of Artificial Sequence: Synthetic oligonucleotide
  Sense strand starting at position 3436 of SEQ ID NO: 1062
auucucagcugucagcaaa

SEQ ID NO: 84675 - RNA, 19 nt, Artificial Sequence
  Description of Artificial Sequence: Synthetic oligonucleotide
  Antisense strand to SEQ ID NO: 84594
uuugcugacagcugagaau

SEQ ID NO: 84676 - RNA, 19 nt, Artificial Sequence
  Description of Artificial Sequence: Synthetic oligonucleotide
  Sense strand starting at position 3431 of SEQ ID NO: 1062
gcucgauucucagcuguca

SEQ ID NO: 84677 - RNA, 19 nt, Artificial Sequence
  Description of Artificial Sequence: Synthetic oligonucleotide
  Antisense strand to SEQ ID NO: 84596
ugacagcugagaaucgagc

SEQ ID NO: 84678 - RNA, 19 nt, Artificial Sequence
  Description of Artificial Sequence: Synthetic oligonucleotide
  Sense strand starting at position 3361 of SEQ ID NO: 1062
ccgguuccuccgggaggau

SEQ ID NO: 84679 - RNA, 19 nt, Artificial Sequence
  Description of Artificial Sequence: Synthetic oligonucleotide
  Antisense strand to SEQ ID NO: 84598
auccucccggaggaaccgg

SEQ ID NO: 84680 - RNA, 19 nt, Artificial Sequence
  Description of Artificial Sequence: Synthetic oligonucleotide
  Sense strand starting at position 3336 of SEQ ID NO: 1062
gugagccuuccgcagcaaa

SEQ ID NO: 84681 - RNA, 19 nt, Artificial Sequence
  Description of Artificial Sequence: Synthetic oligonucleotide
  Antisense strand to SEQ ID NO: 84600
uuugcugcggaaggcucac

SEQ ID NO: 84682 - RNA, 19 nt, Artificial Sequence
  Description of Artificial Sequence: Synthetic oligonucleotide
  Sense strand starting at position 3126 of SEQ ID NO: 1062
uacuuugucccagggcauu

SEQ ID NO: 84683 - RNA, 19 nt, Artificial Sequence
  Description of Artificial Sequence: Synthetic oligonucleotide
  Antisense strand to SEQ ID NO: 84602
aaugcccugggacaaagua

SEQ ID NO: 84684 - RNA, 19 nt, Artificial Sequence
  Description of Artificial Sequence: Synthetic oligonucleotide
  Sense strand starting at position 3124 of SEQ ID NO: 1062
gauacuuugucccagggca

SEQ ID NO: 84685 - RNA, 19 nt, Artificial Sequence
  Description of Artificial Sequence: Synthetic oligonucleotide
  Antisense strand to SEQ ID NO: 84604
ugcccugggacaaaguauc

SEQ ID NO: 84686 - RNA, 19 nt, Artificial Sequence
  Description of Artificial Sequence: Synthetic oligonucleotide
  Sense strand starting at position 3046 of SEQ ID NO: 1062
ggagaugagcucuaagcca

SEQ ID NO: 84687 - RNA, 19 nt, Artificial Sequence
  Description of Artificial Sequence: Synthetic oligonucleotide
  Antisense strand to SEQ ID NO: 84606
uggcuuagagcucaucucc

SEQ ID NO: 84688 - RNA, 19 nt, Artificial Sequence
  Description of Artificial Sequence: Synthetic oligonucleotide
  Sense strand starting at position 3034 of SEQ ID NO: 1062
gauggaguguugggagaug

SEQ ID NO: 84689 - RNA, 19 nt, Artificial Sequence
  Description of Artificial Sequence: Synthetic oligonucleotide
  Antisense strand to SEQ ID NO: 84608
caucucccaacacuccauc

SEQ ID NO: 84690 - RNA, 19 nt, Artificial Sequence
  Description of Artificial Sequence: Synthetic oligonucleotide
  Sense strand starting at position 3033 of SEQ ID NO: 1062
agauggaguguugggagau

SEQ ID NO: 84691 - RNA, 19 nt, Artificial Sequence
  Description of Artificial Sequence: Synthetic oligonucleotide
  Antisense strand to SEQ ID NO: 84610
aucucccaacacuccaucu

SEQ ID NO: 84692 - RNA, 19 nt, Artificial Sequence
  Description of Artificial Sequence: Synthetic oligonucleotide
  Sense strand starting at position 2804 of SEQ ID NO: 1062
ggcgguuguccugcucuua

SEQ ID NO: 84693 - RNA, 19 nt, Artificial Sequence
  Description of Artificial Sequence: Synthetic oligonucleotide
  Antisense strand to SEQ ID NO: 84612
uaagagcaggacaaccgcc

SEQ ID NO: 84694 - RNA, 19 nt, Artificial Sequence
  Description of Artificial Sequence: Synthetic oligonucleotide
  Sense strand starting at position 2661 of SEQ ID NO: 1062
ugaguuaugggucgggugu

SEQ ID NO: 84695 - RNA, 19 nt, Artificial Sequence
  Description of Artificial Sequence: Synthetic oligonucleotide
  Antisense strand to SEQ ID NO: 84614
acacccgacccauaacuca

SEQ ID NO: 84696 - RNA, 19 nt, Artificial Sequence
  Description of Artificial Sequence: Synthetic oligonucleotide
  Sense strand starting at position 2649 of SEQ ID NO: 1062
gucagugaggugugaguua

SEQ ID NO: 84697 - RNA, 19 nt, Artificial Sequence
  Description of Artificial Sequence: Synthetic oligonucleotide
  Antisense strand to SEQ ID NO: 84616
uaacucacaccucacugac

SEQ ID NO: 84698 - RNA, 19 nt, Artificial Sequence
  Description of Artificial Sequence: Synthetic oligonucleotide
  Sense strand starting at position 2562 of SEQ ID NO: 1062
cguggaguuuagguguaga

SEQ ID NO: 84699 - RNA, 19 nt, Artificial Sequence
  Description of Artificial Sequence: Synthetic oligonucleotide
  Antisense strand to SEQ ID NO: 84618
ucuacaccuaaacuccacg

SEQ ID NO: 84700 - RNA, 19 nt, Artificial Sequence
  Description of Artificial Sequence: Synthetic oligonucleotide
  Sense strand starting at position 2554 of SEQ ID NO: 1062
cagugucccguggaguuua

SEQ ID NO: 84701 - RNA, 19 nt, Artificial Sequence
  Description of Artificial Sequence: Synthetic oligonucleotide
  Antisense strand to SEQ ID NO: 84620
uaaacuccacgggacacug

SEQ ID NO: 84702 - RNA, 19 nt, Artificial Sequence
  Description of Artificial Sequence: Synthetic oligonucleotide
  Sense strand starting at position 2552 of SEQ ID NO: 1062
cgcagugucccguggaguu

SEQ ID NO: 84703 - RNA, 19 nt, Artificial Sequence
  Description of Artificial Sequence: Synthetic oligonucleotide
  Antisense strand to SEQ ID NO: 84622
aacuccacgggacacugcg

SEQ ID NO: 84704 - RNA, 19 nt, Artificial Sequence
  Description of Artificial Sequence: Synthetic oligonucleotide
  Sense strand starting at position 2493 of SEQ ID NO: 1062
cgugugugcuuguggaaag

SEQ ID NO: 84705 - RNA, 19 nt, Artificial Sequence
  Description of Artificial Sequence: Synthetic oligonucleotide
  Antisense strand to SEQ ID NO: 84624
cuuuccacaagcacacacg

SEQ ID NO: 84706 - RNA, 19 nt, Artificial Sequence
  Description of Artificial Sequence: Synthetic oligonucleotide
  Sense strand starting at position 2492 of SEQ ID NO: 1062
ucgugugugcuuguggaaa

SEQ ID NO: 84707 - RNA, 19 nt, Artificial Sequence
  Description of Artificial Sequence: Synthetic oligonucleotide
  Antisense strand to SEQ ID NO: 84626
uuuccacaagcacacacga

SEQ ID NO: 84708 - RNA, 19 nt, Artificial Sequence
  Description of Artificial Sequence: Synthetic oligonucleotide
  Sense strand starting at position 2162 of SEQ ID NO: 1062
cucuuauuacgcgcuccau

SEQ ID NO: 84709 - RNA, 19 nt, Artificial Sequence
  Description of Artificial Sequence: Synthetic oligonucleotide
  Antisense strand to SEQ ID NO: 84628
auggagcgcguaauaagag

SEQ ID NO: 84710 - RNA, 19 nt, Artificial Sequence
  Description of Artificial Sequence: Synthetic oligonucleotide
  Sense strand starting at position 1350 of SEQ ID NO: 1062
gcggucaggauggaaauaa

SEQ ID NO: 84711 - RNA, 19 nt, Artificial Sequence
  Description of Artificial Sequence: Synthetic oligonucleotide
  Antisense strand to SEQ ID NO: 84630
uuauuuccauccugaccgc

SEQ ID NO: 84712 - RNA, 19 nt, Artificial Sequence
  Description of Artificial Sequence: Synthetic oligonucleotide
  Sense strand starting at position 1349 of SEQ ID NO: 1062
ggcggucaggauggaaaua

SEQ ID NO: 84713 - RNA, 19 nt, Artificial Sequence
  Description of Artificial Sequence: Synthetic oligonucleotide
  Antisense strand to SEQ ID NO: 84632
uauuuccauccugaccgcc

SEQ ID NO: 84714 - RNA, 19 nt, Artificial Sequence
  Description of Artificial Sequence: Synthetic oligonucleotide
  Sense strand starting at position 1209 of SEQ ID NO: 1062
ccucuuugugucugggaca

SEQ ID NO: 84715 - RNA, 19 nt, Artificial Sequence
  Description of Artificial Sequence: Synthetic oligonucleotide
  Antisense strand to SEQ ID NO: 84634
ugucccagacacaaagagg

SEQ ID NO: 84716 - RNA, 19 nt, Artificial Sequence
  Description of Artificial Sequence: Synthetic oligonucleotide
  Sense strand starting at position 833 of SEQ ID NO: 1062
cagcgucaguguuuccaaa

SEQ ID NO: 84717 - RNA, 19 nt, Artificial Sequence
  Description of Artificial Sequence: Synthetic oligonucleotide
  Antisense strand to SEQ ID NO: 84636
uuuggaaacacugacgcug

SEQ ID NO: 84718 - RNA, 19 nt, Artificial Sequence
  Description of Artificial Sequence: Synthetic oligonucleotide
  Sense strand starting at position 736 of SEQ ID NO: 1062
ugagcucugagcugccaaa

SEQ ID NO: 84719 - RNA, 19 nt, Artificial Sequence
  Description of Artificial Sequence: Synthetic oligonucleotide
  Antisense strand to SEQ ID NO: 84638
uuuggcagcucagagcuca

SEQ ID NO: 84720 - RNA, 19 nt, Artificial Sequence
  Description of Artificial Sequence: Synthetic oligonucleotide
  Sense strand starting at position 211 of SEQ ID NO: 1062
gaaauuaugugggcccagu

SEQ ID NO: 84721 - RNA, 19 nt, Artificial Sequence
  Description of Artificial Sequence: Synthetic oligonucleotide
  Antisense strand to SEQ ID NO: 84640
acugggcccacauaauuuc

SEQ ID NO: 84722 - RNA, 19 nt, Artificial Sequence
  Description of Artificial Sequence: Synthetic oligonucleotide
  Sense strand starting at position 133 of SEQ ID NO: 1062
gcacuuaauggccgagaga

SEQ ID NO: 84723 - RNA, 19 nt, Artificial Sequence
  Description of Artificial Sequence: Synthetic oligonucleotide
  Antisense strand to SEQ ID NO: 84642
ucucucggccauuaagugc

SEQ ID NO: 84724 - RNA, 19 nt, Artificial Sequence
  Description of Artificial Sequence: Synthetic oligonucleotide
  Sense strand starting at position 47 of SEQ ID NO: 1062
accucauguccugagcaau

SEQ ID NO: 84725 - RNA, 19 nt, Artificial Sequence
  Description of Artificial Sequence: Synthetic oligonucleotide
  Antisense strand to SEQ ID NO: 84644
auugcucaggacaugaggu

SEQ ID NO: 84726 - RNA, 19 nt, Artificial Sequence
  Description of Artificial Sequence: Synthetic oligonucleotide
  Sense strand starting at position 46 of SEQ ID NO: 1062
gaccucauguccugagcaa

SEQ ID NO: 84727 - RNA, 19 nt, Artificial Sequence
  Description of Artificial Sequence: Synthetic oligonucleotide
  Antisense strand to SEQ ID NO: 84646
uugcucaggacaugagguc

SEQ ID NO: 84728 - RNA, 19 nt, Artificial Sequence
  Description of Artificial Sequence: Synthetic oligonucleotide
  Sense strand starting at position 100 of SEQ ID NO: 1063
uuaauauggcacugaucca

SEQ ID NO: 84729 - RNA, 19 nt, Artificial Sequence
  Description of Artificial Sequence: Synthetic oligonucleotide
  Antisense strand to SEQ ID NO: 84648
uggaucagugccauauuaa

SEQ ID NO: 84730 - RNA, 19 nt, Artificial Sequence
  Description of Artificial Sequence: Synthetic oligonucleotide
  Sense strand starting at position 165 of SEQ ID NO: 1063
ucugcagcauccuuagaaa

SEQ ID NO: 84731 - RNA, 19 nt, Artificial Sequence
  Description of Artificial Sequence: Synthetic oligonucleotide
  Antisense strand to SEQ ID NO: 84650
uuucuaaggaugcugcaga

SEQ ID NO: 84732 - RNA, 19 nt, Artificial Sequence
  Description of Artificial Sequence: Synthetic oligonucleotide
  Sense strand starting at position 407 of SEQ ID NO: 1063
gcuaaugcaguuuaucuaa

SEQ ID NO: 84733 - RNA, 19 nt, Artificial Sequence
  Description of Artificial Sequence: Synthetic oligonucleotide
  Antisense strand to SEQ ID NO: 84652
uuagauaaacugcauuagc

SEQ ID NO: 84734 - RNA, 19 nt, Artificial Sequence
  Description of Artificial Sequence: Synthetic oligonucleotide
  Sense strand starting at position 673 of SEQ ID NO: 1063
agagacaggaguugguauu

SEQ ID NO: 84735 - RNA, 19 nt, Artificial Sequence
  Description of Artificial Sequence: Synthetic oligonucleotide
  Antisense strand to SEQ ID NO: 84654
aauaccaacuccugucucu

SEQ ID NO: 84736 - RNA, 19 nt, Artificial Sequence
  Description of Artificial Sequence: Synthetic oligonucleotide
  Sense strand starting at position 722 of SEQ ID NO: 1063
aguguauuggucaguggug

SEQ ID NO: 84737 - RNA, 19 nt, Artificial Sequence
  Description of Artificial Sequence: Synthetic oligonucleotide
  Antisense strand to SEQ ID NO: 84656
caccacugaccaauacacu

SEQ ID NO: 84738 - RNA, 19 nt, Artificial Sequence
  Description of Artificial Sequence: Synthetic oligonucleotide
  Sense strand starting at position 842 of SEQ ID NO: 1063
uugagaaccuaguuaguau

SEQ ID NO: 84739 - RNA, 19 nt, Artificial Sequence
  Description of Artificial Sequence: Synthetic oligonucleotide
  Antisense strand to SEQ ID NO: 84658
auacuaacuagguucucaa

SEQ ID NO: 84740 - RNA, 19 nt, Artificial Sequence
  Description of Artificial Sequence: Synthetic oligonucleotide
  Sense strand starting at position 882 of SEQ ID NO: 1063
agaaauguggcaugugaua

SEQ ID NO: 84741 - RNA, 19 nt, Artificial Sequence
  Description of Artificial Sequence: Synthetic oligonucleotide
  Antisense strand to SEQ ID NO: 84660
uaucacaugccacauuucu

SEQ ID NO: 84742 - RNA, 19 nt, Artificial Sequence
  Description of Artificial Sequence: Synthetic oligonucleotide
  Sense strand starting at position 889 of SEQ ID NO: 1063
uggcaugugauauauggga

SEQ ID NO: 84743 - RNA, 19 nt, Artificial Sequence
  Description of Artificial Sequence: Synthetic oligonucleotide
  Antisense strand to SEQ ID NO: 84662
ucccauauaucacaugcca

SEQ ID NO: 84744 - RNA, 19 nt, Artificial Sequence
  Description of Artificial Sequence: Synthetic oligonucleotide
  Sense strand starting at position 891 of SEQ ID NO: 1063
gcaugugauauaugggaug

SEQ ID NO: 84745 - RNA, 19 nt, Artificial Sequence
  Description of Artificial Sequence: Synthetic oligonucleotide
  Antisense strand to SEQ ID NO: 84664
caucccauauaucacaugc

SEQ ID NO: 84746 - RNA, 19 nt, Artificial Sequence
  Description of Artificial Sequence: Synthetic oligonucleotide
  Sense strand starting at position 923 of SEQ ID NO: 1063
auacuaaauucgcugaaau

SEQ ID NO: 84747 - RNA, 19 nt, Artificial Sequence
  Description of Artificial Sequence: Synthetic oligonucleotide
  Antisense strand to SEQ ID NO: 84666
auuucagcgaauuuaguau

SEQ ID NO: 84748 - RNA, 19 nt, Artificial Sequence
  Description of Artificial Sequence: Synthetic oligonucleotide
  Sense strand starting at position 925 of SEQ ID NO: 1063
acuaaauucgcugaaauac

SEQ ID NO: 84749 - RNA, 19 nt, Artificial Sequence
  Description of Artificial Sequence: Synthetic oligonucleotide
  Antisense strand to SEQ ID NO: 84668
guauuucagcgaauuuagu

SEQ ID NO: 84750 - RNA, 19 nt, Artificial Sequence
  Description of Artificial Sequence: Synthetic oligonucleotide
  Sense strand starting at position 996 of SEQ ID NO: 1063
gcaguaaugcuauaaauaa

SEQ ID NO: 84751 - RNA, 19 nt, Artificial Sequence
  Description of Artificial Sequence: Synthetic oligonucleotide
  Antisense strand to SEQ ID NO: 84670
uuauuuauagcauuacugc

SEQ ID NO: 84752 - RNA, 19 nt, Artificial Sequence
  Description of Artificial Sequence: Synthetic oligonucleotide
  Sense strand starting at position 1076 of SEQ ID NO: 1063
ugagacauauauucuguuu

SEQ ID NO: 84753 - RNA, 19 nt, Artificial Sequence
  Description of Artificial Sequence: Synthetic oligonucleotide
  Antisense strand to SEQ ID NO: 84672
aaacagaauauaugucuca

SEQ ID NO: 84754 - RNA, 19 nt, Artificial Sequence
  Description of Artificial Sequence: Synthetic oligonucleotide
  Sense strand starting at position 1298 of SEQ ID NO: 1063
guagauaccuacucaagac

SEQ ID NO: 84755 - RNA, 19 nt, Artificial Sequence
  Description of Artificial Sequence: Synthetic oligonucleotide
  Antisense strand to SEQ ID NO: 84674
gucuugaguagguaucuac

SEQ ID NO: 84756 - RNA, 19 nt, Artificial Sequence
  Description of Artificial Sequence: Synthetic oligonucleotide
  Sense strand starting at position 1532 of SEQ ID NO: 1063
gcaccaaaugaaugcaaua

SEQ ID NO: 84757 - RNA, 19 nt, Artificial Sequence
  Description of Artificial Sequence: Synthetic oligonucleotide
  Antisense strand to SEQ ID NO: 84676
uauugcauucauuuggugc

SEQ ID NO: 84758 - RNA, 19 nt, Artificial Sequence
  Description of Artificial Sequence: Synthetic oligonucleotide
  Sense strand starting at position 1815 of SEQ ID NO: 1063
gcagcaaaucucgaaaccu

SEQ ID NO: 84759 - RNA, 19 nt, Artificial Sequence
  Description of Artificial Sequence: Synthetic oligonucleotide
  Antisense strand to SEQ ID NO: 84678
agguuucgagauuugcugc

SEQ ID NO: 84760 - RNA, 19 nt, Artificial Sequence
  Description of Artificial Sequence: Synthetic oligonucleotide
  Sense strand starting at position 2272 of SEQ ID NO: 1063
ggagugagcgccgcuugau

SEQ ID NO: 84761 - RNA, 19 nt, Artificial Sequence
  Description of Artificial Sequence: Synthetic oligonucleotide
  Antisense strand to SEQ ID NO: 84680
aucaagcggcgcucacucc

SEQ ID NO: 84762 - RNA, 19 nt, Artificial Sequence
  Description of Artificial Sequence: Synthetic oligonucleotide
  Sense strand starting at position 2450 of SEQ ID NO: 1063
gcaaucucccuguggagau

SEQ ID NO: 84763 - RNA, 19 nt, Artificial Sequence
  Description of Artificial Sequence: Synthetic oligonucleotide
  Antisense strand to SEQ ID NO: 84682
aucuccacagggagauugc

SEQ ID NO: 84764 - RNA, 19 nt, Artificial Sequence
  Description of Artificial Sequence: Synthetic oligonucleotide
  Sense strand starting at position 2692 of SEQ ID NO: 1063
gcacguuucuggaaaggga

SEQ ID NO: 84765 - RNA, 19 nt, Artificial Sequence
  Description of Artificial Sequence: Synthetic oligonucleotide
  Antisense strand to SEQ ID NO: 84684
ucccuuuccagaaacgugc

SEQ ID NO: 84766 - RNA, 19 nt, Artificial Sequence
  Description of Artificial Sequence: Synthetic oligonucleotide
  Sense strand starting at position 2766 of SEQ ID NO: 1063
ggagguguuucccugaacu

SEQ ID NO: 84767 - RNA, 19 nt, Artificial Sequence
  Description of Artificial Sequence: Synthetic oligonucleotide
  Antisense strand to SEQ ID NO: 84686
aguucagggaaacaccucc

SEQ ID NO: 84768 - RNA, 19 nt, Artificial Sequence
  Description of Artificial Sequence: Synthetic oligonucleotide
  Sense strand starting at position 2824 of SEQ ID NO: 1063
gcauuuagaugacagggaa

SEQ ID NO: 84769 - RNA, 19 nt, Artificial Sequence
  Description of Artificial Sequence: Synthetic oligonucleotide
  Antisense strand to SEQ ID NO: 84688
uucccugucaucuaaaugc

SEQ ID NO: 84770 - RNA, 19 nt, Artificial Sequence
  Description of Artificial Sequence: Synthetic oligonucleotide
  Sense strand starting at position 2962 of SEQ ID NO: 1063
agugguucacacggaggaa

SEQ ID NO: 84771 - RNA, 19 nt, Artificial Sequence
  Description of Artificial Sequence: Synthetic oligonucleotide
  Antisense strand to SEQ ID NO: 84690
uuccuccgugugaaccacu

SEQ ID NO: 84772 - RNA, 19 nt, Artificial Sequence
  Description of Artificial Sequence: Synthetic oligonucleotide
  Sense strand starting at position 3090 of SEQ ID NO: 1063
aacugauugcaucagagua

SEQ ID NO: 84773 - RNA, 19 nt, Artificial Sequence
  Description of Artificial Sequence: Synthetic oligonucleotide
  Antisense strand to SEQ ID NO: 84692
uacucugaugcaaucaguu

SEQ ID NO: 84774 - RNA, 19 nt, Artificial Sequence
  Description of Artificial Sequence: Synthetic oligonucleotide
  Sense strand starting at position 3095 of SEQ ID NO: 1063
auugcaucagaguauauac

SEQ ID NO: 84775 - RNA, 19 nt, Artificial Sequence
  Description of Artificial Sequence: Synthetic oligonucleotide
  Antisense strand to SEQ ID NO: 84694
guauauacucugaugcaau

SEQ ID NO: 84776 - RNA, 19 nt, Artificial Sequence
  Description of Artificial Sequence: Synthetic oligonucleotide
  Sense strand starting at position 3202 of SEQ ID NO: 1063
gaacaagcuuguuccuuga

SEQ ID NO: 84777 - RNA, 19 nt, Artificial Sequence
  Description of Artificial Sequence: Synthetic oligonucleotide
  Antisense strand to SEQ ID NO: 84696
ucaaggaacaagcuuguuc

SEQ ID NO: 84778 - RNA, 19 nt, Artificial Sequence
  Description of Artificial Sequence: Synthetic oligonucleotide
  Sense strand starting at position 3204 of SEQ ID NO: 1063
acaagcuuguuccuugaua

SEQ ID NO: 84779 - RNA, 19 nt, Artificial Sequence
  Description of Artificial Sequence: Synthetic oligonucleotide
  Antisense strand to SEQ ID NO: 84698
uaucaaggaacaagcuugu

SEQ ID NO: 84780 - RNA, 19 nt, Artificial Sequence
  Description of Artificial Sequence: Synthetic oligonucleotide
  Sense strand starting at position 3224 of SEQ ID NO: 1063
auggauacgaugugagaga

SEQ ID NO: 84781 - RNA, 19 nt, Artificial Sequence
  Description of Artificial Sequence: Synthetic oligonucleotide
  Antisense strand to SEQ ID NO: 84700
ucucucacaucguauccau

SEQ ID NO: 84782 - RNA, 19 nt, Artificial Sequence
  Description of Artificial Sequence: Synthetic oligonucleotide
  Sense strand starting at position 3271 of SEQ ID NO: 1063
uggaaauaccugugaggua

SEQ ID NO: 84783 - RNA, 19 nt, Artificial Sequence
  Description of Artificial Sequence: Synthetic oligonucleotide
  Antisense strand to SEQ ID NO: 84702
uaccucacagguauuucca

SEQ ID NO: 84784 - RNA, 19 nt, Artificial Sequence
  Description of Artificial Sequence: Synthetic oligonucleotide
  Sense strand starting at position 3289 of SEQ ID NO: 1063
acacauacuucuucgaggu

SEQ ID NO: 84785 - RNA, 19 nt, Artificial Sequence
  Description of Artificial Sequence: Synthetic oligonucleotide
  Antisense strand to SEQ ID NO: 84704
accucgaagaaguaugugu

SEQ ID NO: 84786 - RNA, 19 nt, Artificial Sequence
  Description of Artificial Sequence: Synthetic oligonucleotide
  Sense strand starting at position 3460 of SEQ ID NO: 1063
ugauuaauuuggcaugauu

SEQ ID NO: 84787 - RNA, 19 nt, Artificial Sequence
  Description of Artificial Sequence: Synthetic oligonucleotide
  Antisense strand to SEQ ID NO: 84706
aaucaugccaaauuaauca

SEQ ID NO: 84788 - RNA, 19 nt, Artificial Sequence
  Description of Artificial Sequence: Synthetic oligonucleotide
  Sense strand starting at position 3472 of SEQ ID NO: 1063
caugauuaaugcucaguag

SEQ ID NO: 84789 - RNA, 19 nt, Artificial Sequence
  Description of Artificial Sequence: Synthetic oligonucleotide
  Antisense strand to SEQ ID NO: 84708
cuacugagcauuaaucaug

SEQ ID NO: 84790 - RNA, 19 nt, Artificial Sequence
  Description of Artificial Sequence: Synthetic oligonucleotide
  Sense strand starting at position 3473 of SEQ ID NO: 1063
augauuaaugcucaguaga

SEQ ID NO: 84791 - RNA, 19 nt, Artificial Sequence
  Description of Artificial Sequence: Synthetic oligonucleotide
  Antisense strand to SEQ ID NO: 84710
ucuacugagcauuaaucau

SEQ ID NO: 84792 - RNA, 19 nt, Artificial Sequence
  Description of Artificial Sequence: Synthetic oligonucleotide
  Sense strand starting at position 3475 of SEQ ID NO: 1063
gauuaaugcucaguagagg

SEQ ID NO: 84793 - RNA, 19 nt, Artificial Sequence
  Description of Artificial Sequence: Synthetic oligonucleotide
  Antisense strand to SEQ ID NO: 84712
ccucuacugagcauuaauc

SEQ ID NO: 84794 - RNA, 19 nt, Artificial Sequence
  Description of Artificial Sequence: Synthetic oligonucleotide
  Sense strand starting at position 3476 of SEQ ID NO: 1063
auuaaugcucaguagaggu

SEQ ID NO: 84795 - RNA, 19 nt, Artificial Sequence
  Description of Artificial Sequence: Synthetic oligonucleotide
  Antisense strand to SEQ ID NO: 84714
accucuacugagcauuaau

SEQ ID NO: 84796 - RNA, 19 nt, Artificial Sequence
  Description of Artificial Sequence: Synthetic oligonucleotide
  Sense strand starting at position 3494 of SEQ ID NO: 1063
ucauguagcagaggguuua

SEQ ID NO: 84797 - RNA, 19 nt, Artificial Sequence
  Description of Artificial Sequence: Synthetic oligonucleotide
  Antisense strand to SEQ ID NO: 84716
uaaacccucugcuacauga

SEQ ID NO: 84798 - RNA, 19 nt, Artificial Sequence
  Description of Artificial Sequence: Synthetic oligonucleotide
  Sense strand starting at position 3506 of SEQ ID NO: 1063
ggguuuauuuaagaagcua

SEQ ID NO: 84799 - RNA, 19 nt, Artificial Sequence
  Description of Artificial Sequence: Synthetic oligonucleotide
  Antisense strand to SEQ ID NO: 84718
uagcuucuuaaauaaaccc

SEQ ID NO: 84800 - RNA, 19 nt, Artificial Sequence
  Description of Artificial Sequence: Synthetic oligonucleotide
  Sense strand starting at position 3775 of SEQ ID NO: 1063
cuggaaugcuuacuauaac

SEQ ID NO: 84801 - RNA, 19 nt, Artificial Sequence
  Description of Artificial Sequence: Synthetic oligonucleotide
  Antisense strand to SEQ ID NO: 84720
guuauaguaagcauuccag

SEQ ID NO: 84802 - RNA, 19 nt, Artificial Sequence
  Description of Artificial Sequence: Synthetic oligonucleotide
  Sense strand starting at position 3896 of SEQ ID NO: 1063
aacaaauagguguggaguu

SEQ ID NO: 84803 - RNA, 19 nt, Artificial Sequence
  Description of Artificial Sequence: Synthetic oligonucleotide
  Antisense strand to SEQ ID NO: 84722
aacuccacaccuauuuguu

SEQ ID NO: 84804 - RNA, 19 nt, Artificial Sequence
  Description of Artificial Sequence: Synthetic oligonucleotide
  Sense strand starting at position 3934 of SEQ ID NO: 1063
cuaggaaauuaagcauguu

SEQ ID NO: 84805 - RNA, 19 nt, Artificial Sequence
  Description of Artificial Sequence: Synthetic oligonucleotide
  Antisense strand to SEQ ID NO: 84724
aacaugcuuaauuuccuag

SEQ ID NO: 84806 - RNA, 19 nt, Artificial Sequence
  Description of Artificial Sequence: Synthetic oligonucleotide
  Sense strand starting at position 3966 of SEQ ID NO: 1063
gcuugcacuccugugguau

SEQ ID NO: 84807 - RNA, 19 nt, Artificial Sequence
  Description of Artificial Sequence: Synthetic oligonucleotide
  Antisense strand to SEQ ID NO: 84726
auaccacaggagugcaagc

SEQ ID NO: 84808 - RNA, 19 nt, Artificial Sequence
  Description of Artificial Sequence: Synthetic oligonucleotide
  Sense strand starting at position 3939 of SEQ ID NO: 1064
acuucuugauauguccaga

SEQ ID NO: 84809 - RNA, 19 nt, Artificial Sequence
  Description of Artificial Sequence: Synthetic oligonucleotide
  Antisense strand to SEQ ID NO: 84728
ucuggacauaucaagaagu

SEQ ID NO: 84810 - RNA, 19 nt, Artificial Sequence
  Description of Artificial Sequence: Synthetic oligonucleotide
  Sense strand starting at position 3934 of SEQ ID NO: 1064
ucaugacuucuugauaugu

SEQ ID NO: 84811 - RNA, 19 nt, Artificial Sequence
  Description of Artificial Sequence: Synthetic oligonucleotide
  Antisense strand to SEQ ID NO: 84730
acauaucaagaagucauga

SEQ ID NO: 84812 - RNA, 19 nt, Artificial Sequence
  Description of Artificial Sequence: Synthetic oligonucleotide
  Sense strand starting at position 3932 of SEQ ID NO: 1064
ggucaugacuucuugauau

SEQ ID NO: 84813 - RNA, 19 nt, Artificial Sequence
  Description of Artificial Sequence: Synthetic oligonucleotide
  Antisense strand to SEQ ID NO: 84732
auaucaagaagucaugacc

SEQ ID NO: 84814 - RNA, 19 nt, Artificial Sequence
  Description of Artificial Sequence: Synthetic oligonucleotide
  Sense strand starting at position 3758 of SEQ ID NO: 1064
gcaaguuggaguuagaaua

SEQ ID NO: 84815 - RNA, 19 nt, Artificial Sequence
  Description of Artificial Sequence: Synthetic oligonucleotide
  Antisense strand to SEQ ID NO: 84734
uauucuaacuccaacuugc

SEQ ID NO: 84816 - RNA, 19 nt, Artificial Sequence
  Description of Artificial Sequence: Synthetic oligonucleotide
  Sense strand starting at position 3720 of SEQ ID NO: 1064
augaaagaauaguugcuaa

SEQ ID NO: 84817 - RNA, 19 nt, Artificial Sequence
  Description of Artificial Sequence: Synthetic oligonucleotide
  Antisense strand to SEQ ID NO: 84736
uuagcaacuauucuuucau

SEQ ID NO: 84818 - RNA, 19 nt, Artificial Sequence
  Description of Artificial Sequence: Synthetic oligonucleotide
  Sense strand starting at position 3410 of SEQ ID NO: 1064
gaugaauugucuuuggcca

SEQ ID NO: 84819 - RNA, 19 nt, Artificial Sequence
  Description of Artificial Sequence: Synthetic oligonucleotide
  Antisense strand to SEQ ID NO: 84738
uggccaaagacaauucauc

SEQ ID NO: 84820 - RNA, 19 nt, Artificial Sequence
  Description of Artificial Sequence: Synthetic oligonucleotide
  Sense strand starting at position 3283 of SEQ ID NO: 1064
acugcauuguaccucauua

SEQ ID NO: 84821 - RNA, 19 nt, Artificial Sequence
  Description of Artificial Sequence: Synthetic oligonucleotide
  Antisense strand to SEQ ID NO: 84740
uaaugagguacaaugcagu

SEQ ID NO: 84822 - RNA, 19 nt, Artificial Sequence
  Description of Artificial Sequence: Synthetic oligonucleotide
  Sense strand starting at position 3074 of SEQ ID NO: 1064
gcuaauuuguguuuaucau

SEQ ID NO: 84823 - RNA, 19 nt, Artificial Sequence
  Description of Artificial Sequence: Synthetic oligonucleotide
  Antisense strand to SEQ ID NO: 84742
augauaaacacaaauuagc

SEQ ID NO: 84824 - RNA, 19 nt, Artificial Sequence
  Description of Artificial Sequence: Synthetic oligonucleotide
  Sense strand starting at position 3051 of SEQ ID NO: 1064
aguugaugauaagcuuaau

SEQ ID NO: 84825 - RNA, 19 nt, Artificial Sequence
  Description of Artificial Sequence: Synthetic oligonucleotide
  Antisense strand to SEQ ID NO: 84744
auuaagcuuaucaucaacu

SEQ ID NO: 84826 - RNA, 19 nt, Artificial Sequence
  Description of Artificial Sequence: Synthetic oligonucleotide
  Sense strand starting at position 3015 of SEQ ID NO: 1064
aguacauauggauguaaga

SEQ ID NO: 84827 - RNA, 19 nt, Artificial Sequence
  Description of Artificial Sequence: Synthetic oligonucleotide
  Antisense strand to SEQ ID NO: 84746
ucuuacauccauauguacu

SEQ ID NO: 84828 - RNA, 19 nt, Artificial Sequence
  Description of Artificial Sequence: Synthetic oligonucleotide
  Sense strand starting at position 2996 of SEQ ID NO: 1064
cgacuugaaagauguuaau

SEQ ID NO: 84829 - RNA, 19 nt, Artificial Sequence
  Description of Artificial Sequence: Synthetic oligonucleotide
  Antisense strand to SEQ ID NO: 84748
auuaacaucuuucaagucg

SEQ ID NO: 84830 - RNA, 19 nt, Artificial Sequence
  Description of Artificial Sequence: Synthetic oligonucleotide
  Sense strand starting at position 2994 of SEQ ID NO: 1064
uucgacuugaaagauguua

SEQ ID NO: 84831 - RNA, 19 nt, Artificial Sequence
  Description of Artificial Sequence: Synthetic oligonucleotide
  Antisense strand to SEQ ID NO: 84750
uaacaucuuucaagucgaa

SEQ ID NO: 84832 - RNA, 19 nt, Artificial Sequence
  Description of Artificial Sequence: Synthetic oligonucleotide
  Sense strand starting at position 2989 of SEQ ID NO: 1064
cuagauucgacuugaaaga

SEQ ID NO: 84833 - RNA, 19 nt, Artificial Sequence
  Description of Artificial Sequence: Synthetic oligonucleotide
  Antisense strand to SEQ ID NO: 84752
ucuuucaagucgaaucuag

SEQ ID NO: 84834 - RNA, 19 nt, Artificial Sequence
  Description of Artificial Sequence: Synthetic oligonucleotide
  Sense strand starting at position 2980 of SEQ ID NO: 1064
augcucuaucuagauucga

SEQ ID NO: 84835 - RNA, 19 nt, Artificial Sequence
  Description of Artificial Sequence: Synthetic oligonucleotide
  Antisense strand to SEQ ID NO: 84754
ucgaaucuagauagagcau

SEQ ID NO: 84836 - RNA, 19 nt, Artificial Sequence
  Description of Artificial Sequence: Synthetic oligonucleotide
  Sense strand starting at position 2974 of SEQ ID NO: 1064
ugugauaugcucuaucuag

SEQ ID NO: 84837 - RNA, 19 nt, Artificial Sequence
  Description of Artificial Sequence: Synthetic oligonucleotide
  Antisense strand to SEQ ID NO: 84756
cuagauagagcauaucaca

SEQ ID NO: 84838 - RNA, 19 nt, Artificial Sequence
  Description of Artificial Sequence: Synthetic oligonucleotide
  Sense strand starting at position 2883 of SEQ ID NO: 1064
cugauaauguaucugaugu

SEQ ID NO: 84839 - RNA, 19 nt, Artificial Sequence
  Description of Artificial Sequence: Synthetic oligonucleotide
  Antisense strand to SEQ ID NO: 84758
acaucagauacauuaucag

SEQ ID NO: 84840 - RNA, 19 nt, Artificial Sequence
  Description of Artificial Sequence: Synthetic oligonucleotide
  Sense strand starting at position 2686 of SEQ ID NO: 1064
ugcuuuaaacgguaucuau

SEQ ID NO: 84841 - RNA, 19 nt, Artificial Sequence
  Description of Artificial Sequence: Synthetic oligonucleotide
  Antisense strand to SEQ ID NO: 84760
auagauaccguuuaaagca

SEQ ID NO: 84842 - RNA, 19 nt, Artificial Sequence
  Description of Artificial Sequence: Synthetic oligonucleotide
  Sense strand starting at position 2662 of SEQ ID NO: 1064
ugcgcuuguuuauuuauuu

SEQ ID NO: 84843 - RNA, 19 nt, Artificial Sequence
  Description of Artificial Sequence: Synthetic oligonucleotide
  Antisense strand to SEQ ID NO: 84762
aaauaaauaaacaagcgca

SEQ ID NO: 84844 - RNA, 19 nt, Artificial Sequence
  Description of Artificial Sequence: Synthetic oligonucleotide
  Sense strand starting at position 2659 of SEQ ID NO: 1064
uuaugcgcuuguuuauuua

SEQ ID NO: 84845 - RNA, 19 nt, Artificial Sequence
  Description of Artificial Sequence: Synthetic oligonucleotide
  Antisense strand to SEQ ID NO: 84764
uaaauaaacaagcgcauaa

SEQ ID NO: 84846 - RNA, 19 nt, Artificial Sequence
  Description of Artificial Sequence: Synthetic oligonucleotide
  Sense strand starting at position 2536 of SEQ ID NO: 1064
guuuguuaagcaggaagga

SEQ ID NO: 84847 - RNA, 19 nt, Artificial Sequence
  Description of Artificial Sequence: Synthetic oligonucleotide
  Antisense strand to SEQ ID NO: 84766
uccuuccugcuuaacaaac

SEQ ID NO: 84848 - RNA, 19 nt, Artificial Sequence
  Description of Artificial Sequence: Synthetic oligonucleotide
  Sense strand starting at position 2533 of SEQ ID NO: 1064
uuuguuuguuaagcaggaa

SEQ ID NO: 84849 - RNA, 19 nt, Artificial Sequence
  Description of Artificial Sequence: Synthetic oligonucleotide
  Antisense strand to SEQ ID NO: 84768
uuccugcuuaacaaacaaa

SEQ ID NO: 84850 - RNA, 19 nt, Artificial Sequence
  Description of Artificial Sequence: Synthetic oligonucleotide
  Sense strand starting at position 2416 of SEQ ID NO: 1064
cagggaacauuuggagauu

SEQ ID NO: 84851 - RNA, 19 nt, Artificial Sequence
  Description of Artificial Sequence: Synthetic oligonucleotide
  Antisense strand to SEQ ID NO: 84770
aaucuccaaauguucccug

SEQ ID NO: 84852 - RNA, 19 nt, Artificial Sequence
  Description of Artificial Sequence: Synthetic oligonucleotide
  Sense strand starting at position 2396 of SEQ ID NO: 1064
aaauguagacagugcaaau

SEQ ID NO: 84853 - RNA, 19 nt, Artificial Sequence
  Description of Artificial Sequence: Synthetic oligonucleotide
  Antisense strand to SEQ ID NO: 84772
auuugcacugucuacauuu

SEQ ID NO: 84854 - RNA, 19 nt, Artificial Sequence
  Description of Artificial Sequence: Synthetic oligonucleotide
  Sense strand starting at position 2383 of SEQ ID NO: 1064
aaaguugaugccuaaaugu

SEQ ID NO: 84855 - RNA, 19 nt, Artificial Sequence
  Description of Artificial Sequence: Synthetic oligonucleotide
  Antisense strand to SEQ ID NO: 84774
acauuuaggcaucaacuuu

SEQ ID NO: 84856 - RNA, 19 nt, Artificial Sequence
  Description of Artificial Sequence: Synthetic oligonucleotide
  Sense strand starting at position 2332 of SEQ ID NO: 1064
ccacuuugucaacauggau

SEQ ID NO: 84857 - RNA, 19 nt, Artificial Sequence
  Description of Artificial Sequence: Synthetic oligonucleotide
  Antisense strand to SEQ ID NO: 84776
auccauguugacaaagugg

SEQ ID NO: 84858 - RNA, 19 nt, Artificial Sequence
  Description of Artificial Sequence: Synthetic oligonucleotide
  Sense strand starting at position 2319 of SEQ ID NO: 1064
ggaucuuuaugacccacuu

SEQ ID NO: 84859 - RNA, 19 nt, Artificial Sequence
  Description of Artificial Sequence: Synthetic oligonucleotide
  Antisense strand to SEQ ID NO: 84778
aagugggucauaaagaucc

SEQ ID NO: 84860 - RNA, 19 nt, Artificial Sequence
  Description of Artificial Sequence: Synthetic oligonucleotide
  Sense strand starting at position 2304 of SEQ ID NO: 1064
gggcaaacgaucuacggau

SEQ ID NO: 84861 - RNA, 19 nt, Artificial Sequence
  Description of Artificial Sequence: Synthetic oligonucleotide
  Antisense strand to SEQ ID NO: 84780
auccguagaucguuugccc

SEQ ID NO: 84862 - RNA, 19 nt, Artificial Sequence
  Description of Artificial Sequence: Synthetic oligonucleotide
  Sense strand starting at position 2295 of SEQ ID NO: 1064
ggcagaucugggcaaacga

SEQ ID NO: 84863 - RNA, 19 nt, Artificial Sequence
  Description of Artificial Sequence: Synthetic oligonucleotide
  Antisense strand to SEQ ID NO: 84782
ucguuugcccagaucugcc

SEQ ID NO: 84864 - RNA, 19 nt, Artificial Sequence
  Description of Artificial Sequence: Synthetic oligonucleotide
  Sense strand starting at position 2276 of SEQ ID NO: 1064
agcugauucgcagauugag

SEQ ID NO: 84865 - RNA, 19 nt, Artificial Sequence
  Description of Artificial Sequence: Synthetic oligonucleotide
  Antisense strand to SEQ ID NO: 84784
cucaaucugcgaaucagcu

SEQ ID NO: 84866 - RNA, 19 nt, Artificial Sequence
  Description of Artificial Sequence: Synthetic oligonucleotide
  Sense strand starting at position 1309 of SEQ ID NO: 1064
uaaggaaggcuguguaaug

SEQ ID NO: 84867 - RNA, 19 nt, Artificial Sequence
  Description of Artificial Sequence: Synthetic oligonucleotide
  Antisense strand to SEQ ID NO: 84786
cauuacacagccuuccuua

SEQ ID NO: 84868 - RNA, 19 nt, Artificial Sequence
  Description of Artificial Sequence: Synthetic oligonucleotide
  Sense strand starting at position 1292 of SEQ ID NO: 1064
ucuaaucugagaugaggua

SEQ ID NO: 84869 - RNA, 19 nt, Artificial Sequence
  Description of Artificial Sequence: Synthetic oligonucleotide
  Antisense strand to SEQ ID NO: 84788
uaccucaucucagauuaga

SEQ ID NO: 84870 - RNA, 19 nt, Artificial Sequence
  Description of Artificial Sequence: Synthetic oligonucleotide
  Sense strand starting at position 1175 of SEQ ID NO: 1064
cgcacucuucccuaagaaa

SEQ ID NO: 84871 - RNA, 19 nt, Artificial Sequence
  Description of Artificial Sequence: Synthetic oligonucleotide
  Antisense strand to SEQ ID NO: 84790
uuucuuagggaagagugcg

SEQ ID NO: 84872 - RNA, 19 nt, Artificial Sequence
  Description of Artificial Sequence: Synthetic oligonucleotide
  Sense strand starting at position 1174 of SEQ ID NO: 1064
ccgcacucuucccuaagaa

SEQ ID NO: 84873 - RNA, 19 nt, Artificial Sequence
  Description of Artificial Sequence: Synthetic oligonucleotide
  Antisense strand to SEQ ID NO: 84792
uucuuagggaagagugcgg

SEQ ID NO: 84874 - RNA, 19 nt, Artificial Sequence
  Description of Artificial Sequence: Synthetic oligonucleotide
  Sense strand starting at position 1023 of SEQ ID NO: 1064
uggacacacuguccuagaa

SEQ ID NO: 84875 - RNA, 19 nt, Artificial Sequence
  Description of Artificial Sequence: Synthetic oligonucleotide
  Antisense strand to SEQ ID NO: 84794
uucuaggacagugugucca

SEQ ID NO: 84876 - RNA, 19 nt, Artificial Sequence
  Description of Artificial Sequence: Synthetic oligonucleotide
  Sense strand starting at position 727 of SEQ ID NO: 1064
agcauuuccuuguuuaucu

SEQ ID NO: 84877 - RNA, 19 nt, Artificial Sequence
  Description of Artificial Sequence: Synthetic oligonucleotide
  Antisense strand to SEQ ID NO: 84796
agauaaacaaggaaaugcu

SEQ ID NO: 84878 - RNA, 19 nt, Artificial Sequence
  Description of Artificial Sequence: Synthetic oligonucleotide
  Sense strand starting at position 725 of SEQ ID NO: 1064
agagcauuuccuuguuuau

SEQ ID NO: 84879 - RNA, 19 nt, Artificial Sequence
  Description of Artificial Sequence: Synthetic oligonucleotide
  Antisense strand to SEQ ID NO: 84798
auaaacaaggaaaugcucu

SEQ ID NO: 84880 - RNA, 19 nt, Artificial Sequence
  Description of Artificial Sequence: Synthetic oligonucleotide
  Sense strand starting at position 595 of SEQ ID NO: 1064
gcuaucaaauguuuaggau

SEQ ID NO: 84881 - RNA, 19 nt, Artificial Sequence
  Description of Artificial Sequence: Synthetic oligonucleotide
  Antisense strand to SEQ ID NO: 84800
auccuaaacauuugauagc

SEQ ID NO: 84882 - RNA, 19 nt, Artificial Sequence
  Description of Artificial Sequence: Synthetic oligonucleotide
  Sense strand starting at position 579 of SEQ ID NO: 1064
uguuaaauucuagaaagcu

SEQ ID NO: 84883 - RNA, 19 nt, Artificial Sequence
  Description of Artificial Sequence: Synthetic oligonucleotide
  Antisense strand to SEQ ID NO: 84802
agcuuucuagaauuuaaca

SEQ ID NO: 84884 - RNA, 19 nt, Artificial Sequence
  Description of Artificial Sequence: Synthetic oligonucleotide
  Sense strand starting at position 475 of SEQ ID NO: 1064
ccauaagacugguuucuau

SEQ ID NO: 84885 - RNA, 19 nt, Artificial Sequence
  Description of Artificial Sequence: Synthetic oligonucleotide
  Antisense strand to SEQ ID NO: 84804
auagaaaccagucuuaugg

SEQ ID NO: 84886 - RNA, 19 nt, Artificial Sequence
  Description of Artificial Sequence: Synthetic oligonucleotide
  Sense strand starting at position 316 of SEQ ID NO: 1064
caguguagggauuguaaau

SEQ ID NO: 84887 - RNA, 19 nt, Artificial Sequence
  Description of Artificial Sequence: Synthetic oligonucleotide
  Antisense strand to SEQ ID NO: 84806
auuuacaaucccuacacug

SEQ ID NO: 84888 - RNA, 19 nt, Artificial Sequence
  Description of Artificial Sequence: Synthetic oligonucleotide
  Sense strand starting at position 69 of SEQ ID NO: 1065
ccucaaccucaggaguuua

SEQ ID NO: 84889 - RNA, 19 nt, Artificial Sequence
  Description of Artificial Sequence: Synthetic oligonucleotide
  Antisense strand to SEQ ID NO: 84808
uaaacuccugagguugagg

SEQ ID NO: 84890 - RNA, 19 nt, Artificial Sequence
  Description of Artificial Sequence: Synthetic oligonucleotide
  Sense strand starting at position 84 of SEQ ID NO: 1065
uuuacaauccagugagagu

SEQ ID NO: 84891 - RNA, 19 nt, Artificial Sequence
  Description of Artificial Sequence: Synthetic oligonucleotide
  Antisense strand to SEQ ID NO: 84810
acucucacuggauuguaaa

SEQ ID NO: 84892 - RNA, 19 nt, Artificial Sequence
  Description of Artificial Sequence: Synthetic oligonucleotide
  Sense strand starting at position 91 of SEQ ID NO: 1065
uccagugagaguugauuau

SEQ ID NO: 84893 - RNA, 19 nt, Artificial Sequence
  Description of Artificial Sequence: Synthetic oligonucleotide
  Antisense strand to SEQ ID NO: 84812
auaaucaacucucacugga

SEQ ID NO: 84894 - RNA, 19 nt, Artificial Sequence
  Description of Artificial Sequence: Synthetic oligonucleotide
  Sense strand starting at position 95 of SEQ ID NO: 1065
gugagaguugauuauugau

SEQ ID NO: 84895 - RNA, 19 nt, Artificial Sequence
  Description of Artificial Sequence: Synthetic oligonucleotide
  Antisense strand to SEQ ID NO: 84814
aucaauaaucaacucucac

SEQ ID NO: 84896 - RNA, 19 nt, Artificial Sequence
  Description of Artificial Sequence: Synthetic oligonucleotide
  Sense strand starting at position 111 of SEQ ID NO: 1065
gauggcuuacacuguucua

SEQ ID NO: 84897 - RNA, 19 nt, Artificial Sequence
  Description of Artificial Sequence: Synthetic oligonucleotide
  Antisense strand to SEQ ID NO: 84816
uagaacaguguaagccauc

SEQ ID NO: 84898 - RNA, 19 nt, Artificial Sequence
  Description of Artificial Sequence: Synthetic oligonucleotide
  Sense strand starting at position 460 of SEQ ID NO: 1065
ugaggauggacuggcuauu

SEQ ID NO: 84899 - RNA, 19 nt, Artificial Sequence
  Description of Artificial Sequence: Synthetic oligonucleotide
  Antisense strand to SEQ ID NO: 84818
aauagccaguccauccuca

SEQ ID NO: 84900 - RNA, 19 nt, Artificial Sequence
  Description of Artificial Sequence: Synthetic oligonucleotide
  Sense strand starting at position 1005 of SEQ ID NO: 1065
uguggcuugaggcaagauu

SEQ ID NO: 84901 - RNA, 19 nt, Artificial Sequence
  Description of Artificial Sequence: Synthetic oligonucleotide
  Antisense strand to SEQ ID NO: 84820
aaucuugccucaagccaca

SEQ ID NO: 84902 - RNA, 19 nt, Artificial Sequence
  Description of Artificial Sequence: Synthetic oligonucleotide
  Sense strand starting at position 1078 of SEQ ID NO: 1065
cgccaaucccgugagauuu

SEQ ID NO: 84903 - RNA, 19 nt, Artificial Sequence
  Description of Artificial Sequence: Synthetic oligonucleotide
  Antisense strand to SEQ ID NO: 84822
aaaucucacgggauuggcg

SEQ ID NO: 84904 - RNA, 19 nt, Artificial Sequence
  Description of Artificial Sequence: Synthetic oligonucleotide
  Sense strand starting at position 1080 of SEQ ID NO: 1065
ccaaucccgugagauuuaa

SEQ ID NO: 84905 - RNA, 19 nt, Artificial Sequence
  Description of Artificial Sequence: Synthetic oligonucleotide
  Antisense strand to SEQ ID NO: 84824
uuaaaucucacgggauugg

SEQ ID NO: 84906 - RNA, 19 nt, Artificial Sequence
  Description of Artificial Sequence: Synthetic oligonucleotide
  Sense strand starting at position 1154 of SEQ ID NO: 1065
aggucacuaggcgaucuaa

SEQ ID NO: 84907 - RNA, 19 nt, Artificial Sequence
  Description of Artificial Sequence: Synthetic oligonucleotide
  Antisense strand to SEQ ID NO: 84826
uuagaucgccuagugaccu

SEQ ID NO: 84908 - RNA, 19 nt, Artificial Sequence
  Description of Artificial Sequence: Synthetic oligonucleotide
  Sense strand starting at position 1223 of SEQ ID NO: 1065
uggauuucucguugaugcu

SEQ ID NO: 84909 - RNA, 19 nt, Artificial Sequence
  Description of Artificial Sequence: Synthetic oligonucleotide
  Antisense strand to SEQ ID NO: 84828
agcaucaacgagaaaucca

SEQ ID NO: 84910 - RNA, 19 nt, Artificial Sequence
  Description of Artificial Sequence: Synthetic oligonucleotide
  Sense strand starting at position 1224 of SEQ ID NO: 1065
ggauuucucguugaugcuu

SEQ ID NO: 84911 - RNA, 19 nt, Artificial Sequence
  Description of Artificial Sequence: Synthetic oligonucleotide
  Antisense strand to SEQ ID NO: 84830
aagcaucaacgagaaaucc

SEQ ID NO: 84912 - RNA, 19 nt, Artificial Sequence
  Description of Artificial Sequence: Synthetic oligonucleotide
  Sense strand starting at position 1395 of SEQ ID NO: 1065
cccaguccugcucgagaaa

SEQ ID NO: 84913 - RNA, 19 nt, Artificial Sequence
  Description of Artificial Sequence: Synthetic oligonucleotide
  Antisense strand to SEQ ID NO: 84832
uuucucgagcaggacuggg

SEQ ID NO: 84914 - RNA, 19 nt, Artificial Sequence
  Description of Artificial Sequence: Synthetic oligonucleotide
  Sense strand starting at position 2278 of SEQ ID NO: 1065
gccguaaagcuccaacuca

SEQ ID NO: 84915 - RNA, 19 nt, Artificial Sequence
  Description of Artificial Sequence: Synthetic oligonucleotide
  Antisense strand to SEQ ID NO: 84834
ugaguuggagcuuuacggc

SEQ ID NO: 84916 - RNA, 19 nt, Artificial Sequence
  Description of Artificial Sequence: Synthetic oligonucleotide
  Sense strand starting at position 2312 of SEQ ID NO: 1065
cugggaagcuuucccugau

SEQ ID NO: 84917 - RNA, 19 nt, Artificial Sequence
  Description of Artificial Sequence: Synthetic oligonucleotide
  Antisense strand to SEQ ID NO: 84836
aucagggaaagcuucccag

SEQ ID NO: 84918 - RNA, 19 nt, Artificial Sequence
  Description of Artificial Sequence: Synthetic oligonucleotide
  Sense strand starting at position 2313 of SEQ ID NO: 1065
ugggaagcuuucccugauc

SEQ ID NO: 84919 - RNA, 19 nt, Artificial Sequence
  Description of Artificial Sequence: Synthetic oligonucleotide
  Antisense strand to SEQ ID NO: 84838
gaucagggaaagcuuccca

SEQ ID NO: 84920 - RNA, 19 nt, Artificial Sequence
  Description of Artificial Sequence: Synthetic oligonucleotide
  Sense strand starting at position 2315 of SEQ ID NO: 1065
ggaagcuuucccugauccu

SEQ ID NO: 84921 - RNA, 19 nt, Artificial Sequence
  Description of Artificial Sequence: Synthetic oligonucleotide
  Antisense strand to SEQ ID NO: 84840
aggaucagggaaagcuucc

SEQ ID NO: 84922 - RNA, 19 nt, Artificial Sequence
  Description of Artificial Sequence: Synthetic oligonucleotide
  Sense strand starting at position 2567 of SEQ ID NO: 1065
cgcugaucaguuuaccuuu

SEQ ID NO: 84923 - RNA, 19 nt, Artificial Sequence
  Description of Artificial Sequence: Synthetic oligonucleotide
  Antisense strand to SEQ ID NO: 84842
aaagguaaacugaucagcg

SEQ ID NO: 84924 - RNA, 19 nt, Artificial Sequence
  Description of Artificial Sequence: Synthetic oligonucleotide
  Sense strand starting at position 2597 of SEQ ID NO: 1065
gagaaaucugcagguaaag

SEQ ID NO: 84925 - RNA, 19 nt, Artificial Sequence
  Description of Artificial Sequence: Synthetic oligonucleotide
  Antisense strand to SEQ ID NO: 84844
cuuuaccugcagauuucuc

SEQ ID NO: 84926 - RNA, 19 nt, Artificial Sequence
  Description of Artificial Sequence: Synthetic oligonucleotide
  Sense strand starting at position 2694 of SEQ ID NO: 1065
aucagaagugguggccaaa

SEQ ID NO: 84927 - RNA, 19 nt, Artificial Sequence
  Description of Artificial Sequence: Synthetic oligonucleotide
  Antisense strand to SEQ ID NO: 84846
uuuggccaccacuucugau

SEQ ID NO: 84928 - RNA, 19 nt, Artificial Sequence
  Description of Artificial Sequence: Synthetic oligonucleotide
  Sense strand starting at position 2787 of SEQ ID NO: 1065
cagacuauucuggguuacu

SEQ ID NO: 84929 - RNA, 19 nt, Artificial Sequence
  Description of Artificial Sequence: Synthetic oligonucleotide
  Antisense strand to SEQ ID NO: 84848
aguaacccagaauagucug

SEQ ID NO: 84930 - RNA, 19 nt, Artificial Sequence
  Description of Artificial Sequence: Synthetic oligonucleotide
  Sense strand starting at position 2788 of SEQ ID NO: 1065
agacuauucuggguuacug

SEQ ID NO: 84931 - RNA, 19 nt, Artificial Sequence
  Description of Artificial Sequence: Synthetic oligonucleotide
  Antisense strand to SEQ ID NO: 84850
caguaacccagaauagucu

SEQ ID NO: 84932 - RNA, 19 nt, Artificial Sequence
  Description of Artificial Sequence: Synthetic oligonucleotide
  Sense strand starting at position 3226 of SEQ ID NO: 1065
ugugaagugggucagguau

SEQ ID NO: 84933 - RNA, 19 nt, Artificial Sequence
  Description of Artificial Sequence: Synthetic oligonucleotide
  Antisense strand to SEQ ID NO: 84852
auaccugacccacuucaca

SEQ ID NO: 84934 - RNA, 19 nt, Artificial Sequence
  Description of Artificial Sequence: Synthetic oligonucleotide
  Sense strand starting at position 3370 of SEQ ID NO: 1065
aguaguaccucucuuuaac

SEQ ID NO: 84935 - RNA, 19 nt, Artificial Sequence
  Description of Artificial Sequence: Synthetic oligonucleotide
  Antisense strand to SEQ ID NO: 84854
guuaaagagagguacuacu

SEQ ID NO: 84936 - RNA, 19 nt, Artificial Sequence
  Description of Artificial Sequence: Synthetic oligonucleotide
  Sense strand starting at position 3378 of SEQ ID NO: 1065
cucucuuuaacugggagga

SEQ ID NO: 84937 - RNA, 19 nt, Artificial Sequence
  Description of Artificial Sequence: Synthetic oligonucleotide
  Antisense strand to SEQ ID NO: 84856
uccucccaguuaaagagag

SEQ ID NO: 84938 - RNA, 19 nt, Artificial Sequence
  Description of Artificial Sequence: Synthetic oligonucleotide
  Sense strand starting at position 3379 of SEQ ID NO: 1065
ucucuuuaacugggaggau

SEQ ID NO: 84939 - RNA, 19 nt, Artificial Sequence
  Description of Artificial Sequence: Synthetic oligonucleotide
  Antisense strand to SEQ ID NO: 84858
auccucccaguuaaagaga

SEQ ID NO: 84940 - RNA, 19 nt, Artificial Sequence
  Description of Artificial Sequence: Synthetic oligonucleotide
  Sense strand starting at position 3423 of SEQ ID NO: 1065
aagauaucacugggaugca

SEQ ID NO: 84941 - RNA, 19 nt, Artificial Sequence
  Description of Artificial Sequence: Synthetic oligonucleotide
  Antisense strand to SEQ ID NO: 84860
ugcaucccagugauaucuu

SEQ ID NO: 84942 - RNA, 19 nt, Artificial Sequence
  Description of Artificial Sequence: Synthetic oligonucleotide
  Sense strand starting at position 3426 of SEQ ID NO: 1065
auaucacugggaugcauua

SEQ ID NO: 84943 - RNA, 19 nt, Artificial Sequence
  Description of Artificial Sequence: Synthetic oligonucleotide
  Antisense strand to SEQ ID NO: 84862
uaaugcaucccagugauau

SEQ ID NO: 84944 - RNA, 19 nt, Artificial Sequence
  Description of Artificial Sequence: Synthetic oligonucleotide
  Sense strand starting at position 3520 of SEQ ID NO: 1065
gaggaaagugcacauugua

SEQ ID NO: 84945 - RNA, 19 nt, Artificial Sequence
  Description of Artificial Sequence: Synthetic oligonucleotide
  Antisense strand to SEQ ID NO: 84864
uacaaugugcacuuuccuc

SEQ ID NO: 84946 - RNA, 19 nt, Artificial Sequence
  Description of Artificial Sequence: Synthetic oligonucleotide
  Sense strand starting at position 3528 of SEQ ID NO: 1065
ugcacauuguauucuuauu

SEQ ID NO: 84947 - RNA, 19 nt, Artificial Sequence
  Description of Artificial Sequence: Synthetic oligonucleotide
  Antisense strand to SEQ ID NO: 84866
aauaagaauacaaugugca

SEQ ID NO: 84948 - RNA, 19 nt, Artificial Sequence
  Description of Artificial Sequence: Synthetic oligonucleotide
  Sense strand starting at position 3597 of SEQ ID NO: 1065
aguugaacaucuguguacu

SEQ ID NO: 84949 - RNA, 19 nt, Artificial Sequence
  Description of Artificial Sequence: Synthetic oligonucleotide
  Antisense strand to SEQ ID NO: 84868
aguacacagauguucaacu

SEQ ID NO: 84950 - RNA, 19 nt, Artificial Sequence
  Description of Artificial Sequence: Synthetic oligonucleotide
  Sense strand starting at position 3598 of SEQ ID NO: 1065
guugaacaucuguguacuc

SEQ ID NO: 84951 - RNA, 19 nt, Artificial Sequence
  Description of Artificial Sequence: Synthetic oligonucleotide
  Antisense strand to SEQ ID NO: 84870
gaguacacagauguucaac

SEQ ID NO: 84952 - RNA, 19 nt, Artificial Sequence
  Description of Artificial Sequence: Synthetic oligonucleotide
  Sense strand starting at position 3629 of SEQ ID NO: 1065
aguccauuccuaugguaca

SEQ ID NO: 84953 - RNA, 19 nt, Artificial Sequence
  Description of Artificial Sequence: Synthetic oligonucleotide
  Antisense strand to SEQ ID NO: 84872
uguaccauaggaauggacu

SEQ ID NO: 84954 - RNA, 19 nt, Artificial Sequence
  Description of Artificial Sequence: Synthetic oligonucleotide
  Sense strand starting at position 3685 of SEQ ID NO: 1065
uguauacaagaauguuacu

SEQ ID NO: 84955 - RNA, 19 nt, Artificial Sequence
  Description of Artificial Sequence: Synthetic oligonucleotide
  Antisense strand to SEQ ID NO: 84874
aguaacauucuuguauaca

SEQ ID NO: 84956 - RNA, 19 nt, Artificial Sequence
  Description of Artificial Sequence: Synthetic oligonucleotide
  Sense strand starting at position 3704 of SEQ ID NO: 1065
agaaacauuguuuguggua

SEQ ID NO: 84957 - RNA, 19 nt, Artificial Sequence
  Description of Artificial Sequence: Synthetic oligonucleotide
  Antisense strand to SEQ ID NO: 84876
uaccacaaacaauguuucu

SEQ ID NO: 84958 - RNA, 19 nt, Artificial Sequence
  Description of Artificial Sequence: Synthetic oligonucleotide
  Sense strand starting at position 3705 of SEQ ID NO: 1065
gaaacauuguuugugguag

SEQ ID NO: 84959 - RNA, 19 nt, Artificial Sequence
  Description of Artificial Sequence: Synthetic oligonucleotide
  Antisense strand to SEQ ID NO: 84878
cuaccacaaacaauguuuc

SEQ ID NO: 84960 - RNA, 19 nt, Artificial Sequence
  Description of Artificial Sequence: Synthetic oligonucleotide
  Sense strand starting at position 3745 of SEQ ID NO: 1065
augcuacugacaggagaua

SEQ ID NO: 84961 - RNA, 19 nt, Artificial Sequence
  Description of Artificial Sequence: Synthetic oligonucleotide
  Antisense strand to SEQ ID NO: 84880
uaucuccugucaguagcau

SEQ ID NO: 84962 - RNA, 19 nt, Artificial Sequence
  Description of Artificial Sequence: Synthetic oligonucleotide
  Sense strand starting at position 3763 of SEQ ID NO: 1065
agagaaaugugggauauuc

SEQ ID NO: 84963 - RNA, 19 nt, Artificial Sequence
  Description of Artificial Sequence: Synthetic oligonucleotide
  Antisense strand to SEQ ID NO: 84882
gaauaucccacauuucucu

SEQ ID NO: 84964 - RNA, 19 nt, Artificial Sequence
  Description of Artificial Sequence: Synthetic oligonucleotide
  Sense strand starting at position 3972 of SEQ ID NO: 1065
ugaauuugcuguuauuuga

SEQ ID NO: 84965 - RNA, 19 nt, Artificial Sequence
  Description of Artificial Sequence: Synthetic oligonucleotide
  Antisense strand to SEQ ID NO: 84884
ucaaauaacagcaaauuca

SEQ ID NO: 84966 - RNA, 19 nt, Artificial Sequence
  Description of Artificial Sequence: Synthetic oligonucleotide
  Sense strand starting at position 3979 of SEQ ID NO: 1065
gcuguuauuugaccuguuu

SEQ ID NO: 84967 - RNA, 19 nt, Artificial Sequence
  Description of Artificial Sequence: Synthetic oligonucleotide
  Antisense strand to SEQ ID NO: 84886
aaacaggucaaauaacagc

SEQ ID NO: 84968 - RNA, 19 nt, Artificial Sequence
  Description of Artificial Sequence: Synthetic oligonucleotide
  Sense strand starting at position 3870 of SEQ ID NO: 1066
cugcuugggagcuaaauua

SEQ ID NO: 84969 - RNA, 19 nt, Artificial Sequence
  Description of Artificial Sequence: Synthetic oligonucleotide
  Antisense strand to SEQ ID NO: 84888
uaauuuagcucccaagcag

SEQ ID NO: 84970 - RNA, 19 nt, Artificial Sequence
  Description of Artificial Sequence: Synthetic oligonucleotide
  Sense strand starting at position 3496 of SEQ ID NO: 1066
gggugcaaucuugacucaa

SEQ ID NO: 84971 - RNA, 19 nt, Artificial Sequence
  Description of Artificial Sequence: Synthetic oligonucleotide
  Antisense strand to SEQ ID NO: 84890
uugagucaagauugcaccc

SEQ ID NO: 84972 - RNA, 19 nt, Artificial Sequence
  Description of Artificial Sequence: Synthetic oligonucleotide
  Sense strand starting at position 3388 of SEQ ID NO: 1066
guaagcagugaauauuguu

SEQ ID NO: 84973 - RNA, 19 nt, Artificial Sequence
  Description of Artificial Sequence: Synthetic oligonucleotide
  Antisense strand to SEQ ID NO: 84892
aacaauauucacugcuuac

SEQ ID NO: 84974 - RNA, 19 nt, Artificial Sequence
  Description of Artificial Sequence: Synthetic oligonucleotide
  Sense strand starting at position 3384 of SEQ ID NO: 1066
aaacguaagcagugaauau

SEQ ID NO: 84975 - RNA, 19 nt, Artificial Sequence
  Description of Artificial Sequence: Synthetic oligonucleotide
  Antisense strand to SEQ ID NO: 84894
auauucacugcuuacguuu

SEQ ID NO: 84976 - RNA, 19 nt, Artificial Sequence
  Description of Artificial Sequence: Synthetic oligonucleotide
  Sense strand starting at position 3355 of SEQ ID NO: 1066
agcugugaacuguauuaac

SEQ ID NO: 84977 - RNA, 19 nt, Artificial Sequence
  Description of Artificial Sequence: Synthetic oligonucleotide
  Antisense strand to SEQ ID NO: 84896
guuaauacaguucacagcu

SEQ ID NO: 84978 - RNA, 19 nt, Artificial Sequence
  Description of Artificial Sequence: Synthetic oligonucleotide
  Sense strand starting at position 2996 of SEQ ID NO: 1066
augguuacauagguguaua

SEQ ID NO: 84979 - RNA, 19 nt, Artificial Sequence
  Description of Artificial Sequence: Synthetic oligonucleotide
  Antisense strand to SEQ ID NO: 84898
uauacaccuauguaaccau

SEQ ID NO: 84980 - RNA, 19 nt, Artificial Sequence
  Description of Artificial Sequence: Synthetic oligonucleotide
  Sense strand starting at position 2995 of SEQ ID NO: 1066
gaugguuacauagguguau

SEQ ID NO: 84981 - RNA, 19 nt, Artificial Sequence
  Description of Artificial Sequence: Synthetic oligonucleotide
  Antisense strand to SEQ ID NO: 84900
auacaccuauguaaccauc

SEQ ID NO: 84982 - RNA, 19 nt, Artificial Sequence
  Description of Artificial Sequence: Synthetic oligonucleotide
  Sense strand starting at position 2982 of SEQ ID NO: 1066
ucuugauuagggugauggu

SEQ ID NO: 84983 - RNA, 19 nt, Artificial Sequence
  Description of Artificial Sequence: Synthetic oligonucleotide
  Antisense strand to SEQ ID NO: 84902
accaucacccuaaucaaga

SEQ ID NO: 84984 - RNA, 19 nt, Artificial Sequence
  Description of Artificial Sequence: Synthetic oligonucleotide
  Sense strand starting at position 2810 of SEQ ID NO: 1066
gucucuucgaagugaaauu

SEQ ID NO: 84985 - RNA, 19 nt, Artificial Sequence
  Description of Artificial Sequence: Synthetic oligonucleotide
  Antisense strand to SEQ ID NO: 84904
aauuucacuucgaagagac

SEQ ID NO: 84986 - RNA, 19 nt, Artificial Sequence
  Description of Artificial Sequence: Synthetic oligonucleotide
  Sense strand starting at position 2802 of SEQ ID NO: 1066
aauagucugucucuucgaa

SEQ ID NO: 84987 - RNA, 19 nt, Artificial Sequence
  Description of Artificial Sequence: Synthetic oligonucleotide
  Antisense strand to SEQ ID NO: 84906
uucgaagagacagacuauu

SEQ ID NO: 84988 - RNA, 19 nt, Artificial Sequence
  Description of Artificial Sequence: Synthetic oligonucleotide
  Sense strand starting at position 2761 of SEQ ID NO: 1066
uuuagcaugcguguacuua

SEQ ID NO: 84989 - RNA, 19 nt, Artificial Sequence
  Description of Artificial Sequence: Synthetic oligonucleotide
  Antisense strand to SEQ ID NO: 84908
uaaguacacgcaugcuaaa

SEQ ID NO: 84990 - RNA, 19 nt, Artificial Sequence
  Description of Artificial Sequence: Synthetic oligonucleotide
  Sense strand starting at position 2717 of SEQ ID NO: 1066
cgaggaaucccuugcuaac

SEQ ID NO: 84991 - RNA, 19 nt, Artificial Sequence
  Description of Artificial Sequence: Synthetic oligonucleotide
  Antisense strand to SEQ ID NO: 84910
guuagcaagggauuccucg

SEQ ID NO: 84992 - RNA, 19 nt, Artificial Sequence
  Description of Artificial Sequence: Synthetic oligonucleotide
  Sense strand starting at position 2654 of SEQ ID NO: 1066
cucuuucuacuccagguua

SEQ ID NO: 84993 - RNA, 19 nt, Artificial Sequence
  Description of Artificial Sequence: Synthetic oligonucleotide
  Antisense strand to SEQ ID NO: 84912
uaaccuggaguagaaagag

SEQ ID NO: 84994 - RNA, 19 nt, Artificial Sequence
  Description of Artificial Sequence: Synthetic oligonucleotide
  Sense strand starting at position 2470 of SEQ ID NO: 1066
uuacgaaauccagguuuga

SEQ ID NO: 84995 - RNA, 19 nt, Artificial Sequence
  Description of Artificial Sequence: Synthetic oligonucleotide
  Antisense strand to SEQ ID NO: 84914
ucaaaccuggauuucguaa

SEQ ID NO: 84996 - RNA, 19 nt, Artificial Sequence
  Description of Artificial Sequence: Synthetic oligonucleotide
  Sense strand starting at position 2298 of SEQ ID NO: 1066
cguaacaaggguuacauua

SEQ ID NO: 84997 - RNA, 19 nt, Artificial Sequence
  Description of Artificial Sequence: Synthetic oligonucleotide
  Antisense strand to SEQ ID NO: 84916
uaauguaacccuuguuacg

SEQ ID NO: 84998 - RNA, 19 nt, Artificial Sequence
  Description of Artificial Sequence: Synthetic oligonucleotide
  Sense strand starting at position 2295 of SEQ ID NO: 1066
cuacguaacaaggguuaca

SEQ ID NO: 84999 - RNA, 19 nt, Artificial Sequence
  Description of Artificial Sequence: Synthetic oligonucleotide
  Antisense strand to SEQ ID NO: 84918
uguaacccuuguuacguag

SEQ ID NO: 85000 - RNA, 19 nt, Artificial Sequence
  Description of Artificial Sequence: Synthetic oligonucleotide
  Sense strand starting at position 2175 of SEQ ID NO: 1066
agacuaaaccuccgaaggu

SEQ ID NO: 85001 - RNA, 19 nt, Artificial Sequence
  Description of Artificial Sequence: Synthetic oligonucleotide
  Antisense strand to SEQ ID NO: 84920
accuucggagguuuagucu

SEQ ID NO: 85002 - RNA, 19 nt, Artificial Sequence
  Description of Artificial Sequence: Synthetic oligonucleotide
  Sense strand starting at position 2164 of SEQ ID NO: 1066
gcuucugggccagacuaaa

SEQ ID NO: 85003 - RNA, 19 nt, Artificial Sequence
  Description of Artificial Sequence: Synthetic oligonucleotide
  Antisense strand to SEQ ID NO: 84922
uuuagucuggcccagaagc

SEQ ID NO: 85004 - RNA, 19 nt, Artificial Sequence
  Description of Artificial Sequence: Synthetic oligonucleotide
  Sense strand starting at position 2162 of SEQ ID NO: 1066
gggcuucugggccagacua

SEQ ID NO: 85005 - RNA, 19 nt, Artificial Sequence
  Description of Artificial Sequence: Synthetic oligonucleotide
  Antisense strand to SEQ ID NO: 84924
uagucuggcccagaagccc

SEQ ID NO: 85006 - RNA, 19 nt, Artificial Sequence
  Description of Artificial Sequence: Synthetic oligonucleotide
  Sense strand starting at position 1124 of SEQ ID NO: 1066
ccagaccuaucugugaaca

SEQ ID NO: 85007 - RNA, 19 nt, Artificial Sequence
  Description of Artificial Sequence: Synthetic oligonucleotide
  Antisense strand to SEQ ID NO: 84926
uguucacagauaggucugg

SEQ ID NO: 85008 - RNA, 19 nt, Artificial Sequence
  Description of Artificial Sequence: Synthetic oligonucleotide
  Sense strand starting at position 1093 of SEQ ID NO: 1066
cugaaacgccaucaauauc

SEQ ID NO: 85009 - RNA, 19 nt, Artificial Sequence
  Description of Artificial Sequence: Synthetic oligonucleotide
  Antisense strand to SEQ ID NO: 84928
gauauugauggcguuucag

SEQ ID NO: 85010 - RNA, 19 nt, Artificial Sequence
  Description of Artificial Sequence: Synthetic oligonucleotide
  Sense strand starting at position 820 of SEQ ID NO: 1066
uguauauacuguuuggagu

SEQ ID NO: 85011 - RNA, 19 nt, Artificial Sequence
  Description of Artificial Sequence: Synthetic oligonucleotide
  Antisense strand to SEQ ID NO: 84930
acuccaaacaguauauaca

SEQ ID NO: 85012 - RNA, 19 nt, Artificial Sequence
  Description of Artificial Sequence: Synthetic oligonucleotide
  Sense strand starting at position 809 of SEQ ID NO: 1066
cagucacugucuguauaua

SEQ ID NO: 85013 - RNA, 19 nt, Artificial Sequence
  Description of Artificial Sequence: Synthetic oligonucleotide
  Antisense strand to SEQ ID NO: 84932
uauauacagacagugacug

SEQ ID NO: 85014 - RNA, 19 nt, Artificial Sequence
  Description of Artificial Sequence: Synthetic oligonucleotide
  Sense strand starting at position 765 of SEQ ID NO: 1066
uggugacacgcugaauaua

SEQ ID NO: 85015 - RNA, 19 nt, Artificial Sequence
  Description of Artificial Sequence: Synthetic oligonucleotide
  Antisense strand to SEQ ID NO: 84934
uauauucagcgugucacca

SEQ ID NO: 85016 - RNA, 19 nt, Artificial Sequence
  Description of Artificial Sequence: Synthetic oligonucleotide
  Sense strand starting at position 678 of SEQ ID NO: 1066
aauugugugccucaguuua

SEQ ID NO: 85017 - RNA, 19 nt, Artificial Sequence
  Description of Artificial Sequence: Synthetic oligonucleotide
  Antisense strand to SEQ ID NO: 84936
uaaacugaggcacacaauu

SEQ ID NO: 85018 - RNA, 19 nt, Artificial Sequence
  Description of Artificial Sequence: Synthetic oligonucleotide
  Sense strand starting at position 664 of SEQ ID NO: 1066
aggcaaguugcuuaaauug

SEQ ID NO: 85019 - RNA, 19 nt, Artificial Sequence
  Description of Artificial Sequence: Synthetic oligonucleotide
  Antisense strand to SEQ ID NO: 84938
caauuuaagcaacuugccu

SEQ ID NO: 85020 - RNA, 19 nt, Artificial Sequence
  Description of Artificial Sequence: Synthetic oligonucleotide
  Sense strand starting at position 663 of SEQ ID NO: 1066
uaggcaaguugcuuaaauu

SEQ ID NO: 85021 - RNA, 19 nt, Artificial Sequence
  Description of Artificial Sequence: Synthetic oligonucleotide
  Antisense strand to SEQ ID NO: 84940
aauuuaagcaacuugccua

SEQ ID NO: 85022 - RNA, 19 nt, Artificial Sequence
  Description of Artificial Sequence: Synthetic oligonucleotide
  Sense strand starting at position 644 of SEQ ID NO: 1066
uuauuuagcuuugugacuu

SEQ ID NO: 85023 - RNA, 19 nt, Artificial Sequence
  Description of Artificial Sequence: Synthetic oligonucleotide
  Antisense strand to SEQ ID NO: 84942
aagucacaaagcuaaauaa

SEQ ID NO: 85024 - RNA, 19 nt, Artificial Sequence
  Description of Artificial Sequence: Synthetic oligonucleotide
  Sense strand starting at position 643 of SEQ ID NO: 1066
cuuauuuagcuuugugacu

SEQ ID NO: 85025 - RNA, 19 nt, Artificial Sequence
  Description of Artificial Sequence: Synthetic oligonucleotide
  Antisense strand to SEQ ID NO: 84944
agucacaaagcuaaauaag

SEQ ID NO: 85026 - RNA, 19 nt, Artificial Sequence
  Description of Artificial Sequence: Synthetic oligonucleotide
  Sense strand starting at position 588 of SEQ ID NO: 1066
ggcugaugauacccuguaa

SEQ ID NO: 85027 - RNA, 19 nt, Artificial Sequence
  Description of Artificial Sequence: Synthetic oligonucleotide
  Antisense strand to SEQ ID NO: 84946
uuacaggguaucaucagcc

SEQ ID NO: 85028 - RNA, 19 nt, Artificial Sequence
  Description of Artificial Sequence: Synthetic oligonucleotide
  Sense strand starting at position 580 of SEQ ID NO: 1066
guuucaagggcugaugaua

SEQ ID NO: 85029 - RNA, 19 nt, Artificial Sequence
  Description of Artificial Sequence: Synthetic oligonucleotide
  Antisense strand to SEQ ID NO: 84948
uaucaucagcccuugaaac

SEQ ID NO: 85030 - RNA, 19 nt, Artificial Sequence
  Description of Artificial Sequence: Synthetic oligonucleotide
  Sense strand starting at position 579 of SEQ ID NO: 1066
uguuucaagggcugaugau

SEQ ID NO: 85031 - RNA, 19 nt, Artificial Sequence
  Description of Artificial Sequence: Synthetic oligonucleotide
  Antisense strand to SEQ ID NO: 84950
aucaucagcccuugaaaca

SEQ ID NO: 85032 - RNA, 19 nt, Artificial Sequence
  Description of Artificial Sequence: Synthetic oligonucleotide
  Sense strand starting at position 443 of SEQ ID NO: 1066
ugacuacacgcacauauau

SEQ ID NO: 85033 - RNA, 19 nt, Artificial Sequence
  Description of Artificial Sequence: Synthetic oligonucleotide
  Antisense strand to SEQ ID NO: 84952
auauaugugcguguaguca

SEQ ID NO: 85034 - RNA, 19 nt, Artificial Sequence
  Description of Artificial Sequence: Synthetic oligonucleotide
  Sense strand starting at position 324 of SEQ ID NO: 1066
ggguaauacucaucucaag

SEQ ID NO: 85035 - RNA, 19 nt, Artificial Sequence
  Description of Artificial Sequence: Synthetic oligonucleotide
  Antisense strand to SEQ ID NO: 84954
cuugagaugaguauuaccc

SEQ ID NO: 85036 - RNA, 19 nt, Artificial Sequence
  Description of Artificial Sequence: Synthetic oligonucleotide
  Sense strand starting at position 313 of SEQ ID NO: 1066
gcucucagacuggguaaua

SEQ ID NO: 85037 - RNA, 19 nt, Artificial Sequence
  Description of Artificial Sequence: Synthetic oligonucleotide
  Antisense strand to SEQ ID NO: 84956
uauuacccagucugagagc

SEQ ID NO: 85038 - RNA, 19 nt, Artificial Sequence
  Description of Artificial Sequence: Synthetic oligonucleotide
  Sense strand starting at position 312 of SEQ ID NO: 1066
agcucucagacuggguaau

SEQ ID NO: 85039 - RNA, 19 nt, Artificial Sequence
  Description of Artificial Sequence: Synthetic oligonucleotide
  Antisense strand to SEQ ID NO: 84958
auuacccagucugagagcu

SEQ ID NO: 85040 - RNA, 19 nt, Artificial Sequence
  Description of Artificial Sequence: Synthetic oligonucleotide
  Sense strand starting at position 311 of SEQ ID NO: 1066
gagcucucagacuggguaa

SEQ ID NO: 85041 - RNA, 19 nt, Artificial Sequence
  Description of Artificial Sequence: Synthetic oligonucleotide
  Antisense strand to SEQ ID NO: 84960
uuacccagucugagagcuc

SEQ ID NO: 85042 - RNA, 19 nt, Artificial Sequence
  Description of Artificial Sequence: Synthetic oligonucleotide
  Sense strand starting at position 286 of SEQ ID NO: 1066
ggcucaaguaggcagauaa

SEQ ID NO: 85043 - RNA, 19 nt, Artificial Sequence
  Description of Artificial Sequence: Synthetic oligonucleotide
  Antisense strand to SEQ ID NO: 84962
uuaucugccuacuugagcc

SEQ ID NO: 85044 - RNA, 19 nt, Artificial Sequence
  Description of Artificial Sequence: Synthetic oligonucleotide
  Sense strand starting at position 273 of SEQ ID NO: 1066
acuuuagagaguuggcuca

SEQ ID NO: 85045 - RNA, 19 nt, Artificial Sequence
  Description of Artificial Sequence: Synthetic oligonucleotide
  Antisense strand to SEQ ID NO: 84964
ugagccaacucucuaaagu

SEQ ID NO: 85046 - RNA, 19 nt, Artificial Sequence
  Description of Artificial Sequence: Synthetic oligonucleotide
  Sense strand starting at position 108 of SEQ ID NO: 1066
uggccaccugucuauugaa

SEQ ID NO: 85047 - RNA, 19 nt, Artificial Sequence
  Description of Artificial Sequence: Synthetic oligonucleotide
  Antisense strand to SEQ ID NO: 84966
uucaauagacagguggcca

SEQ ID NO: 85048 - RNA, 19 nt, Artificial Sequence
  Description of Artificial Sequence: Synthetic oligonucleotide
  Sense strand starting at position 3830 of SEQ ID NO: 1067
uaaaucaaguucucgugau

SEQ ID NO: 85049 - RNA, 19 nt, Artificial Sequence
  Description of Artificial Sequence: Synthetic oligonucleotide
  Antisense strand to SEQ ID NO: 84968
aucacgagaacuugauuua

SEQ ID NO: 85050 - RNA, 19 nt, Artificial Sequence
  Description of Artificial Sequence: Synthetic oligonucleotide
  Sense strand starting at position 3813 of SEQ ID NO: 1067
augugauagguggagccua

SEQ ID NO: 85051 - RNA, 19 nt, Artificial Sequence
  Description of Artificial Sequence: Synthetic oligonucleotide
  Antisense strand to SEQ ID NO: 84970
uaggcuccaccuaucacau

SEQ ID NO: 85052 - RNA, 19 nt, Artificial Sequence
  Description of Artificial Sequence: Synthetic oligonucleotide
  Sense strand starting at position 3749 of SEQ ID NO: 1067
ggugcugccagaugauuuc

SEQ ID NO: 85053 - RNA, 19 nt, Artificial Sequence
  Description of Artificial Sequence: Synthetic oligonucleotide
  Antisense strand to SEQ ID NO: 84972
gaaaucaucuggcagcacc

SEQ ID NO: 85054 - RNA, 19 nt, Artificial Sequence
  Description of Artificial Sequence: Synthetic oligonucleotide
  Sense strand starting at position 3593 of SEQ ID NO: 1067
caaauccugcgguagaauu

SEQ ID NO: 85055 - RNA, 19 nt, Artificial Sequence
  Description of Artificial Sequence: Synthetic oligonucleotide
  Antisense strand to SEQ ID NO: 84974
aauucuaccgcaggauuug

SEQ ID NO: 85056 - RNA, 19 nt, Artificial Sequence
  Description of Artificial Sequence: Synthetic oligonucleotide
  Sense strand starting at position 3523 of SEQ ID NO: 1067
gauuauacugaguggcuca

SEQ ID NO: 85057 - RNA, 19 nt, Artificial Sequence
  Description of Artificial Sequence: Synthetic oligonucleotide
  Antisense strand to SEQ ID NO: 84976
ugagccacucaguauaauc

SEQ ID NO: 85058 - RNA, 19 nt, Artificial Sequence
  Description of Artificial Sequence: Synthetic oligonucleotide
  Sense strand starting at position 3499 of SEQ ID NO: 1067
gguaaucgacaguauuaga

SEQ ID NO: 85059 - RNA, 19 nt, Artificial Sequence
  Description of Artificial Sequence: Synthetic oligonucleotide
  Antisense strand to SEQ ID NO: 84978
ucuaauacugucgauuacc

SEQ ID NO: 85060 - RNA, 19 nt, Artificial Sequence
  Description of Artificial Sequence: Synthetic oligonucleotide
  Sense strand starting at position 3496 of SEQ ID NO: 1067
uaagguaaucgacaguauu

SEQ ID NO: 85061 - RNA, 19 nt, Artificial Sequence
  Description of Artificial Sequence: Synthetic oligonucleotide
  Antisense strand to SEQ ID NO: 84980
aauacugucgauuaccuua

SEQ ID NO: 85062 - RNA, 19 nt, Artificial Sequence
  Description of Artificial Sequence: Synthetic oligonucleotide
  Sense strand starting at position 3493 of SEQ ID NO: 1067
caguaagguaaucgacagu

SEQ ID NO: 85063 - RNA, 19 nt, Artificial Sequence
  Description of Artificial Sequence: Synthetic oligonucleotide
  Antisense strand to SEQ ID NO: 84982
acugucgauuaccuuacug

SEQ ID NO: 85064 - RNA, 19 nt, Artificial Sequence
  Description of Artificial Sequence: Synthetic oligonucleotide
  Sense strand starting at position 3484 of SEQ ID NO: 1067
gcccuuacccaguaaggua

SEQ ID NO: 85065 - RNA, 19 nt, Artificial Sequence
  Description of Artificial Sequence: Synthetic oligonucleotide
  Antisense strand to SEQ ID NO: 84984
uaccuuacuggguaagggc

SEQ ID NO: 85066 - RNA, 19 nt, Artificial Sequence
  Description of Artificial Sequence: Synthetic oligonucleotide
  Sense strand starting at position 3363 of SEQ ID NO: 1067
uggguacaugccuacugaa

SEQ ID NO: 85067 - RNA, 19 nt, Artificial Sequence
  Description of Artificial Sequence: Synthetic oligonucleotide
  Antisense strand to SEQ ID NO: 84986
uucaguaggcauguaccca

SEQ ID NO: 85068 - RNA, 19 nt, Artificial Sequence
  Description of Artificial Sequence: Synthetic oligonucleotide
  Sense strand starting at position 3334 of SEQ ID NO: 1067
auggaccaaucaugauuua

SEQ ID NO: 85069 - RNA, 19 nt, Artificial Sequence
  Description of Artificial Sequence: Synthetic oligonucleotide
  Antisense strand to SEQ ID NO: 84988
uaaaucaugauugguccau

SEQ ID NO: 85070 - RNA, 19 nt, Artificial Sequence
  Description of Artificial Sequence: Synthetic oligonucleotide
  Sense strand starting at position 3066 of SEQ ID NO: 1067
ccagauugucaaggguagu

SEQ ID NO: 85071 - RNA, 19 nt, Artificial Sequence
  Description of Artificial Sequence: Synthetic oligonucleotide
  Antisense strand to SEQ ID NO: 84990
acuacccuugacaaucugg

SEQ ID NO: 85072 - RNA, 19 nt, Artificial Sequence
  Description of Artificial Sequence: Synthetic oligonucleotide
  Sense strand starting at position 2561 of SEQ ID NO: 1067
ucuccuuagggucauuaaa

SEQ ID NO: 85073 - RNA, 19 nt, Artificial Sequence
  Description of Artificial Sequence: Synthetic oligonucleotide
  Antisense strand to SEQ ID NO: 84992
uuuaaugacccuaaggaga

SEQ ID NO: 85074 - RNA, 19 nt, Artificial Sequence
  Description of Artificial Sequence: Synthetic oligonucleotide
  Sense strand starting at position 2334 of SEQ ID NO: 1067
ugggaugaguauccucuuu

SEQ ID NO: 85075 - RNA, 19 nt, Artificial Sequence
  Description of Artificial Sequence: Synthetic oligonucleotide
  Antisense strand to SEQ ID NO: 84994
aaagaggauacucauccca

SEQ ID NO: 85076 - RNA, 19 nt, Artificial Sequence
  Description of Artificial Sequence: Synthetic oligonucleotide
  Sense strand starting at position 2295 of SEQ ID NO: 1067
auaggaugucgcuaacgaa

SEQ ID NO: 85077 - RNA, 19 nt, Artificial Sequence
  Description of Artificial Sequence: Synthetic oligonucleotide
  Antisense strand to SEQ ID NO: 84996
uucguuagcgacauccuau

SEQ ID NO: 85078 - RNA, 19 nt, Artificial Sequence
  Description of Artificial Sequence: Synthetic oligonucleotide
  Sense strand starting at position 2279 of SEQ ID NO: 1067
gggcggugagguuacuaua

SEQ ID NO: 85079 - RNA, 19 nt, Artificial Sequence
  Description of Artificial Sequence: Synthetic oligonucleotide
  Antisense strand to SEQ ID NO: 84998
uauaguaaccucaccgccc

SEQ ID NO: 85080 - RNA, 19 nt, Artificial Sequence
  Description of Artificial Sequence: Synthetic oligonucleotide
  Sense strand starting at position 2115 of SEQ ID NO: 1067
ggcuguugccgggaggaaa

SEQ ID NO: 85081 - RNA, 19 nt, Artificial Sequence
  Description of Artificial Sequence: Synthetic oligonucleotide
  Antisense strand to SEQ ID NO: 85000
uuuccucccggcaacagcc

SEQ ID NO: 85082 - RNA, 19 nt, Artificial Sequence
  Description of Artificial Sequence: Synthetic oligonucleotide
  Sense strand starting at position 1834 of SEQ ID NO: 1067
ggcaaugauccucgagaau

SEQ ID NO: 85083 - RNA, 19 nt, Artificial Sequence
  Description of Artificial Sequence: Synthetic oligonucleotide
  Antisense strand to SEQ ID NO: 85002
auucucgaggaucauugcc

SEQ ID NO: 85084 - RNA, 19 nt, Artificial Sequence
  Description of Artificial Sequence: Synthetic oligonucleotide
  Sense strand starting at position 1833 of SEQ ID NO: 1067
cggcaaugauccucgagaa

SEQ ID NO: 85085 - RNA, 19 nt, Artificial Sequence
  Description of Artificial Sequence: Synthetic oligonucleotide
  Antisense strand to SEQ ID NO: 85004
uucucgaggaucauugccg

SEQ ID NO: 85086 - RNA, 19 nt, Artificial Sequence
  Description of Artificial Sequence: Synthetic oligonucleotide
  Sense strand starting at position 1765 of SEQ ID NO: 1067
aucacucaccgcuggaaga

SEQ ID NO: 85087 - RNA, 19 nt, Artificial Sequence
  Description of Artificial Sequence: Synthetic oligonucleotide
  Antisense strand to SEQ ID NO: 85006
ucuuccagcggugagugau

SEQ ID NO: 85088 - RNA, 19 nt, Artificial Sequence
  Description of Artificial Sequence: Synthetic oligonucleotide
  Sense strand starting at position 1752 of SEQ ID NO: 1067
gagaaacaugccgaucacu

SEQ ID NO: 85089 - RNA, 19 nt, Artificial Sequence
  Description of Artificial Sequence: Synthetic oligonucleotide
  Antisense strand to SEQ ID NO: 85008
agugaucggcauguuucuc

SEQ ID NO: 85090 - RNA, 19 nt, Artificial Sequence
  Description of Artificial Sequence: Synthetic oligonucleotide
  Sense strand starting at position 1742 of SEQ ID NO: 1067
ccuauuggccgagaaacau

SEQ ID NO: 85091 - RNA, 19 nt, Artificial Sequence
  Description of Artificial Sequence: Synthetic oligonucleotide
  Antisense strand to SEQ ID NO: 85010
auguuucucggccaauagg

SEQ ID NO: 85092 - RNA, 19 nt, Artificial Sequence
  Description of Artificial Sequence: Synthetic oligonucleotide
  Sense strand starting at position 1740 of SEQ ID NO: 1067
cuccuauuggccgagaaac

SEQ ID NO: 85093 - RNA, 19 nt, Artificial Sequence
  Description of Artificial Sequence: Synthetic oligonucleotide
  Antisense strand to SEQ ID NO: 85012
guuucucggccaauaggag

SEQ ID NO: 85094 - RNA, 19 nt, Artificial Sequence
  Description of Artificial Sequence: Synthetic oligonucleotide
  Sense strand starting at position 1739 of SEQ ID NO: 1067
ucuccuauuggccgagaaa

SEQ ID NO: 85095 - RNA, 19 nt, Artificial Sequence
  Description of Artificial Sequence: Synthetic oligonucleotide
  Antisense strand to SEQ ID NO: 85014
uuucucggccaauaggaga

SEQ ID NO: 85096 - RNA, 19 nt, Artificial Sequence
  Description of Artificial Sequence: Synthetic oligonucleotide
  Sense strand starting at position 1729 of SEQ ID NO: 1067
ggaagcuccuucuccuauu

SEQ ID NO: 85097 - RNA, 19 nt, Artificial Sequence
  Description of Artificial Sequence: Synthetic oligonucleotide
  Antisense strand to SEQ ID NO: 85016
aauaggagaaggagcuucc

SEQ ID NO: 85098 - RNA, 19 nt, Artificial Sequence
  Description of Artificial Sequence: Synthetic oligonucleotide
  Sense strand starting at position 1690 of SEQ ID NO: 1067
ccuugaagauuggaaagga

SEQ ID NO: 85099 - RNA, 19 nt, Artificial Sequence
  Description of Artificial Sequence: Synthetic oligonucleotide
  Antisense strand to SEQ ID NO: 85018
uccuuuccaaucuucaagg

SEQ ID NO: 85100 - RNA, 19 nt, Artificial Sequence
  Description of Artificial Sequence: Synthetic oligonucleotide
  Sense strand starting at position 1688 of SEQ ID NO: 1067
ggccuugaagauuggaaag

SEQ ID NO: 85101 - RNA, 19 nt, Artificial Sequence
  Description of Artificial Sequence: Synthetic oligonucleotide
  Antisense strand to SEQ ID NO: 85020
cuuuccaaucuucaaggcc

SEQ ID NO: 85102 - RNA, 19 nt, Artificial Sequence
  Description of Artificial Sequence: Synthetic oligonucleotide
  Sense strand starting at position 1681 of SEQ ID NO: 1067
guccauuggccuugaagau

SEQ ID NO: 85103 - RNA, 19 nt, Artificial Sequence
  Description of Artificial Sequence: Synthetic oligonucleotide
  Antisense strand to SEQ ID NO: 85022
aucuucaaggccaauggac

SEQ ID NO: 85104 - RNA, 19 nt, Artificial Sequence
  Description of Artificial Sequence: Synthetic oligonucleotide
  Sense strand starting at position 1397 of SEQ ID NO: 1067
cugugauuagcucagauga

SEQ ID NO: 85105 - RNA, 19 nt, Artificial Sequence
  Description of Artificial Sequence: Synthetic oligonucleotide
  Antisense strand to SEQ ID NO: 85024
ucaucugagcuaaucacag

SEQ ID NO: 85106 - RNA, 19 nt, Artificial Sequence
  Description of Artificial Sequence: Synthetic oligonucleotide
  Sense strand starting at position 1289 of SEQ ID NO: 1067
cggucucugccguuuauua

SEQ ID NO: 85107 - RNA, 19 nt, Artificial Sequence
  Description of Artificial Sequence: Synthetic oligonucleotide
  Antisense strand to SEQ ID NO: 85026
uaauaaacggcagagaccg

SEQ ID NO: 85108 - RNA, 19 nt, Artificial Sequence
  Description of Artificial Sequence: Synthetic oligonucleotide
  Sense strand starting at position 1288 of SEQ ID NO: 1067
ccggucucugccguuuauu

SEQ ID NO: 85109 - RNA, 19 nt, Artificial Sequence
  Description of Artificial Sequence: Synthetic oligonucleotide
  Antisense strand to SEQ ID NO: 85028
aauaaacggcagagaccgg

SEQ ID NO: 85110 - RNA, 19 nt, Artificial Sequence
  Description of Artificial Sequence: Synthetic oligonucleotide
  Sense strand starting at position 1056 of SEQ ID NO: 1067
uuuguaugccuagaacaau

SEQ ID NO: 85111 - RNA, 19 nt, Artificial Sequence
  Description of Artificial Sequence: Synthetic oligonucleotide
  Antisense strand to SEQ ID NO: 85030
auuguucuaggcauacaaa

SEQ ID NO: 85112 - RNA, 19 nt, Artificial Sequence
  Description of Artificial Sequence: Synthetic oligonucleotide
  Sense strand starting at position 842 of SEQ ID NO: 1067
uggacuaaguccucugcaa

SEQ ID NO: 85113 - RNA, 19 nt, Artificial Sequence
  Description of Artificial Sequence: Synthetic oligonucleotide
  Antisense strand to SEQ ID NO: 85032
uugcagaggacuuagucca

SEQ ID NO: 85114 - RNA, 19 nt, Artificial Sequence
  Description of Artificial Sequence: Synthetic oligonucleotide
  Sense strand starting at position 613 of SEQ ID NO: 1067
agcacaacuguguaaggua

SEQ ID NO: 85115 - RNA, 19 nt, Artificial Sequence
  Description of Artificial Sequence: Synthetic oligonucleotide
  Antisense strand to SEQ ID NO: 85034
uaccuuacacaguugugcu

SEQ ID NO: 85116 - RNA, 19 nt, Artificial Sequence
  Description of Artificial Sequence: Synthetic oligonucleotide
  Sense strand starting at position 576 of SEQ ID NO: 1067
ccagaaaucuaguuacagg

SEQ ID NO: 85117 - RNA, 19 nt, Artificial Sequence
  Description of Artificial Sequence: Synthetic oligonucleotide
  Antisense strand to SEQ ID NO: 85036
ccuguaacuagauuucugg

SEQ ID NO: 85118 - RNA, 19 nt, Artificial Sequence
  Description of Artificial Sequence: Synthetic oligonucleotide
  Sense strand starting at position 520 of SEQ ID NO: 1067
caagacucucuuugagagu

SEQ ID NO: 85119 - RNA, 19 nt, Artificial Sequence
  Description of Artificial Sequence: Synthetic oligonucleotide
  Antisense strand to SEQ ID NO: 85038
acucucaaagagagucuug

SEQ ID NO: 85120 - RNA, 19 nt, Artificial Sequence
  Description of Artificial Sequence: Synthetic oligonucleotide
  Sense strand starting at position 519 of SEQ ID NO: 1067
ccaagacucucuuugagag

SEQ ID NO: 85121 - RNA, 19 nt, Artificial Sequence
  Description of Artificial Sequence: Synthetic oligonucleotide
  Antisense strand to SEQ ID NO: 85040
cucucaaagagagucuugg

SEQ ID NO: 85122 - RNA, 19 nt, Artificial Sequence
  Description of Artificial Sequence: Synthetic oligonucleotide
  Sense strand starting at position 143 of SEQ ID NO: 1067
ugaaacuguucuguugaaa

SEQ ID NO: 85123 - RNA, 19 nt, Artificial Sequence
  Description of Artificial Sequence: Synthetic oligonucleotide
  Antisense strand to SEQ ID NO: 85042
uuucaacagaacaguuuca

SEQ ID NO: 85124 - RNA, 19 nt, Artificial Sequence
  Description of Artificial Sequence: Synthetic oligonucleotide
  Sense strand starting at position 140 of SEQ ID NO: 1067
aagugaaacuguucuguug

SEQ ID NO: 85125 - RNA, 19 nt, Artificial Sequence
  Description of Artificial Sequence: Synthetic oligonucleotide
  Antisense strand to SEQ ID NO: 85044
caacagaacaguuucacuu

SEQ ID NO: 85126 - RNA, 19 nt, Artificial Sequence
  Description of Artificial Sequence: Synthetic oligonucleotide
  Sense strand starting at position 32 of SEQ ID NO: 1067
aaguuacguggcuacaaga

SEQ ID NO: 85127 - RNA, 19 nt, Artificial Sequence
  Description of Artificial Sequence: Synthetic oligonucleotide
  Antisense strand to SEQ ID NO: 85046
ucuuguagccacguaacuu

SEQ ID NO: 85128 - RNA, 19 nt, Artificial Sequence
  Description of Artificial Sequence: Synthetic oligonucleotide
  Sense strand starting at position 39 of SEQ ID NO: 1068
gccucuuugcacuaagaga

SEQ ID NO: 85129 - RNA, 19 nt, Artificial Sequence
  Description of Artificial Sequence: Synthetic oligonucleotide
  Antisense strand to SEQ ID NO: 85048
ucucuuagugcaaagaggc

SEQ ID NO: 85130 - RNA, 19 nt, Artificial Sequence
  Description of Artificial Sequence: Synthetic oligonucleotide
  Sense strand starting at position 66 of SEQ ID NO: 1068
ucccuuaagcagcaagaau

SEQ ID NO: 85131 - RNA, 19 nt, Artificial Sequence
  Description of Artificial Sequence: Synthetic oligonucleotide
  Antisense strand to SEQ ID NO: 85050
auucuugcugcuuaaggga

SEQ ID NO: 85132 - RNA, 19 nt, Artificial Sequence
  Description of Artificial Sequence: Synthetic oligonucleotide
  Sense strand starting at position 93 of SEQ ID NO: 1068
cccacuucgcuguaagaaa

SEQ ID NO: 85133 - RNA, 19 nt, Artificial Sequence
  Description of Artificial Sequence: Synthetic oligonucleotide
  Antisense strand to SEQ ID NO: 85052
uuucuuacagcgaaguggg

SEQ ID NO: 85134 - RNA, 19 nt, Artificial Sequence
  Description of Artificial Sequence: Synthetic oligonucleotide
  Sense strand starting at position 100 of SEQ ID NO: 1068
cgcuguaagaaauggaucu

SEQ ID NO: 85135 - RNA, 19 nt, Artificial Sequence
  Description of Artificial Sequence: Synthetic oligonucleotide
  Antisense strand to SEQ ID NO: 85054
agauccauuucuuacagcg

SEQ ID NO: 85136 - RNA, 19 nt, Artificial Sequence
  Description of Artificial Sequence: Synthetic oligonucleotide
  Sense strand starting at position 101 of SEQ ID NO: 1068
gcuguaagaaauggaucua

SEQ ID NO: 85137 - RNA, 19 nt, Artificial Sequence
  Description of Artificial Sequence: Synthetic oligonucleotide
  Antisense strand to SEQ ID NO: 85056
uagauccauuucuuacagc

SEQ ID NO: 85138 - RNA, 19 nt, Artificial Sequence
  Description of Artificial Sequence: Synthetic oligonucleotide
  Sense strand starting at position 376 of SEQ ID NO: 1068
gucuuccucuacuuagaag

SEQ ID NO: 85139 - RNA, 19 nt, Artificial Sequence
  Description of Artificial Sequence: Synthetic oligonucleotide
  Antisense strand to SEQ ID NO: 85058
cuucuaaguagaggaagac

SEQ ID NO: 85140 - RNA, 19 nt, Artificial Sequence
  Description of Artificial Sequence: Synthetic oligonucleotide
  Sense strand starting at position 750 of SEQ ID NO: 1068
gaaaucuucggaggucucu

SEQ ID NO: 85141 - RNA, 19 nt, Artificial Sequence
  Description of Artificial Sequence: Synthetic oligonucleotide
  Antisense strand to SEQ ID NO: 85060
agagaccuccgaagauuuc

SEQ ID NO: 85142 - RNA, 19 nt, Artificial Sequence
  Description of Artificial Sequence: Synthetic oligonucleotide
  Sense strand starting at position 1726 of SEQ ID NO: 1068
ccggaucuuguggaugaaa

SEQ ID NO: 85143 - RNA, 19 nt, Artificial Sequence
  Description of Artificial Sequence: Synthetic oligonucleotide
  Antisense strand to SEQ ID NO: 85062
uuucauccacaagauccgg

SEQ ID NO: 85144 - RNA, 19 nt, Artificial Sequence
  Description of Artificial Sequence: Synthetic oligonucleotide
  Sense strand starting at position 2186 of SEQ ID NO: 1068
uggaguuuauccuuagggu

SEQ ID NO: 85145 - RNA, 19 nt, Artificial Sequence
  Description of Artificial Sequence: Synthetic oligonucleotide
  Antisense strand to SEQ ID NO: 85064
acccuaaggauaaacucca

SEQ ID NO: 85146 - RNA, 19 nt, Artificial Sequence
  Description of Artificial Sequence: Synthetic oligonucleotide
  Sense strand starting at position 2187 of SEQ ID NO: 1068
ggaguuuauccuuaggguu

SEQ ID NO: 85147 - RNA, 19 nt, Artificial Sequence
  Description of Artificial Sequence: Synthetic oligonucleotide
  Antisense strand to SEQ ID NO: 85066
aacccuaaggauaaacucc

SEQ ID NO: 85148 - RNA, 19 nt, Artificial Sequence
  Description of Artificial Sequence: Synthetic oligonucleotide
  Sense strand starting at position 2244 of SEQ ID NO: 1068
cagaguuccugcccugaag

SEQ ID NO: 85149 - RNA, 19 nt, Artificial Sequence
  Description of Artificial Sequence: Synthetic oligonucleotide
  Antisense strand to SEQ ID NO: 85068
cuucagggcaggaacucug

SEQ ID NO: 85150 - RNA, 19 nt, Artificial Sequence
  Description of Artificial Sequence: Synthetic oligonucleotide
  Sense strand starting at position 2246 of SEQ ID NO: 1068
gaguuccugcccugaagaa

SEQ ID NO: 85151 - RNA, 19 nt, Artificial Sequence
  Description of Artificial Sequence: Synthetic oligonucleotide
  Antisense strand to SEQ ID NO: 85070
uucuucagggcaggaacuc

SEQ ID NO: 85152 - RNA, 19 nt, Artificial Sequence
  Description of Artificial Sequence: Synthetic oligonucleotide
  Sense strand starting at position 2261 of SEQ ID NO: 1068
agaaguuaagucugguaga

SEQ ID NO: 85153 - RNA, 19 nt, Artificial Sequence
  Description of Artificial Sequence: Synthetic oligonucleotide
  Antisense strand to SEQ ID NO: 85072
ucuaccagacuuaacuucu

SEQ ID NO: 85154 - RNA, 19 nt, Artificial Sequence
  Description of Artificial Sequence: Synthetic oligonucleotide
  Sense strand starting at position 2282 of SEQ ID NO: 1068
ggaucagucccauaagcca

SEQ ID NO: 85155 - RNA, 19 nt, Artificial Sequence
  Description of Artificial Sequence: Synthetic oligonucleotide
  Antisense strand to SEQ ID NO: 85074
uggcuuaugggacugaucc

SEQ ID NO: 85156 - RNA, 19 nt, Artificial Sequence
  Description of Artificial Sequence: Synthetic oligonucleotide
  Sense strand starting at position 2505 of SEQ ID NO: 1068
auugcaucgcaugauuaau

SEQ ID NO: 85157 - RNA, 19 nt, Artificial Sequence
  Description of Artificial Sequence: Synthetic oligonucleotide
  Antisense strand to SEQ ID NO: 85076
auuaaucaugcgaugcaau

SEQ ID NO: 85158 - RNA, 19 nt, Artificial Sequence
  Description of Artificial Sequence: Synthetic oligonucleotide
  Sense strand starting at position 2511 of SEQ ID NO: 1068
ucgcaugauuaaucacaca

SEQ ID NO: 85159 - RNA, 19 nt, Artificial Sequence
  Description of Artificial Sequence: Synthetic oligonucleotide
  Antisense strand to SEQ ID NO: 85078
ugugugauuaaucaugcga

SEQ ID NO: 85160 - RNA, 19 nt, Artificial Sequence
  Description of Artificial Sequence: Synthetic oligonucleotide
  Sense strand starting at position 2614 of SEQ ID NO: 1068
auggcuaauaagugaugga

SEQ ID NO: 85161 - RNA, 19 nt, Artificial Sequence
  Description of Artificial Sequence: Synthetic oligonucleotide
  Antisense strand to SEQ ID NO: 85080
uccaucacuuauuagccau

SEQ ID NO: 85162 - RNA, 19 nt, Artificial Sequence
  Description of Artificial Sequence: Synthetic oligonucleotide
  Sense strand starting at position 2646 of SEQ ID NO: 1068
uggagauguugcagggaaa

SEQ ID NO: 85163 - RNA, 19 nt, Artificial Sequence
  Description of Artificial Sequence: Synthetic oligonucleotide
  Antisense strand to SEQ ID NO: 85082
uuucccugcaacaucucca

SEQ ID NO: 85164 - RNA, 19 nt, Artificial Sequence
  Description of Artificial Sequence: Synthetic oligonucleotide
  Sense strand starting at position 2681 of SEQ ID NO: 1068
agucuaugacgaggucaga

SEQ ID NO: 85165 - RNA, 19 nt, Artificial Sequence
  Description of Artificial Sequence: Synthetic oligonucleotide
  Antisense strand to SEQ ID NO: 85084
ucugaccucgucauagacu

SEQ ID NO: 85166 - RNA, 19 nt, Artificial Sequence
  Description of Artificial Sequence: Synthetic oligonucleotide
  Sense strand starting at position 2708 of SEQ ID NO: 1068
gggcgaaagacuugaaaua

SEQ ID NO: 85167 - RNA, 19 nt, Artificial Sequence
  Description of Artificial Sequence: Synthetic oligonucleotide
  Antisense strand to SEQ ID NO: 85086
uauuucaagucuuucgccc

SEQ ID NO: 85168 - RNA, 19 nt, Artificial Sequence
  Description of Artificial Sequence: Synthetic oligonucleotide
  Sense strand starting at position 2735 of SEQ ID NO: 1068
aaggaaugauaggaucuaa

SEQ ID NO: 85169 - RNA, 19 nt, Artificial Sequence
  Description of Artificial Sequence: Synthetic oligonucleotide
  Antisense strand to SEQ ID NO: 85088
uuagauccuaucauuccuu

SEQ ID NO: 85170 - RNA, 19 nt, Artificial Sequence
  Description of Artificial Sequence: Synthetic oligonucleotide
  Sense strand starting at position 2896 of SEQ ID NO: 1068
uuggcauugcuggaacauu

SEQ ID NO: 85171 - RNA, 19 nt, Artificial Sequence
  Description of Artificial Sequence: Synthetic oligonucleotide
  Antisense strand to SEQ ID NO: 85090
aauguuccagcaaugccaa

SEQ ID NO: 85172 - RNA, 19 nt, Artificial Sequence
  Description of Artificial Sequence: Synthetic oligonucleotide
  Sense strand starting at position 2934 of SEQ ID NO: 1068
aggcgaguuacucaaggga

SEQ ID NO: 85173 - RNA, 19 nt, Artificial Sequence
  Description of Artificial Sequence: Synthetic oligonucleotide
  Antisense strand to SEQ ID NO: 85092
ucccuugaguaacucgccu

SEQ ID NO: 85174 - RNA, 19 nt, Artificial Sequence
  Description of Artificial Sequence: Synthetic oligonucleotide
  Sense strand starting at position 2937 of SEQ ID NO: 1068
cgaguuacucaagggaaga

SEQ ID NO: 85175 - RNA, 19 nt, Artificial Sequence
  Description of Artificial Sequence: Synthetic oligonucleotide
  Antisense strand to SEQ ID NO: 85094
ucuucccuugaguaacucg

SEQ ID NO: 85176 - RNA, 19 nt, Artificial Sequence
  Description of Artificial Sequence: Synthetic oligonucleotide
  Sense strand starting at position 3071 of SEQ ID NO: 1068
agaucagaauuggagauau

SEQ ID NO: 85177 - RNA, 19 nt, Artificial Sequence
  Description of Artificial Sequence: Synthetic oligonucleotide
  Antisense strand to SEQ ID NO: 85096
auaucuccaauucugaucu

SEQ ID NO: 85178 - RNA, 19 nt, Artificial Sequence
  Description of Artificial Sequence: Synthetic oligonucleotide
  Sense strand starting at position 3197 of SEQ ID NO: 1068
ccaccauauugaguaggua

SEQ ID NO: 85179 - RNA, 19 nt, Artificial Sequence
  Description of Artificial Sequence: Synthetic oligonucleotide
  Antisense strand to SEQ ID NO: 85098
uaccuacucaauauggugg

SEQ ID NO: 85180 - RNA, 19 nt, Artificial Sequence
  Description of Artificial Sequence: Synthetic oligonucleotide
  Sense strand starting at position 3213 of SEQ ID NO: 1068
guacgauauuauccucauu

SEQ ID NO: 85181 - RNA, 19 nt, Artificial Sequence
  Description of Artificial Sequence: Synthetic oligonucleotide
  Antisense strand to SEQ ID NO: 85100
aaugaggauaauaucguac

SEQ ID NO: 85182 - RNA, 19 nt, Artificial Sequence
  Description of Artificial Sequence: Synthetic oligonucleotide
  Sense strand starting at position 3379 of SEQ ID NO: 1068
aaaguagaacgucaacauu

SEQ ID NO: 85183 - RNA, 19 nt, Artificial Sequence
  Description of Artificial Sequence: Synthetic oligonucleotide
  Antisense strand to SEQ ID NO: 85102
aauguugacguucuacuuu

SEQ ID NO: 85184 - RNA, 19 nt, Artificial Sequence
  Description of Artificial Sequence: Synthetic oligonucleotide
  Sense strand starting at position 3382 of SEQ ID NO: 1068
guagaacgucaacauugaa

SEQ ID NO: 85185 - RNA, 19 nt, Artificial Sequence
  Description of Artificial Sequence: Synthetic oligonucleotide
  Antisense strand to SEQ ID NO: 85104
uucaauguugacguucuac

SEQ ID NO: 85186 - RNA, 19 nt, Artificial Sequence
  Description of Artificial Sequence: Synthetic oligonucleotide
  Sense strand starting at position 3385 of SEQ ID NO: 1068
gaacgucaacauugaaaug

SEQ ID NO: 85187 - RNA, 19 nt, Artificial Sequence
  Description of Artificial Sequence: Synthetic oligonucleotide
  Antisense strand to SEQ ID NO: 85106
cauuucaauguugacguuc

SEQ ID NO: 85188 - RNA, 19 nt, Artificial Sequence
  Description of Artificial Sequence: Synthetic oligonucleotide
  Sense strand starting at position 3437 of SEQ ID NO: 1068
caaggaauguuugucaaga

SEQ ID NO: 85189 - RNA, 19 nt, Artificial Sequence
  Description of Artificial Sequence: Synthetic oligonucleotide
  Antisense strand to SEQ ID NO: 85108
ucuugacaaacauuccuug

SEQ ID NO: 85190 - RNA, 19 nt, Artificial Sequence
  Description of Artificial Sequence: Synthetic oligonucleotide
  Sense strand starting at position 3438 of SEQ ID NO: 1068
aaggaauguuugucaagau

SEQ ID NO: 85191 - RNA, 19 nt, Artificial Sequence
  Description of Artificial Sequence: Synthetic oligonucleotide
  Antisense strand to SEQ ID NO: 85110
aucuugacaaacauuccuu

SEQ ID NO: 85192 - RNA, 19 nt, Artificial Sequence
  Description of Artificial Sequence: Synthetic oligonucleotide
  Sense strand starting at position 3492 of SEQ ID NO: 1068
aucucuuaugcuuaagaag

SEQ ID NO: 85193 - RNA, 19 nt, Artificial Sequence
  Description of Artificial Sequence: Synthetic oligonucleotide
  Antisense strand to SEQ ID NO: 85112
cuucuuaagcauaagagau

SEQ ID NO: 85194 - RNA, 19 nt, Artificial Sequence
  Description of Artificial Sequence: Synthetic oligonucleotide
  Sense strand starting at position 3606 of SEQ ID NO: 1068
cacagugguccugggagaa

SEQ ID NO: 85195 - RNA, 19 nt, Artificial Sequence
  Description of Artificial Sequence: Synthetic oligonucleotide
  Antisense strand to SEQ ID NO: 85114
uucucccaggaccacugug

SEQ ID NO: 85196 - RNA, 19 nt, Artificial Sequence
  Description of Artificial Sequence: Synthetic oligonucleotide
  Sense strand starting at position 3734 of SEQ ID NO: 1068
uuaucagugcaagauagau

SEQ ID NO: 85197 - RNA, 19 nt, Artificial Sequence
  Description of Artificial Sequence: Synthetic oligonucleotide
  Antisense strand to SEQ ID NO: 85116
aucuaucuugcacugauaa

SEQ ID NO: 85198 - RNA, 19 nt, Artificial Sequence
  Description of Artificial Sequence: Synthetic oligonucleotide
  Sense strand starting at position 3740 of SEQ ID NO: 1068
gugcaagauagauaugcga

SEQ ID NO: 85199 - RNA, 19 nt, Artificial Sequence
  Description of Artificial Sequence: Synthetic oligonucleotide
  Antisense strand to SEQ ID NO: 85118
ucgcauaucuaucuugcac

SEQ ID NO: 85200 - RNA, 19 nt, Artificial Sequence
  Description of Artificial Sequence: Synthetic oligonucleotide
  Sense strand starting at position 3742 of SEQ ID NO: 1068
gcaagauagauaugcgaug

SEQ ID NO: 85201 - RNA, 19 nt, Artificial Sequence
  Description of Artificial Sequence: Synthetic oligonucleotide
  Antisense strand to SEQ ID NO: 85120
caucgcauaucuaucuugc

SEQ ID NO: 85202 - RNA, 19 nt, Artificial Sequence
  Description of Artificial Sequence: Synthetic oligonucleotide
  Sense strand starting at position 3795 of SEQ ID NO: 1068
agaggaauuugaugcaaau

SEQ ID NO: 85203 - RNA, 19 nt, Artificial Sequence
  Description of Artificial Sequence: Synthetic oligonucleotide
  Antisense strand to SEQ ID NO: 85122
auuugcaucaaauuccucu

SEQ ID NO: 85204 - RNA, 19 nt, Artificial Sequence
  Description of Artificial Sequence: Synthetic oligonucleotide
  Sense strand starting at position 3860 of SEQ ID NO: 1068
guagaagaauuaucgucga

SEQ ID NO: 85205 - RNA, 19 nt, Artificial Sequence
  Description of Artificial Sequence: Synthetic oligonucleotide
  Antisense strand to SEQ ID NO: 85124
ucgacgauaauucuucuac

SEQ ID NO: 85206 - RNA, 19 nt, Artificial Sequence
  Description of Artificial Sequence: Synthetic oligonucleotide
  Sense strand starting at position 3863 of SEQ ID NO: 1068
gaagaauuaucgucgaugg

SEQ ID NO: 85207 - RNA, 19 nt, Artificial Sequence
  Description of Artificial Sequence: Synthetic oligonucleotide
  Antisense strand to SEQ ID NO: 85126
ccaucgacgauaauucuuc

SEQ ID NO: 85208 - RNA, 19 nt, Artificial Sequence
  Description of Artificial Sequence: Synthetic oligonucleotide
  Sense strand starting at position 3526 of SEQ ID NO: 1069
uucugagugccuggaaacu

SEQ ID NO: 85209 - RNA, 19 nt, Artificial Sequence
  Description of Artificial Sequence: Synthetic oligonucleotide
  Antisense strand to SEQ ID NO: 85128
aguuuccaggcacucagaa

SEQ ID NO: 85210 - RNA, 19 nt, Artificial Sequence
  Description of Artificial Sequence: Synthetic oligonucleotide
  Sense strand starting at position 3524 of SEQ ID NO: 1069
ucuucugagugccuggaaa

SEQ ID NO: 85211 - RNA, 19 nt, Artificial Sequence
  Description of Artificial Sequence: Synthetic oligonucleotide
  Antisense strand to SEQ ID NO: 85130
uuuccaggcacucagaaga

SEQ ID NO: 85212 - RNA, 19 nt, Artificial Sequence
  Description of Artificial Sequence: Synthetic oligonucleotide
  Sense strand starting at position 3513 of SEQ ID NO: 1069
uuuggaaauugucuucuga

SEQ ID NO: 85213 - RNA, 19 nt, Artificial Sequence
  Description of Artificial Sequence: Synthetic oligonucleotide
  Antisense strand to SEQ ID NO: 85132
ucagaagacaauuuccaaa

SEQ ID NO: 85214 - RNA, 19 nt, Artificial Sequence
  Description of Artificial Sequence: Synthetic oligonucleotide
  Sense strand starting at position 3505 of SEQ ID NO: 1069
aagguuuauuuggaaauug

SEQ ID NO: 85215 - RNA, 19 nt, Artificial Sequence
  Description of Artificial Sequence: Synthetic oligonucleotide
  Antisense strand to SEQ ID NO: 85134
caauuuccaaauaaaccuu

SEQ ID NO: 85216 - RNA, 19 nt, Artificial Sequence
  Description of Artificial Sequence: Synthetic oligonucleotide
  Sense strand starting at position 3022 of SEQ ID NO: 1069
uggauuaguucuccuaaug

SEQ ID NO: 85217 - RNA, 19 nt, Artificial Sequence
  Description of Artificial Sequence: Synthetic oligonucleotide
  Antisense strand to SEQ ID NO: 85136
cauuaggagaacuaaucca

SEQ ID NO: 85218 - RNA, 19 nt, Artificial Sequence
  Description of Artificial Sequence: Synthetic oligonucleotide
  Sense strand starting at position 3021 of SEQ ID NO: 1069
cuggauuaguucuccuaau

SEQ ID NO: 85219 - RNA, 19 nt, Artificial Sequence
  Description of Artificial Sequence: Synthetic oligonucleotide
  Antisense strand to SEQ ID NO: 85138
auuaggagaacuaauccag

SEQ ID NO: 85220 - RNA, 19 nt, Artificial Sequence
  Description of Artificial Sequence: Synthetic oligonucleotide
  Sense strand starting at position 2960 of SEQ ID NO: 1069
cuucccuccgcagauuauu

SEQ ID NO: 85221 - RNA, 19 nt, Artificial Sequence
  Description of Artificial Sequence: Synthetic oligonucleotide
  Antisense strand to SEQ ID NO: 85140
aauaaucugcggagggaag

SEQ ID NO: 85222 - RNA, 19 nt, Artificial Sequence
  Description of Artificial Sequence: Synthetic oligonucleotide
  Sense strand starting at position 2907 of SEQ ID NO: 1069
gucccuacuugucccauaa

SEQ ID NO: 85223 - RNA, 19 nt, Artificial Sequence
  Description of Artificial Sequence: Synthetic oligonucleotide
  Antisense strand to SEQ ID NO: 85142
uuaugggacaaguagggac

SEQ ID NO: 85224 - RNA, 19 nt, Artificial Sequence
  Description of Artificial Sequence: Synthetic oligonucleotide
  Sense strand starting at position 2906 of SEQ ID NO: 1069
ggucccuacuugucccaua

SEQ ID NO: 85225 - RNA, 19 nt, Artificial Sequence
  Description of Artificial Sequence: Synthetic oligonucleotide
  Antisense strand to SEQ ID NO: 85144
uaugggacaaguagggacc

SEQ ID NO: 85226 - RNA, 19 nt, Artificial Sequence
  Description of Artificial Sequence: Synthetic oligonucleotide
  Sense strand starting at position 2876 of SEQ ID NO: 1069
ccuggugugcuauaugcaa

SEQ ID NO: 85227 - RNA, 19 nt, Artificial Sequence
  Description of Artificial Sequence: Synthetic oligonucleotide
  Antisense strand to SEQ ID NO: 85146
uugcauauagcacaccagg

SEQ ID NO: 85228 - RNA, 19 nt, Artificial Sequence
  Description of Artificial Sequence: Synthetic oligonucleotide
  Sense strand starting at position 2759 of SEQ ID NO: 1069
uugguugcaucauuaggau

SEQ ID NO: 85229 - RNA, 19 nt, Artificial Sequence
  Description of Artificial Sequence: Synthetic oligonucleotide
  Antisense strand to SEQ ID NO: 85148
auccuaaugaugcaaccaa

SEQ ID NO: 85230 - RNA, 19 nt, Artificial Sequence
  Description of Artificial Sequence: Synthetic oligonucleotide
  Sense strand starting at position 2690 of SEQ ID NO: 1069
ccgucauuauugccaauua

SEQ ID NO: 85231 - RNA, 19 nt, Artificial Sequence
  Description of Artificial Sequence: Synthetic oligonucleotide
  Antisense strand to SEQ ID NO: 85150
uaauuggcaauaaugacgg

SEQ ID NO: 85232 - RNA, 19 nt, Artificial Sequence
  Description of Artificial Sequence: Synthetic oligonucleotide
  Sense strand starting at position 2681 of SEQ ID NO: 1069
uuuguuucgccgucauuau

SEQ ID NO: 85233 - RNA, 19 nt, Artificial Sequence
  Description of Artificial Sequence: Synthetic oligonucleotide
  Antisense strand to SEQ ID NO: 85152
auaaugacggcgaaacaaa

SEQ ID NO: 85234 - RNA, 19 nt, Artificial Sequence
  Description of Artificial Sequence: Synthetic oligonucleotide
  Sense strand starting at position 2615 of SEQ ID NO: 1069
gggaaaucuuaagcagcau

SEQ ID NO: 85235 - RNA, 19 nt, Artificial Sequence
  Description of Artificial Sequence: Synthetic oligonucleotide
  Antisense strand to SEQ ID NO: 85154
augcugcuuaagauuuccc

SEQ ID NO: 85236 - RNA, 19 nt, Artificial Sequence
  Description of Artificial Sequence: Synthetic oligonucleotide
  Sense strand starting at position 2604 of SEQ ID NO: 1069
auuguugguacgggaaauc

SEQ ID NO: 85237 - RNA, 19 nt, Artificial Sequence
  Description of Artificial Sequence: Synthetic oligonucleotide
  Antisense strand to SEQ ID NO: 85156
gauuucccguaccaacaau

SEQ ID NO: 85238 - RNA, 19 nt, Artificial Sequence
  Description of Artificial Sequence: Synthetic oligonucleotide
  Sense strand starting at position 2540 of SEQ ID NO: 1069
aguuguuuccaguauauau

SEQ ID NO: 85239 - RNA, 19 nt, Artificial Sequence
  Description of Artificial Sequence: Synthetic oligonucleotide
  Antisense strand to SEQ ID NO: 85158
auauauacuggaaacaacu

SEQ ID NO: 85240 - RNA, 19 nt, Artificial Sequence
  Description of Artificial Sequence: Synthetic oligonucleotide
  Sense strand starting at position 2534 of SEQ ID NO: 1069
acaagaaguuguuuccagu

SEQ ID NO: 85241 - RNA, 19 nt, Artificial Sequence
  Description of Artificial Sequence: Synthetic oligonucleotide
  Antisense strand to SEQ ID NO: 85160
acuggaaacaacuucuugu

SEQ ID NO: 85242 - RNA, 19 nt, Artificial Sequence
  Description of Artificial Sequence: Synthetic oligonucleotide
  Sense strand starting at position 2492 of SEQ ID NO: 1069
ucugaagucuagcaaagaa

SEQ ID NO: 85243 - RNA, 19 nt, Artificial Sequence
  Description of Artificial Sequence: Synthetic oligonucleotide
  Antisense strand to SEQ ID NO: 85162
uucuuugcuagacuucaga

SEQ ID NO: 85244 - RNA, 19 nt, Artificial Sequence
  Description of Artificial Sequence: Synthetic oligonucleotide
  Sense strand starting at position 2471 of SEQ ID NO: 1069
agggaugguucagaucaga

SEQ ID NO: 85245 - RNA, 19 nt, Artificial Sequence
  Description of Artificial Sequence: Synthetic oligonucleotide
  Antisense strand to SEQ ID NO: 85164
ucugaucugaaccaucccu

SEQ ID NO: 85246 - RNA, 19 nt, Artificial Sequence
  Description of Artificial Sequence: Synthetic oligonucleotide
  Sense strand starting at position 2446 of SEQ ID NO: 1069
aggcgauuggaguacuuga

SEQ ID NO: 85247 - RNA, 19 nt, Artificial Sequence
  Description of Artificial Sequence: Synthetic oligonucleotide
  Antisense strand to SEQ ID NO: 85166
ucaaguacuccaaucgccu

SEQ ID NO: 85248 - RNA, 19 nt, Artificial Sequence
  Description of Artificial Sequence: Synthetic oligonucleotide
  Sense strand starting at position 2407 of SEQ ID NO: 1069
gggagaaauugaggaagga

SEQ ID NO: 85249 - RNA, 19 nt, Artificial Sequence
  Description of Artificial Sequence: Synthetic oligonucleotide
  Antisense strand to SEQ ID NO: 85168
uccuuccucaauuucuccc

SEQ ID NO: 85250 - RNA, 19 nt, Artificial Sequence
  Description of Artificial Sequence: Synthetic oligonucleotide
  Sense strand starting at position 2106 of SEQ ID NO: 1069
ggagcuguggaaugucuuu

SEQ ID NO: 85251 - RNA, 19 nt, Artificial Sequence
  Description of Artificial Sequence: Synthetic oligonucleotide
  Antisense strand to SEQ ID NO: 85170
aaagacauuccacagcucc

SEQ ID NO: 85252 - RNA, 19 nt, Artificial Sequence
  Description of Artificial Sequence: Synthetic oligonucleotide
  Sense strand starting at position 1120 of SEQ ID NO: 1069
uccacugcagccuagaaau

SEQ ID NO: 85253 - RNA, 19 nt, Artificial Sequence
  Description of Artificial Sequence: Synthetic oligonucleotide
  Antisense strand to SEQ ID NO: 85172
auuucuaggcugcagugga

SEQ ID NO: 85254 - RNA, 19 nt, Artificial Sequence
  Description of Artificial Sequence: Synthetic oligonucleotide
  Sense strand starting at position 1059 of SEQ ID NO: 1069
ggagcucagcacuauccau

SEQ ID NO: 85255 - RNA, 19 nt, Artificial Sequence
  Description of Artificial Sequence: Synthetic oligonucleotide
  Antisense strand to SEQ ID NO: 85174
auggauagugcugagcucc

SEQ ID NO: 85256 - RNA, 19 nt, Artificial Sequence
  Description of Artificial Sequence: Synthetic oligonucleotide
  Sense strand starting at position 737 of SEQ ID NO: 1069
agcuccgauccacauaaau

SEQ ID NO: 85257 - RNA, 19 nt, Artificial Sequence
  Description of Artificial Sequence: Synthetic oligonucleotide
  Antisense strand to SEQ ID NO: 85176
auuuauguggaucggagcu

SEQ ID NO: 85258 - RNA, 19 nt, Artificial Sequence
  Description of Artificial Sequence: Synthetic oligonucleotide
  Sense strand starting at position 712 of SEQ ID NO: 1069
ucggaaaucugauucggaa

SEQ ID NO: 85259 - RNA, 19 nt, Artificial Sequence
  Description of Artificial Sequence: Synthetic oligonucleotide
  Antisense strand to SEQ ID NO: 85178
uuccgaaucagauuuccga

SEQ ID NO: 85260 - RNA, 19 nt, Artificial Sequence
  Description of Artificial Sequence: Synthetic oligonucleotide
  Sense strand starting at position 701 of SEQ ID NO: 1069
aucagccuuagucggaaau

SEQ ID NO: 85261 - RNA, 19 nt, Artificial Sequence
  Description of Artificial Sequence: Synthetic oligonucleotide
  Antisense strand to SEQ ID NO: 85180
auuuccgacuaaggcugau

SEQ ID NO: 85262 - RNA, 19 nt, Artificial Sequence
  Description of Artificial Sequence: Synthetic oligonucleotide
  Sense strand starting at position 578 of SEQ ID NO: 1069
ggaaacgucaugugaacua

SEQ ID NO: 85263 - RNA, 19 nt, Artificial Sequence
  Description of Artificial Sequence: Synthetic oligonucleotide
  Antisense strand to SEQ ID NO: 85182
uaguucacaugacguuucc

SEQ ID NO: 85264 - RNA, 19 nt, Artificial Sequence
  Description of Artificial Sequence: Synthetic oligonucleotide
  Sense strand starting at position 565 of SEQ ID NO: 1069
guccaucucguugggaaac

SEQ ID NO: 85265 - RNA, 19 nt, Artificial Sequence
  Description of Artificial Sequence: Synthetic oligonucleotide
  Antisense strand to SEQ ID NO: 85184
guuucccaacgagauggac

SEQ ID NO: 85266 - RNA, 19 nt, Artificial Sequence
  Description of Artificial Sequence: Synthetic oligonucleotide
  Sense strand starting at position 564 of SEQ ID NO: 1069
uguccaucucguugggaaa

SEQ ID NO: 85267 - RNA, 19 nt, Artificial Sequence
  Description of Artificial Sequence: Synthetic oligonucleotide
  Antisense strand to SEQ ID NO: 85186
uuucccaacgagauggaca

SEQ ID NO: 85268 - RNA, 19 nt, Artificial Sequence
  Description of Artificial Sequence: Synthetic oligonucleotide
  Sense strand starting at position 563 of SEQ ID NO: 1069
cuguccaucucguugggaa

SEQ ID NO: 85269 - RNA, 19 nt, Artificial Sequence
  Description of Artificial Sequence: Synthetic oligonucleotide
  Antisense strand to SEQ ID NO: 85188
uucccaacgagauggacag

SEQ ID NO: 85270 - RNA, 19 nt, Artificial Sequence
  Description of Artificial Sequence: Synthetic oligonucleotide
  Sense strand starting at position 417 of SEQ ID NO: 1069
gccagugcugaugaggaaa

SEQ ID NO: 85271 - RNA, 19 nt, Artificial Sequence
  Description of Artificial Sequence: Synthetic oligonucleotide
  Antisense strand to SEQ ID NO: 85190
uuuccucaucagcacuggc

SEQ ID NO: 85272 - RNA, 19 nt, Artificial Sequence
  Description of Artificial Sequence: Synthetic oligonucleotide
  Sense strand starting at position 410 of SEQ ID NO: 1069
gugauuggccagugcugau

SEQ ID NO: 85273 - RNA, 19 nt, Artificial Sequence
  Description of Artificial Sequence: Synthetic oligonucleotide
  Antisense strand to SEQ ID NO: 85192
aucagcacuggccaaucac

SEQ ID NO: 85274 - RNA, 19 nt, Artificial Sequence
  Description of Artificial Sequence: Synthetic oligonucleotide
  Sense strand starting at position 369 of SEQ ID NO: 1069
gcgaaagucagacagcuuu

SEQ ID NO: 85275 - RNA, 19 nt, Artificial Sequence
  Description of Artificial Sequence: Synthetic oligonucleotide
  Antisense strand to SEQ ID NO: 85194
aaagcugucugacuuucgc

SEQ ID NO: 85276 - RNA, 19 nt, Artificial Sequence
  Description of Artificial Sequence: Synthetic oligonucleotide
  Sense strand starting at position 288 of SEQ ID NO: 1069
aguguugaaggaugugaau

SEQ ID NO: 85277 - RNA, 19 nt, Artificial Sequence
  Description of Artificial Sequence: Synthetic oligonucleotide
  Antisense strand to SEQ ID NO: 85196
auucacauccuucaacacu

SEQ ID NO: 85278 - RNA, 19 nt, Artificial Sequence
  Description of Artificial Sequence: Synthetic oligonucleotide
  Sense strand starting at position 171 of SEQ ID NO: 1069
ugguaaagaucccuuaccu

SEQ ID NO: 85279 - RNA, 19 nt, Artificial Sequence
  Description of Artificial Sequence: Synthetic oligonucleotide
  Antisense strand to SEQ ID NO: 85198
agguaagggaucuuuacca

SEQ ID NO: 85280 - RNA, 19 nt, Artificial Sequence
  Description of Artificial Sequence: Synthetic oligonucleotide
  Sense strand starting at position 162 of SEQ ID NO: 1069
acaccacacugguaaagau

SEQ ID NO: 85281 - RNA, 19 nt, Artificial Sequence
  Description of Artificial Sequence: Synthetic oligonucleotide
  Antisense strand to SEQ ID NO: 85200
aucuuuaccaguguggugu

SEQ ID NO: 85282 - RNA, 19 nt, Artificial Sequence
  Description of Artificial Sequence: Synthetic oligonucleotide
  Sense strand starting at position 128 of SEQ ID NO: 1069
uuugacaguuaucuuaaga

SEQ ID NO: 85283 - RNA, 19 nt, Artificial Sequence
  Description of Artificial Sequence: Synthetic oligonucleotide
  Antisense strand to SEQ ID NO: 85202
ucuuaagauaacugucaaa

SEQ ID NO: 85284 - RNA, 19 nt, Artificial Sequence
  Description of Artificial Sequence: Synthetic oligonucleotide
  Sense strand starting at position 66 of SEQ ID NO: 1069
ucucuuaguuaagcaguga

SEQ ID NO: 85285 - RNA, 19 nt, Artificial Sequence
  Description of Artificial Sequence: Synthetic oligonucleotide
  Antisense strand to SEQ ID NO: 85204
ucacugcuuaacuaagaga

SEQ ID NO: 85286 - RNA, 19 nt, Artificial Sequence
  Description of Artificial Sequence: Synthetic oligonucleotide
  Sense strand starting at position 62 of SEQ ID NO: 1069
gcacucucuuaguuaagca

SEQ ID NO: 85287 - RNA, 19 nt, Artificial Sequence
  Description of Artificial Sequence: Synthetic oligonucleotide
  Antisense strand to SEQ ID NO: 85206
ugcuuaacuaagagagugc

SEQ ID NO: 85288 - RNA, 19 nt, Artificial Sequence
  Description of Artificial Sequence: Synthetic oligonucleotide
  Sense strand starting at position 115 of SEQ ID NO: 1070
agguuuggcaaauguugaa

SEQ ID NO: 85289 - RNA, 19 nt, Artificial Sequence
  Description of Artificial Sequence: Synthetic oligonucleotide
  Antisense strand to SEQ ID NO: 85208
uucaacauuugccaaaccu

SEQ ID NO: 85290 - RNA, 19 nt, Artificial Sequence
  Description of Artificial Sequence: Synthetic oligonucleotide
  Sense strand starting at position 122 of SEQ ID NO: 1070
gcaaauguugaaugaaugu

SEQ ID NO: 85291 - RNA, 19 nt, Artificial Sequence
  Description of Artificial Sequence: Synthetic oligonucleotide
  Antisense strand to SEQ ID NO: 85210
acauucauucaacauuugc

SEQ ID NO: 85292 - RNA, 19 nt, Artificial Sequence
  Description of Artificial Sequence: Synthetic oligonucleotide
  Sense strand starting at position 157 of SEQ ID NO: 1070
ucccucuuuggugaaauca

SEQ ID NO: 85293 - RNA, 19 nt, Artificial Sequence
  Description of Artificial Sequence: Synthetic oligonucleotide
  Antisense strand to SEQ ID NO: 85212
ugauuucaccaaagaggga

SEQ ID NO: 85294 - RNA, 19 nt, Artificial Sequence
  Description of Artificial Sequence: Synthetic oligonucleotide
  Sense strand starting at position 209 of SEQ ID NO: 1070
uggguuuagucuuuaggga

SEQ ID NO: 85295 - RNA, 19 nt, Artificial Sequence
  Description of Artificial Sequence: Synthetic oligonucleotide
  Antisense strand to SEQ ID NO: 85214
ucccuaaagacuaaaccca

SEQ ID NO: 85296 - RNA, 19 nt, Artificial Sequence
  Description of Artificial Sequence: Synthetic oligonucleotide
  Sense strand starting at position 210 of SEQ ID NO: 1070
ggguuuagucuuuagggaa

SEQ ID NO: 85297 - RNA, 19 nt, Artificial Sequence
  Description of Artificial Sequence: Synthetic oligonucleotide
  Antisense strand to SEQ ID NO: 85216
uucccuaaagacuaaaccc

SEQ ID NO: 85298 - RNA, 19 nt, Artificial Sequence
  Description of Artificial Sequence: Synthetic oligonucleotide
  Sense strand starting at position 434 of SEQ ID NO: 1070
aucagacuaagugguugau

SEQ ID NO: 85299 - RNA, 19 nt, Artificial Sequence
  Description of Artificial Sequence: Synthetic oligonucleotide
  Antisense strand to SEQ ID NO: 85218
aucaaccacuuagucugau

SEQ ID NO: 85300 - RNA, 19 nt, Artificial Sequence
  Description of Artificial Sequence: Synthetic oligonucleotide
  Sense strand starting at position 438 of SEQ ID NO: 1070
gacuaagugguugaugcaa

SEQ ID NO: 85301 - RNA, 19 nt, Artificial Sequence
  Description of Artificial Sequence: Synthetic oligonucleotide
  Antisense strand to SEQ ID NO: 85220
uugcaucaaccacuuaguc

SEQ ID NO: 85302 - RNA, 19 nt, Artificial Sequence
  Description of Artificial Sequence: Synthetic oligonucleotide
  Sense strand starting at position 446 of SEQ ID NO: 1070
gguugaugcaacugaacca

SEQ ID NO: 85303 - RNA, 19 nt, Artificial Sequence
  Description of Artificial Sequence: Synthetic oligonucleotide
  Antisense strand to SEQ ID NO: 85222
ugguucaguugcaucaacc

SEQ ID NO: 85304 - RNA, 19 nt, Artificial Sequence
  Description of Artificial Sequence: Synthetic oligonucleotide
  Sense strand starting at position 464 of SEQ ID NO: 1070
aguuuaaaggcugguaaga

SEQ ID NO: 85305 - RNA, 19 nt, Artificial Sequence
  Description of Artificial Sequence: Synthetic oligonucleotide
  Antisense strand to SEQ ID NO: 85224
ucuuaccagccuuuaaacu

SEQ ID NO: 85306 - RNA, 19 nt, Artificial Sequence
  Description of Artificial Sequence: Synthetic oligonucleotide
  Sense strand starting at position 487 of SEQ ID NO: 1070
ugcagaagucuuuagauag

SEQ ID NO: 85307 - RNA, 19 nt, Artificial Sequence
  Description of Artificial Sequence: Synthetic oligonucleotide
  Antisense strand to SEQ ID NO: 85226
cuaucuaaagacuucugca

SEQ ID NO: 85308 - RNA, 19 nt, Artificial Sequence
  Description of Artificial Sequence: Synthetic oligonucleotide
  Sense strand starting at position 786 of SEQ ID NO: 1070
gccgguguucuguuaaauu

SEQ ID NO: 85309 - RNA, 19 nt, Artificial Sequence
  Description of Artificial Sequence: Synthetic oligonucleotide
  Antisense strand to SEQ ID NO: 85228
aauuuaacagaacaccggc

SEQ ID NO: 85310 - RNA, 19 nt, Artificial Sequence
  Description of Artificial Sequence: Synthetic oligonucleotide
  Sense strand starting at position 867 of SEQ ID NO: 1070
agcuaucaucuauaguuua

SEQ ID NO: 85311 - RNA, 19 nt, Artificial Sequence
  Description of Artificial Sequence: Synthetic oligonucleotide
  Antisense strand to SEQ ID NO: 85230
uaaacuauagaugauagcu

SEQ ID NO: 85312 - RNA, 19 nt, Artificial Sequence
  Description of Artificial Sequence: Synthetic oligonucleotide
  Sense strand starting at position 904 of SEQ ID NO: 1070
ugaugaaucccguaaagcu

SEQ ID NO: 85313 - RNA, 19 nt, Artificial Sequence
  Description of Artificial Sequence: Synthetic oligonucleotide
  Antisense strand to SEQ ID NO: 85232
agcuuuacgggauucauca

SEQ ID NO: 85314 - RNA, 19 nt, Artificial Sequence
  Description of Artificial Sequence: Synthetic oligonucleotide
  Sense strand starting at position 1025 of SEQ ID NO: 1070
ggaaguaaucugugucaca

SEQ ID NO: 85315 - RNA, 19 nt, Artificial Sequence
  Description of Artificial Sequence: Synthetic oligonucleotide
  Antisense strand to SEQ ID NO: 85234
ugugacacagauuacuucc

SEQ ID NO: 85316 - RNA, 19 nt, Artificial Sequence
  Description of Artificial Sequence: Synthetic oligonucleotide
  Sense strand starting at position 1026 of SEQ ID NO: 1070
gaaguaaucugugucacag

SEQ ID NO: 85317 - RNA, 19 nt, Artificial Sequence
  Description of Artificial Sequence: Synthetic oligonucleotide
  Antisense strand to SEQ ID NO: 85236
cugugacacagauuacuuc

SEQ ID NO: 85318 - RNA, 19 nt, Artificial Sequence
  Description of Artificial Sequence: Synthetic oligonucleotide
  Sense strand starting at position 1041 of SEQ ID NO: 1070
acagcaagcucccuggaaa

SEQ ID NO: 85319 - RNA, 19 nt, Artificial Sequence
  Description of Artificial Sequence: Synthetic oligonucleotide
  Antisense strand to SEQ ID NO: 85238
uuuccagggagcuugcugu

SEQ ID NO: 85320 - RNA, 19 nt, Artificial Sequence
  Description of Artificial Sequence: Synthetic oligonucleotide
  Sense strand starting at position 1125 of SEQ ID NO: 1070
guuccuuagcuccagagaa

SEQ ID NO: 85321 - RNA, 19 nt, Artificial Sequence
  Description of Artificial Sequence: Synthetic oligonucleotide
  Antisense strand to SEQ ID NO: 85240
uucucuggagcuaaggaac

SEQ ID NO: 85322 - RNA, 19 nt, Artificial Sequence
  Description of Artificial Sequence: Synthetic oligonucleotide
  Sense strand starting at position 1154 of SEQ ID NO: 1070
caccuagaaugguuuagaa

SEQ ID NO: 85323 - RNA, 19 nt, Artificial Sequence
  Description of Artificial Sequence: Synthetic oligonucleotide
  Antisense strand to SEQ ID NO: 85242
uucuaaaccauucuaggug

SEQ ID NO: 85324 - RNA, 19 nt, Artificial Sequence
  Description of Artificial Sequence: Synthetic oligonucleotide
  Sense strand starting at position 1294 of SEQ ID NO: 1070
cgccgaccuccgaggaguu

SEQ ID NO: 85325 - RNA, 19 nt, Artificial Sequence
  Description of Artificial Sequence: Synthetic oligonucleotide
  Antisense strand to SEQ ID NO: 85244
aacuccucggaggucggcg

SEQ ID NO: 85326 - RNA, 19 nt, Artificial Sequence
  Description of Artificial Sequence: Synthetic oligonucleotide
  Sense strand starting at position 1401 of SEQ ID NO: 1070
gcaagaggcuacuuaggaa

SEQ ID NO: 85327 - RNA, 19 nt, Artificial Sequence
  Description of Artificial Sequence: Synthetic oligonucleotide
  Antisense strand to SEQ ID NO: 85246
uuccuaaguagccucuugc

SEQ ID NO: 85328 - RNA, 19 nt, Artificial Sequence
  Description of Artificial Sequence: Synthetic oligonucleotide
  Sense strand starting at position 1415 of SEQ ID NO: 1070
aggaauaauuccuuguauc

SEQ ID NO: 85329 - RNA, 19 nt, Artificial Sequence
  Description of Artificial Sequence: Synthetic oligonucleotide
  Antisense strand to SEQ ID NO: 85248
gauacaaggaauuauuccu

SEQ ID NO: 85330 - RNA, 19 nt, Artificial Sequence
  Description of Artificial Sequence: Synthetic oligonucleotide
  Sense strand starting at position 1416 of SEQ ID NO: 1070
ggaauaauuccuuguaucu

SEQ ID NO: 85331 - RNA, 19 nt, Artificial Sequence
  Description of Artificial Sequence: Synthetic oligonucleotide
  Antisense strand to SEQ ID NO: 85250
agauacaaggaauuauucc

SEQ ID NO: 85332 - RNA, 19 nt, Artificial Sequence
  Description of Artificial Sequence: Synthetic oligonucleotide
  Sense strand starting at position 2277 of SEQ ID NO: 1070
augucuuaucgggacaaau

SEQ ID NO: 85333 - RNA, 19 nt, Artificial Sequence
  Description of Artificial Sequence: Synthetic oligonucleotide
  Antisense strand to SEQ ID NO: 85252
auuugucccgauaagacau

SEQ ID NO: 85334 - RNA, 19 nt, Artificial Sequence
  Description of Artificial Sequence: Synthetic oligonucleotide
  Sense strand starting at position 2289 of SEQ ID NO: 1070
gacaaaugagcaugacagu

SEQ ID NO: 85335 - RNA, 19 nt, Artificial Sequence
  Description of Artificial Sequence: Synthetic oligonucleotide
  Antisense strand to SEQ ID NO: 85254
acugucaugcucauuuguc

SEQ ID NO: 85336 - RNA, 19 nt, Artificial Sequence
  Description of Artificial Sequence: Synthetic oligonucleotide
  Sense strand starting at position 2355 of SEQ ID NO: 1070
agaagagucuuugucucug

SEQ ID NO: 85337 - RNA, 19 nt, Artificial Sequence
  Description of Artificial Sequence: Synthetic oligonucleotide
  Antisense strand to SEQ ID NO: 85256
cagagacaaagacucuucu

SEQ ID NO: 85338 - RNA, 19 nt, Artificial Sequence
  Description of Artificial Sequence: Synthetic oligonucleotide
  Sense strand starting at position 2634 of SEQ ID NO: 1070
ggauacugugggugggaaa

SEQ ID NO: 85339 - RNA, 19 nt, Artificial Sequence
  Description of Artificial Sequence: Synthetic oligonucleotide
  Antisense strand to SEQ ID NO: 85258
uuucccacccacaguaucc

SEQ ID NO: 85340 - RNA, 19 nt, Artificial Sequence
  Description of Artificial Sequence: Synthetic oligonucleotide
  Sense strand starting at position 2713 of SEQ ID NO: 1070
ggagguccucccugacaag

SEQ ID NO: 85341 - RNA, 19 nt, Artificial Sequence
  Description of Artificial Sequence: Synthetic oligonucleotide
  Antisense strand to SEQ ID NO: 85260
cuugucagggaggaccucc

SEQ ID NO: 85342 - RNA, 19 nt, Artificial Sequence
  Description of Artificial Sequence: Synthetic oligonucleotide
  Sense strand starting at position 2755 of SEQ ID NO: 1070
cuguauuugccagguacac

SEQ ID NO: 85343 - RNA, 19 nt, Artificial Sequence
  Description of Artificial Sequence: Synthetic oligonucleotide
  Antisense strand to SEQ ID NO: 85262
guguaccuggcaaauacag

SEQ ID NO: 85344 - RNA, 19 nt, Artificial Sequence
  Description of Artificial Sequence: Synthetic oligonucleotide
  Sense strand starting at position 2848 of SEQ ID NO: 1070
ucuccaagugggcauuaaa

SEQ ID NO: 85345 - RNA, 19 nt, Artificial Sequence
  Description of Artificial Sequence: Synthetic oligonucleotide
  Antisense strand to SEQ ID NO: 85264
uuuaaugcccacuuggaga

SEQ ID NO: 85346 - RNA, 19 nt, Artificial Sequence
  Description of Artificial Sequence: Synthetic oligonucleotide
  Sense strand starting at position 2900 of SEQ ID NO: 1070
ucaagagauuccuuucugu

SEQ ID NO: 85347 - RNA, 19 nt, Artificial Sequence
  Description of Artificial Sequence: Synthetic oligonucleotide
  Antisense strand to SEQ ID NO: 85266
acagaaaggaaucucuuga

SEQ ID NO: 85348 - RNA, 19 nt, Artificial Sequence
  Description of Artificial Sequence: Synthetic oligonucleotide
  Sense strand starting at position 2903 of SEQ ID NO: 1070
agagauuccuuucuguuua

SEQ ID NO: 85349 - RNA, 19 nt, Artificial Sequence
  Description of Artificial Sequence: Synthetic oligonucleotide
  Antisense strand to SEQ ID NO: 85268
uaaacagaaaggaaucucu

SEQ ID NO: 85350 - RNA, 19 nt, Artificial Sequence
  Description of Artificial Sequence: Synthetic oligonucleotide
  Sense strand starting at position 3081 of SEQ ID NO: 1070
agcucaaaucuguaaugac

SEQ ID NO: 85351 - RNA, 19 nt, Artificial Sequence
  Description of Artificial Sequence: Synthetic oligonucleotide
  Antisense strand to SEQ ID NO: 85270
gucauuacagauuugagcu

SEQ ID NO: 85352 - RNA, 19 nt, Artificial Sequence
  Description of Artificial Sequence: Synthetic oligonucleotide
  Sense strand starting at position 3173 of SEQ ID NO: 1070
agccuaaggccagaguaua

SEQ ID NO: 85353 - RNA, 19 nt, Artificial Sequence
  Description of Artificial Sequence: Synthetic oligonucleotide
  Antisense strand to SEQ ID NO: 85272
uauacucuggccuuaggcu

SEQ ID NO: 85354 - RNA, 19 nt, Artificial Sequence
  Description of Artificial Sequence: Synthetic oligonucleotide
  Sense strand starting at position 3337 of SEQ ID NO: 1070
gagguaguauuauccucau

SEQ ID NO: 85355 - RNA, 19 nt, Artificial Sequence
  Description of Artificial Sequence: Synthetic oligonucleotide
  Antisense strand to SEQ ID NO: 85274
augaggauaauacuaccuc

SEQ ID NO: 85356 - RNA, 19 nt, Artificial Sequence
  Description of Artificial Sequence: Synthetic oligonucleotide
  Sense strand starting at position 3367 of SEQ ID NO: 1070
ggaaauugugguugagagg

SEQ ID NO: 85357 - RNA, 19 nt, Artificial Sequence
  Description of Artificial Sequence: Synthetic oligonucleotide
  Antisense strand to SEQ ID NO: 85276
ccucucaaccacaauuucc

SEQ ID NO: 85358 - RNA, 19 nt, Artificial Sequence
  Description of Artificial Sequence: Synthetic oligonucleotide
  Sense strand starting at position 3390 of SEQ ID NO: 1070
uaaggaaguuccucaaggu

SEQ ID NO: 85359 - RNA, 19 nt, Artificial Sequence
  Description of Artificial Sequence: Synthetic oligonucleotide
  Antisense strand to SEQ ID NO: 85278
accuugaggaacuuccuua

SEQ ID NO: 85360 - RNA, 19 nt, Artificial Sequence
  Description of Artificial Sequence: Synthetic oligonucleotide
  Sense strand starting at position 3541 of SEQ ID NO: 1070
acacuugagcagggaucau

SEQ ID NO: 85361 - RNA, 19 nt, Artificial Sequence
  Description of Artificial Sequence: Synthetic oligonucleotide
  Antisense strand to SEQ ID NO: 85280
augaucccugcucaagugu

SEQ ID NO: 85362 - RNA, 19 nt, Artificial Sequence
  Description of Artificial Sequence: Synthetic oligonucleotide
  Sense strand starting at position 3741 of SEQ ID NO: 1070
uggacaugguugucugauc

SEQ ID NO: 85363 - RNA, 19 nt, Artificial Sequence
  Description of Artificial Sequence: Synthetic oligonucleotide
  Antisense strand to SEQ ID NO: 85282
gaucagacaaccaugucca

SEQ ID NO: 85364 - RNA, 19 nt, Artificial Sequence
  Description of Artificial Sequence: Synthetic oligonucleotide
  Sense strand starting at position 3849 of SEQ ID NO: 1070
uucuguggcagagaaauca

SEQ ID NO: 85365 - RNA, 19 nt, Artificial Sequence
  Description of Artificial Sequence: Synthetic oligonucleotide
  Antisense strand to SEQ ID NO: 85284
ugauuucucugccacagaa

SEQ ID NO: 85366 - RNA, 19 nt, Artificial Sequence
  Description of Artificial Sequence: Synthetic oligonucleotide
  Sense strand starting at position 3892 of SEQ ID NO: 1070
uggauuuacucacacuaga

SEQ ID NO: 85367 - RNA, 19 nt, Artificial Sequence
  Description of Artificial Sequence: Synthetic oligonucleotide
  Antisense strand to SEQ ID NO: 85286
ucuagugugaguaaaucca

SEQ ID NO: 85368 - RNA, 19 nt, Artificial Sequence
  Description of Artificial Sequence: Synthetic oligonucleotide
  Sense strand starting at position 179 of SEQ ID NO: 1071
ugguguggacuucacagau

SEQ ID NO: 85369 - RNA, 19 nt, Artificial Sequence
  Description of Artificial Sequence: Synthetic oligonucleotide
  Antisense strand to SEQ ID NO: 85288
aucugugaaguccacacca

SEQ ID NO: 85370 - RNA, 19 nt, Artificial Sequence
  Description of Artificial Sequence: Synthetic oligonucleotide
  Sense strand starting at position 395 of SEQ ID NO: 1071
agguuuggcaaauguugaa

SEQ ID NO: 85371 - RNA, 19 nt, Artificial Sequence
  Description of Artificial Sequence: Synthetic oligonucleotide
  Antisense strand to SEQ ID NO: 85290
uucaacauuugccaaaccu

SEQ ID NO: 85372 - RNA, 19 nt, Artificial Sequence
  Description of Artificial Sequence: Synthetic oligonucleotide
  Sense strand starting at position 402 of SEQ ID NO: 1071
gcaaauguugaaugaaugu

SEQ ID NO: 85373 - RNA, 19 nt, Artificial Sequence
  Description of Artificial Sequence: Synthetic oligonucleotide
  Antisense strand to SEQ ID NO: 85292
acauucauucaacauuugc

SEQ ID NO: 85374 - RNA, 19 nt, Artificial Sequence
  Description of Artificial Sequence: Synthetic oligonucleotide
  Sense strand starting at position 437 of SEQ ID NO: 1071
ucccucuuuggugaaauca

SEQ ID NO: 85375 - RNA, 19 nt, Artificial Sequence
  Description of Artificial Sequence: Synthetic oligonucleotide
  Antisense strand to SEQ ID NO: 85294
ugauuucaccaaagaggga

SEQ ID NO: 85376 - RNA, 19 nt, Artificial Sequence
  Description of Artificial Sequence: Synthetic oligonucleotide
  Sense strand starting at position 489 of SEQ ID NO: 1071
uggguuuagucuuuaggga

SEQ ID NO: 85377 - RNA, 19 nt, Artificial Sequence
  Description of Artificial Sequence: Synthetic oligonucleotide
  Antisense strand to SEQ ID NO: 85296
ucccuaaagacuaaaccca

SEQ ID NO: 85378 - RNA, 19 nt, Artificial Sequence
  Description of Artificial Sequence: Synthetic oligonucleotide
  Sense strand starting at position 490 of SEQ ID NO: 1071
ggguuuagucuuuagggaa

SEQ ID NO: 85379 - RNA, 19 nt, Artificial Sequence
  Description of Artificial Sequence: Synthetic oligonucleotide
  Antisense strand to SEQ ID NO: 85298
uucccuaaagacuaaaccc

SEQ ID NO: 85380 - RNA, 19 nt, Artificial Sequence
  Description of Artificial Sequence: Synthetic oligonucleotide
  Sense strand starting at position 714 of SEQ ID NO: 1071
aucagacuaagugguugau

SEQ ID NO: 85381 - RNA, 19 nt, Artificial Sequence
  Description of Artificial Sequence: Synthetic oligonucleotide
  Antisense strand to SEQ ID NO: 85300
aucaaccacuuagucugau

SEQ ID NO: 85382 - RNA, 19 nt, Artificial Sequence
  Description of Artificial Sequence: Synthetic oligonucleotide
  Sense strand starting at position 717 of SEQ ID NO: 1071
agacuaagugguugaugca

SEQ ID NO: 85383 - RNA, 19 nt, Artificial Sequence
  Description of Artificial Sequence: Synthetic oligonucleotide
  Antisense strand to SEQ ID NO: 85302
ugcaucaaccacuuagucu

SEQ ID NO: 85384 - RNA, 19 nt, Artificial Sequence
  Description of Artificial Sequence: Synthetic oligonucleotide
  Sense strand starting at position 718 of SEQ ID NO: 1071
gacuaagugguugaugcaa

SEQ ID NO: 85385 - RNA, 19 nt, Artificial Sequence
  Description of Artificial Sequence: Synthetic oligonucleotide
  Antisense strand to SEQ ID NO: 85304
uugcaucaaccacuuaguc

SEQ ID NO: 85386 - RNA, 19 nt, Artificial Sequence
  Description of Artificial Sequence: Synthetic oligonucleotide
  Sense strand starting at position 726 of SEQ ID NO: 1071
gguugaugcaacugaacca

SEQ ID NO: 85387 - RNA, 19 nt, Artificial Sequence
  Description of Artificial Sequence: Synthetic oligonucleotide
  Antisense strand to SEQ ID NO: 85306
ugguucaguugcaucaacc

SEQ ID NO: 85388 - RNA, 19 nt, Artificial Sequence
  Description of Artificial Sequence: Synthetic oligonucleotide
  Sense strand starting at position 744 of SEQ ID NO: 1071
aguuuaaaggcugguaaga

SEQ ID NO: 85389 - RNA, 19 nt, Artificial Sequence
  Description of Artificial Sequence: Synthetic oligonucleotide
  Antisense strand to SEQ ID NO: 85308
ucuuaccagccuuuaaacu

SEQ ID NO: 85390 - RNA, 19 nt, Artificial Sequence
  Description of Artificial Sequence: Synthetic oligonucleotide
  Sense strand starting at position 767 of SEQ ID NO: 1071
ugcagaagucuuuagauag

SEQ ID NO: 85391 - RNA, 19 nt, Artificial Sequence
  Description of Artificial Sequence: Synthetic oligonucleotide
  Antisense strand to SEQ ID NO: 85310
cuaucuaaagacuucugca

SEQ ID NO: 85392 - RNA, 19 nt, Artificial Sequence
  Description of Artificial Sequence: Synthetic oligonucleotide
  Sense strand starting at position 1066 of SEQ ID NO: 1071
gccgguguucuguuaaauu

SEQ ID NO: 85393 - RNA, 19 nt, Artificial Sequence
  Description of Artificial Sequence: Synthetic oligonucleotide
  Antisense strand to SEQ ID NO: 85312
aauuuaacagaacaccggc

SEQ ID NO: 85394 - RNA, 19 nt, Artificial Sequence
  Description of Artificial Sequence: Synthetic oligonucleotide
  Sense strand starting at position 1147 of SEQ ID NO: 1071
agcuaucaucuauaguuua

SEQ ID NO: 85395 - RNA, 19 nt, Artificial Sequence
  Description of Artificial Sequence: Synthetic oligonucleotide
  Antisense strand to SEQ ID NO: 85314
uaaacuauagaugauagcu

SEQ ID NO: 85396 - RNA, 19 nt, Artificial Sequence
  Description of Artificial Sequence: Synthetic oligonucleotide
  Sense strand starting at position 1184 of SEQ ID NO: 1071
ugaugaaucccguaaagcu

SEQ ID NO: 85397 - RNA, 19 nt, Artificial Sequence
  Description of Artificial Sequence: Synthetic oligonucleotide
  Antisense strand to SEQ ID NO: 85316
agcuuuacgggauucauca

SEQ ID NO: 85398 - RNA, 19 nt, Artificial Sequence
  Description of Artificial Sequence: Synthetic oligonucleotide
  Sense strand starting at position 1305 of SEQ ID NO: 1071
ggaaguaaucugugucaca

SEQ ID NO: 85399 - RNA, 19 nt, Artificial Sequence
  Description of Artificial Sequence: Synthetic oligonucleotide
  Antisense strand to SEQ ID NO: 85318
ugugacacagauuacuucc

SEQ ID NO: 85400 - RNA, 19 nt, Artificial Sequence
  Description of Artificial Sequence: Synthetic oligonucleotide
  Sense strand starting at position 1306 of SEQ ID NO: 1071
gaaguaaucugugucacag

SEQ ID NO: 85401 - RNA, 19 nt, Artificial Sequence
  Description of Artificial Sequence: Synthetic oligonucleotide
  Antisense strand to SEQ ID NO: 85320
cugugacacagauuacuuc

SEQ ID NO: 85402 - RNA, 19 nt, Artificial Sequence
  Description of Artificial Sequence: Synthetic oligonucleotide
  Sense strand starting at position 1321 of SEQ ID NO: 1071
acagcaagcucccuggaaa

SEQ ID NO: 85403 - RNA, 19 nt, Artificial Sequence
  Description of Artificial Sequence: Synthetic oligonucleotide
  Antisense strand to SEQ ID NO: 85322
uuuccagggagcuugcugu

SEQ ID NO: 85404 - RNA, 19 nt, Artificial Sequence
  Description of Artificial Sequence: Synthetic oligonucleotide
  Sense strand starting at position 1405 of SEQ ID NO: 1071
guuccuuagcuccagagaa

SEQ ID NO: 85405 - RNA, 19 nt, Artificial Sequence
  Description of Artificial Sequence: Synthetic oligonucleotide
  Antisense strand to SEQ ID NO: 85324
uucucuggagcuaaggaac

SEQ ID NO: 85406 - RNA, 19 nt, Artificial Sequence
  Description of Artificial Sequence: Synthetic oligonucleotide
  Sense strand starting at position 1434 of SEQ ID NO: 1071
caccuagaaugguuuagaa

SEQ ID NO: 85407 - RNA, 19 nt, Artificial Sequence
  Description of Artificial Sequence: Synthetic oligonucleotide
  Antisense strand to SEQ ID NO: 85326
uucuaaaccauucuaggug

SEQ ID NO: 85408 - RNA, 19 nt, Artificial Sequence
  Description of Artificial Sequence: Synthetic oligonucleotide
  Sense strand starting at position 1574 of SEQ ID NO: 1071
cgccgaccuccgaggaguu

SEQ ID NO: 85409 - RNA, 19 nt, Artificial Sequence
  Description of Artificial Sequence: Synthetic oligonucleotide
  Antisense strand to SEQ ID NO: 85328
aacuccucggaggucggcg

SEQ ID NO: 85410 - RNA, 19 nt, Artificial Sequence
  Description of Artificial Sequence: Synthetic oligonucleotide
  Sense strand starting at position 1681 of SEQ ID NO: 1071
gcaagaggcuacuuaggaa

SEQ ID NO: 85411 - RNA, 19 nt, Artificial Sequence
  Description of Artificial Sequence: Synthetic oligonucleotide
  Antisense strand to SEQ ID NO: 85330
uuccuaaguagccucuugc

SEQ ID NO: 85412 - RNA, 19 nt, Artificial Sequence
  Description of Artificial Sequence: Synthetic oligonucleotide
  Sense strand starting at position 1695 of SEQ ID NO: 1071
aggaauaauuccuuguauc

SEQ ID NO: 85413 - RNA, 19 nt, Artificial Sequence
  Description of Artificial Sequence: Synthetic oligonucleotide
  Antisense strand to SEQ ID NO: 85332
gauacaaggaauuauuccu

SEQ ID NO: 85414 - RNA, 19 nt, Artificial Sequence
  Description of Artificial Sequence: Synthetic oligonucleotide
  Sense strand starting at position 1696 of SEQ ID NO: 1071
ggaauaauuccuuguaucu

SEQ ID NO: 85415 - RNA, 19 nt, Artificial Sequence
  Description of Artificial Sequence: Synthetic oligonucleotide
  Antisense strand to SEQ ID NO: 85334
agauacaaggaauuauucc

SEQ ID NO: 85416 - RNA, 19 nt, Artificial Sequence
  Description of Artificial Sequence: Synthetic oligonucleotide
  Sense strand starting at position 2557 of SEQ ID NO: 1071
augucuuaucgggacaaau

SEQ ID NO: 85417 - RNA, 19 nt, Artificial Sequence
  Description of Artificial Sequence: Synthetic oligonucleotide
  Antisense strand to SEQ ID NO: 85336
auuugucccgauaagacau

SEQ ID NO: 85418 - RNA, 19 nt, Artificial Sequence
  Description of Artificial Sequence: Synthetic oligonucleotide
  Sense strand starting at position 2569 of SEQ ID NO: 1071
gacaaaugagcaugacagu

SEQ ID NO: 85419 - RNA, 19 nt, Artificial Sequence
  Description of Artificial Sequence: Synthetic oligonucleotide
  Antisense strand to SEQ ID NO: 85338
acugucaugcucauuuguc

SEQ ID NO: 85420 - RNA, 19 nt, Artificial Sequence
  Description of Artificial Sequence: Synthetic oligonucleotide
  Sense strand starting at position 2635 of SEQ ID NO: 1071
agaagagucuuugucucug

SEQ ID NO: 85421 - RNA, 19 nt, Artificial Sequence
  Description of Artificial Sequence: Synthetic oligonucleotide
  Antisense strand to SEQ ID NO: 85340
cagagacaaagacucuucu

SEQ ID NO: 85422 - RNA, 19 nt, Artificial Sequence
  Description of Artificial Sequence: Synthetic oligonucleotide
  Sense strand starting at position 2914 of SEQ ID NO: 1071
ggauacugugggugggaaa

SEQ ID NO: 85423 - RNA, 19 nt, Artificial Sequence
  Description of Artificial Sequence: Synthetic oligonucleotide
  Antisense strand to SEQ ID NO: 85342
uuucccacccacaguaucc

SEQ ID NO: 85424 - RNA, 19 nt, Artificial Sequence
  Description of Artificial Sequence: Synthetic oligonucleotide
  Sense strand starting at position 2993 of SEQ ID NO: 1071
ggagguccucccugacaag

SEQ ID NO: 85425 - RNA, 19 nt, Artificial Sequence
  Description of Artificial Sequence: Synthetic oligonucleotide
  Antisense strand to SEQ ID NO: 85344
cuugucagggaggaccucc

SEQ ID NO: 85426 - RNA, 19 nt, Artificial Sequence
  Description of Artificial Sequence: Synthetic oligonucleotide
  Sense strand starting at position 3035 of SEQ ID NO: 1071
cuguauuugccagguacac

SEQ ID NO: 85427 - RNA, 19 nt, Artificial Sequence
  Description of Artificial Sequence: Synthetic oligonucleotide
  Antisense strand to SEQ ID NO: 85346
guguaccuggcaaauacag

SEQ ID NO: 85428 - RNA, 19 nt, Artificial Sequence
  Description of Artificial Sequence: Synthetic oligonucleotide
  Sense strand starting at position 3128 of SEQ ID NO: 1071
ucuccaagugggcauuaaa

SEQ ID NO: 85429 - RNA, 19 nt, Artificial Sequence
  Description of Artificial Sequence: Synthetic oligonucleotide
  Antisense strand to SEQ ID NO: 85348
uuuaaugcccacuuggaga

SEQ ID NO: 85430 - RNA, 19 nt, Artificial Sequence
  Description of Artificial Sequence: Synthetic oligonucleotide
  Sense strand starting at position 3180 of SEQ ID NO: 1071
ucaagagauuccuuucugu

SEQ ID NO: 85431 - RNA, 19 nt, Artificial Sequence
  Description of Artificial Sequence: Synthetic oligonucleotide
  Antisense strand to SEQ ID NO: 85350
acagaaaggaaucucuuga

SEQ ID NO: 85432 - RNA, 19 nt, Artificial Sequence
  Description of Artificial Sequence: Synthetic oligonucleotide
  Sense strand starting at position 3183 of SEQ ID NO: 1071
agagauuccuuucuguuua

SEQ ID NO: 85433 - RNA, 19 nt, Artificial Sequence
  Description of Artificial Sequence: Synthetic oligonucleotide
  Antisense strand to SEQ ID NO: 85352
uaaacagaaaggaaucucu

SEQ ID NO: 85434 - RNA, 19 nt, Artificial Sequence
  Description of Artificial Sequence: Synthetic oligonucleotide
  Sense strand starting at position 3361 of SEQ ID NO: 1071
agcucaaaucuguaaugac

SEQ ID NO: 85435 - RNA, 19 nt, Artificial Sequence
  Description of Artificial Sequence: Synthetic oligonucleotide
  Antisense strand to SEQ ID NO: 85354
gucauuacagauuugagcu

SEQ ID NO: 85436 - RNA, 19 nt, Artificial Sequence
  Description of Artificial Sequence: Synthetic oligonucleotide
  Sense strand starting at position 3426 of SEQ ID NO: 1071
cuauguagguuccucuaaa

SEQ ID NO: 85437 - RNA, 19 nt, Artificial Sequence
  Description of Artificial Sequence: Synthetic oligonucleotide
  Antisense strand to SEQ ID NO: 85356
uuuagaggaaccuacauag

SEQ ID NO: 85438 - RNA, 19 nt, Artificial Sequence
  Description of Artificial Sequence: Synthetic oligonucleotide
  Sense strand starting at position 3453 of SEQ ID NO: 1071
agccuaaggccagaguaua

SEQ ID NO: 85439 - RNA, 19 nt, Artificial Sequence
  Description of Artificial Sequence: Synthetic oligonucleotide
  Antisense strand to SEQ ID NO: 85358
uauacucuggccuuaggcu

SEQ ID NO: 85440 - RNA, 19 nt, Artificial Sequence
  Description of Artificial Sequence: Synthetic oligonucleotide
  Sense strand starting at position 3617 of SEQ ID NO: 1071
gagguaguauuauccucau

SEQ ID NO: 85441 - RNA, 19 nt, Artificial Sequence
  Description of Artificial Sequence: Synthetic oligonucleotide
  Antisense strand to SEQ ID NO: 85360
augaggauaauacuaccuc

SEQ ID NO: 85442 - RNA, 19 nt, Artificial Sequence
  Description of Artificial Sequence: Synthetic oligonucleotide
  Sense strand starting at position 3647 of SEQ ID NO: 1071
ggaaauugugguugagagg

SEQ ID NO: 85443 - RNA, 19 nt, Artificial Sequence
  Description of Artificial Sequence: Synthetic oligonucleotide
  Antisense strand to SEQ ID NO: 85362
ccucucaaccacaauuucc

SEQ ID NO: 85444 - RNA, 19 nt, Artificial Sequence
  Description of Artificial Sequence: Synthetic oligonucleotide
  Sense strand starting at position 3670 of SEQ ID NO: 1071
uaaggaaguuccucaaggu

SEQ ID NO: 85445 - RNA, 19 nt, Artificial Sequence
  Description of Artificial Sequence: Synthetic oligonucleotide
  Antisense strand to SEQ ID NO: 85364
accuugaggaacuuccuua

SEQ ID NO: 85446 - RNA, 19 nt, Artificial Sequence
  Description of Artificial Sequence: Synthetic oligonucleotide
  Sense strand starting at position 3821 of SEQ ID NO: 1071
acacuugagcagggaucau

SEQ ID NO: 85447 - RNA, 19 nt, Artificial Sequence
  Description of Artificial Sequence: Synthetic oligonucleotide
  Antisense strand to SEQ ID NO: 85366
augaucccugcucaagugu

SEQ ID NO: 85448 - RNA, 19 nt, Artificial Sequence
  Description of Artificial Sequence: Synthetic oligonucleotide
  Sense strand starting at position 169 of SEQ ID NO: 1072
gugugugggccagagacau

SEQ ID NO: 85449 - RNA, 19 nt, Artificial Sequence
  Description of Artificial Sequence: Synthetic oligonucleotide
  Antisense strand to SEQ ID NO: 85368
augucucuggcccacacac

SEQ ID NO: 85450 - RNA, 19 nt, Artificial Sequence
  Description of Artificial Sequence: Synthetic oligonucleotide
  Sense strand starting at position 204 of SEQ ID NO: 1072
aauggagccuaaguuagaa

SEQ ID NO: 85451 - RNA, 19 nt, Artificial Sequence
  Description of Artificial Sequence: Synthetic oligonucleotide
  Antisense strand to SEQ ID NO: 85370
uucuaacuuaggcuccauu

SEQ ID NO: 85452 - RNA, 19 nt, Artificial Sequence
  Description of Artificial Sequence: Synthetic oligonucleotide
  Sense strand starting at position 253 of SEQ ID NO: 1072
agagggaacgagugaguau

SEQ ID NO: 85453 - RNA, 19 nt, Artificial Sequence
  Description of Artificial Sequence: Synthetic oligonucleotide
  Antisense strand to SEQ ID NO: 85372
auacucacucguucccucu

SEQ ID NO: 85454 - RNA, 19 nt, Artificial Sequence
  Description of Artificial Sequence: Synthetic oligonucleotide
  Sense strand starting at position 365 of SEQ ID NO: 1072
caucaauagccugacaggu

SEQ ID NO: 85455 - RNA, 19 nt, Artificial Sequence
  Description of Artificial Sequence: Synthetic oligonucleotide
  Antisense strand to SEQ ID NO: 85374
accugucaggcuauugaug

SEQ ID NO: 85456 - RNA, 19 nt, Artificial Sequence
  Description of Artificial Sequence: Synthetic oligonucleotide
  Sense strand starting at position 459 of SEQ ID NO: 1072
uuagaagugccaugucuaa

SEQ ID NO: 85457 - RNA, 19 nt, Artificial Sequence
  Description of Artificial Sequence: Synthetic oligonucleotide
  Antisense strand to SEQ ID NO: 85376
uuagacauggcacuucuaa

SEQ ID NO: 85458 - RNA, 19 nt, Artificial Sequence
  Description of Artificial Sequence: Synthetic oligonucleotide
  Sense strand starting at position 479 of SEQ ID NO: 1072
aaaucuugcgucuaagaga

SEQ ID NO: 85459 - RNA, 19 nt, Artificial Sequence
  Description of Artificial Sequence: Synthetic oligonucleotide
  Antisense strand to SEQ ID NO: 85378
ucucuuagacgcaagauuu

SEQ ID NO: 85460 - RNA, 19 nt, Artificial Sequence
  Description of Artificial Sequence: Synthetic oligonucleotide
  Sense strand starting at position 573 of SEQ ID NO: 1072
acugcuaggguccaguuaa

SEQ ID NO: 85461 - RNA, 19 nt, Artificial Sequence
  Description of Artificial Sequence: Synthetic oligonucleotide
  Antisense strand to SEQ ID NO: 85380
uuaacuggacccuagcagu

SEQ ID NO: 85462 - RNA, 19 nt, Artificial Sequence
  Description of Artificial Sequence: Synthetic oligonucleotide
  Sense strand starting at position 629 of SEQ ID NO: 1072
ccaagauccgaauaguuug

SEQ ID NO: 85463 - RNA, 19 nt, Artificial Sequence
  Description of Artificial Sequence: Synthetic oligonucleotide
  Antisense strand to SEQ ID NO: 85382
caaacuauucggaucuugg

SEQ ID NO: 85464 - RNA, 19 nt, Artificial Sequence
  Description of Artificial Sequence: Synthetic oligonucleotide
  Sense strand starting at position 632 of SEQ ID NO: 1072
agauccgaauaguuuguua

SEQ ID NO: 85465 - RNA, 19 nt, Artificial Sequence
  Description of Artificial Sequence: Synthetic oligonucleotide
  Antisense strand to SEQ ID NO: 85384
uaacaaacuauucggaucu

SEQ ID NO: 85466 - RNA, 19 nt, Artificial Sequence
  Description of Artificial Sequence: Synthetic oligonucleotide
  Sense strand starting at position 634 of SEQ ID NO: 1072
auccgaauaguuuguuacu

SEQ ID NO: 85467 - RNA, 19 nt, Artificial Sequence
  Description of Artificial Sequence: Synthetic oligonucleotide
  Antisense strand to SEQ ID NO: 85386
aguaacaaacuauucggau

SEQ ID NO: 85468 - RNA, 19 nt, Artificial Sequence
  Description of Artificial Sequence: Synthetic oligonucleotide
  Sense strand starting at position 636 of SEQ ID NO: 1072
ccgaauaguuuguuacuga

SEQ ID NO: 85469 - RNA, 19 nt, Artificial Sequence
  Description of Artificial Sequence: Synthetic oligonucleotide
  Antisense strand to SEQ ID NO: 85388
ucaguaacaaacuauucgg

SEQ ID NO: 85470 - RNA, 19 nt, Artificial Sequence
  Description of Artificial Sequence: Synthetic oligonucleotide
  Sense strand starting at position 738 of SEQ ID NO: 1072
uggcauuuagggcguuaca

SEQ ID NO: 85471 - RNA, 19 nt, Artificial Sequence
  Description of Artificial Sequence: Synthetic oligonucleotide
  Antisense strand to SEQ ID NO: 85390
uguaacgcccuaaaugcca

SEQ ID NO: 85472 - RNA, 19 nt, Artificial Sequence
  Description of Artificial Sequence: Synthetic oligonucleotide
  Sense strand starting at position 812 of SEQ ID NO: 1072
ggguaauguuuacuuaaua

SEQ ID NO: 85473 - RNA, 19 nt, Artificial Sequence
  Description of Artificial Sequence: Synthetic oligonucleotide
  Antisense strand to SEQ ID NO: 85392
uauuaaguaaacauuaccc

SEQ ID NO: 85474 - RNA, 19 nt, Artificial Sequence
  Description of Artificial Sequence: Synthetic oligonucleotide
  Sense strand starting at position 813 of SEQ ID NO: 1072
gguaauguuuacuuaauac

SEQ ID NO: 85475 - RNA, 19 nt, Artificial Sequence
  Description of Artificial Sequence: Synthetic oligonucleotide
  Antisense strand to SEQ ID NO: 85394
guauuaaguaaacauuacc

SEQ ID NO: 85476 - RNA, 19 nt, Artificial Sequence
  Description of Artificial Sequence: Synthetic oligonucleotide
  Sense strand starting at position 895 of SEQ ID NO: 1072
uguacacagcgauaagaua

SEQ ID NO: 85477 - RNA, 19 nt, Artificial Sequence
  Description of Artificial Sequence: Synthetic oligonucleotide
  Antisense strand to SEQ ID NO: 85396
uaucuuaucgcuguguaca

SEQ ID NO: 85478 - RNA, 19 nt, Artificial Sequence
  Description of Artificial Sequence: Synthetic oligonucleotide
  Sense strand starting at position 902 of SEQ ID NO: 1072
agcgauaagauauguuuga

SEQ ID NO: 85479 - RNA, 19 nt, Artificial Sequence
  Description of Artificial Sequence: Synthetic oligonucleotide
  Antisense strand to SEQ ID NO: 85398
ucaaacauaucuuaucgcu

SEQ ID NO: 85480 - RNA, 19 nt, Artificial Sequence
  Description of Artificial Sequence: Synthetic oligonucleotide
  Sense strand starting at position 903 of SEQ ID NO: 1072
gcgauaagauauguuugaa

SEQ ID NO: 85481 - RNA, 19 nt, Artificial Sequence
  Description of Artificial Sequence: Synthetic oligonucleotide
  Antisense strand to SEQ ID NO: 85400
uucaaacauaucuuaucgc

SEQ ID NO: 85482 - RNA, 19 nt, Artificial Sequence
  Description of Artificial Sequence: Synthetic oligonucleotide
  Sense strand starting at position 957 of SEQ ID NO: 1072
ugguaugaguaaucgagaa

SEQ ID NO: 85483 - RNA, 19 nt, Artificial Sequence
  Description of Artificial Sequence: Synthetic oligonucleotide
  Antisense strand to SEQ ID NO: 85402
uucucgauuacucauacca

SEQ ID NO: 85484 - RNA, 19 nt, Artificial Sequence
  Description of Artificial Sequence: Synthetic oligonucleotide
  Sense strand starting at position 997 of SEQ ID NO: 1072
cucagauauuugggaaagu

SEQ ID NO: 85485 - RNA, 19 nt, Artificial Sequence
  Description of Artificial Sequence: Synthetic oligonucleotide
  Antisense strand to SEQ ID NO: 85404
acuuucccaaauaucugag

SEQ ID NO: 85486 - RNA, 19 nt, Artificial Sequence
  Description of Artificial Sequence: Synthetic oligonucleotide
  Sense strand starting at position 998 of SEQ ID NO: 1072
ucagauauuugggaaaguu

SEQ ID NO: 85487 - RNA, 19 nt, Artificial Sequence
  Description of Artificial Sequence: Synthetic oligonucleotide
  Antisense strand to SEQ ID NO: 85406
aacuuucccaaauaucuga

SEQ ID NO: 85488 - RNA, 19 nt, Artificial Sequence
  Description of Artificial Sequence: Synthetic oligonucleotide
  Sense strand starting at position 1032 of SEQ ID NO: 1072
augaauagcuuugcuuaua

SEQ ID NO: 85489 - RNA, 19 nt, Artificial Sequence
  Description of Artificial Sequence: Synthetic oligonucleotide
  Antisense strand to SEQ ID NO: 85408
uauaagcaaagcuauucau

SEQ ID NO: 85490 - RNA, 19 nt, Artificial Sequence
  Description of Artificial Sequence: Synthetic oligonucleotide
  Sense strand starting at position 1033 of SEQ ID NO: 1072
ugaauagcuuugcuuauau

SEQ ID NO: 85491 - RNA, 19 nt, Artificial Sequence
  Description of Artificial Sequence: Synthetic oligonucleotide
  Antisense strand to SEQ ID NO: 85410
auauaagcaaagcuauuca

SEQ ID NO: 85492 - RNA, 19 nt, Artificial Sequence
  Description of Artificial Sequence: Synthetic oligonucleotide
  Sense strand starting at position 1040 of SEQ ID NO: 1072
cuuugcuuauauuugcaga

SEQ ID NO: 85493 - RNA, 19 nt, Artificial Sequence
  Description of Artificial Sequence: Synthetic oligonucleotide
  Antisense strand to SEQ ID NO: 85412
ucugcaaauauaagcaaag

SEQ ID NO: 85494 - RNA, 19 nt, Artificial Sequence
  Description of Artificial Sequence: Synthetic oligonucleotide
  Sense strand starting at position 1085 of SEQ ID NO: 1072
ugaacagauuguucuggga

SEQ ID NO: 85495 - RNA, 19 nt, Artificial Sequence
  Description of Artificial Sequence: Synthetic oligonucleotide
  Antisense strand to SEQ ID NO: 85414
ucccagaacaaucuguuca

SEQ ID NO: 85496 - RNA, 19 nt, Artificial Sequence
  Description of Artificial Sequence: Synthetic oligonucleotide
  Sense strand starting at position 1089 of SEQ ID NO: 1072
cagauuguucugggagguc

SEQ ID NO: 85497 - RNA, 19 nt, Artificial Sequence
  Description of Artificial Sequence: Synthetic oligonucleotide
  Antisense strand to SEQ ID NO: 85416
gaccucccagaacaaucug

SEQ ID NO: 85498 - RNA, 19 nt, Artificial Sequence
  Description of Artificial Sequence: Synthetic oligonucleotide
  Sense strand starting at position 1091 of SEQ ID NO: 1072
gauuguucugggaggucgu

SEQ ID NO: 85499 - RNA, 19 nt, Artificial Sequence
  Description of Artificial Sequence: Synthetic oligonucleotide
  Antisense strand to SEQ ID NO: 85418
acgaccucccagaacaauc

SEQ ID NO: 85500 - RNA, 19 nt, Artificial Sequence
  Description of Artificial Sequence: Synthetic oligonucleotide
  Sense strand starting at position 1102 of SEQ ID NO: 1072
gaggucgucuuuccaauuu

SEQ ID NO: 85501 - RNA, 19 nt, Artificial Sequence
  Description of Artificial Sequence: Synthetic oligonucleotide
  Antisense strand to SEQ ID NO: 85420
aaauuggaaagacgaccuc

SEQ ID NO: 85502 - RNA, 19 nt, Artificial Sequence
  Description of Artificial Sequence: Synthetic oligonucleotide
  Sense strand starting at position 1111 of SEQ ID NO: 1072
uuuccaauuuguuccuagu

SEQ ID NO: 85503 - RNA, 19 nt, Artificial Sequence
  Description of Artificial Sequence: Synthetic oligonucleotide
  Antisense strand to SEQ ID NO: 85422
acuaggaacaaauuggaaa

SEQ ID NO: 85504 - RNA, 19 nt, Artificial Sequence
  Description of Artificial Sequence: Synthetic oligonucleotide
  Sense strand starting at position 1113 of SEQ ID NO: 1072
uccaauuuguuccuaguuu

SEQ ID NO: 85505 - RNA, 19 nt, Artificial Sequence
  Description of Artificial Sequence: Synthetic oligonucleotide
  Antisense strand to SEQ ID NO: 85424
aaacuaggaacaaauugga

SEQ ID NO: 85506 - RNA, 19 nt, Artificial Sequence
  Description of Artificial Sequence: Synthetic oligonucleotide
  Sense strand starting at position 1161 of SEQ ID NO: 1072
aggagagucagcuaaugcu

SEQ ID NO: 85507 - RNA, 19 nt, Artificial Sequence
  Description of Artificial Sequence: Synthetic oligonucleotide
  Antisense strand to SEQ ID NO: 85426
agcauuagcugacucuccu

SEQ ID NO: 85508 - RNA, 19 nt, Artificial Sequence
  Description of Artificial Sequence: Synthetic oligonucleotide
  Sense strand starting at position 1232 of SEQ ID NO: 1072
gccaaagaguuccuggaau

SEQ ID NO: 85509 - RNA, 19 nt, Artificial Sequence
  Description of Artificial Sequence: Synthetic oligonucleotide
  Antisense strand to SEQ ID NO: 85428
auuccaggaacucuuuggc

SEQ ID NO: 85510 - RNA, 19 nt, Artificial Sequence
  Description of Artificial Sequence: Synthetic oligonucleotide
  Sense strand starting at position 1234 of SEQ ID NO: 1072
caaagaguuccuggaaucc

SEQ ID NO: 85511 - RNA, 19 nt, Artificial Sequence
  Description of Artificial Sequence: Synthetic oligonucleotide
  Antisense strand to SEQ ID NO: 85430
ggauuccaggaacucuuug

SEQ ID NO: 85512 - RNA, 19 nt, Artificial Sequence
  Description of Artificial Sequence: Synthetic oligonucleotide
  Sense strand starting at position 1251 of SEQ ID NO: 1072
cccgccagagguuaucaau

SEQ ID NO: 85513 - RNA, 19 nt, Artificial Sequence
  Description of Artificial Sequence: Synthetic oligonucleotide
  Antisense strand to SEQ ID NO: 85432
auugauaaccucuggcggg

SEQ ID NO: 85514 - RNA, 19 nt, Artificial Sequence
  Description of Artificial Sequence: Synthetic oligonucleotide
  Sense strand starting at position 1418 of SEQ ID NO: 1072
cuuucuaucucgguggaga

SEQ ID NO: 85515 - RNA, 19 nt, Artificial Sequence
  Description of Artificial Sequence: Synthetic oligonucleotide
  Antisense strand to SEQ ID NO: 85434
ucuccaccgagauagaaag

SEQ ID NO: 85516 - RNA, 19 nt, Artificial Sequence
  Description of Artificial Sequence: Synthetic oligonucleotide
  Sense strand starting at position 1419 of SEQ ID NO: 1072
uuucuaucucgguggagag

SEQ ID NO: 85517 - RNA, 19 nt, Artificial Sequence
  Description of Artificial Sequence: Synthetic oligonucleotide
  Antisense strand to SEQ ID NO: 85436
cucuccaccgagauagaaa

SEQ ID NO: 85518 - RNA, 19 nt, Artificial Sequence
  Description of Artificial Sequence: Synthetic oligonucleotide
  Sense strand starting at position 1420 of SEQ ID NO: 1072
uucuaucucgguggagaga

SEQ ID NO: 85519 - RNA, 19 nt, Artificial Sequence
  Description of Artificial Sequence: Synthetic oligonucleotide
  Antisense strand to SEQ ID NO: 85438
ucucuccaccgagauagaa

SEQ ID NO: 85520 - RNA, 19 nt, Artificial Sequence
  Description of Artificial Sequence: Synthetic oligonucleotide
  Sense strand starting at position 3121 of SEQ ID NO: 1072
cccuguugagcgucuugua

SEQ ID NO: 85521 - RNA, 19 nt, Artificial Sequence
  Description of Artificial Sequence: Synthetic oligonucleotide
  Antisense strand to SEQ ID NO: 85440
uacaagacgcucaacaggg

SEQ ID NO: 85522 - RNA, 19 nt, Artificial Sequence
  Description of Artificial Sequence: Synthetic oligonucleotide
  Sense strand starting at position 3122 of SEQ ID NO: 1072
ccuguugagcgucuuguau

SEQ ID NO: 85523 - RNA, 19 nt, Artificial Sequence
  Description of Artificial Sequence: Synthetic oligonucleotide
  Antisense strand to SEQ ID NO: 85442
auacaagacgcucaacagg

SEQ ID NO: 85524 - RNA, 19 nt, Artificial Sequence
  Description of Artificial Sequence: Synthetic oligonucleotide
  Sense strand starting at position 3134 of SEQ ID NO: 1072
cuuguauucucacuucuga

SEQ ID NO: 85525 - RNA, 19 nt, Artificial Sequence
  Description of Artificial Sequence: Synthetic oligonucleotide
  Antisense strand to SEQ ID NO: 85444
ucagaagugagaauacaag

SEQ ID NO: 85526 - RNA, 19 nt, Artificial Sequence
  Description of Artificial Sequence: Synthetic oligonucleotide
  Sense strand starting at position 3522 of SEQ ID NO: 1072
gaggucaguccugaggagu

SEQ ID NO: 85527 - RNA, 19 nt, Artificial Sequence
  Description of Artificial Sequence: Synthetic oligonucleotide
  Antisense strand to SEQ ID NO: 85446
acuccucaggacugaccuc

SEQ ID NO: 85528 - RNA, 19 nt, Artificial Sequence
  Description of Artificial Sequence: Synthetic oligonucleotide
  Sense strand starting at position 3850 of SEQ ID NO: 1073
ugaagccuguaaucggaau

SEQ ID NO: 85529 - RNA, 19 nt, Artificial Sequence
  Description of Artificial Sequence: Synthetic oligonucleotide
  Antisense strand to SEQ ID NO: 85448
auuccgauuacaggcuuca

SEQ ID NO: 85530 - RNA, 19 nt, Artificial Sequence
  Description of Artificial Sequence: Synthetic oligonucleotide
  Sense strand starting at position 3844 of SEQ ID NO: 1073
gugcgcugaagccuguaau

SEQ ID NO: 85531 - RNA, 19 nt, Artificial Sequence
  Description of Artificial Sequence: Synthetic oligonucleotide
  Antisense strand to SEQ ID NO: 85450
auuacaggcuucagcgcac

SEQ ID NO: 85532 - RNA, 19 nt, Artificial Sequence
  Description of Artificial Sequence: Synthetic oligonucleotide
  Sense strand starting at position 3817 of SEQ ID NO: 1073
cagacugguccuuggcaaa

SEQ ID NO: 85533 - RNA, 19 nt, Artificial Sequence
  Description of Artificial Sequence: Synthetic oligonucleotide
  Antisense strand to SEQ ID NO: 85452
uuugccaaggaccagucug

SEQ ID NO: 85534 - RNA, 19 nt, Artificial Sequence
  Description of Artificial Sequence: Synthetic oligonucleotide
  Sense strand starting at position 3816 of SEQ ID NO: 1073
ucagacugguccuuggcaa

SEQ ID NO: 85535 - RNA, 19 nt, Artificial Sequence
  Description of Artificial Sequence: Synthetic oligonucleotide
  Antisense strand to SEQ ID NO: 85454
uugccaaggaccagucuga

SEQ ID NO: 85536 - RNA, 19 nt, Artificial Sequence
  Description of Artificial Sequence: Synthetic oligonucleotide
  Sense strand starting at position 3811 of SEQ ID NO: 1073
gggaaucagacugguccuu

SEQ ID NO: 85537 - RNA, 19 nt, Artificial Sequence
  Description of Artificial Sequence: Synthetic oligonucleotide
  Antisense strand to SEQ ID NO: 85456
aaggaccagucugauuccc

SEQ ID NO: 85538 - RNA, 19 nt, Artificial Sequence
  Description of Artificial Sequence: Synthetic oligonucleotide
  Sense strand starting at position 3800 of SEQ ID NO: 1073
aggcuuacuuagggaauca

SEQ ID NO: 85539 - RNA, 19 nt, Artificial Sequence
  Description of Artificial Sequence: Synthetic oligonucleotide
  Antisense strand to SEQ ID NO: 85458
ugauucccuaaguaagccu

SEQ ID NO: 85540 - RNA, 19 nt, Artificial Sequence
  Description of Artificial Sequence: Synthetic oligonucleotide
  Sense strand starting at position 3753 of SEQ ID NO: 1073
acaccugguguaugaagau

SEQ ID NO: 85541 - RNA, 19 nt, Artificial Sequence
  Description of Artificial Sequence: Synthetic oligonucleotide
  Antisense strand to SEQ ID NO: 85460
aucuucauacaccaggugu

SEQ ID NO: 85542 - RNA, 19 nt, Artificial Sequence
  Description of Artificial Sequence: Synthetic oligonucleotide
  Sense strand starting at position 3678 of SEQ ID NO: 1073
ccauguggucaauauauac

SEQ ID NO: 85543 - RNA, 19 nt, Artificial Sequence
  Description of Artificial Sequence: Synthetic oligonucleotide
  Antisense strand to SEQ ID NO: 85462
guauauauugaccacaugg

SEQ ID NO: 85544 - RNA, 19 nt, Artificial Sequence
  Description of Artificial Sequence: Synthetic oligonucleotide
  Sense strand starting at position 3674 of SEQ ID NO: 1073
cggaccauguggucaauau

SEQ ID NO: 85545 - RNA, 19 nt, Artificial Sequence
  Description of Artificial Sequence: Synthetic oligonucleotide
  Antisense strand to SEQ ID NO: 85464
auauugaccacaugguccg

SEQ ID NO: 85546 - RNA, 19 nt, Artificial Sequence
  Description of Artificial Sequence: Synthetic oligonucleotide
  Sense strand starting at position 3663 of SEQ ID NO: 1073
ggaaucucugucggaccau

SEQ ID NO: 85547 - RNA, 19 nt, Artificial Sequence
  Description of Artificial Sequence: Synthetic oligonucleotide
  Antisense strand to SEQ ID NO: 85466
augguccgacagagauucc

SEQ ID NO: 85548 - RNA, 19 nt, Artificial Sequence
  Description of Artificial Sequence: Synthetic oligonucleotide
  Sense strand starting at position 3605 of SEQ ID NO: 1073
ucuauuugugauggccauu

SEQ ID NO: 85549 - RNA, 19 nt, Artificial Sequence
  Description of Artificial Sequence: Synthetic oligonucleotide
  Antisense strand to SEQ ID NO: 85468
aauggccaucacaaauaga

SEQ ID NO: 85550 - RNA, 19 nt, Artificial Sequence
  Description of Artificial Sequence: Synthetic oligonucleotide
  Sense strand starting at position 3604 of SEQ ID NO: 1073
uucuauuugugauggccau

SEQ ID NO: 85551 - RNA, 19 nt, Artificial Sequence
  Description of Artificial Sequence: Synthetic oligonucleotide
  Antisense strand to SEQ ID NO: 85470
auggccaucacaaauagaa

SEQ ID NO: 85552 - RNA, 19 nt, Artificial Sequence
  Description of Artificial Sequence: Synthetic oligonucleotide
  Sense strand starting at position 3591 of SEQ ID NO: 1073
guccaauacucuguucuau

SEQ ID NO: 85553 - RNA, 19 nt, Artificial Sequence
  Description of Artificial Sequence: Synthetic oligonucleotide
  Antisense strand to SEQ ID NO: 85472
auagaacagaguauuggac

SEQ ID NO: 85554 - RNA, 19 nt, Artificial Sequence
  Description of Artificial Sequence: Synthetic oligonucleotide
  Sense strand starting at position 3590 of SEQ ID NO: 1073
gguccaauacucuguucua

SEQ ID NO: 85555 - RNA, 19 nt, Artificial Sequence
  Description of Artificial Sequence: Synthetic oligonucleotide
  Antisense strand to SEQ ID NO: 85474
uagaacagaguauuggacc

SEQ ID NO: 85556 - RNA, 19 nt, Artificial Sequence
  Description of Artificial Sequence: Synthetic oligonucleotide
  Sense strand starting at position 3512 of SEQ ID NO: 1073
ccuggugacuguuaaacaa

SEQ ID NO: 85557 - RNA, 19 nt, Artificial Sequence
  Description of Artificial Sequence: Synthetic oligonucleotide
  Antisense strand to SEQ ID NO: 85476
uuguuuaacagucaccagg

SEQ ID NO: 85558 - RNA, 19 nt, Artificial Sequence
  Description of Artificial Sequence: Synthetic oligonucleotide
  Sense strand starting at position 3509 of SEQ ID NO: 1073
ucaccuggugacuguuaaa

SEQ ID NO: 85559 - RNA, 19 nt, Artificial Sequence
  Description of Artificial Sequence: Synthetic oligonucleotide
  Antisense strand to SEQ ID NO: 85478
uuuaacagucaccagguga

SEQ ID NO: 85560 - RNA, 19 nt, Artificial Sequence
  Description of Artificial Sequence: Synthetic oligonucleotide
  Sense strand starting at position 3278 of SEQ ID NO: 1073
ugguaucaaugacggaaga

SEQ ID NO: 85561 - RNA, 19 nt, Artificial Sequence
  Description of Artificial Sequence: Synthetic oligonucleotide
  Antisense strand to SEQ ID NO: 85480
ucuuccgucauugauacca

SEQ ID NO: 85562 - RNA, 19 nt, Artificial Sequence
  Description of Artificial Sequence: Synthetic oligonucleotide
  Sense strand starting at position 3276 of SEQ ID NO: 1073
agugguaucaaugacggaa

SEQ ID NO: 85563 - RNA, 19 nt, Artificial Sequence
  Description of Artificial Sequence: Synthetic oligonucleotide
  Antisense strand to SEQ ID NO: 85482
uuccgucauugauaccacu

SEQ ID NO: 85564 - RNA, 19 nt, Artificial Sequence
  Description of Artificial Sequence: Synthetic oligonucleotide
  Sense strand starting at position 3269 of SEQ ID NO: 1073
agaccugagugguaucaau

SEQ ID NO: 85565 - RNA, 19 nt, Artificial Sequence
  Description of Artificial Sequence: Synthetic oligonucleotide
  Antisense strand to SEQ ID NO: 85484
auugauaccacucaggucu

SEQ ID NO: 85566 - RNA, 19 nt, Artificial Sequence
  Description of Artificial Sequence: Synthetic oligonucleotide
  Sense strand starting at position 3224 of SEQ ID NO: 1073
auaucaaguccuggucaau

SEQ ID NO: 85567 - RNA, 19 nt, Artificial Sequence
  Description of Artificial Sequence: Synthetic oligonucleotide
  Antisense strand to SEQ ID NO: 85486
auugaccaggacuugauau

SEQ ID NO: 85568 - RNA, 19 nt, Artificial Sequence
  Description of Artificial Sequence: Synthetic oligonucleotide
  Sense strand starting at position 3178 of SEQ ID NO: 1073
ggauaacucuaggcacauu

SEQ ID NO: 85569 - RNA, 19 nt, Artificial Sequence
  Description of Artificial Sequence: Synthetic oligonucleotide
  Antisense strand to SEQ ID NO: 85488
aaugugccuagaguuaucc

SEQ ID NO: 85570 - RNA, 19 nt, Artificial Sequence
  Description of Artificial Sequence: Synthetic oligonucleotide
  Sense strand starting at position 3177 of SEQ ID NO: 1073
uggauaacucuaggcacau

SEQ ID NO: 85571 - RNA, 19 nt, Artificial Sequence
  Description of Artificial Sequence: Synthetic oligonucleotide
  Antisense strand to SEQ ID NO: 85490
augugccuagaguuaucca

SEQ ID NO: 85572 - RNA, 19 nt, Artificial Sequence
  Description of Artificial Sequence: Synthetic oligonucleotide
  Sense strand starting at position 3165 of SEQ ID NO: 1073
gaccaaaguuauuggauaa

SEQ ID NO: 85573 - RNA, 19 nt, Artificial Sequence
  Description of Artificial Sequence: Synthetic oligonucleotide
  Antisense strand to SEQ ID NO: 85492
uuauccaauaacuuugguc

SEQ ID NO: 85574 - RNA, 19 nt, Artificial Sequence
  Description of Artificial Sequence: Synthetic oligonucleotide
  Sense strand starting at position 2658 of SEQ ID NO: 1073
cgggauucggagcgagaga

SEQ ID NO: 85575 - RNA, 19 nt, Artificial Sequence
  Description of Artificial Sequence: Synthetic oligonucleotide
  Antisense strand to SEQ ID NO: 85494
ucucucgcuccgaaucccg

SEQ ID NO: 85576 - RNA, 19 nt, Artificial Sequence
  Description of Artificial Sequence: Synthetic oligonucleotide
  Sense strand starting at position 2329 of SEQ ID NO: 1073
acuucuggcugggaacaaa

SEQ ID NO: 85577 - RNA, 19 nt, Artificial Sequence
  Description of Artificial Sequence: Synthetic oligonucleotide
  Antisense strand to SEQ ID NO: 85496
uuuguucccagccagaagu

SEQ ID NO: 85578 - RNA, 19 nt, Artificial Sequence
  Description of Artificial Sequence: Synthetic oligonucleotide
  Sense strand starting at position 2328 of SEQ ID NO: 1073
aacuucuggcugggaacaa

SEQ ID NO: 85579 - RNA, 19 nt, Artificial Sequence
  Description of Artificial Sequence: Synthetic oligonucleotide
  Antisense strand to SEQ ID NO: 85498
uuguucccagccagaaguu

SEQ ID NO: 85580 - RNA, 19 nt, Artificial Sequence
  Description of Artificial Sequence: Synthetic oligonucleotide
  Sense strand starting at position 2325 of SEQ ID NO: 1073
gcaaacuucuggcugggaa

SEQ ID NO: 85581 - RNA, 19 nt, Artificial Sequence
  Description of Artificial Sequence: Synthetic oligonucleotide
  Antisense strand to SEQ ID NO: 85500
uucccagccagaaguuugc

SEQ ID NO: 85582 - RNA, 19 nt, Artificial Sequence
  Description of Artificial Sequence: Synthetic oligonucleotide
  Sense strand starting at position 12 of SEQ ID NO: 1074
ccauguaaccaguaacugu

SEQ ID NO: 85583 - RNA, 19 nt, Artificial Sequence
  Description of Artificial Sequence: Synthetic oligonucleotide
  Antisense strand to SEQ ID NO: 85502
acaguuacugguuacaugg

SEQ ID NO: 85584 - RNA, 19 nt, Artificial Sequence
  Description of Artificial Sequence: Synthetic oligonucleotide
  Sense strand starting at position 28 of SEQ ID NO: 1074
uguggauucuggguuucaa

SEQ ID NO: 85585 - RNA, 19 nt, Artificial Sequence
  Description of Artificial Sequence: Synthetic oligonucleotide
  Antisense strand to SEQ ID NO: 85504
uugaaacccagaauccaca

SEQ ID NO: 85586 - RNA, 19 nt, Artificial Sequence
  Description of Artificial Sequence: Synthetic oligonucleotide
  Sense strand starting at position 78 of SEQ ID NO: 1074
uucuaaauccaguguuuau

SEQ ID NO: 85587 - RNA, 19 nt, Artificial Sequence
  Description of Artificial Sequence: Synthetic oligonucleotide
  Antisense strand to SEQ ID NO: 85506
auaaacacuggauuuagaa

SEQ ID NO: 85588 - RNA, 19 nt, Artificial Sequence
  Description of Artificial Sequence: Synthetic oligonucleotide
  Sense strand starting at position 149 of SEQ ID NO: 1074
agcuuaaacgauuaacauc

SEQ ID NO: 85589 - RNA, 19 nt, Artificial Sequence
  Description of Artificial Sequence: Synthetic oligonucleotide
  Antisense strand to SEQ ID NO: 85508
gauguuaaucguuuaagcu

SEQ ID NO: 85590 - RNA, 19 nt, Artificial Sequence
  Description of Artificial Sequence: Synthetic oligonucleotide
  Sense strand starting at position 157 of SEQ ID NO: 1074
cgauuaacaucaguauuaa

SEQ ID NO: 85591 - RNA, 19 nt, Artificial Sequence
  Description of Artificial Sequence: Synthetic oligonucleotide
  Antisense strand to SEQ ID NO: 85510
uuaauacugauguuaaucg

SEQ ID NO: 85592 - RNA, 19 nt, Artificial Sequence
  Description of Artificial Sequence: Synthetic oligonucleotide
  Sense strand starting at position 195 of SEQ ID NO: 1074
gcacuacaucuuugucaag

SEQ ID NO: 85593 - RNA, 19 nt, Artificial Sequence
  Description of Artificial Sequence: Synthetic oligonucleotide
  Antisense strand to SEQ ID NO: 85512
cuugacaaagauguagugc

SEQ ID NO: 85594 - RNA, 19 nt, Artificial Sequence
  Description of Artificial Sequence: Synthetic oligonucleotide
  Sense strand starting at position 667 of SEQ ID NO: 1074
ugcuuuaaaugacuaugga

SEQ ID NO: 85595 - RNA, 19 nt, Artificial Sequence
  Description of Artificial Sequence: Synthetic oligonucleotide
  Antisense strand to SEQ ID NO: 85514
uccauagucauuuaaagca

SEQ ID NO: 85596 - RNA, 19 nt, Artificial Sequence
  Description of Artificial Sequence: Synthetic oligonucleotide
  Sense strand starting at position 791 of SEQ ID NO: 1074
aaauguguucuggaacauu

SEQ ID NO: 85597 - RNA, 19 nt, Artificial Sequence
  Description of Artificial Sequence: Synthetic oligonucleotide
  Antisense strand to SEQ ID NO: 85516
aauguuccagaacacauuu

SEQ ID NO: 85598 - RNA, 19 nt, Artificial Sequence
  Description of Artificial Sequence: Synthetic oligonucleotide
  Sense strand starting at position 865 of SEQ ID NO: 1074
uuauuaugcgauuacagga

SEQ ID NO: 85599 - RNA, 19 nt, Artificial Sequence
  Description of Artificial Sequence: Synthetic oligonucleotide
  Antisense strand to SEQ ID NO: 85518
uccuguaaucgcauaauaa

SEQ ID NO: 85600 - RNA, 19 nt, Artificial Sequence
  Description of Artificial Sequence: Synthetic oligonucleotide
  Sense strand starting at position 870 of SEQ ID NO: 1074
augcgauuacaggauuaca

SEQ ID NO: 85601 - RNA, 19 nt, Artificial Sequence
  Description of Artificial Sequence: Synthetic oligonucleotide
  Antisense strand to SEQ ID NO: 85520
uguaauccuguaaucgcau

SEQ ID NO: 85602 - RNA, 19 nt, Artificial Sequence
  Description of Artificial Sequence: Synthetic oligonucleotide
  Sense strand starting at position 914 of SEQ ID NO: 1074
gacggagucucauuggguc

SEQ ID NO: 85603 - RNA, 19 nt, Artificial Sequence
  Description of Artificial Sequence: Synthetic oligonucleotide
  Antisense strand to SEQ ID NO: 85522
gacccaaugagacuccguc

SEQ ID NO: 85604 - RNA, 19 nt, Artificial Sequence
  Description of Artificial Sequence: Synthetic oligonucleotide
  Sense strand starting at position 1280 of SEQ ID NO: 1074
ugagcauggcauuaaucuu

SEQ ID NO: 85605 - RNA, 19 nt, Artificial Sequence
  Description of Artificial Sequence: Synthetic oligonucleotide
  Antisense strand to SEQ ID NO: 85524
aagauuaaugccaugcuca

SEQ ID NO: 85606 - RNA, 19 nt, Artificial Sequence
  Description of Artificial Sequence: Synthetic oligonucleotide
  Sense strand starting at position 1484 of SEQ ID NO: 1074
caaagcuuucguguauguu

SEQ ID NO: 85607 - RNA, 19 nt, Artificial Sequence
  Description of Artificial Sequence: Synthetic oligonucleotide
  Antisense strand to SEQ ID NO: 85526
aacauacacgaaagcuuug

SEQ ID NO: 85608 - RNA, 19 nt, Artificial Sequence
  Description of Artificial Sequence: Synthetic oligonucleotide
  Sense strand starting at position 1496 of SEQ ID NO: 1074
guauguuauucuuuccuua

SEQ ID NO: 85609 - RNA, 19 nt, Artificial Sequence
  Description of Artificial Sequence: Synthetic oligonucleotide
  Antisense strand to SEQ ID NO: 85528
uaaggaaagaauaacauac

SEQ ID NO: 85610 - RNA, 19 nt, Artificial Sequence
  Description of Artificial Sequence: Synthetic oligonucleotide
  Sense strand starting at position 2175 of SEQ ID NO: 1074
gcgccuuaaccuuaagaaa

SEQ ID NO: 85611 - RNA, 19 nt, Artificial Sequence
  Description of Artificial Sequence: Synthetic oligonucleotide
  Antisense strand to SEQ ID NO: 85530
uuucuuaagguuaaggcgc

SEQ ID NO: 85612 - RNA, 19 nt, Artificial Sequence
  Description of Artificial Sequence: Synthetic oligonucleotide
  Sense strand starting at position 2274 of SEQ ID NO: 1074
agacaauaugcaugaguca

SEQ ID NO: 85613 - RNA, 19 nt, Artificial Sequence
  Description of Artificial Sequence: Synthetic oligonucleotide
  Antisense strand to SEQ ID NO: 85532
ugacucaugcauauugucu

SEQ ID NO: 85614 - RNA, 19 nt, Artificial Sequence
  Description of Artificial Sequence: Synthetic oligonucleotide
  Sense strand starting at position 2293 of SEQ ID NO: 1074
ggagauuaaacagguuucu

SEQ ID NO: 85615 - RNA, 19 nt, Artificial Sequence
  Description of Artificial Sequence: Synthetic oligonucleotide
  Antisense strand to SEQ ID NO: 85534
agaaaccuguuuaaucucc

SEQ ID NO: 85616 - RNA, 19 nt, Artificial Sequence
  Description of Artificial Sequence: Synthetic oligonucleotide
  Sense strand starting at position 2328 of SEQ ID NO: 1074
guuuguguugaguccuagu

SEQ ID NO: 85617 - RNA, 19 nt, Artificial Sequence
  Description of Artificial Sequence: Synthetic oligonucleotide
  Antisense strand to SEQ ID NO: 85536
acuaggacucaacacaaac

SEQ ID NO: 85618 - RNA, 19 nt, Artificial Sequence
  Description of Artificial Sequence: Synthetic oligonucleotide
  Sense strand starting at position 2383 of SEQ ID NO: 1074
ccguuucacguuucuguua

SEQ ID NO: 85619 - RNA, 19 nt, Artificial Sequence
  Description of Artificial Sequence: Synthetic oligonucleotide
  Antisense strand to SEQ ID NO: 85538
uaacagaaacgugaaacgg

SEQ ID NO: 85620 - RNA, 19 nt, Artificial Sequence
  Description of Artificial Sequence: Synthetic oligonucleotide
  Sense strand starting at position 2390 of SEQ ID NO: 1074
acguuucuguuacuuagga

SEQ ID NO: 85621 - RNA, 19 nt, Artificial Sequence
  Description of Artificial Sequence: Synthetic oligonucleotide
  Antisense strand to SEQ ID NO: 85540
uccuaaguaacagaaacgu

SEQ ID NO: 85622 - RNA, 19 nt, Artificial Sequence
  Description of Artificial Sequence: Synthetic oligonucleotide
  Sense strand starting at position 2391 of SEQ ID NO: 1074
cguuucuguuacuuaggaa

SEQ ID NO: 85623 - RNA, 19 nt, Artificial Sequence
  Description of Artificial Sequence: Synthetic oligonucleotide
  Antisense strand to SEQ ID NO: 85542
uuccuaaguaacagaaacg

SEQ ID NO: 85624 - RNA, 19 nt, Artificial Sequence
  Description of Artificial Sequence: Synthetic oligonucleotide
  Sense strand starting at position 2563 of SEQ ID NO: 1074
ggcaaauauguaugauaga

SEQ ID NO: 85625 - RNA, 19 nt, Artificial Sequence
  Description of Artificial Sequence: Synthetic oligonucleotide
  Antisense strand to SEQ ID NO: 85544
ucuaucauacauauuugcc

SEQ ID NO: 85626 - RNA, 19 nt, Artificial Sequence
  Description of Artificial Sequence: Synthetic oligonucleotide
  Sense strand starting at position 2572 of SEQ ID NO: 1074
guaugauagaguuguauau

SEQ ID NO: 85627 - RNA, 19 nt, Artificial Sequence
  Description of Artificial Sequence: Synthetic oligonucleotide
  Antisense strand to SEQ ID NO: 85546
auauacaacucuaucauac

SEQ ID NO: 85628 - RNA, 19 nt, Artificial Sequence
  Description of Artificial Sequence: Synthetic oligonucleotide
  Sense strand starting at position 2587 of SEQ ID NO: 1074
auauuaagcaaaggucgaa

SEQ ID NO: 85629 - RNA, 19 nt, Artificial Sequence
  Description of Artificial Sequence: Synthetic oligonucleotide
  Antisense strand to SEQ ID NO: 85548
uucgaccuuugcuuaauau

SEQ ID NO: 85630 - RNA, 19 nt, Artificial Sequence
  Description of Artificial Sequence: Synthetic oligonucleotide
  Sense strand starting at position 2636 of SEQ ID NO: 1074
uuaagaaugggacgcuaaa

SEQ ID NO: 85631 - RNA, 19 nt, Artificial Sequence
  Description of Artificial Sequence: Synthetic oligonucleotide
  Antisense strand to SEQ ID NO: 85550
uuuagcgucccauucuuaa

SEQ ID NO: 85632 - RNA, 19 nt, Artificial Sequence
  Description of Artificial Sequence: Synthetic oligonucleotide
  Sense strand starting at position 2676 of SEQ ID NO: 1074
ggcgaucaagcauagguua

SEQ ID NO: 85633 - RNA, 19 nt, Artificial Sequence
  Description of Artificial Sequence: Synthetic oligonucleotide
  Antisense strand to SEQ ID NO: 85552
uaaccuaugcuugaucgcc

SEQ ID NO: 85634 - RNA, 19 nt, Artificial Sequence
  Description of Artificial Sequence: Synthetic oligonucleotide
  Sense strand starting at position 2709 of SEQ ID NO: 1074
cuggcaucuguguacuuaa

SEQ ID NO: 85635 - RNA, 19 nt, Artificial Sequence
  Description of Artificial Sequence: Synthetic oligonucleotide
  Antisense strand to SEQ ID NO: 85554
uuaaguacacagaugccag

SEQ ID NO: 85636 - RNA, 19 nt, Artificial Sequence
  Description of Artificial Sequence: Synthetic oligonucleotide
  Sense strand starting at position 2772 of SEQ ID NO: 1074
gaaugcuaugcugaggagu

SEQ ID NO: 85637 - RNA, 19 nt, Artificial Sequence
  Description of Artificial Sequence: Synthetic oligonucleotide
  Antisense strand to SEQ ID NO: 85556
acuccucagcauagcauuc

SEQ ID NO: 85638 - RNA, 19 nt, Artificial Sequence
  Description of Artificial Sequence: Synthetic oligonucleotide
  Sense strand starting at position 2783 of SEQ ID NO: 1074
ugaggaguuugaguugauu

SEQ ID NO: 85639 - RNA, 19 nt, Artificial Sequence
  Description of Artificial Sequence: Synthetic oligonucleotide
  Antisense strand to SEQ ID NO: 85558
aaucaacucaaacuccuca

SEQ ID NO: 85640 - RNA, 19 nt, Artificial Sequence
  Description of Artificial Sequence: Synthetic oligonucleotide
  Sense strand starting at position 2785 of SEQ ID NO: 1074
aggaguuugaguugauucu

SEQ ID NO: 85641 - RNA, 19 nt, Artificial Sequence
  Description of Artificial Sequence: Synthetic oligonucleotide
  Antisense strand to SEQ ID NO: 85560
agaaucaacucaaacuccu

SEQ ID NO: 85642 - RNA, 19 nt, Artificial Sequence
  Description of Artificial Sequence: Synthetic oligonucleotide
  Sense strand starting at position 2795 of SEQ ID NO: 1074
guugauucuguaggcuaaa

SEQ ID NO: 85643 - RNA, 19 nt, Artificial Sequence
  Description of Artificial Sequence: Synthetic oligonucleotide
  Antisense strand to SEQ ID NO: 85562
uuuagccuacagaaucaac

SEQ ID NO: 85644 - RNA, 19 nt, Artificial Sequence
  Description of Artificial Sequence: Synthetic oligonucleotide
  Sense strand starting at position 2883 of SEQ ID NO: 1074
acgcgaucucggcuaacca

SEQ ID NO: 85645 - RNA, 19 nt, Artificial Sequence
  Description of Artificial Sequence: Synthetic oligonucleotide
  Antisense strand to SEQ ID NO: 85564
ugguuagccgagaucgcgu

SEQ ID NO: 85646 - RNA, 19 nt, Artificial Sequence
  Description of Artificial Sequence: Synthetic oligonucleotide
  Sense strand starting at position 3139 of SEQ ID NO: 1074
ggcuaaagguuucuaaccu

SEQ ID NO: 85647 - RNA, 19 nt, Artificial Sequence
  Description of Artificial Sequence: Synthetic oligonucleotide
  Antisense strand to SEQ ID NO: 85566
agguuagaaaccuuuagcc

SEQ ID NO: 85648 - RNA, 19 nt, Artificial Sequence
  Description of Artificial Sequence: Synthetic oligonucleotide
  Sense strand starting at position 3147 of SEQ ID NO: 1074
guuucuaaccuuuaggaug

SEQ ID NO: 85649 - RNA, 19 nt, Artificial Sequence
  Description of Artificial Sequence: Synthetic oligonucleotide
  Antisense strand to SEQ ID NO: 85568
cauccuaaagguuagaaac

SEQ ID NO: 85650 - RNA, 19 nt, Artificial Sequence
  Description of Artificial Sequence: Synthetic oligonucleotide
  Sense strand starting at position 3158 of SEQ ID NO: 1074
uuaggaugucuuggagcuu

SEQ ID NO: 85651 - RNA, 19 nt, Artificial Sequence
  Description of Artificial Sequence: Synthetic oligonucleotide
  Antisense strand to SEQ ID NO: 85570
aagcuccaagacauccuaa

SEQ ID NO: 85652 - RNA, 19 nt, Artificial Sequence
  Description of Artificial Sequence: Synthetic oligonucleotide
  Sense strand starting at position 3549 of SEQ ID NO: 1074
ccacaagauugugccacaa

SEQ ID NO: 85653 - RNA, 19 nt, Artificial Sequence
  Description of Artificial Sequence: Synthetic oligonucleotide
  Antisense strand to SEQ ID NO: 85572
uuguggcacaaucuugugg

SEQ ID NO: 85654 - RNA, 19 nt, Artificial Sequence
  Description of Artificial Sequence: Synthetic oligonucleotide
  Sense strand starting at position 3662 of SEQ ID NO: 1074
augggcuaccacuaaucua

SEQ ID NO: 85655 - RNA, 19 nt, Artificial Sequence
  Description of Artificial Sequence: Synthetic oligonucleotide
  Antisense strand to SEQ ID NO: 85574
uagauuagugguagcccau

SEQ ID NO: 85656 - RNA, 19 nt, Artificial Sequence
  Description of Artificial Sequence: Synthetic oligonucleotide
  Sense strand starting at position 3677 of SEQ ID NO: 1074
ucuacuguuucucuggauu

SEQ ID NO: 85657 - RNA, 19 nt, Artificial Sequence
  Description of Artificial Sequence: Synthetic oligonucleotide
  Antisense strand to SEQ ID NO: 85576
aauccagagaaacaguaga

SEQ ID NO: 85658 - RNA, 19 nt, Artificial Sequence
  Description of Artificial Sequence: Synthetic oligonucleotide
  Sense strand starting at position 3906 of SEQ ID NO: 1074
ugauuaacauuugaguugu

SEQ ID NO: 85659 - RNA, 19 nt, Artificial Sequence
  Description of Artificial Sequence: Synthetic oligonucleotide
  Antisense strand to SEQ ID NO: 85578
acaacucaaauguuaauca

SEQ ID NO: 85660 - RNA, 19 nt, Artificial Sequence
  Description of Artificial Sequence: Synthetic oligonucleotide
  Sense strand starting at position 3927 of SEQ ID NO: 1074
ccaccucuuggguauugua

SEQ ID NO: 85661 - RNA, 19 nt, Artificial Sequence
  Description of Artificial Sequence: Synthetic oligonucleotide
  Antisense strand to SEQ ID NO: 85580
uacaauacccaagaggugg

SEQ ID NO: 85662 - RNA, 19 nt, Artificial Sequence
  Description of Artificial Sequence: Synthetic oligonucleotide
  Sense strand starting at position 3965 of SEQ ID NO: 1075
aauguaguggcuugaacau

SEQ ID NO: 85663 - RNA, 19 nt, Artificial Sequence
  Description of Artificial Sequence: Synthetic oligonucleotide
  Antisense strand to SEQ ID NO: 85582
auguucaagccacuacauu

SEQ ID NO: 85664 - RNA, 19 nt, Artificial Sequence
  Description of Artificial Sequence: Synthetic oligonucleotide
  Sense strand starting at position 3829 of SEQ ID NO: 1075
ggugacagagucuaucagu

SEQ ID NO: 85665 - RNA, 19 nt, Artificial Sequence
  Description of Artificial Sequence: Synthetic oligonucleotide
  Antisense strand to SEQ ID NO: 85584
acugauagacucugucacc

SEQ ID NO: 85666 - RNA, 19 nt, Artificial Sequence
  Description of Artificial Sequence: Synthetic oligonucleotide
  Sense strand starting at position 3400 of SEQ ID NO: 1075
cacagaauuguggaguugu

SEQ ID NO: 85667 - RNA, 19 nt, Artificial Sequence
  Description of Artificial Sequence: Synthetic oligonucleotide
  Antisense strand to SEQ ID NO: 85586
acaacuccacaauucugug

SEQ ID NO: 85668 - RNA, 19 nt, Artificial Sequence
  Description of Artificial Sequence: Synthetic oligonucleotide
  Sense strand starting at position 3156 of SEQ ID NO: 1075
uggaaucuaucuccucagu

SEQ ID NO: 85669 - RNA, 19 nt, Artificial Sequence
  Description of Artificial Sequence: Synthetic oligonucleotide
  Antisense strand to SEQ ID NO: 85588
acugaggagauagauucca

SEQ ID NO: 85670 - RNA, 19 nt, Artificial Sequence
  Description of Artificial Sequence: Synthetic oligonucleotide
  Sense strand starting at position 3154 of SEQ ID NO: 1075
gguggaaucuaucuccuca

SEQ ID NO: 85671 - RNA, 19 nt, Artificial Sequence
  Description of Artificial Sequence: Synthetic oligonucleotide
  Antisense strand to SEQ ID NO: 85590
ugaggagauagauuccacc

SEQ ID NO: 85672 - RNA, 19 nt, Artificial Sequence
  Description of Artificial Sequence: Synthetic oligonucleotide
  Sense strand starting at position 2883 of SEQ ID NO: 1075
agacucuacuguuuauauu

SEQ ID NO: 85673 - RNA, 19 nt, Artificial Sequence
  Description of Artificial Sequence: Synthetic oligonucleotide
  Antisense strand to SEQ ID NO: 85592
aauauaaacaguagagucu

SEQ ID NO: 85674 - RNA, 19 nt, Artificial Sequence
  Description of Artificial Sequence: Synthetic oligonucleotide
  Sense strand starting at position 2877 of SEQ ID NO: 1075
agguuaagacucuacuguu

SEQ ID NO: 85675 - RNA, 19 nt, Artificial Sequence
  Description of Artificial Sequence: Synthetic oligonucleotide
  Antisense strand to SEQ ID NO: 85594
aacaguagagucuuaaccu

SEQ ID NO: 85676 - RNA, 19 nt, Artificial Sequence
  Description of Artificial Sequence: Synthetic oligonucleotide
  Sense strand starting at position 2810 of SEQ ID NO: 1075
uuaugcaaauuuggaaaga

SEQ ID NO: 85677 - RNA, 19 nt, Artificial Sequence
  Description of Artificial Sequence: Synthetic oligonucleotide
  Antisense strand to SEQ ID NO: 85596
ucuuuccaaauuugcauaa

SEQ ID NO: 85678 - RNA, 19 nt, Artificial Sequence
  Description of Artificial Sequence: Synthetic oligonucleotide
  Sense strand starting at position 2284 of SEQ ID NO: 1075
aaguuugagcuaggaagaa

SEQ ID NO: 85679 - RNA, 19 nt, Artificial Sequence
  Description of Artificial Sequence: Synthetic oligonucleotide
  Antisense strand to SEQ ID NO: 85598
uucuuccuagcucaaacuu

SEQ ID NO: 85680 - RNA, 19 nt, Artificial Sequence
  Description of Artificial Sequence: Synthetic oligonucleotide
  Sense strand starting at position 2280 of SEQ ID NO: 1075
gguaaaguuugagcuagga

SEQ ID NO: 85681 - RNA, 19 nt, Artificial Sequence
  Description of Artificial Sequence: Synthetic oligonucleotide
  Antisense strand to SEQ ID NO: 85600
uccuagcucaaacuuuacc

SEQ ID NO: 85682 - RNA, 19 nt, Artificial Sequence
  Description of Artificial Sequence: Synthetic oligonucleotide
  Sense strand starting at position 2277 of SEQ ID NO: 1075
aaggguaaaguuugagcua

SEQ ID NO: 85683 - RNA, 19 nt, Artificial Sequence
  Description of Artificial Sequence: Synthetic oligonucleotide
  Antisense strand to SEQ ID NO: 85602
uagcucaaacuuuacccuu

SEQ ID NO: 85684 - RNA, 19 nt, Artificial Sequence
  Description of Artificial Sequence: Synthetic oligonucleotide
  Sense strand starting at position 2181 of SEQ ID NO: 1075
augggauguuuccugcaaa

SEQ ID NO: 85685 - RNA, 19 nt, Artificial Sequence
  Description of Artificial Sequence: Synthetic oligonucleotide
  Antisense strand to SEQ ID NO: 85604
uuugcaggaaacaucccau

SEQ ID NO: 85686 - RNA, 19 nt, Artificial Sequence
  Description of Artificial Sequence: Synthetic oligonucleotide
  Sense strand starting at position 2115 of SEQ ID NO: 1075
uggaaaguuagaugcuauu

SEQ ID NO: 85687 - RNA, 19 nt, Artificial Sequence
  Description of Artificial Sequence: Synthetic oligonucleotide
  Antisense strand to SEQ ID NO: 85606
aauagcaucuaacuuucca

SEQ ID NO: 85688 - RNA, 19 nt, Artificial Sequence
  Description of Artificial Sequence: Synthetic oligonucleotide
  Sense strand starting at position 2044 of SEQ ID NO: 1075
ugaugauuagccugucacu

SEQ ID NO: 85689 - RNA, 19 nt, Artificial Sequence
  Description of Artificial Sequence: Synthetic oligonucleotide
  Antisense strand to SEQ ID NO: 85608
agugacaggcuaaucauca

SEQ ID NO: 85690 - RNA, 19 nt, Artificial Sequence
  Description of Artificial Sequence: Synthetic oligonucleotide
  Sense strand starting at position 1901 of SEQ ID NO: 1075
uaggcauaguaccuguaaa

SEQ ID NO: 85691 - RNA, 19 nt, Artificial Sequence
  Description of Artificial Sequence: Synthetic oligonucleotide
  Antisense strand to SEQ ID NO: 85610
uuuacagguacuaugccua

SEQ ID NO: 85692 - RNA, 19 nt, Artificial Sequence
  Description of Artificial Sequence: Synthetic oligonucleotide
  Sense strand starting at position 1891 of SEQ ID NO: 1075
ggauauaauuuaggcauag

SEQ ID NO: 85693 - RNA, 19 nt, Artificial Sequence
  Description of Artificial Sequence: Synthetic oligonucleotide
  Antisense strand to SEQ ID NO: 85612
cuaugccuaaauuauaucc

SEQ ID NO: 85694 - RNA, 19 nt, Artificial Sequence
  Description of Artificial Sequence: Synthetic oligonucleotide
  Sense strand starting at position 1726 of SEQ ID NO: 1075
cucaucuugugagccaaau

SEQ ID NO: 85695 - RNA, 19 nt, Artificial Sequence
  Description of Artificial Sequence: Synthetic oligonucleotide
  Antisense strand to SEQ ID NO: 85614
auuuggcucacaagaugag

SEQ ID NO: 85696 - RNA, 19 nt, Artificial Sequence
  Description of Artificial Sequence: Synthetic oligonucleotide
  Sense strand starting at position 1664 of SEQ ID NO: 1075
uagaguuggccagaauuac

SEQ ID NO: 85697 - RNA, 19 nt, Artificial Sequence
  Description of Artificial Sequence: Synthetic oligonucleotide
  Antisense strand to SEQ ID NO: 85616
guaauucuggccaacucua

SEQ ID NO: 85698 - RNA, 19 nt, Artificial Sequence
  Description of Artificial Sequence: Synthetic oligonucleotide
  Sense strand starting at position 1662 of SEQ ID NO: 1075
gcuagaguuggccagaauu

SEQ ID NO: 85699 - RNA, 19 nt, Artificial Sequence
  Description of Artificial Sequence: Synthetic oligonucleotide
  Antisense strand to SEQ ID NO: 85618
aauucuggccaacucuagc

SEQ ID NO: 85700 - RNA, 19 nt, Artificial Sequence
  Description of Artificial Sequence: Synthetic oligonucleotide
  Sense strand starting at position 1622 of SEQ ID NO: 1075
uuaugacuuugguuucuaa

SEQ ID NO: 85701 - RNA, 19 nt, Artificial Sequence
  Description of Artificial Sequence: Synthetic oligonucleotide
  Antisense strand to SEQ ID NO: 85620
uuagaaaccaaagucauaa

SEQ ID NO: 85702 - RNA, 19 nt, Artificial Sequence
  Description of Artificial Sequence: Synthetic oligonucleotide
  Sense strand starting at position 1579 of SEQ ID NO: 1075
uucugcauggaucauaauu

SEQ ID NO: 85703 - RNA, 19 nt, Artificial Sequence
  Description of Artificial Sequence: Synthetic oligonucleotide
  Antisense strand to SEQ ID NO: 85622
aauuaugauccaugcagaa

SEQ ID NO: 85704 - RNA, 19 nt, Artificial Sequence
  Description of Artificial Sequence: Synthetic oligonucleotide
  Sense strand starting at position 1575 of SEQ ID NO: 1075
agaauucugcauggaucau

SEQ ID NO: 85705 - RNA, 19 nt, Artificial Sequence
  Description of Artificial Sequence: Synthetic oligonucleotide
  Antisense strand to SEQ ID NO: 85624
augauccaugcagaauucu

SEQ ID NO: 85706 - RNA, 19 nt, Artificial Sequence
  Description of Artificial Sequence: Synthetic oligonucleotide
  Sense strand starting at position 1574 of SEQ ID NO: 1075
gagaauucugcauggauca

SEQ ID NO: 85707 - RNA, 19 nt, Artificial Sequence
  Description of Artificial Sequence: Synthetic oligonucleotide
  Antisense strand to SEQ ID NO: 85626
ugauccaugcagaauucuc

SEQ ID NO: 85708 - RNA, 19 nt, Artificial Sequence
  Description of Artificial Sequence: Synthetic oligonucleotide
  Sense strand starting at position 1555 of SEQ ID NO: 1075
guagcuucccaauaagaca

SEQ ID NO: 85709 - RNA, 19 nt, Artificial Sequence
  Description of Artificial Sequence: Synthetic oligonucleotide
  Antisense strand to SEQ ID NO: 85628
ugucuuauugggaagcuac

SEQ ID NO: 85710 - RNA, 19 nt, Artificial Sequence
  Description of Artificial Sequence: Synthetic oligonucleotide
  Sense strand starting at position 1525 of SEQ ID NO: 1075
ggaguuauucugugaauaa

SEQ ID NO: 85711 - RNA, 19 nt, Artificial Sequence
  Description of Artificial Sequence: Synthetic oligonucleotide
  Antisense strand to SEQ ID NO: 85630
uuauucacagaauaacucc

SEQ ID NO: 85712 - RNA, 19 nt, Artificial Sequence
  Description of Artificial Sequence: Synthetic oligonucleotide
  Sense strand starting at position 1524 of SEQ ID NO: 1075
aggaguuauucugugaaua

SEQ ID NO: 85713 - RNA, 19 nt, Artificial Sequence
  Description of Artificial Sequence: Synthetic oligonucleotide
  Antisense strand to SEQ ID NO: 85632
uauucacagaauaacuccu

SEQ ID NO: 85714 - RNA, 19 nt, Artificial Sequence
  Description of Artificial Sequence: Synthetic oligonucleotide
  Sense strand starting at position 1274 of SEQ ID NO: 1075
cguaacagaucauuauaac

SEQ ID NO: 85715 - RNA, 19 nt, Artificial Sequence
  Description of Artificial Sequence: Synthetic oligonucleotide
  Antisense strand to SEQ ID NO: 85634
guuauaaugaucuguuacg

SEQ ID NO: 85716 - RNA, 19 nt, Artificial Sequence
  Description of Artificial Sequence: Synthetic oligonucleotide
  Sense strand starting at position 1272 of SEQ ID NO: 1075
ggcguaacagaucauuaua

SEQ ID NO: 85717 - RNA, 19 nt, Artificial Sequence
  Description of Artificial Sequence: Synthetic oligonucleotide
  Antisense strand to SEQ ID NO: 85636
uauaaugaucuguuacgcc

SEQ ID NO: 85718 - RNA, 19 nt, Artificial Sequence
  Description of Artificial Sequence: Synthetic oligonucleotide
  Sense strand starting at position 1269 of SEQ ID NO: 1075
ucuggcguaacagaucauu

SEQ ID NO: 85719 - RNA, 19 nt, Artificial Sequence
  Description of Artificial Sequence: Synthetic oligonucleotide
  Antisense strand to SEQ ID NO: 85638
aaugaucuguuacgccaga

SEQ ID NO: 85720 - RNA, 19 nt, Artificial Sequence
  Description of Artificial Sequence: Synthetic oligonucleotide
  Sense strand starting at position 1264 of SEQ ID NO: 1075
gaaagucuggcguaacaga

SEQ ID NO: 85721 - RNA, 19 nt, Artificial Sequence
  Description of Artificial Sequence: Synthetic oligonucleotide
  Antisense strand to SEQ ID NO: 85640
ucuguuacgccagacuuuc

SEQ ID NO: 85722 - RNA, 19 nt, Artificial Sequence
  Description of Artificial Sequence: Synthetic oligonucleotide
  Sense strand starting at position 579 of SEQ ID NO: 1075
gccacugauuaauuguauu

SEQ ID NO: 85723 - RNA, 19 nt, Artificial Sequence
  Description of Artificial Sequence: Synthetic oligonucleotide
  Antisense strand to SEQ ID NO: 85642
aauacaauuaaucaguggc

SEQ ID NO: 85724 - RNA, 19 nt, Artificial Sequence
  Description of Artificial Sequence: Synthetic oligonucleotide
  Sense strand starting at position 572 of SEQ ID NO: 1075
auuaauggccacugauuaa

SEQ ID NO: 85725 - RNA, 19 nt, Artificial Sequence
  Description of Artificial Sequence: Synthetic oligonucleotide
  Antisense strand to SEQ ID NO: 85644
uuaaucaguggccauuaau

SEQ ID NO: 85726 - RNA, 19 nt, Artificial Sequence
  Description of Artificial Sequence: Synthetic oligonucleotide
  Sense strand starting at position 526 of SEQ ID NO: 1075
auucuugucgaacaaauac

SEQ ID NO: 85727 - RNA, 19 nt, Artificial Sequence
  Description of Artificial Sequence: Synthetic oligonucleotide
  Antisense strand to SEQ ID NO: 85646
guauuuguucgacaagaau

SEQ ID NO: 85728 - RNA, 19 nt, Artificial Sequence
  Description of Artificial Sequence: Synthetic oligonucleotide
  Sense strand starting at position 523 of SEQ ID NO: 1075
accauucuugucgaacaaa

SEQ ID NO: 85729 - RNA, 19 nt, Artificial Sequence
  Description of Artificial Sequence: Synthetic oligonucleotide
  Antisense strand to SEQ ID NO: 85648
uuuguucgacaagaauggu

SEQ ID NO: 85730 - RNA, 19 nt, Artificial Sequence
  Description of Artificial Sequence: Synthetic oligonucleotide
  Sense strand starting at position 484 of SEQ ID NO: 1075
ugcucuauggaauaguaau

SEQ ID NO: 85731 - RNA, 19 nt, Artificial Sequence
  Description of Artificial Sequence: Synthetic oligonucleotide
  Antisense strand to SEQ ID NO: 85650
auuacuauuccauagagca

SEQ ID NO: 85732 - RNA, 19 nt, Artificial Sequence
  Description of Artificial Sequence: Synthetic oligonucleotide
  Sense strand starting at position 479 of SEQ ID NO: 1075
ucaaaugcucuauggaaua

SEQ ID NO: 85733 - RNA, 19 nt, Artificial Sequence
  Description of Artificial Sequence: Synthetic oligonucleotide
  Antisense strand to SEQ ID NO: 85652
uauuccauagagcauuuga

SEQ ID NO: 85734 - RNA, 19 nt, Artificial Sequence
  Description of Artificial Sequence: Synthetic oligonucleotide
  Sense strand starting at position 417 of SEQ ID NO: 1075
accaaugcccuugauauga

SEQ ID NO: 85735 - RNA, 19 nt, Artificial Sequence
  Description of Artificial Sequence: Synthetic oligonucleotide
  Antisense strand to SEQ ID NO: 85654
ucauaucaagggcauuggu

SEQ ID NO: 85736 - RNA, 19 nt, Artificial Sequence
  Description of Artificial Sequence: Synthetic oligonucleotide
  Sense strand starting at position 322 of SEQ ID NO: 1075
acauguuauuuaugaagac

SEQ ID NO: 85737 - RNA, 19 nt, Artificial Sequence
  Description of Artificial Sequence: Synthetic oligonucleotide
  Antisense strand to SEQ ID NO: 85656
gucuucauaaauaacaugu

SEQ ID NO: 85738 - RNA, 19 nt, Artificial Sequence
  Description of Artificial Sequence: Synthetic oligonucleotide
  Sense strand starting at position 311 of SEQ ID NO: 1075
gaucguuggguacauguua

SEQ ID NO: 85739 - RNA, 19 nt, Artificial Sequence
  Description of Artificial Sequence: Synthetic oligonucleotide
  Antisense strand to SEQ ID NO: 85658
uaacauguacccaacgauc

SEQ ID NO: 85740 - RNA, 19 nt, Artificial Sequence
  Description of Artificial Sequence: Synthetic oligonucleotide
  Sense strand starting at position 275 of SEQ ID NO: 1075
aagcuagaucaaugauguc

SEQ ID NO: 85741 - RNA, 19 nt, Artificial Sequence
  Description of Artificial Sequence: Synthetic oligonucleotide
  Antisense strand to SEQ ID NO: 85660
gacaucauugaucuagcuu

SEQ ID NO: 85742 - RNA, 19 nt, Artificial Sequence
  Description of Artificial Sequence: Synthetic oligonucleotide
  Sense strand starting at position 3914 of SEQ ID NO: 1077
gugauuguggucuaauaac

SEQ ID NO: 85743 - RNA, 19 nt, Artificial Sequence
  Description of Artificial Sequence: Synthetic oligonucleotide
  Antisense strand to SEQ ID NO: 85662
guuauuagaccacaaucac

SEQ ID NO: 85744 - RNA, 19 nt, Artificial Sequence
  Description of Artificial Sequence: Synthetic oligonucleotide
  Sense strand starting at position 3912 of SEQ ID NO: 1077
uggugauuguggucuaaua

SEQ ID NO: 85745 - RNA, 19 nt, Artificial Sequence
  Description of Artificial Sequence: Synthetic oligonucleotide
  Antisense strand to SEQ ID NO: 85664
uauuagaccacaaucacca

SEQ ID NO: 85746 - RNA, 19 nt, Artificial Sequence
  Description of Artificial Sequence: Synthetic oligonucleotide
  Sense strand starting at position 3881 of SEQ ID NO: 1077
uaugaaguggugcacaaua

SEQ ID NO: 85747 - RNA, 19 nt, Artificial Sequence
  Description of Artificial Sequence: Synthetic oligonucleotide
  Antisense strand to SEQ ID NO: 85666
uauugugcaccacuucaua

SEQ ID NO: 85748 - RNA, 19 nt, Artificial Sequence
  Description of Artificial Sequence: Synthetic oligonucleotide
  Sense strand starting at position 3876 of SEQ ID NO: 1077
ggauauaugaaguggugca

SEQ ID NO: 85749 - RNA, 19 nt, Artificial Sequence
  Description of Artificial Sequence: Synthetic oligonucleotide
  Antisense strand to SEQ ID NO: 85668
ugcaccacuucauauaucc

SEQ ID NO: 85750 - RNA, 19 nt, Artificial Sequence
  Description of Artificial Sequence: Synthetic oligonucleotide
  Sense strand starting at position 3863 of SEQ ID NO: 1077
guagaagugauugggauau

SEQ ID NO: 85751 - RNA, 19 nt, Artificial Sequence
  Description of Artificial Sequence: Synthetic oligonucleotide
  Antisense strand to SEQ ID NO: 85670
auaucccaaucacuucuac

SEQ ID NO: 85752 - RNA, 19 nt, Artificial Sequence
  Description of Artificial Sequence: Synthetic oligonucleotide
  Sense strand starting at position 3862 of SEQ ID NO: 1077
gguagaagugauugggaua

SEQ ID NO: 85753 - RNA, 19 nt, Artificial Sequence
  Description of Artificial Sequence: Synthetic oligonucleotide
  Antisense strand to SEQ ID NO: 85672
uaucccaaucacuucuacc

SEQ ID NO: 85754 - RNA, 19 nt, Artificial Sequence
  Description of Artificial Sequence: Synthetic oligonucleotide
  Sense strand starting at position 3837 of SEQ ID NO: 1077
ucggaacuuagaugaucuu

SEQ ID NO: 85755 - RNA, 19 nt, Artificial Sequence
  Description of Artificial Sequence: Synthetic oligonucleotide
  Antisense strand to SEQ ID NO: 85674
aagaucaucuaaguuccga

SEQ ID NO: 85756 - RNA, 19 nt, Artificial Sequence
  Description of Artificial Sequence: Synthetic oligonucleotide
  Sense strand starting at position 3789 of SEQ ID NO: 1077
acaauauguuuguuaugug

SEQ ID NO: 85757 - RNA, 19 nt, Artificial Sequence
  Description of Artificial Sequence: Synthetic oligonucleotide
  Antisense strand to SEQ ID NO: 85676
cacauaacaaacauauugu

SEQ ID NO: 85758 - RNA, 19 nt, Artificial Sequence
  Description of Artificial Sequence: Synthetic oligonucleotide
  Sense strand starting at position 3787 of SEQ ID NO: 1077
ccacaauauguuuguuaug

SEQ ID NO: 85759 - RNA, 19 nt, Artificial Sequence
  Description of Artificial Sequence: Synthetic oligonucleotide
  Antisense strand to SEQ ID NO: 85678
cauaacaaacauauugugg

SEQ ID NO: 85760 - RNA, 19 nt, Artificial Sequence
  Description of Artificial Sequence: Synthetic oligonucleotide
  Sense strand starting at position 3786 of SEQ ID NO: 1077
accacaauauguuuguuau

SEQ ID NO: 85761 - RNA, 19 nt, Artificial Sequence
  Description of Artificial Sequence: Synthetic oligonucleotide
  Antisense strand to SEQ ID NO: 85680
auaacaaacauauuguggu

SEQ ID NO: 85762 - RNA, 19 nt, Artificial Sequence
  Description of Artificial Sequence: Synthetic oligonucleotide
  Sense strand starting at position 3734 of SEQ ID NO: 1077
gaggucaugcuuuacacau

SEQ ID NO: 85763 - RNA, 19 nt, Artificial Sequence
  Description of Artificial Sequence: Synthetic oligonucleotide
  Antisense strand to SEQ ID NO: 85682
auguguaaagcaugaccuc

SEQ ID NO: 85764 - RNA, 19 nt, Artificial Sequence
  Description of Artificial Sequence: Synthetic oligonucleotide
  Sense strand starting at position 3710 of SEQ ID NO: 1077
gagagaauccucugaaagc

SEQ ID NO: 85765 - RNA, 19 nt, Artificial Sequence
  Description of Artificial Sequence: Synthetic oligonucleotide
  Antisense strand to SEQ ID NO: 85684
gcuuucagaggauucucuc

SEQ ID NO: 85766 - RNA, 19 nt, Artificial Sequence
  Description of Artificial Sequence: Synthetic oligonucleotide
  Sense strand starting at position 3672 of SEQ ID NO: 1077
gaagacuguucucugaaga

SEQ ID NO: 85767 - RNA, 19 nt, Artificial Sequence
  Description of Artificial Sequence: Synthetic oligonucleotide
  Antisense strand to SEQ ID NO: 85686
ucuucagagaacagucuuc

SEQ ID NO: 85768 - RNA, 19 nt, Artificial Sequence
  Description of Artificial Sequence: Synthetic oligonucleotide
  Sense strand starting at position 3671 of SEQ ID NO: 1077
ggaagacuguucucugaag

SEQ ID NO: 85769 - RNA, 19 nt, Artificial Sequence
  Description of Artificial Sequence: Synthetic oligonucleotide
  Antisense strand to SEQ ID NO: 85688
cuucagagaacagucuucc

SEQ ID NO: 85770 - RNA, 19 nt, Artificial Sequence
  Description of Artificial Sequence: Synthetic oligonucleotide
  Sense strand starting at position 3669 of SEQ ID NO: 1077
uuggaagacuguucucuga

SEQ ID NO: 85771 - RNA, 19 nt, Artificial Sequence
  Description of Artificial Sequence: Synthetic oligonucleotide
  Antisense strand to SEQ ID NO: 85690
ucagagaacagucuuccaa

SEQ ID NO: 85772 - RNA, 19 nt, Artificial Sequence
  Description of Artificial Sequence: Synthetic oligonucleotide
  Sense strand starting at position 3615 of SEQ ID NO: 1077
gugaguauaaguuauggca

SEQ ID NO: 85773 - RNA, 19 nt, Artificial Sequence
  Description of Artificial Sequence: Synthetic oligonucleotide
  Antisense strand to SEQ ID NO: 85692
ugccauaacuuauacucac

SEQ ID NO: 85774 - RNA, 19 nt, Artificial Sequence
  Description of Artificial Sequence: Synthetic oligonucleotide
  Sense strand starting at position 3608 of SEQ ID NO: 1077
aucaauugugaguauaagu

SEQ ID NO: 85775 - RNA, 19 nt, Artificial Sequence
  Description of Artificial Sequence: Synthetic oligonucleotide
  Antisense strand to SEQ ID NO: 85694
acuuauacucacaauugau

SEQ ID NO: 85776 - RNA, 19 nt, Artificial Sequence
  Description of Artificial Sequence: Synthetic oligonucleotide
  Sense strand starting at position 3607 of SEQ ID NO: 1077
aaucaauugugaguauaag

SEQ ID NO: 85777 - RNA, 19 nt, Artificial Sequence
  Description of Artificial Sequence: Synthetic oligonucleotide
  Antisense strand to SEQ ID NO: 85696
cuuauacucacaauugauu

SEQ ID NO: 85778 - RNA, 19 nt, Artificial Sequence
  Description of Artificial Sequence: Synthetic oligonucleotide
  Sense strand starting at position 3422 of SEQ ID NO: 1077
cugugugaugagcagagau

SEQ ID NO: 85779 - RNA, 19 nt, Artificial Sequence
  Description of Artificial Sequence: Synthetic oligonucleotide
  Antisense strand to SEQ ID NO: 85698
aucucugcucaucacacag

SEQ ID NO: 85780 - RNA, 19 nt, Artificial Sequence
  Description of Artificial Sequence: Synthetic oligonucleotide
  Sense strand starting at position 3136 of SEQ ID NO: 1077
gggaauuccucugucauag

SEQ ID NO: 85781 - RNA, 19 nt, Artificial Sequence
  Description of Artificial Sequence: Synthetic oligonucleotide
  Antisense strand to SEQ ID NO: 85700
cuaugacagaggaauuccc

SEQ ID NO: 85782 - RNA, 19 nt, Artificial Sequence
  Description of Artificial Sequence: Synthetic oligonucleotide
  Sense strand starting at position 3135 of SEQ ID NO: 1077
agggaauuccucugucaua

SEQ ID NO: 85783 - RNA, 19 nt, Artificial Sequence
  Description of Artificial Sequence: Synthetic oligonucleotide
  Antisense strand to SEQ ID NO: 85702
uaugacagaggaauucccu

SEQ ID NO: 85784 - RNA, 19 nt, Artificial Sequence
  Description of Artificial Sequence: Synthetic oligonucleotide
  Sense strand starting at position 3015 of SEQ ID NO: 1077
gaggcucaggagugcaauu

SEQ ID NO: 85785 - RNA, 19 nt, Artificial Sequence
  Description of Artificial Sequence: Synthetic oligonucleotide
  Antisense strand to SEQ ID NO: 85704
aauugcacuccugagccuc

SEQ ID NO: 85786 - RNA, 19 nt, Artificial Sequence
  Description of Artificial Sequence: Synthetic oligonucleotide
  Sense strand starting at position 2948 of SEQ ID NO: 1077
ggacuucuuuccucaacug

SEQ ID NO: 85787 - RNA, 19 nt, Artificial Sequence
  Description of Artificial Sequence: Synthetic oligonucleotide
  Antisense strand to SEQ ID NO: 85706
caguugaggaaagaagucc

SEQ ID NO: 85788 - RNA, 19 nt, Artificial Sequence
  Description of Artificial Sequence: Synthetic oligonucleotide
  Sense strand starting at position 2856 of SEQ ID NO: 1077
ccucuuuggucucuugaca

SEQ ID NO: 85789 - RNA, 19 nt, Artificial Sequence
  Description of Artificial Sequence: Synthetic oligonucleotide
  Antisense strand to SEQ ID NO: 85708
ugucaagagaccaaagagg

SEQ ID NO: 85790 - RNA, 19 nt, Artificial Sequence
  Description of Artificial Sequence: Synthetic oligonucleotide
  Sense strand starting at position 2440 of SEQ ID NO: 1077
cgaguuuaagcgaggaguu

SEQ ID NO: 85791 - RNA, 19 nt, Artificial Sequence
  Description of Artificial Sequence: Synthetic oligonucleotide
  Antisense strand to SEQ ID NO: 85710
aacuccucgcuuaaacucg

SEQ ID NO: 85792 - RNA, 19 nt, Artificial Sequence
  Description of Artificial Sequence: Synthetic oligonucleotide
  Sense strand starting at position 2354 of SEQ ID NO: 1077
gccacuccuggagaucuua

SEQ ID NO: 85793 - RNA, 19 nt, Artificial Sequence
  Description of Artificial Sequence: Synthetic oligonucleotide
  Antisense strand to SEQ ID NO: 85712
uaagaucuccaggaguggc

SEQ ID NO: 85794 - RNA, 19 nt, Artificial Sequence
  Description of Artificial Sequence: Synthetic oligonucleotide
  Sense strand starting at position 1429 of SEQ ID NO: 1077
ugaucuauccgugaguccu

SEQ ID NO: 85795 - RNA, 19 nt, Artificial Sequence
  Description of Artificial Sequence: Synthetic oligonucleotide
  Antisense strand to SEQ ID NO: 85714
aggacucacggauagauca

SEQ ID NO: 85796 - RNA, 19 nt, Artificial Sequence
  Description of Artificial Sequence: Synthetic oligonucleotide
  Sense strand starting at position 1426 of SEQ ID NO: 1077
ggaugaucuauccgugagu

SEQ ID NO: 85797 - RNA, 19 nt, Artificial Sequence
  Description of Artificial Sequence: Synthetic oligonucleotide
  Antisense strand to SEQ ID NO: 85716
acucacggauagaucaucc

SEQ ID NO: 85798 - RNA, 19 nt, Artificial Sequence
  Description of Artificial Sequence: Synthetic oligonucleotide
  Sense strand starting at position 1411 of SEQ ID NO: 1077
caucccaaucugugaggau

SEQ ID NO: 85799 - RNA, 19 nt, Artificial Sequence
  Description of Artificial Sequence: Synthetic oligonucleotide
  Antisense strand to SEQ ID NO: 85718
auccucacagauugggaug

SEQ ID NO: 85800 - RNA, 19 nt, Artificial Sequence
  Description of Artificial Sequence: Synthetic oligonucleotide
  Sense strand starting at position 1082 of SEQ ID NO: 1077
acuaaccgauguuuaauaa

SEQ ID NO: 85801 - RNA, 19 nt, Artificial Sequence
  Description of Artificial Sequence: Synthetic oligonucleotide
  Antisense strand to SEQ ID NO: 85720
uuauuaaacaucgguuagu

SEQ ID NO: 85802 - RNA, 19 nt, Artificial Sequence
  Description of Artificial Sequence: Synthetic oligonucleotide
  Sense strand starting at position 1005 of SEQ ID NO: 1077
uguacugucagguacacua

SEQ ID NO: 85803 - RNA, 19 nt, Artificial Sequence
  Description of Artificial Sequence: Synthetic oligonucleotide
  Antisense strand to SEQ ID NO: 85722
uaguguaccugacaguaca

SEQ ID NO: 85804 - RNA, 19 nt, Artificial Sequence
  Description of Artificial Sequence: Synthetic oligonucleotide
  Sense strand starting at position 920 of SEQ ID NO: 1077
gacauauguuaagucagag

SEQ ID NO: 85805 - RNA, 19 nt, Artificial Sequence
  Description of Artificial Sequence: Synthetic oligonucleotide
  Antisense strand to SEQ ID NO: 85724
cucugacuuaacauauguc

SEQ ID NO: 85806 - RNA, 19 nt, Artificial Sequence
  Description of Artificial Sequence: Synthetic oligonucleotide
  Sense strand starting at position 855 of SEQ ID NO: 1077
gagauugacuaccuauugu

SEQ ID NO: 85807 - RNA, 19 nt, Artificial Sequence
  Description of Artificial Sequence: Synthetic oligonucleotide
  Antisense strand to SEQ ID NO: 85726
acaauagguagucaaucuc

SEQ ID NO: 85808 - RNA, 19 nt, Artificial Sequence
  Description of Artificial Sequence: Synthetic oligonucleotide
  Sense strand starting at position 848 of SEQ ID NO: 1077
guuauaagagauugacuac

SEQ ID NO: 85809 - RNA, 19 nt, Artificial Sequence
  Description of Artificial Sequence: Synthetic oligonucleotide
  Antisense strand to SEQ ID NO: 85728
guagucaaucucuuauaac

SEQ ID NO: 85810 - RNA, 19 nt, Artificial Sequence
  Description of Artificial Sequence: Synthetic oligonucleotide
  Sense strand starting at position 811 of SEQ ID NO: 1077
auguuccuccaagaugacu

SEQ ID NO: 85811 - RNA, 19 nt, Artificial Sequence
  Description of Artificial Sequence: Synthetic oligonucleotide
  Antisense strand to SEQ ID NO: 85730
agucaucuuggaggaacau

SEQ ID NO: 85812 - RNA, 19 nt, Artificial Sequence
  Description of Artificial Sequence: Synthetic oligonucleotide
  Sense strand starting at position 603 of SEQ ID NO: 1077
agagcuagaugcuugacuu

SEQ ID NO: 85813 - RNA, 19 nt, Artificial Sequence
  Description of Artificial Sequence: Synthetic oligonucleotide
  Antisense strand to SEQ ID NO: 85732
aagucaagcaucuagcucu

SEQ ID NO: 85814 - RNA, 19 nt, Artificial Sequence
  Description of Artificial Sequence: Synthetic oligonucleotide
  Sense strand starting at position 590 of SEQ ID NO: 1077
ggauuaaauuuacagagcu

SEQ ID NO: 85815 - RNA, 19 nt, Artificial Sequence
  Description of Artificial Sequence: Synthetic oligonucleotide
  Antisense strand to SEQ ID NO: 85734
agcucuguaaauuuaaucc

SEQ ID NO: 85816 - RNA, 19 nt, Artificial Sequence
  Description of Artificial Sequence: Synthetic oligonucleotide
  Sense strand starting at position 569 of SEQ ID NO: 1077
cuuagucaagcuugauauu

SEQ ID NO: 85817 - RNA, 19 nt, Artificial Sequence
  Description of Artificial Sequence: Synthetic oligonucleotide
  Antisense strand to SEQ ID NO: 85736
aauaucaagcuugacuaag

SEQ ID NO: 85818 - RNA, 19 nt, Artificial Sequence
  Description of Artificial Sequence: Synthetic oligonucleotide
  Sense strand starting at position 324 of SEQ ID NO: 1077
cuccauaugggauggaguu

SEQ ID NO: 85819 - RNA, 19 nt, Artificial Sequence
  Description of Artificial Sequence: Synthetic oligonucleotide
  Antisense strand to SEQ ID NO: 85738
aacuccaucccauauggag

SEQ ID NO: 85820 - RNA, 19 nt, Artificial Sequence
  Description of Artificial Sequence: Synthetic oligonucleotide
  Sense strand starting at position 55 of SEQ ID NO: 1077
gugagccagucacugauaa

SEQ ID NO: 85821 - RNA, 19 nt, Artificial Sequence
  Description of Artificial Sequence: Synthetic oligonucleotide
  Antisense strand to SEQ ID NO: 85740
uuaucagugacuggcucac

SEQ ID NO: 85822 - RNA, 19 nt, Artificial Sequence
  Description of Artificial Sequence: Synthetic oligonucleotide
  Sense strand starting at position 3942 of SEQ ID NO: 1076
uccugaaguguugaaguaa

SEQ ID NO: 85823 - RNA, 19 nt, Artificial Sequence
  Description of Artificial Sequence: Synthetic oligonucleotide
  Antisense strand to SEQ ID NO: 85742
uuacuucaacacuucagga

SEQ ID NO: 85824 - RNA, 19 nt, Artificial Sequence
  Description of Artificial Sequence: Synthetic oligonucleotide
  Sense strand starting at position 3780 of SEQ ID NO: 1076
ggagaaguggccuggccaa

SEQ ID NO: 85825 - RNA, 19 nt, Artificial Sequence
  Description of Artificial Sequence: Synthetic oligonucleotide
  Antisense strand to SEQ ID NO: 85744
uuggccaggccacuucucc

SEQ ID NO: 85826 - RNA, 19 nt, Artificial Sequence
  Description of Artificial Sequence: Synthetic oligonucleotide
  Sense strand starting at position 3611 of SEQ ID NO: 1076
caaauauugccggaaguag

SEQ ID NO: 85827 - RNA, 19 nt, Artificial Sequence
  Description of Artificial Sequence: Synthetic oligonucleotide
  Antisense strand to SEQ ID NO: 85746
cuacuuccggcaauauuug

SEQ ID NO: 85828 - RNA, 19 nt, Artificial Sequence
  Description of Artificial Sequence: Synthetic oligonucleotide
  Sense strand starting at position 3610 of SEQ ID NO: 1076
acaaauauugccggaagua

SEQ ID NO: 85829 - RNA, 19 nt, Artificial Sequence
  Description of Artificial Sequence: Synthetic oligonucleotide
  Antisense strand to SEQ ID NO: 85748
uacuuccggcaauauuugu

SEQ ID NO: 85830 - RNA, 19 nt, Artificial Sequence
  Description of Artificial Sequence: Synthetic oligonucleotide
  Sense strand starting at position 3597 of SEQ ID NO: 1076
ggugcauugccacacaaau

SEQ ID NO: 85831 - RNA, 19 nt, Artificial Sequence
  Description of Artificial Sequence: Synthetic oligonucleotide
  Antisense strand to SEQ ID NO: 85750
auuuguguggcaaugcacc

SEQ ID NO: 85832 - RNA, 19 nt, Artificial Sequence
  Description of Artificial Sequence: Synthetic oligonucleotide
  Sense strand starting at position 3524 of SEQ ID NO: 1076
aagaaauauuuggaguuac

SEQ ID NO: 85833 - RNA, 19 nt, Artificial Sequence
  Description of Artificial Sequence: Synthetic oligonucleotide
  Antisense strand to SEQ ID NO: 85752
guaacuccaaauauuucuu

SEQ ID NO: 85834 - RNA, 19 nt, Artificial Sequence
  Description of Artificial Sequence: Synthetic oligonucleotide
  Sense strand starting at position 3523 of SEQ ID NO: 1076
gaagaaauauuuggaguua

SEQ ID NO: 85835 - RNA, 19 nt, Artificial Sequence
  Description of Artificial Sequence: Synthetic oligonucleotide
  Antisense strand to SEQ ID NO: 85754
uaacuccaaauauuucuuc

SEQ ID NO: 85836 - RNA, 19 nt, Artificial Sequence
  Description of Artificial Sequence: Synthetic oligonucleotide
  Sense strand starting at position 3320 of SEQ ID NO: 1076
aaugucauugacugcugaa

SEQ ID NO: 85837 - RNA, 19 nt, Artificial Sequence
  Description of Artificial Sequence: Synthetic oligonucleotide
  Antisense strand to SEQ ID NO: 85756
uucagcagucaaugacauu

SEQ ID NO: 85838 - RNA, 19 nt, Artificial Sequence
  Description of Artificial Sequence: Synthetic oligonucleotide
  Sense strand starting at position 3319 of SEQ ID NO: 1076
caaugucauugacugcuga

SEQ ID NO: 85839 - RNA, 19 nt, Artificial Sequence
  Description of Artificial Sequence: Synthetic oligonucleotide
  Antisense strand to SEQ ID NO: 85758
ucagcagucaaugacauug

SEQ ID NO: 85840 - RNA, 19 nt, Artificial Sequence
  Description of Artificial Sequence: Synthetic oligonucleotide
  Sense strand starting at position 3315 of SEQ ID NO: 1076
gugccaaugucauugacug

SEQ ID NO: 85841 - RNA, 19 nt, Artificial Sequence
  Description of Artificial Sequence: Synthetic oligonucleotide
  Antisense strand to SEQ ID NO: 85760
cagucaaugacauuggcac

SEQ ID NO: 85842 - RNA, 19 nt, Artificial Sequence
  Description of Artificial Sequence: Synthetic oligonucleotide
  Sense strand starting at position 3218 of SEQ ID NO: 1076
aacaguuucugaccggaaa

SEQ ID NO: 85843 - RNA, 19 nt, Artificial Sequence
  Description of Artificial Sequence: Synthetic oligonucleotide
  Antisense strand to SEQ ID NO: 85762
uuuccggucagaaacuguu

SEQ ID NO: 85844 - RNA, 19 nt, Artificial Sequence
  Description of Artificial Sequence: Synthetic oligonucleotide
  Sense strand starting at position 3188 of SEQ ID NO: 1076
gugcauaaacagugaaaca

SEQ ID NO: 85845 - RNA, 19 nt, Artificial Sequence
  Description of Artificial Sequence: Synthetic oligonucleotide
  Antisense strand to SEQ ID NO: 85764
uguuucacuguuuaugcac

SEQ ID NO: 85846 - RNA, 19 nt, Artificial Sequence
  Description of Artificial Sequence: Synthetic oligonucleotide
  Sense strand starting at position 3153 of SEQ ID NO: 1076
gagagaaugaaguggguuu

SEQ ID NO: 85847 - RNA, 19 nt, Artificial Sequence
  Description of Artificial Sequence: Synthetic oligonucleotide
  Antisense strand to SEQ ID NO: 85766
aaacccacuucauucucuc

SEQ ID NO: 85848 - RNA, 19 nt, Artificial Sequence
  Description of Artificial Sequence: Synthetic oligonucleotide
  Sense strand starting at position 2641 of SEQ ID NO: 1076
gucgcuccucgauaaauau

SEQ ID NO: 85849 - RNA, 19 nt, Artificial Sequence
  Description of Artificial Sequence: Synthetic oligonucleotide
  Antisense strand to SEQ ID NO: 85768
auauuuaucgaggagcgac

SEQ ID NO: 85850 - RNA, 19 nt, Artificial Sequence
  Description of Artificial Sequence: Synthetic oligonucleotide
  Sense strand starting at position 2512 of SEQ ID NO: 1076
cccauuuguugucuauuau

SEQ ID NO: 85851 - RNA, 19 nt, Artificial Sequence
  Description of Artificial Sequence: Synthetic oligonucleotide
  Antisense strand to SEQ ID NO: 85770
auaauagacaacaaauggg

SEQ ID NO: 85852 - RNA, 19 nt, Artificial Sequence
  Description of Artificial Sequence: Synthetic oligonucleotide
  Sense strand starting at position 2195 of SEQ ID NO: 1076
ucuugagaaucucuagcuu

SEQ ID NO: 85853 - RNA, 19 nt, Artificial Sequence
  Description of Artificial Sequence: Synthetic oligonucleotide
  Antisense strand to SEQ ID NO: 85772
aagcuagagauucucaaga

SEQ ID NO: 85854 - RNA, 19 nt, Artificial Sequence
  Description of Artificial Sequence: Synthetic oligonucleotide
  Sense strand starting at position 2124 of SEQ ID NO: 1076
guuuaugcucccuaagagc

SEQ ID NO: 85855 - RNA, 19 nt, Artificial Sequence
  Description of Artificial Sequence: Synthetic oligonucleotide
  Antisense strand to SEQ ID NO: 85774
gcucuuagggagcauaaac

SEQ ID NO: 85856 - RNA, 19 nt, Artificial Sequence
  Description of Artificial Sequence: Synthetic oligonucleotide
  Sense strand starting at position 2123 of SEQ ID NO: 1076
uguuuaugcucccuaagag

SEQ ID NO: 85857 - RNA, 19 nt, Artificial Sequence
  Description of Artificial Sequence: Synthetic oligonucleotide
  Antisense strand to SEQ ID NO: 85776
cucuuagggagcauaaaca

SEQ ID NO: 85858 - RNA, 19 nt, Artificial Sequence
  Description of Artificial Sequence: Synthetic oligonucleotide
  Sense strand starting at position 2071 of SEQ ID NO: 1076
acccaugcuuaguuaggaa

SEQ ID NO: 85859 - RNA, 19 nt, Artificial Sequence
  Description of Artificial Sequence: Synthetic oligonucleotide
  Antisense strand to SEQ ID NO: 85778
uuccuaacuaagcaugggu

SEQ ID NO: 85860 - RNA, 19 nt, Artificial Sequence
  Description of Artificial Sequence: Synthetic oligonucleotide
  Sense strand starting at position 2024 of SEQ ID NO: 1076
guaagagaugacugugcaa

SEQ ID NO: 85861 - RNA, 19 nt, Artificial Sequence
  Description of Artificial Sequence: Synthetic oligonucleotide
  Antisense strand to SEQ ID NO: 85780
uugcacagucaucucuuac

SEQ ID NO: 85862 - RNA, 19 nt, Artificial Sequence
  Description of Artificial Sequence: Synthetic oligonucleotide
  Sense strand starting at position 2020 of SEQ ID NO: 1076
guugguaagagaugacugu

SEQ ID NO: 85863 - RNA, 19 nt, Artificial Sequence
  Description of Artificial Sequence: Synthetic oligonucleotide
  Antisense strand to SEQ ID NO: 85782
acagucaucucuuaccaac

SEQ ID NO: 85864 - RNA, 19 nt, Artificial Sequence
  Description of Artificial Sequence: Synthetic oligonucleotide
  Sense strand starting at position 2011 of SEQ ID NO: 1076
ggaggugguguugguaaga

SEQ ID NO: 85865 - RNA, 19 nt, Artificial Sequence
  Description of Artificial Sequence: Synthetic oligonucleotide
  Antisense strand to SEQ ID NO: 85784
ucuuaccaacaccaccucc

SEQ ID NO: 85866 - RNA, 19 nt, Artificial Sequence
  Description of Artificial Sequence: Synthetic oligonucleotide
  Sense strand starting at position 679 of SEQ ID NO: 1076
uguagaaucuuauugcuac

SEQ ID NO: 85867 - RNA, 19 nt, Artificial Sequence
  Description of Artificial Sequence: Synthetic oligonucleotide
  Antisense strand to SEQ ID NO: 85786
guagcaauaagauucuaca

SEQ ID NO: 85868 - RNA, 19 nt, Artificial Sequence
  Description of Artificial Sequence: Synthetic oligonucleotide
  Sense strand starting at position 669 of SEQ ID NO: 1076
ccgauuccacuguagaauc

SEQ ID NO: 85869 - RNA, 19 nt, Artificial Sequence
  Description of Artificial Sequence: Synthetic oligonucleotide
  Antisense strand to SEQ ID NO: 85788
gauucuacaguggaaucgg

SEQ ID NO: 85870 - RNA, 19 nt, Artificial Sequence
  Description of Artificial Sequence: Synthetic oligonucleotide
  Sense strand starting at position 667 of SEQ ID NO: 1076
cuccgauuccacuguagaa

SEQ ID NO: 85871 - RNA, 19 nt, Artificial Sequence
  Description of Artificial Sequence: Synthetic oligonucleotide
  Antisense strand to SEQ ID NO: 85790
uucuacaguggaaucggag

SEQ ID NO: 85872 - RNA, 19 nt, Artificial Sequence
  Description of Artificial Sequence: Synthetic oligonucleotide
  Sense strand starting at position 650 of SEQ ID NO: 1076
aguugucuuagagaaagcu

SEQ ID NO: 85873 - RNA, 19 nt, Artificial Sequence
  Description of Artificial Sequence: Synthetic oligonucleotide
  Antisense strand to SEQ ID NO: 85792
agcuuucucuaagacaacu

SEQ ID NO: 85874 - RNA, 19 nt, Artificial Sequence
  Description of Artificial Sequence: Synthetic oligonucleotide
  Sense strand starting at position 643 of SEQ ID NO: 1076
ugggaccaguugucuuaga

SEQ ID NO: 85875 - RNA, 19 nt, Artificial Sequence
  Description of Artificial Sequence: Synthetic oligonucleotide
  Antisense strand to SEQ ID NO: 85794
ucuaagacaacugguccca

SEQ ID NO: 85876 - RNA, 19 nt, Artificial Sequence
  Description of Artificial Sequence: Synthetic oligonucleotide
  Sense strand starting at position 588 of SEQ ID NO: 1076
aauguugccugggugacaa

SEQ ID NO: 85877 - RNA, 19 nt, Artificial Sequence
  Description of Artificial Sequence: Synthetic oligonucleotide
  Antisense strand to SEQ ID NO: 85796
uugucacccaggcaacauu

SEQ ID NO: 85878 - RNA, 19 nt, Artificial Sequence
  Description of Artificial Sequence: Synthetic oligonucleotide
  Sense strand starting at position 585 of SEQ ID NO: 1076
augaauguugccuggguga

SEQ ID NO: 85879 - RNA, 19 nt, Artificial Sequence
  Description of Artificial Sequence: Synthetic oligonucleotide
  Antisense strand to SEQ ID NO: 85798
ucacccaggcaacauucau

SEQ ID NO: 85880 - RNA, 19 nt, Artificial Sequence
  Description of Artificial Sequence: Synthetic oligonucleotide
  Sense strand starting at position 548 of SEQ ID NO: 1076
gccugagucaugguugugu

SEQ ID NO: 85881 - RNA, 19 nt, Artificial Sequence
  Description of Artificial Sequence: Synthetic oligonucleotide
  Antisense strand to SEQ ID NO: 85800
acacaaccaugacucaggc

SEQ ID NO: 85882 - RNA, 19 nt, Artificial Sequence
  Description of Artificial Sequence: Synthetic oligonucleotide
  Sense strand starting at position 540 of SEQ ID NO: 1076
agcccagugccugagucau

SEQ ID NO: 85883 - RNA, 19 nt, Artificial Sequence
  Description of Artificial Sequence: Synthetic oligonucleotide
  Antisense strand to SEQ ID NO: 85802
augacucaggcacugggcu

SEQ ID NO: 85884 - RNA, 19 nt, Artificial Sequence
  Description of Artificial Sequence: Synthetic oligonucleotide
  Sense strand starting at position 501 of SEQ ID NO: 1076
gggaacuuuguguggcuca

SEQ ID NO: 85885 - RNA, 19 nt, Artificial Sequence
  Description of Artificial Sequence: Synthetic oligonucleotide
  Antisense strand to SEQ ID NO: 85804
ugagccacacaaaguuccc

SEQ ID NO: 85886 - RNA, 19 nt, Artificial Sequence
  Description of Artificial Sequence: Synthetic oligonucleotide
  Sense strand starting at position 468 of SEQ ID NO: 1076
gauucugggccagguaaga

SEQ ID NO: 85887 - RNA, 19 nt, Artificial Sequence
  Description of Artificial Sequence: Synthetic oligonucleotide
  Antisense strand to SEQ ID NO: 85806
ucuuaccuggcccagaauc

SEQ ID NO: 85888 - RNA, 19 nt, Artificial Sequence
  Description of Artificial Sequence: Synthetic oligonucleotide
  Sense strand starting at position 466 of SEQ ID NO: 1076
cagauucugggccagguaa

SEQ ID NO: 85889 - RNA, 19 nt, Artificial Sequence
  Description of Artificial Sequence: Synthetic oligonucleotide
  Antisense strand to SEQ ID NO: 85808
uuaccuggcccagaaucug

SEQ ID NO: 85890 - RNA, 19 nt, Artificial Sequence
  Description of Artificial Sequence: Synthetic oligonucleotide
  Sense strand starting at position 414 of SEQ ID NO: 1076
uuaggacaucuuugggacu

SEQ ID NO: 85891 - RNA, 19 nt, Artificial Sequence
  Description of Artificial Sequence: Synthetic oligonucleotide
  Antisense strand to SEQ ID NO: 85810
agucccaaagauguccuaa

SEQ ID NO: 85892 - RNA, 19 nt, Artificial Sequence
  Description of Artificial Sequence: Synthetic oligonucleotide
  Sense strand starting at position 395 of SEQ ID NO: 1076
aacucagccugugugagau

SEQ ID NO: 85893 - RNA, 19 nt, Artificial Sequence
  Description of Artificial Sequence: Synthetic oligonucleotide
  Antisense strand to SEQ ID NO: 85812
aucucacacaggcugaguu

SEQ ID NO: 85894 - RNA, 19 nt, Artificial Sequence
  Description of Artificial Sequence: Synthetic oligonucleotide
  Sense strand starting at position 394 of SEQ ID NO: 1076
caacucagccugugugaga

SEQ ID NO: 85895 - RNA, 19 nt, Artificial Sequence
  Description of Artificial Sequence: Synthetic oligonucleotide
  Antisense strand to SEQ ID NO: 85814
ucucacacaggcugaguug

SEQ ID NO: 85896 - RNA, 19 nt, Artificial Sequence
  Description of Artificial Sequence: Synthetic oligonucleotide
  Sense strand starting at position 372 of SEQ ID NO: 1076
gucugcagaaauggauuaa

SEQ ID NO: 85897 - RNA, 19 nt, Artificial Sequence
  Description of Artificial Sequence: Synthetic oligonucleotide
  Antisense strand to SEQ ID NO: 85816
uuaauccauuucugcagac

SEQ ID NO: 85898 - RNA, 19 nt, Artificial Sequence
  Description of Artificial Sequence: Synthetic oligonucleotide
  Sense strand starting at position 364 of SEQ ID NO: 1076
ugaguugugucugcagaaa

SEQ ID NO: 85899 - RNA, 19 nt, Artificial Sequence
  Description of Artificial Sequence: Synthetic oligonucleotide
  Antisense strand to SEQ ID NO: 85818
uuucugcagacacaacuca

SEQ ID NO: 85900 - RNA, 19 nt, Artificial Sequence
  Description of Artificial Sequence: Synthetic oligonucleotide
  Sense strand starting at position 363 of SEQ ID NO: 1076
augaguugugucugcagaa

SEQ ID NO: 85901 - RNA, 19 nt, Artificial Sequence
  Description of Artificial Sequence: Synthetic oligonucleotide
  Antisense strand to SEQ ID NO: 85820
uucugcagacacaacucau

SEQ ID NO: 85902 - RNA, 19 nt, Artificial Sequence
  Description of Artificial Sequence: Synthetic oligonucleotide
  Sense strand starting at position 3730 of SEQ ID NO: 1078
cugagugacaggcaucuuu

SEQ ID NO: 85903 - RNA, 19 nt, Artificial Sequence
  Description of Artificial Sequence: Synthetic oligonucleotide
  Antisense strand to SEQ ID NO: 85822
aaagaugccugucacucag

SEQ ID NO: 85904 - RNA, 19 nt, Artificial Sequence
  Description of Artificial Sequence: Synthetic oligonucleotide
  Sense strand starting at position 3695 of SEQ ID NO: 1078
ugccgugagccauguuuga

SEQ ID NO: 85905 - RNA, 19 nt, Artificial Sequence
  Description of Artificial Sequence: Synthetic oligonucleotide
  Antisense strand to SEQ ID NO: 85824
ucaaacauggcucacggca

SEQ ID NO: 85906 - RNA, 19 nt, Artificial Sequence
  Description of Artificial Sequence: Synthetic oligonucleotide
  Sense strand starting at position 3640 of SEQ ID NO: 1078
cccagauauugggaggcua

SEQ ID NO: 85907 - RNA, 19 nt, Artificial Sequence
  Description of Artificial Sequence: Synthetic oligonucleotide
  Antisense strand to SEQ ID NO: 85826
uagccucccaauaucuggg

SEQ ID NO: 85908 - RNA, 19 nt, Artificial Sequence
  Description of Artificial Sequence: Synthetic oligonucleotide
  Sense strand starting at position 3435 of SEQ ID NO: 1078
uaguuagguugucaagaaa

SEQ ID NO: 85909 - RNA, 19 nt, Artificial Sequence
  Description of Artificial Sequence: Synthetic oligonucleotide
  Antisense strand to SEQ ID NO: 85828
uuucuugacaaccuaacua

SEQ ID NO: 85910 - RNA, 19 nt, Artificial Sequence
  Description of Artificial Sequence: Synthetic oligonucleotide
  Sense strand starting at position 3434 of SEQ ID NO: 1078
uuaguuagguugucaagaa

SEQ ID NO: 85911 - RNA, 19 nt, Artificial Sequence
  Description of Artificial Sequence: Synthetic oligonucleotide
  Antisense strand to SEQ ID NO: 85830
uucuugacaaccuaacuaa

SEQ ID NO: 85912 - RNA, 19 nt, Artificial Sequence
  Description of Artificial Sequence: Synthetic oligonucleotide
  Sense strand starting at position 3430 of SEQ ID NO: 1078
ugguuuaguuagguuguca

SEQ ID NO: 85913 - RNA, 19 nt, Artificial Sequence
  Description of Artificial Sequence: Synthetic oligonucleotide
  Antisense strand to SEQ ID NO: 85832
ugacaaccuaacuaaacca

SEQ ID NO: 85914 - RNA, 19 nt, Artificial Sequence
  Description of Artificial Sequence: Synthetic oligonucleotide
  Sense strand starting at position 3425 of SEQ ID NO: 1078
gagagugguuuaguuaggu

SEQ ID NO: 85915 - RNA, 19 nt, Artificial Sequence
  Description of Artificial Sequence: Synthetic oligonucleotide
  Antisense strand to SEQ ID NO: 85834
accuaacuaaaccacucuc

SEQ ID NO: 85916 - RNA, 19 nt, Artificial Sequence
  Description of Artificial Sequence: Synthetic oligonucleotide
  Sense strand starting at position 3423 of SEQ ID NO: 1078
gggagagugguuuaguuag

SEQ ID NO: 85917 - RNA, 19 nt, Artificial Sequence
  Description of Artificial Sequence: Synthetic oligonucleotide
  Antisense strand to SEQ ID NO: 85836
cuaacuaaaccacucuccc

SEQ ID NO: 85918 - RNA, 19 nt, Artificial Sequence
  Description of Artificial Sequence: Synthetic oligonucleotide
  Sense strand starting at position 3345 of SEQ ID NO: 1078
gagguaaacuaacaaugua

SEQ ID NO: 85919 - RNA, 19 nt, Artificial Sequence
  Description of Artificial Sequence: Synthetic oligonucleotide
  Antisense strand to SEQ ID NO: 85838
uacauuguuaguuuaccuc

SEQ ID NO: 85920 - RNA, 19 nt, Artificial Sequence
  Description of Artificial Sequence: Synthetic oligonucleotide
  Sense strand starting at position 3296 of SEQ ID NO: 1078
ggaacauguuaugaguuga

SEQ ID NO: 85921 - RNA, 19 nt, Artificial Sequence
  Description of Artificial Sequence: Synthetic oligonucleotide
  Antisense strand to SEQ ID NO: 85840
ucaacucauaacauguucc

SEQ ID NO: 85922 - RNA, 19 nt, Artificial Sequence
  Description of Artificial Sequence: Synthetic oligonucleotide
  Sense strand starting at position 3293 of SEQ ID NO: 1078
ccuggaacauguuaugagu

SEQ ID NO: 85923 - RNA, 19 nt, Artificial Sequence
  Description of Artificial Sequence: Synthetic oligonucleotide
  Antisense strand to SEQ ID NO: 85842
acucauaacauguuccagg

SEQ ID NO: 85924 - RNA, 19 nt, Artificial Sequence
  Description of Artificial Sequence: Synthetic oligonucleotide
  Sense strand starting at position 3283 of SEQ ID NO: 1078
uaaaucagugccuggaaca

SEQ ID NO: 85925 - RNA, 19 nt, Artificial Sequence
  Description of Artificial Sequence: Synthetic oligonucleotide
  Antisense strand to SEQ ID NO: 85844
uguuccaggcacugauuua

SEQ ID NO: 85926 - RNA, 19 nt, Artificial Sequence
  Description of Artificial Sequence: Synthetic oligonucleotide
  Sense strand starting at position 3243 of SEQ ID NO: 1078
agaagaacuuuaucuuguu

SEQ ID NO: 85927 - RNA, 19 nt, Artificial Sequence
  Description of Artificial Sequence: Synthetic oligonucleotide
  Antisense strand to SEQ ID NO: 85846
aacaagauaaaguucuucu

SEQ ID NO: 85928 - RNA, 19 nt, Artificial Sequence
  Description of Artificial Sequence: Synthetic oligonucleotide
  Sense strand starting at position 3228 of SEQ ID NO: 1078
gacuauaguuaauggagaa

SEQ ID NO: 85929 - RNA, 19 nt, Artificial Sequence
  Description of Artificial Sequence: Synthetic oligonucleotide
  Antisense strand to SEQ ID NO: 85848
uucuccauuaacuauaguc

SEQ ID NO: 85930 - RNA, 19 nt, Artificial Sequence
  Description of Artificial Sequence: Synthetic oligonucleotide
  Sense strand starting at position 3171 of SEQ ID NO: 1078
acaagaugguuguauccau

SEQ ID NO: 85931 - RNA, 19 nt, Artificial Sequence
  Description of Artificial Sequence: Synthetic oligonucleotide
  Antisense strand to SEQ ID NO: 85850
auggauacaaccaucuugu

SEQ ID NO: 85932 - RNA, 19 nt, Artificial Sequence
  Description of Artificial Sequence: Synthetic oligonucleotide
  Sense strand starting at position 2863 of SEQ ID NO: 1078
uuaagauugcuguggcuca

SEQ ID NO: 85933 - RNA, 19 nt, Artificial Sequence
  Description of Artificial Sequence: Synthetic oligonucleotide
  Antisense strand to SEQ ID NO: 85852
ugagccacagcaaucuuaa

SEQ ID NO: 85934 - RNA, 19 nt, Artificial Sequence
  Description of Artificial Sequence: Synthetic oligonucleotide
  Sense strand starting at position 2820 of SEQ ID NO: 1078
aagucacgaucucauauga

SEQ ID NO: 85935 - RNA, 19 nt, Artificial Sequence
  Description of Artificial Sequence: Synthetic oligonucleotide
  Antisense strand to SEQ ID NO: 85854
ucauaugagaucgugacuu

SEQ ID NO: 85936 - RNA, 19 nt, Artificial Sequence
  Description of Artificial Sequence: Synthetic oligonucleotide
  Sense strand starting at position 2784 of SEQ ID NO: 1078
aagucaggucgagguucaa

SEQ ID NO: 85937 - RNA, 19 nt, Artificial Sequence
  Description of Artificial Sequence: Synthetic oligonucleotide
  Antisense strand to SEQ ID NO: 85856
uugaaccucgaccugacuu

SEQ ID NO: 85938 - RNA, 19 nt, Artificial Sequence
  Description of Artificial Sequence: Synthetic oligonucleotide
  Sense strand starting at position 2724 of SEQ ID NO: 1078
gaaacaguccaugggugaa

SEQ ID NO: 85939 - RNA, 19 nt, Artificial Sequence
  Description of Artificial Sequence: Synthetic oligonucleotide
  Antisense strand to SEQ ID NO: 85858
uucacccauggacuguuuc

SEQ ID NO: 85940 - RNA, 19 nt, Artificial Sequence
  Description of Artificial Sequence: Synthetic oligonucleotide
  Sense strand starting at position 2676 of SEQ ID NO: 1078
cagugauucuguccuggau

SEQ ID NO: 85941 - RNA, 19 nt, Artificial Sequence
  Description of Artificial Sequence: Synthetic oligonucleotide
  Antisense strand to SEQ ID NO: 85860
auccaggacagaaucacug

SEQ ID NO: 85942 - RNA, 19 nt, Artificial Sequence
  Description of Artificial Sequence: Synthetic oligonucleotide
  Sense strand starting at position 2667 of SEQ ID NO: 1078
ccacgcugucagugauucu

SEQ ID NO: 85943 - RNA, 19 nt, Artificial Sequence
  Description of Artificial Sequence: Synthetic oligonucleotide
  Antisense strand to SEQ ID NO: 85862
agaaucacugacagcgugg

SEQ ID NO: 85944 - RNA, 19 nt, Artificial Sequence
  Description of Artificial Sequence: Synthetic oligonucleotide
  Sense strand starting at position 2596 of SEQ ID NO: 1078
cuuaaucuugcagaggcua

SEQ ID NO: 85945 - RNA, 19 nt, Artificial Sequence
  Description of Artificial Sequence: Synthetic oligonucleotide
  Antisense strand to SEQ ID NO: 85864
uagccucugcaagauuaag

SEQ ID NO: 85946 - RNA, 19 nt, Artificial Sequence
  Description of Artificial Sequence: Synthetic oligonucleotide
  Sense strand starting at position 2541 of SEQ ID NO: 1078
uuggcaaugugacaucaga

SEQ ID NO: 85947 - RNA, 19 nt, Artificial Sequence
  Description of Artificial Sequence: Synthetic oligonucleotide
  Antisense strand to SEQ ID NO: 85866
ucugaugucacauugccaa

SEQ ID NO: 85948 - RNA, 19 nt, Artificial Sequence
  Description of Artificial Sequence: Synthetic oligonucleotide
  Sense strand starting at position 2536 of SEQ ID NO: 1078
cuacuuuggcaaugugaca

SEQ ID NO: 85949 - RNA, 19 nt, Artificial Sequence
  Description of Artificial Sequence: Synthetic oligonucleotide
  Antisense strand to SEQ ID NO: 85868
ugucacauugccaaaguag

SEQ ID NO: 85950 - RNA, 19 nt, Artificial Sequence
  Description of Artificial Sequence: Synthetic oligonucleotide
  Sense strand starting at position 2202 of SEQ ID NO: 1078
ccugcaaguccagaguuaa

SEQ ID NO: 85951 - RNA, 19 nt, Artificial Sequence
  Description of Artificial Sequence: Synthetic oligonucleotide
  Antisense strand to SEQ ID NO: 85870
uuaacucuggacuugcagg

SEQ ID NO: 85952 - RNA, 19 nt, Artificial Sequence
  Description of Artificial Sequence: Synthetic oligonucleotide
  Sense strand starting at position 2149 of SEQ ID NO: 1078
guaugauuaggaggaccga

SEQ ID NO: 85953 - RNA, 19 nt, Artificial Sequence
  Description of Artificial Sequence: Synthetic oligonucleotide
  Antisense strand to SEQ ID NO: 85872
ucgguccuccuaaucauac

SEQ ID NO: 85954 - RNA, 19 nt, Artificial Sequence
  Description of Artificial Sequence: Synthetic oligonucleotide
  Sense strand starting at position 2138 of SEQ ID NO: 1078
gcuccaguagaguaugauu

SEQ ID NO: 85955 - RNA, 19 nt, Artificial Sequence
  Description of Artificial Sequence: Synthetic oligonucleotide
  Antisense strand to SEQ ID NO: 85874
aaucauacucuacuggagc

SEQ ID NO: 85956 - RNA, 19 nt, Artificial Sequence
  Description of Artificial Sequence: Synthetic oligonucleotide
  Sense strand starting at position 2130 of SEQ ID NO: 1078
ggugcucugcuccaguaga

SEQ ID NO: 85957 - RNA, 19 nt, Artificial Sequence
  Description of Artificial Sequence: Synthetic oligonucleotide
  Antisense strand to SEQ ID NO: 85876
ucuacuggagcagagcacc

SEQ ID NO: 85958 - RNA, 19 nt, Artificial Sequence
  Description of Artificial Sequence: Synthetic oligonucleotide
  Sense strand starting at position 1670 of SEQ ID NO: 1078
gggagauucuggccucauu

SEQ ID NO: 85959 - RNA, 19 nt, Artificial Sequence
  Description of Artificial Sequence: Synthetic oligonucleotide
  Antisense strand to SEQ ID NO: 85878
aaugaggccagaaucuccc

SEQ ID NO: 85960 - RNA, 19 nt, Artificial Sequence
  Description of Artificial Sequence: Synthetic oligonucleotide
  Sense strand starting at position 1510 of SEQ ID NO: 1078
ggcuguacccaguaaagug

SEQ ID NO: 85961 - RNA, 19 nt, Artificial Sequence
  Description of Artificial Sequence: Synthetic oligonucleotide
  Antisense strand to SEQ ID NO: 85880
cacuuuacuggguacagcc

SEQ ID NO: 85962 - RNA, 19 nt, Artificial Sequence
  Description of Artificial Sequence: Synthetic oligonucleotide
  Sense strand starting at position 1507 of SEQ ID NO: 1078
ggaggcuguacccaguaaa

SEQ ID NO: 85963 - RNA, 19 nt, Artificial Sequence
  Description of Artificial Sequence: Synthetic oligonucleotide
  Antisense strand to SEQ ID NO: 85882
uuuacuggguacagccucc

SEQ ID NO: 85964 - RNA, 19 nt, Artificial Sequence
  Description of Artificial Sequence: Synthetic oligonucleotide
  Sense strand starting at position 1321 of SEQ ID NO: 1078
gcccaauuccuaggagaag

SEQ ID NO: 85965 - RNA, 19 nt, Artificial Sequence
  Description of Artificial Sequence: Synthetic oligonucleotide
  Antisense strand to SEQ ID NO: 85884
cuucuccuaggaauugggc

SEQ ID NO: 85966 - RNA, 19 nt, Artificial Sequence
  Description of Artificial Sequence: Synthetic oligonucleotide
  Sense strand starting at position 1300 of SEQ ID NO: 1078
ugucuuaauccaggucuga

SEQ ID NO: 85967 - RNA, 19 nt, Artificial Sequence
  Description of Artificial Sequence: Synthetic oligonucleotide
  Antisense strand to SEQ ID NO: 85886
ucagaccuggauuaagaca

SEQ ID NO: 85968 - RNA, 19 nt, Artificial Sequence
  Description of Artificial Sequence: Synthetic oligonucleotide
  Sense strand starting at position 1289 of SEQ ID NO: 1078
ucuugucccuaugucuuaa

SEQ ID NO: 85969 - RNA, 19 nt, Artificial Sequence
  Description of Artificial Sequence: Synthetic oligonucleotide
  Antisense strand to SEQ ID NO: 85888
uuaagacauagggacaaga

SEQ ID NO: 85970 - RNA, 19 nt, Artificial Sequence
  Description of Artificial Sequence: Synthetic oligonucleotide
  Sense strand starting at position 1239 of SEQ ID NO: 1078
ccggaucacacucagagua

SEQ ID NO: 85971 - RNA, 19 nt, Artificial Sequence
  Description of Artificial Sequence: Synthetic oligonucleotide
  Antisense strand to SEQ ID NO: 85890
uacucugagugugauccgg

SEQ ID NO: 85972 - RNA, 19 nt, Artificial Sequence
  Description of Artificial Sequence: Synthetic oligonucleotide
  Sense strand starting at position 904 of SEQ ID NO: 1078
ucaugugaccuugguaaca

SEQ ID NO: 85973 - RNA, 19 nt, Artificial Sequence
  Description of Artificial Sequence: Synthetic oligonucleotide
  Antisense strand to SEQ ID NO: 85892
uguuaccaaggucacauga

SEQ ID NO: 85974 - RNA, 19 nt, Artificial Sequence
  Description of Artificial Sequence: Synthetic oligonucleotide
  Sense strand starting at position 685 of SEQ ID NO: 1078
gaaauagucccagguaucc

SEQ ID NO: 85975 - RNA, 19 nt, Artificial Sequence
  Description of Artificial Sequence: Synthetic oligonucleotide
  Antisense strand to SEQ ID NO: 85894
ggauaccugggacuauuuc

SEQ ID NO: 85976 - RNA, 19 nt, Artificial Sequence
  Description of Artificial Sequence: Synthetic oligonucleotide
  Sense strand starting at position 683 of SEQ ID NO: 1078
gggaaauagucccagguau

SEQ ID NO: 85977 - RNA, 19 nt, Artificial Sequence
  Description of Artificial Sequence: Synthetic oligonucleotide
  Antisense strand to SEQ ID NO: 85896
auaccugggacuauuuccc

SEQ ID NO: 85978 - RNA, 19 nt, Artificial Sequence
  Description of Artificial Sequence: Synthetic oligonucleotide
  Sense strand starting at position 267 of SEQ ID NO: 1078
agucccugcucuguauaua

SEQ ID NO: 85979 - RNA, 19 nt, Artificial Sequence
  Description of Artificial Sequence: Synthetic oligonucleotide
  Antisense strand to SEQ ID NO: 85898
uauauacagagcagggacu

SEQ ID NO: 85980 - RNA, 19 nt, Artificial Sequence
  Description of Artificial Sequence: Synthetic oligonucleotide
  Sense strand starting at position 191 of SEQ ID NO: 1078
agggcauccgaguauaaac

SEQ ID NO: 85981 - RNA, 19 nt, Artificial Sequence
  Description of Artificial Sequence: Synthetic oligonucleotide
  Antisense strand to SEQ ID NO: 85900
guuuauacucggaugcccu

SEQ ID NO: 85982 - RNA, 19 nt, Artificial Sequence
  Description of Artificial Sequence: Synthetic oligonucleotide
  Sense strand starting at position 3627 of SEQ ID NO: 1079
cucuguuaguuggugagga

SEQ ID NO: 85983 - RNA, 19 nt, Artificial Sequence
  Description of Artificial Sequence: Synthetic oligonucleotide
  Antisense strand to SEQ ID NO: 85902
uccucaccaacuaacagag

SEQ ID NO: 85984 - RNA, 19 nt, Artificial Sequence
  Description of Artificial Sequence: Synthetic oligonucleotide
  Sense strand starting at position 3494 of SEQ ID NO: 1079
ucaguuucuugucuaacca

SEQ ID NO: 85985 - RNA, 19 nt, Artificial Sequence
  Description of Artificial Sequence: Synthetic oligonucleotide
  Antisense strand to SEQ ID NO: 85904
ugguuagacaagaaacuga

SEQ ID NO: 85986 - RNA, 19 nt, Artificial Sequence
  Description of Artificial Sequence: Synthetic oligonucleotide
  Sense strand starting at position 3490 of SEQ ID NO: 1079
ggccucaguuucuugucua

SEQ ID NO: 85987 - RNA, 19 nt, Artificial Sequence
  Description of Artificial Sequence: Synthetic oligonucleotide
  Antisense strand to SEQ ID NO: 85906
uagacaagaaacugaggcc

SEQ ID NO: 85988 - RNA, 19 nt, Artificial Sequence
  Description of Artificial Sequence: Synthetic oligonucleotide
  Sense strand starting at position 3426 of SEQ ID NO: 1079
cugggacaucauugacacu

SEQ ID NO: 85989 - RNA, 19 nt, Artificial Sequence
  Description of Artificial Sequence: Synthetic oligonucleotide
  Antisense strand to SEQ ID NO: 85908
agugucaaugaugucccag

SEQ ID NO: 85990 - RNA, 19 nt, Artificial Sequence
  Description of Artificial Sequence: Synthetic oligonucleotide
  Sense strand starting at position 3364 of SEQ ID NO: 1079
gugggaucucccuaaccug

SEQ ID NO: 85991 - RNA, 19 nt, Artificial Sequence
  Description of Artificial Sequence: Synthetic oligonucleotide
  Antisense strand to SEQ ID NO: 85910
cagguuagggagaucccac

SEQ ID NO: 85992 - RNA, 19 nt, Artificial Sequence
  Description of Artificial Sequence: Synthetic oligonucleotide
  Sense strand starting at position 3345 of SEQ ID NO: 1079
gcaggauuacuagagugca

SEQ ID NO: 85993 - RNA, 19 nt, Artificial Sequence
  Description of Artificial Sequence: Synthetic oligonucleotide
  Antisense strand to SEQ ID NO: 85912
ugcacucuaguaauccugc

SEQ ID NO: 85994 - RNA, 19 nt, Artificial Sequence
  Description of Artificial Sequence: Synthetic oligonucleotide
  Sense strand starting at position 3334 of SEQ ID NO: 1079
accauaacauugcaggauu

SEQ ID NO: 85995 - RNA, 19 nt, Artificial Sequence
  Description of Artificial Sequence: Synthetic oligonucleotide
  Antisense strand to SEQ ID NO: 85914
aauccugcaauguuauggu

SEQ ID NO: 85996 - RNA, 19 nt, Artificial Sequence
  Description of Artificial Sequence: Synthetic oligonucleotide
  Sense strand starting at position 3184 of SEQ ID NO: 1079
uugugauguccauaccagu

SEQ ID NO: 85997 - RNA, 19 nt, Artificial Sequence
  Description of Artificial Sequence: Synthetic oligonucleotide
  Antisense strand to SEQ ID NO: 85916
acugguauggacaucacaa

SEQ ID NO: 85998 - RNA, 19 nt, Artificial Sequence
  Description of Artificial Sequence: Synthetic oligonucleotide
  Sense strand starting at position 3182 of SEQ ID NO: 1079
ccuugugauguccauacca

SEQ ID NO: 85999 - RNA, 19 nt, Artificial Sequence
  Description of Artificial Sequence: Synthetic oligonucleotide
  Antisense strand to SEQ ID NO: 85918
ugguauggacaucacaagg

SEQ ID NO: 86000 - RNA, 19 nt, Artificial Sequence
  Description of Artificial Sequence: Synthetic oligonucleotide
  Sense strand starting at position 3173 of SEQ ID NO: 1079
ccagaagggccuugugaug

SEQ ID NO: 86001 - RNA, 19 nt, Artificial Sequence
  Description of Artificial Sequence: Synthetic oligonucleotide
  Antisense strand to SEQ ID NO: 85920
caucacaaggcccuucugg

SEQ ID NO: 86002 - RNA, 19 nt, Artificial Sequence
  Description of Artificial Sequence: Synthetic oligonucleotide
  Sense strand starting at position 2950 of SEQ ID NO: 1079
ggccucugggucuauuaca

SEQ ID NO: 86003 - RNA, 19 nt, Artificial Sequence
  Description of Artificial Sequence: Synthetic oligonucleotide
  Antisense strand to SEQ ID NO: 85922
uguaauagacccagaggcc

SEQ ID NO: 86004 - RNA, 19 nt, Artificial Sequence
  Description of Artificial Sequence: Synthetic oligonucleotide
  Sense strand starting at position 2923 of SEQ ID NO: 1079
cugaaauugcuguacucau

SEQ ID NO: 86005 - RNA, 19 nt, Artificial Sequence
  Description of Artificial Sequence: Synthetic oligonucleotide
  Antisense strand to SEQ ID NO: 85924
augaguacagcaauuucag

SEQ ID NO: 86006 - RNA, 19 nt, Artificial Sequence
  Description of Artificial Sequence: Synthetic oligonucleotide
  Sense strand starting at position 2824 of SEQ ID NO: 1079
aggaguucccacugagaug

SEQ ID NO: 86007 - RNA, 19 nt, Artificial Sequence
  Description of Artificial Sequence: Synthetic oligonucleotide
  Antisense strand to SEQ ID NO: 85926
caucucagugggaacuccu

SEQ ID NO: 86008 - RNA, 19 nt, Artificial Sequence
  Description of Artificial Sequence: Synthetic oligonucleotide
  Sense strand starting at position 2771 of SEQ ID NO: 1079
uccguuuacccuuggacua

SEQ ID NO: 86009 - RNA, 19 nt, Artificial Sequence
  Description of Artificial Sequence: Synthetic oligonucleotide
  Antisense strand to SEQ ID NO: 85928
uaguccaaggguaaacgga

SEQ ID NO: 86010 - RNA, 19 nt, Artificial Sequence
  Description of Artificial Sequence: Synthetic oligonucleotide
  Sense strand starting at position 2566 of SEQ ID NO: 1079
ggcgcuugcgccaggaaua

SEQ ID NO: 86011 - RNA, 19 nt, Artificial Sequence
  Description of Artificial Sequence: Synthetic oligonucleotide
  Antisense strand to SEQ ID NO: 85930
uauuccuggcgcaagcgcc

SEQ ID NO: 86012 - RNA, 19 nt, Artificial Sequence
  Description of Artificial Sequence: Synthetic oligonucleotide
  Sense strand starting at position 2565 of SEQ ID NO: 1079
gggcgcuugcgccaggaau

SEQ ID NO: 86013 - RNA, 19 nt, Artificial Sequence
  Description of Artificial Sequence: Synthetic oligonucleotide
  Antisense strand to SEQ ID NO: 85932
auuccuggcgcaagcgccc

SEQ ID NO: 86014 - RNA, 19 nt, Artificial Sequence
  Description of Artificial Sequence: Synthetic oligonucleotide
  Sense strand starting at position 2531 of SEQ ID NO: 1079
uuuggagaauuccuuccaa

SEQ ID NO: 86015 - RNA, 19 nt, Artificial Sequence
  Description of Artificial Sequence: Synthetic oligonucleotide
  Antisense strand to SEQ ID NO: 85934
uuggaaggaauucuccaaa

SEQ ID NO: 86016 - RNA, 19 nt, Artificial Sequence
  Description of Artificial Sequence: Synthetic oligonucleotide
  Sense strand starting at position 2472 of SEQ ID NO: 1079
caaguuugggcugggaaua

SEQ ID NO: 86017 - RNA, 19 nt, Artificial Sequence
  Description of Artificial Sequence: Synthetic oligonucleotide
  Antisense strand to SEQ ID NO: 85936
uauucccagcccaaacuug

SEQ ID NO: 86018 - RNA, 19 nt, Artificial Sequence
  Description of Artificial Sequence: Synthetic oligonucleotide
  Sense strand starting at position 2471 of SEQ ID NO: 1079
ccaaguuugggcugggaau

SEQ ID NO: 86019 - RNA, 19 nt, Artificial Sequence
  Description of Artificial Sequence: Synthetic oligonucleotide
  Antisense strand to SEQ ID NO: 85938
auucccagcccaaacuugg

SEQ ID NO: 86020 - RNA, 19 nt, Artificial Sequence
  Description of Artificial Sequence: Synthetic oligonucleotide
  Sense strand starting at position 2458 of SEQ ID NO: 1079
gagacuugguaucccaagu

SEQ ID NO: 86021 - RNA, 19 nt, Artificial Sequence
  Description of Artificial Sequence: Synthetic oligonucleotide
  Antisense strand to SEQ ID NO: 85940
acuugggauaccaagucuc

SEQ ID NO: 86022 - RNA, 19 nt, Artificial Sequence
  Description of Artificial Sequence: Synthetic oligonucleotide
  Sense strand starting at position 2366 of SEQ ID NO: 1079
ggagaucuguucggaagag

SEQ ID NO: 86023 - RNA, 19 nt, Artificial Sequence
  Description of Artificial Sequence: Synthetic oligonucleotide
  Antisense strand to SEQ ID NO: 85942
cucuuccgaacagaucucc

SEQ ID NO: 86024 - RNA, 19 nt, Artificial Sequence
  Description of Artificial Sequence: Synthetic oligonucleotide
  Sense strand starting at position 2365 of SEQ ID NO: 1079
gggagaucuguucggaaga

SEQ ID NO: 86025 - RNA, 19 nt, Artificial Sequence
  Description of Artificial Sequence: Synthetic oligonucleotide
  Antisense strand to SEQ ID NO: 85944
ucuuccgaacagaucuccc

SEQ ID NO: 86026 - RNA, 19 nt, Artificial Sequence
  Description of Artificial Sequence: Synthetic oligonucleotide
  Sense strand starting at position 2364 of SEQ ID NO: 1079
cgggagaucuguucggaag

SEQ ID NO: 86027 - RNA, 19 nt, Artificial Sequence
  Description of Artificial Sequence: Synthetic oligonucleotide
  Antisense strand to SEQ ID NO: 85946
cuuccgaacagaucucccg

SEQ ID NO: 86028 - RNA, 19 nt, Artificial Sequence
  Description of Artificial Sequence: Synthetic oligonucleotide
  Sense strand starting at position 1563 of SEQ ID NO: 1079
ggguggaaguguucggacu

SEQ ID NO: 86029 - RNA, 19 nt, Artificial Sequence
  Description of Artificial Sequence: Synthetic oligonucleotide
  Antisense strand to SEQ ID NO: 85948
aguccgaacacuuccaccc

SEQ ID NO: 86030 - RNA, 19 nt, Artificial Sequence
  Description of Artificial Sequence: Synthetic oligonucleotide
  Sense strand starting at position 1274 of SEQ ID NO: 1079
gcugaaacucuuugugagu

SEQ ID NO: 86031 - RNA, 19 nt, Artificial Sequence
  Description of Artificial Sequence: Synthetic oligonucleotide
  Antisense strand to SEQ ID NO: 85950
acucacaaagaguuucagc

SEQ ID NO: 86032 - RNA, 19 nt, Artificial Sequence
  Description of Artificial Sequence: Synthetic oligonucleotide
  Sense strand starting at position 1273 of SEQ ID NO: 1079
agcugaaacucuuugugag

SEQ ID NO: 86033 - RNA, 19 nt, Artificial Sequence
  Description of Artificial Sequence: Synthetic oligonucleotide
  Antisense strand to SEQ ID NO: 85952
cucacaaagaguuucagcu

SEQ ID NO: 86034 - RNA, 19 nt, Artificial Sequence
  Description of Artificial Sequence: Synthetic oligonucleotide
  Sense strand starting at position 949 of SEQ ID NO: 1079
cugagaauuagcuguugaa

SEQ ID NO: 86035 - RNA, 19 nt, Artificial Sequence
  Description of Artificial Sequence: Synthetic oligonucleotide
  Antisense strand to SEQ ID NO: 85954
uucaacagcuaauucucag

SEQ ID NO: 86036 - RNA, 19 nt, Artificial Sequence
  Description of Artificial Sequence: Synthetic oligonucleotide
  Sense strand starting at position 715 of SEQ ID NO: 1079
gcagcagucuaggaaaggu

SEQ ID NO: 86037 - RNA, 19 nt, Artificial Sequence
  Description of Artificial Sequence: Synthetic oligonucleotide
  Antisense strand to SEQ ID NO: 85956
accuuuccuagacugcugc

SEQ ID NO: 86038 - RNA, 19 nt, Artificial Sequence
  Description of Artificial Sequence: Synthetic oligonucleotide
  Sense strand starting at position 712 of SEQ ID NO: 1079
gcagcagcagucuaggaaa

SEQ ID NO: 86039 - RNA, 19 nt, Artificial Sequence
  Description of Artificial Sequence: Synthetic oligonucleotide
  Antisense strand to SEQ ID NO: 85958
uuuccuagacugcugcugc

SEQ ID NO: 86040 - RNA, 19 nt, Artificial Sequence
  Description of Artificial Sequence: Synthetic oligonucleotide
  Sense strand starting at position 620 of SEQ ID NO: 1079
cccagaagaggugguuaaa

SEQ ID NO: 86041 - RNA, 19 nt, Artificial Sequence
  Description of Artificial Sequence: Synthetic oligonucleotide
  Antisense strand to SEQ ID NO: 85960
uuuaaccaccucuucuggg

SEQ ID NO: 86042 - RNA, 19 nt, Artificial Sequence
  Description of Artificial Sequence: Synthetic oligonucleotide
  Sense strand starting at position 597 of SEQ ID NO: 1079
ccuaaaguguuccuucuaa

SEQ ID NO: 86043 - RNA, 19 nt, Artificial Sequence
  Description of Artificial Sequence: Synthetic oligonucleotide
  Antisense strand to SEQ ID NO: 85962
uuagaaggaacacuuuagg

SEQ ID NO: 86044 - RNA, 19 nt, Artificial Sequence
  Description of Artificial Sequence: Synthetic oligonucleotide
  Sense strand starting at position 413 of SEQ ID NO: 1079
ugcagaggcuuuggaaaca

SEQ ID NO: 86045 - RNA, 19 nt, Artificial Sequence
  Description of Artificial Sequence: Synthetic oligonucleotide
  Antisense strand to SEQ ID NO: 85964
uguuuccaaagccucugca

SEQ ID NO: 86046 - RNA, 19 nt, Artificial Sequence
  Description of Artificial Sequence: Synthetic oligonucleotide
  Sense strand starting at position 254 of SEQ ID NO: 1079
uggaguauacacugcuagu

SEQ ID NO: 86047 - RNA, 19 nt, Artificial Sequence
  Description of Artificial Sequence: Synthetic oligonucleotide
  Antisense strand to SEQ ID NO: 85966
acuagcaguguauacucca

SEQ ID NO: 86048 - RNA, 19 nt, Artificial Sequence
  Description of Artificial Sequence: Synthetic oligonucleotide
  Sense strand starting at position 244 of SEQ ID NO: 1079
uccauugcccuggaguaua

SEQ ID NO: 86049 - RNA, 19 nt, Artificial Sequence
  Description of Artificial Sequence: Synthetic oligonucleotide
  Antisense strand to SEQ ID NO: 85968
uauacuccagggcaaugga

SEQ ID NO: 86050 - RNA, 19 nt, Artificial Sequence
  Description of Artificial Sequence: Synthetic oligonucleotide
  Sense strand starting at position 243 of SEQ ID NO: 1079
guccauugcccuggaguau

SEQ ID NO: 86051 - RNA, 19 nt, Artificial Sequence
  Description of Artificial Sequence: Synthetic oligonucleotide
  Antisense strand to SEQ ID NO: 85970
auacuccagggcaauggac

SEQ ID NO: 86052 - RNA, 19 nt, Artificial Sequence
  Description of Artificial Sequence: Synthetic oligonucleotide
  Sense strand starting at position 242 of SEQ ID NO: 1079
gguccauugcccuggagua

SEQ ID NO: 86053 - RNA, 19 nt, Artificial Sequence
  Description of Artificial Sequence: Synthetic oligonucleotide
  Antisense strand to SEQ ID NO: 85972
uacuccagggcaauggacc

SEQ ID NO: 86054 - RNA, 19 nt, Artificial Sequence
  Description of Artificial Sequence: Synthetic oligonucleotide
  Sense strand starting at position 221 of SEQ ID NO: 1079
gcuggucucccagaggaaa

SEQ ID NO: 86055 - RNA, 19 nt, Artificial Sequence
  Description of Artificial Sequence: Synthetic oligonucleotide
  Antisense strand to SEQ ID NO: 85974
uuuccucugggagaccagc

SEQ ID NO: 86056 - RNA, 19 nt, Artificial Sequence
  Description of Artificial Sequence: Synthetic oligonucleotide
  Sense strand starting at position 76 of SEQ ID NO: 1079
ccgacaugcugcccagaaa

SEQ ID NO: 86057 - RNA, 19 nt, Artificial Sequence
  Description of Artificial Sequence: Synthetic oligonucleotide
  Antisense strand to SEQ ID NO: 85976
uuucugggcagcaugucgg

SEQ ID NO: 86058 - RNA, 19 nt, Artificial Sequence
  Description of Artificial Sequence: Synthetic oligonucleotide
  Sense strand starting at position 43 of SEQ ID NO: 1079
agguguuacccaugcacgu

SEQ ID NO: 86059 - RNA, 19 nt, Artificial Sequence
  Description of Artificial Sequence: Synthetic oligonucleotide
  Antisense strand to SEQ ID NO: 85978
acgugcauggguaacaccu

SEQ ID NO: 86060 - RNA, 19 nt, Artificial Sequence
  Description of Artificial Sequence: Synthetic oligonucleotide
  Sense strand starting at position 41 of SEQ ID NO: 1079
ggagguguuacccaugcac

SEQ ID NO: 86061 - RNA, 19 nt, Artificial Sequence
  Description of Artificial Sequence: Synthetic oligonucleotide
  Antisense strand to SEQ ID NO: 85980
gugcauggguaacaccucc

SEQ ID NO: 86062 - RNA, 19 nt, Artificial Sequence
  Description of Artificial Sequence: Synthetic oligonucleotide
  Sense strand starting at position 3804 of SEQ ID NO: 1080
ggaugcguuccuccucgua

SEQ ID NO: 86063 - RNA, 19 nt, Artificial Sequence
  Description of Artificial Sequence: Synthetic oligonucleotide
  Antisense strand to SEQ ID NO: 85982
uacgaggaggaacgcaucc

SEQ ID NO: 86064 - RNA, 19 nt, Artificial Sequence
  Description of Artificial Sequence: Synthetic oligonucleotide
  Sense strand starting at position 3785 of SEQ ID NO: 1080
cgaguauuguacccagggu

SEQ ID NO: 86065 - RNA, 19 nt, Artificial Sequence
  Description of Artificial Sequence: Synthetic oligonucleotide
  Antisense strand to SEQ ID NO: 85984
acccuggguacaauacucg

SEQ ID NO: 86066 - RNA, 19 nt, Artificial Sequence
  Description of Artificial Sequence: Synthetic oligonucleotide
  Sense strand starting at position 3777 of SEQ ID NO: 1080
uguguaagcgaguauugua

SEQ ID NO: 86067 - RNA, 19 nt, Artificial Sequence
  Description of Artificial Sequence: Synthetic oligonucleotide
  Antisense strand to SEQ ID NO: 85986
uacaauacucgcuuacaca

SEQ ID NO: 86068 - RNA, 19 nt, Artificial Sequence
  Description of Artificial Sequence: Synthetic oligonucleotide
  Sense strand starting at position 3776 of SEQ ID NO: 1080
cuguguaagcgaguauugu

SEQ ID NO: 86069 - RNA, 19 nt, Artificial Sequence
  Description of Artificial Sequence: Synthetic oligonucleotide
  Antisense strand to SEQ ID NO: 85988
acaauacucgcuuacacag

SEQ ID NO: 86070 - RNA, 19 nt, Artificial Sequence
  Description of Artificial Sequence: Synthetic oligonucleotide
  Sense strand starting at position 3774 of SEQ ID NO: 1080
uccuguguaagcgaguauu

SEQ ID NO: 86071 - RNA, 19 nt, Artificial Sequence
  Description of Artificial Sequence: Synthetic oligonucleotide
  Antisense strand to SEQ ID NO: 85990
aauacucgcuuacacagga

SEQ ID NO: 86072 - RNA, 19 nt, Artificial Sequence
  Description of Artificial Sequence: Synthetic oligonucleotide
  Sense strand starting at position 3772 of SEQ ID NO: 1080
uauccuguguaagcgagua

SEQ ID NO: 86073 - RNA, 19 nt, Artificial Sequence
  Description of Artificial Sequence: Synthetic oligonucleotide
  Antisense strand to SEQ ID NO: 85992
uacucgcuuacacaggaua

SEQ ID NO: 86074 - RNA, 19 nt, Artificial Sequence
  Description of Artificial Sequence: Synthetic oligonucleotide
  Sense strand starting at position 3585 of SEQ ID NO: 1080
uuaauaacguuugcuaaac

SEQ ID NO: 86075 - RNA, 19 nt, Artificial Sequence
  Description of Artificial Sequence: Synthetic oligonucleotide
  Antisense strand to SEQ ID NO: 85994
guuuagcaaacguuauuaa

SEQ ID NO: 86076 - RNA, 19 nt, Artificial Sequence
  Description of Artificial Sequence: Synthetic oligonucleotide
  Sense strand starting at position 3536 of SEQ ID NO: 1080
gugaguuagcuauacccag

SEQ ID NO: 86077 - RNA, 19 nt, Artificial Sequence
  Description of Artificial Sequence: Synthetic oligonucleotide
  Antisense strand to SEQ ID NO: 85996
cuggguauagcuaacucac

SEQ ID NO: 86078 - RNA, 19 nt, Artificial Sequence
  Description of Artificial Sequence: Synthetic oligonucleotide
  Sense strand starting at position 3525 of SEQ ID NO: 1080
ccacauucccagugaguua

SEQ ID NO: 86079 - RNA, 19 nt, Artificial Sequence
  Description of Artificial Sequence: Synthetic oligonucleotide
  Antisense strand to SEQ ID NO: 85998
uaacucacugggaaugugg

SEQ ID NO: 86080 - RNA, 19 nt, Artificial Sequence
  Description of Artificial Sequence: Synthetic oligonucleotide
  Sense strand starting at position 3415 of SEQ ID NO: 1080
gugcaaacccucuguguca

SEQ ID NO: 86081 - RNA, 19 nt, Artificial Sequence
  Description of Artificial Sequence: Synthetic oligonucleotide
  Antisense strand to SEQ ID NO: 86000
ugacacagaggguuugcac

SEQ ID NO: 86082 - RNA, 19 nt, Artificial Sequence
  Description of Artificial Sequence: Synthetic oligonucleotide
  Sense strand starting at position 3404 of SEQ ID NO: 1080
gagauuauccagugcaaac

SEQ ID NO: 86083 - RNA, 19 nt, Artificial Sequence
  Description of Artificial Sequence: Synthetic oligonucleotide
  Antisense strand to SEQ ID NO: 86002
guuugcacuggauaaucuc

SEQ ID NO: 86084 - RNA, 19 nt, Artificial Sequence
  Description of Artificial Sequence: Synthetic oligonucleotide
  Sense strand starting at position 3392 of SEQ ID NO: 1080
cuaggagcuugagagauua

SEQ ID NO: 86085 - RNA, 19 nt, Artificial Sequence
  Description of Artificial Sequence: Synthetic oligonucleotide
  Antisense strand to SEQ ID NO: 86004
uaaucucucaagcuccuag

SEQ ID NO: 86086 - RNA, 19 nt, Artificial Sequence
  Description of Artificial Sequence: Synthetic oligonucleotide
  Sense strand starting at position 3119 of SEQ ID NO: 1080
agagaaagugcccguucau

SEQ ID NO: 86087 - RNA, 19 nt, Artificial Sequence
  Description of Artificial Sequence: Synthetic oligonucleotide
  Antisense strand to SEQ ID NO: 86006
augaacgggcacuuucucu

SEQ ID NO: 86088 - RNA, 19 nt, Artificial Sequence
  Description of Artificial Sequence: Synthetic oligonucleotide
  Sense strand starting at position 3030 of SEQ ID NO: 1080
gaccgagccucaccuauuu

SEQ ID NO: 86089 - RNA, 19 nt, Artificial Sequence
  Description of Artificial Sequence: Synthetic oligonucleotide
  Antisense strand to SEQ ID NO: 86008
aaauaggugaggcucgguc

SEQ ID NO: 86090 - RNA, 19 nt, Artificial Sequence
  Description of Artificial Sequence: Synthetic oligonucleotide
  Sense strand starting at position 1678 of SEQ ID NO: 1080
gcccaagcacugugaugua

SEQ ID NO: 86091 - RNA, 19 nt, Artificial Sequence
  Description of Artificial Sequence: Synthetic oligonucleotide
  Antisense strand to SEQ ID NO: 86010
uacaucacagugcuugggc

SEQ ID NO: 86092 - RNA, 19 nt, Artificial Sequence
  Description of Artificial Sequence: Synthetic oligonucleotide
  Sense strand starting at position 1553 of SEQ ID NO: 1080
aauuguugauggguaaacu

SEQ ID NO: 86093 - RNA, 19 nt, Artificial Sequence
  Description of Artificial Sequence: Synthetic oligonucleotide
  Antisense strand to SEQ ID NO: 86012
aguuuacccaucaacaauu

SEQ ID NO: 86094 - RNA, 19 nt, Artificial Sequence
  Description of Artificial Sequence: Synthetic oligonucleotide
  Sense strand starting at position 1551 of SEQ ID NO: 1080
agaauuguugauggguaaa

SEQ ID NO: 86095 - RNA, 19 nt, Artificial Sequence
  Description of Artificial Sequence: Synthetic oligonucleotide
  Antisense strand to SEQ ID NO: 86014
uuuacccaucaacaauucu

SEQ ID NO: 86096 - RNA, 19 nt, Artificial Sequence
  Description of Artificial Sequence: Synthetic oligonucleotide
  Sense strand starting at position 1548 of SEQ ID NO: 1080
guaagaauuguugaugggu

SEQ ID NO: 86097 - RNA, 19 nt, Artificial Sequence
  Description of Artificial Sequence: Synthetic oligonucleotide
  Antisense strand to SEQ ID NO: 86016
acccaucaacaauucuuac

SEQ ID NO: 86098 - RNA, 19 nt, Artificial Sequence
  Description of Artificial Sequence: Synthetic oligonucleotide
  Sense strand starting at position 1387 of SEQ ID NO: 1080
agcaauuucuguuaaguua

SEQ ID NO: 86099 - RNA, 19 nt, Artificial Sequence
  Description of Artificial Sequence: Synthetic oligonucleotide
  Antisense strand to SEQ ID NO: 86018
uaacuuaacagaaauugcu

SEQ ID NO: 86100 - RNA, 19 nt, Artificial Sequence
  Description of Artificial Sequence: Synthetic oligonucleotide
  Sense strand starting at position 1385 of SEQ ID NO: 1080
ugagcaauuucuguuaagu

SEQ ID NO: 86101 - RNA, 19 nt, Artificial Sequence
  Description of Artificial Sequence: Synthetic oligonucleotide
  Antisense strand to SEQ ID NO: 86020
acuuaacagaaauugcuca

SEQ ID NO: 86102 - RNA, 19 nt, Artificial Sequence
  Description of Artificial Sequence: Synthetic oligonucleotide
  Sense strand starting at position 1384 of SEQ ID NO: 1080
augagcaauuucuguuaag

SEQ ID NO: 86103 - RNA, 19 nt, Artificial Sequence
  Description of Artificial Sequence: Synthetic oligonucleotide
  Antisense strand to SEQ ID NO: 86022
cuuaacagaaauugcucau

SEQ ID NO: 86104 - RNA, 19 nt, Artificial Sequence
  Description of Artificial Sequence: Synthetic oligonucleotide
  Sense strand starting at position 1313 of SEQ ID NO: 1080
gcaaguuucucuuugcauc

SEQ ID NO: 86105 - RNA, 19 nt, Artificial Sequence
  Description of Artificial Sequence: Synthetic oligonucleotide
  Antisense strand to SEQ ID NO: 86024
gaugcaaagagaaacuugc

SEQ ID NO: 86106 - RNA, 19 nt, Artificial Sequence
  Description of Artificial Sequence: Synthetic oligonucleotide
  Sense strand starting at position 1302 of SEQ ID NO: 1080
ucuagaaugcagcaaguuu

SEQ ID NO: 86107 - RNA, 19 nt, Artificial Sequence
  Description of Artificial Sequence: Synthetic oligonucleotide
  Antisense strand to SEQ ID NO: 86026
aaacuugcugcauucuaga

SEQ ID NO: 86108 - RNA, 19 nt, Artificial Sequence
  Description of Artificial Sequence: Synthetic oligonucleotide
  Sense strand starting at position 1294 of SEQ ID NO: 1080
ugaguuaaucuagaaugca

SEQ ID NO: 86109 - RNA, 19 nt, Artificial Sequence
  Description of Artificial Sequence: Synthetic oligonucleotide
  Antisense strand to SEQ ID NO: 86028
ugcauucuagauuaacuca

SEQ ID NO: 86110 - RNA, 19 nt, Artificial Sequence
  Description of Artificial Sequence: Synthetic oligonucleotide
  Sense strand starting at position 1259 of SEQ ID NO: 1080
gauuaucuuuaggaggaca

SEQ ID NO: 86111 - RNA, 19 nt, Artificial Sequence
  Description of Artificial Sequence: Synthetic oligonucleotide
  Antisense strand to SEQ ID NO: 86030
uguccuccuaaagauaauc

SEQ ID NO: 86112 - RNA, 19 nt, Artificial Sequence
  Description of Artificial Sequence: Synthetic oligonucleotide
  Sense strand starting at position 1252 of SEQ ID NO: 1080
guuuaaggauuaucuuuag

SEQ ID NO: 86113 - RNA, 19 nt, Artificial Sequence
  Description of Artificial Sequence: Synthetic oligonucleotide
  Antisense strand to SEQ ID NO: 86032
cuaaagauaauccuuaaac

SEQ ID NO: 86114 - RNA, 19 nt, Artificial Sequence
  Description of Artificial Sequence: Synthetic oligonucleotide
  Sense strand starting at position 1243 of SEQ ID NO: 1080
gccaguaaaguuuaaggau

SEQ ID NO: 86115 - RNA, 19 nt, Artificial Sequence
  Description of Artificial Sequence: Synthetic oligonucleotide
  Antisense strand to SEQ ID NO: 86034
auccuuaaacuuuacuggc

SEQ ID NO: 86116 - RNA, 19 nt, Artificial Sequence
  Description of Artificial Sequence: Synthetic oligonucleotide
  Sense strand starting at position 1140 of SEQ ID NO: 1080
uguagucguuuauuacaau

SEQ ID NO: 86117 - RNA, 19 nt, Artificial Sequence
  Description of Artificial Sequence: Synthetic oligonucleotide
  Antisense strand to SEQ ID NO: 86036
auuguaauaaacgacuaca

SEQ ID NO: 86118 - RNA, 19 nt, Artificial Sequence
  Description of Artificial Sequence: Synthetic oligonucleotide
  Sense strand starting at position 1138 of SEQ ID NO: 1080
ucuguagucguuuauuaca

SEQ ID NO: 86119 - RNA, 19 nt, Artificial Sequence
  Description of Artificial Sequence: Synthetic oligonucleotide
  Antisense strand to SEQ ID NO: 86038
uguaauaaacgacuacaga

SEQ ID NO: 86120 - RNA, 19 nt, Artificial Sequence
  Description of Artificial Sequence: Synthetic oligonucleotide
  Sense strand starting at position 1135 of SEQ ID NO: 1080
cucucuguagucguuuauu

SEQ ID NO: 86121 - RNA, 19 nt, Artificial Sequence
  Description of Artificial Sequence: Synthetic oligonucleotide
  Antisense strand to SEQ ID NO: 86040
aauaaacgacuacagagag

SEQ ID NO: 86122 - RNA, 19 nt, Artificial Sequence
  Description of Artificial Sequence: Synthetic oligonucleotide
  Sense strand starting at position 1127 of SEQ ID NO: 1080
uggcaagucucucuguagu

SEQ ID NO: 86123 - RNA, 19 nt, Artificial Sequence
  Description of Artificial Sequence: Synthetic oligonucleotide
  Antisense strand to SEQ ID NO: 86042
acuacagagagacuugcca

SEQ ID NO: 86124 - RNA, 19 nt, Artificial Sequence
  Description of Artificial Sequence: Synthetic oligonucleotide
  Sense strand starting at position 1075 of SEQ ID NO: 1080
aguuauccacuucguaaca

SEQ ID NO: 86125 - RNA, 19 nt, Artificial Sequence
  Description of Artificial Sequence: Synthetic oligonucleotide
  Antisense strand to SEQ ID NO: 86044
uguuacgaaguggauaacu

SEQ ID NO: 86126 - RNA, 19 nt, Artificial Sequence
  Description of Artificial Sequence: Synthetic oligonucleotide
  Sense strand starting at position 1062 of SEQ ID NO: 1080
acuacaaauuaggaguuau

SEQ ID NO: 86127 - RNA, 19 nt, Artificial Sequence
  Description of Artificial Sequence: Synthetic oligonucleotide
  Antisense strand to SEQ ID NO: 86046
auaacuccuaauuuguagu

SEQ ID NO: 86128 - RNA, 19 nt, Artificial Sequence
  Description of Artificial Sequence: Synthetic oligonucleotide
  Sense strand starting at position 1047 of SEQ ID NO: 1080
uccuuauguguauacacua

SEQ ID NO: 86129 - RNA, 19 nt, Artificial Sequence
  Description of Artificial Sequence: Synthetic oligonucleotide
  Antisense strand to SEQ ID NO: 86048
uaguguauacacauaagga

SEQ ID NO: 86130 - RNA, 19 nt, Artificial Sequence
  Description of Artificial Sequence: Synthetic oligonucleotide
  Sense strand starting at position 1026 of SEQ ID NO: 1080
aguaaacuuugugcauaaa

SEQ ID NO: 86131 - RNA, 19 nt, Artificial Sequence
  Description of Artificial Sequence: Synthetic oligonucleotide
  Antisense strand to SEQ ID NO: 86050
uuuaugcacaaaguuuacu

SEQ ID NO: 86132 - RNA, 19 nt, Artificial Sequence
  Description of Artificial Sequence: Synthetic oligonucleotide
  Sense strand starting at position 1024 of SEQ ID NO: 1080
gaaguaaacuuugugcaua

SEQ ID NO: 86133 - RNA, 19 nt, Artificial Sequence
  Description of Artificial Sequence: Synthetic oligonucleotide
  Antisense strand to SEQ ID NO: 86052
uaugcacaaaguuuacuuc

SEQ ID NO: 86134 - RNA, 19 nt, Artificial Sequence
  Description of Artificial Sequence: Synthetic oligonucleotide
  Sense strand starting at position 1023 of SEQ ID NO: 1080
ugaaguaaacuuugugcau

SEQ ID NO: 86135 - RNA, 19 nt, Artificial Sequence
  Description of Artificial Sequence: Synthetic oligonucleotide
  Antisense strand to SEQ ID NO: 86054
augcacaaaguuuacuuca

SEQ ID NO: 86136 - RNA, 19 nt, Artificial Sequence
  Description of Artificial Sequence: Synthetic oligonucleotide
  Sense strand starting at position 920 of SEQ ID NO: 1080
ggguguugcaugcauaucu

SEQ ID NO: 86137 - RNA, 19 nt, Artificial Sequence
  Description of Artificial Sequence: Synthetic oligonucleotide
  Antisense strand to SEQ ID NO: 86056
agauaugcaugcaacaccc

SEQ ID NO: 86138 - RNA, 19 nt, Artificial Sequence
  Description of Artificial Sequence: Synthetic oligonucleotide
  Sense strand starting at position 918 of SEQ ID NO: 1080
caggguguugcaugcauau

SEQ ID NO: 86139 - RNA, 19 nt, Artificial Sequence
  Description of Artificial Sequence: Synthetic oligonucleotide
  Antisense strand to SEQ ID NO: 86058
auaugcaugcaacacccug

SEQ ID NO: 86140 - RNA, 19 nt, Artificial Sequence
  Description of Artificial Sequence: Synthetic oligonucleotide
  Sense strand starting at position 763 of SEQ ID NO: 1080
acauguagugaucacuuaa

SEQ ID NO: 86141 - RNA, 19 nt, Artificial Sequence
  Description of Artificial Sequence: Synthetic oligonucleotide
  Antisense strand to SEQ ID NO: 86060
uuaagugaucacuacaugu

SEQ ID NO: 86142 - RNA, 19 nt, Artificial Sequence
  Description of Artificial Sequence: Synthetic oligonucleotide
  Sense strand starting at position 3955 of SEQ ID NO: 1081
ccaaccgaguuugugauau

SEQ ID NO: 86143 - RNA, 19 nt, Artificial Sequence
  Description of Artificial Sequence: Synthetic oligonucleotide
  Antisense strand to SEQ ID NO: 86062
auaucacaaacucgguugg

SEQ ID NO: 86144 - RNA, 19 nt, Artificial Sequence
  Description of Artificial Sequence: Synthetic oligonucleotide
  Sense strand starting at position 3954 of SEQ ID NO: 1081
accaaccgaguuugugaua

SEQ ID NO: 86145 - RNA, 19 nt, Artificial Sequence
  Description of Artificial Sequence: Synthetic oligonucleotide
  Antisense strand to SEQ ID NO: 86064
uaucacaaacucgguuggu

SEQ ID NO: 86146 - RNA, 19 nt, Artificial Sequence
  Description of Artificial Sequence: Synthetic oligonucleotide
  Sense strand starting at position 3869 of SEQ ID NO: 1081
augggaagcuguuugauac

SEQ ID NO: 86147 - RNA, 19 nt, Artificial Sequence
  Description of Artificial Sequence: Synthetic oligonucleotide
  Antisense strand to SEQ ID NO: 86066
guaucaaacagcuucccau

SEQ ID NO: 86148 - RNA, 19 nt, Artificial Sequence
  Description of Artificial Sequence: Synthetic oligonucleotide
  Sense strand starting at position 3813 of SEQ ID NO: 1081
cuaugaaguuugucacaug

SEQ ID NO: 86149 - RNA, 19 nt, Artificial Sequence
  Description of Artificial Sequence: Synthetic oligonucleotide
  Antisense strand to SEQ ID NO: 86068
caugugacaaacuucauag

SEQ ID NO: 86150 - RNA, 19 nt, Artificial Sequence
  Description of Artificial Sequence: Synthetic oligonucleotide
  Sense strand starting at position 3745 of SEQ ID NO: 1081
auagcugcugacugaucaa

SEQ ID NO: 86151 - RNA, 19 nt, Artificial Sequence
  Description of Artificial Sequence: Synthetic oligonucleotide
  Antisense strand to SEQ ID NO: 86070
uugaucagucagcagcuau

SEQ ID NO: 86152 - RNA, 19 nt, Artificial Sequence
  Description of Artificial Sequence: Synthetic oligonucleotide
  Sense strand starting at position 3729 of SEQ ID NO: 1081
ucuugccucuauguugaua

SEQ ID NO: 86153 - RNA, 19 nt, Artificial Sequence
  Description of Artificial Sequence: Synthetic oligonucleotide
  Antisense strand to SEQ ID NO: 86072
uaucaacauagaggcaaga

SEQ ID NO: 86154 - RNA, 19 nt, Artificial Sequence
  Description of Artificial Sequence: Synthetic oligonucleotide
  Sense strand starting at position 3625 of SEQ ID NO: 1081
gugucuaaagaauguuuau

SEQ ID NO: 86155 - RNA, 19 nt, Artificial Sequence
  Description of Artificial Sequence: Synthetic oligonucleotide
  Antisense strand to SEQ ID NO: 86074
auaaacauucuuuagacac

SEQ ID NO: 86156 - RNA, 19 nt, Artificial Sequence
  Description of Artificial Sequence: Synthetic oligonucleotide
  Sense strand starting at position 3618 of SEQ ID NO: 1081
uagcauugugucuaaagaa

SEQ ID NO: 86157 - RNA, 19 nt, Artificial Sequence
  Description of Artificial Sequence: Synthetic oligonucleotide
  Antisense strand to SEQ ID NO: 86076
uucuuuagacacaaugcua

SEQ ID NO: 86158 - RNA, 19 nt, Artificial Sequence
  Description of Artificial Sequence: Synthetic oligonucleotide
  Sense strand starting at position 3617 of SEQ ID NO: 1081
auagcauugugucuaaaga

SEQ ID NO: 86159 - RNA, 19 nt, Artificial Sequence
  Description of Artificial Sequence: Synthetic oligonucleotide
  Antisense strand to SEQ ID NO: 86078
ucuuuagacacaaugcuau

SEQ ID NO: 86160 - RNA, 19 nt, Artificial Sequence
  Description of Artificial Sequence: Synthetic oligonucleotide
  Sense strand starting at position 3602 of SEQ ID NO: 1081
cguauaaagugugcaauag

SEQ ID NO: 86161 - RNA, 19 nt, Artificial Sequence
  Description of Artificial Sequence: Synthetic oligonucleotide
  Antisense strand to SEQ ID NO: 86080
cuauugcacacuuuauacg

SEQ ID NO: 86162 - RNA, 19 nt, Artificial Sequence
  Description of Artificial Sequence: Synthetic oligonucleotide
  Sense strand starting at position 3601 of SEQ ID NO: 1081
gcguauaaagugugcaaua

SEQ ID NO: 86163 - RNA, 19 nt, Artificial Sequence
  Description of Artificial Sequence: Synthetic oligonucleotide
  Antisense strand to SEQ ID NO: 86082
uauugcacacuuuauacgc

SEQ ID NO: 86164 - RNA, 19 nt, Artificial Sequence
  Description of Artificial Sequence: Synthetic oligonucleotide
  Sense strand starting at position 3599 of SEQ ID NO: 1081
uagcguauaaagugugcaa

SEQ ID NO: 86165 - RNA, 19 nt, Artificial Sequence
  Description of Artificial Sequence: Synthetic oligonucleotide
  Antisense strand to SEQ ID NO: 86084
uugcacacuuuauacgcua

SEQ ID NO: 86166 - RNA, 19 nt, Artificial Sequence
  Description of Artificial Sequence: Synthetic oligonucleotide
  Sense strand starting at position 3587 of SEQ ID NO: 1081
uccaguauacuguagcgua

SEQ ID NO: 86167 - RNA, 19 nt, Artificial Sequence
  Description of Artificial Sequence: Synthetic oligonucleotide
  Antisense strand to SEQ ID NO: 86086
uacgcuacaguauacugga

SEQ ID NO: 86168 - RNA, 19 nt, Artificial Sequence
  Description of Artificial Sequence: Synthetic oligonucleotide
  Sense strand starting at position 3580 of SEQ ID NO: 1081
uuauguuuccaguauacug

SEQ ID NO: 86169 - RNA, 19 nt, Artificial Sequence
  Description of Artificial Sequence: Synthetic oligonucleotide
  Antisense strand to SEQ ID NO: 86088
caguauacuggaaacauaa

SEQ ID NO: 86170 - RNA, 19 nt, Artificial Sequence
  Description of Artificial Sequence: Synthetic oligonucleotide
  Sense strand starting at position 3482 of SEQ ID NO: 1081
augggcauacuuuggagau

SEQ ID NO: 86171 - RNA, 19 nt, Artificial Sequence
  Description of Artificial Sequence: Synthetic oligonucleotide
  Antisense strand to SEQ ID NO: 86090
aucuccaaaguaugcccau

SEQ ID NO: 86172 - RNA, 19 nt, Artificial Sequence
  Description of Artificial Sequence: Synthetic oligonucleotide
  Sense strand starting at position 3472 of SEQ ID NO: 1081
uauuuaaaguaugggcaua

SEQ ID NO: 86173 - RNA, 19 nt, Artificial Sequence
  Description of Artificial Sequence: Synthetic oligonucleotide
  Antisense strand to SEQ ID NO: 86092
uaugcccauacuuuaaaua

SEQ ID NO: 86174 - RNA, 19 nt, Artificial Sequence
  Description of Artificial Sequence: Synthetic oligonucleotide
  Sense strand starting at position 3200 of SEQ ID NO: 1081
ugagcaaguuucuuuauuu

SEQ ID NO: 86175 - RNA, 19 nt, Artificial Sequence
  Description of Artificial Sequence: Synthetic oligonucleotide
  Antisense strand to SEQ ID NO: 86094
aaauaaagaaacuugcuca

SEQ ID NO: 86176 - RNA, 19 nt, Artificial Sequence
  Description of Artificial Sequence: Synthetic oligonucleotide
  Sense strand starting at position 3199 of SEQ ID NO: 1081
uugagcaaguuucuuuauu

SEQ ID NO: 86177 - RNA, 19 nt, Artificial Sequence
  Description of Artificial Sequence: Synthetic oligonucleotide
  Antisense strand to SEQ ID NO: 86096
aauaaagaaacuugcucaa

SEQ ID NO: 86178 - RNA, 19 nt, Artificial Sequence
  Description of Artificial Sequence: Synthetic oligonucleotide
  Sense strand starting at position 3178 of SEQ ID NO: 1081
cuauuuauuggcuguguga

SEQ ID NO: 86179 - RNA, 19 nt, Artificial Sequence
  Description of Artificial Sequence: Synthetic oligonucleotide
  Antisense strand to SEQ ID NO: 86098
ucacacagccaauaaauag

SEQ ID NO: 86180 - RNA, 19 nt, Artificial Sequence
  Description of Artificial Sequence: Synthetic oligonucleotide
  Sense strand starting at position 3111 of SEQ ID NO: 1081
guaacauucugaguuacau

SEQ ID NO: 86181 - RNA, 19 nt, Artificial Sequence
  Description of Artificial Sequence: Synthetic oligonucleotide
  Antisense strand to SEQ ID NO: 86100
auguaacucagaauguuac

SEQ ID NO: 86182 - RNA, 19 nt, Artificial Sequence
  Description of Artificial Sequence: Synthetic oligonucleotide
  Sense strand starting at position 3030 of SEQ ID NO: 1081
gccagaauuuccuaacgug

SEQ ID NO: 86183 - RNA, 19 nt, Artificial Sequence
  Description of Artificial Sequence: Synthetic oligonucleotide
  Antisense strand to SEQ ID NO: 86102
cacguuaggaaauucuggc

SEQ ID NO: 86184 - RNA, 19 nt, Artificial Sequence
  Description of Artificial Sequence: Synthetic oligonucleotide
  Sense strand starting at position 3020 of SEQ ID NO: 1081
ccuguaguaggccagaauu

SEQ ID NO: 86185 - RNA, 19 nt, Artificial Sequence
  Description of Artificial Sequence: Synthetic oligonucleotide
  Antisense strand to SEQ ID NO: 86104
aauucuggccuacuacagg

SEQ ID NO: 86186 - RNA, 19 nt, Artificial Sequence
  Description of Artificial Sequence: Synthetic oligonucleotide
  Sense strand starting at position 2980 of SEQ ID NO: 1081
agaagagcuuaguuauuaa

SEQ ID NO: 86187 - RNA, 19 nt, Artificial Sequence
  Description of Artificial Sequence: Synthetic oligonucleotide
  Antisense strand to SEQ ID NO: 86106
uuaauaacuaagcucuucu

SEQ ID NO: 86188 - RNA, 19 nt, Artificial Sequence
  Description of Artificial Sequence: Synthetic oligonucleotide
  Sense strand starting at position 2848 of SEQ ID NO: 1081
uuuacugucuacucagaug

SEQ ID NO: 86189 - RNA, 19 nt, Artificial Sequence
  Description of Artificial Sequence: Synthetic oligonucleotide
  Antisense strand to SEQ ID NO: 86108
caucugaguagacaguaaa

SEQ ID NO: 86190 - RNA, 19 nt, Artificial Sequence
  Description of Artificial Sequence: Synthetic oligonucleotide
  Sense strand starting at position 2829 of SEQ ID NO: 1081
gguaaauccuuugcuuauu

SEQ ID NO: 86191 - RNA, 19 nt, Artificial Sequence
  Description of Artificial Sequence: Synthetic oligonucleotide
  Antisense strand to SEQ ID NO: 86110
aauaagcaaaggauuuacc

SEQ ID NO: 86192 - RNA, 19 nt, Artificial Sequence
  Description of Artificial Sequence: Synthetic oligonucleotide
  Sense strand starting at position 2828 of SEQ ID NO: 1081
ugguaaauccuuugcuuau

SEQ ID NO: 86193 - RNA, 19 nt, Artificial Sequence
  Description of Artificial Sequence: Synthetic oligonucleotide
  Antisense strand to SEQ ID NO: 86112
auaagcaaaggauuuacca

SEQ ID NO: 86194 - RNA, 19 nt, Artificial Sequence
  Description of Artificial Sequence: Synthetic oligonucleotide
  Sense strand starting at position 2826 of SEQ ID NO: 1081
gaugguaaauccuuugcuu

SEQ ID NO: 86195 - RNA, 19 nt, Artificial Sequence
  Description of Artificial Sequence: Synthetic oligonucleotide
  Antisense strand to SEQ ID NO: 86114
aagcaaaggauuuaccauc

SEQ ID NO: 86196 - RNA, 19 nt, Artificial Sequence
  Description of Artificial Sequence: Synthetic oligonucleotide
  Sense strand starting at position 2804 of SEQ ID NO: 1081
gguauagucccagaagcuc

SEQ ID NO: 86197 - RNA, 19 nt, Artificial Sequence
  Description of Artificial Sequence: Synthetic oligonucleotide
  Antisense strand to SEQ ID NO: 86116
gagcuucugggacuauacc

SEQ ID NO: 86198 - RNA, 19 nt, Artificial Sequence
  Description of Artificial Sequence: Synthetic oligonucleotide
  Sense strand starting at position 2714 of SEQ ID NO: 1081
guggcaagucaccaugcua

SEQ ID NO: 86199 - RNA, 19 nt, Artificial Sequence
  Description of Artificial Sequence: Synthetic oligonucleotide
  Antisense strand to SEQ ID NO: 86118
uagcauggugacuugccac

SEQ ID NO: 86200 - RNA, 19 nt, Artificial Sequence
  Description of Artificial Sequence: Synthetic oligonucleotide
  Sense strand starting at position 2631 of SEQ ID NO: 1081
guugcaguucagggagagu

SEQ ID NO: 86201 - RNA, 19 nt, Artificial Sequence
  Description of Artificial Sequence: Synthetic oligonucleotide
  Antisense strand to SEQ ID NO: 86120
acucucccugaacugcaac

SEQ ID NO: 86202 - RNA, 19 nt, Artificial Sequence
  Description of Artificial Sequence: Synthetic oligonucleotide
  Sense strand starting at position 2579 of SEQ ID NO: 1081
gggagaggguugagaagau

SEQ ID NO: 86203 - RNA, 19 nt, Artificial Sequence
  Description of Artificial Sequence: Synthetic oligonucleotide
  Antisense strand to SEQ ID NO: 86122
aucuucucaacccucuccc

SEQ ID NO: 86204 - RNA, 19 nt, Artificial Sequence
  Description of Artificial Sequence: Synthetic oligonucleotide
  Sense strand starting at position 2496 of SEQ ID NO: 1081
cgucauccgcuauaaauuu

SEQ ID NO: 86205 - RNA, 19 nt, Artificial Sequence
  Description of Artificial Sequence: Synthetic oligonucleotide
  Antisense strand to SEQ ID NO: 86124
aaauuuauagcggaugacg

SEQ ID NO: 86206 - RNA, 19 nt, Artificial Sequence
  Description of Artificial Sequence: Synthetic oligonucleotide
  Sense strand starting at position 2494 of SEQ ID NO: 1081
gccgucauccgcuauaaau

SEQ ID NO: 86207 - RNA, 19 nt, Artificial Sequence
  Description of Artificial Sequence: Synthetic oligonucleotide
  Antisense strand to SEQ ID NO: 86126
auuuauagcggaugacggc

SEQ ID NO: 86208 - RNA, 19 nt, Artificial Sequence
  Description of Artificial Sequence: Synthetic oligonucleotide
  Sense strand starting at position 2493 of SEQ ID NO: 1081
ggccgucauccgcuauaaa

SEQ ID NO: 86209 - RNA, 19 nt, Artificial Sequence
  Description of Artificial Sequence: Synthetic oligonucleotide
  Antisense strand to SEQ ID NO: 86128
uuuauagcggaugacggcc

SEQ ID NO: 86210 - RNA, 19 nt, Artificial Sequence
  Description of Artificial Sequence: Synthetic oligonucleotide
  Sense strand starting at position 2438 of SEQ ID NO: 1081
gcaggugcuccggagcaau

SEQ ID NO: 86211 - RNA, 19 nt, Artificial Sequence
  Description of Artificial Sequence: Synthetic oligonucleotide
  Antisense strand to SEQ ID NO: 86130
auugcuccggagcaccugc

SEQ ID NO: 86212 - RNA, 19 nt, Artificial Sequence
  Description of Artificial Sequence: Synthetic oligonucleotide
  Sense strand starting at position 693 of SEQ ID NO: 1081
gcaagucuggucugaacuu

SEQ ID NO: 86213 - RNA, 19 nt, Artificial Sequence
  Description of Artificial Sequence: Synthetic oligonucleotide
  Antisense strand to SEQ ID NO: 86132
aaguucagaccagacuugc

SEQ ID NO: 86214 - RNA, 19 nt, Artificial Sequence
  Description of Artificial Sequence: Synthetic oligonucleotide
  Sense strand starting at position 691 of SEQ ID NO: 1081
aagcaagucuggucugaac

SEQ ID NO: 86215 - RNA, 19 nt, Artificial Sequence
  Description of Artificial Sequence: Synthetic oligonucleotide
  Antisense strand to SEQ ID NO: 86134
guucagaccagacuugcuu

SEQ ID NO: 86216 - RNA, 19 nt, Artificial Sequence
  Description of Artificial Sequence: Synthetic oligonucleotide
  Sense strand starting at position 643 of SEQ ID NO: 1081
cccugagguuucuaggaga

SEQ ID NO: 86217 - RNA, 19 nt, Artificial Sequence
  Description of Artificial Sequence: Synthetic oligonucleotide
  Antisense strand to SEQ ID NO: 86136
ucuccuagaaaccucaggg

SEQ ID NO: 86218 - RNA, 19 nt, Artificial Sequence
  Description of Artificial Sequence: Synthetic oligonucleotide
  Sense strand starting at position 608 of SEQ ID NO: 1081
augaaucaccucugguauu

SEQ ID NO: 86219 - RNA, 19 nt, Artificial Sequence
  Description of Artificial Sequence: Synthetic oligonucleotide
  Antisense strand to SEQ ID NO: 86138
aauaccagaggugauucau

SEQ ID NO: 86220 - RNA, 19 nt, Artificial Sequence
  Description of Artificial Sequence: Synthetic oligonucleotide
  Sense strand starting at position 563 of SEQ ID NO: 1081
uccauauaaucugcagaag

SEQ ID NO: 86221 - RNA, 19 nt, Artificial Sequence
  Description of Artificial Sequence: Synthetic oligonucleotide
  Antisense strand to SEQ ID NO: 86140
cuucugcagauuauaugga

SEQ ID NO: 86222 - RNA, 19 nt, Artificial Sequence
  Description of Artificial Sequence: Synthetic oligonucleotide
  Sense strand starting at position 565 of SEQ ID NO: 1082
uucugagguaggcguuauu

SEQ ID NO: 86223 - RNA, 19 nt, Artificial Sequence
  Description of Artificial Sequence: Synthetic oligonucleotide
  Antisense strand to SEQ ID NO: 86142
aauaacgccuaccucagaa

SEQ ID NO: 86224 - RNA, 19 nt, Artificial Sequence
  Description of Artificial Sequence: Synthetic oligonucleotide
  Sense strand starting at position 568 of SEQ ID NO: 1082
ugagguaggcguuauuguu

SEQ ID NO: 86225 - RNA, 19 nt, Artificial Sequence
  Description of Artificial Sequence: Synthetic oligonucleotide
  Antisense strand to SEQ ID NO: 86144
aacaauaacgccuaccuca

SEQ ID NO: 86226 - RNA, 19 nt, Artificial Sequence
  Description of Artificial Sequence: Synthetic oligonucleotide
  Sense strand starting at position 574 of SEQ ID NO: 1082
aggcguuauuguuauuaaa

SEQ ID NO: 86227 - RNA, 19 nt, Artificial Sequence
  Description of Artificial Sequence: Synthetic oligonucleotide
  Antisense strand to SEQ ID NO: 86146
uuuaauaacaauaacgccu

SEQ ID NO: 86228 - RNA, 19 nt, Artificial Sequence
  Description of Artificial Sequence: Synthetic oligonucleotide
  Sense strand starting at position 603 of SEQ ID NO: 1082
gagagauuaggcgacgaau

SEQ ID NO: 86229 - RNA, 19 nt, Artificial Sequence
  Description of Artificial Sequence: Synthetic oligonucleotide
  Antisense strand to SEQ ID NO: 86148
auucgucgccuaaucucuc

SEQ ID NO: 86230 - RNA, 19 nt, Artificial Sequence
  Description of Artificial Sequence: Synthetic oligonucleotide
  Sense strand starting at position 713 of SEQ ID NO: 1082
gugucaccucugcagacuu

SEQ ID NO: 86231 - RNA, 19 nt, Artificial Sequence
  Description of Artificial Sequence: Synthetic oligonucleotide
  Antisense strand to SEQ ID NO: 86150
aagucugcagaggugacac

SEQ ID NO: 86232 - RNA, 19 nt, Artificial Sequence
  Description of Artificial Sequence: Synthetic oligonucleotide
  Sense strand starting at position 838 of SEQ ID NO: 1082
guccaagagcuccagcauu

SEQ ID NO: 86233 - RNA, 19 nt, Artificial Sequence
  Description of Artificial Sequence: Synthetic oligonucleotide
  Antisense strand to SEQ ID NO: 86152
aaugcuggagcucuuggac

SEQ ID NO: 86234 - RNA, 19 nt, Artificial Sequence
  Description of Artificial Sequence: Synthetic oligonucleotide
  Sense strand starting at position 1229 of SEQ ID NO: 1082
gccagaaaguccucuugca

SEQ ID NO: 86235 - RNA, 19 nt, Artificial Sequence
  Description of Artificial Sequence: Synthetic oligonucleotide
  Antisense strand to SEQ ID NO: 86154
ugcaagaggacuuucuggc

SEQ ID NO: 86236 - RNA, 19 nt, Artificial Sequence
  Description of Artificial Sequence: Synthetic oligonucleotide
  Sense strand starting at position 2154 of SEQ ID NO: 1082
agugaaguccaguggaguu

SEQ ID NO: 86237 - RNA, 19 nt, Artificial Sequence
  Description of Artificial Sequence: Synthetic oligonucleotide
  Antisense strand to SEQ ID NO: 86156
aacuccacuggacuucacu

SEQ ID NO: 86238 - RNA, 19 nt, Artificial Sequence
  Description of Artificial Sequence: Synthetic oligonucleotide
  Sense strand starting at position 2156 of SEQ ID NO: 1082
ugaaguccaguggaguuaa

SEQ ID NO: 86239 - RNA, 19 nt, Artificial Sequence
  Description of Artificial Sequence: Synthetic oligonucleotide
  Antisense strand to SEQ ID NO: 86158
uuaacuccacuggacuuca

SEQ ID NO: 86240 - RNA, 19 nt, Artificial Sequence
  Description of Artificial Sequence: Synthetic oligonucleotide
  Sense strand starting at position 3544 of SEQ ID NO: 1082
accaaaucgucuucuugau

SEQ ID NO: 86241 - RNA, 19 nt, Artificial Sequence
  Description of Artificial Sequence: Synthetic oligonucleotide
  Antisense strand to SEQ ID NO: 86160
aucaagaagacgauuuggu

SEQ ID NO: 86242 - RNA, 19 nt, Artificial Sequence
  Description of Artificial Sequence: Synthetic oligonucleotide
  Sense strand starting at position 3546 of SEQ ID NO: 1082
caaaucgucuucuugaugu

SEQ ID NO: 86243 - RNA, 19 nt, Artificial Sequence
  Description of Artificial Sequence: Synthetic oligonucleotide
  Antisense strand to SEQ ID NO: 86162
acaucaagaagacgauuug

SEQ ID NO: 86244 - RNA, 19 nt, Artificial Sequence
  Description of Artificial Sequence: Synthetic oligonucleotide
  Sense strand starting at position 3548 of SEQ ID NO: 1082
aaucgucuucuugauguca

SEQ ID NO: 86245 - RNA, 19 nt, Artificial Sequence
  Description of Artificial Sequence: Synthetic oligonucleotide
  Antisense strand to SEQ ID NO: 86164
ugacaucaagaagacgauu

SEQ ID NO: 86246 - RNA, 19 nt, Artificial Sequence
  Description of Artificial Sequence: Synthetic oligonucleotide
  Sense strand starting at position 3550 of SEQ ID NO: 1082
ucgucuucuugaugucagu

SEQ ID NO: 86247 - RNA, 19 nt, Artificial Sequence
  Description of Artificial Sequence: Synthetic oligonucleotide
  Antisense strand to SEQ ID NO: 86166
acugacaucaagaagacga

SEQ ID NO: 86248 - RNA, 19 nt, Artificial Sequence
  Description of Artificial Sequence: Synthetic oligonucleotide
  Sense strand starting at position 3559 of SEQ ID NO: 1082
ugaugucaguccuaaguuu

SEQ ID NO: 86249 - RNA, 19 nt, Artificial Sequence
  Description of Artificial Sequence: Synthetic oligonucleotide
  Antisense strand to SEQ ID NO: 86168
aaacuuaggacugacauca

SEQ ID NO: 86250 - RNA, 19 nt, Artificial Sequence
  Description of Artificial Sequence: Synthetic oligonucleotide
  Sense strand starting at position 3625 of SEQ ID NO: 1082
ggcuuuaaauugugaauca

SEQ ID NO: 86251 - RNA, 19 nt, Artificial Sequence
  Description of Artificial Sequence: Synthetic oligonucleotide
  Antisense strand to SEQ ID NO: 86170
ugauucacaauuuaaagcc

SEQ ID NO: 86252 - RNA, 19 nt, Artificial Sequence
  Description of Artificial Sequence: Synthetic oligonucleotide
  Sense strand starting at position 3626 of SEQ ID NO: 1082
gcuuuaaauugugaaucau

SEQ ID NO: 86253 - RNA, 19 nt, Artificial Sequence
  Description of Artificial Sequence: Synthetic oligonucleotide
  Antisense strand to SEQ ID NO: 86172
augauucacaauuuaaagc

SEQ ID NO: 86254 - RNA, 19 nt, Artificial Sequence
  Description of Artificial Sequence: Synthetic oligonucleotide
  Sense strand starting at position 3634 of SEQ ID NO: 1082
uugugaaucaucgaugcaa

SEQ ID NO: 86255 - RNA, 19 nt, Artificial Sequence
  Description of Artificial Sequence: Synthetic oligonucleotide
  Antisense strand to SEQ ID NO: 86174
uugcaucgaugauucacaa

SEQ ID NO: 86256 - RNA, 19 nt, Artificial Sequence
  Description of Artificial Sequence: Synthetic oligonucleotide
  Sense strand starting at position 3706 of SEQ ID NO: 1082
cagacaaugggugauuguu

SEQ ID NO: 86257 - RNA, 19 nt, Artificial Sequence
  Description of Artificial Sequence: Synthetic oligonucleotide
  Antisense strand to SEQ ID NO: 86176
aacaaucacccauugucug

SEQ ID NO: 86258 - RNA, 19 nt, Artificial Sequence
  Description of Artificial Sequence: Synthetic oligonucleotide
  Sense strand starting at position 3712 of SEQ ID NO: 1082
augggugauuguuuccacu

SEQ ID NO: 86259 - RNA, 19 nt, Artificial Sequence
  Description of Artificial Sequence: Synthetic oligonucleotide
  Antisense strand to SEQ ID NO: 86178
aguggaaacaaucacccau

SEQ ID NO: 86260 - RNA, 19 nt, Artificial Sequence
  Description of Artificial Sequence: Synthetic oligonucleotide
  Sense strand starting at position 3714 of SEQ ID NO: 1082
gggugauuguuuccacuuu

SEQ ID NO: 86261 - RNA, 19 nt, Artificial Sequence
  Description of Artificial Sequence: Synthetic oligonucleotide
  Antisense strand to SEQ ID NO: 86180
aaaguggaaacaaucaccc

SEQ ID NO: 86262 - RNA, 19 nt, Artificial Sequence
  Description of Artificial Sequence: Synthetic oligonucleotide
  Sense strand starting at position 3756 of SEQ ID NO: 1082
gacagugcuucccaguugu

SEQ ID NO: 86263 - RNA, 19 nt, Artificial Sequence
  Description of Artificial Sequence: Synthetic oligonucleotide
  Antisense strand to SEQ ID NO: 86182
acaacugggaagcacuguc

SEQ ID NO: 86264 - RNA, 19 nt, Artificial Sequence
  Description of Artificial Sequence: Synthetic oligonucleotide
  Sense strand starting at position 3760 of SEQ ID NO: 1082
gugcuucccaguuguugga

SEQ ID NO: 86265 - RNA, 19 nt, Artificial Sequence
  Description of Artificial Sequence: Synthetic oligonucleotide
  Antisense strand to SEQ ID NO: 86184
uccaacaacugggaagcac

SEQ ID NO: 86266 - RNA, 19 nt, Artificial Sequence
  Description of Artificial Sequence: Synthetic oligonucleotide
  Sense strand starting at position 3762 of SEQ ID NO: 1082
gcuucccaguuguuggaaa

SEQ ID NO: 86267 - RNA, 19 nt, Artificial Sequence
  Description of Artificial Sequence: Synthetic oligonucleotide
  Antisense strand to SEQ ID NO: 86186
uuuccaacaacugggaagc

SEQ ID NO: 86268 - RNA, 19 nt, Artificial Sequence
  Description of Artificial Sequence: Synthetic oligonucleotide
  Sense strand starting at position 3763 of SEQ ID NO: 1082
cuucccaguuguuggaaau

SEQ ID NO: 86269 - RNA, 19 nt, Artificial Sequence
  Description of Artificial Sequence: Synthetic oligonucleotide
  Antisense strand to SEQ ID NO: 86188
auuuccaacaacugggaag

SEQ ID NO: 86270 - RNA, 19 nt, Artificial Sequence
  Description of Artificial Sequence: Synthetic oligonucleotide
  Sense strand starting at position 3764 of SEQ ID NO: 1082
uucccaguuguuggaaauu

SEQ ID NO: 86271 - RNA, 19 nt, Artificial Sequence
  Description of Artificial Sequence: Synthetic oligonucleotide
  Antisense strand to SEQ ID NO: 86190
aauuuccaacaacugggaa

SEQ ID NO: 86272 - RNA, 19 nt, Artificial Sequence
  Description of Artificial Sequence: Synthetic oligonucleotide
  Sense strand starting at position 3774 of SEQ ID NO: 1082
uuggaaauuaaacggucau

SEQ ID NO: 86273 - RNA, 19 nt, Artificial Sequence
  Description of Artificial Sequence: Synthetic oligonucleotide
  Antisense strand to SEQ ID NO: 86192
augaccguuuaauuuccaa

SEQ ID NO: 86274 - RNA, 19 nt, Artificial Sequence
  Description of Artificial Sequence: Synthetic oligonucleotide
  Sense strand starting at position 3775 of SEQ ID NO: 1082
uggaaauuaaacggucauu

SEQ ID NO: 86275 - RNA, 19 nt, Artificial Sequence
  Description of Artificial Sequence: Synthetic oligonucleotide
  Antisense strand to SEQ ID NO: 86194
aaugaccguuuaauuucca

SEQ ID NO: 86276 - RNA, 19 nt, Artificial Sequence
  Description of Artificial Sequence: Synthetic oligonucleotide
  Sense strand starting at position 3877 of SEQ ID NO: 1082
ccuacagucugcuuaccau

SEQ ID NO: 86277 - RNA, 19 nt, Artificial Sequence
  Description of Artificial Sequence: Synthetic oligonucleotide
  Antisense strand to SEQ ID NO: 86196
augguaagcagacuguagg

SEQ ID NO: 86278 - RNA, 19 nt, Artificial Sequence
  Description of Artificial Sequence: Synthetic oligonucleotide
  Sense strand starting at position 31 of SEQ ID NO: 1083
cuaagcucuucuuuggaca

SEQ ID NO: 86279 - RNA, 19 nt, Artificial Sequence
  Description of Artificial Sequence: Synthetic oligonucleotide
  Antisense strand to SEQ ID NO: 86198
uguccaaagaagagcuuag

SEQ ID NO: 86280 - RNA, 19 nt, Artificial Sequence
  Description of Artificial Sequence: Synthetic oligonucleotide
  Sense strand starting at position 61 of SEQ ID NO: 1083
uccagccauuucuuaugua

SEQ ID NO: 86281 - RNA, 19 nt, Artificial Sequence
  Description of Artificial Sequence: Synthetic oligonucleotide
  Antisense strand to SEQ ID NO: 86200
uacauaagaaauggcugga

SEQ ID NO: 86282 - RNA, 19 nt, Artificial Sequence
  Description of Artificial Sequence: Synthetic oligonucleotide
  Sense strand starting at position 65 of SEQ ID NO: 1083
gccauuucuuauguaucca

SEQ ID NO: 86283 - RNA, 19 nt, Artificial Sequence
  Description of Artificial Sequence: Synthetic oligonucleotide
  Antisense strand to SEQ ID NO: 86202
uggauacauaagaaauggc

SEQ ID NO: 86284 - RNA, 19 nt, Artificial Sequence
  Description of Artificial Sequence: Synthetic oligonucleotide
  Sense strand starting at position 77 of SEQ ID NO: 1083
guauccauuucugaaagua

SEQ ID NO: 86285 - RNA, 19 nt, Artificial Sequence
  Description of Artificial Sequence: Synthetic oligonucleotide
  Antisense strand to SEQ ID NO: 86204
uacuuucagaaauggauac

SEQ ID NO: 86286 - RNA, 19 nt, Artificial Sequence
  Description of Artificial Sequence: Synthetic oligonucleotide
  Sense strand starting at position 85 of SEQ ID NO: 1083
uucugaaaguaucugcuaa

SEQ ID NO: 86287 - RNA, 19 nt, Artificial Sequence
  Description of Artificial Sequence: Synthetic oligonucleotide
  Antisense strand to SEQ ID NO: 86206
uuagcagauacuuucagaa

SEQ ID NO: 86288 - RNA, 19 nt, Artificial Sequence
  Description of Artificial Sequence: Synthetic oligonucleotide
  Sense strand starting at position 87 of SEQ ID NO: 1083
cugaaaguaucugcuaaac

SEQ ID NO: 86289 - RNA, 19 nt, Artificial Sequence
  Description of Artificial Sequence: Synthetic oligonucleotide
  Antisense strand to SEQ ID NO: 86208
guuuagcagauacuuucag

SEQ ID NO: 86290 - RNA, 19 nt, Artificial Sequence
  Description of Artificial Sequence: Synthetic oligonucleotide
  Sense strand starting at position 166 of SEQ ID NO: 1083
agaacaucccauuguguaa

SEQ ID NO: 86291 - RNA, 19 nt, Artificial Sequence
  Description of Artificial Sequence: Synthetic oligonucleotide
  Antisense strand to SEQ ID NO: 86210
uuacacaaugggauguucu

SEQ ID NO: 86292 - RNA, 19 nt, Artificial Sequence
  Description of Artificial Sequence: Synthetic oligonucleotide
  Sense strand starting at position 169 of SEQ ID NO: 1083
acaucccauuguguaagua

SEQ ID NO: 86293 - RNA, 19 nt, Artificial Sequence
  Description of Artificial Sequence: Synthetic oligonucleotide
  Antisense strand to SEQ ID NO: 86212
uacuuacacaaugggaugu

SEQ ID NO: 86294 - RNA, 19 nt, Artificial Sequence
  Description of Artificial Sequence: Synthetic oligonucleotide
  Sense strand starting at position 173 of SEQ ID NO: 1083
cccauuguguaaguaaauu

SEQ ID NO: 86295 - RNA, 19 nt, Artificial Sequence
  Description of Artificial Sequence: Synthetic oligonucleotide
  Antisense strand to SEQ ID NO: 86214
aauuuacuuacacaauggg

SEQ ID NO: 86296 - RNA, 19 nt, Artificial Sequence
  Description of Artificial Sequence: Synthetic oligonucleotide
  Sense strand starting at position 184 of SEQ ID NO: 1083
aguaaauucccagaggcau

SEQ ID NO: 86297 - RNA, 19 nt, Artificial Sequence
  Description of Artificial Sequence: Synthetic oligonucleotide
  Antisense strand to SEQ ID NO: 86216
augccucugggaauuuacu

SEQ ID NO: 86298 - RNA, 19 nt, Artificial Sequence
  Description of Artificial Sequence: Synthetic oligonucleotide
  Sense strand starting at position 190 of SEQ ID NO: 1083
uucccagaggcauacauua

SEQ ID NO: 86299 - RNA, 19 nt, Artificial Sequence
  Description of Artificial Sequence: Synthetic oligonucleotide
  Antisense strand to SEQ ID NO: 86218
uaauguaugccucugggaa

SEQ ID NO: 86300 - RNA, 19 nt, Artificial Sequence
  Description of Artificial Sequence: Synthetic oligonucleotide
  Sense strand starting at position 229 of SEQ ID NO: 1083
cucagauacugcuuccaag

SEQ ID NO: 86301 - RNA, 19 nt, Artificial Sequence
  Description of Artificial Sequence: Synthetic oligonucleotide
  Antisense strand to SEQ ID NO: 86220
cuuggaagcaguaucugag

SEQ ID NO: 86302 - RNA, 19 nt, Artificial Sequence
  Description of Artificial Sequence: Synthetic oligonucleotide
  Sense strand starting at position 420 of SEQ ID NO: 1083
ugugucaagugacuuagaa

SEQ ID NO: 86303 - RNA, 19 nt, Artificial Sequence
  Description of Artificial Sequence: Synthetic oligonucleotide
  Antisense strand to SEQ ID NO: 86222
uucuaagucacuugacaca

SEQ ID NO: 86304 - RNA, 19 nt, Artificial Sequence
  Description of Artificial Sequence: Synthetic oligonucleotide
  Sense strand starting at position 448 of SEQ ID NO: 1083
agugcaugccaacauagau

SEQ ID NO: 86305 - RNA, 19 nt, Artificial Sequence
  Description of Artificial Sequence: Synthetic oligonucleotide
  Antisense strand to SEQ ID NO: 86224
aucuauguuggcaugcacu

SEQ ID NO: 86306 - RNA, 19 nt, Artificial Sequence
  Description of Artificial Sequence: Synthetic oligonucleotide
  Sense strand starting at position 582 of SEQ ID NO: 1083
gccaauguuccauaagaag

SEQ ID NO: 86307 - RNA, 19 nt, Artificial Sequence
  Description of Artificial Sequence: Synthetic oligonucleotide
  Antisense strand to SEQ ID NO: 86226
cuucuuauggaacauuggc

SEQ ID NO: 86308 - RNA, 19 nt, Artificial Sequence
  Description of Artificial Sequence: Synthetic oligonucleotide
  Sense strand starting at position 952 of SEQ ID NO: 1083
auugaauugauugguguca

SEQ ID NO: 86309 - RNA, 19 nt, Artificial Sequence
  Description of Artificial Sequence: Synthetic oligonucleotide
  Antisense strand to SEQ ID NO: 86228
ugacaccaaucaauucaau

SEQ ID NO: 86310 - RNA, 19 nt, Artificial Sequence
  Description of Artificial Sequence: Synthetic oligonucleotide
  Sense strand starting at position 964 of SEQ ID NO: 1083
ggugucacgaggcagauua

SEQ ID NO: 86311 - RNA, 19 nt, Artificial Sequence
  Description of Artificial Sequence: Synthetic oligonucleotide
  Antisense strand to SEQ ID NO: 86230
uaaucugccucgugacacc

SEQ ID NO: 86312 - RNA, 19 nt, Artificial Sequence
  Description of Artificial Sequence: Synthetic oligonucleotide
  Sense strand starting at position 966 of SEQ ID NO: 1083
ugucacgaggcagauuauu

SEQ ID NO: 86313 - RNA, 19 nt, Artificial Sequence
  Description of Artificial Sequence: Synthetic oligonucleotide
  Antisense strand to SEQ ID NO: 86232
aauaaucugccucgugaca

SEQ ID NO: 86314 - RNA, 19 nt, Artificial Sequence
  Description of Artificial Sequence: Synthetic oligonucleotide
  Sense strand starting at position 974 of SEQ ID NO: 1083
ggcagauuauucccaagua

SEQ ID NO: 86315 - RNA, 19 nt, Artificial Sequence
  Description of Artificial Sequence: Synthetic oligonucleotide
  Antisense strand to SEQ ID NO: 86234
uacuugggaauaaucugcc

SEQ ID NO: 86316 - RNA, 19 nt, Artificial Sequence
  Description of Artificial Sequence: Synthetic oligonucleotide
  Sense strand starting at position 1000 of SEQ ID NO: 1083
caguaaguacgauaaguac

SEQ ID NO: 86317 - RNA, 19 nt, Artificial Sequence
  Description of Artificial Sequence: Synthetic oligonucleotide
  Antisense strand to SEQ ID NO: 86236
guacuuaucguacuuacug

SEQ ID NO: 86318 - RNA, 19 nt, Artificial Sequence
  Description of Artificial Sequence: Synthetic oligonucleotide
  Sense strand starting at position 1009 of SEQ ID NO: 1083
cgauaaguacuguaaauua

SEQ ID NO: 86319 - RNA, 19 nt, Artificial Sequence
  Description of Artificial Sequence: Synthetic oligonucleotide
  Antisense strand to SEQ ID NO: 86238
uaauuuacaguacuuaucg

SEQ ID NO: 86320 - RNA, 19 nt, Artificial Sequence
  Description of Artificial Sequence: Synthetic oligonucleotide
  Sense strand starting at position 1073 of SEQ ID NO: 1083
gcccuuuagcaguaagaca

SEQ ID NO: 86321 - RNA, 19 nt, Artificial Sequence
  Description of Artificial Sequence: Synthetic oligonucleotide
  Antisense strand to SEQ ID NO: 86240
ugucuuacugcuaaagggc

SEQ ID NO: 86322 - RNA, 19 nt, Artificial Sequence
  Description of Artificial Sequence: Synthetic oligonucleotide
  Sense strand starting at position 1098 of SEQ ID NO: 1083
uagacagagguguauguaa

SEQ ID NO: 86323 - RNA, 19 nt, Artificial Sequence
  Description of Artificial Sequence: Synthetic oligonucleotide
  Antisense strand to SEQ ID NO: 86242
uuacauacaccucugucua

SEQ ID NO: 86324 - RNA, 19 nt, Artificial Sequence
  Description of Artificial Sequence: Synthetic oligonucleotide
  Sense strand starting at position 1100 of SEQ ID NO: 1083
gacagagguguauguaaau

SEQ ID NO: 86325 - RNA, 19 nt, Artificial Sequence
  Description of Artificial Sequence: Synthetic oligonucleotide
  Antisense strand to SEQ ID NO: 86244
auuuacauacaccucuguc

SEQ ID NO: 86326 - RNA, 19 nt, Artificial Sequence
  Description of Artificial Sequence: Synthetic oligonucleotide
  Sense strand starting at position 1106 of SEQ ID NO: 1083
gguguauguaaauauacag

SEQ ID NO: 86327 - RNA, 19 nt, Artificial Sequence
  Description of Artificial Sequence: Synthetic oligonucleotide
  Antisense strand to SEQ ID NO: 86246
cuguauauuuacauacacc

SEQ ID NO: 86328 - RNA, 19 nt, Artificial Sequence
  Description of Artificial Sequence: Synthetic oligonucleotide
  Sense strand starting at position 1167 of SEQ ID NO: 1083
agcagugacagcuaagaga

SEQ ID NO: 86329 - RNA, 19 nt, Artificial Sequence
  Description of Artificial Sequence: Synthetic oligonucleotide
  Antisense strand to SEQ ID NO: 86248
ucucuuagcugucacugcu

SEQ ID NO: 86330 - RNA, 19 nt, Artificial Sequence
  Description of Artificial Sequence: Synthetic oligonucleotide
  Sense strand starting at position 1176 of SEQ ID NO: 1083
agcuaagagaccuggcuuu

SEQ ID NO: 86331 - RNA, 19 nt, Artificial Sequence
  Description of Artificial Sequence: Synthetic oligonucleotide
  Antisense strand to SEQ ID NO: 86250
aaagccaggucucuuagcu

SEQ ID NO: 86332 - RNA, 19 nt, Artificial Sequence
  Description of Artificial Sequence: Synthetic oligonucleotide
  Sense strand starting at position 1294 of SEQ ID NO: 1083
caaagauuauugcuagcga

SEQ ID NO: 86333 - RNA, 19 nt, Artificial Sequence
  Description of Artificial Sequence: Synthetic oligonucleotide
  Antisense strand to SEQ ID NO: 86252
ucgcuagcaauaaucuuug

SEQ ID NO: 86334 - RNA, 19 nt, Artificial Sequence
  Description of Artificial Sequence: Synthetic oligonucleotide
  Sense strand starting at position 1480 of SEQ ID NO: 1083
ucuggaaauucucuugcaa

SEQ ID NO: 86335 - RNA, 19 nt, Artificial Sequence
  Description of Artificial Sequence: Synthetic oligonucleotide
  Antisense strand to SEQ ID NO: 86254
uugcaagagaauuuccaga

SEQ ID NO: 86336 - RNA, 19 nt, Artificial Sequence
  Description of Artificial Sequence: Synthetic oligonucleotide
  Sense strand starting at position 1508 of SEQ ID NO: 1083
auuugcgauuugcacaaau

SEQ ID NO: 86337 - RNA, 19 nt, Artificial Sequence
  Description of Artificial Sequence: Synthetic oligonucleotide
  Antisense strand to SEQ ID NO: 86256
auuugugcaaaucgcaaau

SEQ ID NO: 86338 - RNA, 19 nt, Artificial Sequence
  Description of Artificial Sequence: Synthetic oligonucleotide
  Sense strand starting at position 1531 of SEQ ID NO: 1083
acgguuucuguuugaggag

SEQ ID NO: 86339 - RNA, 19 nt, Artificial Sequence
  Description of Artificial Sequence: Synthetic oligonucleotide
  Antisense strand to SEQ ID NO: 86258
cuccucaaacagaaaccgu

SEQ ID NO: 86340 - RNA, 19 nt, Artificial Sequence
  Description of Artificial Sequence: Synthetic oligonucleotide
  Sense strand starting at position 2110 of SEQ ID NO: 1083
ccgguagccgucucugaau

SEQ ID NO: 86341 - RNA, 19 nt, Artificial Sequence
  Description of Artificial Sequence: Synthetic oligonucleotide
  Antisense strand to SEQ ID NO: 86260
auucagagacggcuaccgg

SEQ ID NO: 86342 - RNA, 19 nt, Artificial Sequence
  Description of Artificial Sequence: Synthetic oligonucleotide
  Sense strand starting at position 2420 of SEQ ID NO: 1083
ucacguaggaaauaugcua

SEQ ID NO: 86343 - RNA, 19 nt, Artificial Sequence
  Description of Artificial Sequence: Synthetic oligonucleotide
  Antisense strand to SEQ ID NO: 86262
uagcauauuuccuacguga

SEQ ID NO: 86344 - RNA, 19 nt, Artificial Sequence
  Description of Artificial Sequence: Synthetic oligonucleotide
  Sense strand starting at position 2496 of SEQ ID NO: 1083
uuaucccucguuuacagau

SEQ ID NO: 86345 - RNA, 19 nt, Artificial Sequence
  Description of Artificial Sequence: Synthetic oligonucleotide
  Antisense strand to SEQ ID NO: 86264
aucuguaaacgagggauaa

SEQ ID NO: 86346 - RNA, 19 nt, Artificial Sequence
  Description of Artificial Sequence: Synthetic oligonucleotide
  Sense strand starting at position 2553 of SEQ ID NO: 1083
gacaauuagcaguggcaua

SEQ ID NO: 86347 - RNA, 19 nt, Artificial Sequence
  Description of Artificial Sequence: Synthetic oligonucleotide
  Antisense strand to SEQ ID NO: 86266
uaugccacugcuaauuguc

SEQ ID NO: 86348 - RNA, 19 nt, Artificial Sequence
  Description of Artificial Sequence: Synthetic oligonucleotide
  Sense strand starting at position 2586 of SEQ ID NO: 1083
guucuugccgccguacaau

SEQ ID NO: 86349 - RNA, 19 nt, Artificial Sequence
  Description of Artificial Sequence: Synthetic oligonucleotide
  Antisense strand to SEQ ID NO: 86268
auuguacggcggcaagaac

SEQ ID NO: 86350 - RNA, 19 nt, Artificial Sequence
  Description of Artificial Sequence: Synthetic oligonucleotide
  Sense strand starting at position 2845 of SEQ ID NO: 1083
ucgaauuccugaccuugua

SEQ ID NO: 86351 - RNA, 19 nt, Artificial Sequence
  Description of Artificial Sequence: Synthetic oligonucleotide
  Antisense strand to SEQ ID NO: 86270
uacaaggucaggaauucga

SEQ ID NO: 86352 - RNA, 19 nt, Artificial Sequence
  Description of Artificial Sequence: Synthetic oligonucleotide
  Sense strand starting at position 3765 of SEQ ID NO: 1083
cguggaaagagucgaagua

SEQ ID NO: 86353 - RNA, 19 nt, Artificial Sequence
  Description of Artificial Sequence: Synthetic oligonucleotide
  Antisense strand to SEQ ID NO: 86272
uacuucgacucuuuccacg

SEQ ID NO: 86354 - RNA, 19 nt, Artificial Sequence
  Description of Artificial Sequence: Synthetic oligonucleotide
  Sense strand starting at position 3766 of SEQ ID NO: 1083
guggaaagagucgaaguaa

SEQ ID NO: 86355 - RNA, 19 nt, Artificial Sequence
  Description of Artificial Sequence: Synthetic oligonucleotide
  Antisense strand to SEQ ID NO: 86274
uuacuucgacucuuuccac

SEQ ID NO: 86356 - RNA, 19 nt, Artificial Sequence
  Description of Artificial Sequence: Synthetic oligonucleotide
  Sense strand starting at position 3794 of SEQ ID NO: 1083
guuugaagcuuucuggauu

SEQ ID NO: 86357 - RNA, 19 nt, Artificial Sequence
  Description of Artificial Sequence: Synthetic oligonucleotide
  Antisense strand to SEQ ID NO: 86276
aauccagaaagcuucaaac

SEQ ID NO: 86358 - RNA, 19 nt, Artificial Sequence
  Description of Artificial Sequence: Synthetic oligonucleotide
  Sense strand starting at position 351 of SEQ ID NO: 1084
cccaaugucugccugcaau

SEQ ID NO: 86359 - RNA, 19 nt, Artificial Sequence
  Description of Artificial Sequence: Synthetic oligonucleotide
  Antisense strand to SEQ ID NO: 86278
auugcaggcagacauuggg

SEQ ID NO: 86360 - RNA, 19 nt, Artificial Sequence
  Description of Artificial Sequence: Synthetic oligonucleotide
  Sense strand starting at position 563 of SEQ ID NO: 1084
cguacuuugccaggugaca

SEQ ID NO: 86361 - RNA, 19 nt, Artificial Sequence
  Description of Artificial Sequence: Synthetic oligonucleotide
  Antisense strand to SEQ ID NO: 86280
ugucaccuggcaaaguacg

SEQ ID NO: 86362 - RNA, 19 nt, Artificial Sequence
  Description of Artificial Sequence: Synthetic oligonucleotide
  Sense strand starting at position 837 of SEQ ID NO: 1084
agcucaugagcuugcaaau

SEQ ID NO: 86363 - RNA, 19 nt, Artificial Sequence
  Description of Artificial Sequence: Synthetic oligonucleotide
  Antisense strand to SEQ ID NO: 86282
auuugcaagcucaugagcu

SEQ ID NO: 86364 - RNA, 19 nt, Artificial Sequence
  Description of Artificial Sequence: Synthetic oligonucleotide
  Sense strand starting at position 878 of SEQ ID NO: 1084
ggguggauccuguaugggu

SEQ ID NO: 86365 - RNA, 19 nt, Artificial Sequence
  Description of Artificial Sequence: Synthetic oligonucleotide
  Antisense strand to SEQ ID NO: 86284
acccauacaggauccaccc

SEQ ID NO: 86366 - RNA, 19 nt, Artificial Sequence
  Description of Artificial Sequence: Synthetic oligonucleotide
  Sense strand starting at position 882 of SEQ ID NO: 1084
ggauccuguauggguagau

SEQ ID NO: 86367 - RNA, 19 nt, Artificial Sequence
  Description of Artificial Sequence: Synthetic oligonucleotide
  Antisense strand to SEQ ID NO: 86286
aucuacccauacaggaucc

SEQ ID NO: 86368 - RNA, 19 nt, Artificial Sequence
  Description of Artificial Sequence: Synthetic oligonucleotide
  Sense strand starting at position 883 of SEQ ID NO: 1084
gauccuguauggguagauu

SEQ ID NO: 86369 - RNA, 19 nt, Artificial Sequence
  Description of Artificial Sequence: Synthetic oligonucleotide
  Antisense strand to SEQ ID NO: 86288
aaucuacccauacaggauc

SEQ ID NO: 86370 - RNA, 19 nt, Artificial Sequence
  Description of Artificial Sequence: Synthetic oligonucleotide
  Sense strand starting at position 961 of SEQ ID NO: 1084
ugcaaagacccaugcugua

SEQ ID NO: 86371 - RNA, 19 nt, Artificial Sequence
  Description of Artificial Sequence: Synthetic oligonucleotide
  Antisense strand to SEQ ID NO: 86290
uacagcaugggucuuugca

SEQ ID NO: 86372 - RNA, 19 nt, Artificial Sequence
  Description of Artificial Sequence: Synthetic oligonucleotide
  Sense strand starting at position 1003 of SEQ ID NO: 1084
ccaucuugccagugaggga

SEQ ID NO: 86373 - RNA, 19 nt, Artificial Sequence
  Description of Artificial Sequence: Synthetic oligonucleotide
  Antisense strand to SEQ ID NO: 86292
ucccucacuggcaagaugg

SEQ ID NO: 86374 - RNA, 19 nt, Artificial Sequence
  Description of Artificial Sequence: Synthetic oligonucleotide
  Sense strand starting at position 1467 of SEQ ID NO: 1084
gcggauaggcgaucucguu

SEQ ID NO: 86375 - RNA, 19 nt, Artificial Sequence
  Description of Artificial Sequence: Synthetic oligonucleotide
  Antisense strand to SEQ ID NO: 86294
aacgagaucgccuauccgc

SEQ ID NO: 86376 - RNA, 19 nt, Artificial Sequence
  Description of Artificial Sequence: Synthetic oligonucleotide
  Sense strand starting at position 2178 of SEQ ID NO: 1084
guccgcugccuucucgaau

SEQ ID NO: 86377 - RNA, 19 nt, Artificial Sequence
  Description of Artificial Sequence: Synthetic oligonucleotide
  Antisense strand to SEQ ID NO: 86296
auucgagaaggcagcggac

SEQ ID NO: 86378 - RNA, 19 nt, Artificial Sequence
  Description of Artificial Sequence: Synthetic oligonucleotide
  Sense strand starting at position 2213 of SEQ ID NO: 1084
cagagauguuacgcagcuu

SEQ ID NO: 86379 - RNA, 19 nt, Artificial Sequence
  Description of Artificial Sequence: Synthetic oligonucleotide
  Antisense strand to SEQ ID NO: 86298
aagcugcguaacaucucug

SEQ ID NO: 86380 - RNA, 19 nt, Artificial Sequence
  Description of Artificial Sequence: Synthetic oligonucleotide
  Sense strand starting at position 2430 of SEQ ID NO: 1084
ccacccguguuauuucuaa

SEQ ID NO: 86381 - RNA, 19 nt, Artificial Sequence
  Description of Artificial Sequence: Synthetic oligonucleotide
  Antisense strand to SEQ ID NO: 86300
uuagaaauaacacgggugg

SEQ ID NO: 86382 - RNA, 19 nt, Artificial Sequence
  Description of Artificial Sequence: Synthetic oligonucleotide
  Sense strand starting at position 2437 of SEQ ID NO: 1084
uguuauuucuaagacccga

SEQ ID NO: 86383 - RNA, 19 nt, Artificial Sequence
  Description of Artificial Sequence: Synthetic oligonucleotide
  Antisense strand to SEQ ID NO: 86302
ucgggucuuagaaauaaca

SEQ ID NO: 86384 - RNA, 19 nt, Artificial Sequence
  Description of Artificial Sequence: Synthetic oligonucleotide
  Sense strand starting at position 2885 of SEQ ID NO: 1084
cacugagugucggcuacau

SEQ ID NO: 86385 - RNA, 19 nt, Artificial Sequence
  Description of Artificial Sequence: Synthetic oligonucleotide
  Antisense strand to SEQ ID NO: 86304
auguagccgacacucagug

SEQ ID NO: 86386 - RNA, 19 nt, Artificial Sequence
  Description of Artificial Sequence: Synthetic oligonucleotide
  Sense strand starting at position 2908 of SEQ ID NO: 1084
ggcaccgugacagauguua

SEQ ID NO: 86387 - RNA, 19 nt, Artificial Sequence
  Description of Artificial Sequence: Synthetic oligonucleotide
  Antisense strand to SEQ ID NO: 86306
uaacaucugucacggugcc

SEQ ID NO: 86388 - RNA, 19 nt, Artificial Sequence
  Description of Artificial Sequence: Synthetic oligonucleotide
  Sense strand starting at position 2916 of SEQ ID NO: 1084
gacagauguuagggagaca

SEQ ID NO: 86389 - RNA, 19 nt, Artificial Sequence
  Description of Artificial Sequence: Synthetic oligonucleotide
  Antisense strand to SEQ ID NO: 86308
ugucucccuaacaucuguc

SEQ ID NO: 86390 - RNA, 19 nt, Artificial Sequence
  Description of Artificial Sequence: Synthetic oligonucleotide
  Sense strand starting at position 2943 of SEQ ID NO: 1084
gcaugaucuagcuggagag

SEQ ID NO: 86391 - RNA, 19 nt, Artificial Sequence
  Description of Artificial Sequence: Synthetic oligonucleotide
  Antisense strand to SEQ ID NO: 86310
cucuccagcuagaucaugc

SEQ ID NO: 86392 - RNA, 19 nt, Artificial Sequence
  Description of Artificial Sequence: Synthetic oligonucleotide
  Sense strand starting at position 2944 of SEQ ID NO: 1084
caugaucuagcuggagaga

SEQ ID NO: 86393 - RNA, 19 nt, Artificial Sequence
  Description of Artificial Sequence: Synthetic oligonucleotide
  Antisense strand to SEQ ID NO: 86312
ucucuccagcuagaucaug

SEQ ID NO: 86394 - RNA, 19 nt, Artificial Sequence
  Description of Artificial Sequence: Synthetic oligonucleotide
  Sense strand starting at position 3021 of SEQ ID NO: 1084
gcugaauaaucaguuccau

SEQ ID NO: 86395 - RNA, 19 nt, Artificial Sequence
  Description of Artificial Sequence: Synthetic oligonucleotide
  Antisense strand to SEQ ID NO: 86314
auggaacugauuauucagc

SEQ ID NO: 86396 - RNA, 19 nt, Artificial Sequence
  Description of Artificial Sequence: Synthetic oligonucleotide
  Sense strand starting at position 3262 of SEQ ID NO: 1084
ggauuacuagcacgaauca

SEQ ID NO: 86397 - RNA, 19 nt, Artificial Sequence
  Description of Artificial Sequence: Synthetic oligonucleotide
  Antisense strand to SEQ ID NO: 86316
ugauucgugcuaguaaucc

SEQ ID NO: 86398 - RNA, 19 nt, Artificial Sequence
  Description of Artificial Sequence: Synthetic oligonucleotide
  Sense strand starting at position 3352 of SEQ ID NO: 1084
auugacuggagcugaaaua

SEQ ID NO: 86399 - RNA, 19 nt, Artificial Sequence
  Description of Artificial Sequence: Synthetic oligonucleotide
  Antisense strand to SEQ ID NO: 86318
uauuucagcuccagucaau

SEQ ID NO: 86400 - RNA, 19 nt, Artificial Sequence
  Description of Artificial Sequence: Synthetic oligonucleotide
  Sense strand starting at position 3365 of SEQ ID NO: 1084
gaaauaugauggcugagug

SEQ ID NO: 86401 - RNA, 19 nt, Artificial Sequence
  Description of Artificial Sequence: Synthetic oligonucleotide
  Antisense strand to SEQ ID NO: 86320
cacucagccaucauauuuc

SEQ ID NO: 86402 - RNA, 19 nt, Artificial Sequence
  Description of Artificial Sequence: Synthetic oligonucleotide
  Sense strand starting at position 3369 of SEQ ID NO: 1084
uaugauggcugagugguua

SEQ ID NO: 86403 - RNA, 19 nt, Artificial Sequence
  Description of Artificial Sequence: Synthetic oligonucleotide
  Antisense strand to SEQ ID NO: 86322
uaaccacucagccaucaua

SEQ ID NO: 86404 - RNA, 19 nt, Artificial Sequence
  Description of Artificial Sequence: Synthetic oligonucleotide
  Sense strand starting at position 3373 of SEQ ID NO: 1084
auggcugagugguuaacaa

SEQ ID NO: 86405 - RNA, 19 nt, Artificial Sequence
  Description of Artificial Sequence: Synthetic oligonucleotide
  Antisense strand to SEQ ID NO: 86324
uuguuaaccacucagccau

SEQ ID NO: 86406 - RNA, 19 nt, Artificial Sequence
  Description of Artificial Sequence: Synthetic oligonucleotide
  Sense strand starting at position 3475 of SEQ ID NO: 1084
ccagguugccagugcagaa

SEQ ID NO: 86407 - RNA, 19 nt, Artificial Sequence
  Description of Artificial Sequence: Synthetic oligonucleotide
  Antisense strand to SEQ ID NO: 86326
uucugcacuggcaaccugg

SEQ ID NO: 86408 - RNA, 19 nt, Artificial Sequence
  Description of Artificial Sequence: Synthetic oligonucleotide
  Sense strand starting at position 3487 of SEQ ID NO: 1084
ugcagaaggacuugagucu

SEQ ID NO: 86409 - RNA, 19 nt, Artificial Sequence
  Description of Artificial Sequence: Synthetic oligonucleotide
  Antisense strand to SEQ ID NO: 86328
agacucaaguccuucugca

SEQ ID NO: 86410 - RNA, 19 nt, Artificial Sequence
  Description of Artificial Sequence: Synthetic oligonucleotide
  Sense strand starting at position 3488 of SEQ ID NO: 1084
gcagaaggacuugagucuu

SEQ ID NO: 86411 - RNA, 19 nt, Artificial Sequence
  Description of Artificial Sequence: Synthetic oligonucleotide
  Antisense strand to SEQ ID NO: 86330
aagacucaaguccuucugc

SEQ ID NO: 86412 - RNA, 19 nt, Artificial Sequence
  Description of Artificial Sequence: Synthetic oligonucleotide
  Sense strand starting at position 3549 of SEQ ID NO: 1084
acguaaauugauugagucu

SEQ ID NO: 86413 - RNA, 19 nt, Artificial Sequence
  Description of Artificial Sequence: Synthetic oligonucleotide
  Antisense strand to SEQ ID NO: 86332
agacucaaucaauuuacgu

SEQ ID NO: 86414 - RNA, 19 nt, Artificial Sequence
  Description of Artificial Sequence: Synthetic oligonucleotide
  Sense strand starting at position 3560 of SEQ ID NO: 1084
uugagucucccugcgcaau

SEQ ID NO: 86415 - RNA, 19 nt, Artificial Sequence
  Description of Artificial Sequence: Synthetic oligonucleotide
  Antisense strand to SEQ ID NO: 86334
auugcgcagggagacucaa

SEQ ID NO: 86416 - RNA, 19 nt, Artificial Sequence
  Description of Artificial Sequence: Synthetic oligonucleotide
  Sense strand starting at position 3630 of SEQ ID NO: 1084
ugaagauacguuuggcaaa

SEQ ID NO: 86417 - RNA, 19 nt, Artificial Sequence
  Description of Artificial Sequence: Synthetic oligonucleotide
  Antisense strand to SEQ ID NO: 86336
uuugccaaacguaucuuca

SEQ ID NO: 86418 - RNA, 19 nt, Artificial Sequence
  Description of Artificial Sequence: Synthetic oligonucleotide
  Sense strand starting at position 3675 of SEQ ID NO: 1084
ucaccuuucgaaggaaaga

SEQ ID NO: 86419 - RNA, 19 nt, Artificial Sequence
  Description of Artificial Sequence: Synthetic oligonucleotide
  Antisense strand to SEQ ID NO: 86338
ucuuuccuucgaaagguga

SEQ ID NO: 86420 - RNA, 19 nt, Artificial Sequence
  Description of Artificial Sequence: Synthetic oligonucleotide
  Sense strand starting at position 3799 of SEQ ID NO: 1084
aacuguggucucugauuaa

SEQ ID NO: 86421 - RNA, 19 nt, Artificial Sequence
  Description of Artificial Sequence: Synthetic oligonucleotide
  Antisense strand to SEQ ID NO: 86340
uuaaucagagaccacaguu

SEQ ID NO: 86422 - RNA, 19 nt, Artificial Sequence
  Description of Artificial Sequence: Synthetic oligonucleotide
  Sense strand starting at position 3802 of SEQ ID NO: 1084
uguggucucugauuaagac

SEQ ID NO: 86423 - RNA, 19 nt, Artificial Sequence
  Description of Artificial Sequence: Synthetic oligonucleotide
  Antisense strand to SEQ ID NO: 86342
gucuuaaucagagaccaca

SEQ ID NO: 86424 - RNA, 19 nt, Artificial Sequence
  Description of Artificial Sequence: Synthetic oligonucleotide
  Sense strand starting at position 3803 of SEQ ID NO: 1084
guggucucugauuaagaca

SEQ ID NO: 86425 - RNA, 19 nt, Artificial Sequence
  Description of Artificial Sequence: Synthetic oligonucleotide
  Antisense strand to SEQ ID NO: 86344
ugucuuaaucagagaccac

SEQ ID NO: 86426 - RNA, 19 nt, Artificial Sequence
  Description of Artificial Sequence: Synthetic oligonucleotide
  Sense strand starting at position 3810 of SEQ ID NO: 1084
cugauuaagacauggaguc

SEQ ID NO: 86427 - RNA, 19 nt, Artificial Sequence
  Description of Artificial Sequence: Synthetic oligonucleotide
  Antisense strand to SEQ ID NO: 86346
gacuccaugucuuaaucag

SEQ ID NO: 86428 - RNA, 19 nt, Artificial Sequence
  Description of Artificial Sequence: Synthetic oligonucleotide
  Sense strand starting at position 3811 of SEQ ID NO: 1084
ugauuaagacauggagucu

SEQ ID NO: 86429 - RNA, 19 nt, Artificial Sequence
  Description of Artificial Sequence: Synthetic oligonucleotide
  Antisense strand to SEQ ID NO: 86348
agacuccaugucuuaauca

SEQ ID NO: 86430 - RNA, 19 nt, Artificial Sequence
  Description of Artificial Sequence: Synthetic oligonucleotide
  Sense strand starting at position 3858 of SEQ ID NO: 1084
ucuguaacacgagaucaau

SEQ ID NO: 86431 - RNA, 19 nt, Artificial Sequence
  Description of Artificial Sequence: Synthetic oligonucleotide
  Antisense strand to SEQ ID NO: 86350
auugaucucguguuacaga

SEQ ID NO: 86432 - RNA, 19 nt, Artificial Sequence
  Description of Artificial Sequence: Synthetic oligonucleotide
  Sense strand starting at position 3866 of SEQ ID NO: 1084
acgagaucaaucuaugcug

SEQ ID NO: 86433 - RNA, 19 nt, Artificial Sequence
  Description of Artificial Sequence: Synthetic oligonucleotide
  Antisense strand to SEQ ID NO: 86352
cagcauagauugaucucgu

SEQ ID NO: 86434 - RNA, 19 nt, Artificial Sequence
  Description of Artificial Sequence: Synthetic oligonucleotide
  Sense strand starting at position 3895 of SEQ ID NO: 1084
uguuaaagugcuuggugga

SEQ ID NO: 86435 - RNA, 19 nt, Artificial Sequence
  Description of Artificial Sequence: Synthetic oligonucleotide
  Antisense strand to SEQ ID NO: 86354
uccaccaagcacuuuaaca

SEQ ID NO: 86436 - RNA, 19 nt, Artificial Sequence
  Description of Artificial Sequence: Synthetic oligonucleotide
  Sense strand starting at position 3911 of SEQ ID NO: 1084
ggagacuggucccuucagu

SEQ ID NO: 86437 - RNA, 19 nt, Artificial Sequence
  Description of Artificial Sequence: Synthetic oligonucleotide
  Antisense strand to SEQ ID NO: 86356
acugaagggaccagucucc

SEQ ID NO: 86438 - RNA, 19 nt, Artificial Sequence
  Description of Artificial Sequence: Synthetic oligonucleotide
  Sense strand starting at position 3943 of SEQ ID NO: 1085
gcguaaauacuguggugag

SEQ ID NO: 86439 - RNA, 19 nt, Artificial Sequence
  Description of Artificial Sequence: Synthetic oligonucleotide
  Antisense strand to SEQ ID NO: 86358
cucaccacaguauuuacgc

SEQ ID NO: 86440 - RNA, 19 nt, Artificial Sequence
  Description of Artificial Sequence: Synthetic oligonucleotide
  Sense strand starting at position 3933 of SEQ ID NO: 1085
ggaccuccuugcguaaaua

SEQ ID NO: 86441 - RNA, 19 nt, Artificial Sequence
  Description of Artificial Sequence: Synthetic oligonucleotide
  Antisense strand to SEQ ID NO: 86360
uauuuacgcaaggaggucc

SEQ ID NO: 86442 - RNA, 19 nt, Artificial Sequence
  Description of Artificial Sequence: Synthetic oligonucleotide
  Sense strand starting at position 3930 of SEQ ID NO: 1085
cguggaccuccuugcguaa

SEQ ID NO: 86443 - RNA, 19 nt, Artificial Sequence
  Description of Artificial Sequence: Synthetic oligonucleotide
  Antisense strand to SEQ ID NO: 86362
uuacgcaaggagguccacg

SEQ ID NO: 86444 - RNA, 19 nt, Artificial Sequence
  Description of Artificial Sequence: Synthetic oligonucleotide
  Sense strand starting at position 3866 of SEQ ID NO: 1085
gaaacuauaguagguuaau

SEQ ID NO: 86445 - RNA, 19 nt, Artificial Sequence
  Description of Artificial Sequence: Synthetic oligonucleotide
  Antisense strand to SEQ ID NO: 86364
auuaaccuacuauaguuuc

SEQ ID NO: 86446 - RNA, 19 nt, Artificial Sequence
  Description of Artificial Sequence: Synthetic oligonucleotide
  Sense strand starting at position 3842 of SEQ ID NO: 1085
cuuccugacggcuaagagu

SEQ ID NO: 86447 - RNA, 19 nt, Artificial Sequence
  Description of Artificial Sequence: Synthetic oligonucleotide
  Antisense strand to SEQ ID NO: 86366
acucuuagccgucaggaag

SEQ ID NO: 86448 - RNA, 19 nt, Artificial Sequence
  Description of Artificial Sequence: Synthetic oligonucleotide
  Sense strand starting at position 3441 of SEQ ID NO: 1085
cuguuugaaugagaggcau

SEQ ID NO: 86449 - RNA, 19 nt, Artificial Sequence
  Description of Artificial Sequence: Synthetic oligonucleotide
  Antisense strand to SEQ ID NO: 86368
augccucucauucaaacag

SEQ ID NO: 86450 - RNA, 19 nt, Artificial Sequence
  Description of Artificial Sequence: Synthetic oligonucleotide
  Sense strand starting at position 3373 of SEQ ID NO: 1085
gaaaccguauagcuuuaaa

SEQ ID NO: 86451 - RNA, 19 nt, Artificial Sequence
  Description of Artificial Sequence: Synthetic oligonucleotide
  Antisense strand to SEQ ID NO: 86370
uuuaaagcuauacgguuuc

SEQ ID NO: 86452 - RNA, 19 nt, Artificial Sequence
  Description of Artificial Sequence: Synthetic oligonucleotide
  Sense strand starting at position 3370 of SEQ ID NO: 1085
agugaaaccguauagcuuu

SEQ ID NO: 86453 - RNA, 19 nt, Artificial Sequence
  Description of Artificial Sequence: Synthetic oligonucleotide
  Antisense strand to SEQ ID NO: 86372
aaagcuauacgguuucacu

SEQ ID NO: 86454 - RNA, 19 nt, Artificial Sequence
  Description of Artificial Sequence: Synthetic oligonucleotide
  Sense strand starting at position 3178 of SEQ ID NO: 1085
agguauuauguacaagcau

SEQ ID NO: 86455 - RNA, 19 nt, Artificial Sequence
  Description of Artificial Sequence: Synthetic oligonucleotide
  Antisense strand to SEQ ID NO: 86374
augcuuguacauaauaccu

SEQ ID NO: 86456 - RNA, 19 nt, Artificial Sequence
  Description of Artificial Sequence: Synthetic oligonucleotide
  Sense strand starting at position 3159 of SEQ ID NO: 1085
caguauuauugugaguaaa

SEQ ID NO: 86457 - RNA, 19 nt, Artificial Sequence
  Description of Artificial Sequence: Synthetic oligonucleotide
  Antisense strand to SEQ ID NO: 86376
uuuacucacaauaauacug

SEQ ID NO: 86458 - RNA, 19 nt, Artificial Sequence
  Description of Artificial Sequence: Synthetic oligonucleotide
  Sense strand starting at position 3110 of SEQ ID NO: 1085
acuagcagacauugaaagu

SEQ ID NO: 86459 - RNA, 19 nt, Artificial Sequence
  Description of Artificial Sequence: Synthetic oligonucleotide
  Antisense strand to SEQ ID NO: 86378
acuuucaaugucugcuagu

SEQ ID NO: 86460 - RNA, 19 nt, Artificial Sequence
  Description of Artificial Sequence: Synthetic oligonucleotide
  Sense strand starting at position 3080 of SEQ ID NO: 1085
acuuuauaagguugugaau

SEQ ID NO: 86461 - RNA, 19 nt, Artificial Sequence
  Description of Artificial Sequence: Synthetic oligonucleotide
  Antisense strand to SEQ ID NO: 86380
auucacaaccuuauaaagu

SEQ ID NO: 86462 - RNA, 19 nt, Artificial Sequence
  Description of Artificial Sequence: Synthetic oligonucleotide
  Sense strand starting at position 3072 of SEQ ID NO: 1085
gcacuauuacuuuauaagg

SEQ ID NO: 86463 - RNA, 19 nt, Artificial Sequence
  Description of Artificial Sequence: Synthetic oligonucleotide
  Antisense strand to SEQ ID NO: 86382
ccuuauaaaguaauagugc

SEQ ID NO: 86464 - RNA, 19 nt, Artificial Sequence
  Description of Artificial Sequence: Synthetic oligonucleotide
  Sense strand starting at position 3069 of SEQ ID NO: 1085
cgagcacuauuacuuuaua

SEQ ID NO: 86465 - RNA, 19 nt, Artificial Sequence
  Description of Artificial Sequence: Synthetic oligonucleotide
  Antisense strand to SEQ ID NO: 86384
uauaaaguaauagugcucg

SEQ ID NO: 86466 - RNA, 19 nt, Artificial Sequence
  Description of Artificial Sequence: Synthetic oligonucleotide
  Sense strand starting at position 2878 of SEQ ID NO: 1085
gggagaugcccuugaagga

SEQ ID NO: 86467 - RNA, 19 nt, Artificial Sequence
  Description of Artificial Sequence: Synthetic oligonucleotide
  Antisense strand to SEQ ID NO: 86386
uccuucaagggcaucuccc

SEQ ID NO: 86468 - RNA, 19 nt, Artificial Sequence
  Description of Artificial Sequence: Synthetic oligonucleotide
  Sense strand starting at position 2841 of SEQ ID NO: 1085
ugcaccgucccugaguuaa

SEQ ID NO: 86469 - RNA, 19 nt, Artificial Sequence
  Description of Artificial Sequence: Synthetic oligonucleotide
  Antisense strand to SEQ ID NO: 86388
uuaacucagggacggugca

SEQ ID NO: 86470 - RNA, 19 nt, Artificial Sequence
  Description of Artificial Sequence: Synthetic oligonucleotide
  Sense strand starting at position 2840 of SEQ ID NO: 1085
uugcaccgucccugaguua

SEQ ID NO: 86471 - RNA, 19 nt, Artificial Sequence
  Description of Artificial Sequence: Synthetic oligonucleotide
  Antisense strand to SEQ ID NO: 86390
uaacucagggacggugcaa

SEQ ID NO: 86472 - RNA, 19 nt, Artificial Sequence
  Description of Artificial Sequence: Synthetic oligonucleotide
  Sense strand starting at position 2767 of SEQ ID NO: 1085
gcaugacuuggugggcauu

SEQ ID NO: 86473 - RNA, 19 nt, Artificial Sequence
  Description of Artificial Sequence: Synthetic oligonucleotide
  Antisense strand to SEQ ID NO: 86392
aaugcccaccaagucaugc

SEQ ID NO: 86474 - RNA, 19 nt, Artificial Sequence
  Description of Artificial Sequence: Synthetic oligonucleotide
  Sense strand starting at position 2687 of SEQ ID NO: 1085
cuggccuauucuuacagaa

SEQ ID NO: 86475 - RNA, 19 nt, Artificial Sequence
  Description of Artificial Sequence: Synthetic oligonucleotide
  Antisense strand to SEQ ID NO: 86394
uucuguaagaauaggccag

SEQ ID NO: 86476 - RNA, 19 nt, Artificial Sequence
  Description of Artificial Sequence: Synthetic oligonucleotide
  Sense strand starting at position 2686 of SEQ ID NO: 1085
ccuggccuauucuuacaga

SEQ ID NO: 86477 - RNA, 19 nt, Artificial Sequence
  Description of Artificial Sequence: Synthetic oligonucleotide
  Antisense strand to SEQ ID NO: 86396
ucuguaagaauaggccagg

SEQ ID NO: 86478 - RNA, 19 nt, Artificial Sequence
  Description of Artificial Sequence: Synthetic oligonucleotide
  Sense strand starting at position 2583 of SEQ ID NO: 1085
gaaucauuguccgucggaa

SEQ ID NO: 86479 - RNA, 19 nt, Artificial Sequence
  Description of Artificial Sequence: Synthetic oligonucleotide
  Antisense strand to SEQ ID NO: 86398
uuccgacggacaaugauuc

SEQ ID NO: 86480 - RNA, 19 nt, Artificial Sequence
  Description of Artificial Sequence: Synthetic oligonucleotide
  Sense strand starting at position 2582 of SEQ ID NO: 1085
ggaaucauuguccgucgga

SEQ ID NO: 86481 - RNA, 19 nt, Artificial Sequence
  Description of Artificial Sequence: Synthetic oligonucleotide
  Antisense strand to SEQ ID NO: 86400
uccgacggacaaugauucc

SEQ ID NO: 86482 - RNA, 19 nt, Artificial Sequence
  Description of Artificial Sequence: Synthetic oligonucleotide
  Sense strand starting at position 2572 of SEQ ID NO: 1085
cgccgagaguggaaucauu

SEQ ID NO: 86483 - RNA, 19 nt, Artificial Sequence
  Description of Artificial Sequence: Synthetic oligonucleotide
  Antisense strand to SEQ ID NO: 86402
aaugauuccacucucggcg

SEQ ID NO: 86484 - RNA, 19 nt, Artificial Sequence
  Description of Artificial Sequence: Synthetic oligonucleotide
  Sense strand starting at position 2435 of SEQ ID NO: 1085
agggcauucgucggaauca

SEQ ID NO: 86485 - RNA, 19 nt, Artificial Sequence
  Description of Artificial Sequence: Synthetic oligonucleotide
  Antisense strand to SEQ ID NO: 86404
ugauuccgacgaaugcccu

SEQ ID NO: 86486 - RNA, 19 nt, Artificial Sequence
  Description of Artificial Sequence: Synthetic oligonucleotide
  Sense strand starting at position 1209 of SEQ ID NO: 1085
caauauggcugcccgagua

SEQ ID NO: 86487 - RNA, 19 nt, Artificial Sequence
  Description of Artificial Sequence: Synthetic oligonucleotide
  Antisense strand to SEQ ID NO: 86406
uacucgggcagccauauug

SEQ ID NO: 86488 - RNA, 19 nt, Artificial Sequence
  Description of Artificial Sequence: Synthetic oligonucleotide
  Sense strand starting at position 1186 of SEQ ID NO: 1085
aaggauuugucagaucauc

SEQ ID NO: 86489 - RNA, 19 nt, Artificial Sequence
  Description of Artificial Sequence: Synthetic oligonucleotide
  Antisense strand to SEQ ID NO: 86408
gaugaucugacaaauccuu

SEQ ID NO: 86490 - RNA, 19 nt, Artificial Sequence
  Description of Artificial Sequence: Synthetic oligonucleotide
  Sense strand starting at position 1120 of SEQ ID NO: 1085
gccagucacccugaaagcu

SEQ ID NO: 86491 - RNA, 19 nt, Artificial Sequence
  Description of Artificial Sequence: Synthetic oligonucleotide
  Antisense strand to SEQ ID NO: 86410
agcuuucagggugacuggc

SEQ ID NO: 86492 - RNA, 19 nt, Artificial Sequence
  Description of Artificial Sequence: Synthetic oligonucleotide
  Sense strand starting at position 960 of SEQ ID NO: 1085
gcaguuuaccuuggaagcu

SEQ ID NO: 86493 - RNA, 19 nt, Artificial Sequence
  Description of Artificial Sequence: Synthetic oligonucleotide
  Antisense strand to SEQ ID NO: 86412
agcuuccaagguaaacugc

SEQ ID NO: 86494 - RNA, 19 nt, Artificial Sequence
  Description of Artificial Sequence: Synthetic oligonucleotide
  Sense strand starting at position 850 of SEQ ID NO: 1085
ggccuaugcacauguaaag

SEQ ID NO: 86495 - RNA, 19 nt, Artificial Sequence
  Description of Artificial Sequence: Synthetic oligonucleotide
  Antisense strand to SEQ ID NO: 86414
cuuuacaugugcauaggcc

SEQ ID NO: 86496 - RNA, 19 nt, Artificial Sequence
  Description of Artificial Sequence: Synthetic oligonucleotide
  Sense strand starting at position 730 of SEQ ID NO: 1085
agaauacucugguuuacuu

SEQ ID NO: 86497 - RNA, 19 nt, Artificial Sequence
  Description of Artificial Sequence: Synthetic oligonucleotide
  Antisense strand to SEQ ID NO: 86416
aaguaaaccagaguauucu

SEQ ID NO: 86498 - RNA, 19 nt, Artificial Sequence
  Description of Artificial Sequence: Synthetic oligonucleotide
  Sense strand starting at position 727 of SEQ ID NO: 1085
aucagaauacucugguuua

SEQ ID NO: 86499 - RNA, 19 nt, Artificial Sequence
  Description of Artificial Sequence: Synthetic oligonucleotide
  Antisense strand to SEQ ID NO: 86418
uaaaccagaguauucugau

SEQ ID NO: 86500 - RNA, 19 nt, Artificial Sequence
  Description of Artificial Sequence: Synthetic oligonucleotide
  Sense strand starting at position 719 of SEQ ID NO: 1085
cgcccacuaucagaauacu

SEQ ID NO: 86501 - RNA, 19 nt, Artificial Sequence
  Description of Artificial Sequence: Synthetic oligonucleotide
  Antisense strand to SEQ ID NO: 86420
aguauucugauagugggcg

SEQ ID NO: 86502 - RNA, 19 nt, Artificial Sequence
  Description of Artificial Sequence: Synthetic oligonucleotide
  Sense strand starting at position 685 of SEQ ID NO: 1085
cagccugcguccucagaaa

SEQ ID NO: 86503 - RNA, 19 nt, Artificial Sequence
  Description of Artificial Sequence: Synthetic oligonucleotide
  Antisense strand to SEQ ID NO: 86422
uuucugaggacgcaggcug

SEQ ID NO: 86504 - RNA, 19 nt, Artificial Sequence
  Description of Artificial Sequence: Synthetic oligonucleotide
  Sense strand starting at position 634 of SEQ ID NO: 1085
gggaucuguugacaaucua

SEQ ID NO: 86505 - RNA, 19 nt, Artificial Sequence
  Description of Artificial Sequence: Synthetic oligonucleotide
  Antisense strand to SEQ ID NO: 86424
uagauugucaacagauccc

SEQ ID NO: 86506 - RNA, 19 nt, Artificial Sequence
  Description of Artificial Sequence: Synthetic oligonucleotide
  Sense strand starting at position 585 of SEQ ID NO: 1085
guucaaugguggcagaaca

SEQ ID NO: 86507 - RNA, 19 nt, Artificial Sequence
  Description of Artificial Sequence: Synthetic oligonucleotide
  Antisense strand to SEQ ID NO: 86426
uguucugccaccauugaac

SEQ ID NO: 86508 - RNA, 19 nt, Artificial Sequence
  Description of Artificial Sequence: Synthetic oligonucleotide
  Sense strand starting at position 315 of SEQ ID NO: 1085
accuauguguaauucucau

SEQ ID NO: 86509 - RNA, 19 nt, Artificial Sequence
  Description of Artificial Sequence: Synthetic oligonucleotide
  Antisense strand to SEQ ID NO: 86428
augagaauuacacauaggu

SEQ ID NO: 86510 - RNA, 19 nt, Artificial Sequence
  Description of Artificial Sequence: Synthetic oligonucleotide
  Sense strand starting at position 309 of SEQ ID NO: 1085
auaccaaccuauguguaau

SEQ ID NO: 86511 - RNA, 19 nt, Artificial Sequence
  Description of Artificial Sequence: Synthetic oligonucleotide
  Antisense strand to SEQ ID NO: 86430
auuacacauagguugguau

SEQ ID NO: 86512 - RNA, 19 nt, Artificial Sequence
  Description of Artificial Sequence: Synthetic oligonucleotide
  Sense strand starting at position 256 of SEQ ID NO: 1085
ucuacagacucaugcugaa

SEQ ID NO: 86513 - RNA, 19 nt, Artificial Sequence
  Description of Artificial Sequence: Synthetic oligonucleotide
  Antisense strand to SEQ ID NO: 86432
uucagcaugagucuguaga

SEQ ID NO: 86514 - RNA, 19 nt, Artificial Sequence
  Description of Artificial Sequence: Synthetic oligonucleotide
  Sense strand starting at position 225 of SEQ ID NO: 1085
uguccacaucuaggauaua

SEQ ID NO: 86515 - RNA, 19 nt, Artificial Sequence
  Description of Artificial Sequence: Synthetic oligonucleotide
  Antisense strand to SEQ ID NO: 86434
uauauccuagauguggaca

SEQ ID NO: 86516 - RNA, 19 nt, Artificial Sequence
  Description of Artificial Sequence: Synthetic oligonucleotide
  Sense strand starting at position 130 of SEQ ID NO: 1085
cugagaaguuaugagaaug

SEQ ID NO: 86517 - RNA, 19 nt, Artificial Sequence
  Description of Artificial Sequence: Synthetic oligonucleotide
  Antisense strand to SEQ ID NO: 86436
cauucucauaacuucucag

SEQ ID NO: 86518 - RNA, 19 nt, Artificial Sequence
  Description of Artificial Sequence: Synthetic oligonucleotide
  Sense strand starting at position 320 of SEQ ID NO: 1086
ccaggaaagcugugcucaa

SEQ ID NO: 86519 - RNA, 19 nt, Artificial Sequence
  Description of Artificial Sequence: Synthetic oligonucleotide
  Antisense strand to SEQ ID NO: 86438
uugagcacagcuuuccugg

SEQ ID NO: 86520 - RNA, 19 nt, Artificial Sequence
  Description of Artificial Sequence: Synthetic oligonucleotide
  Sense strand starting at position 324 of SEQ ID NO: 1086
gaaagcugugcucaaguga

SEQ ID NO: 86521 - RNA, 19 nt, Artificial Sequence
  Description of Artificial Sequence: Synthetic oligonucleotide
  Antisense strand to SEQ ID NO: 86440
ucacuugagcacagcuuuc

SEQ ID NO: 86522 - RNA, 19 nt, Artificial Sequence
  Description of Artificial Sequence: Synthetic oligonucleotide
  Sense strand starting at position 331 of SEQ ID NO: 1086
gugcucaagugauucuuga

SEQ ID NO: 86523 - RNA, 19 nt, Artificial Sequence
  Description of Artificial Sequence: Synthetic oligonucleotide
  Antisense strand to SEQ ID NO: 86442
ucaagaaucacuugagcac

SEQ ID NO: 86524 - RNA, 19 nt, Artificial Sequence
  Description of Artificial Sequence: Synthetic oligonucleotide
  Sense strand starting at position 514 of SEQ ID NO: 1086
ugacucugucuaggagcaa

SEQ ID NO: 86525 - RNA, 19 nt, Artificial Sequence
  Description of Artificial Sequence: Synthetic oligonucleotide
  Antisense strand to SEQ ID NO: 86444
uugcuccuagacagaguca

SEQ ID NO: 86526 - RNA, 19 nt, Artificial Sequence
  Description of Artificial Sequence: Synthetic oligonucleotide
  Sense strand starting at position 549 of SEQ ID NO: 1086
gaaucugggucacauauga

SEQ ID NO: 86527 - RNA, 19 nt, Artificial Sequence
  Description of Artificial Sequence: Synthetic oligonucleotide
  Antisense strand to SEQ ID NO: 86446
ucauaugugacccagauuc

SEQ ID NO: 86528 - RNA, 19 nt, Artificial Sequence
  Description of Artificial Sequence: Synthetic oligonucleotide
  Sense strand starting at position 644 of SEQ ID NO: 1086
ggcagagauagauguucuu

SEQ ID NO: 86529 - RNA, 19 nt, Artificial Sequence
  Description of Artificial Sequence: Synthetic oligonucleotide
  Antisense strand to SEQ ID NO: 86448
aagaacaucuaucucugcc

SEQ ID NO: 86530 - RNA, 19 nt, Artificial Sequence
  Description of Artificial Sequence: Synthetic oligonucleotide
  Sense strand starting at position 886 of SEQ ID NO: 1086
cucauuucugccggcucaa

SEQ ID NO: 86531 - RNA, 19 nt, Artificial Sequence
  Description of Artificial Sequence: Synthetic oligonucleotide
  Antisense strand to SEQ ID NO: 86450
uugagccggcagaaaugag

SEQ ID NO: 86532 - RNA, 19 nt, Artificial Sequence
  Description of Artificial Sequence: Synthetic oligonucleotide
  Sense strand starting at position 930 of SEQ ID NO: 1086
cccagauaagucuaggcaa

SEQ ID NO: 86533 - RNA, 19 nt, Artificial Sequence
  Description of Artificial Sequence: Synthetic oligonucleotide
  Antisense strand to SEQ ID NO: 86452
uugccuagacuuaucuggg

SEQ ID NO: 86534 - RNA, 19 nt, Artificial Sequence
  Description of Artificial Sequence: Synthetic oligonucleotide
  Sense strand starting at position 1162 of SEQ ID NO: 1086
cccgaucuuugucugcaga

SEQ ID NO: 86535 - RNA, 19 nt, Artificial Sequence
  Description of Artificial Sequence: Synthetic oligonucleotide
  Antisense strand to SEQ ID NO: 86454
ucugcagacaaagaucggg

SEQ ID NO: 86536 - RNA, 19 nt, Artificial Sequence
  Description of Artificial Sequence: Synthetic oligonucleotide
  Sense strand starting at position 1163 of SEQ ID NO: 1086
ccgaucuuugucugcagau

SEQ ID NO: 86537 - RNA, 19 nt, Artificial Sequence
  Description of Artificial Sequence: Synthetic oligonucleotide
  Antisense strand to SEQ ID NO: 86456
aucugcagacaaagaucgg

SEQ ID NO: 86538 - RNA, 19 nt, Artificial Sequence
  Description of Artificial Sequence: Synthetic oligonucleotide
  Sense strand starting at position 1164 of SEQ ID NO: 1086
cgaucuuugucugcagauc

SEQ ID NO: 86539 - RNA, 19 nt, Artificial Sequence
  Description of Artificial Sequence: Synthetic oligonucleotide
  Antisense strand to SEQ ID NO: 86458
gaucugcagacaaagaucg

SEQ ID NO: 86540 - RNA, 19 nt, Artificial Sequence
  Description of Artificial Sequence: Synthetic oligonucleotide
  Sense strand starting at position 1165 of SEQ ID NO: 1086
gaucuuugucugcagaucu

SEQ ID NO: 86541 - RNA, 19 nt, Artificial Sequence
  Description of Artificial Sequence: Synthetic oligonucleotide
  Antisense strand to SEQ ID NO: 86460
agaucugcagacaaagauc

SEQ ID NO: 86542 - RNA, 19 nt, Artificial Sequence
  Description of Artificial Sequence: Synthetic oligonucleotide
  Sense strand starting at position 1196 of SEQ ID NO: 1086
gggugugcugccuuugcua

SEQ ID NO: 86543 - RNA, 19 nt, Artificial Sequence
  Description of Artificial Sequence: Synthetic oligonucleotide
  Antisense strand to SEQ ID NO: 86462
uagcaaaggcagcacaccc

SEQ ID NO: 86544 - RNA, 19 nt, Artificial Sequence
  Description of Artificial Sequence: Synthetic oligonucleotide
  Sense strand starting at position 1237 of SEQ ID NO: 1086
agcugacucgcauggauga

SEQ ID NO: 86545 - RNA, 19 nt, Artificial Sequence
  Description of Artificial Sequence: Synthetic oligonucleotide
  Antisense strand to SEQ ID NO: 86464
ucauccaugcgagucagcu

SEQ ID NO: 86546 - RNA, 19 nt, Artificial Sequence
  Description of Artificial Sequence: Synthetic oligonucleotide
  Sense strand starting at position 1342 of SEQ ID NO: 1086
gccagagcugggugugaaa

SEQ ID NO: 86547 - RNA, 19 nt, Artificial Sequence
  Description of Artificial Sequence: Synthetic oligonucleotide
  Antisense strand to SEQ ID NO: 86466
uuucacacccagcucuggc

SEQ ID NO: 86548 - RNA, 19 nt, Artificial Sequence
  Description of Artificial Sequence: Synthetic oligonucleotide
  Sense strand starting at position 1344 of SEQ ID NO: 1086
cagagcugggugugaaaua

SEQ ID NO: 86549 - RNA, 19 nt, Artificial Sequence
  Description of Artificial Sequence: Synthetic oligonucleotide
  Antisense strand to SEQ ID NO: 86468
uauuucacacccagcucug

SEQ ID NO: 86550 - RNA, 19 nt, Artificial Sequence
  Description of Artificial Sequence: Synthetic oligonucleotide
  Sense strand starting at position 1362 of SEQ ID NO: 1086
accggauuuccuuguuuau

SEQ ID NO: 86551 - RNA, 19 nt, Artificial Sequence
  Description of Artificial Sequence: Synthetic oligonucleotide
  Antisense strand to SEQ ID NO: 86470
auaaacaaggaaauccggu

SEQ ID NO: 86552 - RNA, 19 nt, Artificial Sequence
  Description of Artificial Sequence: Synthetic oligonucleotide
  Sense strand starting at position 1364 of SEQ ID NO: 1086
cggauuuccuuguuuauuc

SEQ ID NO: 86553 - RNA, 19 nt, Artificial Sequence
  Description of Artificial Sequence: Synthetic oligonucleotide
  Antisense strand to SEQ ID NO: 86472
gaauaaacaaggaaauccg

SEQ ID NO: 86554 - RNA, 19 nt, Artificial Sequence
  Description of Artificial Sequence: Synthetic oligonucleotide
  Sense strand starting at position 1368 of SEQ ID NO: 1086
uuuccuuguuuauucgauu

SEQ ID NO: 86555 - RNA, 19 nt, Artificial Sequence
  Description of Artificial Sequence: Synthetic oligonucleotide
  Antisense strand to SEQ ID NO: 86474
aaucgaauaaacaaggaaa

SEQ ID NO: 86556 - RNA, 19 nt, Artificial Sequence
  Description of Artificial Sequence: Synthetic oligonucleotide
  Sense strand starting at position 1369 of SEQ ID NO: 1086
uuccuuguuuauucgauuu

SEQ ID NO: 86557 - RNA, 19 nt, Artificial Sequence
  Description of Artificial Sequence: Synthetic oligonucleotide
  Antisense strand to SEQ ID NO: 86476
aaaucgaauaaacaaggaa

SEQ ID NO: 86558 - RNA, 19 nt, Artificial Sequence
  Description of Artificial Sequence: Synthetic oligonucleotide
  Sense strand starting at position 2128 of SEQ ID NO: 1086
gcgggacucgcgccuuuaa

SEQ ID NO: 86559 - RNA, 19 nt, Artificial Sequence
  Description of Artificial Sequence: Synthetic oligonucleotide
  Antisense strand to SEQ ID NO: 86478
uuaaaggcgcgagucccgc

SEQ ID NO: 86560 - RNA, 19 nt, Artificial Sequence
  Description of Artificial Sequence: Synthetic oligonucleotide
  Sense strand starting at position 2129 of SEQ ID NO: 1086
cgggacucgcgccuuuaaa

SEQ ID NO: 86561 - RNA, 19 nt, Artificial Sequence
  Description of Artificial Sequence: Synthetic oligonucleotide
  Antisense strand to SEQ ID NO: 86480
uuuaaaggcgcgagucccg

SEQ ID NO: 86562 - RNA, 19 nt, Artificial Sequence
  Description of Artificial Sequence: Synthetic oligonucleotide
  Sense strand starting at position 2344 of SEQ ID NO: 1086
ggaacuaccgaagguuaca

SEQ ID NO: 86563 - RNA, 19 nt, Artificial Sequence
  Description of Artificial Sequence: Synthetic oligonucleotide
  Antisense strand to SEQ ID NO: 86482
uguaaccuucgguaguucc

SEQ ID NO: 86564 - RNA, 19 nt, Artificial Sequence
  Description of Artificial Sequence: Synthetic oligonucleotide
  Sense strand starting at position 2366 of SEQ ID NO: 1086
cgaguucguggguaagcau

SEQ ID NO: 86565 - RNA, 19 nt, Artificial Sequence
  Description of Artificial Sequence: Synthetic oligonucleotide
  Antisense strand to SEQ ID NO: 86484
augcuuacccacgaacucg

SEQ ID NO: 86566 - RNA, 19 nt, Artificial Sequence
  Description of Artificial Sequence: Synthetic oligonucleotide
  Sense strand starting at position 2373 of SEQ ID NO: 1086
guggguaagcaugguaaga

SEQ ID NO: 86567 - RNA, 19 nt, Artificial Sequence
  Description of Artificial Sequence: Synthetic oligonucleotide
  Antisense strand to SEQ ID NO: 86486
ucuuaccaugcuuacccac

SEQ ID NO: 86568 - RNA, 19 nt, Artificial Sequence
  Description of Artificial Sequence: Synthetic oligonucleotide
  Sense strand starting at position 2460 of SEQ ID NO: 1086
uucugcauuuauuccagua

SEQ ID NO: 86569 - RNA, 19 nt, Artificial Sequence
  Description of Artificial Sequence: Synthetic oligonucleotide
  Antisense strand to SEQ ID NO: 86488
uacuggaauaaaugcagaa

SEQ ID NO: 86570 - RNA, 19 nt, Artificial Sequence
  Description of Artificial Sequence: Synthetic oligonucleotide
  Sense strand starting at position 3148 of SEQ ID NO: 1086
acauuacccucagaugaug

SEQ ID NO: 86571 - RNA, 19 nt, Artificial Sequence
  Description of Artificial Sequence: Synthetic oligonucleotide
  Antisense strand to SEQ ID NO: 86490
caucaucugaggguaaugu

SEQ ID NO: 86572 - RNA, 19 nt, Artificial Sequence
  Description of Artificial Sequence: Synthetic oligonucleotide
  Sense strand starting at position 3164 of SEQ ID NO: 1086
augaaaccaugucagagau

SEQ ID NO: 86573 - RNA, 19 nt, Artificial Sequence
  Description of Artificial Sequence: Synthetic oligonucleotide
  Antisense strand to SEQ ID NO: 86492
aucucugacaugguuucau

SEQ ID NO: 86574 - RNA, 19 nt, Artificial Sequence
  Description of Artificial Sequence: Synthetic oligonucleotide
  Sense strand starting at position 3208 of SEQ ID NO: 1086
ugaggaugcaucuguuggu

SEQ ID NO: 86575 - RNA, 19 nt, Artificial Sequence
  Description of Artificial Sequence: Synthetic oligonucleotide
  Antisense strand to SEQ ID NO: 86494
accaacagaugcauccuca

SEQ ID NO: 86576 - RNA, 19 nt, Artificial Sequence
  Description of Artificial Sequence: Synthetic oligonucleotide
  Sense strand starting at position 3209 of SEQ ID NO: 1086
gaggaugcaucuguuggua

SEQ ID NO: 86577 - RNA, 19 nt, Artificial Sequence
  Description of Artificial Sequence: Synthetic oligonucleotide
  Antisense strand to SEQ ID NO: 86496
uaccaacagaugcauccuc

SEQ ID NO: 86578 - RNA, 19 nt, Artificial Sequence
  Description of Artificial Sequence: Synthetic oligonucleotide
  Sense strand starting at position 3302 of SEQ ID NO: 1086
cccuguuuggcuugaccua

SEQ ID NO: 86579 - RNA, 19 nt, Artificial Sequence
  Description of Artificial Sequence: Synthetic oligonucleotide
  Antisense strand to SEQ ID NO: 86498
uaggucaagccaaacaggg

SEQ ID NO: 86580 - RNA, 19 nt, Artificial Sequence
  Description of Artificial Sequence: Synthetic oligonucleotide
  Sense strand starting at position 3303 of SEQ ID NO: 1086
ccuguuuggcuugaccuau

SEQ ID NO: 86581 - RNA, 19 nt, Artificial Sequence
  Description of Artificial Sequence: Synthetic oligonucleotide
  Antisense strand to SEQ ID NO: 86500
auaggucaagccaaacagg

SEQ ID NO: 86582 - RNA, 19 nt, Artificial Sequence
  Description of Artificial Sequence: Synthetic oligonucleotide
  Sense strand starting at position 3446 of SEQ ID NO: 1086
agaagaggucuugguggua

SEQ ID NO: 86583 - RNA, 19 nt, Artificial Sequence
  Description of Artificial Sequence: Synthetic oligonucleotide
  Antisense strand to SEQ ID NO: 86502
uaccaccaagaccucuucu

SEQ ID NO: 86584 - RNA, 19 nt, Artificial Sequence
  Description of Artificial Sequence: Synthetic oligonucleotide
  Sense strand starting at position 3458 of SEQ ID NO: 1086
ggugguauccuggaccuuu

SEQ ID NO: 86585 - RNA, 19 nt, Artificial Sequence
  Description of Artificial Sequence: Synthetic oligonucleotide
  Antisense strand to SEQ ID NO: 86504
aaagguccaggauaccacc

SEQ ID NO: 86586 - RNA, 19 nt, Artificial Sequence
  Description of Artificial Sequence: Synthetic oligonucleotide
  Sense strand starting at position 3610 of SEQ ID NO: 1086
ggaggagacuaacacauau

SEQ ID NO: 86587 - RNA, 19 nt, Artificial Sequence
  Description of Artificial Sequence: Synthetic oligonucleotide
  Antisense strand to SEQ ID NO: 86506
auauguguuagucuccucc

SEQ ID NO: 86588 - RNA, 19 nt, Artificial Sequence
  Description of Artificial Sequence: Synthetic oligonucleotide
  Sense strand starting at position 3779 of SEQ ID NO: 1086
uuuggacauguauaucuua

SEQ ID NO: 86589 - RNA, 19 nt, Artificial Sequence
  Description of Artificial Sequence: Synthetic oligonucleotide
  Antisense strand to SEQ ID NO: 86508
uaagauauacauguccaaa

SEQ ID NO: 86590 - RNA, 19 nt, Artificial Sequence
  Description of Artificial Sequence: Synthetic oligonucleotide
  Sense strand starting at position 3832 of SEQ ID NO: 1086
ggaugaugauguccaggca

SEQ ID NO: 86591 - RNA, 19 nt, Artificial Sequence
  Description of Artificial Sequence: Synthetic oligonucleotide
  Antisense strand to SEQ ID NO: 86510
ugccuggacaucaucaucc

SEQ ID NO: 86592 - RNA, 19 nt, Artificial Sequence
  Description of Artificial Sequence: Synthetic oligonucleotide
  Sense strand starting at position 3835 of SEQ ID NO: 1086
ugaugauguccaggcagaa

SEQ ID NO: 86593 - RNA, 19 nt, Artificial Sequence
  Description of Artificial Sequence: Synthetic oligonucleotide
  Antisense strand to SEQ ID NO: 86512
uucugccuggacaucauca

SEQ ID NO: 86594 - RNA, 19 nt, Artificial Sequence
  Description of Artificial Sequence: Synthetic oligonucleotide
  Sense strand starting at position 3904 of SEQ ID NO: 1086
ucagccuucccggauggua

SEQ ID NO: 86595 - RNA, 19 nt, Artificial Sequence
  Description of Artificial Sequence: Synthetic oligonucleotide
  Antisense strand to SEQ ID NO: 86514
uaccauccgggaaggcuga

SEQ ID NO: 86596 - RNA, 19 nt, Artificial Sequence
  Description of Artificial Sequence: Synthetic oligonucleotide
  Sense strand starting at position 3906 of SEQ ID NO: 1086
agccuucccggaugguaau

SEQ ID NO: 86597 - RNA, 19 nt, Artificial Sequence
  Description of Artificial Sequence: Synthetic oligonucleotide
  Antisense strand to SEQ ID NO: 86516
auuaccauccgggaaggcu

SEQ ID NO: 86598 - RNA, 19 nt, Artificial Sequence
  Description of Artificial Sequence: Synthetic oligonucleotide
  Sense strand starting at position 3816 of SEQ ID NO: 1087
cccucuguugauuaaaguu

SEQ ID NO: 86599 - RNA, 19 nt, Artificial Sequence
  Description of Artificial Sequence: Synthetic oligonucleotide
  Antisense strand to SEQ ID NO: 86518
aacuuuaaucaacagaggg

SEQ ID NO: 86600 - RNA, 19 nt, Artificial Sequence
  Description of Artificial Sequence: Synthetic oligonucleotide
  Sense strand starting at position 3815 of SEQ ID NO: 1087
gcccucuguugauuaaagu

SEQ ID NO: 86601 - RNA, 19 nt, Artificial Sequence
  Description of Artificial Sequence: Synthetic oligonucleotide
  Antisense strand to SEQ ID NO: 86520
acuuuaaucaacagagggc

SEQ ID NO: 86602 - RNA, 19 nt, Artificial Sequence
  Description of Artificial Sequence: Synthetic oligonucleotide
  Sense strand starting at position 3813 of SEQ ID NO: 1087
gcgcccucuguugauuaaa

SEQ ID NO: 86603 - RNA, 19 nt, Artificial Sequence
  Description of Artificial Sequence: Synthetic oligonucleotide
  Antisense strand to SEQ ID NO: 86522
uuuaaucaacagagggcgc

SEQ ID NO: 86604 - RNA, 19 nt, Artificial Sequence
  Description of Artificial Sequence: Synthetic oligonucleotide
  Sense strand starting at position 3812 of SEQ ID NO: 1087
agcgcccucuguugauuaa

SEQ ID NO: 86605 - RNA, 19 nt, Artificial Sequence
  Description of Artificial Sequence: Synthetic oligonucleotide
  Antisense strand to SEQ ID NO: 86524
uuaaucaacagagggcgcu

SEQ ID NO: 86606 - RNA, 19 nt, Artificial Sequence
  Description of Artificial Sequence: Synthetic oligonucleotide
  Sense strand starting at position 3575 of SEQ ID NO: 1087
aucuguauuucgcguaggu

SEQ ID NO: 86607 - RNA, 19 nt, Artificial Sequence
  Description of Artificial Sequence: Synthetic oligonucleotide
  Antisense strand to SEQ ID NO: 86526
accuacgcgaaauacagau

SEQ ID NO: 86608 - RNA, 19 nt, Artificial Sequence
  Description of Artificial Sequence: Synthetic oligonucleotide
  Sense strand starting at position 3469 of SEQ ID NO: 1087
ggacguuuccguuacguuc

SEQ ID NO: 86609 - RNA, 19 nt, Artificial Sequence
  Description of Artificial Sequence: Synthetic oligonucleotide
  Antisense strand to SEQ ID NO: 86528
gaacguaacggaaacgucc

SEQ ID NO: 86610 - RNA, 19 nt, Artificial Sequence
  Description of Artificial Sequence: Synthetic oligonucleotide
  Sense strand starting at position 3395 of SEQ ID NO: 1087
gcuccugcgcgggaauauu

SEQ ID NO: 86611 - RNA, 19 nt, Artificial Sequence
  Description of Artificial Sequence: Synthetic oligonucleotide
  Antisense strand to SEQ ID NO: 86530
aauauucccgcgcaggagc

SEQ ID NO: 86612 - RNA, 19 nt, Artificial Sequence
  Description of Artificial Sequence: Synthetic oligonucleotide
  Sense strand starting at position 3089 of SEQ ID NO: 1087
uguugugaccuuuaauuaa

SEQ ID NO: 86613 - RNA, 19 nt, Artificial Sequence
  Description of Artificial Sequence: Synthetic oligonucleotide
  Antisense strand to SEQ ID NO: 86532
uuaauuaaaggucacaaca

SEQ ID NO: 86614 - RNA, 19 nt, Artificial Sequence
  Description of Artificial Sequence: Synthetic oligonucleotide
  Sense strand starting at position 3055 of SEQ ID NO: 1087
ggacauuucuucuggugag

SEQ ID NO: 86615 - RNA, 19 nt, Artificial Sequence
  Description of Artificial Sequence: Synthetic oligonucleotide
  Antisense strand to SEQ ID NO: 86534
cucaccagaagaaaugucc

SEQ ID NO: 86616 - RNA, 19 nt, Artificial Sequence
  Description of Artificial Sequence: Synthetic oligonucleotide
  Sense strand starting at position 2690 of SEQ ID NO: 1087
ccggucugugauggacuaa

SEQ ID NO: 86617 - RNA, 19 nt, Artificial Sequence
  Description of Artificial Sequence: Synthetic oligonucleotide
  Antisense strand to SEQ ID NO: 86536
uuaguccaucacagaccgg

SEQ ID NO: 86618 - RNA, 19 nt, Artificial Sequence
  Description of Artificial Sequence: Synthetic oligonucleotide
  Sense strand starting at position 2689 of SEQ ID NO: 1087
cccggucugugauggacua

SEQ ID NO: 86619 - RNA, 19 nt, Artificial Sequence
  Description of Artificial Sequence: Synthetic oligonucleotide
  Antisense strand to SEQ ID NO: 86538
uaguccaucacagaccggg

SEQ ID NO: 86620 - RNA, 19 nt, Artificial Sequence
  Description of Artificial Sequence: Synthetic oligonucleotide
  Sense strand starting at position 2557 of SEQ ID NO: 1087
gcccuuuguucucggagag

SEQ ID NO: 86621 - RNA, 19 nt, Artificial Sequence
  Description of Artificial Sequence: Synthetic oligonucleotide
  Antisense strand to SEQ ID NO: 86540
cucuccgagaacaaagggc

SEQ ID NO: 86622 - RNA, 19 nt, Artificial Sequence
  Description of Artificial Sequence: Synthetic oligonucleotide
  Sense strand starting at position 2556 of SEQ ID NO: 1087
cgcccuuuguucucggaga

SEQ ID NO: 86623 - RNA, 19 nt, Artificial Sequence
  Description of Artificial Sequence: Synthetic oligonucleotide
  Antisense strand to SEQ ID NO: 86542
ucuccgagaacaaagggcg

SEQ ID NO: 86624 - RNA, 19 nt, Artificial Sequence
  Description of Artificial Sequence: Synthetic oligonucleotide
  Sense strand starting at position 2510 of SEQ ID NO: 1087
gggauugagucacaaacaa

SEQ ID NO: 86625 - RNA, 19 nt, Artificial Sequence
  Description of Artificial Sequence: Synthetic oligonucleotide
  Antisense strand to SEQ ID NO: 86544
uuguuugugacucaauccc

SEQ ID NO: 86626 - RNA, 19 nt, Artificial Sequence
  Description of Artificial Sequence: Synthetic oligonucleotide
  Sense strand starting at position 2490 of SEQ ID NO: 1087
cugugaaacgccgugcaaa

SEQ ID NO: 86627 - RNA, 19 nt, Artificial Sequence
  Description of Artificial Sequence: Synthetic oligonucleotide
  Antisense strand to SEQ ID NO: 86546
uuugcacggcguuucacag

SEQ ID NO: 86628 - RNA, 19 nt, Artificial Sequence
  Description of Artificial Sequence: Synthetic oligonucleotide
  Sense strand starting at position 2480 of SEQ ID NO: 1087
gcaggucugucugugaaac

SEQ ID NO: 86629 - RNA, 19 nt, Artificial Sequence
  Description of Artificial Sequence: Synthetic oligonucleotide
  Antisense strand to SEQ ID NO: 86548
guuucacagacagaccugc

SEQ ID NO: 86630 - RNA, 19 nt, Artificial Sequence
  Description of Artificial Sequence: Synthetic oligonucleotide
  Sense strand starting at position 2246 of SEQ ID NO: 1087
ggcgcucgugccugacauu

SEQ ID NO: 86631 - RNA, 19 nt, Artificial Sequence
  Description of Artificial Sequence: Synthetic oligonucleotide
  Antisense strand to SEQ ID NO: 86550
aaugucaggcacgagcgcc

SEQ ID NO: 86632 - RNA, 19 nt, Artificial Sequence
  Description of Artificial Sequence: Synthetic oligonucleotide
  Sense strand starting at position 2084 of SEQ ID NO: 1087
cccguuucgccugacaguu

SEQ ID NO: 86633 - RNA, 19 nt, Artificial Sequence
  Description of Artificial Sequence: Synthetic oligonucleotide
  Antisense strand to SEQ ID NO: 86552
aacugucaggcgaaacggg

SEQ ID NO: 86634 - RNA, 19 nt, Artificial Sequence
  Description of Artificial Sequence: Synthetic oligonucleotide
  Sense strand starting at position 2083 of SEQ ID NO: 1087
gcccguuucgccugacagu

SEQ ID NO: 86635 - RNA, 19 nt, Artificial Sequence
  Description of Artificial Sequence: Synthetic oligonucleotide
  Antisense strand to SEQ ID NO: 86554
acugucaggcgaaacgggc

SEQ ID NO: 86636 - RNA, 19 nt, Artificial Sequence
  Description of Artificial Sequence: Synthetic oligonucleotide
  Sense strand starting at position 2057 of SEQ ID NO: 1087
gcgugucgccgagccaaua

SEQ ID NO: 86637 - RNA, 19 nt, Artificial Sequence
  Description of Artificial Sequence: Synthetic oligonucleotide
  Antisense strand to SEQ ID NO: 86556
uauuggcucggcgacacgc

SEQ ID NO: 86638 - RNA, 19 nt, Artificial Sequence
  Description of Artificial Sequence: Synthetic oligonucleotide
  Sense strand starting at position 1479 of SEQ ID NO: 1087
gucguaccgucacaacuua

SEQ ID NO: 86639 - RNA, 19 nt, Artificial Sequence
  Description of Artificial Sequence: Synthetic oligonucleotide
  Antisense strand to SEQ ID NO: 86558
uaaguugugacgguacgac

SEQ ID NO: 86640 - RNA, 19 nt, Artificial Sequence
  Description of Artificial Sequence: Synthetic oligonucleotide
  Sense strand starting at position 1450 of SEQ ID NO: 1087
ccgagaugggucugguaac

SEQ ID NO: 86641 - RNA, 19 nt, Artificial Sequence
  Description of Artificial Sequence: Synthetic oligonucleotide
  Antisense strand to SEQ ID NO: 86560
guuaccagacccaucucgg

SEQ ID NO: 86642 - RNA, 19 nt, Artificial Sequence
  Description of Artificial Sequence: Synthetic oligonucleotide
  Sense strand starting at position 1185 of SEQ ID NO: 1087
cgagguacugcccagcauu

SEQ ID NO: 86643 - RNA, 19 nt, Artificial Sequence
  Description of Artificial Sequence: Synthetic oligonucleotide
  Antisense strand to SEQ ID NO: 86562
aaugcugggcaguaccucg

SEQ ID NO: 86644 - RNA, 19 nt, Artificial Sequence
  Description of Artificial Sequence: Synthetic oligonucleotide
  Sense strand starting at position 1173 of SEQ ID NO: 1087
agcuaaacgauccgaggua

SEQ ID NO: 86645 - RNA, 19 nt, Artificial Sequence
  Description of Artificial Sequence: Synthetic oligonucleotide
  Antisense strand to SEQ ID NO: 86564
uaccucggaucguuuagcu

SEQ ID NO: 86646 - RNA, 19 nt, Artificial Sequence
  Description of Artificial Sequence: Synthetic oligonucleotide
  Sense strand starting at position 866 of SEQ ID NO: 1087
guuaauuguccuuaaguga

SEQ ID NO: 86647 - RNA, 19 nt, Artificial Sequence
  Description of Artificial Sequence: Synthetic oligonucleotide
  Antisense strand to SEQ ID NO: 86566
ucacuuaaggacaauuaac

SEQ ID NO: 86648 - RNA, 19 nt, Artificial Sequence
  Description of Artificial Sequence: Synthetic oligonucleotide
  Sense strand starting at position 865 of SEQ ID NO: 1087
cguuaauuguccuuaagug

SEQ ID NO: 86649 - RNA, 19 nt, Artificial Sequence
  Description of Artificial Sequence: Synthetic oligonucleotide
  Antisense strand to SEQ ID NO: 86568
cacuuaaggacaauuaacg

SEQ ID NO: 86650 - RNA, 19 nt, Artificial Sequence
  Description of Artificial Sequence: Synthetic oligonucleotide
  Sense strand starting at position 863 of SEQ ID NO: 1087
cucguuaauuguccuuaag

SEQ ID NO: 86651 - RNA, 19 nt, Artificial Sequence
  Description of Artificial Sequence: Synthetic oligonucleotide
  Antisense strand to SEQ ID NO: 86570
cuuaaggacaauuaacgag

SEQ ID NO: 86652 - RNA, 19 nt, Artificial Sequence
  Description of Artificial Sequence: Synthetic oligonucleotide
  Sense strand starting at position 862 of SEQ ID NO: 1087
ucucguuaauuguccuuaa

SEQ ID NO: 86653 - RNA, 19 nt, Artificial Sequence
  Description of Artificial Sequence: Synthetic oligonucleotide
  Antisense strand to SEQ ID NO: 86572
uuaaggacaauuaacgaga

SEQ ID NO: 86654 - RNA, 19 nt, Artificial Sequence
  Description of Artificial Sequence: Synthetic oligonucleotide
  Sense strand starting at position 855 of SEQ ID NO: 1087
ccgucugucucguuaauug

SEQ ID NO: 86655 - RNA, 19 nt, Artificial Sequence
  Description of Artificial Sequence: Synthetic oligonucleotide
  Antisense strand to SEQ ID NO: 86574
caauuaacgagacagacgg

SEQ ID NO: 86656 - RNA, 19 nt, Artificial Sequence
  Description of Artificial Sequence: Synthetic oligonucleotide
  Sense strand starting at position 854 of SEQ ID NO: 1087
uccgucugucucguuaauu

SEQ ID NO: 86657 - RNA, 19 nt, Artificial Sequence
  Description of Artificial Sequence: Synthetic oligonucleotide
  Antisense strand to SEQ ID NO: 86576
aauuaacgagacagacgga

SEQ ID NO: 86658 - RNA, 19 nt, Artificial Sequence
  Description of Artificial Sequence: Synthetic oligonucleotide
  Sense strand starting at position 853 of SEQ ID NO: 1087
cuccgucugucucguuaau

SEQ ID NO: 86659 - RNA, 19 nt, Artificial Sequence
  Description of Artificial Sequence: Synthetic oligonucleotide
  Antisense strand to SEQ ID NO: 86578
auuaacgagacagacggag

SEQ ID NO: 86660 - RNA, 19 nt, Artificial Sequence
  Description of Artificial Sequence: Synthetic oligonucleotide
  Sense strand starting at position 3983 of SEQ ID NO: 1089
caggaaaggucuuguuuga

SEQ ID NO: 86661 - RNA, 19 nt, Artificial Sequence
  Description of Artificial Sequence: Synthetic oligonucleotide
  Antisense strand to SEQ ID NO: 86580
ucaaacaagaccuuuccug

SEQ ID NO: 86662 - RNA, 19 nt, Artificial Sequence
  Description of Artificial Sequence: Synthetic oligonucleotide
  Sense strand starting at position 2617 of SEQ ID NO: 1089
uaggcaugguaccaggaaa

SEQ ID NO: 86663 - RNA, 19 nt, Artificial Sequence
  Description of Artificial Sequence: Synthetic oligonucleotide
  Antisense strand to SEQ ID NO: 86582
uuuccugguaccaugccua

SEQ ID NO: 86664 - RNA, 19 nt, Artificial Sequence
  Description of Artificial Sequence: Synthetic oligonucleotide
  Sense strand starting at position 2554 of SEQ ID NO: 1089
uguauaaauuuccagaaag

SEQ ID NO: 86665 - RNA, 19 nt, Artificial Sequence
  Description of Artificial Sequence: Synthetic oligonucleotide
  Antisense strand to SEQ ID NO: 86584
cuuucuggaaauuuauaca

SEQ ID NO: 86666 - RNA, 19 nt, Artificial Sequence
  Description of Artificial Sequence: Synthetic oligonucleotide
  Sense strand starting at position 2525 of SEQ ID NO: 1089
agaagcauguugccucauu

SEQ ID NO: 86667 - RNA, 19 nt, Artificial Sequence
  Description of Artificial Sequence: Synthetic oligonucleotide
  Antisense strand to SEQ ID NO: 86586
aaugaggcaacaugcuucu

SEQ ID NO: 86668 - RNA, 19 nt, Artificial Sequence
  Description of Artificial Sequence: Synthetic oligonucleotide
  Sense strand starting at position 2514 of SEQ ID NO: 1089
uuaaauagugcagaagcau

SEQ ID NO: 86669 - RNA, 19 nt, Artificial Sequence
  Description of Artificial Sequence: Synthetic oligonucleotide
  Antisense strand to SEQ ID NO: 86588
augcuucugcacuauuuaa

SEQ ID NO: 86670 - RNA, 19 nt, Artificial Sequence
  Description of Artificial Sequence: Synthetic oligonucleotide
  Sense strand starting at position 2510 of SEQ ID NO: 1089
cuuauuaaauagugcagaa

SEQ ID NO: 86671 - RNA, 19 nt, Artificial Sequence
  Description of Artificial Sequence: Synthetic oligonucleotide
  Antisense strand to SEQ ID NO: 86590
uucugcacuauuuaauaag

SEQ ID NO: 86672 - RNA, 19 nt, Artificial Sequence
  Description of Artificial Sequence: Synthetic oligonucleotide
  Sense strand starting at position 2488 of SEQ ID NO: 1089
uuagaaacuugacuuaguu

SEQ ID NO: 86673 - RNA, 19 nt, Artificial Sequence
  Description of Artificial Sequence: Synthetic oligonucleotide
  Antisense strand to SEQ ID NO: 86592
aacuaagucaaguuucuaa

SEQ ID NO: 86674 - RNA, 19 nt, Artificial Sequence
  Description of Artificial Sequence: Synthetic oligonucleotide
  Sense strand starting at position 2405 of SEQ ID NO: 1089
gugaucgcucgagaucaga

SEQ ID NO: 86675 - RNA, 19 nt, Artificial Sequence
  Description of Artificial Sequence: Synthetic oligonucleotide
  Antisense strand to SEQ ID NO: 86594
ucugaucucgagcgaucac

SEQ ID NO: 86676 - RNA, 19 nt, Artificial Sequence
  Description of Artificial Sequence: Synthetic oligonucleotide
  Sense strand starting at position 2404 of SEQ ID NO: 1089
agugaucgcucgagaucag

SEQ ID NO: 86677 - RNA, 19 nt, Artificial Sequence
  Description of Artificial Sequence: Synthetic oligonucleotide
  Antisense strand to SEQ ID NO: 86596
cugaucucgagcgaucacu

SEQ ID NO: 86678 - RNA, 19 nt, Artificial Sequence
  Description of Artificial Sequence: Synthetic oligonucleotide
  Sense strand starting at position 2403 of SEQ ID NO: 1089
gagugaucgcucgagauca

SEQ ID NO: 86679 - RNA, 19 nt, Artificial Sequence
  Description of Artificial Sequence: Synthetic oligonucleotide
  Antisense strand to SEQ ID NO: 86598
ugaucucgagcgaucacuc

SEQ ID NO: 86680 - RNA, 19 nt, Artificial Sequence
  Description of Artificial Sequence: Synthetic oligonucleotide
  Sense strand starting at position 2400 of SEQ ID NO: 1089
ugggagugaucgcucgaga

SEQ ID NO: 86681 - RNA, 19 nt, Artificial Sequence
  Description of Artificial Sequence: Synthetic oligonucleotide
  Antisense strand to SEQ ID NO: 86600
ucucgagcgaucacuccca

SEQ ID NO: 86682 - RNA, 19 nt, Artificial Sequence
  Description of Artificial Sequence: Synthetic oligonucleotide
  Sense strand starting at position 2289 of SEQ ID NO: 1089
guucgaaucguagcuucuu

SEQ ID NO: 86683 - RNA, 19 nt, Artificial Sequence
  Description of Artificial Sequence: Synthetic oligonucleotide
  Antisense strand to SEQ ID NO: 86602
aagaagcuacgauucgaac

SEQ ID NO: 86684 - RNA, 19 nt, Artificial Sequence
  Description of Artificial Sequence: Synthetic oligonucleotide
  Sense strand starting at position 2246 of SEQ ID NO: 1089
guauguauuugacaaugag

SEQ ID NO: 86685 - RNA, 19 nt, Artificial Sequence
  Description of Artificial Sequence: Synthetic oligonucleotide
  Antisense strand to SEQ ID NO: 86604
cucauugucaaauacauac

SEQ ID NO: 86686 - RNA, 19 nt, Artificial Sequence
  Description of Artificial Sequence: Synthetic oligonucleotide
  Sense strand starting at position 2244 of SEQ ID NO: 1089
caguauguauuugacaaug

SEQ ID NO: 86687 - RNA, 19 nt, Artificial Sequence
  Description of Artificial Sequence: Synthetic oligonucleotide
  Antisense strand to SEQ ID NO: 86606
cauugucaaauacauacug

SEQ ID NO: 86688 - RNA, 19 nt, Artificial Sequence
  Description of Artificial Sequence: Synthetic oligonucleotide
  Sense strand starting at position 2189 of SEQ ID NO: 1089
cugguauuguccucgguca

SEQ ID NO: 86689 - RNA, 19 nt, Artificial Sequence
  Description of Artificial Sequence: Synthetic oligonucleotide
  Antisense strand to SEQ ID NO: 86608
ugaccgaggacaauaccag

SEQ ID NO: 86690 - RNA, 19 nt, Artificial Sequence
  Description of Artificial Sequence: Synthetic oligonucleotide
  Sense strand starting at position 1990 of SEQ ID NO: 1089
gcgcgcaagcguccuuaaa

SEQ ID NO: 86691 - RNA, 19 nt, Artificial Sequence
  Description of Artificial Sequence: Synthetic oligonucleotide
  Antisense strand to SEQ ID NO: 86610
uuuaaggacgcuugcgcgc

SEQ ID NO: 86692 - RNA, 19 nt, Artificial Sequence
  Description of Artificial Sequence: Synthetic oligonucleotide
  Sense strand starting at position 1684 of SEQ ID NO: 1089
ggagugagugcgugugaaa

SEQ ID NO: 86693 - RNA, 19 nt, Artificial Sequence
  Description of Artificial Sequence: Synthetic oligonucleotide
  Antisense strand to SEQ ID NO: 86612
uuucacacgcacucacucc

SEQ ID NO: 86694 - RNA, 19 nt, Artificial Sequence
  Description of Artificial Sequence: Synthetic oligonucleotide
  Sense strand starting at position 1453 of SEQ ID NO: 1089
caauauuuauucgagagua

SEQ ID NO: 86695 - RNA, 19 nt, Artificial Sequence
  Description of Artificial Sequence: Synthetic oligonucleotide
  Antisense strand to SEQ ID NO: 86614
uacucucgaauaaauauug

SEQ ID NO: 86696 - RNA, 19 nt, Artificial Sequence
  Description of Artificial Sequence: Synthetic oligonucleotide
  Sense strand starting at position 1450 of SEQ ID NO: 1089
gcgcaauauuuauucgaga

SEQ ID NO: 86697 - RNA, 19 nt, Artificial Sequence
  Description of Artificial Sequence: Synthetic oligonucleotide
  Antisense strand to SEQ ID NO: 86616
ucucgaauaaauauugcgc

SEQ ID NO: 86698 - RNA, 19 nt, Artificial Sequence
  Description of Artificial Sequence: Synthetic oligonucleotide
  Sense strand starting at position 1444 of SEQ ID NO: 1089
gcaacugcgcaauauuuau

SEQ ID NO: 86699 - RNA, 19 nt, Artificial Sequence
  Description of Artificial Sequence: Synthetic oligonucleotide
  Antisense strand to SEQ ID NO: 86618
auaaauauugcgcaguugc

SEQ ID NO: 86700 - RNA, 19 nt, Artificial Sequence
  Description of Artificial Sequence: Synthetic oligonucleotide
  Sense strand starting at position 1441 of SEQ ID NO: 1089
accgcaacugcgcaauauu

SEQ ID NO: 86701 - RNA, 19 nt, Artificial Sequence
  Description of Artificial Sequence: Synthetic oligonucleotide
  Antisense strand to SEQ ID NO: 86620
aauauugcgcaguugcggu

SEQ ID NO: 86702 - RNA, 19 nt, Artificial Sequence
  Description of Artificial Sequence: Synthetic oligonucleotide
  Sense strand starting at position 1360 of SEQ ID NO: 1089
gcgguaccugcuuaagcaa

SEQ ID NO: 86703 - RNA, 19 nt, Artificial Sequence
  Description of Artificial Sequence: Synthetic oligonucleotide
  Antisense strand to SEQ ID NO: 86622
uugcuuaagcagguaccgc

SEQ ID NO: 86704 - RNA, 19 nt, Artificial Sequence
  Description of Artificial Sequence: Synthetic oligonucleotide
  Sense strand starting at position 1338 of SEQ ID NO: 1089
ggguaucagaccugccaga

SEQ ID NO: 86705 - RNA, 19 nt, Artificial Sequence
  Description of Artificial Sequence: Synthetic oligonucleotide
  Antisense strand to SEQ ID NO: 86624
ucuggcaggucugauaccc

SEQ ID NO: 86706 - RNA, 19 nt, Artificial Sequence
  Description of Artificial Sequence: Synthetic oligonucleotide
  Sense strand starting at position 1325 of SEQ ID NO: 1089
ucccuaaugacacggguau

SEQ ID NO: 86707 - RNA, 19 nt, Artificial Sequence
  Description of Artificial Sequence: Synthetic oligonucleotide
  Antisense strand to SEQ ID NO: 86626
auacccgugucauuaggga

SEQ ID NO: 86708 - RNA, 19 nt, Artificial Sequence
  Description of Artificial Sequence: Synthetic oligonucleotide
  Sense strand starting at position 1308 of SEQ ID NO: 1089
ggucauaucuguccauuuc

SEQ ID NO: 86709 - RNA, 19 nt, Artificial Sequence
  Description of Artificial Sequence: Synthetic oligonucleotide
  Antisense strand to SEQ ID NO: 86628
gaaauggacagauaugacc

SEQ ID NO: 86710 - RNA, 19 nt, Artificial Sequence
  Description of Artificial Sequence: Synthetic oligonucleotide
  Sense strand starting at position 1306 of SEQ ID NO: 1089
gcggucauaucuguccauu

SEQ ID NO: 86711 - RNA, 19 nt, Artificial Sequence
  Description of Artificial Sequence: Synthetic oligonucleotide
  Antisense strand to SEQ ID NO: 86630
aauggacagauaugaccgc

SEQ ID NO: 86712 - RNA, 19 nt, Artificial Sequence
  Description of Artificial Sequence: Synthetic oligonucleotide
  Sense strand starting at position 1305 of SEQ ID NO: 1089
ggcggucauaucuguccau

SEQ ID NO: 86713 - RNA, 19 nt, Artificial Sequence
  Description of Artificial Sequence: Synthetic oligonucleotide
  Antisense strand to SEQ ID NO: 86632
auggacagauaugaccgcc

SEQ ID NO: 86714 - RNA, 19 nt, Artificial Sequence
  Description of Artificial Sequence: Synthetic oligonucleotide
  Sense strand starting at position 1296 of SEQ ID NO: 1089
cucauuucuggcggucaua

SEQ ID NO: 86715 - RNA, 19 nt, Artificial Sequence
  Description of Artificial Sequence: Synthetic oligonucleotide
  Antisense strand to SEQ ID NO: 86634
uaugaccgccagaaaugag

SEQ ID NO: 86716 - RNA, 19 nt, Artificial Sequence
  Description of Artificial Sequence: Synthetic oligonucleotide
  Sense strand starting at position 1295 of SEQ ID NO: 1089
acucauuucuggcggucau

SEQ ID NO: 86717 - RNA, 19 nt, Artificial Sequence
  Description of Artificial Sequence: Synthetic oligonucleotide
  Antisense strand to SEQ ID NO: 86636
augaccgccagaaaugagu

SEQ ID NO: 86718 - RNA, 19 nt, Artificial Sequence
  Description of Artificial Sequence: Synthetic oligonucleotide
  Sense strand starting at position 1253 of SEQ ID NO: 1089
ucaacauagcauugaggau

SEQ ID NO: 86719 - RNA, 19 nt, Artificial Sequence
  Description of Artificial Sequence: Synthetic oligonucleotide
  Antisense strand to SEQ ID NO: 86638
auccucaaugcuauguuga

SEQ ID NO: 86720 - RNA, 19 nt, Artificial Sequence
  Description of Artificial Sequence: Synthetic oligonucleotide
  Sense strand starting at position 1207 of SEQ ID NO: 1089
uauguuugagcacaggauu

SEQ ID NO: 86721 - RNA, 19 nt, Artificial Sequence
  Description of Artificial Sequence: Synthetic oligonucleotide
  Antisense strand to SEQ ID NO: 86640
aauccugugcucaaacaua

SEQ ID NO: 86722 - RNA, 19 nt, Artificial Sequence
  Description of Artificial Sequence: Synthetic oligonucleotide
  Sense strand starting at position 1202 of SEQ ID NO: 1089
aaagguauguuugagcaca

SEQ ID NO: 86723 - RNA, 19 nt, Artificial Sequence
  Description of Artificial Sequence: Synthetic oligonucleotide
  Antisense strand to SEQ ID NO: 86642
ugugcucaaacauaccuuu

SEQ ID NO: 86724 - RNA, 19 nt, Artificial Sequence
  Description of Artificial Sequence: Synthetic oligonucleotide
  Sense strand starting at position 1116 of SEQ ID NO: 1089
aacugagcugcaugggaua

SEQ ID NO: 86725 - RNA, 19 nt, Artificial Sequence
  Description of Artificial Sequence: Synthetic oligonucleotide
  Antisense strand to SEQ ID NO: 86644
uaucccaugcagcucaguu

SEQ ID NO: 86726 - RNA, 19 nt, Artificial Sequence
  Description of Artificial Sequence: Synthetic oligonucleotide
  Sense strand starting at position 970 of SEQ ID NO: 1089
cacagagauucccaaagug

SEQ ID NO: 86727 - RNA, 19 nt, Artificial Sequence
  Description of Artificial Sequence: Synthetic oligonucleotide
  Antisense strand to SEQ ID NO: 86646
cacuuugggaaucucugug

SEQ ID NO: 86728 - RNA, 19 nt, Artificial Sequence
  Description of Artificial Sequence: Synthetic oligonucleotide
  Sense strand starting at position 776 of SEQ ID NO: 1089
cauuaaaugugguagagga

SEQ ID NO: 86729 - RNA, 19 nt, Artificial Sequence
  Description of Artificial Sequence: Synthetic oligonucleotide
  Antisense strand to SEQ ID NO: 86648
uccucuaccacauuuaaug

SEQ ID NO: 86730 - RNA, 19 nt, Artificial Sequence
  Description of Artificial Sequence: Synthetic oligonucleotide
  Sense strand starting at position 774 of SEQ ID NO: 1089
gacauuaaaugugguagag

SEQ ID NO: 86731 - RNA, 19 nt, Artificial Sequence
  Description of Artificial Sequence: Synthetic oligonucleotide
  Antisense strand to SEQ ID NO: 86650
cucuaccacauuuaauguc

SEQ ID NO: 86732 - RNA, 19 nt, Artificial Sequence
  Description of Artificial Sequence: Synthetic oligonucleotide
  Sense strand starting at position 773 of SEQ ID NO: 1089
agacauuaaaugugguaga

SEQ ID NO: 86733 - RNA, 19 nt, Artificial Sequence
  Description of Artificial Sequence: Synthetic oligonucleotide
  Antisense strand to SEQ ID NO: 86652
ucuaccacauuuaaugucu

SEQ ID NO: 86734 - RNA, 19 nt, Artificial Sequence
  Description of Artificial Sequence: Synthetic oligonucleotide
  Sense strand starting at position 759 of SEQ ID NO: 1089
uccuuuauguaggaagaca

SEQ ID NO: 86735 - RNA, 19 nt, Artificial Sequence
  Description of Artificial Sequence: Synthetic oligonucleotide
  Antisense strand to SEQ ID NO: 86654
ugucuuccuacauaaagga

SEQ ID NO: 86736 - RNA, 19 nt, Artificial Sequence
  Description of Artificial Sequence: Synthetic oligonucleotide
  Sense strand starting at position 754 of SEQ ID NO: 1089
acagauccuuuauguagga

SEQ ID NO: 86737 - RNA, 19 nt, Artificial Sequence
  Description of Artificial Sequence: Synthetic oligonucleotide
  Antisense strand to SEQ ID NO: 86656
uccuacauaaaggaucugu

SEQ ID NO: 86738 - RNA, 19 nt, Artificial Sequence
  Description of Artificial Sequence: Synthetic oligonucleotide
  Sense strand starting at position 750 of SEQ ID NO: 1089
cugcacagauccuuuaugu

SEQ ID NO: 86739 - RNA, 19 nt, Artificial Sequence
  Description of Artificial Sequence: Synthetic oligonucleotide
  Antisense strand to SEQ ID NO: 86658
acauaaaggaucugugcag

SEQ ID NO: 86740 - RNA, 19 nt, Artificial Sequence
  Description of Artificial Sequence: Synthetic oligonucleotide
  Sense strand starting at position 3910 of SEQ ID NO: 1088
aagaguaugugguacaaag

SEQ ID NO: 86741 - RNA, 19 nt, Artificial Sequence
  Description of Artificial Sequence: Synthetic oligonucleotide
  Antisense strand to SEQ ID NO: 86660
cuuuguaccacauacucuu

SEQ ID NO: 86742 - RNA, 19 nt, Artificial Sequence
  Description of Artificial Sequence: Synthetic oligonucleotide
  Sense strand starting at position 3908 of SEQ ID NO: 1088
agaagaguaugugguacaa

SEQ ID NO: 86743 - RNA, 19 nt, Artificial Sequence
  Description of Artificial Sequence: Synthetic oligonucleotide
  Antisense strand to SEQ ID NO: 86662
uuguaccacauacucuucu

SEQ ID NO: 86744 - RNA, 19 nt, Artificial Sequence
  Description of Artificial Sequence: Synthetic oligonucleotide
  Sense strand starting at position 3905 of SEQ ID NO: 1088
ggaagaagaguauguggua

SEQ ID NO: 86745 - RNA, 19 nt, Artificial Sequence
  Description of Artificial Sequence: Synthetic oligonucleotide
  Antisense strand to SEQ ID NO: 86664
uaccacauacucuucuucc

SEQ ID NO: 86746 - RNA, 19 nt, Artificial Sequence
  Description of Artificial Sequence: Synthetic oligonucleotide
  Sense strand starting at position 3890 of SEQ ID NO: 1088
gggcauaggauauguggaa

SEQ ID NO: 86747 - RNA, 19 nt, Artificial Sequence
  Description of Artificial Sequence: Synthetic oligonucleotide
  Antisense strand to SEQ ID NO: 86666
uuccacauauccuaugccc

SEQ ID NO: 86748 - RNA, 19 nt, Artificial Sequence
  Description of Artificial Sequence: Synthetic oligonucleotide
  Sense strand starting at position 3878 of SEQ ID NO: 1088
ccucauuugccagggcaua

SEQ ID NO: 86749 - RNA, 19 nt, Artificial Sequence
  Description of Artificial Sequence: Synthetic oligonucleotide
  Antisense strand to SEQ ID NO: 86668
uaugcccuggcaaaugagg

SEQ ID NO: 86750 - RNA, 19 nt, Artificial Sequence
  Description of Artificial Sequence: Synthetic oligonucleotide
  Sense strand starting at position 3867 of SEQ ID NO: 1088
gcaguaaacugccucauuu

SEQ ID NO: 86751 - RNA, 19 nt, Artificial Sequence
  Description of Artificial Sequence: Synthetic oligonucleotide
  Antisense strand to SEQ ID NO: 86670
aaaugaggcaguuuacugc

SEQ ID NO: 86752 - RNA, 19 nt, Artificial Sequence
  Description of Artificial Sequence: Synthetic oligonucleotide
  Sense strand starting at position 3803 of SEQ ID NO: 1088
gggugaacaucccaggaga

SEQ ID NO: 86753 - RNA, 19 nt, Artificial Sequence
  Description of Artificial Sequence: Synthetic oligonucleotide
  Antisense strand to SEQ ID NO: 86672
ucuccugggauguucaccc

SEQ ID NO: 86754 - RNA, 19 nt, Artificial Sequence
  Description of Artificial Sequence: Synthetic oligonucleotide
  Sense strand starting at position 3791 of SEQ ID NO: 1088
guugauaauucagggugaa

SEQ ID NO: 86755 - RNA, 19 nt, Artificial Sequence
  Description of Artificial Sequence: Synthetic oligonucleotide
  Antisense strand to SEQ ID NO: 86674
uucacccugaauuaucaac

SEQ ID NO: 86756 - RNA, 19 nt, Artificial Sequence
  Description of Artificial Sequence: Synthetic oligonucleotide
  Sense strand starting at position 3781 of SEQ ID NO: 1088
ugauucucauguugauaau

SEQ ID NO: 86757 - RNA, 19 nt, Artificial Sequence
  Description of Artificial Sequence: Synthetic oligonucleotide
  Antisense strand to SEQ ID NO: 86676
auuaucaacaugagaauca

SEQ ID NO: 86758 - RNA, 19 nt, Artificial Sequence
  Description of Artificial Sequence: Synthetic oligonucleotide
  Sense strand starting at position 2819 of SEQ ID NO: 1088
ccaagauagcgccaucaca

SEQ ID NO: 86759 - RNA, 19 nt, Artificial Sequence
  Description of Artificial Sequence: Synthetic oligonucleotide
  Antisense strand to SEQ ID NO: 86678
ugugauggcgcuaucuugg

SEQ ID NO: 86760 - RNA, 19 nt, Artificial Sequence
  Description of Artificial Sequence: Synthetic oligonucleotide
  Sense strand starting at position 2564 of SEQ ID NO: 1088
gguagucaaagaugaauua

SEQ ID NO: 86761 - RNA, 19 nt, Artificial Sequence
  Description of Artificial Sequence: Synthetic oligonucleotide
  Antisense strand to SEQ ID NO: 86680
uaauucaucuuugacuacc

SEQ ID NO: 86762 - RNA, 19 nt, Artificial Sequence
  Description of Artificial Sequence: Synthetic oligonucleotide
  Sense strand starting at position 2498 of SEQ ID NO: 1088
ugcaguuauuugcugccua

SEQ ID NO: 86763 - RNA, 19 nt, Artificial Sequence
  Description of Artificial Sequence: Synthetic oligonucleotide
  Antisense strand to SEQ ID NO: 86682
uaggcagcaaauaacugca

SEQ ID NO: 86764 - RNA, 19 nt, Artificial Sequence
  Description of Artificial Sequence: Synthetic oligonucleotide
  Sense strand starting at position 2240 of SEQ ID NO: 1088
ggcggauuaccugaccuca

SEQ ID NO: 86765 - RNA, 19 nt, Artificial Sequence
  Description of Artificial Sequence: Synthetic oligonucleotide
  Antisense strand to SEQ ID NO: 86684
ugaggucagguaauccgcc

SEQ ID NO: 86766 - RNA, 19 nt, Artificial Sequence
  Description of Artificial Sequence: Synthetic oligonucleotide
  Sense strand starting at position 2158 of SEQ ID NO: 1088
cuuuacugccuagagauga

SEQ ID NO: 86767 - RNA, 19 nt, Artificial Sequence
  Description of Artificial Sequence: Synthetic oligonucleotide
  Antisense strand to SEQ ID NO: 86686
ucaucucuaggcaguaaag

SEQ ID NO: 86768 - RNA, 19 nt, Artificial Sequence
  Description of Artificial Sequence: Synthetic oligonucleotide
  Sense strand starting at position 2156 of SEQ ID NO: 1088
ggcuuuacugccuagagau

SEQ ID NO: 86769 - RNA, 19 nt, Artificial Sequence
  Description of Artificial Sequence: Synthetic oligonucleotide
  Antisense strand to SEQ ID NO: 86688
aucucuaggcaguaaagcc

SEQ ID NO: 86770 - RNA, 19 nt, Artificial Sequence
  Description of Artificial Sequence: Synthetic oligonucleotide
  Sense strand starting at position 2155 of SEQ ID NO: 1088
gggcuuuacugccuagaga

SEQ ID NO: 86771 - RNA, 19 nt, Artificial Sequence
  Description of Artificial Sequence: Synthetic oligonucleotide
  Antisense strand to SEQ ID NO: 86690
ucucuaggcaguaaagccc

SEQ ID NO: 86772 - RNA, 19 nt, Artificial Sequence
  Description of Artificial Sequence: Synthetic oligonucleotide
  Sense strand starting at position 2031 of SEQ ID NO: 1088
ugcaauucuccaggaacaa

SEQ ID NO: 86773 - RNA, 19 nt, Artificial Sequence
  Description of Artificial Sequence: Synthetic oligonucleotide
  Antisense strand to SEQ ID NO: 86692
uuguuccuggagaauugca

SEQ ID NO: 86774 - RNA, 19 nt, Artificial Sequence
  Description of Artificial Sequence: Synthetic oligonucleotide
  Sense strand starting at position 2028 of SEQ ID NO: 1088
uccugcaauucuccaggaa

SEQ ID NO: 86775 - RNA, 19 nt, Artificial Sequence
  Description of Artificial Sequence: Synthetic oligonucleotide
  Antisense strand to SEQ ID NO: 86694
uuccuggagaauugcagga

SEQ ID NO: 86776 - RNA, 19 nt, Artificial Sequence
  Description of Artificial Sequence: Synthetic oligonucleotide
  Sense strand starting at position 1997 of SEQ ID NO: 1088
aggucacaauucuaaguuu

SEQ ID NO: 86777 - RNA, 19 nt, Artificial Sequence
  Description of Artificial Sequence: Synthetic oligonucleotide
  Antisense strand to SEQ ID NO: 86696
aaacuuagaauugugaccu

SEQ ID NO: 86778 - RNA, 19 nt, Artificial Sequence
  Description of Artificial Sequence: Synthetic oligonucleotide
  Sense strand starting at position 1989 of SEQ ID NO: 1088
cugcaaugaggucacaauu

SEQ ID NO: 86779 - RNA, 19 nt, Artificial Sequence
  Description of Artificial Sequence: Synthetic oligonucleotide
  Antisense strand to SEQ ID NO: 86698
aauugugaccucauugcag

SEQ ID NO: 86780 - RNA, 19 nt, Artificial Sequence
  Description of Artificial Sequence: Synthetic oligonucleotide
  Sense strand starting at position 874 of SEQ ID NO: 1088
cuaccuggauuguuacauu

SEQ ID NO: 86781 - RNA, 19 nt, Artificial Sequence
  Description of Artificial Sequence: Synthetic oligonucleotide
  Antisense strand to SEQ ID NO: 86700
aauguaacaauccagguag

SEQ ID NO: 86782 - RNA, 19 nt, Artificial Sequence
  Description of Artificial Sequence: Synthetic oligonucleotide
  Sense strand starting at position 830 of SEQ ID NO: 1088
aagugaauucucuggcgca

SEQ ID NO: 86783 - RNA, 19 nt, Artificial Sequence
  Description of Artificial Sequence: Synthetic oligonucleotide
  Antisense strand to SEQ ID NO: 86702
ugcgccagagaauucacuu

SEQ ID NO: 86784 - RNA, 19 nt, Artificial Sequence
  Description of Artificial Sequence: Synthetic oligonucleotide
  Sense strand starting at position 775 of SEQ ID NO: 1088
gcccauguacuaugcuaaa

SEQ ID NO: 86785 - RNA, 19 nt, Artificial Sequence
  Description of Artificial Sequence: Synthetic oligonucleotide
  Antisense strand to SEQ ID NO: 86704
uuuagcauaguacaugggc

SEQ ID NO: 86786 - RNA, 19 nt, Artificial Sequence
  Description of Artificial Sequence: Synthetic oligonucleotide
  Sense strand starting at position 636 of SEQ ID NO: 1088
auaguaagcuaguagaaau

SEQ ID NO: 86787 - RNA, 19 nt, Artificial Sequence
  Description of Artificial Sequence: Synthetic oligonucleotide
  Antisense strand to SEQ ID NO: 86706
auuucuacuagcuuacuau

SEQ ID NO: 86788 - RNA, 19 nt, Artificial Sequence
  Description of Artificial Sequence: Synthetic oligonucleotide
  Sense strand starting at position 633 of SEQ ID NO: 1088
augauaguaagcuaguaga

SEQ ID NO: 86789 - RNA, 19 nt, Artificial Sequence
  Description of Artificial Sequence: Synthetic oligonucleotide
  Antisense strand to SEQ ID NO: 86708
ucuacuagcuuacuaucau

SEQ ID NO: 86790 - RNA, 19 nt, Artificial Sequence
  Description of Artificial Sequence: Synthetic oligonucleotide
  Sense strand starting at position 631 of SEQ ID NO: 1088
ccaugauaguaagcuagua

SEQ ID NO: 86791 - RNA, 19 nt, Artificial Sequence
  Description of Artificial Sequence: Synthetic oligonucleotide
  Antisense strand to SEQ ID NO: 86710
uacuagcuuacuaucaugg

SEQ ID NO: 86792 - RNA, 19 nt, Artificial Sequence
  Description of Artificial Sequence: Synthetic oligonucleotide
  Sense strand starting at position 628 of SEQ ID NO: 1088
auuccaugauaguaagcua

SEQ ID NO: 86793 - RNA, 19 nt, Artificial Sequence
  Description of Artificial Sequence: Synthetic oligonucleotide
  Antisense strand to SEQ ID NO: 86712
uagcuuacuaucauggaau

SEQ ID NO: 86794 - RNA, 19 nt, Artificial Sequence
  Description of Artificial Sequence: Synthetic oligonucleotide
  Sense strand starting at position 525 of SEQ ID NO: 1088
gaaagaugcuuggaacaca

SEQ ID NO: 86795 - RNA, 19 nt, Artificial Sequence
  Description of Artificial Sequence: Synthetic oligonucleotide
  Antisense strand to SEQ ID NO: 86714
uguguuccaagcaucuuuc

SEQ ID NO: 86796 - RNA, 19 nt, Artificial Sequence
  Description of Artificial Sequence: Synthetic oligonucleotide
  Sense strand starting at position 507 of SEQ ID NO: 1088
uggauucuuucucauagag

SEQ ID NO: 86797 - RNA, 19 nt, Artificial Sequence
  Description of Artificial Sequence: Synthetic oligonucleotide
  Antisense strand to SEQ ID NO: 86716
cucuaugagaaagaaucca

SEQ ID NO: 86798 - RNA, 19 nt, Artificial Sequence
  Description of Artificial Sequence: Synthetic oligonucleotide
  Sense strand starting at position 505 of SEQ ID NO: 1088
auuggauucuuucucauag

SEQ ID NO: 86799 - RNA, 19 nt, Artificial Sequence
  Description of Artificial Sequence: Synthetic oligonucleotide
  Antisense strand to SEQ ID NO: 86718
cuaugagaaagaauccaau

SEQ ID NO: 86800 - RNA, 19 nt, Artificial Sequence
  Description of Artificial Sequence: Synthetic oligonucleotide
  Sense strand starting at position 490 of SEQ ID NO: 1088
gccugauagcuguagauug

SEQ ID NO: 86801 - RNA, 19 nt, Artificial Sequence
  Description of Artificial Sequence: Synthetic oligonucleotide
  Antisense strand to SEQ ID NO: 86720
caaucuacagcuaucaggc

SEQ ID NO: 86802 - RNA, 19 nt, Artificial Sequence
  Description of Artificial Sequence: Synthetic oligonucleotide
  Sense strand starting at position 488 of SEQ ID NO: 1088
uggccugauagcuguagau

SEQ ID NO: 86803 - RNA, 19 nt, Artificial Sequence
  Description of Artificial Sequence: Synthetic oligonucleotide
  Antisense strand to SEQ ID NO: 86722
aucuacagcuaucaggcca

SEQ ID NO: 86804 - RNA, 19 nt, Artificial Sequence
  Description of Artificial Sequence: Synthetic oligonucleotide
  Sense strand starting at position 482 of SEQ ID NO: 1088
aaagguuggccugauagcu

SEQ ID NO: 86805 - RNA, 19 nt, Artificial Sequence
  Description of Artificial Sequence: Synthetic oligonucleotide
  Antisense strand to SEQ ID NO: 86724
agcuaucaggccaaccuuu

SEQ ID NO: 86806 - RNA, 19 nt, Artificial Sequence
  Description of Artificial Sequence: Synthetic oligonucleotide
  Sense strand starting at position 479 of SEQ ID NO: 1088
cuuaaagguuggccugaua

SEQ ID NO: 86807 - RNA, 19 nt, Artificial Sequence
  Description of Artificial Sequence: Synthetic oligonucleotide
  Antisense strand to SEQ ID NO: 86726
uaucaggccaaccuuuaag

SEQ ID NO: 86808 - RNA, 19 nt, Artificial Sequence
  Description of Artificial Sequence: Synthetic oligonucleotide
  Sense strand starting at position 415 of SEQ ID NO: 1088
ggcucuggauucuacagaa

SEQ ID NO: 86809 - RNA, 19 nt, Artificial Sequence
  Description of Artificial Sequence: Synthetic oligonucleotide
  Antisense strand to SEQ ID NO: 86728
uucuguagaauccagagcc

SEQ ID NO: 86810 - RNA, 19 nt, Artificial Sequence
  Description of Artificial Sequence: Synthetic oligonucleotide
  Sense strand starting at position 295 of SEQ ID NO: 1088
ggccuagugucucccauuu

SEQ ID NO: 86811 - RNA, 19 nt, Artificial Sequence
  Description of Artificial Sequence: Synthetic oligonucleotide
  Antisense strand to SEQ ID NO: 86730
aaaugggagacacuaggcc

SEQ ID NO: 86812 - RNA, 19 nt, Artificial Sequence
  Description of Artificial Sequence: Synthetic oligonucleotide
  Sense strand starting at position 176 of SEQ ID NO: 1088
cagacuacuucugcagaga

SEQ ID NO: 86813 - RNA, 19 nt, Artificial Sequence
  Description of Artificial Sequence: Synthetic oligonucleotide
  Antisense strand to SEQ ID NO: 86732
ucucugcagaaguagucug

SEQ ID NO: 86814 - RNA, 19 nt, Artificial Sequence
  Description of Artificial Sequence: Synthetic oligonucleotide
  Sense strand starting at position 148 of SEQ ID NO: 1088
ucuaucauguugucaaagu

SEQ ID NO: 86815 - RNA, 19 nt, Artificial Sequence
  Description of Artificial Sequence: Synthetic oligonucleotide
  Antisense strand to SEQ ID NO: 86734
acuuugacaacaugauaga

SEQ ID NO: 86816 - RNA, 19 nt, Artificial Sequence
  Description of Artificial Sequence: Synthetic oligonucleotide
  Sense strand starting at position 102 of SEQ ID NO: 1088
ggcuuuaagcuggaucuuu

SEQ ID NO: 86817 - RNA, 19 nt, Artificial Sequence
  Description of Artificial Sequence: Synthetic oligonucleotide
  Antisense strand to SEQ ID NO: 86736
aaagauccagcuuaaagcc

SEQ ID NO: 86818 - RNA, 19 nt, Artificial Sequence
  Description of Artificial Sequence: Synthetic oligonucleotide
  Sense strand starting at position 17 of SEQ ID NO: 1088
cccugagguagcugaauca

SEQ ID NO: 86819 - RNA, 19 nt, Artificial Sequence
  Description of Artificial Sequence: Synthetic oligonucleotide
  Antisense strand to SEQ ID NO: 86738
ugauucagcuaccucaggg

SEQ ID NO: 86820 - RNA, 19 nt, Artificial Sequence
  Description of Artificial Sequence: Synthetic oligonucleotide
  Sense strand starting at position 35 of SEQ ID NO: 1090
uuccaucaggccuguauaa

SEQ ID NO: 86821 - RNA, 19 nt, Artificial Sequence
  Description of Artificial Sequence: Synthetic oligonucleotide
  Antisense strand to SEQ ID NO: 86740
uuauacaggccugauggaa

SEQ ID NO: 86822 - RNA, 19 nt, Artificial Sequence
  Description of Artificial Sequence: Synthetic oligonucleotide
  Sense strand starting at position 37 of SEQ ID NO: 1090
ccaucaggccuguauaaau

SEQ ID NO: 86823 - RNA, 19 nt, Artificial Sequence
  Description of Artificial Sequence: Synthetic oligonucleotide
  Antisense strand to SEQ ID NO: 86742
auuuauacaggccugaugg

SEQ ID NO: 86824 - RNA, 19 nt, Artificial Sequence
  Description of Artificial Sequence: Synthetic oligonucleotide
  Sense strand starting at position 287 of SEQ ID NO: 1090
uccauacugguacgauaau

SEQ ID NO: 86825 - RNA, 19 nt, Artificial Sequence
  Description of Artificial Sequence: Synthetic oligonucleotide
  Antisense strand to SEQ ID NO: 86744
auuaucguaccaguaugga

SEQ ID NO: 86826 - RNA, 19 nt, Artificial Sequence
  Description of Artificial Sequence: Synthetic oligonucleotide
  Sense strand starting at position 599 of SEQ ID NO: 1090
ccugucuugccaggacaau

SEQ ID NO: 86827 - RNA, 19 nt, Artificial Sequence
  Description of Artificial Sequence: Synthetic oligonucleotide
  Antisense strand to SEQ ID NO: 86746
auuguccuggcaagacagg

SEQ ID NO: 86828 - RNA, 19 nt, Artificial Sequence
  Description of Artificial Sequence: Synthetic oligonucleotide
  Sense strand starting at position 600 of SEQ ID NO: 1090
cugucuugccaggacaaua

SEQ ID NO: 86829 - RNA, 19 nt, Artificial Sequence
  Description of Artificial Sequence: Synthetic oligonucleotide
  Antisense strand to SEQ ID NO: 86748
uauuguccuggcaagacag

SEQ ID NO: 86830 - RNA, 19 nt, Artificial Sequence
  Description of Artificial Sequence: Synthetic oligonucleotide
  Sense strand starting at position 679 of SEQ ID NO: 1090
aagaucuuucugugaugau

SEQ ID NO: 86831 - RNA, 19 nt, Artificial Sequence
  Description of Artificial Sequence: Synthetic oligonucleotide
  Antisense strand to SEQ ID NO: 86750
aucaucacagaaagaucuu

SEQ ID NO: 86832 - RNA, 19 nt, Artificial Sequence
  Description of Artificial Sequence: Synthetic oligonucleotide
  Sense strand starting at position 736 of SEQ ID NO: 1090
aguguauuaugacuugaaa

SEQ ID NO: 86833 - RNA, 19 nt, Artificial Sequence
  Description of Artificial Sequence: Synthetic oligonucleotide
  Antisense strand to SEQ ID NO: 86752
uuucaagucauaauacacu

SEQ ID NO: 86834 - RNA, 19 nt, Artificial Sequence
  Description of Artificial Sequence: Synthetic oligonucleotide
  Sense strand starting at position 808 of SEQ ID NO: 1090
guccuuguaucucucagaa

SEQ ID NO: 86835 - RNA, 19 nt, Artificial Sequence
  Description of Artificial Sequence: Synthetic oligonucleotide
  Antisense strand to SEQ ID NO: 86754
uucugagagauacaaggac

SEQ ID NO: 86836 - RNA, 19 nt, Artificial Sequence
  Description of Artificial Sequence: Synthetic oligonucleotide
  Sense strand starting at position 889 of SEQ ID NO: 1090
caggguauuuacugaauca

SEQ ID NO: 86837 - RNA, 19 nt, Artificial Sequence
  Description of Artificial Sequence: Synthetic oligonucleotide
  Antisense strand to SEQ ID NO: 86756
ugauucaguaaauacccug

SEQ ID NO: 86838 - RNA, 19 nt, Artificial Sequence
  Description of Artificial Sequence: Synthetic oligonucleotide
  Sense strand starting at position 949 of SEQ ID NO: 1090
cuugguucagugggaggua

SEQ ID NO: 86839 - RNA, 19 nt, Artificial Sequence
  Description of Artificial Sequence: Synthetic oligonucleotide
  Antisense strand to SEQ ID NO: 86758
uaccucccacugaaccaag

SEQ ID NO: 86840 - RNA, 19 nt, Artificial Sequence
  Description of Artificial Sequence: Synthetic oligonucleotide
  Sense strand starting at position 986 of SEQ ID NO: 1090
ucaggaaugaucugaguau

SEQ ID NO: 86841 - RNA, 19 nt, Artificial Sequence
  Description of Artificial Sequence: Synthetic oligonucleotide
  Antisense strand to SEQ ID NO: 86760
auacucagaucauuccuga

SEQ ID NO: 86842 - RNA, 19 nt, Artificial Sequence
  Description of Artificial Sequence: Synthetic oligonucleotide
  Sense strand starting at position 1144 of SEQ ID NO: 1090
uuauguuguauacauggga

SEQ ID NO: 86843 - RNA, 19 nt, Artificial Sequence
  Description of Artificial Sequence: Synthetic oligonucleotide
  Antisense strand to SEQ ID NO: 86762
ucccauguauacaacauaa

SEQ ID NO: 86844 - RNA, 19 nt, Artificial Sequence
  Description of Artificial Sequence: Synthetic oligonucleotide
  Sense strand starting at position 1148 of SEQ ID NO: 1090
guuguauacaugggaguca

SEQ ID NO: 86845 - RNA, 19 nt, Artificial Sequence
  Description of Artificial Sequence: Synthetic oligonucleotide
  Antisense strand to SEQ ID NO: 86764
ugacucccauguauacaac

SEQ ID NO: 86846 - RNA, 19 nt, Artificial Sequence
  Description of Artificial Sequence: Synthetic oligonucleotide
  Sense strand starting at position 1310 of SEQ ID NO: 1090
gcggaugcaccagacuuua

SEQ ID NO: 86847 - RNA, 19 nt, Artificial Sequence
  Description of Artificial Sequence: Synthetic oligonucleotide
  Antisense strand to SEQ ID NO: 86766
uaaagucuggugcauccgc

SEQ ID NO: 86848 - RNA, 19 nt, Artificial Sequence
  Description of Artificial Sequence: Synthetic oligonucleotide
  Sense strand starting at position 1334 of SEQ ID NO: 1090
aggcucucaugggauuuau

SEQ ID NO: 86849 - RNA, 19 nt, Artificial Sequence
  Description of Artificial Sequence: Synthetic oligonucleotide
  Antisense strand to SEQ ID NO: 86768
auaaaucccaugagagccu

SEQ ID NO: 86850 - RNA, 19 nt, Artificial Sequence
  Description of Artificial Sequence: Synthetic oligonucleotide
  Sense strand starting at position 1345 of SEQ ID NO: 1090
ggauuuaucuauuauggga

SEQ ID NO: 86851 - RNA, 19 nt, Artificial Sequence
  Description of Artificial Sequence: Synthetic oligonucleotide
  Antisense strand to SEQ ID NO: 86770
ucccauaauagauaaaucc

SEQ ID NO: 86852 - RNA, 19 nt, Artificial Sequence
  Description of Artificial Sequence: Synthetic oligonucleotide
  Sense strand starting at position 1436 of SEQ ID NO: 1090
ccuggaauaaggugaugua

SEQ ID NO: 86853 - RNA, 19 nt, Artificial Sequence
  Description of Artificial Sequence: Synthetic oligonucleotide
  Antisense strand to SEQ ID NO: 86772
uacaucaccuuauuccagg

SEQ ID NO: 86854 - RNA, 19 nt, Artificial Sequence
  Description of Artificial Sequence: Synthetic oligonucleotide
  Sense strand starting at position 1445 of SEQ ID NO: 1090
aggugauguagcgaagaaa

SEQ ID NO: 86855 - RNA, 19 nt, Artificial Sequence
  Description of Artificial Sequence: Synthetic oligonucleotide
  Antisense strand to SEQ ID NO: 86774
uuucuucgcuacaucaccu

SEQ ID NO: 86856 - RNA, 19 nt, Artificial Sequence
  Description of Artificial Sequence: Synthetic oligonucleotide
  Sense strand starting at position 1607 of SEQ ID NO: 1090
uagcguugcccagugacau

SEQ ID NO: 86857 - RNA, 19 nt, Artificial Sequence
  Description of Artificial Sequence: Synthetic oligonucleotide
  Antisense strand to SEQ ID NO: 86776
augucacugggcaacgcua

SEQ ID NO: 86858 - RNA, 19 nt, Artificial Sequence
  Description of Artificial Sequence: Synthetic oligonucleotide
  Sense strand starting at position 2021 of SEQ ID NO: 1090
ggcgguggccucagaguuu

SEQ ID NO: 86859 - RNA, 19 nt, Artificial Sequence
  Description of Artificial Sequence: Synthetic oligonucleotide
  Antisense strand to SEQ ID NO: 86778
aaacucugaggccaccgcc

SEQ ID NO: 86860 - RNA, 19 nt, Artificial Sequence
  Description of Artificial Sequence: Synthetic oligonucleotide
  Sense strand starting at position 2082 of SEQ ID NO: 1090
gagcguccguguauaagga

SEQ ID NO: 86861 - RNA, 19 nt, Artificial Sequence
  Description of Artificial Sequence: Synthetic oligonucleotide
  Antisense strand to SEQ ID NO: 86780
uccuuauacacggacgcuc

SEQ ID NO: 86862 - RNA, 19 nt, Artificial Sequence
  Description of Artificial Sequence: Synthetic oligonucleotide
  Sense strand starting at position 2195 of SEQ ID NO: 1090
uagcgaaugcuauacagca

SEQ ID NO: 86863 - RNA, 19 nt, Artificial Sequence
  Description of Artificial Sequence: Synthetic oligonucleotide
  Antisense strand to SEQ ID NO: 86782
ugcuguauagcauucgcua

SEQ ID NO: 86864 - RNA, 19 nt, Artificial Sequence
  Description of Artificial Sequence: Synthetic oligonucleotide
  Sense strand starting at position 2287 of SEQ ID NO: 1090
gagauaaucugaccguugu

SEQ ID NO: 86865 - RNA, 19 nt, Artificial Sequence
  Description of Artificial Sequence: Synthetic oligonucleotide
  Antisense strand to SEQ ID NO: 86784
acaacggucagauuaucuc

SEQ ID NO: 86866 - RNA, 19 nt, Artificial Sequence
  Description of Artificial Sequence: Synthetic oligonucleotide
  Sense strand starting at position 2288 of SEQ ID NO: 1090
agauaaucugaccguugua

SEQ ID NO: 86867 - RNA, 19 nt, Artificial Sequence
  Description of Artificial Sequence: Synthetic oligonucleotide
  Antisense strand to SEQ ID NO: 86786
uacaacggucagauuaucu

SEQ ID NO: 86868 - RNA, 19 nt, Artificial Sequence
  Description of Artificial Sequence: Synthetic oligonucleotide
  Sense strand starting at position 2291 of SEQ ID NO: 1090
uaaucugaccguuguacaa

SEQ ID NO: 86869 - RNA, 19 nt, Artificial Sequence
  Description of Artificial Sequence: Synthetic oligonucleotide
  Antisense strand to SEQ ID NO: 86788
uuguacaacggucagauua

SEQ ID NO: 86870 - RNA, 19 nt, Artificial Sequence
  Description of Artificial Sequence: Synthetic oligonucleotide
  Sense strand starting at position 2329 of SEQ ID NO: 1090
gcggcaagucugucacuuu

SEQ ID NO: 86871 - RNA, 19 nt, Artificial Sequence
  Description of Artificial Sequence: Synthetic oligonucleotide
  Antisense strand to SEQ ID NO: 86790
aaagugacagacuugccgc

SEQ ID NO: 86872 - RNA, 19 nt, Artificial Sequence
  Description of Artificial Sequence: Synthetic oligonucleotide
  Sense strand starting at position 2452 of SEQ ID NO: 1090
uccugaacucaagguaugu

SEQ ID NO: 86873 - RNA, 19 nt, Artificial Sequence
  Description of Artificial Sequence: Synthetic oligonucleotide
  Antisense strand to SEQ ID NO: 86792
acauaccuugaguucagga

SEQ ID NO: 86874 - RNA, 19 nt, Artificial Sequence
  Description of Artificial Sequence: Synthetic oligonucleotide
  Sense strand starting at position 2545 of SEQ ID NO: 1090
cauguucucugguuuaaga

SEQ ID NO: 86875 - RNA, 19 nt, Artificial Sequence
  Description of Artificial Sequence: Synthetic oligonucleotide
  Antisense strand to SEQ ID NO: 86794
ucuuaaaccagagaacaug

SEQ ID NO: 86876 - RNA, 19 nt, Artificial Sequence
  Description of Artificial Sequence: Synthetic oligonucleotide
  Sense strand starting at position 2547 of SEQ ID NO: 1090
uguucucugguuuaagauc

SEQ ID NO: 86877 - RNA, 19 nt, Artificial Sequence
  Description of Artificial Sequence: Synthetic oligonucleotide
  Antisense strand to SEQ ID NO: 86796
gaucuuaaaccagagaaca

SEQ ID NO: 86878 - RNA, 19 nt, Artificial Sequence
  Description of Artificial Sequence: Synthetic oligonucleotide
  Sense strand starting at position 2562 of SEQ ID NO: 1090
gaucuauucccauggguuc

SEQ ID NO: 86879 - RNA, 19 nt, Artificial Sequence
  Description of Artificial Sequence: Synthetic oligonucleotide
  Antisense strand to SEQ ID NO: 86798
gaacccaugggaauagauc

SEQ ID NO: 86880 - RNA, 19 nt, Artificial Sequence
  Description of Artificial Sequence: Synthetic oligonucleotide
  Sense strand starting at position 2581 of SEQ ID NO: 1090
agcuauuaugucuaugcaa

SEQ ID NO: 86881 - RNA, 19 nt, Artificial Sequence
  Description of Artificial Sequence: Synthetic oligonucleotide
  Antisense strand to SEQ ID NO: 86800
uugcauagacauaauagcu

SEQ ID NO: 86882 - RNA, 19 nt, Artificial Sequence
  Description of Artificial Sequence: Synthetic oligonucleotide
  Sense strand starting at position 2815 of SEQ ID NO: 1090
gcaauuauugauuauccgu

SEQ ID NO: 86883 - RNA, 19 nt, Artificial Sequence
  Description of Artificial Sequence: Synthetic oligonucleotide
  Antisense strand to SEQ ID NO: 86802
acggauaaucaauaauugc

SEQ ID NO: 86884 - RNA, 19 nt, Artificial Sequence
  Description of Artificial Sequence: Synthetic oligonucleotide
  Sense strand starting at position 3127 of SEQ ID NO: 1090
aucacuuuauaccuagagu

SEQ ID NO: 86885 - RNA, 19 nt, Artificial Sequence
  Description of Artificial Sequence: Synthetic oligonucleotide
  Antisense strand to SEQ ID NO: 86804
acucuagguauaaagugau

SEQ ID NO: 86886 - RNA, 19 nt, Artificial Sequence
  Description of Artificial Sequence: Synthetic oligonucleotide
  Sense strand starting at position 3251 of SEQ ID NO: 1090
gguaauauagcaggcuaga

SEQ ID NO: 86887 - RNA, 19 nt, Artificial Sequence
  Description of Artificial Sequence: Synthetic oligonucleotide
  Antisense strand to SEQ ID NO: 86806
ucuagccugcuauauuacc

SEQ ID NO: 86888 - RNA, 19 nt, Artificial Sequence
  Description of Artificial Sequence: Synthetic oligonucleotide
  Sense strand starting at position 3365 of SEQ ID NO: 1090
gcuccuugagcucagagaa

SEQ ID NO: 86889 - RNA, 19 nt, Artificial Sequence
  Description of Artificial Sequence: Synthetic oligonucleotide
  Antisense strand to SEQ ID NO: 86808
uucucugagcucaaggagc

SEQ ID NO: 86890 - RNA, 19 nt, Artificial Sequence
  Description of Artificial Sequence: Synthetic oligonucleotide
  Sense strand starting at position 3450 of SEQ ID NO: 1090
augcaaaccugagcuugaa

SEQ ID NO: 86891 - RNA, 19 nt, Artificial Sequence
  Description of Artificial Sequence: Synthetic oligonucleotide
  Antisense strand to SEQ ID NO: 86810
uucaagcucagguuugcau

SEQ ID NO: 86892 - RNA, 19 nt, Artificial Sequence
  Description of Artificial Sequence: Synthetic oligonucleotide
  Sense strand starting at position 3584 of SEQ ID NO: 1090
agauaaacugucugucugu

SEQ ID NO: 86893 - RNA, 19 nt, Artificial Sequence
  Description of Artificial Sequence: Synthetic oligonucleotide
  Antisense strand to SEQ ID NO: 86812
acagacagacaguuuaucu

SEQ ID NO: 86894 - RNA, 19 nt, Artificial Sequence
  Description of Artificial Sequence: Synthetic oligonucleotide
  Sense strand starting at position 3689 of SEQ ID NO: 1090
aaaggacacuggugaauuu

SEQ ID NO: 86895 - RNA, 19 nt, Artificial Sequence
  Description of Artificial Sequence: Synthetic oligonucleotide
  Antisense strand to SEQ ID NO: 86814
aaauucaccaguguccuuu

SEQ ID NO: 86896 - RNA, 19 nt, Artificial Sequence
  Description of Artificial Sequence: Synthetic oligonucleotide
  Sense strand starting at position 3708 of SEQ ID NO: 1090
gaggcaauuugggaaucaa

SEQ ID NO: 86897 - RNA, 19 nt, Artificial Sequence
  Description of Artificial Sequence: Synthetic oligonucleotide
  Antisense strand to SEQ ID NO: 86816
uugauucccaaauugccuc

SEQ ID NO: 86898 - RNA, 19 nt, Artificial Sequence
  Description of Artificial Sequence: Synthetic oligonucleotide
  Sense strand starting at position 3852 of SEQ ID NO: 1090
agaucuuuacucugaaagc

SEQ ID NO: 86899 - RNA, 19 nt, Artificial Sequence
  Description of Artificial Sequence: Synthetic oligonucleotide
  Antisense strand to SEQ ID NO: 86818
gcuuucagaguaaagaucu

SEQ ID NO: 86900 - RNA, 19 nt, Artificial Sequence
  Description of Artificial Sequence: Synthetic oligonucleotide
  Sense strand starting at position 168 of SEQ ID NO: 1091
gcagauuagauacggguaa

SEQ ID NO: 86901 - RNA, 19 nt, Artificial Sequence
  Description of Artificial Sequence: Synthetic oligonucleotide
  Antisense strand to SEQ ID NO: 86820
uuacccguaucuaaucugc

SEQ ID NO: 86902 - RNA, 19 nt, Artificial Sequence
  Description of Artificial Sequence: Synthetic oligonucleotide
  Sense strand starting at position 187 of SEQ ID NO: 1091
ggagauaauuuauggcaua

SEQ ID NO: 86903 - RNA, 19 nt, Artificial Sequence
  Description of Artificial Sequence: Synthetic oligonucleotide
  Antisense strand to SEQ ID NO: 86822
uaugccauaaauuaucucc

SEQ ID NO: 86904 - RNA, 19 nt, Artificial Sequence
  Description of Artificial Sequence: Synthetic oligonucleotide
  Sense strand starting at position 305 of SEQ ID NO: 1091
uagcauauguacuugaagu

SEQ ID NO: 86905 - RNA, 19 nt, Artificial Sequence
  Description of Artificial Sequence: Synthetic oligonucleotide
  Antisense strand to SEQ ID NO: 86824
acuucaaguacauaugcua

SEQ ID NO: 86906 - RNA, 19 nt, Artificial Sequence
  Description of Artificial Sequence: Synthetic oligonucleotide
  Sense strand starting at position 371 of SEQ ID NO: 1091
gauaauggcuaagugacau

SEQ ID NO: 86907 - RNA, 19 nt, Artificial Sequence
  Description of Artificial Sequence: Synthetic oligonucleotide
  Antisense strand to SEQ ID NO: 86826
augucacuuagccauuauc

SEQ ID NO: 86908 - RNA, 19 nt, Artificial Sequence
  Description of Artificial Sequence: Synthetic oligonucleotide
  Sense strand starting at position 518 of SEQ ID NO: 1091
ccaagugaauguuuaauca

SEQ ID NO: 86909 - RNA, 19 nt, Artificial Sequence
  Description of Artificial Sequence: Synthetic oligonucleotide
  Antisense strand to SEQ ID NO: 86828
ugauuaaacauucacuugg

SEQ ID NO: 86910 - RNA, 19 nt, Artificial Sequence
  Description of Artificial Sequence: Synthetic oligonucleotide
  Sense strand starting at position 522 of SEQ ID NO: 1091
gugaauguuuaaucagaag

SEQ ID NO: 86911 - RNA, 19 nt, Artificial Sequence
  Description of Artificial Sequence: Synthetic oligonucleotide
  Antisense strand to SEQ ID NO: 86830
cuucugauuaaacauucac

SEQ ID NO: 86912 - RNA, 19 nt, Artificial Sequence
  Description of Artificial Sequence: Synthetic oligonucleotide
  Sense strand starting at position 556 of SEQ ID NO: 1091
aagguaggcgaucauuaug

SEQ ID NO: 86913 - RNA, 19 nt, Artificial Sequence
  Description of Artificial Sequence: Synthetic oligonucleotide
  Antisense strand to SEQ ID NO: 86832
cauaaugaucgccuaccuu

SEQ ID NO: 86914 - RNA, 19 nt, Artificial Sequence
  Description of Artificial Sequence: Synthetic oligonucleotide
  Sense strand starting at position 620 of SEQ ID NO: 1091
ggcagucuucaagauggca

SEQ ID NO: 86915 - RNA, 19 nt, Artificial Sequence
  Description of Artificial Sequence: Synthetic oligonucleotide
  Antisense strand to SEQ ID NO: 86834
ugccaucuugaagacugcc

SEQ ID NO: 86916 - RNA, 19 nt, Artificial Sequence
  Description of Artificial Sequence: Synthetic oligonucleotide
  Sense strand starting at position 652 of SEQ ID NO: 1091
cuguuaauacuugguucua

SEQ ID NO: 86917 - RNA, 19 nt, Artificial Sequence
  Description of Artificial Sequence: Synthetic oligonucleotide
  Antisense strand to SEQ ID NO: 86836
uagaaccaaguauuaacag

SEQ ID NO: 86918 - RNA, 19 nt, Artificial Sequence
  Description of Artificial Sequence: Synthetic oligonucleotide
  Sense strand starting at position 654 of SEQ ID NO: 1091
guuaauacuugguucuaga

SEQ ID NO: 86919 - RNA, 19 nt, Artificial Sequence
  Description of Artificial Sequence: Synthetic oligonucleotide
  Antisense strand to SEQ ID NO: 86838
ucuagaaccaaguauuaac

SEQ ID NO: 86920 - RNA, 19 nt, Artificial Sequence
  Description of Artificial Sequence: Synthetic oligonucleotide
  Sense strand starting at position 661 of SEQ ID NO: 1091
cuugguucuagaggaguca

SEQ ID NO: 86921 - RNA, 19 nt, Artificial Sequence
  Description of Artificial Sequence: Synthetic oligonucleotide
  Antisense strand to SEQ ID NO: 86840
ugacuccucuagaaccaag

SEQ ID NO: 86922 - RNA, 19 nt, Artificial Sequence
  Description of Artificial Sequence: Synthetic oligonucleotide
  Sense strand starting at position 662 of SEQ ID NO: 1091
uugguucuagaggagucaa

SEQ ID NO: 86923 - RNA, 19 nt, Artificial Sequence
  Description of Artificial Sequence: Synthetic oligonucleotide
  Antisense strand to SEQ ID NO: 86842
uugacuccucuagaaccaa

SEQ ID NO: 86924 - RNA, 19 nt, Artificial Sequence
  Description of Artificial Sequence: Synthetic oligonucleotide
  Sense strand starting at position 725 of SEQ ID NO: 1091
gacugaaguuuccuuugag

SEQ ID NO: 86925 - RNA, 19 nt, Artificial Sequence
  Description of Artificial Sequence: Synthetic oligonucleotide
  Antisense strand to SEQ ID NO: 86844
cucaaaggaaacuucaguc

SEQ ID NO: 86926 - RNA, 19 nt, Artificial Sequence
  Description of Artificial Sequence: Synthetic oligonucleotide
  Sense strand starting at position 728 of SEQ ID NO: 1091
ugaaguuuccuuugagguc

SEQ ID NO: 86927 - RNA, 19 nt, Artificial Sequence
  Description of Artificial Sequence: Synthetic oligonucleotide
  Antisense strand to SEQ ID NO: 86846
gaccucaaaggaaacuuca

SEQ ID NO: 86928 - RNA, 19 nt, Artificial Sequence
  Description of Artificial Sequence: Synthetic oligonucleotide
  Sense strand starting at position 806 of SEQ ID NO: 1091
cuaugcagucacugaaauc

SEQ ID NO: 86929 - RNA, 19 nt, Artificial Sequence
  Description of Artificial Sequence: Synthetic oligonucleotide
  Antisense strand to SEQ ID NO: 86848
gauuucagugacugcauag

SEQ ID NO: 86930 - RNA, 19 nt, Artificial Sequence
  Description of Artificial Sequence: Synthetic oligonucleotide
  Sense strand starting at position 815 of SEQ ID NO: 1091
cacugaaaucagugaaagc

SEQ ID NO: 86931 - RNA, 19 nt, Artificial Sequence
  Description of Artificial Sequence: Synthetic oligonucleotide
  Antisense strand to SEQ ID NO: 86850
gcuuucacugauuucagug

SEQ ID NO: 86932 - RNA, 19 nt, Artificial Sequence
  Description of Artificial Sequence: Synthetic oligonucleotide
  Sense strand starting at position 865 of SEQ ID NO: 1091
auaguaauagcugggucaa

SEQ ID NO: 86933 - RNA, 19 nt, Artificial Sequence
  Description of Artificial Sequence: Synthetic oligonucleotide
  Antisense strand to SEQ ID NO: 86852
uugacccagcuauuacuau

SEQ ID NO: 86934 - RNA, 19 nt, Artificial Sequence
  Description of Artificial Sequence: Synthetic oligonucleotide
  Sense strand starting at position 866 of SEQ ID NO: 1091
uaguaauagcugggucaaa

SEQ ID NO: 86935 - RNA, 19 nt, Artificial Sequence
  Description of Artificial Sequence: Synthetic oligonucleotide
  Antisense strand to SEQ ID NO: 86854
uuugacccagcuauuacua

SEQ ID NO: 86936 - RNA, 19 nt, Artificial Sequence
  Description of Artificial Sequence: Synthetic oligonucleotide
  Sense strand starting at position 867 of SEQ ID NO: 1091
aguaauagcugggucaaac

SEQ ID NO: 86937 - RNA, 19 nt, Artificial Sequence
  Description of Artificial Sequence: Synthetic oligonucleotide
  Antisense strand to SEQ ID NO: 86856
guuugacccagcuauuacu

SEQ ID NO: 86938 - RNA, 19 nt, Artificial Sequence
  Description of Artificial Sequence: Synthetic oligonucleotide
  Sense strand starting at position 979 of SEQ ID NO: 1091
ucuagaaauccaugagcau

SEQ ID NO: 86939 - RNA, 19 nt, Artificial Sequence
  Description of Artificial Sequence: Synthetic oligonucleotide
  Antisense strand to SEQ ID NO: 86858
augcucauggauuucuaga

SEQ ID NO: 86940 - RNA, 19 nt, Artificial Sequence
  Description of Artificial Sequence: Synthetic oligonucleotide
  Sense strand starting at position 994 of SEQ ID NO: 1091
gcaugcucagggcagaaua

SEQ ID NO: 86941 - RNA, 19 nt, Artificial Sequence
  Description of Artificial Sequence: Synthetic oligonucleotide
  Antisense strand to SEQ ID NO: 86860
uauucugcccugagcaugc

SEQ ID NO: 86942 - RNA, 19 nt, Artificial Sequence
  Description of Artificial Sequence: Synthetic oligonucleotide
  Sense strand starting at position 1083 of SEQ ID NO: 1091
gcaaaugaaggcuaaggua

SEQ ID NO: 86943 - RNA, 19 nt, Artificial Sequence
  Description of Artificial Sequence: Synthetic oligonucleotide
  Antisense strand to SEQ ID NO: 86862
uaccuuagccuucauuugc

SEQ ID NO: 86944 - RNA, 19 nt, Artificial Sequence
  Description of Artificial Sequence: Synthetic oligonucleotide
  Sense strand starting at position 1302 of SEQ ID NO: 1091
acagaaacuguccaugcua

SEQ ID NO: 86945 - RNA, 19 nt, Artificial Sequence
  Description of Artificial Sequence: Synthetic oligonucleotide
  Antisense strand to SEQ ID NO: 86864
uagcauggacaguuucugu

SEQ ID NO: 86946 - RNA, 19 nt, Artificial Sequence
  Description of Artificial Sequence: Synthetic oligonucleotide
  Sense strand starting at position 1304 of SEQ ID NO: 1091
agaaacuguccaugcuaca

SEQ ID NO: 86947 - RNA, 19 nt, Artificial Sequence
  Description of Artificial Sequence: Synthetic oligonucleotide
  Antisense strand to SEQ ID NO: 86866
uguagcauggacaguuucu

SEQ ID NO: 86948 - RNA, 19 nt, Artificial Sequence
  Description of Artificial Sequence: Synthetic oligonucleotide
  Sense strand starting at position 1360 of SEQ ID NO: 1091
ugucuuaaauauguccaaa

SEQ ID NO: 86949 - RNA, 19 nt, Artificial Sequence
  Description of Artificial Sequence: Synthetic oligonucleotide
  Antisense strand to SEQ ID NO: 86868
uuuggacauauuuaagaca

SEQ ID NO: 86950 - RNA, 19 nt, Artificial Sequence
  Description of Artificial Sequence: Synthetic oligonucleotide
  Sense strand starting at position 1688 of SEQ ID NO: 1091
augcauaaugaggguauga

SEQ ID NO: 86951 - RNA, 19 nt, Artificial Sequence
  Description of Artificial Sequence: Synthetic oligonucleotide
  Antisense strand to SEQ ID NO: 86870
ucauacccucauuaugcau

SEQ ID NO: 86952 - RNA, 19 nt, Artificial Sequence
  Description of Artificial Sequence: Synthetic oligonucleotide
  Sense strand starting at position 2278 of SEQ ID NO: 1091
uuagaaguaaggugauuga

SEQ ID NO: 86953 - RNA, 19 nt, Artificial Sequence
  Description of Artificial Sequence: Synthetic oligonucleotide
  Antisense strand to SEQ ID NO: 86872
ucaaucaccuuacuucuaa

SEQ ID NO: 86954 - RNA, 19 nt, Artificial Sequence
  Description of Artificial Sequence: Synthetic oligonucleotide
  Sense strand starting at position 2281 of SEQ ID NO: 1091
gaaguaaggugauugaauc

SEQ ID NO: 86955 - RNA, 19 nt, Artificial Sequence
  Description of Artificial Sequence: Synthetic oligonucleotide
  Antisense strand to SEQ ID NO: 86874
gauucaaucaccuuacuuc

SEQ ID NO: 86956 - RNA, 19 nt, Artificial Sequence
  Description of Artificial Sequence: Synthetic oligonucleotide
  Sense strand starting at position 2282 of SEQ ID NO: 1091
aaguaaggugauugaauca

SEQ ID NO: 86957 - RNA, 19 nt, Artificial Sequence
  Description of Artificial Sequence: Synthetic oligonucleotide
  Antisense strand to SEQ ID NO: 86876
ugauucaaucaccuuacuu

SEQ ID NO: 86958 - RNA, 19 nt, Artificial Sequence
  Description of Artificial Sequence: Synthetic oligonucleotide
  Sense strand starting at position 2511 of SEQ ID NO: 1091
acccuuuaugaaugucgau

SEQ ID NO: 86959 - RNA, 19 nt, Artificial Sequence
  Description of Artificial Sequence: Synthetic oligonucleotide
  Antisense strand to SEQ ID NO: 86878
aucgacauucauaaagggu

SEQ ID NO: 86960 - RNA, 19 nt, Artificial Sequence
  Description of Artificial Sequence: Synthetic oligonucleotide
  Sense strand starting at position 2517 of SEQ ID NO: 1091
uaugaaugucgaugugaaa

SEQ ID NO: 86961 - RNA, 19 nt, Artificial Sequence
  Description of Artificial Sequence: Synthetic oligonucleotide
  Antisense strand to SEQ ID NO: 86880
uuucacaucgacauucaua

SEQ ID NO: 86962 - RNA, 19 nt, Artificial Sequence
  Description of Artificial Sequence: Synthetic oligonucleotide
  Sense strand starting at position 2904 of SEQ ID NO: 1091
agcaaugaggcaugggaaa

SEQ ID NO: 86963 - RNA, 19 nt, Artificial Sequence
  Description of Artificial Sequence: Synthetic oligonucleotide
  Antisense strand to SEQ ID NO: 86882
uuucccaugccucauugcu

SEQ ID NO: 86964 - RNA, 19 nt, Artificial Sequence
  Description of Artificial Sequence: Synthetic oligonucleotide
  Sense strand starting at position 2968 of SEQ ID NO: 1091
uuucuaucugcagaagaca

SEQ ID NO: 86965 - RNA, 19 nt, Artificial Sequence
  Description of Artificial Sequence: Synthetic oligonucleotide
  Antisense strand to SEQ ID NO: 86884
ugucuucugcagauagaaa

SEQ ID NO: 86966 - RNA, 19 nt, Artificial Sequence
  Description of Artificial Sequence: Synthetic oligonucleotide
  Sense strand starting at position 3549 of SEQ ID NO: 1091
uauaauugagagugcagga

SEQ ID NO: 86967 - RNA, 19 nt, Artificial Sequence
  Description of Artificial Sequence: Synthetic oligonucleotide
  Antisense strand to SEQ ID NO: 86886
uccugcacucucaauuaua

SEQ ID NO: 86968 - RNA, 19 nt, Artificial Sequence
  Description of Artificial Sequence: Synthetic oligonucleotide
  Sense strand starting at position 3715 of SEQ ID NO: 1091
gauggacccuugccauaua

SEQ ID NO: 86969 - RNA, 19 nt, Artificial Sequence
  Description of Artificial Sequence: Synthetic oligonucleotide
  Antisense strand to SEQ ID NO: 86888
uauauggcaaggguccauc

SEQ ID NO: 86970 - RNA, 19 nt, Artificial Sequence
  Description of Artificial Sequence: Synthetic oligonucleotide
  Sense strand starting at position 3718 of SEQ ID NO: 1091
ggacccuugccauauacca

SEQ ID NO: 86971 - RNA, 19 nt, Artificial Sequence
  Description of Artificial Sequence: Synthetic oligonucleotide
  Antisense strand to SEQ ID NO: 86890
ugguauauggcaagggucc

SEQ ID NO: 86972 - RNA, 19 nt, Artificial Sequence
  Description of Artificial Sequence: Synthetic oligonucleotide
  Sense strand starting at position 3746 of SEQ ID NO: 1091
acuaacucgagauggauca

SEQ ID NO: 86973 - RNA, 19 nt, Artificial Sequence
  Description of Artificial Sequence: Synthetic oligonucleotide
  Antisense strand to SEQ ID NO: 86892
ugauccaucucgaguuagu

SEQ ID NO: 86974 - RNA, 19 nt, Artificial Sequence
  Description of Artificial Sequence: Synthetic oligonucleotide
  Sense strand starting at position 3843 of SEQ ID NO: 1091
agcagugguuucuuaaaua

SEQ ID NO: 86975 - RNA, 19 nt, Artificial Sequence
  Description of Artificial Sequence: Synthetic oligonucleotide
  Antisense strand to SEQ ID NO: 86894
uauuuaagaaaccacugcu

SEQ ID NO: 86976 - RNA, 19 nt, Artificial Sequence
  Description of Artificial Sequence: Synthetic oligonucleotide
  Sense strand starting at position 3854 of SEQ ID NO: 1091
cuuaaauaacgaugccaaa

SEQ ID NO: 86977 - RNA, 19 nt, Artificial Sequence
  Description of Artificial Sequence: Synthetic oligonucleotide
  Antisense strand to SEQ ID NO: 86896
uuuggcaucguuauuuaag

SEQ ID NO: 86978 - RNA, 19 nt, Artificial Sequence
  Description of Artificial Sequence: Synthetic oligonucleotide
  Sense strand starting at position 3974 of SEQ ID NO: 1091
gggacaaaguaucuguaaa

SEQ ID NO: 86979 - RNA, 19 nt, Artificial Sequence
  Description of Artificial Sequence: Synthetic oligonucleotide
  Antisense strand to SEQ ID NO: 86898
uuuacagauacuuuguccc

SEQ ID NO: 86980 - RNA, 19 nt, Artificial Sequence
  Description of Artificial Sequence: Synthetic oligonucleotide
  Sense strand starting at position 3897 of SEQ ID NO: 1092
gggugacccugacuuagga

SEQ ID NO: 86981 - RNA, 19 nt, Artificial Sequence
  Description of Artificial Sequence: Synthetic oligonucleotide
  Antisense strand to SEQ ID NO: 86900
uccuaagucagggucaccc

SEQ ID NO: 86982 - RNA, 19 nt, Artificial Sequence
  Description of Artificial Sequence: Synthetic oligonucleotide
  Sense strand starting at position 3830 of SEQ ID NO: 1092
ggacaugucagcgagacag

SEQ ID NO: 86983 - RNA, 19 nt, Artificial Sequence
  Description of Artificial Sequence: Synthetic oligonucleotide
  Antisense strand to SEQ ID NO: 86902
cugucucgcugacaugucc

SEQ ID NO: 86984 - RNA, 19 nt, Artificial Sequence
  Description of Artificial Sequence: Synthetic oligonucleotide
  Sense strand starting at position 3829 of SEQ ID NO: 1092
cggacaugucagcgagaca

SEQ ID NO: 86985 - RNA, 19 nt, Artificial Sequence
  Description of Artificial Sequence: Synthetic oligonucleotide
  Antisense strand to SEQ ID NO: 86904
ugucucgcugacauguccg

SEQ ID NO: 86986 - RNA, 19 nt, Artificial Sequence
  Description of Artificial Sequence: Synthetic oligonucleotide
  Sense strand starting at position 3759 of SEQ ID NO: 1092
aggcgucugagggaagaau

SEQ ID NO: 86987 - RNA, 19 nt, Artificial Sequence
  Description of Artificial Sequence: Synthetic oligonucleotide
  Antisense strand to SEQ ID NO: 86906
auucuucccucagacgccu

SEQ ID NO: 86988 - RNA, 19 nt, Artificial Sequence
  Description of Artificial Sequence: Synthetic oligonucleotide
  Sense strand starting at position 3589 of SEQ ID NO: 1092
ugaaauauacuagguuaug

SEQ ID NO: 86989 - RNA, 19 nt, Artificial Sequence
  Description of Artificial Sequence: Synthetic oligonucleotide
  Antisense strand to SEQ ID NO: 86908
cauaaccuaguauauuuca

SEQ ID NO: 86990 - RNA, 19 nt, Artificial Sequence
  Description of Artificial Sequence: Synthetic oligonucleotide
  Sense strand starting at position 3549 of SEQ ID NO: 1092
uuccauucuggaggaaagu

SEQ ID NO: 86991 - RNA, 19 nt, Artificial Sequence
  Description of Artificial Sequence: Synthetic oligonucleotide
  Antisense strand to SEQ ID NO: 86910
acuuuccuccagaauggaa

SEQ ID NO: 86992 - RNA, 19 nt, Artificial Sequence
  Description of Artificial Sequence: Synthetic oligonucleotide
  Sense strand starting at position 3525 of SEQ ID NO: 1092
aggacaaagucuuucccuu

SEQ ID NO: 86993 - RNA, 19 nt, Artificial Sequence
  Description of Artificial Sequence: Synthetic oligonucleotide
  Antisense strand to SEQ ID NO: 86912
aagggaaagacuuuguccu

SEQ ID NO: 86994 - RNA, 19 nt, Artificial Sequence
  Description of Artificial Sequence: Synthetic oligonucleotide
  Sense strand starting at position 3500 of SEQ ID NO: 1092
gggagacaauaauaauaaa

SEQ ID NO: 86995 - RNA, 19 nt, Artificial Sequence
  Description of Artificial Sequence: Synthetic oligonucleotide
  Antisense strand to SEQ ID NO: 86914
uuuauuauuauugucuccc

SEQ ID NO: 86996 - RNA, 19 nt, Artificial Sequence
  Description of Artificial Sequence: Synthetic oligonucleotide
  Sense strand starting at position 3335 of SEQ ID NO: 1092
gccauacuuuggccagaga

SEQ ID NO: 86997 - RNA, 19 nt, Artificial Sequence
  Description of Artificial Sequence: Synthetic oligonucleotide
  Antisense strand to SEQ ID NO: 86916
ucucuggccaaaguauggc

SEQ ID NO: 86998 - RNA, 19 nt, Artificial Sequence
  Description of Artificial Sequence: Synthetic oligonucleotide
  Sense strand starting at position 3313 of SEQ ID NO: 1092
gcaagcacagcuuaagaau

SEQ ID NO: 86999 - RNA, 19 nt, Artificial Sequence
  Description of Artificial Sequence: Synthetic oligonucleotide
  Antisense strand to SEQ ID NO: 86918
auucuuaagcugugcuugc

SEQ ID NO: 87000 - RNA, 19 nt, Artificial Sequence
  Description of Artificial Sequence: Synthetic oligonucleotide
  Sense strand starting at position 3160 of SEQ ID NO: 1092
ccucuuuccuccgcagaua

SEQ ID NO: 87001 - RNA, 19 nt, Artificial Sequence
  Description of Artificial Sequence: Synthetic oligonucleotide
  Antisense strand to SEQ ID NO: 86920
uaucugcggaggaaagagg

SEQ ID NO: 87002 - RNA, 19 nt, Artificial Sequence
  Description of Artificial Sequence: Synthetic oligonucleotide
  Sense strand starting at position 3003 of SEQ ID NO: 1092
aguaauguguugguccaaa

SEQ ID NO: 87003 - RNA, 19 nt, Artificial Sequence
  Description of Artificial Sequence: Synthetic oligonucleotide
  Antisense strand to SEQ ID NO: 86922
uuuggaccaacacauuacu

SEQ ID NO: 87004 - RNA, 19 nt, Artificial Sequence
  Description of Artificial Sequence: Synthetic oligonucleotide
  Sense strand starting at position 3002 of SEQ ID NO: 1092
caguaauguguugguccaa

SEQ ID NO: 87005 - RNA, 19 nt, Artificial Sequence
  Description of Artificial Sequence: Synthetic oligonucleotide
  Antisense strand to SEQ ID NO: 86924
uuggaccaacacauuacug

SEQ ID NO: 87006 - RNA, 19 nt, Artificial Sequence
  Description of Artificial Sequence: Synthetic oligonucleotide
  Sense strand starting at position 2973 of SEQ ID NO: 1092
agagaaguugcuggaauug

SEQ ID NO: 87007 - RNA, 19 nt, Artificial Sequence
  Description of Artificial Sequence: Synthetic oligonucleotide
  Antisense strand to SEQ ID NO: 86926
caauuccagcaacuucucu

SEQ ID NO: 87008 - RNA, 19 nt, Artificial Sequence
  Description of Artificial Sequence: Synthetic oligonucleotide
  Sense strand starting at position 2914 of SEQ ID NO: 1092
gauacuucugcucacagga

SEQ ID NO: 87009 - RNA, 19 nt, Artificial Sequence
  Description of Artificial Sequence: Synthetic oligonucleotide
  Antisense strand to SEQ ID NO: 86928
uccugugagcagaaguauc

SEQ ID NO: 87010 - RNA, 19 nt, Artificial Sequence
  Description of Artificial Sequence: Synthetic oligonucleotide
  Sense strand starting at position 2749 of SEQ ID NO: 1092
ccagucagaucucuaagca

SEQ ID NO: 87011 - RNA, 19 nt, Artificial Sequence
  Description of Artificial Sequence: Synthetic oligonucleotide
  Antisense strand to SEQ ID NO: 86930
ugcuuagagaucugacugg

SEQ ID NO: 87012 - RNA, 19 nt, Artificial Sequence
  Description of Artificial Sequence: Synthetic oligonucleotide
  Sense strand starting at position 2448 of SEQ ID NO: 1092
uaaugaaugcuuggauaag

SEQ ID NO: 87013 - RNA, 19 nt, Artificial Sequence
  Description of Artificial Sequence: Synthetic oligonucleotide
  Antisense strand to SEQ ID NO: 86932
cuuauccaagcauucauua

SEQ ID NO: 87014 - RNA, 19 nt, Artificial Sequence
  Description of Artificial Sequence: Synthetic oligonucleotide
  Sense strand starting at position 2446 of SEQ ID NO: 1092
acuaaugaaugcuuggaua

SEQ ID NO: 87015 - RNA, 19 nt, Artificial Sequence
  Description of Artificial Sequence: Synthetic oligonucleotide
  Antisense strand to SEQ ID NO: 86934
uauccaagcauucauuagu

SEQ ID NO: 87016 - RNA, 19 nt, Artificial Sequence
  Description of Artificial Sequence: Synthetic oligonucleotide
  Sense strand starting at position 1537 of SEQ ID NO: 1092
ggcccuuaccuugggagaa

SEQ ID NO: 87017 - RNA, 19 nt, Artificial Sequence
  Description of Artificial Sequence: Synthetic oligonucleotide
  Antisense strand to SEQ ID NO: 86936
uucucccaagguaagggcc

SEQ ID NO: 87018 - RNA, 19 nt, Artificial Sequence
  Description of Artificial Sequence: Synthetic oligonucleotide
  Sense strand starting at position 1536 of SEQ ID NO: 1092
gggcccuuaccuugggaga

SEQ ID NO: 87019 - RNA, 19 nt, Artificial Sequence
  Description of Artificial Sequence: Synthetic oligonucleotide
  Antisense strand to SEQ ID NO: 86938
ucucccaagguaagggccc

SEQ ID NO: 87020 - RNA, 19 nt, Artificial Sequence
  Description of Artificial Sequence: Synthetic oligonucleotide
  Sense strand starting at position 545 of SEQ ID NO: 1092
ugucaauuucuguguguca

SEQ ID NO: 87021 - RNA, 19 nt, Artificial Sequence
  Description of Artificial Sequence: Synthetic oligonucleotide
  Antisense strand to SEQ ID NO: 86940
ugacacacagaaauugaca

SEQ ID NO: 87022 - RNA, 19 nt, Artificial Sequence
  Description of Artificial Sequence: Synthetic oligonucleotide
  Sense strand starting at position 497 of SEQ ID NO: 1092
aggugaguagucugucuca

SEQ ID NO: 87023 - RNA, 19 nt, Artificial Sequence
  Description of Artificial Sequence: Synthetic oligonucleotide
  Antisense strand to SEQ ID NO: 86942
ugagacagacuacucaccu

SEQ ID NO: 87024 - RNA, 19 nt, Artificial Sequence
  Description of Artificial Sequence: Synthetic oligonucleotide
  Sense strand starting at position 409 of SEQ ID NO: 1092
aucugucuuccucagaugu

SEQ ID NO: 87025 - RNA, 19 nt, Artificial Sequence
  Description of Artificial Sequence: Synthetic oligonucleotide
  Antisense strand to SEQ ID NO: 86944
acaucugaggaagacagau

SEQ ID NO: 87026 - RNA, 19 nt, Artificial Sequence
  Description of Artificial Sequence: Synthetic oligonucleotide
  Sense strand starting at position 373 of SEQ ID NO: 1092
gaugaaugcgugagugugu

SEQ ID NO: 87027 - RNA, 19 nt, Artificial Sequence
  Description of Artificial Sequence: Synthetic oligonucleotide
  Antisense strand to SEQ ID NO: 86946
acacacucacgcauucauc

SEQ ID NO: 87028 - RNA, 19 nt, Artificial Sequence
  Description of Artificial Sequence: Synthetic oligonucleotide
  Sense strand starting at position 372 of SEQ ID NO: 1092
ggaugaaugcgugagugug

SEQ ID NO: 87029 - RNA, 19 nt, Artificial Sequence
  Description of Artificial Sequence: Synthetic oligonucleotide
  Antisense strand to SEQ ID NO: 86948
cacacucacgcauucaucc

SEQ ID NO: 87030 - RNA, 19 nt, Artificial Sequence
  Description of Artificial Sequence: Synthetic oligonucleotide
  Sense strand starting at position 369 of SEQ ID NO: 1092
gguggaugaaugcgugagu

SEQ ID NO: 87031 - RNA, 19 nt, Artificial Sequence
  Description of Artificial Sequence: Synthetic oligonucleotide
  Antisense strand to SEQ ID NO: 86950
acucacgcauucauccacc

SEQ ID NO: 87032 - RNA, 19 nt, Artificial Sequence
  Description of Artificial Sequence: Synthetic oligonucleotide
  Sense strand starting at position 361 of SEQ ID NO: 1092
aacguucggguggaugaau

SEQ ID NO: 87033 - RNA, 19 nt, Artificial Sequence
  Description of Artificial Sequence: Synthetic oligonucleotide
  Antisense strand to SEQ ID NO: 86952
auucauccacccgaacguu

SEQ ID NO: 87034 - RNA, 19 nt, Artificial Sequence
  Description of Artificial Sequence: Synthetic oligonucleotide
  Sense strand starting at position 360 of SEQ ID NO: 1092
uaacguucggguggaugaa

SEQ ID NO: 87035 - RNA, 19 nt, Artificial Sequence
  Description of Artificial Sequence: Synthetic oligonucleotide
  Antisense strand to SEQ ID NO: 86954
uucauccacccgaacguua

SEQ ID NO: 87036 - RNA, 19 nt, Artificial Sequence
  Description of Artificial Sequence: Synthetic oligonucleotide
  Sense strand starting at position 359 of SEQ ID NO: 1092
guaacguucggguggauga

SEQ ID NO: 87037 - RNA, 19 nt, Artificial Sequence
  Description of Artificial Sequence: Synthetic oligonucleotide
  Antisense strand to SEQ ID NO: 86956
ucauccacccgaacguuac

SEQ ID NO: 87038 - RNA, 19 nt, Artificial Sequence
  Description of Artificial Sequence: Synthetic oligonucleotide
  Sense strand starting at position 340 of SEQ ID NO: 1092
acauguacuguguauaguu

SEQ ID NO: 87039 - RNA, 19 nt, Artificial Sequence
  Description of Artificial Sequence: Synthetic oligonucleotide
  Antisense strand to SEQ ID NO: 86958
aacuauacacaguacaugu

SEQ ID NO: 87040 - RNA, 19 nt, Artificial Sequence
  Description of Artificial Sequence: Synthetic oligonucleotide
  Sense strand starting at position 325 of SEQ ID NO: 1092
uguaaacgccugcauacau

SEQ ID NO: 87041 - RNA, 19 nt, Artificial Sequence
  Description of Artificial Sequence: Synthetic oligonucleotide
  Antisense strand to SEQ ID NO: 86960
auguaugcaggcguuuaca

SEQ ID NO: 87042 - RNA, 19 nt, Artificial Sequence
  Description of Artificial Sequence: Synthetic oligonucleotide
  Sense strand starting at position 311 of SEQ ID NO: 1092
guguguccuguccuuguaa

SEQ ID NO: 87043 - RNA, 19 nt, Artificial Sequence
  Description of Artificial Sequence: Synthetic oligonucleotide
  Antisense strand to SEQ ID NO: 86962
uuacaaggacaggacacac

SEQ ID NO: 87044 - RNA, 19 nt, Artificial Sequence
  Description of Artificial Sequence: Synthetic oligonucleotide
  Sense strand starting at position 294 of SEQ ID NO: 1092
uugguuucugugagagcgu

SEQ ID NO: 87045 - RNA, 19 nt, Artificial Sequence
  Description of Artificial Sequence: Synthetic oligonucleotide
  Antisense strand to SEQ ID NO: 86964
acgcucucacagaaaccaa

SEQ ID NO: 87046 - RNA, 19 nt, Artificial Sequence
  Description of Artificial Sequence: Synthetic oligonucleotide
  Sense strand starting at position 291 of SEQ ID NO: 1092
ggguugguuucugugagag

SEQ ID NO: 87047 - RNA, 19 nt, Artificial Sequence
  Description of Artificial Sequence: Synthetic oligonucleotide
  Antisense strand to SEQ ID NO: 86966
cucucacagaaaccaaccc

SEQ ID NO: 87048 - RNA, 19 nt, Artificial Sequence
  Description of Artificial Sequence: Synthetic oligonucleotide
  Sense strand starting at position 277 of SEQ ID NO: 1092
cuuuguuugcuagaggguu

SEQ ID NO: 87049 - RNA, 19 nt, Artificial Sequence
  Description of Artificial Sequence: Synthetic oligonucleotide
  Antisense strand to SEQ ID NO: 86968
aacccucuagcaaacaaag

SEQ ID NO: 87050 - RNA, 19 nt, Artificial Sequence
  Description of Artificial Sequence: Synthetic oligonucleotide
  Sense strand starting at position 244 of SEQ ID NO: 1092
ggugucugcccauaugaau

SEQ ID NO: 87051 - RNA, 19 nt, Artificial Sequence
  Description of Artificial Sequence: Synthetic oligonucleotide
  Antisense strand to SEQ ID NO: 86970
auucauaugggcagacacc

SEQ ID NO: 87052 - RNA, 19 nt, Artificial Sequence
  Description of Artificial Sequence: Synthetic oligonucleotide
  Sense strand starting at position 241 of SEQ ID NO: 1092
auaggugucugcccauaug

SEQ ID NO: 87053 - RNA, 19 nt, Artificial Sequence
  Description of Artificial Sequence: Synthetic oligonucleotide
  Antisense strand to SEQ ID NO: 86972
cauaugggcagacaccuau

SEQ ID NO: 87054 - RNA, 19 nt, Artificial Sequence
  Description of Artificial Sequence: Synthetic oligonucleotide
  Sense strand starting at position 230 of SEQ ID NO: 1092
uguacaucuccauaggugu

SEQ ID NO: 87055 - RNA, 19 nt, Artificial Sequence
  Description of Artificial Sequence: Synthetic oligonucleotide
  Antisense strand to SEQ ID NO: 86974
acaccuauggagauguaca

SEQ ID NO: 87056 - RNA, 19 nt, Artificial Sequence
  Description of Artificial Sequence: Synthetic oligonucleotide
  Sense strand starting at position 167 of SEQ ID NO: 1092
cuguucuacccagauccau

SEQ ID NO: 87057 - RNA, 19 nt, Artificial Sequence
  Description of Artificial Sequence: Synthetic oligonucleotide
  Antisense strand to SEQ ID NO: 86976
auggaucuggguagaacag

SEQ ID NO: 87058 - RNA, 19 nt, Artificial Sequence
  Description of Artificial Sequence: Synthetic oligonucleotide
  Sense strand starting at position 150 of SEQ ID NO: 1092
ggcaauaaugccugaggcu

SEQ ID NO: 87059 - RNA, 19 nt, Artificial Sequence
  Description of Artificial Sequence: Synthetic oligonucleotide
  Antisense strand to SEQ ID NO: 86978
agccucaggcauuauugcc

SEQ ID NO: 87060 - RNA, 19 nt, Artificial Sequence
  Description of Artificial Sequence: Synthetic oligonucleotide
  Sense strand starting at position 78 of SEQ ID NO: 1093
ucaagucuagcaugagaaa

SEQ ID NO: 87061 - RNA, 19 nt, Artificial Sequence
  Description of Artificial Sequence: Synthetic oligonucleotide
  Antisense strand to SEQ ID NO: 86980
uuucucaugcuagacuuga

SEQ ID NO: 87062 - RNA, 19 nt, Artificial Sequence
  Description of Artificial Sequence: Synthetic oligonucleotide
  Sense strand starting at position 235 of SEQ ID NO: 1093
agcuguuucugagcaugaa

SEQ ID NO: 87063 - RNA, 19 nt, Artificial Sequence
  Description of Artificial Sequence: Synthetic oligonucleotide
  Antisense strand to SEQ ID NO: 86982
uucaugcucagaaacagcu

SEQ ID NO: 87064 - RNA, 19 nt, Artificial Sequence
  Description of Artificial Sequence: Synthetic oligonucleotide
  Sense strand starting at position 236 of SEQ ID NO: 1093
gcuguuucugagcaugaau

SEQ ID NO: 87065 - RNA, 19 nt, Artificial Sequence
  Description of Artificial Sequence: Synthetic oligonucleotide
  Antisense strand to SEQ ID NO: 86984
auucaugcucagaaacagc

SEQ ID NO: 87066 - RNA, 19 nt, Artificial Sequence
  Description of Artificial Sequence: Synthetic oligonucleotide
  Sense strand starting at position 245 of SEQ ID NO: 1093
gagcaugaaucgcugaaag

SEQ ID NO: 87067 - RNA, 19 nt, Artificial Sequence
  Description of Artificial Sequence: Synthetic oligonucleotide
  Antisense strand to SEQ ID NO: 86986
cuuucagcgauucaugcuc

SEQ ID NO: 87068 - RNA, 19 nt, Artificial Sequence
  Description of Artificial Sequence: Synthetic oligonucleotide
  Sense strand starting at position 247 of SEQ ID NO: 1093
gcaugaaucgcugaaaggu

SEQ ID NO: 87069 - RNA, 19 nt, Artificial Sequence
  Description of Artificial Sequence: Synthetic oligonucleotide
  Antisense strand to SEQ ID NO: 86988
accuuucagcgauucaugc

SEQ ID NO: 87070 - RNA, 19 nt, Artificial Sequence
  Description of Artificial Sequence: Synthetic oligonucleotide
  Sense strand starting at position 255 of SEQ ID NO: 1093
cgcugaaagguuuacagaa

SEQ ID NO: 87071 - RNA, 19 nt, Artificial Sequence
  Description of Artificial Sequence: Synthetic oligonucleotide
  Antisense strand to SEQ ID NO: 86990
uucuguaaaccuuucagcg

SEQ ID NO: 87072 - RNA, 19 nt, Artificial Sequence
  Description of Artificial Sequence: Synthetic oligonucleotide
  Sense strand starting at position 363 of SEQ ID NO: 1093
ggagcuuugcauggagaga

SEQ ID NO: 87073 - RNA, 19 nt, Artificial Sequence
  Description of Artificial Sequence: Synthetic oligonucleotide
  Antisense strand to SEQ ID NO: 86992
ucucuccaugcaaagcucc

SEQ ID NO: 87074 - RNA, 19 nt, Artificial Sequence
  Description of Artificial Sequence: Synthetic oligonucleotide
  Sense strand starting at position 364 of SEQ ID NO: 1093
gagcuuugcauggagagaa

SEQ ID NO: 87075 - RNA, 19 nt, Artificial Sequence
  Description of Artificial Sequence: Synthetic oligonucleotide
  Antisense strand to SEQ ID NO: 86994
uucucuccaugcaaagcuc

SEQ ID NO: 87076 - RNA, 19 nt, Artificial Sequence
  Description of Artificial Sequence: Synthetic oligonucleotide
  Sense strand starting at position 448 of SEQ ID NO: 1093
caggaauguggguagaugu

SEQ ID NO: 87077 - RNA, 19 nt, Artificial Sequence
  Description of Artificial Sequence: Synthetic oligonucleotide
  Antisense strand to SEQ ID NO: 86996
acaucuacccacauuccug

SEQ ID NO: 87078 - RNA, 19 nt, Artificial Sequence
  Description of Artificial Sequence: Synthetic oligonucleotide
  Sense strand starting at position 1128 of SEQ ID NO: 1093
cccauacacguacaucaua

SEQ ID NO: 87079 - RNA, 19 nt, Artificial Sequence
  Description of Artificial Sequence: Synthetic oligonucleotide
  Antisense strand to SEQ ID NO: 86998
uaugauguacguguauggg

SEQ ID NO: 87080 - RNA, 19 nt, Artificial Sequence
  Description of Artificial Sequence: Synthetic oligonucleotide
  Sense strand starting at position 1340 of SEQ ID NO: 1093
cgaccugcuguagacaauu

SEQ ID NO: 87081 - RNA, 19 nt, Artificial Sequence
  Description of Artificial Sequence: Synthetic oligonucleotide
  Antisense strand to SEQ ID NO: 87000
aauugucuacagcaggucg

SEQ ID NO: 87082 - RNA, 19 nt, Artificial Sequence
  Description of Artificial Sequence: Synthetic oligonucleotide
  Sense strand starting at position 1384 of SEQ ID NO: 1093
guuuguauccagugaguga

SEQ ID NO: 87083 - RNA, 19 nt, Artificial Sequence
  Description of Artificial Sequence: Synthetic oligonucleotide
  Antisense strand to SEQ ID NO: 87002
ucacucacuggauacaaac

SEQ ID NO: 87084 - RNA, 19 nt, Artificial Sequence
  Description of Artificial Sequence: Synthetic oligonucleotide
  Sense strand starting at position 1388 of SEQ ID NO: 1093
guauccagugagugacaga

SEQ ID NO: 87085 - RNA, 19 nt, Artificial Sequence
  Description of Artificial Sequence: Synthetic oligonucleotide
  Antisense strand to SEQ ID NO: 87004
ucugucacucacuggauac

SEQ ID NO: 87086 - RNA, 19 nt, Artificial Sequence
  Description of Artificial Sequence: Synthetic oligonucleotide
  Sense strand starting at position 1404 of SEQ ID NO: 1093
agaaauuccaggcaugguu

SEQ ID NO: 87087 - RNA, 19 nt, Artificial Sequence
  Description of Artificial Sequence: Synthetic oligonucleotide
  Antisense strand to SEQ ID NO: 87006
aaccaugccuggaauuucu

SEQ ID NO: 87088 - RNA, 19 nt, Artificial Sequence
  Description of Artificial Sequence: Synthetic oligonucleotide
  Sense strand starting at position 1451 of SEQ ID NO: 1093
aguucuuaguggguaggua

SEQ ID NO: 87089 - RNA, 19 nt, Artificial Sequence
  Description of Artificial Sequence: Synthetic oligonucleotide
  Antisense strand to SEQ ID NO: 87008
uaccuacccacuaagaacu

SEQ ID NO: 87090 - RNA, 19 nt, Artificial Sequence
  Description of Artificial Sequence: Synthetic oligonucleotide
  Sense strand starting at position 1466 of SEQ ID NO: 1093
gguagaugcccuugguuag

SEQ ID NO: 87091 - RNA, 19 nt, Artificial Sequence
  Description of Artificial Sequence: Synthetic oligonucleotide
  Antisense strand to SEQ ID NO: 87010
cuaaccaagggcaucuacc

SEQ ID NO: 87092 - RNA, 19 nt, Artificial Sequence
  Description of Artificial Sequence: Synthetic oligonucleotide
  Sense strand starting at position 1577 of SEQ ID NO: 1093
cgugucuguggucucuaau

SEQ ID NO: 87093 - RNA, 19 nt, Artificial Sequence
  Description of Artificial Sequence: Synthetic oligonucleotide
  Antisense strand to SEQ ID NO: 87012
auuagagaccacagacacg

SEQ ID NO: 87094 - RNA, 19 nt, Artificial Sequence
  Description of Artificial Sequence: Synthetic oligonucleotide
  Sense strand starting at position 1681 of SEQ ID NO: 1093
uaaagugcgacucagugua

SEQ ID NO: 87095 - RNA, 19 nt, Artificial Sequence
  Description of Artificial Sequence: Synthetic oligonucleotide
  Antisense strand to SEQ ID NO: 87014
uacacugagucgcacuuua

SEQ ID NO: 87096 - RNA, 19 nt, Artificial Sequence
  Description of Artificial Sequence: Synthetic oligonucleotide
  Sense strand starting at position 1693 of SEQ ID NO: 1093
caguguauucgcccaggca

SEQ ID NO: 87097 - RNA, 19 nt, Artificial Sequence
  Description of Artificial Sequence: Synthetic oligonucleotide
  Antisense strand to SEQ ID NO: 87016
ugccugggcgaauacacug

SEQ ID NO: 87098 - RNA, 19 nt, Artificial Sequence
  Description of Artificial Sequence: Synthetic oligonucleotide
  Sense strand starting at position 1705 of SEQ ID NO: 1093
ccaggcaucccaggauaau

SEQ ID NO: 87099 - RNA, 19 nt, Artificial Sequence
  Description of Artificial Sequence: Synthetic oligonucleotide
  Antisense strand to SEQ ID NO: 87018
auuauccugggaugccugg

SEQ ID NO: 87100 - RNA, 19 nt, Artificial Sequence
  Description of Artificial Sequence: Synthetic oligonucleotide
  Sense strand starting at position 1950 of SEQ ID NO: 1093
gggugaauguccagagggu

SEQ ID NO: 87101 - RNA, 19 nt, Artificial Sequence
  Description of Artificial Sequence: Synthetic oligonucleotide
  Antisense strand to SEQ ID NO: 87020
acccucuggacauucaccc

SEQ ID NO: 87102 - RNA, 19 nt, Artificial Sequence
  Description of Artificial Sequence: Synthetic oligonucleotide
  Sense strand starting at position 2186 of SEQ ID NO: 1093
gggacuuucuccuucuuac

SEQ ID NO: 87103 - RNA, 19 nt, Artificial Sequence
  Description of Artificial Sequence: Synthetic oligonucleotide
  Antisense strand to SEQ ID NO: 87022
guaagaaggagaaaguccc

SEQ ID NO: 87104 - RNA, 19 nt, Artificial Sequence
  Description of Artificial Sequence: Synthetic oligonucleotide
  Sense strand starting at position 2267 of SEQ ID NO: 1093
guggaaaugggcuaucuga

SEQ ID NO: 87105 - RNA, 19 nt, Artificial Sequence
  Description of Artificial Sequence: Synthetic oligonucleotide
  Antisense strand to SEQ ID NO: 87024
ucagauagcccauuuccac

SEQ ID NO: 87106 - RNA, 19 nt, Artificial Sequence
  Description of Artificial Sequence: Synthetic oligonucleotide
  Sense strand starting at position 2295 of SEQ ID NO: 1093
ggagaagugucagugugaa

SEQ ID NO: 87107 - RNA, 19 nt, Artificial Sequence
  Description of Artificial Sequence: Synthetic oligonucleotide
  Antisense strand to SEQ ID NO: 87026
uucacacugacacuucucc

SEQ ID NO: 87108 - RNA, 19 nt, Artificial Sequence
  Description of Artificial Sequence: Synthetic oligonucleotide
  Sense strand starting at position 2310 of SEQ ID NO: 1093
ugaaaugucuuguuuccuc

SEQ ID NO: 87109 - RNA, 19 nt, Artificial Sequence
  Description of Artificial Sequence: Synthetic oligonucleotide
  Antisense strand to SEQ ID NO: 87028
gaggaaacaagacauuuca

SEQ ID NO: 87110 - RNA, 19 nt, Artificial Sequence
  Description of Artificial Sequence: Synthetic oligonucleotide
  Sense strand starting at position 2318 of SEQ ID NO: 1093
cuuguuuccucuccgaaga

SEQ ID NO: 87111 - RNA, 19 nt, Artificial Sequence
  Description of Artificial Sequence: Synthetic oligonucleotide
  Antisense strand to SEQ ID NO: 87030
ucuucggagaggaaacaag

SEQ ID NO: 87112 - RNA, 19 nt, Artificial Sequence
  Description of Artificial Sequence: Synthetic oligonucleotide
  Sense strand starting at position 2342 of SEQ ID NO: 1093
agacacaccuagucugaau

SEQ ID NO: 87113 - RNA, 19 nt, Artificial Sequence
  Description of Artificial Sequence: Synthetic oligonucleotide
  Antisense strand to SEQ ID NO: 87032
auucagacuaggugugucu

SEQ ID NO: 87114 - RNA, 19 nt, Artificial Sequence
  Description of Artificial Sequence: Synthetic oligonucleotide
  Sense strand starting at position 2353 of SEQ ID NO: 1093
gucugaauuagacguagaa

SEQ ID NO: 87115 - RNA, 19 nt, Artificial Sequence
  Description of Artificial Sequence: Synthetic oligonucleotide
  Antisense strand to SEQ ID NO: 87034
uucuacgucuaauucagac

SEQ ID NO: 87116 - RNA, 19 nt, Artificial Sequence
  Description of Artificial Sequence: Synthetic oligonucleotide
  Sense strand starting at position 2518 of SEQ ID NO: 1093
ggcagagauucucuccuuu

SEQ ID NO: 87117 - RNA, 19 nt, Artificial Sequence
  Description of Artificial Sequence: Synthetic oligonucleotide
  Antisense strand to SEQ ID NO: 87036
aaaggagagaaucucugcc

SEQ ID NO: 87118 - RNA, 19 nt, Artificial Sequence
  Description of Artificial Sequence: Synthetic oligonucleotide
  Sense strand starting at position 2608 of SEQ ID NO: 1093
aggcuauggacuggucaga

SEQ ID NO: 87119 - RNA, 19 nt, Artificial Sequence
  Description of Artificial Sequence: Synthetic oligonucleotide
  Antisense strand to SEQ ID NO: 87038
ucugaccaguccauagccu

SEQ ID NO: 87120 - RNA, 19 nt, Artificial Sequence
  Description of Artificial Sequence: Synthetic oligonucleotide
  Sense strand starting at position 2872 of SEQ ID NO: 1093
cuccauugcugggcacaua

SEQ ID NO: 87121 - RNA, 19 nt, Artificial Sequence
  Description of Artificial Sequence: Synthetic oligonucleotide
  Antisense strand to SEQ ID NO: 87040
uaugugcccagcaauggag

SEQ ID NO: 87122 - RNA, 19 nt, Artificial Sequence
  Description of Artificial Sequence: Synthetic oligonucleotide
  Sense strand starting at position 2949 of SEQ ID NO: 1093
cuuucuugagccugcaaua

SEQ ID NO: 87123 - RNA, 19 nt, Artificial Sequence
  Description of Artificial Sequence: Synthetic oligonucleotide
  Antisense strand to SEQ ID NO: 87042
uauugcaggcucaagaaag

SEQ ID NO: 87124 - RNA, 19 nt, Artificial Sequence
  Description of Artificial Sequence: Synthetic oligonucleotide
  Sense strand starting at position 3001 of SEQ ID NO: 1093
ggcagagacuguuucuucu

SEQ ID NO: 87125 - RNA, 19 nt, Artificial Sequence
  Description of Artificial Sequence: Synthetic oligonucleotide
  Antisense strand to SEQ ID NO: 87044
agaagaaacagucucugcc

SEQ ID NO: 87126 - RNA, 19 nt, Artificial Sequence
  Description of Artificial Sequence: Synthetic oligonucleotide
  Sense strand starting at position 3015 of SEQ ID NO: 1093
cuucuaucaggcugggagu

SEQ ID NO: 87127 - RNA, 19 nt, Artificial Sequence
  Description of Artificial Sequence: Synthetic oligonucleotide
  Antisense strand to SEQ ID NO: 87046
acucccagccugauagaag

SEQ ID NO: 87128 - RNA, 19 nt, Artificial Sequence
  Description of Artificial Sequence: Synthetic oligonucleotide
  Sense strand starting at position 3049 of SEQ ID NO: 1093
cuaugucucuacccucaga

SEQ ID NO: 87129 - RNA, 19 nt, Artificial Sequence
  Description of Artificial Sequence: Synthetic oligonucleotide
  Antisense strand to SEQ ID NO: 87048
ucugaggguagagacauag

SEQ ID NO: 87130 - RNA, 19 nt, Artificial Sequence
  Description of Artificial Sequence: Synthetic oligonucleotide
  Sense strand starting at position 3157 of SEQ ID NO: 1093
gucugaugcuuacuguuaa

SEQ ID NO: 87131 - RNA, 19 nt, Artificial Sequence
  Description of Artificial Sequence: Synthetic oligonucleotide
  Antisense strand to SEQ ID NO: 87050
uuaacaguaagcaucagac

SEQ ID NO: 87132 - RNA, 19 nt, Artificial Sequence
  Description of Artificial Sequence: Synthetic oligonucleotide
  Sense strand starting at position 3204 of SEQ ID NO: 1093
acccauuagggcuguuaaa

SEQ ID NO: 87133 - RNA, 19 nt, Artificial Sequence
  Description of Artificial Sequence: Synthetic oligonucleotide
  Antisense strand to SEQ ID NO: 87052
uuuaacagcccuaaugggu

SEQ ID NO: 87134 - RNA, 19 nt, Artificial Sequence
  Description of Artificial Sequence: Synthetic oligonucleotide
  Sense strand starting at position 3328 of SEQ ID NO: 1093
gucuuaaugggcugaagac

SEQ ID NO: 87135 - RNA, 19 nt, Artificial Sequence
  Description of Artificial Sequence: Synthetic oligonucleotide
  Antisense strand to SEQ ID NO: 87054
gucuucagcccauuaagac

SEQ ID NO: 87136 - RNA, 19 nt, Artificial Sequence
  Description of Artificial Sequence: Synthetic oligonucleotide
  Sense strand starting at position 3337 of SEQ ID NO: 1093
ggcugaagacgcuaacuuu

SEQ ID NO: 87137 - RNA, 19 nt, Artificial Sequence
  Description of Artificial Sequence: Synthetic oligonucleotide
  Antisense strand to SEQ ID NO: 87056
aaaguuagcgucuucagcc

SEQ ID NO: 87138 - RNA, 19 nt, Artificial Sequence
  Description of Artificial Sequence: Synthetic oligonucleotide
  Sense strand starting at position 3676 of SEQ ID NO: 1093
cgcacaacuugggaauuua

SEQ ID NO: 87139 - RNA, 19 nt, Artificial Sequence
  Description of Artificial Sequence: Synthetic oligonucleotide
  Antisense strand to SEQ ID NO: 87058
uaaauucccaaguugugcg

SEQ ID NO: 87140 - RNA, 19 nt, Artificial Sequence
  Description of Artificial Sequence: Synthetic oligonucleotide
  Sense strand starting at position 3979 of SEQ ID NO: 1094
aggucagggcuguaaaugu

SEQ ID NO: 87141 - RNA, 19 nt, Artificial Sequence
  Description of Artificial Sequence: Synthetic oligonucleotide
  Antisense strand to SEQ ID NO: 87060
acauuuacagcccugaccu

SEQ ID NO: 87142 - RNA, 19 nt, Artificial Sequence
  Description of Artificial Sequence: Synthetic oligonucleotide
  Sense strand starting at position 3977 of SEQ ID NO: 1094
gaaggucagggcuguaaau

SEQ ID NO: 87143 - RNA, 19 nt, Artificial Sequence
  Description of Artificial Sequence: Synthetic oligonucleotide
  Antisense strand to SEQ ID NO: 87062
auuuacagcccugaccuuc

SEQ ID NO: 87144 - RNA, 19 nt, Artificial Sequence
  Description of Artificial Sequence: Synthetic oligonucleotide
  Sense strand starting at position 3848 of SEQ ID NO: 1094
ugagcaacugcaugaugau

SEQ ID NO: 87145 - RNA, 19 nt, Artificial Sequence
  Description of Artificial Sequence: Synthetic oligonucleotide
  Antisense strand to SEQ ID NO: 87064
aucaucaugcaguugcuca

SEQ ID NO: 87146 - RNA, 19 nt, Artificial Sequence
  Description of Artificial Sequence: Synthetic oligonucleotide
  Sense strand starting at position 3837 of SEQ ID NO: 1094
gauuauuggcuugagcaac

SEQ ID NO: 87147 - RNA, 19 nt, Artificial Sequence
  Description of Artificial Sequence: Synthetic oligonucleotide
  Antisense strand to SEQ ID NO: 87066
guugcucaagccaauaauc

SEQ ID NO: 87148 - RNA, 19 nt, Artificial Sequence
  Description of Artificial Sequence: Synthetic oligonucleotide
  Sense strand starting at position 3836 of SEQ ID NO: 1094
agauuauuggcuugagcaa

SEQ ID NO: 87149 - RNA, 19 nt, Artificial Sequence
  Description of Artificial Sequence: Synthetic oligonucleotide
  Antisense strand to SEQ ID NO: 87068
uugcucaagccaauaaucu

SEQ ID NO: 87150 - RNA, 19 nt, Artificial Sequence
  Description of Artificial Sequence: Synthetic oligonucleotide
  Sense strand starting at position 3773 of SEQ ID NO: 1094
cagaauuuguaauggauca

SEQ ID NO: 87151 - RNA, 19 nt, Artificial Sequence
  Description of Artificial Sequence: Synthetic oligonucleotide
  Antisense strand to SEQ ID NO: 87070
ugauccauuacaaauucug

SEQ ID NO: 87152 - RNA, 19 nt, Artificial Sequence
  Description of Artificial Sequence: Synthetic oligonucleotide
  Sense strand starting at position 3676 of SEQ ID NO: 1094
cugauugguaaugggauua

SEQ ID NO: 87153 - RNA, 19 nt, Artificial Sequence
  Description of Artificial Sequence: Synthetic oligonucleotide
  Antisense strand to SEQ ID NO: 87072
uaaucccauuaccaaucag

SEQ ID NO: 87154 - RNA, 19 nt, Artificial Sequence
  Description of Artificial Sequence: Synthetic oligonucleotide
  Sense strand starting at position 3436 of SEQ ID NO: 1094
aagagaugucaguguuugg

SEQ ID NO: 87155 - RNA, 19 nt, Artificial Sequence
  Description of Artificial Sequence: Synthetic oligonucleotide
  Antisense strand to SEQ ID NO: 87074
ccaaacacugacaucucuu

SEQ ID NO: 87156 - RNA, 19 nt, Artificial Sequence
  Description of Artificial Sequence: Synthetic oligonucleotide
  Sense strand starting at position 3430 of SEQ ID NO: 1094
ccaagaaagagaugucagu

SEQ ID NO: 87157 - RNA, 19 nt, Artificial Sequence
  Description of Artificial Sequence: Synthetic oligonucleotide
  Antisense strand to SEQ ID NO: 87076
acugacaucucuuucuugg

SEQ ID NO: 87158 - RNA, 19 nt, Artificial Sequence
  Description of Artificial Sequence: Synthetic oligonucleotide
  Sense strand starting at position 2946 of SEQ ID NO: 1094
ggaauuugaugugaucuga

SEQ ID NO: 87159 - RNA, 19 nt, Artificial Sequence
  Description of Artificial Sequence: Synthetic oligonucleotide
  Antisense strand to SEQ ID NO: 87078
ucagaucacaucaaauucc

SEQ ID NO: 87160 - RNA, 19 nt, Artificial Sequence
  Description of Artificial Sequence: Synthetic oligonucleotide
  Sense strand starting at position 2866 of SEQ ID NO: 1094
gggauagggccuugaagac

SEQ ID NO: 87161 - RNA, 19 nt, Artificial Sequence
  Description of Artificial Sequence: Synthetic oligonucleotide
  Antisense strand to SEQ ID NO: 87080
gucuucaaggcccuauccc

SEQ ID NO: 87162 - RNA, 19 nt, Artificial Sequence
  Description of Artificial Sequence: Synthetic oligonucleotide
  Sense strand starting at position 2820 of SEQ ID NO: 1094
caaggugaccacggugaua

SEQ ID NO: 87163 - RNA, 19 nt, Artificial Sequence
  Description of Artificial Sequence: Synthetic oligonucleotide
  Antisense strand to SEQ ID NO: 87082
uaucaccguggucaccuug

SEQ ID NO: 87164 - RNA, 19 nt, Artificial Sequence
  Description of Artificial Sequence: Synthetic oligonucleotide
  Sense strand starting at position 2760 of SEQ ID NO: 1094
ggaagauugaagggcucua

SEQ ID NO: 87165 - RNA, 19 nt, Artificial Sequence
  Description of Artificial Sequence: Synthetic oligonucleotide
  Antisense strand to SEQ ID NO: 87084
uagagcccuucaaucuucc

SEQ ID NO: 87166 - RNA, 19 nt, Artificial Sequence
  Description of Artificial Sequence: Synthetic oligonucleotide
  Sense strand starting at position 2713 of SEQ ID NO: 1094
acagaaaugugagcugaaa

SEQ ID NO: 87167 - RNA, 19 nt, Artificial Sequence
  Description of Artificial Sequence: Synthetic oligonucleotide
  Antisense strand to SEQ ID NO: 87086
uuucagcucacauuucugu

SEQ ID NO: 87168 - RNA, 19 nt, Artificial Sequence
  Description of Artificial Sequence: Synthetic oligonucleotide
  Sense strand starting at position 2626 of SEQ ID NO: 1094
ccaucuuauacgggaagac

SEQ ID NO: 87169 - RNA, 19 nt, Artificial Sequence
  Description of Artificial Sequence: Synthetic oligonucleotide
  Antisense strand to SEQ ID NO: 87088
gucuucccguauaagaugg

SEQ ID NO: 87170 - RNA, 19 nt, Artificial Sequence
  Description of Artificial Sequence: Synthetic oligonucleotide
  Sense strand starting at position 2560 of SEQ ID NO: 1094
ggcacugaucucugaacua

SEQ ID NO: 87171 - RNA, 19 nt, Artificial Sequence
  Description of Artificial Sequence: Synthetic oligonucleotide
  Antisense strand to SEQ ID NO: 87090
uaguucagagaucagugcc

SEQ ID NO: 87172 - RNA, 19 nt, Artificial Sequence
  Description of Artificial Sequence: Synthetic oligonucleotide
  Sense strand starting at position 2559 of SEQ ID NO: 1094
gggcacugaucucugaacu

SEQ ID NO: 87173 - RNA, 19 nt, Artificial Sequence
  Description of Artificial Sequence: Synthetic oligonucleotide
  Antisense strand to SEQ ID NO: 87092
aguucagagaucagugccc

SEQ ID NO: 87174 - RNA, 19 nt, Artificial Sequence
  Description of Artificial Sequence: Synthetic oligonucleotide
  Sense strand starting at position 2520 of SEQ ID NO: 1094
guuuauuccgcaguguuua

SEQ ID NO: 87175 - RNA, 19 nt, Artificial Sequence
  Description of Artificial Sequence: Synthetic oligonucleotide
  Antisense strand to SEQ ID NO: 87094
uaaacacugcggaauaaac

SEQ ID NO: 87176 - RNA, 19 nt, Artificial Sequence
  Description of Artificial Sequence: Synthetic oligonucleotide
  Sense strand starting at position 2412 of SEQ ID NO: 1094
gggaucuugccauaagcuu

SEQ ID NO: 87177 - RNA, 19 nt, Artificial Sequence
  Description of Artificial Sequence: Synthetic oligonucleotide
  Antisense strand to SEQ ID NO: 87096
aagcuuauggcaagauccc

SEQ ID NO: 87178 - RNA, 19 nt, Artificial Sequence
  Description of Artificial Sequence: Synthetic oligonucleotide
  Sense strand starting at position 2368 of SEQ ID NO: 1094
ggccucuaccgauaggaga

SEQ ID NO: 87179 - RNA, 19 nt, Artificial Sequence
  Description of Artificial Sequence: Synthetic oligonucleotide
  Antisense strand to SEQ ID NO: 87098
ucuccuaucgguagaggcc

SEQ ID NO: 87180 - RNA, 19 nt, Artificial Sequence
  Description of Artificial Sequence: Synthetic oligonucleotide
  Sense strand starting at position 1580 of SEQ ID NO: 1094
uggaauaaacgacguauga

SEQ ID NO: 87181 - RNA, 19 nt, Artificial Sequence
  Description of Artificial Sequence: Synthetic oligonucleotide
  Antisense strand to SEQ ID NO: 87100
ucauacgucguuuauucca

SEQ ID NO: 87182 - RNA, 19 nt, Artificial Sequence
  Description of Artificial Sequence: Synthetic oligonucleotide
  Sense strand starting at position 1578 of SEQ ID NO: 1094
guuggaauaaacgacguau

SEQ ID NO: 87183 - RNA, 19 nt, Artificial Sequence
  Description of Artificial Sequence: Synthetic oligonucleotide
  Antisense strand to SEQ ID NO: 87102
auacgucguuuauuccaac

SEQ ID NO: 87184 - RNA, 19 nt, Artificial Sequence
  Description of Artificial Sequence: Synthetic oligonucleotide
  Sense strand starting at position 1569 of SEQ ID NO: 1094
gcgaacauuguuggaauaa

SEQ ID NO: 87185 - RNA, 19 nt, Artificial Sequence
  Description of Artificial Sequence: Synthetic oligonucleotide
  Antisense strand to SEQ ID NO: 87104
uuauuccaacaauguucgc

SEQ ID NO: 87186 - RNA, 19 nt, Artificial Sequence
  Description of Artificial Sequence: Synthetic oligonucleotide
  Sense strand starting at position 1567 of SEQ ID NO: 1094
gggcgaacauuguuggaau

SEQ ID NO: 87187 - RNA, 19 nt, Artificial Sequence
  Description of Artificial Sequence: Synthetic oligonucleotide
  Antisense strand to SEQ ID NO: 87106
auuccaacaauguucgccc

SEQ ID NO: 87188 - RNA, 19 nt, Artificial Sequence
  Description of Artificial Sequence: Synthetic oligonucleotide
  Sense strand starting at position 1512 of SEQ ID NO: 1094
gaaaguugccuagaacccu

SEQ ID NO: 87189 - RNA, 19 nt, Artificial Sequence
  Description of Artificial Sequence: Synthetic oligonucleotide
  Antisense strand to SEQ ID NO: 87108
aggguucuaggcaacuuuc

SEQ ID NO: 87190 - RNA, 19 nt, Artificial Sequence
  Description of Artificial Sequence: Synthetic oligonucleotide
  Sense strand starting at position 1509 of SEQ ID NO: 1094
ccagaaaguugccuagaac

SEQ ID NO: 87191 - RNA, 19 nt, Artificial Sequence
  Description of Artificial Sequence: Synthetic oligonucleotide
  Antisense strand to SEQ ID NO: 87110
guucuaggcaacuuucugg

SEQ ID NO: 87192 - RNA, 19 nt, Artificial Sequence
  Description of Artificial Sequence: Synthetic oligonucleotide
  Sense strand starting at position 1508 of SEQ ID NO: 1094
accagaaaguugccuagaa

SEQ ID NO: 87193 - RNA, 19 nt, Artificial Sequence
  Description of Artificial Sequence: Synthetic oligonucleotide
  Antisense strand to SEQ ID NO: 87112
uucuaggcaacuuucuggu

SEQ ID NO: 87194 - RNA, 19 nt, Artificial Sequence
  Description of Artificial Sequence: Synthetic oligonucleotide
  Sense strand starting at position 1500 of SEQ ID NO: 1094
agucccucaccagaaaguu

SEQ ID NO: 87195 - RNA, 19 nt, Artificial Sequence
  Description of Artificial Sequence: Synthetic oligonucleotide
  Antisense strand to SEQ ID NO: 87114
aacuuucuggugagggacu

SEQ ID NO: 87196 - RNA, 19 nt, Artificial Sequence
  Description of Artificial Sequence: Synthetic oligonucleotide
  Sense strand starting at position 1449 of SEQ ID NO: 1094
uguuguuuccugcucacuu

SEQ ID NO: 87197 - RNA, 19 nt, Artificial Sequence
  Description of Artificial Sequence: Synthetic oligonucleotide
  Antisense strand to SEQ ID NO: 87116
aagugagcaggaaacaaca

SEQ ID NO: 87198 - RNA, 19 nt, Artificial Sequence
  Description of Artificial Sequence: Synthetic oligonucleotide
  Sense strand starting at position 1403 of SEQ ID NO: 1094
uuaguagggcuccaauuaa

SEQ ID NO: 87199 - RNA, 19 nt, Artificial Sequence
  Description of Artificial Sequence: Synthetic oligonucleotide
  Antisense strand to SEQ ID NO: 87118
uuaauuggagcccuacuaa

SEQ ID NO: 87200 - RNA, 19 nt, Artificial Sequence
  Description of Artificial Sequence: Synthetic oligonucleotide
  Sense strand starting at position 1238 of SEQ ID NO: 1094
gucaaacaccucugguauc

SEQ ID NO: 87201 - RNA, 19 nt, Artificial Sequence
  Description of Artificial Sequence: Synthetic oligonucleotide
  Antisense strand to SEQ ID NO: 87120
gauaccagagguguuugac

SEQ ID NO: 87202 - RNA, 19 nt, Artificial Sequence
  Description of Artificial Sequence: Synthetic oligonucleotide
  Sense strand starting at position 1061 of SEQ ID NO: 1094
gaaugaucucaaugguguc

SEQ ID NO: 87203 - RNA, 19 nt, Artificial Sequence
  Description of Artificial Sequence: Synthetic oligonucleotide
  Antisense strand to SEQ ID NO: 87122
gacaccauugagaucauuc

SEQ ID NO: 87204 - RNA, 19 nt, Artificial Sequence
  Description of Artificial Sequence: Synthetic oligonucleotide
  Sense strand starting at position 1055 of SEQ ID NO: 1094
agcccugaaugaucucaau

SEQ ID NO: 87205 - RNA, 19 nt, Artificial Sequence
  Description of Artificial Sequence: Synthetic oligonucleotide
  Antisense strand to SEQ ID NO: 87124
auugagaucauucagggcu

SEQ ID NO: 87206 - RNA, 19 nt, Artificial Sequence
  Description of Artificial Sequence: Synthetic oligonucleotide
  Sense strand starting at position 986 of SEQ ID NO: 1094
augcaaaucuaauugagac

SEQ ID NO: 87207 - RNA, 19 nt, Artificial Sequence
  Description of Artificial Sequence: Synthetic oligonucleotide
  Antisense strand to SEQ ID NO: 87126
gucucaauuagauuugcau

SEQ ID NO: 87208 - RNA, 19 nt, Artificial Sequence
  Description of Artificial Sequence: Synthetic oligonucleotide
  Sense strand starting at position 901 of SEQ ID NO: 1094
uuugaauucucaccuggau

SEQ ID NO: 87209 - RNA, 19 nt, Artificial Sequence
  Description of Artificial Sequence: Synthetic oligonucleotide
  Antisense strand to SEQ ID NO: 87128
auccaggugagaauucaaa

SEQ ID NO: 87210 - RNA, 19 nt, Artificial Sequence
  Description of Artificial Sequence: Synthetic oligonucleotide
  Sense strand starting at position 770 of SEQ ID NO: 1094
ucuguuacucuagaugucu

SEQ ID NO: 87211 - RNA, 19 nt, Artificial Sequence
  Description of Artificial Sequence: Synthetic oligonucleotide
  Antisense strand to SEQ ID NO: 87130
agacaucuagaguaacaga

SEQ ID NO: 87212 - RNA, 19 nt, Artificial Sequence
  Description of Artificial Sequence: Synthetic oligonucleotide
  Sense strand starting at position 765 of SEQ ID NO: 1094
agaaaucuguuacucuaga

SEQ ID NO: 87213 - RNA, 19 nt, Artificial Sequence
  Description of Artificial Sequence: Synthetic oligonucleotide
  Antisense strand to SEQ ID NO: 87132
ucuagaguaacagauuucu

SEQ ID NO: 87214 - RNA, 19 nt, Artificial Sequence
  Description of Artificial Sequence: Synthetic oligonucleotide
  Sense strand starting at position 525 of SEQ ID NO: 1094
cuguuuacaguccaacuau

SEQ ID NO: 87215 - RNA, 19 nt, Artificial Sequence
  Description of Artificial Sequence: Synthetic oligonucleotide
  Antisense strand to SEQ ID NO: 87134
auaguuggacuguaaacag

SEQ ID NO: 87216 - RNA, 19 nt, Artificial Sequence
  Description of Artificial Sequence: Synthetic oligonucleotide
  Sense strand starting at position 332 of SEQ ID NO: 1094
uugaacucucaggagcuua

SEQ ID NO: 87217 - RNA, 19 nt, Artificial Sequence
  Description of Artificial Sequence: Synthetic oligonucleotide
  Antisense strand to SEQ ID NO: 87136
uaagcuccugagaguucaa

SEQ ID NO: 87218 - RNA, 19 nt, Artificial Sequence
  Description of Artificial Sequence: Synthetic oligonucleotide
  Sense strand starting at position 203 of SEQ ID NO: 1094
acuacuuugccuuaugagu

SEQ ID NO: 87219 - RNA, 19 nt, Artificial Sequence
  Description of Artificial Sequence: Synthetic oligonucleotide
  Antisense strand to SEQ ID NO: 87138
acucauaaggcaaaguagu

SEQ ID NO: 87220 - RNA, 19 nt, Artificial Sequence
  Description of Artificial Sequence: Synthetic oligonucleotide
  Sense strand starting at position 3915 of SEQ ID NO: 1095
gagagacacgauuguuauc

SEQ ID NO: 87221 - RNA, 19 nt, Artificial Sequence
  Description of Artificial Sequence: Synthetic oligonucleotide
  Antisense strand to SEQ ID NO: 87140
gauaacaaucgugucucuc

SEQ ID NO: 87222 - RNA, 19 nt, Artificial Sequence
  Description of Artificial Sequence: Synthetic oligonucleotide
  Sense strand starting at position 3869 of SEQ ID NO: 1095
ggaugaagcucaucucauc

SEQ ID NO: 87223 - RNA, 19 nt, Artificial Sequence
  Description of Artificial Sequence: Synthetic oligonucleotide
  Antisense strand to SEQ ID NO: 87142
gaugagaugagcuucaucc

SEQ ID NO: 87224 - RNA, 19 nt, Artificial Sequence
  Description of Artificial Sequence: Synthetic oligonucleotide
  Sense strand starting at position 3856 of SEQ ID NO: 1095
gggugaacacucgggauga

SEQ ID NO: 87225 - RNA, 19 nt, Artificial Sequence
  Description of Artificial Sequence: Synthetic oligonucleotide
  Antisense strand to SEQ ID NO: 87144
ucaucccgaguguucaccc

SEQ ID NO: 87226 - RNA, 19 nt, Artificial Sequence
  Description of Artificial Sequence: Synthetic oligonucleotide
  Sense strand starting at position 3836 of SEQ ID NO: 1095
ucuuuacacugaguggauu

SEQ ID NO: 87227 - RNA, 19 nt, Artificial Sequence
  Description of Artificial Sequence: Synthetic oligonucleotide
  Antisense strand to SEQ ID NO: 87146
aauccacucaguguaaaga

SEQ ID NO: 87228 - RNA, 19 nt, Artificial Sequence
  Description of Artificial Sequence: Synthetic oligonucleotide
  Sense strand starting at position 3834 of SEQ ID NO: 1095
ugucuuuacacugagugga

SEQ ID NO: 87229 - RNA, 19 nt, Artificial Sequence
  Description of Artificial Sequence: Synthetic oligonucleotide
  Antisense strand to SEQ ID NO: 87148
uccacucaguguaaagaca

SEQ ID NO: 87230 - RNA, 19 nt, Artificial Sequence
  Description of Artificial Sequence: Synthetic oligonucleotide
  Sense strand starting at position 3827 of SEQ ID NO: 1095
cagggauugucuuuacacu

SEQ ID NO: 87231 - RNA, 19 nt, Artificial Sequence
  Description of Artificial Sequence: Synthetic oligonucleotide
  Antisense strand to SEQ ID NO: 87150
aguguaaagacaaucccug

SEQ ID NO: 87232 - RNA, 19 nt, Artificial Sequence
  Description of Artificial Sequence: Synthetic oligonucleotide
  Sense strand starting at position 3736 of SEQ ID NO: 1095
auucuaaguccuugaggac

SEQ ID NO: 87233 - RNA, 19 nt, Artificial Sequence
  Description of Artificial Sequence: Synthetic oligonucleotide
  Antisense strand to SEQ ID NO: 87152
guccucaaggacuuagaau

SEQ ID NO: 87234 - RNA, 19 nt, Artificial Sequence
  Description of Artificial Sequence: Synthetic oligonucleotide
  Sense strand starting at position 3735 of SEQ ID NO: 1095
cauucuaaguccuugagga

SEQ ID NO: 87235 - RNA, 19 nt, Artificial Sequence
  Description of Artificial Sequence: Synthetic oligonucleotide
  Antisense strand to SEQ ID NO: 87154
uccucaaggacuuagaaug

SEQ ID NO: 87236 - RNA, 19 nt, Artificial Sequence
  Description of Artificial Sequence: Synthetic oligonucleotide
  Sense strand starting at position 3706 of SEQ ID NO: 1095
gugcauugugugcaagauc

SEQ ID NO: 87237 - RNA, 19 nt, Artificial Sequence
  Description of Artificial Sequence: Synthetic oligonucleotide
  Antisense strand to SEQ ID NO: 87156
gaucuugcacacaaugcac

SEQ ID NO: 87238 - RNA, 19 nt, Artificial Sequence
  Description of Artificial Sequence: Synthetic oligonucleotide
  Sense strand starting at position 3705 of SEQ ID NO: 1095
agugcauugugugcaagau

SEQ ID NO: 87239 - RNA, 19 nt, Artificial Sequence
  Description of Artificial Sequence: Synthetic oligonucleotide
  Antisense strand to SEQ ID NO: 87158
aucuugcacacaaugcacu

SEQ ID NO: 87240 - RNA, 19 nt, Artificial Sequence
  Description of Artificial Sequence: Synthetic oligonucleotide
  Sense strand starting at position 3704 of SEQ ID NO: 1095
aagugcauugugugcaaga

SEQ ID NO: 87241 - RNA, 19 nt, Artificial Sequence
  Description of Artificial Sequence: Synthetic oligonucleotide
  Antisense strand to SEQ ID NO: 87160
ucuugcacacaaugcacuu

SEQ ID NO: 87242 - RNA, 19 nt, Artificial Sequence
  Description of Artificial Sequence: Synthetic oligonucleotide
  Sense strand starting at position 3565 of SEQ ID NO: 1095
cccaucagaguuggguaaa

SEQ ID NO: 87243 - RNA, 19 nt, Artificial Sequence
  Description of Artificial Sequence: Synthetic oligonucleotide
  Antisense strand to SEQ ID NO: 87162
uuuacccaacucugauggg

SEQ ID NO: 87244 - RNA, 19 nt, Artificial Sequence
  Description of Artificial Sequence: Synthetic oligonucleotide
  Sense strand starting at position 3564 of SEQ ID NO: 1095
gcccaucagaguuggguaa

SEQ ID NO: 87245 - RNA, 19 nt, Artificial Sequence
  Description of Artificial Sequence: Synthetic oligonucleotide
  Antisense strand to SEQ ID NO: 87164
uuacccaacucugaugggc

SEQ ID NO: 87246 - RNA, 19 nt, Artificial Sequence
  Description of Artificial Sequence: Synthetic oligonucleotide
  Sense strand starting at position 3524 of SEQ ID NO: 1095
ggugacuucuuggcaggga

SEQ ID NO: 87247 - RNA, 19 nt, Artificial Sequence
  Description of Artificial Sequence: Synthetic oligonucleotide
  Antisense strand to SEQ ID NO: 87166
ucccugccaagaagucacc

SEQ ID NO: 87248 - RNA, 19 nt, Artificial Sequence
  Description of Artificial Sequence: Synthetic oligonucleotide
  Sense strand starting at position 3495 of SEQ ID NO: 1095
cugaucacugccuagcaaa

SEQ ID NO: 87249 - RNA, 19 nt, Artificial Sequence
  Description of Artificial Sequence: Synthetic oligonucleotide
  Antisense strand to SEQ ID NO: 87168
uuugcuaggcagugaucag

SEQ ID NO: 87250 - RNA, 19 nt, Artificial Sequence
  Description of Artificial Sequence: Synthetic oligonucleotide
  Sense strand starting at position 3469 of SEQ ID NO: 1095
ucgguuuacucuuccagau

SEQ ID NO: 87251 - RNA, 19 nt, Artificial Sequence
  Description of Artificial Sequence: Synthetic oligonucleotide
  Antisense strand to SEQ ID NO: 87170
aucuggaagaguaaaccga

SEQ ID NO: 87252 - RNA, 19 nt, Artificial Sequence
  Description of Artificial Sequence: Synthetic oligonucleotide
  Sense strand starting at position 3405 of SEQ ID NO: 1095
cuuugacucuaggagacaa

SEQ ID NO: 87253 - RNA, 19 nt, Artificial Sequence
  Description of Artificial Sequence: Synthetic oligonucleotide
  Antisense strand to SEQ ID NO: 87172
uugucuccuagagucaaag

SEQ ID NO: 87254 - RNA, 19 nt, Artificial Sequence
  Description of Artificial Sequence: Synthetic oligonucleotide
  Sense strand starting at position 3396 of SEQ ID NO: 1095
cucugaaggcuuugacucu

SEQ ID NO: 87255 - RNA, 19 nt, Artificial Sequence
  Description of Artificial Sequence: Synthetic oligonucleotide
  Antisense strand to SEQ ID NO: 87174
agagucaaagccuucagag

SEQ ID NO: 87256 - RNA, 19 nt, Artificial Sequence
  Description of Artificial Sequence: Synthetic oligonucleotide
  Sense strand starting at position 3388 of SEQ ID NO: 1095
gaauuuggcucugaaggcu

SEQ ID NO: 87257 - RNA, 19 nt, Artificial Sequence
  Description of Artificial Sequence: Synthetic oligonucleotide
  Antisense strand to SEQ ID NO: 87176
agccuucagagccaaauuc

SEQ ID NO: 87258 - RNA, 19 nt, Artificial Sequence
  Description of Artificial Sequence: Synthetic oligonucleotide
  Sense strand starting at position 3280 of SEQ ID NO: 1095
uuagaaucccaguagugac

SEQ ID NO: 87259 - RNA, 19 nt, Artificial Sequence
  Description of Artificial Sequence: Synthetic oligonucleotide
  Antisense strand to SEQ ID NO: 87178
gucacuacugggauucuaa

SEQ ID NO: 87260 - RNA, 19 nt, Artificial Sequence
  Description of Artificial Sequence: Synthetic oligonucleotide
  Sense strand starting at position 3112 of SEQ ID NO: 1095
ugaccaagguccucaaaga

SEQ ID NO: 87261 - RNA, 19 nt, Artificial Sequence
  Description of Artificial Sequence: Synthetic oligonucleotide
  Antisense strand to SEQ ID NO: 87180
ucuuugaggaccuugguca

SEQ ID NO: 87262 - RNA, 19 nt, Artificial Sequence
  Description of Artificial Sequence: Synthetic oligonucleotide
  Sense strand starting at position 3057 of SEQ ID NO: 1095
uaucaauugucaucagagg

SEQ ID NO: 87263 - RNA, 19 nt, Artificial Sequence
  Description of Artificial Sequence: Synthetic oligonucleotide
  Antisense strand to SEQ ID NO: 87182
ccucugaugacaauugaua

SEQ ID NO: 87264 - RNA, 19 nt, Artificial Sequence
  Description of Artificial Sequence: Synthetic oligonucleotide
  Sense strand starting at position 3041 of SEQ ID NO: 1095
gcaccaucaucgcuaguau

SEQ ID NO: 87265 - RNA, 19 nt, Artificial Sequence
  Description of Artificial Sequence: Synthetic oligonucleotide
  Antisense strand to SEQ ID NO: 87184
auacuagcgaugauggugc

SEQ ID NO: 87266 - RNA, 19 nt, Artificial Sequence
  Description of Artificial Sequence: Synthetic oligonucleotide
  Sense strand starting at position 2937 of SEQ ID NO: 1095
augggcuacuaggaauaaa

SEQ ID NO: 87267 - RNA, 19 nt, Artificial Sequence
  Description of Artificial Sequence: Synthetic oligonucleotide
  Antisense strand to SEQ ID NO: 87186
uuuauuccuaguagcccau

SEQ ID NO: 87268 - RNA, 19 nt, Artificial Sequence
  Description of Artificial Sequence: Synthetic oligonucleotide
  Sense strand starting at position 2870 of SEQ ID NO: 1095
cucugugcuuugucugaaa

SEQ ID NO: 87269 - RNA, 19 nt, Artificial Sequence
  Description of Artificial Sequence: Synthetic oligonucleotide
  Antisense strand to SEQ ID NO: 87188
uuucagacaaagcacagag

SEQ ID NO: 87270 - RNA, 19 nt, Artificial Sequence
  Description of Artificial Sequence: Synthetic oligonucleotide
  Sense strand starting at position 2726 of SEQ ID NO: 1095
gugaaagauugagggaaga

SEQ ID NO: 87271 - RNA, 19 nt, Artificial Sequence
  Description of Artificial Sequence: Synthetic oligonucleotide
  Antisense strand to SEQ ID NO: 87190
ucuucccucaaucuuucac

SEQ ID NO: 87272 - RNA, 19 nt, Artificial Sequence
  Description of Artificial Sequence: Synthetic oligonucleotide
  Sense strand starting at position 2716 of SEQ ID NO: 1095
aucuccuacggugaaagau

SEQ ID NO: 87273 - RNA, 19 nt, Artificial Sequence
  Description of Artificial Sequence: Synthetic oligonucleotide
  Antisense strand to SEQ ID NO: 87192
aucuuucaccguaggagau

SEQ ID NO: 87274 - RNA, 19 nt, Artificial Sequence
  Description of Artificial Sequence: Synthetic oligonucleotide
  Sense strand starting at position 2712 of SEQ ID NO: 1095
gacaaucuccuacggugaa

SEQ ID NO: 87275 - RNA, 19 nt, Artificial Sequence
  Description of Artificial Sequence: Synthetic oligonucleotide
  Antisense strand to SEQ ID NO: 87194
uucaccguaggagauuguc

SEQ ID NO: 87276 - RNA, 19 nt, Artificial Sequence
  Description of Artificial Sequence: Synthetic oligonucleotide
  Sense strand starting at position 2678 of SEQ ID NO: 1095
guuagauguggacacaucu

SEQ ID NO: 87277 - RNA, 19 nt, Artificial Sequence
  Description of Artificial Sequence: Synthetic oligonucleotide
  Antisense strand to SEQ ID NO: 87196
agauguguccacaucuaac

SEQ ID NO: 87278 - RNA, 19 nt, Artificial Sequence
  Description of Artificial Sequence: Synthetic oligonucleotide
  Sense strand starting at position 2656 of SEQ ID NO: 1095
uugcauuagugcucagauc

SEQ ID NO: 87279 - RNA, 19 nt, Artificial Sequence
  Description of Artificial Sequence: Synthetic oligonucleotide
  Antisense strand to SEQ ID NO: 87198
gaucugagcacuaaugcaa

SEQ ID NO: 87280 - RNA, 19 nt, Artificial Sequence
  Description of Artificial Sequence: Synthetic oligonucleotide
  Sense strand starting at position 2624 of SEQ ID NO: 1095
accagccuuucugagaaca

SEQ ID NO: 87281 - RNA, 19 nt, Artificial Sequence
  Description of Artificial Sequence: Synthetic oligonucleotide
  Antisense strand to SEQ ID NO: 87200
uguucucagaaaggcuggu

SEQ ID NO: 87282 - RNA, 19 nt, Artificial Sequence
  Description of Artificial Sequence: Synthetic oligonucleotide
  Sense strand starting at position 2601 of SEQ ID NO: 1095
gccugacaaguuuauuaag

SEQ ID NO: 87283 - RNA, 19 nt, Artificial Sequence
  Description of Artificial Sequence: Synthetic oligonucleotide
  Antisense strand to SEQ ID NO: 87202
cuuaauaaacuugucaggc

SEQ ID NO: 87284 - RNA, 19 nt, Artificial Sequence
  Description of Artificial Sequence: Synthetic oligonucleotide
  Sense strand starting at position 2341 of SEQ ID NO: 1095
uugguuauucuuuaugugu

SEQ ID NO: 87285 - RNA, 19 nt, Artificial Sequence
  Description of Artificial Sequence: Synthetic oligonucleotide
  Antisense strand to SEQ ID NO: 87204
acacauaaagaauaaccaa

SEQ ID NO: 87286 - RNA, 19 nt, Artificial Sequence
  Description of Artificial Sequence: Synthetic oligonucleotide
  Sense strand starting at position 2340 of SEQ ID NO: 1095
guugguuauucuuuaugug

SEQ ID NO: 87287 - RNA, 19 nt, Artificial Sequence
  Description of Artificial Sequence: Synthetic oligonucleotide
  Antisense strand to SEQ ID NO: 87206
cacauaaagaauaaccaac

SEQ ID NO: 87288 - RNA, 19 nt, Artificial Sequence
  Description of Artificial Sequence: Synthetic oligonucleotide
  Sense strand starting at position 2294 of SEQ ID NO: 1095
ggaagcucuuaaccaaaca

SEQ ID NO: 87289 - RNA, 19 nt, Artificial Sequence
  Description of Artificial Sequence: Synthetic oligonucleotide
  Antisense strand to SEQ ID NO: 87208
uguuugguuaagagcuucc

SEQ ID NO: 87290 - RNA, 19 nt, Artificial Sequence
  Description of Artificial Sequence: Synthetic oligonucleotide
  Sense strand starting at position 2291 of SEQ ID NO: 1095
ggaggaagcucuuaaccaa

SEQ ID NO: 87291 - RNA, 19 nt, Artificial Sequence
  Description of Artificial Sequence: Synthetic oligonucleotide
  Antisense strand to SEQ ID NO: 87210
uugguuaagagcuuccucc

SEQ ID NO: 87292 - RNA, 19 nt, Artificial Sequence
  Description of Artificial Sequence: Synthetic oligonucleotide
  Sense strand starting at position 2265 of SEQ ID NO: 1095
ggaguauccagugggcaua

SEQ ID NO: 87293 - RNA, 19 nt, Artificial Sequence
  Description of Artificial Sequence: Synthetic oligonucleotide
  Antisense strand to SEQ ID NO: 87212
uaugcccacuggauacucc

SEQ ID NO: 87294 - RNA, 19 nt, Artificial Sequence
  Description of Artificial Sequence: Synthetic oligonucleotide
  Sense strand starting at position 2264 of SEQ ID NO: 1095
aggaguauccagugggcau

SEQ ID NO: 87295 - RNA, 19 nt, Artificial Sequence
  Description of Artificial Sequence: Synthetic oligonucleotide
  Antisense strand to SEQ ID NO: 87214
augcccacuggauacuccu

SEQ ID NO: 87296 - RNA, 19 nt, Artificial Sequence
  Description of Artificial Sequence: Synthetic oligonucleotide
  Sense strand starting at position 2208 of SEQ ID NO: 1095
cugagcuugugaucagcca

SEQ ID NO: 87297 - RNA, 19 nt, Artificial Sequence
  Description of Artificial Sequence: Synthetic oligonucleotide
  Antisense strand to SEQ ID NO: 87216
uggcugaucacaagcucag

SEQ ID NO: 87298 - RNA, 19 nt, Artificial Sequence
  Description of Artificial Sequence: Synthetic oligonucleotide
  Sense strand starting at position 2044 of SEQ ID NO: 1095
agggaguucugggcugguu

SEQ ID NO: 87299 - RNA, 19 nt, Artificial Sequence
  Description of Artificial Sequence: Synthetic oligonucleotide
  Antisense strand to SEQ ID NO: 87218
aaccagcccagaacucccu

SEQ ID NO: 87300 - RNA, 19 nt, Artificial Sequence
  Description of Artificial Sequence: Synthetic oligonucleotide
  Sense strand starting at position 1 of SEQ ID NO: 1097
cucuauaaaguguaucacu

SEQ ID NO: 87301 - RNA, 19 nt, Artificial Sequence
  Description of Artificial Sequence: Synthetic oligonucleotide
  Antisense strand to SEQ ID NO: 87220
agugauacacuuuauagag

SEQ ID NO: 87302 - RNA, 19 nt, Artificial Sequence
  Description of Artificial Sequence: Synthetic oligonucleotide
  Sense strand starting at position 61 of SEQ ID NO: 1097
agugucacacccuaaucuu

SEQ ID NO: 87303 - RNA, 19 nt, Artificial Sequence
  Description of Artificial Sequence: Synthetic oligonucleotide
  Antisense strand to SEQ ID NO: 87222
aagauuagggugugacacu

SEQ ID NO: 87304 - RNA, 19 nt, Artificial Sequence
  Description of Artificial Sequence: Synthetic oligonucleotide
  Sense strand starting at position 80 of SEQ ID NO: 1097
ggcccuuguccucaagaug

SEQ ID NO: 87305 - RNA, 19 nt, Artificial Sequence
  Description of Artificial Sequence: Synthetic oligonucleotide
  Antisense strand to SEQ ID NO: 87224
caucuugaggacaagggcc

SEQ ID NO: 87306 - RNA, 19 nt, Artificial Sequence
  Description of Artificial Sequence: Synthetic oligonucleotide
  Sense strand starting at position 360 of SEQ ID NO: 1097
auaacuauguuagcaugau

SEQ ID NO: 87307 - RNA, 19 nt, Artificial Sequence
  Description of Artificial Sequence: Synthetic oligonucleotide
  Antisense strand to SEQ ID NO: 87226
aucaugcuaacauaguuau

SEQ ID NO: 87308 - RNA, 19 nt, Artificial Sequence
  Description of Artificial Sequence: Synthetic oligonucleotide
  Sense strand starting at position 364 of SEQ ID NO: 1097
cuauguuagcaugauaaua

SEQ ID NO: 87309 - RNA, 19 nt, Artificial Sequence
  Description of Artificial Sequence: Synthetic oligonucleotide
  Antisense strand to SEQ ID NO: 87228
uauuaucaugcuaacauag

SEQ ID NO: 87310 - RNA, 19 nt, Artificial Sequence
  Description of Artificial Sequence: Synthetic oligonucleotide
  Sense strand starting at position 487 of SEQ ID NO: 1097
guauauggugcucaauaug

SEQ ID NO: 87311 - RNA, 19 nt, Artificial Sequence
  Description of Artificial Sequence: Synthetic oligonucleotide
  Antisense strand to SEQ ID NO: 87230
cauauugagcaccauauac

SEQ ID NO: 87312 - RNA, 19 nt, Artificial Sequence
  Description of Artificial Sequence: Synthetic oligonucleotide
  Sense strand starting at position 497 of SEQ ID NO: 1097
cucaauaugcgucaugaac

SEQ ID NO: 87313 - RNA, 19 nt, Artificial Sequence
  Description of Artificial Sequence: Synthetic oligonucleotide
  Antisense strand to SEQ ID NO: 87232
guucaugacgcauauugag

SEQ ID NO: 87314 - RNA, 19 nt, Artificial Sequence
  Description of Artificial Sequence: Synthetic oligonucleotide
  Sense strand starting at position 505 of SEQ ID NO: 1097
gcgucaugaacugaucaga

SEQ ID NO: 87315 - RNA, 19 nt, Artificial Sequence
  Description of Artificial Sequence: Synthetic oligonucleotide
  Antisense strand to SEQ ID NO: 87234
ucugaucaguucaugacgc

SEQ ID NO: 87316 - RNA, 19 nt, Artificial Sequence
  Description of Artificial Sequence: Synthetic oligonucleotide
  Sense strand starting at position 662 of SEQ ID NO: 1097
ggaugugacaucuagcuug

SEQ ID NO: 87317 - RNA, 19 nt, Artificial Sequence
  Description of Artificial Sequence: Synthetic oligonucleotide
  Antisense strand to SEQ ID NO: 87236
caagcuagaugucacaucc

SEQ ID NO: 87318 - RNA, 19 nt, Artificial Sequence
  Description of Artificial Sequence: Synthetic oligonucleotide
  Sense strand starting at position 699 of SEQ ID NO: 1097
auaccugucuauguagaua

SEQ ID NO: 87319 - RNA, 19 nt, Artificial Sequence
  Description of Artificial Sequence: Synthetic oligonucleotide
  Antisense strand to SEQ ID NO: 87238
uaucuacauagacagguau

SEQ ID NO: 87320 - RNA, 19 nt, Artificial Sequence
  Description of Artificial Sequence: Synthetic oligonucleotide
  Sense strand starting at position 719 of SEQ ID NO: 1097
ucuuucuuaccagauggua

SEQ ID NO: 87321 - RNA, 19 nt, Artificial Sequence
  Description of Artificial Sequence: Synthetic oligonucleotide
  Antisense strand to SEQ ID NO: 87240
uaccaucugguaagaaaga

SEQ ID NO: 87322 - RNA, 19 nt, Artificial Sequence
  Description of Artificial Sequence: Synthetic oligonucleotide
  Sense strand starting at position 765 of SEQ ID NO: 1097
gugccauugcugucaaagc

SEQ ID NO: 87323 - RNA, 19 nt, Artificial Sequence
  Description of Artificial Sequence: Synthetic oligonucleotide
  Antisense strand to SEQ ID NO: 87242
gcuuugacagcaauggcac

SEQ ID NO: 87324 - RNA, 19 nt, Artificial Sequence
  Description of Artificial Sequence: Synthetic oligonucleotide
  Sense strand starting at position 822 of SEQ ID NO: 1097
cauaguagguaguccauaa

SEQ ID NO: 87325 - RNA, 19 nt, Artificial Sequence
  Description of Artificial Sequence: Synthetic oligonucleotide
  Antisense strand to SEQ ID NO: 87244
uuauggacuaccuacuaug

SEQ ID NO: 87326 - RNA, 19 nt, Artificial Sequence
  Description of Artificial Sequence: Synthetic oligonucleotide
  Sense strand starting at position 1074 of SEQ ID NO: 1097
acguuuguaagugagaaua

SEQ ID NO: 87327 - RNA, 19 nt, Artificial Sequence
  Description of Artificial Sequence: Synthetic oligonucleotide
  Antisense strand to SEQ ID NO: 87246
uauucucacuuacaaacgu

SEQ ID NO: 87328 - RNA, 19 nt, Artificial Sequence
  Description of Artificial Sequence: Synthetic oligonucleotide
  Sense strand starting at position 1198 of SEQ ID NO: 1097
gacagcaaucuuuggaguu

SEQ ID NO: 87329 - RNA, 19 nt, Artificial Sequence
  Description of Artificial Sequence: Synthetic oligonucleotide
  Antisense strand to SEQ ID NO: 87248
aacuccaaagauugcuguc

SEQ ID NO: 87330 - RNA, 19 nt, Artificial Sequence
  Description of Artificial Sequence: Synthetic oligonucleotide
  Sense strand starting at position 1405 of SEQ ID NO: 1097
ggcaucacucugcauagau

SEQ ID NO: 87331 - RNA, 19 nt, Artificial Sequence
  Description of Artificial Sequence: Synthetic oligonucleotide
  Antisense strand to SEQ ID NO: 87250
aucuaugcagagugaugcc

SEQ ID NO: 87332 - RNA, 19 nt, Artificial Sequence
  Description of Artificial Sequence: Synthetic oligonucleotide
  Sense strand starting at position 1593 of SEQ ID NO: 1097
gggcuuccuccacaauuga

SEQ ID NO: 87333 - RNA, 19 nt, Artificial Sequence
  Description of Artificial Sequence: Synthetic oligonucleotide
  Antisense strand to SEQ ID NO: 87252
ucaauuguggaggaagccc

SEQ ID NO: 87334 - RNA, 19 nt, Artificial Sequence
  Description of Artificial Sequence: Synthetic oligonucleotide
  Sense strand starting at position 2079 of SEQ ID NO: 1097
agagaaguggguugaccuu

SEQ ID NO: 87335 - RNA, 19 nt, Artificial Sequence
  Description of Artificial Sequence: Synthetic oligonucleotide
  Antisense strand to SEQ ID NO: 87254
aaggucaacccacuucucu

SEQ ID NO: 87336 - RNA, 19 nt, Artificial Sequence
  Description of Artificial Sequence: Synthetic oligonucleotide
  Sense strand starting at position 2332 of SEQ ID NO: 1097
cuguuuaauggguagcaaa

SEQ ID NO: 87337 - RNA, 19 nt, Artificial Sequence
  Description of Artificial Sequence: Synthetic oligonucleotide
  Antisense strand to SEQ ID NO: 87256
uuugcuacccauuaaacag

SEQ ID NO: 87338 - RNA, 19 nt, Artificial Sequence
  Description of Artificial Sequence: Synthetic oligonucleotide
  Sense strand starting at position 2375 of SEQ ID NO: 1097
cuuucuauccaugauguua

SEQ ID NO: 87339 - RNA, 19 nt, Artificial Sequence
  Description of Artificial Sequence: Synthetic oligonucleotide
  Antisense strand to SEQ ID NO: 87258
uaacaucauggauagaaag

SEQ ID NO: 87340 - RNA, 19 nt, Artificial Sequence
  Description of Artificial Sequence: Synthetic oligonucleotide
  Sense strand starting at position 2711 of SEQ ID NO: 1097
ggcucauaguauuugccau

SEQ ID NO: 87341 - RNA, 19 nt, Artificial Sequence
  Description of Artificial Sequence: Synthetic oligonucleotide
  Antisense strand to SEQ ID NO: 87260
auggcaaauacuaugagcc

SEQ ID NO: 87342 - RNA, 19 nt, Artificial Sequence
  Description of Artificial Sequence: Synthetic oligonucleotide
  Sense strand starting at position 2718 of SEQ ID NO: 1097
aguauuugccauuguuaug

SEQ ID NO: 87343 - RNA, 19 nt, Artificial Sequence
  Description of Artificial Sequence: Synthetic oligonucleotide
  Antisense strand to SEQ ID NO: 87262
cauaacaauggcaaauacu

SEQ ID NO: 87344 - RNA, 19 nt, Artificial Sequence
  Description of Artificial Sequence: Synthetic oligonucleotide
  Sense strand starting at position 2808 of SEQ ID NO: 1097
auggauuaagugugaggau

SEQ ID NO: 87345 - RNA, 19 nt, Artificial Sequence
  Description of Artificial Sequence: Synthetic oligonucleotide
  Antisense strand to SEQ ID NO: 87264
auccucacacuuaauccau

SEQ ID NO: 87346 - RNA, 19 nt, Artificial Sequence
  Description of Artificial Sequence: Synthetic oligonucleotide
  Sense strand starting at position 2827 of SEQ ID NO: 1097
gaaucaugucguuauaacu

SEQ ID NO: 87347 - RNA, 19 nt, Artificial Sequence
  Description of Artificial Sequence: Synthetic oligonucleotide
  Antisense strand to SEQ ID NO: 87266
aguuauaacgacaugauuc

SEQ ID NO: 87348 - RNA, 19 nt, Artificial Sequence
  Description of Artificial Sequence: Synthetic oligonucleotide
  Sense strand starting at position 2834 of SEQ ID NO: 1097
gucguuauaacugauggag

SEQ ID NO: 87349 - RNA, 19 nt, Artificial Sequence
  Description of Artificial Sequence: Synthetic oligonucleotide
  Antisense strand to SEQ ID NO: 87268
cuccaucaguuauaacgac

SEQ ID NO: 87350 - RNA, 19 nt, Artificial Sequence
  Description of Artificial Sequence: Synthetic oligonucleotide
  Sense strand starting at position 2858 of SEQ ID NO: 1097
guuauaaggguguauacau

SEQ ID NO: 87351 - RNA, 19 nt, Artificial Sequence
  Description of Artificial Sequence: Synthetic oligonucleotide
  Antisense strand to SEQ ID NO: 87270
auguauacacccuuauaac

SEQ ID NO: 87352 - RNA, 19 nt, Artificial Sequence
  Description of Artificial Sequence: Synthetic oligonucleotide
  Sense strand starting at position 2942 of SEQ ID NO: 1097
agguuuauaucaccaggua

SEQ ID NO: 87353 - RNA, 19 nt, Artificial Sequence
  Description of Artificial Sequence: Synthetic oligonucleotide
  Antisense strand to SEQ ID NO: 87272
uaccuggugauauaaaccu

SEQ ID NO: 87354 - RNA, 19 nt, Artificial Sequence
  Description of Artificial Sequence: Synthetic oligonucleotide
  Sense strand starting at position 2943 of SEQ ID NO: 1097
gguuuauaucaccagguaa

SEQ ID NO: 87355 - RNA, 19 nt, Artificial Sequence
  Description of Artificial Sequence: Synthetic oligonucleotide
  Antisense strand to SEQ ID NO: 87274
uuaccuggugauauaaacc

SEQ ID NO: 87356 - RNA, 19 nt, Artificial Sequence
  Description of Artificial Sequence: Synthetic oligonucleotide
  Sense strand starting at position 2945 of SEQ ID NO: 1097
uuuauaucaccagguaaag

SEQ ID NO: 87357 - RNA, 19 nt, Artificial Sequence
  Description of Artificial Sequence: Synthetic oligonucleotide
  Antisense strand to SEQ ID NO: 87276
cuuuaccuggugauauaaa

SEQ ID NO: 87358 - RNA, 19 nt, Artificial Sequence
  Description of Artificial Sequence: Synthetic oligonucleotide
  Sense strand starting at position 2956 of SEQ ID NO: 1097
agguaaagcagccaugagu

SEQ ID NO: 87359 - RNA, 19 nt, Artificial Sequence
  Description of Artificial Sequence: Synthetic oligonucleotide
  Antisense strand to SEQ ID NO: 87278
acucauggcugcuuuaccu

SEQ ID NO: 87360 - RNA, 19 nt, Artificial Sequence
  Description of Artificial Sequence: Synthetic oligonucleotide
  Sense strand starting at position 3412 of SEQ ID NO: 1097
uagguaaugggcuaucugu

SEQ ID NO: 87361 - RNA, 19 nt, Artificial Sequence
  Description of Artificial Sequence: Synthetic oligonucleotide
  Antisense strand to SEQ ID NO: 87280
acagauagcccauuaccua

SEQ ID NO: 87362 - RNA, 19 nt, Artificial Sequence
  Description of Artificial Sequence: Synthetic oligonucleotide
  Sense strand starting at position 3449 of SEQ ID NO: 1097
gcuauuuccugagucuuga

SEQ ID NO: 87363 - RNA, 19 nt, Artificial Sequence
  Description of Artificial Sequence: Synthetic oligonucleotide
  Antisense strand to SEQ ID NO: 87282
ucaagacucaggaaauagc

SEQ ID NO: 87364 - RNA, 19 nt, Artificial Sequence
  Description of Artificial Sequence: Synthetic oligonucleotide
  Sense strand starting at position 3488 of SEQ ID NO: 1097
aaggcaauaccuggguaaa

SEQ ID NO: 87365 - RNA, 19 nt, Artificial Sequence
  Description of Artificial Sequence: Synthetic oligonucleotide
  Antisense strand to SEQ ID NO: 87284
uuuacccagguauugccuu

SEQ ID NO: 87366 - RNA, 19 nt, Artificial Sequence
  Description of Artificial Sequence: Synthetic oligonucleotide
  Sense strand starting at position 3489 of SEQ ID NO: 1097
aggcaauaccuggguaaau

SEQ ID NO: 87367 - RNA, 19 nt, Artificial Sequence
  Description of Artificial Sequence: Synthetic oligonucleotide
  Antisense strand to SEQ ID NO: 87286
auuuacccagguauugccu

SEQ ID NO: 87368 - RNA, 19 nt, Artificial Sequence
  Description of Artificial Sequence: Synthetic oligonucleotide
  Sense strand starting at position 3490 of SEQ ID NO: 1097
ggcaauaccuggguaaaug

SEQ ID NO: 87369 - RNA, 19 nt, Artificial Sequence
  Description of Artificial Sequence: Synthetic oligonucleotide
  Antisense strand to SEQ ID NO: 87288
cauuuacccagguauugcc

SEQ ID NO: 87370 - RNA, 19 nt, Artificial Sequence
  Description of Artificial Sequence: Synthetic oligonucleotide
  Sense strand starting at position 3741 of SEQ ID NO: 1097
cagacugcuguccaucaga

SEQ ID NO: 87371 - RNA, 19 nt, Artificial Sequence
  Description of Artificial Sequence: Synthetic oligonucleotide
  Antisense strand to SEQ ID NO: 87290
ucugauggacagcagucug

SEQ ID NO: 87372 - RNA, 19 nt, Artificial Sequence
  Description of Artificial Sequence: Synthetic oligonucleotide
  Sense strand starting at position 3867 of SEQ ID NO: 1097
uggagaauaguauguaauu

SEQ ID NO: 87373 - RNA, 19 nt, Artificial Sequence
  Description of Artificial Sequence: Synthetic oligonucleotide
  Antisense strand to SEQ ID NO: 87292
aauuacauacuauucucca

SEQ ID NO: 87374 - RNA, 19 nt, Artificial Sequence
  Description of Artificial Sequence: Synthetic oligonucleotide
  Sense strand starting at position 3868 of SEQ ID NO: 1097
ggagaauaguauguaauua

SEQ ID NO: 87375 - RNA, 19 nt, Artificial Sequence
  Description of Artificial Sequence: Synthetic oligonucleotide
  Antisense strand to SEQ ID NO: 87294
uaauuacauacuauucucc

SEQ ID NO: 87376 - RNA, 19 nt, Artificial Sequence
  Description of Artificial Sequence: Synthetic oligonucleotide
  Sense strand starting at position 3949 of SEQ ID NO: 1097
accauaacugcuuggguga

SEQ ID NO: 87377 - RNA, 19 nt, Artificial Sequence
  Description of Artificial Sequence: Synthetic oligonucleotide
  Antisense strand to SEQ ID NO: 87296
ucacccaagcaguuauggu

SEQ ID NO: 87378 - RNA, 19 nt, Artificial Sequence
  Description of Artificial Sequence: Synthetic oligonucleotide
  Sense strand starting at position 3960 of SEQ ID NO: 1097
uugggugauaguggagauu

SEQ ID NO: 87379 - RNA, 19 nt, Artificial Sequence
  Description of Artificial Sequence: Synthetic oligonucleotide
  Antisense strand to SEQ ID NO: 87298
aaucuccacuaucacccaa

SEQ ID NO: 87380 - RNA, 19 nt, Artificial Sequence
  Description of Artificial Sequence: Synthetic oligonucleotide
  Sense strand starting at position 11 of SEQ ID NO: 1096
agcaauuagccucagagca

SEQ ID NO: 87381 - RNA, 19 nt, Artificial Sequence
  Description of Artificial Sequence: Synthetic oligonucleotide
  Antisense strand to SEQ ID NO: 87300
ugcucugaggcuaauugcu

SEQ ID NO: 87382 - RNA, 19 nt, Artificial Sequence
  Description of Artificial Sequence: Synthetic oligonucleotide
  Sense strand starting at position 91 of SEQ ID NO: 1096
cucuauaaaguguaucacu

SEQ ID NO: 87383 - RNA, 19 nt, Artificial Sequence
  Description of Artificial Sequence: Synthetic oligonucleotide
  Antisense strand to SEQ ID NO: 87302
agugauacacuuuauagag

SEQ ID NO: 87384 - RNA, 19 nt, Artificial Sequence
  Description of Artificial Sequence: Synthetic oligonucleotide
  Sense strand starting at position 151 of SEQ ID NO: 1096
agugucacacccuaaucuu

SEQ ID NO: 87385 - RNA, 19 nt, Artificial Sequence
  Description of Artificial Sequence: Synthetic oligonucleotide
  Antisense strand to SEQ ID NO: 87304
aagauuagggugugacacu

SEQ ID NO: 87386 - RNA, 19 nt, Artificial Sequence
  Description of Artificial Sequence: Synthetic oligonucleotide
  Sense strand starting at position 170 of SEQ ID NO: 1096
ggcccuuguccucaagaug

SEQ ID NO: 87387 - RNA, 19 nt, Artificial Sequence
  Description of Artificial Sequence: Synthetic oligonucleotide
  Antisense strand to SEQ ID NO: 87306
caucuugaggacaagggcc

SEQ ID NO: 87388 - RNA, 19 nt, Artificial Sequence
  Description of Artificial Sequence: Synthetic oligonucleotide
  Sense strand starting at position 450 of SEQ ID NO: 1096
auaacuauguuagcaugau

SEQ ID NO: 87389 - RNA, 19 nt, Artificial Sequence
  Description of Artificial Sequence: Synthetic oligonucleotide
  Antisense strand to SEQ ID NO: 87308
aucaugcuaacauaguuau

SEQ ID NO: 87390 - RNA, 19 nt, Artificial Sequence
  Description of Artificial Sequence: Synthetic oligonucleotide
  Sense strand starting at position 454 of SEQ ID NO: 1096
cuauguuagcaugauaaua

SEQ ID NO: 87391 - RNA, 19 nt, Artificial Sequence
  Description of Artificial Sequence: Synthetic oligonucleotide
  Antisense strand to SEQ ID NO: 87310
uauuaucaugcuaacauag

SEQ ID NO: 87392 - RNA, 19 nt, Artificial Sequence
  Description of Artificial Sequence: Synthetic oligonucleotide
  Sense strand starting at position 577 of SEQ ID NO: 1096
guauauggugcucaauaug

SEQ ID NO: 87393 - RNA, 19 nt, Artificial Sequence
  Description of Artificial Sequence: Synthetic oligonucleotide
  Antisense strand to SEQ ID NO: 87312
cauauugagcaccauauac

SEQ ID NO: 87394 - RNA, 19 nt, Artificial Sequence
  Description of Artificial Sequence: Synthetic oligonucleotide
  Sense strand starting at position 587 of SEQ ID NO: 1096
cucaauaugcgucaugaac

SEQ ID NO: 87395 - RNA, 19 nt, Artificial Sequence
  Description of Artificial Sequence: Synthetic oligonucleotide
  Antisense strand to SEQ ID NO: 87314
guucaugacgcauauugag

SEQ ID NO: 87396 - RNA, 19 nt, Artificial Sequence
  Description of Artificial Sequence: Synthetic oligonucleotide
  Sense strand starting at position 595 of SEQ ID NO: 1096
gcgucaugaacugaucaga

SEQ ID NO: 87397 - RNA, 19 nt, Artificial Sequence
  Description of Artificial Sequence: Synthetic oligonucleotide
  Antisense strand to SEQ ID NO: 87316
ucugaucaguucaugacgc

SEQ ID NO: 87398 - RNA, 19 nt, Artificial Sequence
  Description of Artificial Sequence: Synthetic oligonucleotide
  Sense strand starting at position 752 of SEQ ID NO: 1096
ggaugugacaucuagcuug

SEQ ID NO: 87399 - RNA, 19 nt, Artificial Sequence
  Description of Artificial Sequence: Synthetic oligonucleotide
  Antisense strand to SEQ ID NO: 87318
caagcuagaugucacaucc

SEQ ID NO: 87400 - RNA, 19 nt, Artificial Sequence
  Description of Artificial Sequence: Synthetic oligonucleotide
  Sense strand starting at position 789 of SEQ ID NO: 1096
auaccugucuauguagaua

SEQ ID NO: 87401 - RNA, 19 nt, Artificial Sequence
  Description of Artificial Sequence: Synthetic oligonucleotide
  Antisense strand to SEQ ID NO: 87320
uaucuacauagacagguau

SEQ ID NO: 87402 - RNA, 19 nt, Artificial Sequence
  Description of Artificial Sequence: Synthetic oligonucleotide
  Sense strand starting at position 800 of SEQ ID NO: 1096
uguagauauucuuucuuac

SEQ ID NO: 87403 - RNA, 19 nt, Artificial Sequence
  Description of Artificial Sequence: Synthetic oligonucleotide
  Antisense strand to SEQ ID NO: 87322
guaagaaagaauaucuaca

SEQ ID NO: 87404 - RNA, 19 nt, Artificial Sequence
  Description of Artificial Sequence: Synthetic oligonucleotide
  Sense strand starting at position 809 of SEQ ID NO: 1096
ucuuucuuaccagauggua

SEQ ID NO: 87405 - RNA, 19 nt, Artificial Sequence
  Description of Artificial Sequence: Synthetic oligonucleotide
  Antisense strand to SEQ ID NO: 87324
uaccaucugguaagaaaga

SEQ ID NO: 87406 - RNA, 19 nt, Artificial Sequence
  Description of Artificial Sequence: Synthetic oligonucleotide
  Sense strand starting at position 855 of SEQ ID NO: 1096
gugccauugcugucaaagc

SEQ ID NO: 87407 - RNA, 19 nt, Artificial Sequence
  Description of Artificial Sequence: Synthetic oligonucleotide
  Antisense strand to SEQ ID NO: 87326
gcuuugacagcaauggcac

SEQ ID NO: 87408 - RNA, 19 nt, Artificial Sequence
  Description of Artificial Sequence: Synthetic oligonucleotide
  Sense strand starting at position 912 of SEQ ID NO: 1096
cauaguagguaguccauaa

SEQ ID NO: 87409 - RNA, 19 nt, Artificial Sequence
  Description of Artificial Sequence: Synthetic oligonucleotide
  Antisense strand to SEQ ID NO: 87328
uuauggacuaccuacuaug

SEQ ID NO: 87410 - RNA, 19 nt, Artificial Sequence
  Description of Artificial Sequence: Synthetic oligonucleotide
  Sense strand starting at position 1164 of SEQ ID NO: 1096
acguuuguaagugagaaua

SEQ ID NO: 87411 - RNA, 19 nt, Artificial Sequence
  Description of Artificial Sequence: Synthetic oligonucleotide
  Antisense strand to SEQ ID NO: 87330
uauucucacuuacaaacgu

SEQ ID NO: 87412 - RNA, 19 nt, Artificial Sequence
  Description of Artificial Sequence: Synthetic oligonucleotide
  Sense strand starting at position 1288 of SEQ ID NO: 1096
gacagcaaucuuuggaguu

SEQ ID NO: 87413 - RNA, 19 nt, Artificial Sequence
  Description of Artificial Sequence: Synthetic oligonucleotide
  Antisense strand to SEQ ID NO: 87332
aacuccaaagauugcuguc

SEQ ID NO: 87414 - RNA, 19 nt, Artificial Sequence
  Description of Artificial Sequence: Synthetic oligonucleotide
  Sense strand starting at position 1495 of SEQ ID NO: 1096
ggcaucacucugcauagau

SEQ ID NO: 87415 - RNA, 19 nt, Artificial Sequence
  Description of Artificial Sequence: Synthetic oligonucleotide
  Antisense strand to SEQ ID NO: 87334
aucuaugcagagugaugcc

SEQ ID NO: 87416 - RNA, 19 nt, Artificial Sequence
  Description of Artificial Sequence: Synthetic oligonucleotide
  Sense strand starting at position 1683 of SEQ ID NO: 1096
gggcuuccuccacaauuga

SEQ ID NO: 87417 - RNA, 19 nt, Artificial Sequence
  Description of Artificial Sequence: Synthetic oligonucleotide
  Antisense strand to SEQ ID NO: 87336
ucaauuguggaggaagccc

SEQ ID NO: 87418 - RNA, 19 nt, Artificial Sequence
  Description of Artificial Sequence: Synthetic oligonucleotide
  Sense strand starting at position 2169 of SEQ ID NO: 1096
agagaaguggguugaccuu

SEQ ID NO: 87419 - RNA, 19 nt, Artificial Sequence
  Description of Artificial Sequence: Synthetic oligonucleotide
  Antisense strand to SEQ ID NO: 87338
aaggucaacccacuucucu

SEQ ID NO: 87420 - RNA, 19 nt, Artificial Sequence
  Description of Artificial Sequence: Synthetic oligonucleotide
  Sense strand starting at position 2422 of SEQ ID NO: 1096
cuguuuaauggguagcaaa

SEQ ID NO: 87421 - RNA, 19 nt, Artificial Sequence
  Description of Artificial Sequence: Synthetic oligonucleotide
  Antisense strand to SEQ ID NO: 87340
uuugcuacccauuaaacag

SEQ ID NO: 87422 - RNA, 19 nt, Artificial Sequence
  Description of Artificial Sequence: Synthetic oligonucleotide
  Sense strand starting at position 2465 of SEQ ID NO: 1096
cuuucuauccaugauguua

SEQ ID NO: 87423 - RNA, 19 nt, Artificial Sequence
  Description of Artificial Sequence: Synthetic oligonucleotide
  Antisense strand to SEQ ID NO: 87342
uaacaucauggauagaaag

SEQ ID NO: 87424 - RNA, 19 nt, Artificial Sequence
  Description of Artificial Sequence: Synthetic oligonucleotide
  Sense strand starting at position 2801 of SEQ ID NO: 1096
ggcucauaguauuugccau

SEQ ID NO: 87425 - RNA, 19 nt, Artificial Sequence
  Description of Artificial Sequence: Synthetic oligonucleotide
  Antisense strand to SEQ ID NO: 87344
auggcaaauacuaugagcc

SEQ ID NO: 87426 - RNA, 19 nt, Artificial Sequence
  Description of Artificial Sequence: Synthetic oligonucleotide
  Sense strand starting at position 2808 of SEQ ID NO: 1096
aguauuugccauuguuaug

SEQ ID NO: 87427 - RNA, 19 nt, Artificial Sequence
  Description of Artificial Sequence: Synthetic oligonucleotide
  Antisense strand to SEQ ID NO: 87346
cauaacaauggcaaauacu

SEQ ID NO: 87428 - RNA, 19 nt, Artificial Sequence
  Description of Artificial Sequence: Synthetic oligonucleotide
  Sense strand starting at position 2898 of SEQ ID NO: 1096
auggauuaagugugaggau

SEQ ID NO: 87429 - RNA, 19 nt, Artificial Sequence
  Description of Artificial Sequence: Synthetic oligonucleotide
  Antisense strand to SEQ ID NO: 87348
auccucacacuuaauccau

SEQ ID NO: 87430 - RNA, 19 nt, Artificial Sequence
  Description of Artificial Sequence: Synthetic oligonucleotide
  Sense strand starting at position 2917 of SEQ ID NO: 1096
gaaucaugucguuauaacu

SEQ ID NO: 87431 - RNA, 19 nt, Artificial Sequence
  Description of Artificial Sequence: Synthetic oligonucleotide
  Antisense strand to SEQ ID NO: 87350
aguuauaacgacaugauuc

SEQ ID NO: 87432 - RNA, 19 nt, Artificial Sequence
  Description of Artificial Sequence: Synthetic oligonucleotide
  Sense strand starting at position 2924 of SEQ ID NO: 1096
gucguuauaacugauggag

SEQ ID NO: 87433 - RNA, 19 nt, Artificial Sequence
  Description of Artificial Sequence: Synthetic oligonucleotide
  Antisense strand to SEQ ID NO: 87352
cuccaucaguuauaacgac

SEQ ID NO: 87434 - RNA, 19 nt, Artificial Sequence
  Description of Artificial Sequence: Synthetic oligonucleotide
  Sense strand starting at position 2948 of SEQ ID NO: 1096
guuauaaggguguauacau

SEQ ID NO: 87435 - RNA, 19 nt, Artificial Sequence
  Description of Artificial Sequence: Synthetic oligonucleotide
  Antisense strand to SEQ ID NO: 87354
auguauacacccuuauaac

SEQ ID NO: 87436 - RNA, 19 nt, Artificial Sequence
  Description of Artificial Sequence: Synthetic oligonucleotide
  Sense strand starting at position 3032 of SEQ ID NO: 1096
agguuuauaucaccaggua

SEQ ID NO: 87437 - RNA, 19 nt, Artificial Sequence
  Description of Artificial Sequence: Synthetic oligonucleotide
  Antisense strand to SEQ ID NO: 87356
uaccuggugauauaaaccu

SEQ ID NO: 87438 - RNA, 19 nt, Artificial Sequence
  Description of Artificial Sequence: Synthetic oligonucleotide
  Sense strand starting at position 3033 of SEQ ID NO: 1096
gguuuauaucaccagguaa

SEQ ID NO: 87439 - RNA, 19 nt, Artificial Sequence
  Description of Artificial Sequence: Synthetic oligonucleotide
  Antisense strand to SEQ ID NO: 87358
uuaccuggugauauaaacc

SEQ ID NO: 87440 - RNA, 19 nt, Artificial Sequence
  Description of Artificial Sequence: Synthetic oligonucleotide
  Sense strand starting at position 3035 of SEQ ID NO: 1096
uuuauaucaccagguaaag

SEQ ID NO: 87441 - RNA, 19 nt, Artificial Sequence
  Description of Artificial Sequence: Synthetic oligonucleotide
  Antisense strand to SEQ ID NO: 87360
cuuuaccuggugauauaaa

SEQ ID NO: 87442 - RNA, 19 nt, Artificial Sequence
  Description of Artificial Sequence: Synthetic oligonucleotide
  Sense strand starting at position 3046 of SEQ ID NO: 1096
agguaaagcagccaugagu

SEQ ID NO: 87443 - RNA, 19 nt, Artificial Sequence
  Description of Artificial Sequence: Synthetic oligonucleotide
  Antisense strand to SEQ ID NO: 87362
acucauggcugcuuuaccu

SEQ ID NO: 87444 - RNA, 19 nt, Artificial Sequence
  Description of Artificial Sequence: Synthetic oligonucleotide
  Sense strand starting at position 3502 of SEQ ID NO: 1096
uagguaaugggcuaucugu

SEQ ID NO: 87445 - RNA, 19 nt, Artificial Sequence
  Description of Artificial Sequence: Synthetic oligonucleotide
  Antisense strand to SEQ ID NO: 87364
acagauagcccauuaccua

SEQ ID NO: 87446 - RNA, 19 nt, Artificial Sequence
  Description of Artificial Sequence: Synthetic oligonucleotide
  Sense strand starting at position 3539 of SEQ ID NO: 1096
gcuauuuccugagucuuga

SEQ ID NO: 87447 - RNA, 19 nt, Artificial Sequence
  Description of Artificial Sequence: Synthetic oligonucleotide
  Antisense strand to SEQ ID NO: 87366
ucaagacucaggaaauagc

SEQ ID NO: 87448 - RNA, 19 nt, Artificial Sequence
  Description of Artificial Sequence: Synthetic oligonucleotide
  Sense strand starting at position 3578 of SEQ ID NO: 1096
aaggcaauaccuggguaaa

SEQ ID NO: 87449 - RNA, 19 nt, Artificial Sequence
  Description of Artificial Sequence: Synthetic oligonucleotide
  Antisense strand to SEQ ID NO: 87368
uuuacccagguauugccuu

SEQ ID NO: 87450 - RNA, 19 nt, Artificial Sequence
  Description of Artificial Sequence: Synthetic oligonucleotide
  Sense strand starting at position 3579 of SEQ ID NO: 1096
aggcaauaccuggguaaau

SEQ ID NO: 87451 - RNA, 19 nt, Artificial Sequence
  Description of Artificial Sequence: Synthetic oligonucleotide
  Antisense strand to SEQ ID NO: 87370
auuuacccagguauugccu

SEQ ID NO: 87452 - RNA, 19 nt, Artificial Sequence
  Description of Artificial Sequence: Synthetic oligonucleotide
  Sense strand starting at position 3580 of SEQ ID NO: 1096
ggcaauaccuggguaaaug

SEQ ID NO: 87453 - RNA, 19 nt, Artificial Sequence
  Description of Artificial Sequence: Synthetic oligonucleotide
  Antisense strand to SEQ ID NO: 87372
cauuuacccagguauugcc

SEQ ID NO: 87454 - RNA, 19 nt, Artificial Sequence
  Description of Artificial Sequence: Synthetic oligonucleotide
  Sense strand starting at position 3831 of SEQ ID NO: 1096
cagacugcuguccaucaga

SEQ ID NO: 87455 - RNA, 19 nt, Artificial Sequence
  Description of Artificial Sequence: Synthetic oligonucleotide
  Antisense strand to SEQ ID NO: 87374
ucugauggacagcagucug

SEQ ID NO: 87456 - RNA, 19 nt, Artificial Sequence
  Description of Artificial Sequence: Synthetic oligonucleotide
  Sense strand starting at position 3957 of SEQ ID NO: 1096
uggagaauaguauguaauu

SEQ ID NO: 87457 - RNA, 19 nt, Artificial Sequence
  Description of Artificial Sequence: Synthetic oligonucleotide
  Antisense strand to SEQ ID NO: 87376
aauuacauacuauucucca

SEQ ID NO: 87458 - RNA, 19 nt, Artificial Sequence
  Description of Artificial Sequence: Synthetic oligonucleotide
  Sense strand starting at position 3958 of SEQ ID NO: 1096
ggagaauaguauguaauua

SEQ ID NO: 87459 - RNA, 19 nt, Artificial Sequence
  Description of Artificial Sequence: Synthetic oligonucleotide
  Antisense strand to SEQ ID NO: 87378
uaauuacauacuauucucc

SEQ ID NO: 87460 - RNA, 19 nt, Artificial Sequence
  Description of Artificial Sequence: Synthetic oligonucleotide
  Sense strand starting at position 3980 of SEQ ID NO: 1098
cuucuuagguuaguuugaa

SEQ ID NO: 87461 - RNA, 19 nt, Artificial Sequence
  Description of Artificial Sequence: Synthetic oligonucleotide
  Antisense strand to SEQ ID NO: 87380
uucaaacuaaccuaagaag

SEQ ID NO: 87462 - RNA, 19 nt, Artificial Sequence
  Description of Artificial Sequence: Synthetic oligonucleotide
  Sense strand starting at position 3904 of SEQ ID NO: 1098
uccuaauagcuggaagcau

SEQ ID NO: 87463 - RNA, 19 nt, Artificial Sequence
  Description of Artificial Sequence: Synthetic oligonucleotide
  Antisense strand to SEQ ID NO: 87382
augcuuccagcuauuagga

SEQ ID NO: 87464 - RNA, 19 nt, Artificial Sequence
  Description of Artificial Sequence: Synthetic oligonucleotide
  Sense strand starting at position 3874 of SEQ ID NO: 1098
ccaguucuguaccuagaug

SEQ ID NO: 87465 - RNA, 19 nt, Artificial Sequence
  Description of Artificial Sequence: Synthetic oligonucleotide
  Antisense strand to SEQ ID NO: 87384
caucuagguacagaacugg

SEQ ID NO: 87466 - RNA, 19 nt, Artificial Sequence
  Description of Artificial Sequence: Synthetic oligonucleotide
  Sense strand starting at position 3830 of SEQ ID NO: 1098
agacauagagcuugaaccu

SEQ ID NO: 87467 - RNA, 19 nt, Artificial Sequence
  Description of Artificial Sequence: Synthetic oligonucleotide
  Antisense strand to SEQ ID NO: 87386
agguucaagcucuaugucu

SEQ ID NO: 87468 - RNA, 19 nt, Artificial Sequence
  Description of Artificial Sequence: Synthetic oligonucleotide
  Sense strand starting at position 3816 of SEQ ID NO: 1098
uaggcaucuuaguuagaca

SEQ ID NO: 87469 - RNA, 19 nt, Artificial Sequence
  Description of Artificial Sequence: Synthetic oligonucleotide
  Antisense strand to SEQ ID NO: 87388
ugucuaacuaagaugccua

SEQ ID NO: 87470 - RNA, 19 nt, Artificial Sequence
  Description of Artificial Sequence: Synthetic oligonucleotide
  Sense strand starting at position 3793 of SEQ ID NO: 1098
cucugacucugaguccuua

SEQ ID NO: 87471 - RNA, 19 nt, Artificial Sequence
  Description of Artificial Sequence: Synthetic oligonucleotide
  Antisense strand to SEQ ID NO: 87390
uaaggacucagagucagag

SEQ ID NO: 87472 - RNA, 19 nt, Artificial Sequence
  Description of Artificial Sequence: Synthetic oligonucleotide
  Sense strand starting at position 3724 of SEQ ID NO: 1098
gccuuuccuggauagaaau

SEQ ID NO: 87473 - RNA, 19 nt, Artificial Sequence
  Description of Artificial Sequence: Synthetic oligonucleotide
  Antisense strand to SEQ ID NO: 87392
auuucuauccaggaaaggc

SEQ ID NO: 87474 - RNA, 19 nt, Artificial Sequence
  Description of Artificial Sequence: Synthetic oligonucleotide
  Sense strand starting at position 3722 of SEQ ID NO: 1098
cugccuuuccuggauagaa

SEQ ID NO: 87475 - RNA, 19 nt, Artificial Sequence
  Description of Artificial Sequence: Synthetic oligonucleotide
  Antisense strand to SEQ ID NO: 87394
uucuauccaggaaaggcag

SEQ ID NO: 87476 - RNA, 19 nt, Artificial Sequence
  Description of Artificial Sequence: Synthetic oligonucleotide
  Sense strand starting at position 3721 of SEQ ID NO: 1098
ucugccuuuccuggauaga

SEQ ID NO: 87477 - RNA, 19 nt, Artificial Sequence
  Description of Artificial Sequence: Synthetic oligonucleotide
  Antisense strand to SEQ ID NO: 87396
ucuauccaggaaaggcaga

SEQ ID NO: 87478 - RNA, 19 nt, Artificial Sequence
  Description of Artificial Sequence: Synthetic oligonucleotide
  Sense strand starting at position 3648 of SEQ ID NO: 1098
accuuauuggccuauaugu

SEQ ID NO: 87479 - RNA, 19 nt, Artificial Sequence
  Description of Artificial Sequence: Synthetic oligonucleotide
  Antisense strand to SEQ ID NO: 87398
acauauaggccaauaaggu

SEQ ID NO: 87480 - RNA, 19 nt, Artificial Sequence
  Description of Artificial Sequence: Synthetic oligonucleotide
  Sense strand starting at position 3591 of SEQ ID NO: 1098
gucauacuccuaggauuag

SEQ ID NO: 87481 - RNA, 19 nt, Artificial Sequence
  Description of Artificial Sequence: Synthetic oligonucleotide
  Antisense strand to SEQ ID NO: 87400
cuaauccuaggaguaugac

SEQ ID NO: 87482 - RNA, 19 nt, Artificial Sequence
  Description of Artificial Sequence: Synthetic oligonucleotide
  Sense strand starting at position 3503 of SEQ ID NO: 1098
uacuguccuuggcugaaau

SEQ ID NO: 87483 - RNA, 19 nt, Artificial Sequence
  Description of Artificial Sequence: Synthetic oligonucleotide
  Antisense strand to SEQ ID NO: 87402
auuucagccaaggacagua

SEQ ID NO: 87484 - RNA, 19 nt, Artificial Sequence
  Description of Artificial Sequence: Synthetic oligonucleotide
  Sense strand starting at position 3435 of SEQ ID NO: 1098
gaguaugacaggcaguauu

SEQ ID NO: 87485 - RNA, 19 nt, Artificial Sequence
  Description of Artificial Sequence: Synthetic oligonucleotide
  Antisense strand to SEQ ID NO: 87404
aauacugccugucauacuc

SEQ ID NO: 87486 - RNA, 19 nt, Artificial Sequence
  Description of Artificial Sequence: Synthetic oligonucleotide
  Sense strand starting at position 3426 of SEQ ID NO: 1098
gcuuucccugaguaugaca

SEQ ID NO: 87487 - RNA, 19 nt, Artificial Sequence
  Description of Artificial Sequence: Synthetic oligonucleotide
  Antisense strand to SEQ ID NO: 87406
ugucauacucagggaaagc

SEQ ID NO: 87488 - RNA, 19 nt, Artificial Sequence
  Description of Artificial Sequence: Synthetic oligonucleotide
  Sense strand starting at position 3423 of SEQ ID NO: 1098
auagcuuucccugaguaug

SEQ ID NO: 87489 - RNA, 19 nt, Artificial Sequence
  Description of Artificial Sequence: Synthetic oligonucleotide
  Antisense strand to SEQ ID NO: 87408
cauacucagggaaagcuau

SEQ ID NO: 87490 - RNA, 19 nt, Artificial Sequence
  Description of Artificial Sequence: Synthetic oligonucleotide
  Sense strand starting at position 3273 of SEQ ID NO: 1098
aacucuugguccucagaga

SEQ ID NO: 87491 - RNA, 19 nt, Artificial Sequence
  Description of Artificial Sequence: Synthetic oligonucleotide
  Antisense strand to SEQ ID NO: 87410
ucucugaggaccaagaguu

SEQ ID NO: 87492 - RNA, 19 nt, Artificial Sequence
  Description of Artificial Sequence: Synthetic oligonucleotide
  Sense strand starting at position 3223 of SEQ ID NO: 1098
cauguaaugcagggucuga

SEQ ID NO: 87493 - RNA, 19 nt, Artificial Sequence
  Description of Artificial Sequence: Synthetic oligonucleotide
  Antisense strand to SEQ ID NO: 87412
ucagacccugcauuacaug

SEQ ID NO: 87494 - RNA, 19 nt, Artificial Sequence
  Description of Artificial Sequence: Synthetic oligonucleotide
  Sense strand starting at position 3213 of SEQ ID NO: 1098
ugaggaugggcauguaaug

SEQ ID NO: 87495 - RNA, 19 nt, Artificial Sequence
  Description of Artificial Sequence: Synthetic oligonucleotide
  Antisense strand to SEQ ID NO: 87414
cauuacaugcccauccuca

SEQ ID NO: 87496 - RNA, 19 nt, Artificial Sequence
  Description of Artificial Sequence: Synthetic oligonucleotide
  Sense strand starting at position 3130 of SEQ ID NO: 1098
uagugagacccuggcgaaa

SEQ ID NO: 87497 - RNA, 19 nt, Artificial Sequence
  Description of Artificial Sequence: Synthetic oligonucleotide
  Antisense strand to SEQ ID NO: 87416
uuucgccagggucucacua

SEQ ID NO: 87498 - RNA, 19 nt, Artificial Sequence
  Description of Artificial Sequence: Synthetic oligonucleotide
  Sense strand starting at position 2981 of SEQ ID NO: 1098
gggaaugaugacugcuacu

SEQ ID NO: 87499 - RNA, 19 nt, Artificial Sequence
  Description of Artificial Sequence: Synthetic oligonucleotide
  Antisense strand to SEQ ID NO: 87418
aguagcagucaucauuccc

SEQ ID NO: 87500 - RNA, 19 nt, Artificial Sequence
  Description of Artificial Sequence: Synthetic oligonucleotide
  Sense strand starting at position 2949 of SEQ ID NO: 1098
ggaucuguguccucuggga

SEQ ID NO: 87501 - RNA, 19 nt, Artificial Sequence
  Description of Artificial Sequence: Synthetic oligonucleotide
  Antisense strand to SEQ ID NO: 87420
ucccagaggacacagaucc

SEQ ID NO: 87502 - RNA, 19 nt, Artificial Sequence
  Description of Artificial Sequence: Synthetic oligonucleotide
  Sense strand starting at position 2805 of SEQ ID NO: 1098
uuaagccaguuuccagaua

SEQ ID NO: 87503 - RNA, 19 nt, Artificial Sequence
  Description of Artificial Sequence: Synthetic oligonucleotide
  Antisense strand to SEQ ID NO: 87422
uaucuggaaacuggcuuaa

SEQ ID NO: 87504 - RNA, 19 nt, Artificial Sequence
  Description of Artificial Sequence: Synthetic oligonucleotide
  Sense strand starting at position 2547 of SEQ ID NO: 1098
auugauugggugggagagu

SEQ ID NO: 87505 - RNA, 19 nt, Artificial Sequence
  Description of Artificial Sequence: Synthetic oligonucleotide
  Antisense strand to SEQ ID NO: 87424
acucucccacccaaucaau

SEQ ID NO: 87506 - RNA, 19 nt, Artificial Sequence
  Description of Artificial Sequence: Synthetic oligonucleotide
  Sense strand starting at position 2545 of SEQ ID NO: 1098
cgauugauugggugggaga

SEQ ID NO: 87507 - RNA, 19 nt, Artificial Sequence
  Description of Artificial Sequence: Synthetic oligonucleotide
  Antisense strand to SEQ ID NO: 87426
ucucccacccaaucaaucg

SEQ ID NO: 87508 - RNA, 19 nt, Artificial Sequence
  Description of Artificial Sequence: Synthetic oligonucleotide
  Sense strand starting at position 2534 of SEQ ID NO: 1098
cuugaaggucccgauugau

SEQ ID NO: 87509 - RNA, 19 nt, Artificial Sequence
  Description of Artificial Sequence: Synthetic oligonucleotide
  Antisense strand to SEQ ID NO: 87428
aucaaucgggaccuucaag

SEQ ID NO: 87510 - RNA, 19 nt, Artificial Sequence
  Description of Artificial Sequence: Synthetic oligonucleotide
  Sense strand starting at position 2240 of SEQ ID NO: 1098
ugugaacugauuugcgauu

SEQ ID NO: 87511 - RNA, 19 nt, Artificial Sequence
  Description of Artificial Sequence: Synthetic oligonucleotide
  Antisense strand to SEQ ID NO: 87430
aaucgcaaaucaguucaca

SEQ ID NO: 87512 - RNA, 19 nt, Artificial Sequence
  Description of Artificial Sequence: Synthetic oligonucleotide
  Sense strand starting at position 2202 of SEQ ID NO: 1098
acagucggguccuuagaau

SEQ ID NO: 87513 - RNA, 19 nt, Artificial Sequence
  Description of Artificial Sequence: Synthetic oligonucleotide
  Antisense strand to SEQ ID NO: 87432
auucuaaggacccgacugu

SEQ ID NO: 87514 - RNA, 19 nt, Artificial Sequence
  Description of Artificial Sequence: Synthetic oligonucleotide
  Sense strand starting at position 2169 of SEQ ID NO: 1098
ccugcaagauuguuaaccu

SEQ ID NO: 87515 - RNA, 19 nt, Artificial Sequence
  Description of Artificial Sequence: Synthetic oligonucleotide
  Antisense strand to SEQ ID NO: 87434
agguuaacaaucuugcagg

SEQ ID NO: 87516 - RNA, 19 nt, Artificial Sequence
  Description of Artificial Sequence: Synthetic oligonucleotide
  Sense strand starting at position 2147 of SEQ ID NO: 1098
gcuguaucaggucaauaaa

SEQ ID NO: 87517 - RNA, 19 nt, Artificial Sequence
  Description of Artificial Sequence: Synthetic oligonucleotide
  Antisense strand to SEQ ID NO: 87436
uuuauugaccugauacagc

SEQ ID NO: 87518 - RNA, 19 nt, Artificial Sequence
  Description of Artificial Sequence: Synthetic oligonucleotide
  Sense strand starting at position 1292 of SEQ ID NO: 1098
ggaugagagugaaagguuu

SEQ ID NO: 87519 - RNA, 19 nt, Artificial Sequence
  Description of Artificial Sequence: Synthetic oligonucleotide
  Antisense strand to SEQ ID NO: 87438
aaaccuuucacucucaucc

SEQ ID NO: 87520 - RNA, 19 nt, Artificial Sequence
  Description of Artificial Sequence: Synthetic oligonucleotide
  Sense strand starting at position 1283 of SEQ ID NO: 1098
cgagaguguggaugagagu

SEQ ID NO: 87521 - RNA, 19 nt, Artificial Sequence
  Description of Artificial Sequence: Synthetic oligonucleotide
  Antisense strand to SEQ ID NO: 87440
acucucauccacacucucg

SEQ ID NO: 87522 - RNA, 19 nt, Artificial Sequence
  Description of Artificial Sequence: Synthetic oligonucleotide
  Sense strand starting at position 1256 of SEQ ID NO: 1098
gagaaaucugcuuaggcuu

SEQ ID NO: 87523 - RNA, 19 nt, Artificial Sequence
  Description of Artificial Sequence: Synthetic oligonucleotide
  Antisense strand to SEQ ID NO: 87442
aagccuaagcagauuucuc

SEQ ID NO: 87524 - RNA, 19 nt, Artificial Sequence
  Description of Artificial Sequence: Synthetic oligonucleotide
  Sense strand starting at position 1255 of SEQ ID NO: 1098
ugagaaaucugcuuaggcu

SEQ ID NO: 87525 - RNA, 19 nt, Artificial Sequence
  Description of Artificial Sequence: Synthetic oligonucleotide
  Antisense strand to SEQ ID NO: 87444
agccuaagcagauuucuca

SEQ ID NO: 87526 - RNA, 19 nt, Artificial Sequence
  Description of Artificial Sequence: Synthetic oligonucleotide
  Sense strand starting at position 1252 of SEQ ID NO: 1098
gccugagaaaucugcuuag

SEQ ID NO: 87527 - RNA, 19 nt, Artificial Sequence
  Description of Artificial Sequence: Synthetic oligonucleotide
  Antisense strand to SEQ ID NO: 87446
cuaagcagauuucucaggc

SEQ ID NO: 87528 - RNA, 19 nt, Artificial Sequence
  Description of Artificial Sequence: Synthetic oligonucleotide
  Sense strand starting at position 1242 of SEQ ID NO: 1098
uggauaaauugccugagaa

SEQ ID NO: 87529 - RNA, 19 nt, Artificial Sequence
  Description of Artificial Sequence: Synthetic oligonucleotide
  Antisense strand to SEQ ID NO: 87448
uucucaggcaauuuaucca

SEQ ID NO: 87530 - RNA, 19 nt, Artificial Sequence
  Description of Artificial Sequence: Synthetic oligonucleotide
  Sense strand starting at position 1241 of SEQ ID NO: 1098
guggauaaauugccugaga

SEQ ID NO: 87531 - RNA, 19 nt, Artificial Sequence
  Description of Artificial Sequence: Synthetic oligonucleotide
  Antisense strand to SEQ ID NO: 87450
ucucaggcaauuuauccac

SEQ ID NO: 87532 - RNA, 19 nt, Artificial Sequence
  Description of Artificial Sequence: Synthetic oligonucleotide
  Sense strand starting at position 1168 of SEQ ID NO: 1098
gguaauacuguagagagcu

SEQ ID NO: 87533 - RNA, 19 nt, Artificial Sequence
  Description of Artificial Sequence: Synthetic oligonucleotide
  Antisense strand to SEQ ID NO: 87452
agcucucuacaguauuacc

SEQ ID NO: 87534 - RNA, 19 nt, Artificial Sequence
  Description of Artificial Sequence: Synthetic oligonucleotide
  Sense strand starting at position 587 of SEQ ID NO: 1098
ggcucucacgaguaucaua

SEQ ID NO: 87535 - RNA, 19 nt, Artificial Sequence
  Description of Artificial Sequence: Synthetic oligonucleotide
  Antisense strand to SEQ ID NO: 87454
uaugauacucgugagagcc

SEQ ID NO: 87536 - RNA, 19 nt, Artificial Sequence
  Description of Artificial Sequence: Synthetic oligonucleotide
  Sense strand starting at position 321 of SEQ ID NO: 1098
aggagaugugccuguugga

SEQ ID NO: 87537 - RNA, 19 nt, Artificial Sequence
  Description of Artificial Sequence: Synthetic oligonucleotide
  Antisense strand to SEQ ID NO: 87456
uccaacaggcacaucuccu

SEQ ID NO: 87538 - RNA, 19 nt, Artificial Sequence
  Description of Artificial Sequence: Synthetic oligonucleotide
  Sense strand starting at position 38 of SEQ ID NO: 1098
gacaaaucuugagucucag

SEQ ID NO: 87539 - RNA, 19 nt, Artificial Sequence
  Description of Artificial Sequence: Synthetic oligonucleotide
  Antisense strand to SEQ ID NO: 87458
cugagacucaagauuuguc

SEQ ID NO: 87540 - RNA, 19 nt, Artificial Sequence
  Description of Artificial Sequence: Synthetic oligonucleotide
  Sense strand starting at position 161 of SEQ ID NO: 1099
ucugaauuccucuaucacg

SEQ ID NO: 87541 - RNA, 19 nt, Artificial Sequence
  Description of Artificial Sequence: Synthetic oligonucleotide
  Antisense strand to SEQ ID NO: 87460
cgugauagaggaauucaga

SEQ ID NO: 87542 - RNA, 19 nt, Artificial Sequence
  Description of Artificial Sequence: Synthetic oligonucleotide
  Sense strand starting at position 207 of SEQ ID NO: 1099
augaucaaugcugaaaugu

SEQ ID NO: 87543 - RNA, 19 nt, Artificial Sequence
  Description of Artificial Sequence: Synthetic oligonucleotide
  Antisense strand to SEQ ID NO: 87462
acauuucagcauugaucau

SEQ ID NO: 87544 - RNA, 19 nt, Artificial Sequence
  Description of Artificial Sequence: Synthetic oligonucleotide
  Sense strand starting at position 216 of SEQ ID NO: 1099
gcugaaauguaaguagaga

SEQ ID NO: 87545 - RNA, 19 nt, Artificial Sequence
  Description of Artificial Sequence: Synthetic oligonucleotide
  Antisense strand to SEQ ID NO: 87464
ucucuacuuacauuucagc

SEQ ID NO: 87546 - RNA, 19 nt, Artificial Sequence
  Description of Artificial Sequence: Synthetic oligonucleotide
  Sense strand starting at position 334 of SEQ ID NO: 1099
uguccuuaaguagauaagu

SEQ ID NO: 87547 - RNA, 19 nt, Artificial Sequence
  Description of Artificial Sequence: Synthetic oligonucleotide
  Antisense strand to SEQ ID NO: 87466
acuuaucuacuuaaggaca

SEQ ID NO: 87548 - RNA, 19 nt, Artificial Sequence
  Description of Artificial Sequence: Synthetic oligonucleotide
  Sense strand starting at position 372 of SEQ ID NO: 1099
agaggauccugcuuuauau

SEQ ID NO: 87549 - RNA, 19 nt, Artificial Sequence
  Description of Artificial Sequence: Synthetic oligonucleotide
  Antisense strand to SEQ ID NO: 87468
auauaaagcaggauccucu

SEQ ID NO: 87550 - RNA, 19 nt, Artificial Sequence
  Description of Artificial Sequence: Synthetic oligonucleotide
  Sense strand starting at position 396 of SEQ ID NO: 1099
cuuucuauccuagaaguug

SEQ ID NO: 87551 - RNA, 19 nt, Artificial Sequence
  Description of Artificial Sequence: Synthetic oligonucleotide
  Antisense strand to SEQ ID NO: 87470
caacuucuaggauagaaag

SEQ ID NO: 87552 - RNA, 19 nt, Artificial Sequence
  Description of Artificial Sequence: Synthetic oligonucleotide
  Sense strand starting at position 408 of SEQ ID NO: 1099
gaaguugcacaauaaaugu

SEQ ID NO: 87553 - RNA, 19 nt, Artificial Sequence
  Description of Artificial Sequence: Synthetic oligonucleotide
  Antisense strand to SEQ ID NO: 87472
acauuuauugugcaacuuc

SEQ ID NO: 87554 - RNA, 19 nt, Artificial Sequence
  Description of Artificial Sequence: Synthetic oligonucleotide
  Sense strand starting at position 519 of SEQ ID NO: 1099
uccaaaugauaugucugau

SEQ ID NO: 87555 - RNA, 19 nt, Artificial Sequence
  Description of Artificial Sequence: Synthetic oligonucleotide
  Antisense strand to SEQ ID NO: 87474
aucagacauaucauuugga

SEQ ID NO: 87556 - RNA, 19 nt, Artificial Sequence
  Description of Artificial Sequence: Synthetic oligonucleotide
  Sense strand starting at position 927 of SEQ ID NO: 1099
acgcaaguuaucgauggac

SEQ ID NO: 87557 - RNA, 19 nt, Artificial Sequence
  Description of Artificial Sequence: Synthetic oligonucleotide
  Antisense strand to SEQ ID NO: 87476
guccaucgauaacuugcgu

SEQ ID NO: 87558 - RNA, 19 nt, Artificial Sequence
  Description of Artificial Sequence: Synthetic oligonucleotide
  Sense strand starting at position 929 of SEQ ID NO: 1099
gcaaguuaucgauggacuu

SEQ ID NO: 87559 - RNA, 19 nt, Artificial Sequence
  Description of Artificial Sequence: Synthetic oligonucleotide
  Antisense strand to SEQ ID NO: 87478
aaguccaucgauaacuugc

SEQ ID NO: 87560 - RNA, 19 nt, Artificial Sequence
  Description of Artificial Sequence: Synthetic oligonucleotide
  Sense strand starting at position 930 of SEQ ID NO: 1099
caaguuaucgauggacuua

SEQ ID NO: 87561 - RNA, 19 nt, Artificial Sequence
  Description of Artificial Sequence: Synthetic oligonucleotide
  Antisense strand to SEQ ID NO: 87480
uaaguccaucgauaacuug

SEQ ID NO: 87562 - RNA, 19 nt, Artificial Sequence
  Description of Artificial Sequence: Synthetic oligonucleotide
  Sense strand starting at position 977 of SEQ ID NO: 1099
acaagaggguauuccuacu

SEQ ID NO: 87563 - RNA, 19 nt, Artificial Sequence
  Description of Artificial Sequence: Synthetic oligonucleotide
  Antisense strand to SEQ ID NO: 87482
aguaggaauacccucuugu

SEQ ID NO: 87564 - RNA, 19 nt, Artificial Sequence
  Description of Artificial Sequence: Synthetic oligonucleotide
  Sense strand starting at position 983 of SEQ ID NO: 1099
ggguauuccuacucuacau

SEQ ID NO: 87565 - RNA, 19 nt, Artificial Sequence
  Description of Artificial Sequence: Synthetic oligonucleotide
  Antisense strand to SEQ ID NO: 87484
auguagaguaggaauaccc

SEQ ID NO: 87566 - RNA, 19 nt, Artificial Sequence
  Description of Artificial Sequence: Synthetic oligonucleotide
  Sense strand starting at position 993 of SEQ ID NO: 1099
acucuacaucugugaaugu

SEQ ID NO: 87567 - RNA, 19 nt, Artificial Sequence
  Description of Artificial Sequence: Synthetic oligonucleotide
  Antisense strand to SEQ ID NO: 87486
acauucacagauguagagu

SEQ ID NO: 87568 - RNA, 19 nt, Artificial Sequence
  Description of Artificial Sequence: Synthetic oligonucleotide
  Sense strand starting at position 1004 of SEQ ID NO: 1099
gugaauguccauuacuguu

SEQ ID NO: 87569 - RNA, 19 nt, Artificial Sequence
  Description of Artificial Sequence: Synthetic oligonucleotide
  Antisense strand to SEQ ID NO: 87488
aacaguaauggacauucac

SEQ ID NO: 87570 - RNA, 19 nt, Artificial Sequence
  Description of Artificial Sequence: Synthetic oligonucleotide
  Sense strand starting at position 1076 of SEQ ID NO: 1099
aucaaacuguggucuccaa

SEQ ID NO: 87571 - RNA, 19 nt, Artificial Sequence
  Description of Artificial Sequence: Synthetic oligonucleotide
  Antisense strand to SEQ ID NO: 87490
uuggagaccacaguuugau

SEQ ID NO: 87572 - RNA, 19 nt, Artificial Sequence
  Description of Artificial Sequence: Synthetic oligonucleotide
  Sense strand starting at position 1418 of SEQ ID NO: 1099
ggauuccugccucaacacu

SEQ ID NO: 87573 - RNA, 19 nt, Artificial Sequence
  Description of Artificial Sequence: Synthetic oligonucleotide
  Antisense strand to SEQ ID NO: 87492
aguguugaggcaggaaucc

SEQ ID NO: 87574 - RNA, 19 nt, Artificial Sequence
  Description of Artificial Sequence: Synthetic oligonucleotide
  Sense strand starting at position 1486 of SEQ ID NO: 1099
ucuagaacuuucguuaaca

SEQ ID NO: 87575 - RNA, 19 nt, Artificial Sequence
  Description of Artificial Sequence: Synthetic oligonucleotide
  Antisense strand to SEQ ID NO: 87494
uguuaacgaaaguucuaga

SEQ ID NO: 87576 - RNA, 19 nt, Artificial Sequence
  Description of Artificial Sequence: Synthetic oligonucleotide
  Sense strand starting at position 1487 of SEQ ID NO: 1099
cuagaacuuucguuaacau

SEQ ID NO: 87577 - RNA, 19 nt, Artificial Sequence
  Description of Artificial Sequence: Synthetic oligonucleotide
  Antisense strand to SEQ ID NO: 87496
auguuaacgaaaguucuag

SEQ ID NO: 87578 - RNA, 19 nt, Artificial Sequence
  Description of Artificial Sequence: Synthetic oligonucleotide
  Sense strand starting at position 1515 of SEQ ID NO: 1099
gggauuccacuucgggaga

SEQ ID NO: 87579 - RNA, 19 nt, Artificial Sequence
  Description of Artificial Sequence: Synthetic oligonucleotide
  Antisense strand to SEQ ID NO: 87498
ucucccgaaguggaauccc

SEQ ID NO: 87580 - RNA, 19 nt, Artificial Sequence
  Description of Artificial Sequence: Synthetic oligonucleotide
  Sense strand starting at position 1550 of SEQ ID NO: 1099
gguaguaaacucgggaaag

SEQ ID NO: 87581 - RNA, 19 nt, Artificial Sequence
  Description of Artificial Sequence: Synthetic oligonucleotide
  Antisense strand to SEQ ID NO: 87500
cuuucccgaguuuacuacc

SEQ ID NO: 87582 - RNA, 19 nt, Artificial Sequence
  Description of Artificial Sequence: Synthetic oligonucleotide
  Sense strand starting at position 1590 of SEQ ID NO: 1099
cgaaguccuuccuccuaau

SEQ ID NO: 87583 - RNA, 19 nt, Artificial Sequence
  Description of Artificial Sequence: Synthetic oligonucleotide
  Antisense strand to SEQ ID NO: 87502
auuaggaggaaggacuucg

SEQ ID NO: 87584 - RNA, 19 nt, Artificial Sequence
  Description of Artificial Sequence: Synthetic oligonucleotide
  Sense strand starting at position 1780 of SEQ ID NO: 1099
ggccauaacccggaguuga

SEQ ID NO: 87585 - RNA, 19 nt, Artificial Sequence
  Description of Artificial Sequence: Synthetic oligonucleotide
  Antisense strand to SEQ ID NO: 87504
ucaacuccggguuauggcc

SEQ ID NO: 87586 - RNA, 19 nt, Artificial Sequence
  Description of Artificial Sequence: Synthetic oligonucleotide
  Sense strand starting at position 2087 of SEQ ID NO: 1099
gugaccugucuguacccua

SEQ ID NO: 87587 - RNA, 19 nt, Artificial Sequence
  Description of Artificial Sequence: Synthetic oligonucleotide
  Antisense strand to SEQ ID NO: 87506
uaggguacagacaggucac

SEQ ID NO: 87588 - RNA, 19 nt, Artificial Sequence
  Description of Artificial Sequence: Synthetic oligonucleotide
  Sense strand starting at position 2829 of SEQ ID NO: 1099
gaucgauucuggcuaacac

SEQ ID NO: 87589 - RNA, 19 nt, Artificial Sequence
  Description of Artificial Sequence: Synthetic oligonucleotide
  Antisense strand to SEQ ID NO: 87508
guguuagccagaaucgauc

SEQ ID NO: 87590 - RNA, 19 nt, Artificial Sequence
  Description of Artificial Sequence: Synthetic oligonucleotide
  Sense strand starting at position 3109 of SEQ ID NO: 1099
ugggaauguaucuacagcu

SEQ ID NO: 87591 - RNA, 19 nt, Artificial Sequence
  Description of Artificial Sequence: Synthetic oligonucleotide
  Antisense strand to SEQ ID NO: 87510
agcuguagauacauuccca

SEQ ID NO: 87592 - RNA, 19 nt, Artificial Sequence
  Description of Artificial Sequence: Synthetic oligonucleotide
  Sense strand starting at position 3183 of SEQ ID NO: 1099
agagaauuccaacgcuuaa

SEQ ID NO: 87593 - RNA, 19 nt, Artificial Sequence
  Description of Artificial Sequence: Synthetic oligonucleotide
  Antisense strand to SEQ ID NO: 87512
uuaagcguuggaauucucu

SEQ ID NO: 87594 - RNA, 19 nt, Artificial Sequence
  Description of Artificial Sequence: Synthetic oligonucleotide
  Sense strand starting at position 3212 of SEQ ID NO: 1099
aucugauugcagcaaguau

SEQ ID NO: 87595 - RNA, 19 nt, Artificial Sequence
  Description of Artificial Sequence: Synthetic oligonucleotide
  Antisense strand to SEQ ID NO: 87514
auacuugcugcaaucagau

SEQ ID NO: 87596 - RNA, 19 nt, Artificial Sequence
  Description of Artificial Sequence: Synthetic oligonucleotide
  Sense strand starting at position 3380 of SEQ ID NO: 1099
aguauauacucugcaucau

SEQ ID NO: 87597 - RNA, 19 nt, Artificial Sequence
  Description of Artificial Sequence: Synthetic oligonucleotide
  Antisense strand to SEQ ID NO: 87516
augaugcagaguauauacu

SEQ ID NO: 87598 - RNA, 19 nt, Artificial Sequence
  Description of Artificial Sequence: Synthetic oligonucleotide
  Sense strand starting at position 3381 of SEQ ID NO: 1099
guauauacucugcaucaua

SEQ ID NO: 87599 - RNA, 19 nt, Artificial Sequence
  Description of Artificial Sequence: Synthetic oligonucleotide
  Antisense strand to SEQ ID NO: 87518
uaugaugcagaguauauac

SEQ ID NO: 87600 - RNA, 19 nt, Artificial Sequence
  Description of Artificial Sequence: Synthetic oligonucleotide
  Sense strand starting at position 3408 of SEQ ID NO: 1099
ugucaucaccacugaauug

SEQ ID NO: 87601 - RNA, 19 nt, Artificial Sequence
  Description of Artificial Sequence: Synthetic oligonucleotide
  Antisense strand to SEQ ID NO: 87520
caauucaguggugaugaca

SEQ ID NO: 87602 - RNA, 19 nt, Artificial Sequence
  Description of Artificial Sequence: Synthetic oligonucleotide
  Sense strand starting at position 3419 of SEQ ID NO: 1099
cugaauugauucuaaggaa

SEQ ID NO: 87603 - RNA, 19 nt, Artificial Sequence
  Description of Artificial Sequence: Synthetic oligonucleotide
  Antisense strand to SEQ ID NO: 87522
uuccuuagaaucaauucag

SEQ ID NO: 87604 - RNA, 19 nt, Artificial Sequence
  Description of Artificial Sequence: Synthetic oligonucleotide
  Sense strand starting at position 3514 of SEQ ID NO: 1099
agcuuaucugaaugucuag

SEQ ID NO: 87605 - RNA, 19 nt, Artificial Sequence
  Description of Artificial Sequence: Synthetic oligonucleotide
  Antisense strand to SEQ ID NO: 87524
cuagacauucagauaagcu

SEQ ID NO: 87606 - RNA, 19 nt, Artificial Sequence
  Description of Artificial Sequence: Synthetic oligonucleotide
  Sense strand starting at position 3517 of SEQ ID NO: 1099
uuaucugaaugucuagaca

SEQ ID NO: 87607 - RNA, 19 nt, Artificial Sequence
  Description of Artificial Sequence: Synthetic oligonucleotide
  Antisense strand to SEQ ID NO: 87526
ugucuagacauucagauaa

SEQ ID NO: 87608 - RNA, 19 nt, Artificial Sequence
  Description of Artificial Sequence: Synthetic oligonucleotide
  Sense strand starting at position 3530 of SEQ ID NO: 1099
uagacaaauuguguuuggu

SEQ ID NO: 87609 - RNA, 19 nt, Artificial Sequence
  Description of Artificial Sequence: Synthetic oligonucleotide
  Antisense strand to SEQ ID NO: 87528
accaaacacaauuugucua

SEQ ID NO: 87610 - RNA, 19 nt, Artificial Sequence
  Description of Artificial Sequence: Synthetic oligonucleotide
  Sense strand starting at position 3532 of SEQ ID NO: 1099
gacaaauuguguuugguaa

SEQ ID NO: 87611 - RNA, 19 nt, Artificial Sequence
  Description of Artificial Sequence: Synthetic oligonucleotide
  Antisense strand to SEQ ID NO: 87530
uuaccaaacacaauuuguc

SEQ ID NO: 87612 - RNA, 19 nt, Artificial Sequence
  Description of Artificial Sequence: Synthetic oligonucleotide
  Sense strand starting at position 3550 of SEQ ID NO: 1099
auacuauuaugcucuguga

SEQ ID NO: 87613 - RNA, 19 nt, Artificial Sequence
  Description of Artificial Sequence: Synthetic oligonucleotide
  Antisense strand to SEQ ID NO: 87532
ucacagagcauaauaguau

SEQ ID NO: 87614 - RNA, 19 nt, Artificial Sequence
  Description of Artificial Sequence: Synthetic oligonucleotide
  Sense strand starting at position 3875 of SEQ ID NO: 1099
agcgccuagcccuuugauu

SEQ ID NO: 87615 - RNA, 19 nt, Artificial Sequence
  Description of Artificial Sequence: Synthetic oligonucleotide
  Antisense strand to SEQ ID NO: 87534
aaucaaagggcuaggcgcu

SEQ ID NO: 87616 - RNA, 19 nt, Artificial Sequence
  Description of Artificial Sequence: Synthetic oligonucleotide
  Sense strand starting at position 3921 of SEQ ID NO: 1099
uggguagcauucuaaauuu

SEQ ID NO: 87617 - RNA, 19 nt, Artificial Sequence
  Description of Artificial Sequence: Synthetic oligonucleotide
  Antisense strand to SEQ ID NO: 87536
aaauuuagaaugcuaccca

SEQ ID NO: 87618 - RNA, 19 nt, Artificial Sequence
  Description of Artificial Sequence: Synthetic oligonucleotide
  Sense strand starting at position 3961 of SEQ ID NO: 1099
ugucauaccuuccugaucu

SEQ ID NO: 87619 - RNA, 19 nt, Artificial Sequence
  Description of Artificial Sequence: Synthetic oligonucleotide
  Antisense strand to SEQ ID NO: 87538
agaucaggaagguaugaca

SEQ ID NO: 87620 - RNA, 19 nt, Artificial Sequence
  Description of Artificial Sequence: Synthetic oligonucleotide
  Sense strand starting at position 3934 of SEQ ID NO: 1100
ugcaguucgguagaagaga

SEQ ID NO: 87621 - RNA, 19 nt, Artificial Sequence
  Description of Artificial Sequence: Synthetic oligonucleotide
  Antisense strand to SEQ ID NO: 87540
ucucuucuaccgaacugca

SEQ ID NO: 87622 - RNA, 19 nt, Artificial Sequence
  Description of Artificial Sequence: Synthetic oligonucleotide
  Sense strand starting at position 3932 of SEQ ID NO: 1100
ccugcaguucgguagaaga

SEQ ID NO: 87623 - RNA, 19 nt, Artificial Sequence
  Description of Artificial Sequence: Synthetic oligonucleotide
  Antisense strand to SEQ ID NO: 87542
ucuucuaccgaacugcagg

SEQ ID NO: 87624 - RNA, 19 nt, Artificial Sequence
  Description of Artificial Sequence: Synthetic oligonucleotide
  Sense strand starting at position 3910 of SEQ ID NO: 1100
acguucuugggugaaauca

SEQ ID NO: 87625 - RNA, 19 nt, Artificial Sequence
  Description of Artificial Sequence: Synthetic oligonucleotide
  Antisense strand to SEQ ID NO: 87544
ugauuucacccaagaacgu

SEQ ID NO: 87626 - RNA, 19 nt, Artificial Sequence
  Description of Artificial Sequence: Synthetic oligonucleotide
  Sense strand starting at position 3909 of SEQ ID NO: 1100
cacguucuugggugaaauc

SEQ ID NO: 87627 - RNA, 19 nt, Artificial Sequence
  Description of Artificial Sequence: Synthetic oligonucleotide
  Antisense strand to SEQ ID NO: 87546
gauuucacccaagaacgug

SEQ ID NO: 87628 - RNA, 19 nt, Artificial Sequence
  Description of Artificial Sequence: Synthetic oligonucleotide
  Sense strand starting at position 3908 of SEQ ID NO: 1100
ucacguucuugggugaaau

SEQ ID NO: 87629 - RNA, 19 nt, Artificial Sequence
  Description of Artificial Sequence: Synthetic oligonucleotide
  Antisense strand to SEQ ID NO: 87548
auuucacccaagaacguga

SEQ ID NO: 87630 - RNA, 19 nt, Artificial Sequence
  Description of Artificial Sequence: Synthetic oligonucleotide
  Sense strand starting at position 3899 of SEQ ID NO: 1100
ggagaacucucacguucuu

SEQ ID NO: 87631 - RNA, 19 nt, Artificial Sequence
  Description of Artificial Sequence: Synthetic oligonucleotide
  Antisense strand to SEQ ID NO: 87550
aagaacgugagaguucucc

SEQ ID NO: 87632 - RNA, 19 nt, Artificial Sequence
  Description of Artificial Sequence: Synthetic oligonucleotide
  Sense strand starting at position 3858 of SEQ ID NO: 1100
gcguauguuggugaguugu

SEQ ID NO: 87633 - RNA, 19 nt, Artificial Sequence
  Description of Artificial Sequence: Synthetic oligonucleotide
  Antisense strand to SEQ ID NO: 87552
acaacucaccaacauacgc

SEQ ID NO: 87634 - RNA, 19 nt, Artificial Sequence
  Description of Artificial Sequence: Synthetic oligonucleotide
  Sense strand starting at position 3857 of SEQ ID NO: 1100
agcguauguuggugaguug

SEQ ID NO: 87635 - RNA, 19 nt, Artificial Sequence
  Description of Artificial Sequence: Synthetic oligonucleotide
  Antisense strand to SEQ ID NO: 87554
caacucaccaacauacgcu

SEQ ID NO: 87636 - RNA, 19 nt, Artificial Sequence
  Description of Artificial Sequence: Synthetic oligonucleotide
  Sense strand starting at position 3856 of SEQ ID NO: 1100
gagcguauguuggugaguu

SEQ ID NO: 87637 - RNA, 19 nt, Artificial Sequence
  Description of Artificial Sequence: Synthetic oligonucleotide
  Antisense strand to SEQ ID NO: 87556
aacucaccaacauacgcuc

SEQ ID NO: 87638 - RNA, 19 nt, Artificial Sequence
  Description of Artificial Sequence: Synthetic oligonucleotide
  Sense strand starting at position 3821 of SEQ ID NO: 1100
gcuccuguuccgugccaaa

SEQ ID NO: 87639 - RNA, 19 nt, Artificial Sequence
  Description of Artificial Sequence: Synthetic oligonucleotide
  Antisense strand to SEQ ID NO: 87558
uuuggcacggaacaggagc

SEQ ID NO: 87640 - RNA, 19 nt, Artificial Sequence
  Description of Artificial Sequence: Synthetic oligonucleotide
  Sense strand starting at position 3481 of SEQ ID NO: 1100
agcugugacuccugcguga

SEQ ID NO: 87641 - RNA, 19 nt, Artificial Sequence
  Description of Artificial Sequence: Synthetic oligonucleotide
  Antisense strand to SEQ ID NO: 87560
ucacgcaggagucacagcu

SEQ ID NO: 87642 - RNA, 19 nt, Artificial Sequence
  Description of Artificial Sequence: Synthetic oligonucleotide
  Sense strand starting at position 3203 of SEQ ID NO: 1100
cggcguugcggucggagaa

SEQ ID NO: 87643 - RNA, 19 nt, Artificial Sequence
  Description of Artificial Sequence: Synthetic oligonucleotide
  Antisense strand to SEQ ID NO: 87562
uucuccgaccgcaacgccg

SEQ ID NO: 87644 - RNA, 19 nt, Artificial Sequence
  Description of Artificial Sequence: Synthetic oligonucleotide
  Sense strand starting at position 2370 of SEQ ID NO: 1100
ccuccuguuucuccgaaga

SEQ ID NO: 87645 - RNA, 19 nt, Artificial Sequence
  Description of Artificial Sequence: Synthetic oligonucleotide
  Antisense strand to SEQ ID NO: 87564
ucuucggagaaacaggagg

SEQ ID NO: 87646 - RNA, 19 nt, Artificial Sequence
  Description of Artificial Sequence: Synthetic oligonucleotide
  Sense strand starting at position 2222 of SEQ ID NO: 1100
ccaucuuccuucuccgaga

SEQ ID NO: 87647 - RNA, 19 nt, Artificial Sequence
  Description of Artificial Sequence: Synthetic oligonucleotide
  Antisense strand to SEQ ID NO: 87566
ucucggagaaggaagaugg

SEQ ID NO: 87648 - RNA, 19 nt, Artificial Sequence
  Description of Artificial Sequence: Synthetic oligonucleotide
  Sense strand starting at position 1028 of SEQ ID NO: 1100
guacuugcuugugaacaug

SEQ ID NO: 87649 - RNA, 19 nt, Artificial Sequence
  Description of Artificial Sequence: Synthetic oligonucleotide
  Antisense strand to SEQ ID NO: 87568
cauguucacaagcaaguac

SEQ ID NO: 87650 - RNA, 19 nt, Artificial Sequence
  Description of Artificial Sequence: Synthetic oligonucleotide
  Sense strand starting at position 1027 of SEQ ID NO: 1100
gguacuugcuugugaacau

SEQ ID NO: 87651 - RNA, 19 nt, Artificial Sequence
  Description of Artificial Sequence: Synthetic oligonucleotide
  Antisense strand to SEQ ID NO: 87570
auguucacaagcaaguacc

SEQ ID NO: 87652 - RNA, 19 nt, Artificial Sequence
  Description of Artificial Sequence: Synthetic oligonucleotide
  Sense strand starting at position 1025 of SEQ ID NO: 1100
cggguacuugcuugugaac

SEQ ID NO: 87653 - RNA, 19 nt, Artificial Sequence
  Description of Artificial Sequence: Synthetic oligonucleotide
  Antisense strand to SEQ ID NO: 87572
guucacaagcaaguacccg

SEQ ID NO: 87654 - RNA, 19 nt, Artificial Sequence
  Description of Artificial Sequence: Synthetic oligonucleotide
  Sense strand starting at position 1024 of SEQ ID NO: 1100
gcggguacuugcuugugaa

SEQ ID NO: 87655 - RNA, 19 nt, Artificial Sequence
  Description of Artificial Sequence: Synthetic oligonucleotide
  Antisense strand to SEQ ID NO: 87574
uucacaagcaaguacccgc

SEQ ID NO: 87656 - RNA, 19 nt, Artificial Sequence
  Description of Artificial Sequence: Synthetic oligonucleotide
  Sense strand starting at position 446 of SEQ ID NO: 1100
agggcugugucaggaacaa

SEQ ID NO: 87657 - RNA, 19 nt, Artificial Sequence
  Description of Artificial Sequence: Synthetic oligonucleotide
  Antisense strand to SEQ ID NO: 87576
uuguuccugacacagcccu

SEQ ID NO: 87658 - RNA, 19 nt, Artificial Sequence
  Description of Artificial Sequence: Synthetic oligonucleotide
  Sense strand starting at position 245 of SEQ ID NO: 1100
gguccucagaccugagauc

SEQ ID NO: 87659 - RNA, 19 nt, Artificial Sequence
  Description of Artificial Sequence: Synthetic oligonucleotide
  Antisense strand to SEQ ID NO: 87578
gaucucaggucugaggacc

SEQ ID NO: 87660 - RNA, 19 nt, Artificial Sequence
  Description of Artificial Sequence: Synthetic oligonucleotide
  Sense strand starting at position 3929 of SEQ ID NO: 1101
cauguugaucaaugaaggu

SEQ ID NO: 87661 - RNA, 19 nt, Artificial Sequence
  Description of Artificial Sequence: Synthetic oligonucleotide
  Antisense strand to SEQ ID NO: 87580
accuucauugaucaacaug

SEQ ID NO: 87662 - RNA, 19 nt, Artificial Sequence
  Description of Artificial Sequence: Synthetic oligonucleotide
  Sense strand starting at position 3926 of SEQ ID NO: 1101
guccauguugaucaaugaa

SEQ ID NO: 87663 - RNA, 19 nt, Artificial Sequence
  Description of Artificial Sequence: Synthetic oligonucleotide
  Antisense strand to SEQ ID NO: 87582
uucauugaucaacauggac

SEQ ID NO: 87664 - RNA, 19 nt, Artificial Sequence
  Description of Artificial Sequence: Synthetic oligonucleotide
  Sense strand starting at position 3925 of SEQ ID NO: 1101
uguccauguugaucaauga

SEQ ID NO: 87665 - RNA, 19 nt, Artificial Sequence
  Description of Artificial Sequence: Synthetic oligonucleotide
  Antisense strand to SEQ ID NO: 87584
ucauugaucaacauggaca

SEQ ID NO: 87666 - RNA, 19 nt, Artificial Sequence
  Description of Artificial Sequence: Synthetic oligonucleotide
  Sense strand starting at position 3860 of SEQ ID NO: 1101
gguaucaaagcauauguau

SEQ ID NO: 87667 - RNA, 19 nt, Artificial Sequence
  Description of Artificial Sequence: Synthetic oligonucleotide
  Antisense strand to SEQ ID NO: 87586
auacauaugcuuugauacc

SEQ ID NO: 87668 - RNA, 19 nt, Artificial Sequence
  Description of Artificial Sequence: Synthetic oligonucleotide
  Sense strand starting at position 3729 of SEQ ID NO: 1101
guacaaauccuagaccugu

SEQ ID NO: 87669 - RNA, 19 nt, Artificial Sequence
  Description of Artificial Sequence: Synthetic oligonucleotide
  Antisense strand to SEQ ID NO: 87588
acaggucuaggauuuguac

SEQ ID NO: 87670 - RNA, 19 nt, Artificial Sequence
  Description of Artificial Sequence: Synthetic oligonucleotide
  Sense strand starting at position 3562 of SEQ ID NO: 1101
aaaguuaucuuggcuuaag

SEQ ID NO: 87671 - RNA, 19 nt, Artificial Sequence
  Description of Artificial Sequence: Synthetic oligonucleotide
  Antisense strand to SEQ ID NO: 87590
cuuaagccaagauaacuuu

SEQ ID NO: 87672 - RNA, 19 nt, Artificial Sequence
  Description of Artificial Sequence: Synthetic oligonucleotide
  Sense strand starting at position 3335 of SEQ ID NO: 1101
aggccaauccuagauucua

SEQ ID NO: 87673 - RNA, 19 nt, Artificial Sequence
  Description of Artificial Sequence: Synthetic oligonucleotide
  Antisense strand to SEQ ID NO: 87592
uagaaucuaggauuggccu

SEQ ID NO: 87674 - RNA, 19 nt, Artificial Sequence
  Description of Artificial Sequence: Synthetic oligonucleotide
  Sense strand starting at position 2892 of SEQ ID NO: 1101
ggauaccucuuguuaauua

SEQ ID NO: 87675 - RNA, 19 nt, Artificial Sequence
  Description of Artificial Sequence: Synthetic oligonucleotide
  Antisense strand to SEQ ID NO: 87594
uaauuaacaagagguaucc

SEQ ID NO: 87676 - RNA, 19 nt, Artificial Sequence
  Description of Artificial Sequence: Synthetic oligonucleotide
  Sense strand starting at position 2850 of SEQ ID NO: 1101
guagaaucuacacaggugu

SEQ ID NO: 87677 - RNA, 19 nt, Artificial Sequence
  Description of Artificial Sequence: Synthetic oligonucleotide
  Antisense strand to SEQ ID NO: 87596
acaccuguguagauucuac

SEQ ID NO: 87678 - RNA, 19 nt, Artificial Sequence
  Description of Artificial Sequence: Synthetic oligonucleotide
  Sense strand starting at position 2841 of SEQ ID NO: 1101
guucuuuauguagaaucua

SEQ ID NO: 87679 - RNA, 19 nt, Artificial Sequence
  Description of Artificial Sequence: Synthetic oligonucleotide
  Antisense strand to SEQ ID NO: 87598
uagauucuacauaaagaac

SEQ ID NO: 87680 - RNA, 19 nt, Artificial Sequence
  Description of Artificial Sequence: Synthetic oligonucleotide
  Sense strand starting at position 2805 of SEQ ID NO: 1101
auacuaggcuaaguauuaa

SEQ ID NO: 87681 - RNA, 19 nt, Artificial Sequence
  Description of Artificial Sequence: Synthetic oligonucleotide
  Antisense strand to SEQ ID NO: 87600
uuaauacuuagccuaguau

SEQ ID NO: 87682 - RNA, 19 nt, Artificial Sequence
  Description of Artificial Sequence: Synthetic oligonucleotide
  Sense strand starting at position 2802 of SEQ ID NO: 1101
aguauacuaggcuaaguau

SEQ ID NO: 87683 - RNA, 19 nt, Artificial Sequence
  Description of Artificial Sequence: Synthetic oligonucleotide
  Antisense strand to SEQ ID NO: 87602
auacuuagccuaguauacu

SEQ ID NO: 87684 - RNA, 19 nt, Artificial Sequence
  Description of Artificial Sequence: Synthetic oligonucleotide
  Sense strand starting at position 2786 of SEQ ID NO: 1101
ugcugauuuccugguaagu

SEQ ID NO: 87685 - RNA, 19 nt, Artificial Sequence
  Description of Artificial Sequence: Synthetic oligonucleotide
  Antisense strand to SEQ ID NO: 87604
acuuaccaggaaaucagca

SEQ ID NO: 87686 - RNA, 19 nt, Artificial Sequence
  Description of Artificial Sequence: Synthetic oligonucleotide
  Sense strand starting at position 2784 of SEQ ID NO: 1101
guugcugauuuccugguaa

SEQ ID NO: 87687 - RNA, 19 nt, Artificial Sequence
  Description of Artificial Sequence: Synthetic oligonucleotide
  Antisense strand to SEQ ID NO: 87606
uuaccaggaaaucagcaac

SEQ ID NO: 87688 - RNA, 19 nt, Artificial Sequence
  Description of Artificial Sequence: Synthetic oligonucleotide
  Sense strand starting at position 2762 of SEQ ID NO: 1101
ucaggaauaucagagaaag

SEQ ID NO: 87689 - RNA, 19 nt, Artificial Sequence
  Description of Artificial Sequence: Synthetic oligonucleotide
  Antisense strand to SEQ ID NO: 87608
cuuucucugauauuccuga

SEQ ID NO: 87690 - RNA, 19 nt, Artificial Sequence
  Description of Artificial Sequence: Synthetic oligonucleotide
  Sense strand starting at position 2334 of SEQ ID NO: 1101
uguggauugaauuauugca

SEQ ID NO: 87691 - RNA, 19 nt, Artificial Sequence
  Description of Artificial Sequence: Synthetic oligonucleotide
  Antisense strand to SEQ ID NO: 87610
ugcaauaauucaauccaca

SEQ ID NO: 87692 - RNA, 19 nt, Artificial Sequence
  Description of Artificial Sequence: Synthetic oligonucleotide
  Sense strand starting at position 2329 of SEQ ID NO: 1101
cuaauuguggauugaauua

SEQ ID NO: 87693 - RNA, 19 nt, Artificial Sequence
  Description of Artificial Sequence: Synthetic oligonucleotide
  Antisense strand to SEQ ID NO: 87612
uaauucaauccacaauuag

SEQ ID NO: 87694 - RNA, 19 nt, Artificial Sequence
  Description of Artificial Sequence: Synthetic oligonucleotide
  Sense strand starting at position 2321 of SEQ ID NO: 1101
caauguuccuaauugugga

SEQ ID NO: 87695 - RNA, 19 nt, Artificial Sequence
  Description of Artificial Sequence: Synthetic oligonucleotide
  Antisense strand to SEQ ID NO: 87614
uccacaauuaggaacauug

SEQ ID NO: 87696 - RNA, 19 nt, Artificial Sequence
  Description of Artificial Sequence: Synthetic oligonucleotide
  Sense strand starting at position 2259 of SEQ ID NO: 1101
aggguagucacagaaagcu

SEQ ID NO: 87697 - RNA, 19 nt, Artificial Sequence
  Description of Artificial Sequence: Synthetic oligonucleotide
  Antisense strand to SEQ ID NO: 87616
agcuuucugugacuacccu

SEQ ID NO: 87698 - RNA, 19 nt, Artificial Sequence
  Description of Artificial Sequence: Synthetic oligonucleotide
  Sense strand starting at position 2254 of SEQ ID NO: 1101
aguaaaggguagucacaga

SEQ ID NO: 87699 - RNA, 19 nt, Artificial Sequence
  Description of Artificial Sequence: Synthetic oligonucleotide
  Antisense strand to SEQ ID NO: 87618
ucugugacuacccuuuacu

SEQ ID NO: 87700 - RNA, 19 nt, Artificial Sequence
  Description of Artificial Sequence: Synthetic oligonucleotide
  Sense strand starting at position 2153 of SEQ ID NO: 1101
cuuguaucccaagaguaac

SEQ ID NO: 87701 - RNA, 19 nt, Artificial Sequence
  Description of Artificial Sequence: Synthetic oligonucleotide
  Antisense strand to SEQ ID NO: 87620
guuacucuugggauacaag

SEQ ID NO: 87702 - RNA, 19 nt, Artificial Sequence
  Description of Artificial Sequence: Synthetic oligonucleotide
  Sense strand starting at position 1436 of SEQ ID NO: 1101
aaaguauggcuccagacua

SEQ ID NO: 87703 - RNA, 19 nt, Artificial Sequence
  Description of Artificial Sequence: Synthetic oligonucleotide
  Antisense strand to SEQ ID NO: 87622
uagucuggagccauacuuu

SEQ ID NO: 87704 - RNA, 19 nt, Artificial Sequence
  Description of Artificial Sequence: Synthetic oligonucleotide
  Sense strand starting at position 1433 of SEQ ID NO: 1101
gggaaaguauggcuccaga

SEQ ID NO: 87705 - RNA, 19 nt, Artificial Sequence
  Description of Artificial Sequence: Synthetic oligonucleotide
  Antisense strand to SEQ ID NO: 87624
ucuggagccauacuuuccc

SEQ ID NO: 87706 - RNA, 19 nt, Artificial Sequence
  Description of Artificial Sequence: Synthetic oligonucleotide
  Sense strand starting at position 1363 of SEQ ID NO: 1101
ggaggaggcgucugcauuu

SEQ ID NO: 87707 - RNA, 19 nt, Artificial Sequence
  Description of Artificial Sequence: Synthetic oligonucleotide
  Antisense strand to SEQ ID NO: 87626
aaaugcagacgccuccucc

SEQ ID NO: 87708 - RNA, 19 nt, Artificial Sequence
  Description of Artificial Sequence: Synthetic oligonucleotide
  Sense strand starting at position 1339 of SEQ ID NO: 1101
uuaacuugucccgaaguga

SEQ ID NO: 87709 - RNA, 19 nt, Artificial Sequence
  Description of Artificial Sequence: Synthetic oligonucleotide
  Antisense strand to SEQ ID NO: 87628
ucacuucgggacaaguuaa

SEQ ID NO: 87710 - RNA, 19 nt, Artificial Sequence
  Description of Artificial Sequence: Synthetic oligonucleotide
  Sense strand starting at position 1327 of SEQ ID NO: 1101
aucugaagauuguuaacuu

SEQ ID NO: 87711 - RNA, 19 nt, Artificial Sequence
  Description of Artificial Sequence: Synthetic oligonucleotide
  Antisense strand to SEQ ID NO: 87630
aaguuaacaaucuucagau

SEQ ID NO: 87712 - RNA, 19 nt, Artificial Sequence
  Description of Artificial Sequence: Synthetic oligonucleotide
  Sense strand starting at position 1229 of SEQ ID NO: 1101
ugaucucgacaucaaguau

SEQ ID NO: 87713 - RNA, 19 nt, Artificial Sequence
  Description of Artificial Sequence: Synthetic oligonucleotide
  Antisense strand to SEQ ID NO: 87632
auacuugaugucgagauca

SEQ ID NO: 87714 - RNA, 19 nt, Artificial Sequence
  Description of Artificial Sequence: Synthetic oligonucleotide
  Sense strand starting at position 1226 of SEQ ID NO: 1101
cugugaucucgacaucaag

SEQ ID NO: 87715 - RNA, 19 nt, Artificial Sequence
  Description of Artificial Sequence: Synthetic oligonucleotide
  Antisense strand to SEQ ID NO: 87634
cuugaugucgagaucacag

SEQ ID NO: 87716 - RNA, 19 nt, Artificial Sequence
  Description of Artificial Sequence: Synthetic oligonucleotide
  Sense strand starting at position 1224 of SEQ ID NO: 1101
aacugugaucucgacauca

SEQ ID NO: 87717 - RNA, 19 nt, Artificial Sequence
  Description of Artificial Sequence: Synthetic oligonucleotide
  Antisense strand to SEQ ID NO: 87636
ugaugucgagaucacaguu

SEQ ID NO: 87718 - RNA, 19 nt, Artificial Sequence
  Description of Artificial Sequence: Synthetic oligonucleotide
  Sense strand starting at position 1163 of SEQ ID NO: 1101
cuaaauagucccgacuguu

SEQ ID NO: 87719 - RNA, 19 nt, Artificial Sequence
  Description of Artificial Sequence: Synthetic oligonucleotide
  Antisense strand to SEQ ID NO: 87638
aacagucgggacuauuuag

SEQ ID NO: 87720 - RNA, 19 nt, Artificial Sequence
  Description of Artificial Sequence: Synthetic oligonucleotide
  Sense strand starting at position 1150 of SEQ ID NO: 1101
gagggaaaguaugcuaaau

SEQ ID NO: 87721 - RNA, 19 nt, Artificial Sequence
  Description of Artificial Sequence: Synthetic oligonucleotide
  Antisense strand to SEQ ID NO: 87640
auuuagcauacuuucccuc

SEQ ID NO: 87722 - RNA, 19 nt, Artificial Sequence
  Description of Artificial Sequence: Synthetic oligonucleotide
  Sense strand starting at position 1071 of SEQ ID NO: 1101
gcagaugcacaauaacuua

SEQ ID NO: 87723 - RNA, 19 nt, Artificial Sequence
  Description of Artificial Sequence: Synthetic oligonucleotide
  Antisense strand to SEQ ID NO: 87642
uaaguuauugugcaucugc

SEQ ID NO: 87724 - RNA, 19 nt, Artificial Sequence
  Description of Artificial Sequence: Synthetic oligonucleotide
  Sense strand starting at position 1026 of SEQ ID NO: 1101
gucaguuaucaagaguuuc

SEQ ID NO: 87725 - RNA, 19 nt, Artificial Sequence
  Description of Artificial Sequence: Synthetic oligonucleotide
  Antisense strand to SEQ ID NO: 87644
gaaacucuugauaacugac

SEQ ID NO: 87726 - RNA, 19 nt, Artificial Sequence
  Description of Artificial Sequence: Synthetic oligonucleotide
  Sense strand starting at position 1018 of SEQ ID NO: 1101
cucauuucgucaguuauca

SEQ ID NO: 87727 - RNA, 19 nt, Artificial Sequence
  Description of Artificial Sequence: Synthetic oligonucleotide
  Antisense strand to SEQ ID NO: 87646
ugauaacugacgaaaugag

SEQ ID NO: 87728 - RNA, 19 nt, Artificial Sequence
  Description of Artificial Sequence: Synthetic oligonucleotide
  Sense strand starting at position 1015 of SEQ ID NO: 1101
ucacucauuucgucaguua

SEQ ID NO: 87729 - RNA, 19 nt, Artificial Sequence
  Description of Artificial Sequence: Synthetic oligonucleotide
  Antisense strand to SEQ ID NO: 87648
uaacugacgaaaugaguga

SEQ ID NO: 87730 - RNA, 19 nt, Artificial Sequence
  Description of Artificial Sequence: Synthetic oligonucleotide
  Sense strand starting at position 776 of SEQ ID NO: 1101
agcagaauuuaguaagauu

SEQ ID NO: 87731 - RNA, 19 nt, Artificial Sequence
  Description of Artificial Sequence: Synthetic oligonucleotide
  Antisense strand to SEQ ID NO: 87650
aaucuuacuaaauucugcu

SEQ ID NO: 87732 - RNA, 19 nt, Artificial Sequence
  Description of Artificial Sequence: Synthetic oligonucleotide
  Sense strand starting at position 650 of SEQ ID NO: 1101
aguguuuagcacuacauac

SEQ ID NO: 87733 - RNA, 19 nt, Artificial Sequence
  Description of Artificial Sequence: Synthetic oligonucleotide
  Antisense strand to SEQ ID NO: 87652
guauguagugcuaaacacu

SEQ ID NO: 87734 - RNA, 19 nt, Artificial Sequence
  Description of Artificial Sequence: Synthetic oligonucleotide
  Sense strand starting at position 497 of SEQ ID NO: 1101
ugcaguacaguauauuaua

SEQ ID NO: 87735 - RNA, 19 nt, Artificial Sequence
  Description of Artificial Sequence: Synthetic oligonucleotide
  Antisense strand to SEQ ID NO: 87654
uauaauauacuguacugca

SEQ ID NO: 87736 - RNA, 19 nt, Artificial Sequence
  Description of Artificial Sequence: Synthetic oligonucleotide
  Sense strand starting at position 322 of SEQ ID NO: 1101
gccuauuuauugucuauau

SEQ ID NO: 87737 - RNA, 19 nt, Artificial Sequence
  Description of Artificial Sequence: Synthetic oligonucleotide
  Antisense strand to SEQ ID NO: 87656
auauagacaauaaauaggc

SEQ ID NO: 87738 - RNA, 19 nt, Artificial Sequence
  Description of Artificial Sequence: Synthetic oligonucleotide
  Sense strand starting at position 147 of SEQ ID NO: 1101
agaaguuguuuaucuuuga

SEQ ID NO: 87739 - RNA, 19 nt, Artificial Sequence
  Description of Artificial Sequence: Synthetic oligonucleotide
  Antisense strand to SEQ ID NO: 87658
ucaaagauaaacaacuucu

SEQ ID NO: 87740 - RNA, 19 nt, Artificial Sequence
  Description of Artificial Sequence: Synthetic oligonucleotide
  Sense strand starting at position 179 of SEQ ID NO: 1102
guggguucuuuccuuauau

SEQ ID NO: 87741 - RNA, 19 nt, Artificial Sequence
  Description of Artificial Sequence: Synthetic oligonucleotide
  Antisense strand to SEQ ID NO: 87660
auauaaggaaagaacccac

SEQ ID NO: 87742 - RNA, 19 nt, Artificial Sequence
  Description of Artificial Sequence: Synthetic oligonucleotide
  Sense strand starting at position 180 of SEQ ID NO: 1102
uggguucuuuccuuauaua

SEQ ID NO: 87743 - RNA, 19 nt, Artificial Sequence
  Description of Artificial Sequence: Synthetic oligonucleotide
  Antisense strand to SEQ ID NO: 87662
uauauaaggaaagaaccca

SEQ ID NO: 87744 - RNA, 19 nt, Artificial Sequence
  Description of Artificial Sequence: Synthetic oligonucleotide
  Sense strand starting at position 181 of SEQ ID NO: 1102
ggguucuuuccuuauauag

SEQ ID NO: 87745 - RNA, 19 nt, Artificial Sequence
  Description of Artificial Sequence: Synthetic oligonucleotide
  Antisense strand to SEQ ID NO: 87664
cuauauaaggaaagaaccc

SEQ ID NO: 87746 - RNA, 19 nt, Artificial Sequence
  Description of Artificial Sequence: Synthetic oligonucleotide
  Sense strand starting at position 245 of SEQ ID NO: 1102
ucguguuugaacugggauu

SEQ ID NO: 87747 - RNA, 19 nt, Artificial Sequence
  Description of Artificial Sequence: Synthetic oligonucleotide
  Antisense strand to SEQ ID NO: 87666
aaucccaguucaaacacga

SEQ ID NO: 87748 - RNA, 19 nt, Artificial Sequence
  Description of Artificial Sequence: Synthetic oligonucleotide
  Sense strand starting at position 246 of SEQ ID NO: 1102
cguguuugaacugggauuu

SEQ ID NO: 87749 - RNA, 19 nt, Artificial Sequence
  Description of Artificial Sequence: Synthetic oligonucleotide
  Antisense strand to SEQ ID NO: 87668
aaaucccaguucaaacacg

SEQ ID NO: 87750 - RNA, 19 nt, Artificial Sequence
  Description of Artificial Sequence: Synthetic oligonucleotide
  Sense strand starting at position 346 of SEQ ID NO: 1102
ggccaaguaacuggaagaa

SEQ ID NO: 87751 - RNA, 19 nt, Artificial Sequence
  Description of Artificial Sequence: Synthetic oligonucleotide
  Antisense strand to SEQ ID NO: 87670
uucuuccaguuacuuggcc

SEQ ID NO: 87752 - RNA, 19 nt, Artificial Sequence
  Description of Artificial Sequence: Synthetic oligonucleotide
  Sense strand starting at position 371 of SEQ ID NO: 1102
uuaacaugugaccauguuu

SEQ ID NO: 87753 - RNA, 19 nt, Artificial Sequence
  Description of Artificial Sequence: Synthetic oligonucleotide
  Antisense strand to SEQ ID NO: 87672
aaacauggucacauguuaa

SEQ ID NO: 87754 - RNA, 19 nt, Artificial Sequence
  Description of Artificial Sequence: Synthetic oligonucleotide
  Sense strand starting at position 458 of SEQ ID NO: 1102
gaaccuugucaccggguga

SEQ ID NO: 87755 - RNA, 19 nt, Artificial Sequence
  Description of Artificial Sequence: Synthetic oligonucleotide
  Antisense strand to SEQ ID NO: 87674
ucacccggugacaagguuc

SEQ ID NO: 87756 - RNA, 19 nt, Artificial Sequence
  Description of Artificial Sequence: Synthetic oligonucleotide
  Sense strand starting at position 462 of SEQ ID NO: 1102
cuugucaccgggugacaaa

SEQ ID NO: 87757 - RNA, 19 nt, Artificial Sequence
  Description of Artificial Sequence: Synthetic oligonucleotide
  Antisense strand to SEQ ID NO: 87676
uuugucacccggugacaag

SEQ ID NO: 87758 - RNA, 19 nt, Artificial Sequence
  Description of Artificial Sequence: Synthetic oligonucleotide
  Sense strand starting at position 581 of SEQ ID NO: 1102
uggauuccuuaaggagaaa

SEQ ID NO: 87759 - RNA, 19 nt, Artificial Sequence
  Description of Artificial Sequence: Synthetic oligonucleotide
  Antisense strand to SEQ ID NO: 87678
uuucuccuuaaggaaucca

SEQ ID NO: 87760 - RNA, 19 nt, Artificial Sequence
  Description of Artificial Sequence: Synthetic oligonucleotide
  Sense strand starting at position 771 of SEQ ID NO: 1102
aaguaucgcccagagacau

SEQ ID NO: 87761 - RNA, 19 nt, Artificial Sequence
  Description of Artificial Sequence: Synthetic oligonucleotide
  Antisense strand to SEQ ID NO: 87680
augucucugggcgauacuu

SEQ ID NO: 87762 - RNA, 19 nt, Artificial Sequence
  Description of Artificial Sequence: Synthetic oligonucleotide
  Sense strand starting at position 1834 of SEQ ID NO: 1102
gggucacguccaggaacuu

SEQ ID NO: 87763 - RNA, 19 nt, Artificial Sequence
  Description of Artificial Sequence: Synthetic oligonucleotide
  Antisense strand to SEQ ID NO: 87682
aaguuccuggacgugaccc

SEQ ID NO: 87764 - RNA, 19 nt, Artificial Sequence
  Description of Artificial Sequence: Synthetic oligonucleotide
  Sense strand starting at position 1943 of SEQ ID NO: 1102
cuccauggcgccuucgaua

SEQ ID NO: 87765 - RNA, 19 nt, Artificial Sequence
  Description of Artificial Sequence: Synthetic oligonucleotide
  Antisense strand to SEQ ID NO: 87684
uaucgaaggcgccauggag

SEQ ID NO: 87766 - RNA, 19 nt, Artificial Sequence
  Description of Artificial Sequence: Synthetic oligonucleotide
  Sense strand starting at position 1955 of SEQ ID NO: 1102
uucgauagguugucgagga

SEQ ID NO: 87767 - RNA, 19 nt, Artificial Sequence
  Description of Artificial Sequence: Synthetic oligonucleotide
  Antisense strand to SEQ ID NO: 87686
uccucgacaaccuaucgaa

SEQ ID NO: 87768 - RNA, 19 nt, Artificial Sequence
  Description of Artificial Sequence: Synthetic oligonucleotide
  Sense strand starting at position 2561 of SEQ ID NO: 1102
caagaacgcguauaaaguu

SEQ ID NO: 87769 - RNA, 19 nt, Artificial Sequence
  Description of Artificial Sequence: Synthetic oligonucleotide
  Antisense strand to SEQ ID NO: 87688
aacuuuauacgcguucuug

SEQ ID NO: 87770 - RNA, 19 nt, Artificial Sequence
  Description of Artificial Sequence: Synthetic oligonucleotide
  Sense strand starting at position 2649 of SEQ ID NO: 1102
uccuguguuccugaaggag

SEQ ID NO: 87771 - RNA, 19 nt, Artificial Sequence
  Description of Artificial Sequence: Synthetic oligonucleotide
  Antisense strand to SEQ ID NO: 87690
cuccuucaggaacacagga

SEQ ID NO: 87772 - RNA, 19 nt, Artificial Sequence
  Description of Artificial Sequence: Synthetic oligonucleotide
  Sense strand starting at position 2661 of SEQ ID NO: 1102
gaaggagcuucugacucaa

SEQ ID NO: 87773 - RNA, 19 nt, Artificial Sequence
  Description of Artificial Sequence: Synthetic oligonucleotide
  Antisense strand to SEQ ID NO: 87692
uugagucagaagcuccuuc

SEQ ID NO: 87774 - RNA, 19 nt, Artificial Sequence
  Description of Artificial Sequence: Synthetic oligonucleotide
  Sense strand starting at position 2713 of SEQ ID NO: 1102
gcaguuguaguuuccgagu

SEQ ID NO: 87775 - RNA, 19 nt, Artificial Sequence
  Description of Artificial Sequence: Synthetic oligonucleotide
  Antisense strand to SEQ ID NO: 87694
acucggaaacuacaacugc

SEQ ID NO: 87776 - RNA, 19 nt, Artificial Sequence
  Description of Artificial Sequence: Synthetic oligonucleotide
  Sense strand starting at position 2839 of SEQ ID NO: 1102
ggcucaaagucagauagga

SEQ ID NO: 87777 - RNA, 19 nt, Artificial Sequence
  Description of Artificial Sequence: Synthetic oligonucleotide
  Antisense strand to SEQ ID NO: 87696
uccuaucugacuuugagcc

SEQ ID NO: 87778 - RNA, 19 nt, Artificial Sequence
  Description of Artificial Sequence: Synthetic oligonucleotide
  Sense strand starting at position 2854 of SEQ ID NO: 1102
aggagaccgccuugaaacu

SEQ ID NO: 87779 - RNA, 19 nt, Artificial Sequence
  Description of Artificial Sequence: Synthetic oligonucleotide
  Antisense strand to SEQ ID NO: 87698
aguuucaaggcggucuccu

SEQ ID NO: 87780 - RNA, 19 nt, Artificial Sequence
  Description of Artificial Sequence: Synthetic oligonucleotide
  Sense strand starting at position 2974 of SEQ ID NO: 1102
cuuugaaugucacuuguag

SEQ ID NO: 87781 - RNA, 19 nt, Artificial Sequence
  Description of Artificial Sequence: Synthetic oligonucleotide
  Antisense strand to SEQ ID NO: 87700
cuacaagugacauucaaag

SEQ ID NO: 87782 - RNA, 19 nt, Artificial Sequence
  Description of Artificial Sequence: Synthetic oligonucleotide
  Sense strand starting at position 3084 of SEQ ID NO: 1102
gacugcugcuuugcagaga

SEQ ID NO: 87783 - RNA, 19 nt, Artificial Sequence
  Description of Artificial Sequence: Synthetic oligonucleotide
  Antisense strand to SEQ ID NO: 87702
ucucugcaaagcagcaguc

SEQ ID NO: 87784 - RNA, 19 nt, Artificial Sequence
  Description of Artificial Sequence: Synthetic oligonucleotide
  Sense strand starting at position 3210 of SEQ ID NO: 1102
augggagcuggcuaucauu

SEQ ID NO: 87785 - RNA, 19 nt, Artificial Sequence
  Description of Artificial Sequence: Synthetic oligonucleotide
  Antisense strand to SEQ ID NO: 87704
aaugauagccagcucccau

SEQ ID NO: 87786 - RNA, 19 nt, Artificial Sequence
  Description of Artificial Sequence: Synthetic oligonucleotide
  Sense strand starting at position 3253 of SEQ ID NO: 1102
ccgcguagcguuuccagaa

SEQ ID NO: 87787 - RNA, 19 nt, Artificial Sequence
  Description of Artificial Sequence: Synthetic oligonucleotide
  Antisense strand to SEQ ID NO: 87706
uucuggaaacgcuacgcgg

SEQ ID NO: 87788 - RNA, 19 nt, Artificial Sequence
  Description of Artificial Sequence: Synthetic oligonucleotide
  Sense strand starting at position 3355 of SEQ ID NO: 1102
gaaugcaucuggucugaau

SEQ ID NO: 87789 - RNA, 19 nt, Artificial Sequence
  Description of Artificial Sequence: Synthetic oligonucleotide
  Antisense strand to SEQ ID NO: 87708
auucagaccagaugcauuc

SEQ ID NO: 87790 - RNA, 19 nt, Artificial Sequence
  Description of Artificial Sequence: Synthetic oligonucleotide
  Sense strand starting at position 3366 of SEQ ID NO: 1102
gucugaauuucagggugag

SEQ ID NO: 87791 - RNA, 19 nt, Artificial Sequence
  Description of Artificial Sequence: Synthetic oligonucleotide
  Antisense strand to SEQ ID NO: 87710
cucacccugaaauucagac

SEQ ID NO: 87792 - RNA, 19 nt, Artificial Sequence
  Description of Artificial Sequence: Synthetic oligonucleotide
  Sense strand starting at position 3434 of SEQ ID NO: 1102
ccgccuguugcccauagaa

SEQ ID NO: 87793 - RNA, 19 nt, Artificial Sequence
  Description of Artificial Sequence: Synthetic oligonucleotide
  Antisense strand to SEQ ID NO: 87712
uucuaugggcaacaggcgg

SEQ ID NO: 87794 - RNA, 19 nt, Artificial Sequence
  Description of Artificial Sequence: Synthetic oligonucleotide
  Sense strand starting at position 3523 of SEQ ID NO: 1102
ugcacaggcuuugugacaa

SEQ ID NO: 87795 - RNA, 19 nt, Artificial Sequence
  Description of Artificial Sequence: Synthetic oligonucleotide
  Antisense strand to SEQ ID NO: 87714
uugucacaaagccugugca

SEQ ID NO: 87796 - RNA, 19 nt, Artificial Sequence
  Description of Artificial Sequence: Synthetic oligonucleotide
  Sense strand starting at position 3562 of SEQ ID NO: 1102
aguggaauguuuguaggga

SEQ ID NO: 87797 - RNA, 19 nt, Artificial Sequence
  Description of Artificial Sequence: Synthetic oligonucleotide
  Antisense strand to SEQ ID NO: 87716
ucccuacaaacauuccacu

SEQ ID NO: 87798 - RNA, 19 nt, Artificial Sequence
  Description of Artificial Sequence: Synthetic oligonucleotide
  Sense strand starting at position 3618 of SEQ ID NO: 1102
gcguaaguccagugauuaa

SEQ ID NO: 87799 - RNA, 19 nt, Artificial Sequence
  Description of Artificial Sequence: Synthetic oligonucleotide
  Antisense strand to SEQ ID NO: 87718
uuaaucacuggacuuacgc

SEQ ID NO: 87800 - RNA, 19 nt, Artificial Sequence
  Description of Artificial Sequence: Synthetic oligonucleotide
  Sense strand starting at position 3638 of SEQ ID NO: 1102
ucaauaauguuuccauagu

SEQ ID NO: 87801 - RNA, 19 nt, Artificial Sequence
  Description of Artificial Sequence: Synthetic oligonucleotide
  Antisense strand to SEQ ID NO: 87720
acuauggaaacauuauuga

SEQ ID NO: 87802 - RNA, 19 nt, Artificial Sequence
  Description of Artificial Sequence: Synthetic oligonucleotide
  Sense strand starting at position 3644 of SEQ ID NO: 1102
auguuuccauaguugagga

SEQ ID NO: 87803 - RNA, 19 nt, Artificial Sequence
  Description of Artificial Sequence: Synthetic oligonucleotide
  Antisense strand to SEQ ID NO: 87722
uccucaacuauggaaacau

SEQ ID NO: 87804 - RNA, 19 nt, Artificial Sequence
  Description of Artificial Sequence: Synthetic oligonucleotide
  Sense strand starting at position 3645 of SEQ ID NO: 1102
uguuuccauaguugaggau

SEQ ID NO: 87805 - RNA, 19 nt, Artificial Sequence
  Description of Artificial Sequence: Synthetic oligonucleotide
  Antisense strand to SEQ ID NO: 87724
auccucaacuauggaaaca

SEQ ID NO: 87806 - RNA, 19 nt, Artificial Sequence
  Description of Artificial Sequence: Synthetic oligonucleotide
  Sense strand starting at position 3646 of SEQ ID NO: 1102
guuuccauaguugaggauu

SEQ ID NO: 87807 - RNA, 19 nt, Artificial Sequence
  Description of Artificial Sequence: Synthetic oligonucleotide
  Antisense strand to SEQ ID NO: 87726
aauccucaacuauggaaac

SEQ ID NO: 87808 - RNA, 19 nt, Artificial Sequence
  Description of Artificial Sequence: Synthetic oligonucleotide
  Sense strand starting at position 3721 of SEQ ID NO: 1102
cuuacuauguagccuugaa

SEQ ID NO: 87809 - RNA, 19 nt, Artificial Sequence
  Description of Artificial Sequence: Synthetic oligonucleotide
  Antisense strand to SEQ ID NO: 87728
uucaaggcuacauaguaag

SEQ ID NO: 87810 - RNA, 19 nt, Artificial Sequence
  Description of Artificial Sequence: Synthetic oligonucleotide
  Sense strand starting at position 3725 of SEQ ID NO: 1102
cuauguagccuugaagaau

SEQ ID NO: 87811 - RNA, 19 nt, Artificial Sequence
  Description of Artificial Sequence: Synthetic oligonucleotide
  Antisense strand to SEQ ID NO: 87730
auucuucaaggcuacauag

SEQ ID NO: 87812 - RNA, 19 nt, Artificial Sequence
  Description of Artificial Sequence: Synthetic oligonucleotide
  Sense strand starting at position 3728 of SEQ ID NO: 1102
uguagccuugaagaauaau

SEQ ID NO: 87813 - RNA, 19 nt, Artificial Sequence
  Description of Artificial Sequence: Synthetic oligonucleotide
  Antisense strand to SEQ ID NO: 87732
auuauucuucaaggcuaca

SEQ ID NO: 87814 - RNA, 19 nt, Artificial Sequence
  Description of Artificial Sequence: Synthetic oligonucleotide
  Sense strand starting at position 3763 of SEQ ID NO: 1102
uggaaagauguuugagcua

SEQ ID NO: 87815 - RNA, 19 nt, Artificial Sequence
  Description of Artificial Sequence: Synthetic oligonucleotide
  Antisense strand to SEQ ID NO: 87734
uagcucaaacaucuuucca

SEQ ID NO: 87816 - RNA, 19 nt, Artificial Sequence
  Description of Artificial Sequence: Synthetic oligonucleotide
  Sense strand starting at position 3766 of SEQ ID NO: 1102
aaagauguuugagcuauaa

SEQ ID NO: 87817 - RNA, 19 nt, Artificial Sequence
  Description of Artificial Sequence: Synthetic oligonucleotide
  Antisense strand to SEQ ID NO: 87736
uuauagcucaaacaucuuu

SEQ ID NO: 87818 - RNA, 19 nt, Artificial Sequence
  Description of Artificial Sequence: Synthetic oligonucleotide
  Sense strand starting at position 3794 of SEQ ID NO: 1102
ucagauuacucauuguaug

SEQ ID NO: 87819 - RNA, 19 nt, Artificial Sequence
  Description of Artificial Sequence: Synthetic oligonucleotide
  Antisense strand to SEQ ID NO: 87738
cauacaaugaguaaucuga

SEQ ID NO: 87820 - RNA, 19 nt, Artificial Sequence
  Description of Artificial Sequence: Synthetic oligonucleotide
  Sense strand starting at position 3869 of SEQ ID NO: 1103
gaauuacagaugugaguga

SEQ ID NO: 87821 - RNA, 19 nt, Artificial Sequence
  Description of Artificial Sequence: Synthetic oligonucleotide
  Antisense strand to SEQ ID NO: 87740
ucacucacaucuguaauuc

SEQ ID NO: 87822 - RNA, 19 nt, Artificial Sequence
  Description of Artificial Sequence: Synthetic oligonucleotide
  Sense strand starting at position 3548 of SEQ ID NO: 1103
guaugaguaucucuagguu

SEQ ID NO: 87823 - RNA, 19 nt, Artificial Sequence
  Description of Artificial Sequence: Synthetic oligonucleotide
  Antisense strand to SEQ ID NO: 87742
aaccuagagauacucauac

SEQ ID NO: 87824 - RNA, 19 nt, Artificial Sequence
  Description of Artificial Sequence: Synthetic oligonucleotide
  Sense strand starting at position 3539 of SEQ ID NO: 1103
uguacauauguaugaguau

SEQ ID NO: 87825 - RNA, 19 nt, Artificial Sequence
  Description of Artificial Sequence: Synthetic oligonucleotide
  Antisense strand to SEQ ID NO: 87744
auacucauacauauguaca

SEQ ID NO: 87826 - RNA, 19 nt, Artificial Sequence
  Description of Artificial Sequence: Synthetic oligonucleotide
  Sense strand starting at position 3212 of SEQ ID NO: 1103
cguagagguaacugccaua

SEQ ID NO: 87827 - RNA, 19 nt, Artificial Sequence
  Description of Artificial Sequence: Synthetic oligonucleotide
  Antisense strand to SEQ ID NO: 87746
uauggcaguuaccucuacg

SEQ ID NO: 87828 - RNA, 19 nt, Artificial Sequence
  Description of Artificial Sequence: Synthetic oligonucleotide
  Sense strand starting at position 3204 of SEQ ID NO: 1103
cccuccuucguagagguaa

SEQ ID NO: 87829 - RNA, 19 nt, Artificial Sequence
  Description of Artificial Sequence: Synthetic oligonucleotide
  Antisense strand to SEQ ID NO: 87748
uuaccucuacgaaggaggg

SEQ ID NO: 87830 - RNA, 19 nt, Artificial Sequence
  Description of Artificial Sequence: Synthetic oligonucleotide
  Sense strand starting at position 3164 of SEQ ID NO: 1103
gccagaaucccagaagucu

SEQ ID NO: 87831 - RNA, 19 nt, Artificial Sequence
  Description of Artificial Sequence: Synthetic oligonucleotide
  Antisense strand to SEQ ID NO: 87750
agacuucugggauucuggc

SEQ ID NO: 87832 - RNA, 19 nt, Artificial Sequence
  Description of Artificial Sequence: Synthetic oligonucleotide
  Sense strand starting at position 3022 of SEQ ID NO: 1103
guaucaauuccucaguauc

SEQ ID NO: 87833 - RNA, 19 nt, Artificial Sequence
  Description of Artificial Sequence: Synthetic oligonucleotide
  Antisense strand to SEQ ID NO: 87752
gauacugaggaauugauac

SEQ ID NO: 87834 - RNA, 19 nt, Artificial Sequence
  Description of Artificial Sequence: Synthetic oligonucleotide
  Sense strand starting at position 3021 of SEQ ID NO: 1103
uguaucaauuccucaguau

SEQ ID NO: 87835 - RNA, 19 nt, Artificial Sequence
  Description of Artificial Sequence: Synthetic oligonucleotide
  Antisense strand to SEQ ID NO: 87754
auacugaggaauugauaca

SEQ ID NO: 87836 - RNA, 19 nt, Artificial Sequence
  Description of Artificial Sequence: Synthetic oligonucleotide
  Sense strand starting at position 3020 of SEQ ID NO: 1103
auguaucaauuccucagua

SEQ ID NO: 87837 - RNA, 19 nt, Artificial Sequence
  Description of Artificial Sequence: Synthetic oligonucleotide
  Antisense strand to SEQ ID NO: 87756
uacugaggaauugauacau

SEQ ID NO: 87838 - RNA, 19 nt, Artificial Sequence
  Description of Artificial Sequence: Synthetic oligonucleotide
  Sense strand starting at position 3010 of SEQ ID NO: 1103
uguagagaauauguaucaa

SEQ ID NO: 87839 - RNA, 19 nt, Artificial Sequence
  Description of Artificial Sequence: Synthetic oligonucleotide
  Antisense strand to SEQ ID NO: 87758
uugauacauauucucuaca

SEQ ID NO: 87840 - RNA, 19 nt, Artificial Sequence
  Description of Artificial Sequence: Synthetic oligonucleotide
  Sense strand starting at position 2834 of SEQ ID NO: 1103
ucuucuacacguugauuau

SEQ ID NO: 87841 - RNA, 19 nt, Artificial Sequence
  Description of Artificial Sequence: Synthetic oligonucleotide
  Antisense strand to SEQ ID NO: 87760
auaaucaacguguagaaga

SEQ ID NO: 87842 - RNA, 19 nt, Artificial Sequence
  Description of Artificial Sequence: Synthetic oligonucleotide
  Sense strand starting at position 2744 of SEQ ID NO: 1103
ggugaauaguaauccugcu

SEQ ID NO: 87843 - RNA, 19 nt, Artificial Sequence
  Description of Artificial Sequence: Synthetic oligonucleotide
  Antisense strand to SEQ ID NO: 87762
agcaggauuacuauucacc

SEQ ID NO: 87844 - RNA, 19 nt, Artificial Sequence
  Description of Artificial Sequence: Synthetic oligonucleotide
  Sense strand starting at position 2738 of SEQ ID NO: 1103
guacacggugaauaguaau

SEQ ID NO: 87845 - RNA, 19 nt, Artificial Sequence
  Description of Artificial Sequence: Synthetic oligonucleotide
  Antisense strand to SEQ ID NO: 87764
auuacuauucaccguguac

SEQ ID NO: 87846 - RNA, 19 nt, Artificial Sequence
  Description of Artificial Sequence: Synthetic oligonucleotide
  Sense strand starting at position 2735 of SEQ ID NO: 1103
agaguacacggugaauagu

SEQ ID NO: 87847 - RNA, 19 nt, Artificial Sequence
  Description of Artificial Sequence: Synthetic oligonucleotide
  Antisense strand to SEQ ID NO: 87766
acuauucaccguguacucu

SEQ ID NO: 87848 - RNA, 19 nt, Artificial Sequence
  Description of Artificial Sequence: Synthetic oligonucleotide
  Sense strand starting at position 2705 of SEQ ID NO: 1103
auuaacauggcaugaaauu

SEQ ID NO: 87849 - RNA, 19 nt, Artificial Sequence
  Description of Artificial Sequence: Synthetic oligonucleotide
  Antisense strand to SEQ ID NO: 87768
aauuucaugccauguuaau

SEQ ID NO: 87850 - RNA, 19 nt, Artificial Sequence
  Description of Artificial Sequence: Synthetic oligonucleotide
  Sense strand starting at position 2660 of SEQ ID NO: 1103
ggauaagcaugauuaggua

SEQ ID NO: 87851 - RNA, 19 nt, Artificial Sequence
  Description of Artificial Sequence: Synthetic oligonucleotide
  Antisense strand to SEQ ID NO: 87770
uaccuaaucaugcuuaucc

SEQ ID NO: 87852 - RNA, 19 nt, Artificial Sequence
  Description of Artificial Sequence: Synthetic oligonucleotide
  Sense strand starting at position 2657 of SEQ ID NO: 1103
uguggauaagcaugauuag

SEQ ID NO: 87853 - RNA, 19 nt, Artificial Sequence
  Description of Artificial Sequence: Synthetic oligonucleotide
  Antisense strand to SEQ ID NO: 87772
cuaaucaugcuuauccaca

SEQ ID NO: 87854 - RNA, 19 nt, Artificial Sequence
  Description of Artificial Sequence: Synthetic oligonucleotide
  Sense strand starting at position 2614 of SEQ ID NO: 1103
cugguuaggaacuagaguu

SEQ ID NO: 87855 - RNA, 19 nt, Artificial Sequence
  Description of Artificial Sequence: Synthetic oligonucleotide
  Antisense strand to SEQ ID NO: 87774
aacucuaguuccuaaccag

SEQ ID NO: 87856 - RNA, 19 nt, Artificial Sequence
  Description of Artificial Sequence: Synthetic oligonucleotide
  Sense strand starting at position 2523 of SEQ ID NO: 1103
caugaugugguguaaugua

SEQ ID NO: 87857 - RNA, 19 nt, Artificial Sequence
  Description of Artificial Sequence: Synthetic oligonucleotide
  Antisense strand to SEQ ID NO: 87776
uacauuacaccacaucaug

SEQ ID NO: 87858 - RNA, 19 nt, Artificial Sequence
  Description of Artificial Sequence: Synthetic oligonucleotide
  Sense strand starting at position 2493 of SEQ ID NO: 1103
ugauuugcgaauggcaauu

SEQ ID NO: 87859 - RNA, 19 nt, Artificial Sequence
  Description of Artificial Sequence: Synthetic oligonucleotide
  Antisense strand to SEQ ID NO: 87778
aauugccauucgcaaauca

SEQ ID NO: 87860 - RNA, 19 nt, Artificial Sequence
  Description of Artificial Sequence: Synthetic oligonucleotide
  Sense strand starting at position 2486 of SEQ ID NO: 1103
uugugcaugauuugcgaau

SEQ ID NO: 87861 - RNA, 19 nt, Artificial Sequence
  Description of Artificial Sequence: Synthetic oligonucleotide
  Antisense strand to SEQ ID NO: 87780
auucgcaaaucaugcacaa

SEQ ID NO: 87862 - RNA, 19 nt, Artificial Sequence
  Description of Artificial Sequence: Synthetic oligonucleotide
  Sense strand starting at position 2410 of SEQ ID NO: 1103
ucuguaaacucauucccga

SEQ ID NO: 87863 - RNA, 19 nt, Artificial Sequence
  Description of Artificial Sequence: Synthetic oligonucleotide
  Antisense strand to SEQ ID NO: 87782
ucgggaaugaguuuacaga

SEQ ID NO: 87864 - RNA, 19 nt, Artificial Sequence
  Description of Artificial Sequence: Synthetic oligonucleotide
  Sense strand starting at position 2287 of SEQ ID NO: 1103
uguguaacugaccauacuu

SEQ ID NO: 87865 - RNA, 19 nt, Artificial Sequence
  Description of Artificial Sequence: Synthetic oligonucleotide
  Antisense strand to SEQ ID NO: 87784
aaguauggucaguuacaca

SEQ ID NO: 87866 - RNA, 19 nt, Artificial Sequence
  Description of Artificial Sequence: Synthetic oligonucleotide
  Sense strand starting at position 2286 of SEQ ID NO: 1103
uuguguaacugaccauacu

SEQ ID NO: 87867 - RNA, 19 nt, Artificial Sequence
  Description of Artificial Sequence: Synthetic oligonucleotide
  Antisense strand to SEQ ID NO: 87786
aguauggucaguuacacaa

SEQ ID NO: 87868 - RNA, 19 nt, Artificial Sequence
  Description of Artificial Sequence: Synthetic oligonucleotide
  Sense strand starting at position 2282 of SEQ ID NO: 1103
ugaauuguguaacugacca

SEQ ID NO: 87869 - RNA, 19 nt, Artificial Sequence
  Description of Artificial Sequence: Synthetic oligonucleotide
  Antisense strand to SEQ ID NO: 87788
uggucaguuacacaauuca

SEQ ID NO: 87870 - RNA, 19 nt, Artificial Sequence
  Description of Artificial Sequence: Synthetic oligonucleotide
  Sense strand starting at position 2255 of SEQ ID NO: 1103
gucuuaauauucucccgau

SEQ ID NO: 87871 - RNA, 19 nt, Artificial Sequence
  Description of Artificial Sequence: Synthetic oligonucleotide
  Antisense strand to SEQ ID NO: 87790
aucgggagaauauuaagac

SEQ ID NO: 87872 - RNA, 19 nt, Artificial Sequence
  Description of Artificial Sequence: Synthetic oligonucleotide
  Sense strand starting at position 1551 of SEQ ID NO: 1103
ugcagaagugacgaauaau

SEQ ID NO: 87873 - RNA, 19 nt, Artificial Sequence
  Description of Artificial Sequence: Synthetic oligonucleotide
  Antisense strand to SEQ ID NO: 87792
auuauucgucacuucugca

SEQ ID NO: 87874 - RNA, 19 nt, Artificial Sequence
  Description of Artificial Sequence: Synthetic oligonucleotide
  Sense strand starting at position 1229 of SEQ ID NO: 1103
agcauuaacugaguuauua

SEQ ID NO: 87875 - RNA, 19 nt, Artificial Sequence
  Description of Artificial Sequence: Synthetic oligonucleotide
  Antisense strand to SEQ ID NO: 87794
uaauaacucaguuaaugcu

SEQ ID NO: 87876 - RNA, 19 nt, Artificial Sequence
  Description of Artificial Sequence: Synthetic oligonucleotide
  Sense strand starting at position 1047 of SEQ ID NO: 1103
cgucacgugcucagugaga

SEQ ID NO: 87877 - RNA, 19 nt, Artificial Sequence
  Description of Artificial Sequence: Synthetic oligonucleotide
  Antisense strand to SEQ ID NO: 87796
ucucacugagcacgugacg

SEQ ID NO: 87878 - RNA, 19 nt, Artificial Sequence
  Description of Artificial Sequence: Synthetic oligonucleotide
  Sense strand starting at position 939 of SEQ ID NO: 1103
ggagcagacccauguuaaa

SEQ ID NO: 87879 - RNA, 19 nt, Artificial Sequence
  Description of Artificial Sequence: Synthetic oligonucleotide
  Antisense strand to SEQ ID NO: 87798
uuuaacaugggucugcucc

SEQ ID NO: 87880 - RNA, 19 nt, Artificial Sequence
  Description of Artificial Sequence: Synthetic oligonucleotide
  Sense strand starting at position 881 of SEQ ID NO: 1103
ggauguuuguauucugaaa

SEQ ID NO: 87881 - RNA, 19 nt, Artificial Sequence
  Description of Artificial Sequence: Synthetic oligonucleotide
  Antisense strand to SEQ ID NO: 87800
uuucagaauacaaacaucc

SEQ ID NO: 87882 - RNA, 19 nt, Artificial Sequence
  Description of Artificial Sequence: Synthetic oligonucleotide
  Sense strand starting at position 872 of SEQ ID NO: 1103
gacuaacugggauguuugu

SEQ ID NO: 87883 - RNA, 19 nt, Artificial Sequence
  Description of Artificial Sequence: Synthetic oligonucleotide
  Antisense strand to SEQ ID NO: 87802
acaaacaucccaguuaguc

SEQ ID NO: 87884 - RNA, 19 nt, Artificial Sequence
  Description of Artificial Sequence: Synthetic oligonucleotide
  Sense strand starting at position 840 of SEQ ID NO: 1103
gaccaaaggugauagggaa

SEQ ID NO: 87885 - RNA, 19 nt, Artificial Sequence
  Description of Artificial Sequence: Synthetic oligonucleotide
  Antisense strand to SEQ ID NO: 87804
uucccuaucaccuuugguc

SEQ ID NO: 87886 - RNA, 19 nt, Artificial Sequence
  Description of Artificial Sequence: Synthetic oligonucleotide
  Sense strand starting at position 769 of SEQ ID NO: 1103
guguuacgcccucaauaaa

SEQ ID NO: 87887 - RNA, 19 nt, Artificial Sequence
  Description of Artificial Sequence: Synthetic oligonucleotide
  Antisense strand to SEQ ID NO: 87806
uuuauugagggcguaacac

SEQ ID NO: 87888 - RNA, 19 nt, Artificial Sequence
  Description of Artificial Sequence: Synthetic oligonucleotide
  Sense strand starting at position 720 of SEQ ID NO: 1103
uaaauacauguguggcaua

SEQ ID NO: 87889 - RNA, 19 nt, Artificial Sequence
  Description of Artificial Sequence: Synthetic oligonucleotide
  Antisense strand to SEQ ID NO: 87808
uaugccacacauguauuua

SEQ ID NO: 87890 - RNA, 19 nt, Artificial Sequence
  Description of Artificial Sequence: Synthetic oligonucleotide
  Sense strand starting at position 478 of SEQ ID NO: 1103
gguacauaguaaucagauu

SEQ ID NO: 87891 - RNA, 19 nt, Artificial Sequence
  Description of Artificial Sequence: Synthetic oligonucleotide
  Antisense strand to SEQ ID NO: 87810
aaucugauuacuauguacc

SEQ ID NO: 87892 - RNA, 19 nt, Artificial Sequence
  Description of Artificial Sequence: Synthetic oligonucleotide
  Sense strand starting at position 375 of SEQ ID NO: 1103
agugcuucucuuuaacuga

SEQ ID NO: 87893 - RNA, 19 nt, Artificial Sequence
  Description of Artificial Sequence: Synthetic oligonucleotide
  Antisense strand to SEQ ID NO: 87812
ucaguuaaagagaagcacu

SEQ ID NO: 87894 - RNA, 19 nt, Artificial Sequence
  Description of Artificial Sequence: Synthetic oligonucleotide
  Sense strand starting at position 171 of SEQ ID NO: 1103
ucauuauugccugaggguu

SEQ ID NO: 87895 - RNA, 19 nt, Artificial Sequence
  Description of Artificial Sequence: Synthetic oligonucleotide
  Antisense strand to SEQ ID NO: 87814
aacccucaggcaauaauga

SEQ ID NO: 87896 - RNA, 19 nt, Artificial Sequence
  Description of Artificial Sequence: Synthetic oligonucleotide
  Sense strand starting at position 170 of SEQ ID NO: 1103
cucauuauugccugagggu

SEQ ID NO: 87897 - RNA, 19 nt, Artificial Sequence
  Description of Artificial Sequence: Synthetic oligonucleotide
  Antisense strand to SEQ ID NO: 87816
acccucaggcaauaaugag

SEQ ID NO: 87898 - RNA, 19 nt, Artificial Sequence
  Description of Artificial Sequence: Synthetic oligonucleotide
  Sense strand starting at position 13 of SEQ ID NO: 1103
auaguuucccauuguaauu

SEQ ID NO: 87899 - RNA, 19 nt, Artificial Sequence
  Description of Artificial Sequence: Synthetic oligonucleotide
  Antisense strand to SEQ ID NO: 87818
aauuacaaugggaaacuau

SEQ ID NO: 87900 - RNA, 19 nt, Artificial Sequence
  Description of Artificial Sequence: Synthetic oligonucleotide
  Sense strand starting at position 133 of SEQ ID NO: 1104
cuugcuaucuagucuccau

SEQ ID NO: 87901 - RNA, 19 nt, Artificial Sequence
  Description of Artificial Sequence: Synthetic oligonucleotide
  Antisense strand to SEQ ID NO: 87820
auggagacuagauagcaag

SEQ ID NO: 87902 - RNA, 19 nt, Artificial Sequence
  Description of Artificial Sequence: Synthetic oligonucleotide
  Sense strand starting at position 191 of SEQ ID NO: 1104
ucacaugaucugggcugau

SEQ ID NO: 87903 - RNA, 19 nt, Artificial Sequence
  Description of Artificial Sequence: Synthetic oligonucleotide
  Antisense strand to SEQ ID NO: 87822
aucagcccagaucauguga

SEQ ID NO: 87904 - RNA, 19 nt, Artificial Sequence
  Description of Artificial Sequence: Synthetic oligonucleotide
  Sense strand starting at position 426 of SEQ ID NO: 1104
gggaguuauuuagagaugu

SEQ ID NO: 87905 - RNA, 19 nt, Artificial Sequence
  Description of Artificial Sequence: Synthetic oligonucleotide
  Antisense strand to SEQ ID NO: 87824
acaucucuaaauaacuccc

SEQ ID NO: 87906 - RNA, 19 nt, Artificial Sequence
  Description of Artificial Sequence: Synthetic oligonucleotide
  Sense strand starting at position 669 of SEQ ID NO: 1104
uggaacaguccuuggcaga

SEQ ID NO: 87907 - RNA, 19 nt, Artificial Sequence
  Description of Artificial Sequence: Synthetic oligonucleotide
  Antisense strand to SEQ ID NO: 87826
ucugccaaggacuguucca

SEQ ID NO: 87908 - RNA, 19 nt, Artificial Sequence
  Description of Artificial Sequence: Synthetic oligonucleotide
  Sense strand starting at position 708 of SEQ ID NO: 1104
agaggccucaccuauggua

SEQ ID NO: 87909 - RNA, 19 nt, Artificial Sequence
  Description of Artificial Sequence: Synthetic oligonucleotide
  Antisense strand to SEQ ID NO: 87828
uaccauaggugaggccucu

SEQ ID NO: 87910 - RNA, 19 nt, Artificial Sequence
  Description of Artificial Sequence: Synthetic oligonucleotide
  Sense strand starting at position 731 of SEQ ID NO: 1104
ggaugugguccagguugaa

SEQ ID NO: 87911 - RNA, 19 nt, Artificial Sequence
  Description of Artificial Sequence: Synthetic oligonucleotide
  Antisense strand to SEQ ID NO: 87830
uucaaccuggaccacaucc

SEQ ID NO: 87912 - RNA, 19 nt, Artificial Sequence
  Description of Artificial Sequence: Synthetic oligonucleotide
  Sense strand starting at position 870 of SEQ ID NO: 1104
ugguuugugagauaugggu

SEQ ID NO: 87913 - RNA, 19 nt, Artificial Sequence
  Description of Artificial Sequence: Synthetic oligonucleotide
  Antisense strand to SEQ ID NO: 87832
acccauaucucacaaacca

SEQ ID NO: 87914 - RNA, 19 nt, Artificial Sequence
  Description of Artificial Sequence: Synthetic oligonucleotide
  Sense strand starting at position 872 of SEQ ID NO: 1104
guuugugagauaugggugu

SEQ ID NO: 87915 - RNA, 19 nt, Artificial Sequence
  Description of Artificial Sequence: Synthetic oligonucleotide
  Antisense strand to SEQ ID NO: 87834
acacccauaucucacaaac

SEQ ID NO: 87916 - RNA, 19 nt, Artificial Sequence
  Description of Artificial Sequence: Synthetic oligonucleotide
  Sense strand starting at position 876 of SEQ ID NO: 1104
gugagauaugggugugcau

SEQ ID NO: 87917 - RNA, 19 nt, Artificial Sequence
  Description of Artificial Sequence: Synthetic oligonucleotide
  Antisense strand to SEQ ID NO: 87836
augcacacccauaucucac

SEQ ID NO: 87918 - RNA, 19 nt, Artificial Sequence
  Description of Artificial Sequence: Synthetic oligonucleotide
  Sense strand starting at position 918 of SEQ ID NO: 1104
ugggacugugaguguguaa

SEQ ID NO: 87919 - RNA, 19 nt, Artificial Sequence
  Description of Artificial Sequence: Synthetic oligonucleotide
  Antisense strand to SEQ ID NO: 87838
uuacacacucacaguccca

SEQ ID NO: 87920 - RNA, 19 nt, Artificial Sequence
  Description of Artificial Sequence: Synthetic oligonucleotide
  Sense strand starting at position 921 of SEQ ID NO: 1104
gacugugaguguguaaaug

SEQ ID NO: 87921 - RNA, 19 nt, Artificial Sequence
  Description of Artificial Sequence: Synthetic oligonucleotide
  Antisense strand to SEQ ID NO: 87840
cauuuacacacucacaguc

SEQ ID NO: 87922 - RNA, 19 nt, Artificial Sequence
  Description of Artificial Sequence: Synthetic oligonucleotide
  Sense strand starting at position 1031 of SEQ ID NO: 1104
caccguuccuaagugaaga

SEQ ID NO: 87923 - RNA, 19 nt, Artificial Sequence
  Description of Artificial Sequence: Synthetic oligonucleotide
  Antisense strand to SEQ ID NO: 87842
ucuucacuuaggaacggug

SEQ ID NO: 87924 - RNA, 19 nt, Artificial Sequence
  Description of Artificial Sequence: Synthetic oligonucleotide
  Sense strand starting at position 1229 of SEQ ID NO: 1104
augagcaucugugccagaa

SEQ ID NO: 87925 - RNA, 19 nt, Artificial Sequence
  Description of Artificial Sequence: Synthetic oligonucleotide
  Antisense strand to SEQ ID NO: 87844
uucuggcacagaugcucau

SEQ ID NO: 87926 - RNA, 19 nt, Artificial Sequence
  Description of Artificial Sequence: Synthetic oligonucleotide
  Sense strand starting at position 1464 of SEQ ID NO: 1104
gagccugucuuggcucaga

SEQ ID NO: 87927 - RNA, 19 nt, Artificial Sequence
  Description of Artificial Sequence: Synthetic oligonucleotide
  Antisense strand to SEQ ID NO: 87846
ucugagccaagacaggcuc

SEQ ID NO: 87928 - RNA, 19 nt, Artificial Sequence
  Description of Artificial Sequence: Synthetic oligonucleotide
  Sense strand starting at position 1904 of SEQ ID NO: 1104
cggagaugccgauaaugau

SEQ ID NO: 87929 - RNA, 19 nt, Artificial Sequence
  Description of Artificial Sequence: Synthetic oligonucleotide
  Antisense strand to SEQ ID NO: 87848
aucauuaucggcaucuccg

SEQ ID NO: 87930 - RNA, 19 nt, Artificial Sequence
  Description of Artificial Sequence: Synthetic oligonucleotide
  Sense strand starting at position 2111 of SEQ ID NO: 1104
ggaguuucugggcaguaag

SEQ ID NO: 87931 - RNA, 19 nt, Artificial Sequence
  Description of Artificial Sequence: Synthetic oligonucleotide
  Antisense strand to SEQ ID NO: 87850
cuuacugcccagaaacucc

SEQ ID NO: 87932 - RNA, 19 nt, Artificial Sequence
  Description of Artificial Sequence: Synthetic oligonucleotide
  Sense strand starting at position 2114 of SEQ ID NO: 1104
guuucugggcaguaagaug

SEQ ID NO: 87933 - RNA, 19 nt, Artificial Sequence
  Description of Artificial Sequence: Synthetic oligonucleotide
  Antisense strand to SEQ ID NO: 87852
caucuuacugcccagaaac

SEQ ID NO: 87934 - RNA, 19 nt, Artificial Sequence
  Description of Artificial Sequence: Synthetic oligonucleotide
  Sense strand starting at position 2283 of SEQ ID NO: 1104
acuccugucuggcuacauu

SEQ ID NO: 87935 - RNA, 19 nt, Artificial Sequence
  Description of Artificial Sequence: Synthetic oligonucleotide
  Antisense strand to SEQ ID NO: 87854
aauguagccagacaggagu

SEQ ID NO: 87936 - RNA, 19 nt, Artificial Sequence
  Description of Artificial Sequence: Synthetic oligonucleotide
  Sense strand starting at position 2303 of SEQ ID NO: 1104
cugcuuuggcugccagagu

SEQ ID NO: 87937 - RNA, 19 nt, Artificial Sequence
  Description of Artificial Sequence: Synthetic oligonucleotide
  Antisense strand to SEQ ID NO: 87856
acucuggcagccaaagcag

SEQ ID NO: 87938 - RNA, 19 nt, Artificial Sequence
  Description of Artificial Sequence: Synthetic oligonucleotide
  Sense strand starting at position 2314 of SEQ ID NO: 1104
gccagaguucuagggagcu

SEQ ID NO: 87939 - RNA, 19 nt, Artificial Sequence
  Description of Artificial Sequence: Synthetic oligonucleotide
  Antisense strand to SEQ ID NO: 87858
agcucccuagaacucuggc

SEQ ID NO: 87940 - RNA, 19 nt, Artificial Sequence
  Description of Artificial Sequence: Synthetic oligonucleotide
  Sense strand starting at position 2333 of SEQ ID NO: 1104
gggccuguuccauaggauc

SEQ ID NO: 87941 - RNA, 19 nt, Artificial Sequence
  Description of Artificial Sequence: Synthetic oligonucleotide
  Antisense strand to SEQ ID NO: 87860
gauccuauggaacaggccc

SEQ ID NO: 87942 - RNA, 19 nt, Artificial Sequence
  Description of Artificial Sequence: Synthetic oligonucleotide
  Sense strand starting at position 2531 of SEQ ID NO: 1104
cagggaggugcugaguuau

SEQ ID NO: 87943 - RNA, 19 nt, Artificial Sequence
  Description of Artificial Sequence: Synthetic oligonucleotide
  Antisense strand to SEQ ID NO: 87862
auaacucagcaccucccug

SEQ ID NO: 87944 - RNA, 19 nt, Artificial Sequence
  Description of Artificial Sequence: Synthetic oligonucleotide
  Sense strand starting at position 2542 of SEQ ID NO: 1104
ugaguuauucaugagguug

SEQ ID NO: 87945 - RNA, 19 nt, Artificial Sequence
  Description of Artificial Sequence: Synthetic oligonucleotide
  Antisense strand to SEQ ID NO: 87864
caaccucaugaauaacuca

SEQ ID NO: 87946 - RNA, 19 nt, Artificial Sequence
  Description of Artificial Sequence: Synthetic oligonucleotide
  Sense strand starting at position 2759 of SEQ ID NO: 1104
cugcuuggagucugagaua

SEQ ID NO: 87947 - RNA, 19 nt, Artificial Sequence
  Description of Artificial Sequence: Synthetic oligonucleotide
  Antisense strand to SEQ ID NO: 87866
uaucucagacuccaagcag

SEQ ID NO: 87948 - RNA, 19 nt, Artificial Sequence
  Description of Artificial Sequence: Synthetic oligonucleotide
  Sense strand starting at position 2838 of SEQ ID NO: 1104
gaggcaucccuccaagucu

SEQ ID NO: 87949 - RNA, 19 nt, Artificial Sequence
  Description of Artificial Sequence: Synthetic oligonucleotide
  Antisense strand to SEQ ID NO: 87868
agacuuggagggaugccuc

SEQ ID NO: 87950 - RNA, 19 nt, Artificial Sequence
  Description of Artificial Sequence: Synthetic oligonucleotide
  Sense strand starting at position 3207 of SEQ ID NO: 1104
cagccugucugaguuacuu

SEQ ID NO: 87951 - RNA, 19 nt, Artificial Sequence
  Description of Artificial Sequence: Synthetic oligonucleotide
  Antisense strand to SEQ ID NO: 87870
aaguaacucagacaggcug

SEQ ID NO: 87952 - RNA, 19 nt, Artificial Sequence
  Description of Artificial Sequence: Synthetic oligonucleotide
  Sense strand starting at position 3213 of SEQ ID NO: 1104
gucugaguuacuugcagga

SEQ ID NO: 87953 - RNA, 19 nt, Artificial Sequence
  Description of Artificial Sequence: Synthetic oligonucleotide
  Antisense strand to SEQ ID NO: 87872
uccugcaaguaacucagac

SEQ ID NO: 87954 - RNA, 19 nt, Artificial Sequence
  Description of Artificial Sequence: Synthetic oligonucleotide
  Sense strand starting at position 3250 of SEQ ID NO: 1104
ggcaguggucaccaaugca

SEQ ID NO: 87955 - RNA, 19 nt, Artificial Sequence
  Description of Artificial Sequence: Synthetic oligonucleotide
  Antisense strand to SEQ ID NO: 87874
ugcauuggugaccacugcc

SEQ ID NO: 87956 - RNA, 19 nt, Artificial Sequence
  Description of Artificial Sequence: Synthetic oligonucleotide
  Sense strand starting at position 3298 of SEQ ID NO: 1104
aguuccagccuuuaucauu

SEQ ID NO: 87957 - RNA, 19 nt, Artificial Sequence
  Description of Artificial Sequence: Synthetic oligonucleotide
  Antisense strand to SEQ ID NO: 87876
aaugauaaaggcuggaacu

SEQ ID NO: 87958 - RNA, 19 nt, Artificial Sequence
  Description of Artificial Sequence: Synthetic oligonucleotide
  Sense strand starting at position 3320 of SEQ ID NO: 1104
ugcguuauuuggcccuuua

SEQ ID NO: 87959 - RNA, 19 nt, Artificial Sequence
  Description of Artificial Sequence: Synthetic oligonucleotide
  Antisense strand to SEQ ID NO: 87878
uaaagggccaaauaacgca

SEQ ID NO: 87960 - RNA, 19 nt, Artificial Sequence
  Description of Artificial Sequence: Synthetic oligonucleotide
  Sense strand starting at position 3411 of SEQ ID NO: 1104
ccauaauccugcucggagu

SEQ ID NO: 87961 - RNA, 19 nt, Artificial Sequence
  Description of Artificial Sequence: Synthetic oligonucleotide
  Antisense strand to SEQ ID NO: 87880
acuccgagcaggauuaugg

SEQ ID NO: 87962 - RNA, 19 nt, Artificial Sequence
  Description of Artificial Sequence: Synthetic oligonucleotide
  Sense strand starting at position 3490 of SEQ ID NO: 1104
cucauauugccaggcucaa

SEQ ID NO: 87963 - RNA, 19 nt, Artificial Sequence
  Description of Artificial Sequence: Synthetic oligonucleotide
  Antisense strand to SEQ ID NO: 87882
uugagccuggcaauaugag

SEQ ID NO: 87964 - RNA, 19 nt, Artificial Sequence
  Description of Artificial Sequence: Synthetic oligonucleotide
  Sense strand starting at position 3727 of SEQ ID NO: 1104
aagggaaccucugucucua

SEQ ID NO: 87965 - RNA, 19 nt, Artificial Sequence
  Description of Artificial Sequence: Synthetic oligonucleotide
  Antisense strand to SEQ ID NO: 87884
uagagacagagguucccuu

SEQ ID NO: 87966 - RNA, 19 nt, Artificial Sequence
  Description of Artificial Sequence: Synthetic oligonucleotide
  Sense strand starting at position 3749 of SEQ ID NO: 1104
agaggcauuccuuguaugu

SEQ ID NO: 87967 - RNA, 19 nt, Artificial Sequence
  Description of Artificial Sequence: Synthetic oligonucleotide
  Antisense strand to SEQ ID NO: 87886
acauacaaggaaugccucu

SEQ ID NO: 87968 - RNA, 19 nt, Artificial Sequence
  Description of Artificial Sequence: Synthetic oligonucleotide
  Sense strand starting at position 3755 of SEQ ID NO: 1104
auuccuuguauguggagaa

SEQ ID NO: 87969 - RNA, 19 nt, Artificial Sequence
  Description of Artificial Sequence: Synthetic oligonucleotide
  Antisense strand to SEQ ID NO: 87888
uucuccacauacaaggaau

SEQ ID NO: 87970 - RNA, 19 nt, Artificial Sequence
  Description of Artificial Sequence: Synthetic oligonucleotide
  Sense strand starting at position 3815 of SEQ ID NO: 1104
ggcucaugaugagucugua

SEQ ID NO: 87971 - RNA, 19 nt, Artificial Sequence
  Description of Artificial Sequence: Synthetic oligonucleotide
  Antisense strand to SEQ ID NO: 87890
uacagacucaucaugagcc

SEQ ID NO: 87972 - RNA, 19 nt, Artificial Sequence
  Description of Artificial Sequence: Synthetic oligonucleotide
  Sense strand starting at position 3818 of SEQ ID NO: 1104
ucaugaugagucuguagag

SEQ ID NO: 87973 - RNA, 19 nt, Artificial Sequence
  Description of Artificial Sequence: Synthetic oligonucleotide
  Antisense strand to SEQ ID NO: 87892
cucuacagacucaucauga

SEQ ID NO: 87974 - RNA, 19 nt, Artificial Sequence
  Description of Artificial Sequence: Synthetic oligonucleotide
  Sense strand starting at position 3819 of SEQ ID NO: 1104
caugaugagucuguagaga

SEQ ID NO: 87975 - RNA, 19 nt, Artificial Sequence
  Description of Artificial Sequence: Synthetic oligonucleotide
  Antisense strand to SEQ ID NO: 87894
ucucuacagacucaucaug

SEQ ID NO: 87976 - RNA, 19 nt, Artificial Sequence
  Description of Artificial Sequence: Synthetic oligonucleotide
  Sense strand starting at position 3821 of SEQ ID NO: 1104
ugaugagucuguagagagg

SEQ ID NO: 87977 - RNA, 19 nt, Artificial Sequence
  Description of Artificial Sequence: Synthetic oligonucleotide
  Antisense strand to SEQ ID NO: 87896
ccucucuacagacucauca

SEQ ID NO: 87978 - RNA, 19 nt, Artificial Sequence
  Description of Artificial Sequence: Synthetic oligonucleotide
  Sense strand starting at position 3951 of SEQ ID NO: 1104
gccuccugccuggaugaga

SEQ ID NO: 87979 - RNA, 19 nt, Artificial Sequence
  Description of Artificial Sequence: Synthetic oligonucleotide
  Antisense strand to SEQ ID NO: 87898
ucucauccaggcaggaggc

SEQ ID NO: 87980 - RNA, 19 nt, Artificial Sequence
  Description of Artificial Sequence: Synthetic oligonucleotide
  Sense strand starting at position 3825 of SEQ ID NO: 1105
uuucaaucacgggacguau

SEQ ID NO: 87981 - RNA, 19 nt, Artificial Sequence
  Description of Artificial Sequence: Synthetic oligonucleotide
  Antisense strand to SEQ ID NO: 87900
auacgucccgugauugaaa

SEQ ID NO: 87982 - RNA, 19 nt, Artificial Sequence
  Description of Artificial Sequence: Synthetic oligonucleotide
  Sense strand starting at position 3694 of SEQ ID NO: 1105
gugugugcuccauaaauaa

SEQ ID NO: 87983 - RNA, 19 nt, Artificial Sequence
  Description of Artificial Sequence: Synthetic oligonucleotide
  Antisense strand to SEQ ID NO: 87902
uuauuuauggagcacacac

SEQ ID NO: 87984 - RNA, 19 nt, Artificial Sequence
  Description of Artificial Sequence: Synthetic oligonucleotide
  Sense strand starting at position 3639 of SEQ ID NO: 1105
guucuauauuguuuaccac

SEQ ID NO: 87985 - RNA, 19 nt, Artificial Sequence
  Description of Artificial Sequence: Synthetic oligonucleotide
  Antisense strand to SEQ ID NO: 87904
gugguaaacaauauagaac

SEQ ID NO: 87986 - RNA, 19 nt, Artificial Sequence
  Description of Artificial Sequence: Synthetic oligonucleotide
  Sense strand starting at position 3638 of SEQ ID NO: 1105
gguucuauauuguuuacca

SEQ ID NO: 87987 - RNA, 19 nt, Artificial Sequence
  Description of Artificial Sequence: Synthetic oligonucleotide
  Antisense strand to SEQ ID NO: 87906
ugguaaacaauauagaacc

SEQ ID NO: 87988 - RNA, 19 nt, Artificial Sequence
  Description of Artificial Sequence: Synthetic oligonucleotide
  Sense strand starting at position 3552 of SEQ ID NO: 1105
caaugagacccaugcagua

SEQ ID NO: 87989 - RNA, 19 nt, Artificial Sequence
  Description of Artificial Sequence: Synthetic oligonucleotide
  Antisense strand to SEQ ID NO: 87908
uacugcaugggucucauug

SEQ ID NO: 87990 - RNA, 19 nt, Artificial Sequence
  Description of Artificial Sequence: Synthetic oligonucleotide
  Sense strand starting at position 3324 of SEQ ID NO: 1105
augacugugucacuauacu

SEQ ID NO: 87991 - RNA, 19 nt, Artificial Sequence
  Description of Artificial Sequence: Synthetic oligonucleotide
  Antisense strand to SEQ ID NO: 87910
aguauagugacacagucau

SEQ ID NO: 87992 - RNA, 19 nt, Artificial Sequence
  Description of Artificial Sequence: Synthetic oligonucleotide
  Sense strand starting at position 3320 of SEQ ID NO: 1105
ugccaugacugugucacua

SEQ ID NO: 87993 - RNA, 19 nt, Artificial Sequence
  Description of Artificial Sequence: Synthetic oligonucleotide
  Antisense strand to SEQ ID NO: 87912
uagugacacagucauggca

SEQ ID NO: 87994 - RNA, 19 nt, Artificial Sequence
  Description of Artificial Sequence: Synthetic oligonucleotide
  Sense strand starting at position 3101 of SEQ ID NO: 1105
ggugguucacgcuugucua

SEQ ID NO: 87995 - RNA, 19 nt, Artificial Sequence
  Description of Artificial Sequence: Synthetic oligonucleotide
  Antisense strand to SEQ ID NO: 87914
uagacaagcgugaaccacc

SEQ ID NO: 87996 - RNA, 19 nt, Artificial Sequence
  Description of Artificial Sequence: Synthetic oligonucleotide
  Sense strand starting at position 3057 of SEQ ID NO: 1105
caaucuuauugggagauga

SEQ ID NO: 87997 - RNA, 19 nt, Artificial Sequence
  Description of Artificial Sequence: Synthetic oligonucleotide
  Antisense strand to SEQ ID NO: 87916
ucaucucccaauaagauug

SEQ ID NO: 87998 - RNA, 19 nt, Artificial Sequence
  Description of Artificial Sequence: Synthetic oligonucleotide
  Sense strand starting at position 3056 of SEQ ID NO: 1105
gcaaucuuauugggagaug

SEQ ID NO: 87999 - RNA, 19 nt, Artificial Sequence
  Description of Artificial Sequence: Synthetic oligonucleotide
  Antisense strand to SEQ ID NO: 87918
caucucccaauaagauugc

SEQ ID NO: 88000 - RNA, 19 nt, Artificial Sequence
  Description of Artificial Sequence: Synthetic oligonucleotide
  Sense strand starting at position 3055 of SEQ ID NO: 1105
ugcaaucuuauugggagau

SEQ ID NO: 88001 - RNA, 19 nt, Artificial Sequence
  Description of Artificial Sequence: Synthetic oligonucleotide
  Antisense strand to SEQ ID NO: 87920
aucucccaauaagauugca

SEQ ID NO: 88002 - RNA, 19 nt, Artificial Sequence
  Description of Artificial Sequence: Synthetic oligonucleotide
  Sense strand starting at position 3053 of SEQ ID NO: 1105
guugcaaucuuauugggag

SEQ ID NO: 88003 - RNA, 19 nt, Artificial Sequence
  Description of Artificial Sequence: Synthetic oligonucleotide
  Antisense strand to SEQ ID NO: 87922
cucccaauaagauugcaac

SEQ ID NO: 88004 - RNA, 19 nt, Artificial Sequence
  Description of Artificial Sequence: Synthetic oligonucleotide
  Sense strand starting at position 2953 of SEQ ID NO: 1105
ggaagugccuugcucaaug

SEQ ID NO: 88005 - RNA, 19 nt, Artificial Sequence
  Description of Artificial Sequence: Synthetic oligonucleotide
  Antisense strand to SEQ ID NO: 87924
cauugagcaaggcacuucc

SEQ ID NO: 88006 - RNA, 19 nt, Artificial Sequence
  Description of Artificial Sequence: Synthetic oligonucleotide
  Sense strand starting at position 2911 of SEQ ID NO: 1105
uagaccuugggcugaauau

SEQ ID NO: 88007 - RNA, 19 nt, Artificial Sequence
  Description of Artificial Sequence: Synthetic oligonucleotide
  Antisense strand to SEQ ID NO: 87926
auauucagcccaaggucua

SEQ ID NO: 88008 - RNA, 19 nt, Artificial Sequence
  Description of Artificial Sequence: Synthetic oligonucleotide
  Sense strand starting at position 2909 of SEQ ID NO: 1105
cauagaccuugggcugaau

SEQ ID NO: 88009 - RNA, 19 nt, Artificial Sequence
  Description of Artificial Sequence: Synthetic oligonucleotide
  Antisense strand to SEQ ID NO: 87928
auucagcccaaggucuaug

SEQ ID NO: 88010 - RNA, 19 nt, Artificial Sequence
  Description of Artificial Sequence: Synthetic oligonucleotide
  Sense strand starting at position 2716 of SEQ ID NO: 1105
gcccauggucucuacuaaa

SEQ ID NO: 88011 - RNA, 19 nt, Artificial Sequence
  Description of Artificial Sequence: Synthetic oligonucleotide
  Antisense strand to SEQ ID NO: 87930
uuuaguagagaccaugggc

SEQ ID NO: 88012 - RNA, 19 nt, Artificial Sequence
  Description of Artificial Sequence: Synthetic oligonucleotide
  Sense strand starting at position 2715 of SEQ ID NO: 1105
ugcccauggucucuacuaa

SEQ ID NO: 88013 - RNA, 19 nt, Artificial Sequence
  Description of Artificial Sequence: Synthetic oligonucleotide
  Antisense strand to SEQ ID NO: 87932
uuaguagagaccaugggca

SEQ ID NO: 88014 - RNA, 19 nt, Artificial Sequence
  Description of Artificial Sequence: Synthetic oligonucleotide
  Sense strand starting at position 2239 of SEQ ID NO: 1105
uuucuuuacccggaacuuu

SEQ ID NO: 88015 - RNA, 19 nt, Artificial Sequence
  Description of Artificial Sequence: Synthetic oligonucleotide
  Antisense strand to SEQ ID NO: 87934
aaaguuccggguaaagaaa

SEQ ID NO: 88016 - RNA, 19 nt, Artificial Sequence
  Description of Artificial Sequence: Synthetic oligonucleotide
  Sense strand starting at position 2201 of SEQ ID NO: 1105
ccagcuguuucugcuacua

SEQ ID NO: 88017 - RNA, 19 nt, Artificial Sequence
  Description of Artificial Sequence: Synthetic oligonucleotide
  Antisense strand to SEQ ID NO: 87936
uaguagcagaaacagcugg

SEQ ID NO: 88018 - RNA, 19 nt, Artificial Sequence
  Description of Artificial Sequence: Synthetic oligonucleotide
  Sense strand starting at position 2176 of SEQ ID NO: 1105
gaaaguuaagugugucuag

SEQ ID NO: 88019 - RNA, 19 nt, Artificial Sequence
  Description of Artificial Sequence: Synthetic oligonucleotide
  Antisense strand to SEQ ID NO: 87938
cuagacacacuuaacuuuc

SEQ ID NO: 88020 - RNA, 19 nt, Artificial Sequence
  Description of Artificial Sequence: Synthetic oligonucleotide
  Sense strand starting at position 2164 of SEQ ID NO: 1105
agggauaccuaagaaaguu

SEQ ID NO: 88021 - RNA, 19 nt, Artificial Sequence
  Description of Artificial Sequence: Synthetic oligonucleotide
  Antisense strand to SEQ ID NO: 87940
aacuuucuuagguaucccu

SEQ ID NO: 88022 - RNA, 19 nt, Artificial Sequence
  Description of Artificial Sequence: Synthetic oligonucleotide
  Sense strand starting at position 2076 of SEQ ID NO: 1105
accgaaagugcgcacuuaa

SEQ ID NO: 88023 - RNA, 19 nt, Artificial Sequence
  Description of Artificial Sequence: Synthetic oligonucleotide
  Antisense strand to SEQ ID NO: 87942
uuaagugcgcacuuucggu

SEQ ID NO: 88024 - RNA, 19 nt, Artificial Sequence
  Description of Artificial Sequence: Synthetic oligonucleotide
  Sense strand starting at position 2066 of SEQ ID NO: 1105
cuaucauuacaccgaaagu

SEQ ID NO: 88025 - RNA, 19 nt, Artificial Sequence
  Description of Artificial Sequence: Synthetic oligonucleotide
  Antisense strand to SEQ ID NO: 87944
acuuucgguguaaugauag

SEQ ID NO: 88026 - RNA, 19 nt, Artificial Sequence
  Description of Artificial Sequence: Synthetic oligonucleotide
  Sense strand starting at position 2055 of SEQ ID NO: 1105
ggcccaaucgccuaucauu

SEQ ID NO: 88027 - RNA, 19 nt, Artificial Sequence
  Description of Artificial Sequence: Synthetic oligonucleotide
  Antisense strand to SEQ ID NO: 87946
aaugauaggcgauugggcc

SEQ ID NO: 88028 - RNA, 19 nt, Artificial Sequence
  Description of Artificial Sequence: Synthetic oligonucleotide
  Sense strand starting at position 2026 of SEQ ID NO: 1105
caguuaacuccaggacgaa

SEQ ID NO: 88029 - RNA, 19 nt, Artificial Sequence
  Description of Artificial Sequence: Synthetic oligonucleotide
  Antisense strand to SEQ ID NO: 87948
uucguccuggaguuaacug

SEQ ID NO: 88030 - RNA, 19 nt, Artificial Sequence
  Description of Artificial Sequence: Synthetic oligonucleotide
  Sense strand starting at position 1469 of SEQ ID NO: 1105
guaggacuucccugaguuc

SEQ ID NO: 88031 - RNA, 19 nt, Artificial Sequence
  Description of Artificial Sequence: Synthetic oligonucleotide
  Antisense strand to SEQ ID NO: 87950
gaacucagggaaguccuac

SEQ ID NO: 88032 - RNA, 19 nt, Artificial Sequence
  Description of Artificial Sequence: Synthetic oligonucleotide
  Sense strand starting at position 1280 of SEQ ID NO: 1105
ggccuuugguguucuacca

SEQ ID NO: 88033 - RNA, 19 nt, Artificial Sequence
  Description of Artificial Sequence: Synthetic oligonucleotide
  Antisense strand to SEQ ID NO: 87952
ugguagaacaccaaaggcc

SEQ ID NO: 88034 - RNA, 19 nt, Artificial Sequence
  Description of Artificial Sequence: Synthetic oligonucleotide
  Sense strand starting at position 1149 of SEQ ID NO: 1105
gguauucucucugaacaga

SEQ ID NO: 88035 - RNA, 19 nt, Artificial Sequence
  Description of Artificial Sequence: Synthetic oligonucleotide
  Antisense strand to SEQ ID NO: 87954
ucuguucagagagaauacc

SEQ ID NO: 88036 - RNA, 19 nt, Artificial Sequence
  Description of Artificial Sequence: Synthetic oligonucleotide
  Sense strand starting at position 1148 of SEQ ID NO: 1105
ugguauucucucugaacag

SEQ ID NO: 88037 - RNA, 19 nt, Artificial Sequence
  Description of Artificial Sequence: Synthetic oligonucleotide
  Antisense strand to SEQ ID NO: 87956
cuguucagagagaauacca

SEQ ID NO: 88038 - RNA, 19 nt, Artificial Sequence
  Description of Artificial Sequence: Synthetic oligonucleotide
  Sense strand starting at position 1136 of SEQ ID NO: 1105
aagacuucgccaugguauu

SEQ ID NO: 88039 - RNA, 19 nt, Artificial Sequence
  Description of Artificial Sequence: Synthetic oligonucleotide
  Antisense strand to SEQ ID NO: 87958
aauaccauggcgaagucuu

SEQ ID NO: 88040 - RNA, 19 nt, Artificial Sequence
  Description of Artificial Sequence: Synthetic oligonucleotide
  Sense strand starting at position 1134 of SEQ ID NO: 1105
caaagacuucgccauggua

SEQ ID NO: 88041 - RNA, 19 nt, Artificial Sequence
  Description of Artificial Sequence: Synthetic oligonucleotide
  Antisense strand to SEQ ID NO: 87960
uaccauggcgaagucuuug

SEQ ID NO: 88042 - RNA, 19 nt, Artificial Sequence
  Description of Artificial Sequence: Synthetic oligonucleotide
  Sense strand starting at position 1115 of SEQ ID NO: 1105
uugguucugucucuaaauc

SEQ ID NO: 88043 - RNA, 19 nt, Artificial Sequence
  Description of Artificial Sequence: Synthetic oligonucleotide
  Antisense strand to SEQ ID NO: 87962
gauuuagagacagaaccaa

SEQ ID NO: 88044 - RNA, 19 nt, Artificial Sequence
  Description of Artificial Sequence: Synthetic oligonucleotide
  Sense strand starting at position 1101 of SEQ ID NO: 1105
aggaauuaccacuguuggu

SEQ ID NO: 88045 - RNA, 19 nt, Artificial Sequence
  Description of Artificial Sequence: Synthetic oligonucleotide
  Antisense strand to SEQ ID NO: 87964
accaacagugguaauuccu

SEQ ID NO: 88046 - RNA, 19 nt, Artificial Sequence
  Description of Artificial Sequence: Synthetic oligonucleotide
  Sense strand starting at position 1088 of SEQ ID NO: 1105
uuuacugcuuuagaggaau

SEQ ID NO: 88047 - RNA, 19 nt, Artificial Sequence
  Description of Artificial Sequence: Synthetic oligonucleotide
  Antisense strand to SEQ ID NO: 87966
auuccucuaaagcaguaaa

SEQ ID NO: 88048 - RNA, 19 nt, Artificial Sequence
  Description of Artificial Sequence: Synthetic oligonucleotide
  Sense strand starting at position 1059 of SEQ ID NO: 1105
guagaaagagcuuagcaaa

SEQ ID NO: 88049 - RNA, 19 nt, Artificial Sequence
  Description of Artificial Sequence: Synthetic oligonucleotide
  Antisense strand to SEQ ID NO: 87968
uuugcuaagcucuuucuac

SEQ ID NO: 88050 - RNA, 19 nt, Artificial Sequence
  Description of Artificial Sequence: Synthetic oligonucleotide
  Sense strand starting at position 991 of SEQ ID NO: 1105
ucuauuuccuuagguugua

SEQ ID NO: 88051 - RNA, 19 nt, Artificial Sequence
  Description of Artificial Sequence: Synthetic oligonucleotide
  Antisense strand to SEQ ID NO: 87970
uacaaccuaaggaaauaga

SEQ ID NO: 88052 - RNA, 19 nt, Artificial Sequence
  Description of Artificial Sequence: Synthetic oligonucleotide
  Sense strand starting at position 988 of SEQ ID NO: 1105
gcaucuauuuccuuagguu

SEQ ID NO: 88053 - RNA, 19 nt, Artificial Sequence
  Description of Artificial Sequence: Synthetic oligonucleotide
  Antisense strand to SEQ ID NO: 87972
aaccuaaggaaauagaugc

SEQ ID NO: 88054 - RNA, 19 nt, Artificial Sequence
  Description of Artificial Sequence: Synthetic oligonucleotide
  Sense strand starting at position 984 of SEQ ID NO: 1105
gguagcaucuauuuccuua

SEQ ID NO: 88055 - RNA, 19 nt, Artificial Sequence
  Description of Artificial Sequence: Synthetic oligonucleotide
  Antisense strand to SEQ ID NO: 87974
uaaggaaauagaugcuacc

SEQ ID NO: 88056 - RNA, 19 nt, Artificial Sequence
  Description of Artificial Sequence: Synthetic oligonucleotide
  Sense strand starting at position 916 of SEQ ID NO: 1105
acugcaugaccuuggguaa

SEQ ID NO: 88057 - RNA, 19 nt, Artificial Sequence
  Description of Artificial Sequence: Synthetic oligonucleotide
  Antisense strand to SEQ ID NO: 87976
uuacccaaggucaugcagu

SEQ ID NO: 88058 - RNA, 19 nt, Artificial Sequence
  Description of Artificial Sequence: Synthetic oligonucleotide
  Sense strand starting at position 476 of SEQ ID NO: 1105
caacuuugccuaggguuaa

SEQ ID NO: 88059 - RNA, 19 nt, Artificial Sequence
  Description of Artificial Sequence: Synthetic oligonucleotide
  Antisense strand to SEQ ID NO: 87978
uuaacccuaggcaaaguug

SEQ ID NO: 88060 - RNA, 19 nt, Artificial Sequence
  Description of Artificial Sequence: Synthetic oligonucleotide
  Sense strand starting at position 3980 of SEQ ID NO: 1106
gguugaaucugagcucuag

SEQ ID NO: 88061 - RNA, 19 nt, Artificial Sequence
  Description of Artificial Sequence: Synthetic oligonucleotide
  Antisense strand to SEQ ID NO: 87980
cuagagcucagauucaacc

SEQ ID NO: 88062 - RNA, 19 nt, Artificial Sequence
  Description of Artificial Sequence: Synthetic oligonucleotide
  Sense strand starting at position 3938 of SEQ ID NO: 1106
agcuuaugagcggagacuu

SEQ ID NO: 88063 - RNA, 19 nt, Artificial Sequence
  Description of Artificial Sequence: Synthetic oligonucleotide
  Antisense strand to SEQ ID NO: 87982
aagucuccgcucauaagcu

SEQ ID NO: 88064 - RNA, 19 nt, Artificial Sequence
  Description of Artificial Sequence: Synthetic oligonucleotide
  Sense strand starting at position 3791 of SEQ ID NO: 1106
caguguaaguuuccuuaug

SEQ ID NO: 88065 - RNA, 19 nt, Artificial Sequence
  Description of Artificial Sequence: Synthetic oligonucleotide
  Antisense strand to SEQ ID NO: 87984
cauaaggaaacuuacacug

SEQ ID NO: 88066 - RNA, 19 nt, Artificial Sequence
  Description of Artificial Sequence: Synthetic oligonucleotide
  Sense strand starting at position 3719 of SEQ ID NO: 1106
uggacuacgacagguaaau

SEQ ID NO: 88067 - RNA, 19 nt, Artificial Sequence
  Description of Artificial Sequence: Synthetic oligonucleotide
  Antisense strand to SEQ ID NO: 87986
auuuaccugucguagucca

SEQ ID NO: 88068 - RNA, 19 nt, Artificial Sequence
  Description of Artificial Sequence: Synthetic oligonucleotide
  Sense strand starting at position 3636 of SEQ ID NO: 1106
acagaaaugugagcccaau

SEQ ID NO: 88069 - RNA, 19 nt, Artificial Sequence
  Description of Artificial Sequence: Synthetic oligonucleotide
  Antisense strand to SEQ ID NO: 87988
auugggcucacauuucugu

SEQ ID NO: 88070 - RNA, 19 nt, Artificial Sequence
  Description of Artificial Sequence: Synthetic oligonucleotide
  Sense strand starting at position 3583 of SEQ ID NO: 1106
gccugagucccucacuaga

SEQ ID NO: 88071 - RNA, 19 nt, Artificial Sequence
  Description of Artificial Sequence: Synthetic oligonucleotide
  Antisense strand to SEQ ID NO: 87990
ucuagugagggacucaggc

SEQ ID NO: 88072 - RNA, 19 nt, Artificial Sequence
  Description of Artificial Sequence: Synthetic oligonucleotide
  Sense strand starting at position 3368 of SEQ ID NO: 1106
auagcagaaguuuggguua

SEQ ID NO: 88073 - RNA, 19 nt, Artificial Sequence
  Description of Artificial Sequence: Synthetic oligonucleotide
  Antisense strand to SEQ ID NO: 87992
uaacccaaacuucugcuau

SEQ ID NO: 88074 - RNA, 19 nt, Artificial Sequence
  Description of Artificial Sequence: Synthetic oligonucleotide
  Sense strand starting at position 3362 of SEQ ID NO: 1106
agccuaauagcagaaguuu

SEQ ID NO: 88075 - RNA, 19 nt, Artificial Sequence
  Description of Artificial Sequence: Synthetic oligonucleotide
  Antisense strand to SEQ ID NO: 87994
aaacuucugcuauuaggcu

SEQ ID NO: 88076 - RNA, 19 nt, Artificial Sequence
  Description of Artificial Sequence: Synthetic oligonucleotide
  Sense strand starting at position 3297 of SEQ ID NO: 1106
uauaguuugcguguuuauc

SEQ ID NO: 88077 - RNA, 19 nt, Artificial Sequence
  Description of Artificial Sequence: Synthetic oligonucleotide
  Antisense strand to SEQ ID NO: 87996
gauaaacacgcaaacuaua

SEQ ID NO: 88078 - RNA, 19 nt, Artificial Sequence
  Description of Artificial Sequence: Synthetic oligonucleotide
  Sense strand starting at position 3282 of SEQ ID NO: 1106
uagauagggcauugcuaua

SEQ ID NO: 88079 - RNA, 19 nt, Artificial Sequence
  Description of Artificial Sequence: Synthetic oligonucleotide
  Antisense strand to SEQ ID NO: 87998
uauagcaaugcccuaucua

SEQ ID NO: 88080 - RNA, 19 nt, Artificial Sequence
  Description of Artificial Sequence: Synthetic oligonucleotide
  Sense strand starting at position 3253 of SEQ ID NO: 1106
ccauuauccugauuagcag

SEQ ID NO: 88081 - RNA, 19 nt, Artificial Sequence
  Description of Artificial Sequence: Synthetic oligonucleotide
  Antisense strand to SEQ ID NO: 88000
cugcuaaucaggauaaugg

SEQ ID NO: 88082 - RNA, 19 nt, Artificial Sequence
  Description of Artificial Sequence: Synthetic oligonucleotide
  Sense strand starting at position 3230 of SEQ ID NO: 1106
ucuagcauaguugaacaua

SEQ ID NO: 88083 - RNA, 19 nt, Artificial Sequence
  Description of Artificial Sequence: Synthetic oligonucleotide
  Antisense strand to SEQ ID NO: 88002
uauguucaacuaugcuaga

SEQ ID NO: 88084 - RNA, 19 nt, Artificial Sequence
  Description of Artificial Sequence: Synthetic oligonucleotide
  Sense strand starting at position 3228 of SEQ ID NO: 1106
gaucuagcauaguugaaca

SEQ ID NO: 88085 - RNA, 19 nt, Artificial Sequence
  Description of Artificial Sequence: Synthetic oligonucleotide
  Antisense strand to SEQ ID NO: 88004
uguucaacuaugcuagauc

SEQ ID NO: 88086 - RNA, 19 nt, Artificial Sequence
  Description of Artificial Sequence: Synthetic oligonucleotide
  Sense strand starting at position 3116 of SEQ ID NO: 1106
uggacagcucuuuauguuu

SEQ ID NO: 88087 - RNA, 19 nt, Artificial Sequence
  Description of Artificial Sequence: Synthetic oligonucleotide
  Antisense strand to SEQ ID NO: 88006
aaacauaaagagcugucca

SEQ ID NO: 88088 - RNA, 19 nt, Artificial Sequence
  Description of Artificial Sequence: Synthetic oligonucleotide
  Sense strand starting at position 3115 of SEQ ID NO: 1106
auggacagcucuuuauguu

SEQ ID NO: 88089 - RNA, 19 nt, Artificial Sequence
  Description of Artificial Sequence: Synthetic oligonucleotide
  Antisense strand to SEQ ID NO: 88008
aacauaaagagcuguccau

SEQ ID NO: 88090 - RNA, 19 nt, Artificial Sequence
  Description of Artificial Sequence: Synthetic oligonucleotide
  Sense strand starting at position 3003 of SEQ ID NO: 1106
gcaguauuugaaggcagca

SEQ ID NO: 88091 - RNA, 19 nt, Artificial Sequence
  Description of Artificial Sequence: Synthetic oligonucleotide
  Antisense strand to SEQ ID NO: 88010
ugcugccuucaaauacugc

SEQ ID NO: 88092 - RNA, 19 nt, Artificial Sequence
  Description of Artificial Sequence: Synthetic oligonucleotide
  Sense strand starting at position 2995 of SEQ ID NO: 1106
gcugcagagcaguauuuga

SEQ ID NO: 88093 - RNA, 19 nt, Artificial Sequence
  Description of Artificial Sequence: Synthetic oligonucleotide
  Antisense strand to SEQ ID NO: 88012
ucaaauacugcucugcagc

SEQ ID NO: 88094 - RNA, 19 nt, Artificial Sequence
  Description of Artificial Sequence: Synthetic oligonucleotide
  Sense strand starting at position 2888 of SEQ ID NO: 1106
gguaaaugcuggccauaag

SEQ ID NO: 88095 - RNA, 19 nt, Artificial Sequence
  Description of Artificial Sequence: Synthetic oligonucleotide
  Antisense strand to SEQ ID NO: 88014
cuuauggccagcauuuacc

SEQ ID NO: 88096 - RNA, 19 nt, Artificial Sequence
  Description of Artificial Sequence: Synthetic oligonucleotide
  Sense strand starting at position 2886 of SEQ ID NO: 1106
aggguaaaugcuggccaua

SEQ ID NO: 88097 - RNA, 19 nt, Artificial Sequence
  Description of Artificial Sequence: Synthetic oligonucleotide
  Antisense strand to SEQ ID NO: 88016
uauggccagcauuuacccu

SEQ ID NO: 88098 - RNA, 19 nt, Artificial Sequence
  Description of Artificial Sequence: Synthetic oligonucleotide
  Sense strand starting at position 2570 of SEQ ID NO: 1106
uguugugaggauuaaggca

SEQ ID NO: 88099 - RNA, 19 nt, Artificial Sequence
  Description of Artificial Sequence: Synthetic oligonucleotide
  Antisense strand to SEQ ID NO: 88018
ugccuuaauccucacaaca

SEQ ID NO: 88100 - RNA, 19 nt, Artificial Sequence
  Description of Artificial Sequence: Synthetic oligonucleotide
  Sense strand starting at position 2351 of SEQ ID NO: 1106
uucuuaccagagugacaua

SEQ ID NO: 88101 - RNA, 19 nt, Artificial Sequence
  Description of Artificial Sequence: Synthetic oligonucleotide
  Antisense strand to SEQ ID NO: 88020
uaugucacucugguaagaa

SEQ ID NO: 88102 - RNA, 19 nt, Artificial Sequence
  Description of Artificial Sequence: Synthetic oligonucleotide
  Sense strand starting at position 2316 of SEQ ID NO: 1106
augauuguaucugccaacu

SEQ ID NO: 88103 - RNA, 19 nt, Artificial Sequence
  Description of Artificial Sequence: Synthetic oligonucleotide
  Antisense strand to SEQ ID NO: 88022
aguuggcagauacaaucau

SEQ ID NO: 88104 - RNA, 19 nt, Artificial Sequence
  Description of Artificial Sequence: Synthetic oligonucleotide
  Sense strand starting at position 2314 of SEQ ID NO: 1106
agaugauuguaucugccaa

SEQ ID NO: 88105 - RNA, 19 nt, Artificial Sequence
  Description of Artificial Sequence: Synthetic oligonucleotide
  Antisense strand to SEQ ID NO: 88024
uuggcagauacaaucaucu

SEQ ID NO: 88106 - RNA, 19 nt, Artificial Sequence
  Description of Artificial Sequence: Synthetic oligonucleotide
  Sense strand starting at position 2196 of SEQ ID NO: 1106
cuaugaauagcagauucuu

SEQ ID NO: 88107 - RNA, 19 nt, Artificial Sequence
  Description of Artificial Sequence: Synthetic oligonucleotide
  Antisense strand to SEQ ID NO: 88026
aagaaucugcuauucauag

SEQ ID NO: 88108 - RNA, 19 nt, Artificial Sequence
  Description of Artificial Sequence: Synthetic oligonucleotide
  Sense strand starting at position 2166 of SEQ ID NO: 1106
guggcuugucuuaguguug

SEQ ID NO: 88109 - RNA, 19 nt, Artificial Sequence
  Description of Artificial Sequence: Synthetic oligonucleotide
  Antisense strand to SEQ ID NO: 88028
caacacuaagacaagccac

SEQ ID NO: 88110 - RNA, 19 nt, Artificial Sequence
  Description of Artificial Sequence: Synthetic oligonucleotide
  Sense strand starting at position 2048 of SEQ ID NO: 1106
uggcuugggccaugagaca

SEQ ID NO: 88111 - RNA, 19 nt, Artificial Sequence
  Description of Artificial Sequence: Synthetic oligonucleotide
  Antisense strand to SEQ ID NO: 88030
ugucucauggcccaagcca

SEQ ID NO: 88112 - RNA, 19 nt, Artificial Sequence
  Description of Artificial Sequence: Synthetic oligonucleotide
  Sense strand starting at position 2016 of SEQ ID NO: 1106
gagggcugucuuuauauaa

SEQ ID NO: 88113 - RNA, 19 nt, Artificial Sequence
  Description of Artificial Sequence: Synthetic oligonucleotide
  Antisense strand to SEQ ID NO: 88032
uuauauaaagacagcccuc

SEQ ID NO: 88114 - RNA, 19 nt, Artificial Sequence
  Description of Artificial Sequence: Synthetic oligonucleotide
  Sense strand starting at position 2010 of SEQ ID NO: 1106
ugggaagagggcugucuuu

SEQ ID NO: 88115 - RNA, 19 nt, Artificial Sequence
  Description of Artificial Sequence: Synthetic oligonucleotide
  Antisense strand to SEQ ID NO: 88034
aaagacagcccucuuccca

SEQ ID NO: 88116 - RNA, 19 nt, Artificial Sequence
  Description of Artificial Sequence: Synthetic oligonucleotide
  Sense strand starting at position 1787 of SEQ ID NO: 1106
ucguaaacucuguagcuau

SEQ ID NO: 88117 - RNA, 19 nt, Artificial Sequence
  Description of Artificial Sequence: Synthetic oligonucleotide
  Antisense strand to SEQ ID NO: 88036
auagcuacagaguuuacga

SEQ ID NO: 88118 - RNA, 19 nt, Artificial Sequence
  Description of Artificial Sequence: Synthetic oligonucleotide
  Sense strand starting at position 1666 of SEQ ID NO: 1106
gcucauaagguguaaauug

SEQ ID NO: 88119 - RNA, 19 nt, Artificial Sequence
  Description of Artificial Sequence: Synthetic oligonucleotide
  Antisense strand to SEQ ID NO: 88038
caauuuacaccuuaugagc

SEQ ID NO: 88120 - RNA, 19 nt, Artificial Sequence
  Description of Artificial Sequence: Synthetic oligonucleotide
  Sense strand starting at position 1570 of SEQ ID NO: 1106
gcuccugaugaggguucaa

SEQ ID NO: 88121 - RNA, 19 nt, Artificial Sequence
  Description of Artificial Sequence: Synthetic oligonucleotide
  Antisense strand to SEQ ID NO: 88040
uugaacccucaucaggagc

SEQ ID NO: 88122 - RNA, 19 nt, Artificial Sequence
  Description of Artificial Sequence: Synthetic oligonucleotide
  Sense strand starting at position 1312 of SEQ ID NO: 1106
aguccaagguucuuaauca

SEQ ID NO: 88123 - RNA, 19 nt, Artificial Sequence
  Description of Artificial Sequence: Synthetic oligonucleotide
  Antisense strand to SEQ ID NO: 88042
ugauuaagaaccuuggacu

SEQ ID NO: 88124 - RNA, 19 nt, Artificial Sequence
  Description of Artificial Sequence: Synthetic oligonucleotide
  Sense strand starting at position 1307 of SEQ ID NO: 1106
cagaaaguccaagguucuu

SEQ ID NO: 88125 - RNA, 19 nt, Artificial Sequence
  Description of Artificial Sequence: Synthetic oligonucleotide
  Antisense strand to SEQ ID NO: 88044
aagaaccuuggacuuucug

SEQ ID NO: 88126 - RNA, 19 nt, Artificial Sequence
  Description of Artificial Sequence: Synthetic oligonucleotide
  Sense strand starting at position 1233 of SEQ ID NO: 1106
gucugcaggccucagaaau

SEQ ID NO: 88127 - RNA, 19 nt, Artificial Sequence
  Description of Artificial Sequence: Synthetic oligonucleotide
  Antisense strand to SEQ ID NO: 88046
auuucugaggccugcagac

SEQ ID NO: 88128 - RNA, 19 nt, Artificial Sequence
  Description of Artificial Sequence: Synthetic oligonucleotide
  Sense strand starting at position 1210 of SEQ ID NO: 1106
ugcuaaucaccugaagugu

SEQ ID NO: 88129 - RNA, 19 nt, Artificial Sequence
  Description of Artificial Sequence: Synthetic oligonucleotide
  Antisense strand to SEQ ID NO: 88048
acacuucaggugauuagca

SEQ ID NO: 88130 - RNA, 19 nt, Artificial Sequence
  Description of Artificial Sequence: Synthetic oligonucleotide
  Sense strand starting at position 859 of SEQ ID NO: 1106
uggauuuacucacacaugu

SEQ ID NO: 88131 - RNA, 19 nt, Artificial Sequence
  Description of Artificial Sequence: Synthetic oligonucleotide
  Antisense strand to SEQ ID NO: 88050
acaugugugaguaaaucca

SEQ ID NO: 88132 - RNA, 19 nt, Artificial Sequence
  Description of Artificial Sequence: Synthetic oligonucleotide
  Sense strand starting at position 730 of SEQ ID NO: 1106
aaaggauucuccuuucguc

SEQ ID NO: 88133 - RNA, 19 nt, Artificial Sequence
  Description of Artificial Sequence: Synthetic oligonucleotide
  Antisense strand to SEQ ID NO: 88052
gacgaaaggagaauccuuu

SEQ ID NO: 88134 - RNA, 19 nt, Artificial Sequence
  Description of Artificial Sequence: Synthetic oligonucleotide
  Sense strand starting at position 611 of SEQ ID NO: 1106
caggauuaaucuguuagac

SEQ ID NO: 88135 - RNA, 19 nt, Artificial Sequence
  Description of Artificial Sequence: Synthetic oligonucleotide
  Antisense strand to SEQ ID NO: 88054
gucuaacagauuaauccug

SEQ ID NO: 88136 - RNA, 19 nt, Artificial Sequence
  Description of Artificial Sequence: Synthetic oligonucleotide
  Sense strand starting at position 601 of SEQ ID NO: 1106
uaguucgacccaggauuaa

SEQ ID NO: 88137 - RNA, 19 nt, Artificial Sequence
  Description of Artificial Sequence: Synthetic oligonucleotide
  Antisense strand to SEQ ID NO: 88056
uuaauccugggucgaacua

SEQ ID NO: 88138 - RNA, 19 nt, Artificial Sequence
  Description of Artificial Sequence: Synthetic oligonucleotide
  Sense strand starting at position 599 of SEQ ID NO: 1106
cuuaguucgacccaggauu

SEQ ID NO: 88139 - RNA, 19 nt, Artificial Sequence
  Description of Artificial Sequence: Synthetic oligonucleotide
  Antisense strand to SEQ ID NO: 88058
aauccugggucgaacuaag

SEQ ID NO: 88140 - RNA, 19 nt, Artificial Sequence
  Description of Artificial Sequence: Synthetic oligonucleotide
  Sense strand starting at position 108 of SEQ ID NO: 1107
gaagcaagugaagguaaua

SEQ ID NO: 88141 - RNA, 19 nt, Artificial Sequence
  Description of Artificial Sequence: Synthetic oligonucleotide
  Antisense strand to SEQ ID NO: 88060
uauuaccuucacuugcuuc

SEQ ID NO: 88142 - RNA, 19 nt, Artificial Sequence
  Description of Artificial Sequence: Synthetic oligonucleotide
  Sense strand starting at position 113 of SEQ ID NO: 1107
aagugaagguaauacauau

SEQ ID NO: 88143 - RNA, 19 nt, Artificial Sequence
  Description of Artificial Sequence: Synthetic oligonucleotide
  Antisense strand to SEQ ID NO: 88062
auauguauuaccuucacuu

SEQ ID NO: 88144 - RNA, 19 nt, Artificial Sequence
  Description of Artificial Sequence: Synthetic oligonucleotide
  Sense strand starting at position 120 of SEQ ID NO: 1107
gguaauacauauggaaaca

SEQ ID NO: 88145 - RNA, 19 nt, Artificial Sequence
  Description of Artificial Sequence: Synthetic oligonucleotide
  Antisense strand to SEQ ID NO: 88064
uguuuccauauguauuacc

SEQ ID NO: 88146 - RNA, 19 nt, Artificial Sequence
  Description of Artificial Sequence: Synthetic oligonucleotide
  Sense strand starting at position 502 of SEQ ID NO: 1107
agaguaaagccuugucuca

SEQ ID NO: 88147 - RNA, 19 nt, Artificial Sequence
  Description of Artificial Sequence: Synthetic oligonucleotide
  Antisense strand to SEQ ID NO: 88066
ugagacaaggcuuuacucu

SEQ ID NO: 88148 - RNA, 19 nt, Artificial Sequence
  Description of Artificial Sequence: Synthetic oligonucleotide
  Sense strand starting at position 504 of SEQ ID NO: 1107
aguaaagccuugucucaaa

SEQ ID NO: 88149 - RNA, 19 nt, Artificial Sequence
  Description of Artificial Sequence: Synthetic oligonucleotide
  Antisense strand to SEQ ID NO: 88068
uuugagacaaggcuuuacu

SEQ ID NO: 88150 - RNA, 19 nt, Artificial Sequence
  Description of Artificial Sequence: Synthetic oligonucleotide
  Sense strand starting at position 555 of SEQ ID NO: 1107
gggcaaccaugauagaucu

SEQ ID NO: 88151 - RNA, 19 nt, Artificial Sequence
  Description of Artificial Sequence: Synthetic oligonucleotide
  Antisense strand to SEQ ID NO: 88070
agaucuaucaugguugccc

SEQ ID NO: 88152 - RNA, 19 nt, Artificial Sequence
  Description of Artificial Sequence: Synthetic oligonucleotide
  Sense strand starting at position 601 of SEQ ID NO: 1107
gagauugcaucugcuguga

SEQ ID NO: 88153 - RNA, 19 nt, Artificial Sequence
  Description of Artificial Sequence: Synthetic oligonucleotide
  Antisense strand to SEQ ID NO: 88072
ucacagcagaugcaaucuc

SEQ ID NO: 88154 - RNA, 19 nt, Artificial Sequence
  Description of Artificial Sequence: Synthetic oligonucleotide
  Sense strand starting at position 605 of SEQ ID NO: 1107
uugcaucugcugugaauuu

SEQ ID NO: 88155 - RNA, 19 nt, Artificial Sequence
  Description of Artificial Sequence: Synthetic oligonucleotide
  Antisense strand to SEQ ID NO: 88074
aaauucacagcagaugcaa

SEQ ID NO: 88156 - RNA, 19 nt, Artificial Sequence
  Description of Artificial Sequence: Synthetic oligonucleotide
  Sense strand starting at position 612 of SEQ ID NO: 1107
ugcugugaauuucugagca

SEQ ID NO: 88157 - RNA, 19 nt, Artificial Sequence
  Description of Artificial Sequence: Synthetic oligonucleotide
  Antisense strand to SEQ ID NO: 88076
ugcucagaaauucacagca

SEQ ID NO: 88158 - RNA, 19 nt, Artificial Sequence
  Description of Artificial Sequence: Synthetic oligonucleotide
  Sense strand starting at position 616 of SEQ ID NO: 1107
gugaauuucugagcacgug

SEQ ID NO: 88159 - RNA, 19 nt, Artificial Sequence
  Description of Artificial Sequence: Synthetic oligonucleotide
  Antisense strand to SEQ ID NO: 88078
cacgugcucagaaauucac

SEQ ID NO: 88160 - RNA, 19 nt, Artificial Sequence
  Description of Artificial Sequence: Synthetic oligonucleotide
  Sense strand starting at position 631 of SEQ ID NO: 1107
cguggcauuccuuaaguaa

SEQ ID NO: 88161 - RNA, 19 nt, Artificial Sequence
  Description of Artificial Sequence: Synthetic oligonucleotide
  Antisense strand to SEQ ID NO: 88080
uuacuuaaggaaugccacg

SEQ ID NO: 88162 - RNA, 19 nt, Artificial Sequence
  Description of Artificial Sequence: Synthetic oligonucleotide
  Sense strand starting at position 634 of SEQ ID NO: 1107
ggcauuccuuaaguaaucu

SEQ ID NO: 88163 - RNA, 19 nt, Artificial Sequence
  Description of Artificial Sequence: Synthetic oligonucleotide
  Antisense strand to SEQ ID NO: 88082
agauuacuuaaggaaugcc

SEQ ID NO: 88164 - RNA, 19 nt, Artificial Sequence
  Description of Artificial Sequence: Synthetic oligonucleotide
  Sense strand starting at position 643 of SEQ ID NO: 1107
uaaguaaucuggccuugac

SEQ ID NO: 88165 - RNA, 19 nt, Artificial Sequence
  Description of Artificial Sequence: Synthetic oligonucleotide
  Antisense strand to SEQ ID NO: 88084
gucaaggccagauuacuua

SEQ ID NO: 88166 - RNA, 19 nt, Artificial Sequence
  Description of Artificial Sequence: Synthetic oligonucleotide
  Sense strand starting at position 646 of SEQ ID NO: 1107
guaaucuggccuugacacu

SEQ ID NO: 88167 - RNA, 19 nt, Artificial Sequence
  Description of Artificial Sequence: Synthetic oligonucleotide
  Antisense strand to SEQ ID NO: 88086
agugucaaggccagauuac

SEQ ID NO: 88168 - RNA, 19 nt, Artificial Sequence
  Description of Artificial Sequence: Synthetic oligonucleotide
  Sense strand starting at position 713 of SEQ ID NO: 1107
ucuugauuacaugagcaau

SEQ ID NO: 88169 - RNA, 19 nt, Artificial Sequence
  Description of Artificial Sequence: Synthetic oligonucleotide
  Antisense strand to SEQ ID NO: 88088
auugcucauguaaucaaga

SEQ ID NO: 88170 - RNA, 19 nt, Artificial Sequence
  Description of Artificial Sequence: Synthetic oligonucleotide
  Sense strand starting at position 804 of SEQ ID NO: 1107
gauauuuggugccucuagu

SEQ ID NO: 88171 - RNA, 19 nt, Artificial Sequence
  Description of Artificial Sequence: Synthetic oligonucleotide
  Antisense strand to SEQ ID NO: 88090
acuagaggcaccaaauauc

SEQ ID NO: 88172 - RNA, 19 nt, Artificial Sequence
  Description of Artificial Sequence: Synthetic oligonucleotide
  Sense strand starting at position 855 of SEQ ID NO: 1107
agaauucucuaauauugag

SEQ ID NO: 88173 - RNA, 19 nt, Artificial Sequence
  Description of Artificial Sequence: Synthetic oligonucleotide
  Antisense strand to SEQ ID NO: 88092
cucaauauuagagaauucu

SEQ ID NO: 88174 - RNA, 19 nt, Artificial Sequence
  Description of Artificial Sequence: Synthetic oligonucleotide
  Sense strand starting at position 887 of SEQ ID NO: 1107
agaacuccauagugaacuu

SEQ ID NO: 88175 - RNA, 19 nt, Artificial Sequence
  Description of Artificial Sequence: Synthetic oligonucleotide
  Antisense strand to SEQ ID NO: 88094
aaguucacuauggaguucu

SEQ ID NO: 88176 - RNA, 19 nt, Artificial Sequence
  Description of Artificial Sequence: Synthetic oligonucleotide
  Sense strand starting at position 915 of SEQ ID NO: 1107
gcuucuucuggugggaaca

SEQ ID NO: 88177 - RNA, 19 nt, Artificial Sequence
  Description of Artificial Sequence: Synthetic oligonucleotide
  Antisense strand to SEQ ID NO: 88096
uguucccaccagaagaagc

SEQ ID NO: 88178 - RNA, 19 nt, Artificial Sequence
  Description of Artificial Sequence: Synthetic oligonucleotide
  Sense strand starting at position 916 of SEQ ID NO: 1107
cuucuucuggugggaacaa

SEQ ID NO: 88179 - RNA, 19 nt, Artificial Sequence
  Description of Artificial Sequence: Synthetic oligonucleotide
  Antisense strand to SEQ ID NO: 88098
uuguucccaccagaagaag

SEQ ID NO: 88180 - RNA, 19 nt, Artificial Sequence
  Description of Artificial Sequence: Synthetic oligonucleotide
  Sense strand starting at position 1011 of SEQ ID NO: 1107
gccagaagguaccaaaguu

SEQ ID NO: 88181 - RNA, 19 nt, Artificial Sequence
  Description of Artificial Sequence: Synthetic oligonucleotide
  Antisense strand to SEQ ID NO: 88100
aacuuugguaccuucuggc

SEQ ID NO: 88182 - RNA, 19 nt, Artificial Sequence
  Description of Artificial Sequence: Synthetic oligonucleotide
  Sense strand starting at position 1019 of SEQ ID NO: 1107
guaccaaaguuucuugcuu

SEQ ID NO: 88183 - RNA, 19 nt, Artificial Sequence
  Description of Artificial Sequence: Synthetic oligonucleotide
  Antisense strand to SEQ ID NO: 88102
aagcaagaaacuuugguac

SEQ ID NO: 88184 - RNA, 19 nt, Artificial Sequence
  Description of Artificial Sequence: Synthetic oligonucleotide
  Sense strand starting at position 1152 of SEQ ID NO: 1107
accuaagcaucuggaaauu

SEQ ID NO: 88185 - RNA, 19 nt, Artificial Sequence
  Description of Artificial Sequence: Synthetic oligonucleotide
  Antisense strand to SEQ ID NO: 88104
aauuuccagaugcuuaggu

SEQ ID NO: 88186 - RNA, 19 nt, Artificial Sequence
  Description of Artificial Sequence: Synthetic oligonucleotide
  Sense strand starting at position 1243 of SEQ ID NO: 1107
ggaagaucuuugcuuggaa

SEQ ID NO: 88187 - RNA, 19 nt, Artificial Sequence
  Description of Artificial Sequence: Synthetic oligonucleotide
  Antisense strand to SEQ ID NO: 88106
uuccaagcaaagaucuucc

SEQ ID NO: 88188 - RNA, 19 nt, Artificial Sequence
  Description of Artificial Sequence: Synthetic oligonucleotide
  Sense strand starting at position 1244 of SEQ ID NO: 1107
gaagaucuuugcuuggaau

SEQ ID NO: 88189 - RNA, 19 nt, Artificial Sequence
  Description of Artificial Sequence: Synthetic oligonucleotide
  Antisense strand to SEQ ID NO: 88108
auuccaagcaaagaucuuc

SEQ ID NO: 88190 - RNA, 19 nt, Artificial Sequence
  Description of Artificial Sequence: Synthetic oligonucleotide
  Sense strand starting at position 1255 of SEQ ID NO: 1107
cuuggaauccuuugccaaa

SEQ ID NO: 88191 - RNA, 19 nt, Artificial Sequence
  Description of Artificial Sequence: Synthetic oligonucleotide
  Antisense strand to SEQ ID NO: 88110
uuuggcaaaggauuccaag

SEQ ID NO: 88192 - RNA, 19 nt, Artificial Sequence
  Description of Artificial Sequence: Synthetic oligonucleotide
  Sense strand starting at position 1256 of SEQ ID NO: 1107
uuggaauccuuugccaaag

SEQ ID NO: 88193 - RNA, 19 nt, Artificial Sequence
  Description of Artificial Sequence: Synthetic oligonucleotide
  Antisense strand to SEQ ID NO: 88112
cuuuggcaaaggauuccaa

SEQ ID NO: 88194 - RNA, 19 nt, Artificial Sequence
  Description of Artificial Sequence: Synthetic oligonucleotide
  Sense strand starting at position 1257 of SEQ ID NO: 1107
uggaauccuuugccaaaga

SEQ ID NO: 88195 - RNA, 19 nt, Artificial Sequence
  Description of Artificial Sequence: Synthetic oligonucleotide
  Antisense strand to SEQ ID NO: 88114
ucuuuggcaaaggauucca

SEQ ID NO: 88196 - RNA, 19 nt, Artificial Sequence
  Description of Artificial Sequence: Synthetic oligonucleotide
  Sense strand starting at position 1921 of SEQ ID NO: 1107
ggcgccucuggccaagaaa

SEQ ID NO: 88197 - RNA, 19 nt, Artificial Sequence
  Description of Artificial Sequence: Synthetic oligonucleotide
  Antisense strand to SEQ ID NO: 88116
uuucuuggccagaggcgcc

SEQ ID NO: 88198 - RNA, 19 nt, Artificial Sequence
  Description of Artificial Sequence: Synthetic oligonucleotide
  Sense strand starting at position 2156 of SEQ ID NO: 1107
gugcacuuaucucuuuaag

SEQ ID NO: 88199 - RNA, 19 nt, Artificial Sequence
  Description of Artificial Sequence: Synthetic oligonucleotide
  Antisense strand to SEQ ID NO: 88118
cuuaaagagauaagugcac

SEQ ID NO: 88200 - RNA, 19 nt, Artificial Sequence
  Description of Artificial Sequence: Synthetic oligonucleotide
  Sense strand starting at position 2840 of SEQ ID NO: 1107
ucgggaugcagguaugaga

SEQ ID NO: 88201 - RNA, 19 nt, Artificial Sequence
  Description of Artificial Sequence: Synthetic oligonucleotide
  Antisense strand to SEQ ID NO: 88120
ucucauaccugcaucccga

SEQ ID NO: 88202 - RNA, 19 nt, Artificial Sequence
  Description of Artificial Sequence: Synthetic oligonucleotide
  Sense strand starting at position 2847 of SEQ ID NO: 1107
gcagguaugagaggguaau

SEQ ID NO: 88203 - RNA, 19 nt, Artificial Sequence
  Description of Artificial Sequence: Synthetic oligonucleotide
  Antisense strand to SEQ ID NO: 88122
auuacccucucauaccugc

SEQ ID NO: 88204 - RNA, 19 nt, Artificial Sequence
  Description of Artificial Sequence: Synthetic oligonucleotide
  Sense strand starting at position 2848 of SEQ ID NO: 1107
cagguaugagaggguaauc

SEQ ID NO: 88205 - RNA, 19 nt, Artificial Sequence
  Description of Artificial Sequence: Synthetic oligonucleotide
  Antisense strand to SEQ ID NO: 88124
gauuacccucucauaccug

SEQ ID NO: 88206 - RNA, 19 nt, Artificial Sequence
  Description of Artificial Sequence: Synthetic oligonucleotide
  Sense strand starting at position 2857 of SEQ ID NO: 1107
gaggguaaucccgggagca

SEQ ID NO: 88207 - RNA, 19 nt, Artificial Sequence
  Description of Artificial Sequence: Synthetic oligonucleotide
  Antisense strand to SEQ ID NO: 88126
ugcucccgggauuacccuc

SEQ ID NO: 88208 - RNA, 19 nt, Artificial Sequence
  Description of Artificial Sequence: Synthetic oligonucleotide
  Sense strand starting at position 2858 of SEQ ID NO: 1107
aggguaaucccgggagcag

SEQ ID NO: 88209 - RNA, 19 nt, Artificial Sequence
  Description of Artificial Sequence: Synthetic oligonucleotide
  Antisense strand to SEQ ID NO: 88128
cugcucccgggauuacccu

SEQ ID NO: 88210 - RNA, 19 nt, Artificial Sequence
  Description of Artificial Sequence: Synthetic oligonucleotide
  Sense strand starting at position 3003 of SEQ ID NO: 1107
aggcccuguuaugagaaga

SEQ ID NO: 88211 - RNA, 19 nt, Artificial Sequence
  Description of Artificial Sequence: Synthetic oligonucleotide
  Antisense strand to SEQ ID NO: 88130
ucuucucauaacagggccu

SEQ ID NO: 88212 - RNA, 19 nt, Artificial Sequence
  Description of Artificial Sequence: Synthetic oligonucleotide
  Sense strand starting at position 3025 of SEQ ID NO: 1107
acgugugagcuuggauauu

SEQ ID NO: 88213 - RNA, 19 nt, Artificial Sequence
  Description of Artificial Sequence: Synthetic oligonucleotide
  Antisense strand to SEQ ID NO: 88132
aauauccaagcucacacgu

SEQ ID NO: 88214 - RNA, 19 nt, Artificial Sequence
  Description of Artificial Sequence: Synthetic oligonucleotide
  Sense strand starting at position 3693 of SEQ ID NO: 1107
ugggcgguguccuugagaa

SEQ ID NO: 88215 - RNA, 19 nt, Artificial Sequence
  Description of Artificial Sequence: Synthetic oligonucleotide
  Antisense strand to SEQ ID NO: 88134
uucucaaggacaccgccca

SEQ ID NO: 88216 - RNA, 19 nt, Artificial Sequence
  Description of Artificial Sequence: Synthetic oligonucleotide
  Sense strand starting at position 3694 of SEQ ID NO: 1107
gggcgguguccuugagaaa

SEQ ID NO: 88217 - RNA, 19 nt, Artificial Sequence
  Description of Artificial Sequence: Synthetic oligonucleotide
  Antisense strand to SEQ ID NO: 88136
uuucucaaggacaccgccc

SEQ ID NO: 88218 - RNA, 19 nt, Artificial Sequence
  Description of Artificial Sequence: Synthetic oligonucleotide
  Sense strand starting at position 3721 of SEQ ID NO: 1107
gggcaagcugcccagagau

SEQ ID NO: 88219 - RNA, 19 nt, Artificial Sequence
  Description of Artificial Sequence: Synthetic oligonucleotide
  Antisense strand to SEQ ID NO: 88138
aucucugggcagcuugccc

SEQ ID NO: 88220 - RNA, 19 nt, Artificial Sequence
  Description of Artificial Sequence: Synthetic oligonucleotide
  Sense strand starting at position 10 of SEQ ID NO: 1108
guaucuaauuggucuuuga

SEQ ID NO: 88221 - RNA, 19 nt, Artificial Sequence
  Description of Artificial Sequence: Synthetic oligonucleotide
  Antisense strand to SEQ ID NO: 88140
ucaaagaccaauuagauac

SEQ ID NO: 88222 - RNA, 19 nt, Artificial Sequence
  Description of Artificial Sequence: Synthetic oligonucleotide
  Sense strand starting at position 141 of SEQ ID NO: 1108
aguuacggaaauugucaua

SEQ ID NO: 88223 - RNA, 19 nt, Artificial Sequence
  Description of Artificial Sequence: Synthetic oligonucleotide
  Antisense strand to SEQ ID NO: 88142
uaugacaauuuccguaacu

SEQ ID NO: 88224 - RNA, 19 nt, Artificial Sequence
  Description of Artificial Sequence: Synthetic oligonucleotide
  Sense strand starting at position 397 of SEQ ID NO: 1108
ggauuuaucugugaacucg

SEQ ID NO: 88225 - RNA, 19 nt, Artificial Sequence
  Description of Artificial Sequence: Synthetic oligonucleotide
  Antisense strand to SEQ ID NO: 88144
cgaguucacagauaaaucc

SEQ ID NO: 88226 - RNA, 19 nt, Artificial Sequence
  Description of Artificial Sequence: Synthetic oligonucleotide
  Sense strand starting at position 582 of SEQ ID NO: 1108
gagggaagccaauggucaa

SEQ ID NO: 88227 - RNA, 19 nt, Artificial Sequence
  Description of Artificial Sequence: Synthetic oligonucleotide
  Antisense strand to SEQ ID NO: 88146
uugaccauuggcuucccuc

SEQ ID NO: 88228 - RNA, 19 nt, Artificial Sequence
  Description of Artificial Sequence: Synthetic oligonucleotide
  Sense strand starting at position 583 of SEQ ID NO: 1108
agggaagccaauggucaau

SEQ ID NO: 88229 - RNA, 19 nt, Artificial Sequence
  Description of Artificial Sequence: Synthetic oligonucleotide
  Antisense strand to SEQ ID NO: 88148
auugaccauuggcuucccu

SEQ ID NO: 88230 - RNA, 19 nt, Artificial Sequence
  Description of Artificial Sequence: Synthetic oligonucleotide
  Sense strand starting at position 594 of SEQ ID NO: 1108
uggucaaugcucugugaua

SEQ ID NO: 88231 - RNA, 19 nt, Artificial Sequence
  Description of Artificial Sequence: Synthetic oligonucleotide
  Antisense strand to SEQ ID NO: 88150
uaucacagagcauugacca

SEQ ID NO: 88232 - RNA, 19 nt, Artificial Sequence
  Description of Artificial Sequence: Synthetic oligonucleotide
  Sense strand starting at position 595 of SEQ ID NO: 1108
ggucaaugcucugugauag

SEQ ID NO: 88233 - RNA, 19 nt, Artificial Sequence
  Description of Artificial Sequence: Synthetic oligonucleotide
  Antisense strand to SEQ ID NO: 88152
cuaucacagagcauugacc

SEQ ID NO: 88234 - RNA, 19 nt, Artificial Sequence
  Description of Artificial Sequence: Synthetic oligonucleotide
  Sense strand starting at position 667 of SEQ ID NO: 1108
agggauuugccagguugca

SEQ ID NO: 88235 - RNA, 19 nt, Artificial Sequence
  Description of Artificial Sequence: Synthetic oligonucleotide
  Antisense strand to SEQ ID NO: 88154
ugcaaccuggcaaaucccu

SEQ ID NO: 88236 - RNA, 19 nt, Artificial Sequence
  Description of Artificial Sequence: Synthetic oligonucleotide
  Sense strand starting at position 756 of SEQ ID NO: 1108
aggaaaguuugagugaauc

SEQ ID NO: 88237 - RNA, 19 nt, Artificial Sequence
  Description of Artificial Sequence: Synthetic oligonucleotide
  Antisense strand to SEQ ID NO: 88156
gauucacucaaacuuuccu

SEQ ID NO: 88238 - RNA, 19 nt, Artificial Sequence
  Description of Artificial Sequence: Synthetic oligonucleotide
  Sense strand starting at position 764 of SEQ ID NO: 1108
uugagugaaucagucacaa

SEQ ID NO: 88239 - RNA, 19 nt, Artificial Sequence
  Description of Artificial Sequence: Synthetic oligonucleotide
  Antisense strand to SEQ ID NO: 88158
uugugacugauucacucaa

SEQ ID NO: 88240 - RNA, 19 nt, Artificial Sequence
  Description of Artificial Sequence: Synthetic oligonucleotide
  Sense strand starting at position 793 of SEQ ID NO: 1108
acaguacugcaucgauaug

SEQ ID NO: 88241 - RNA, 19 nt, Artificial Sequence
  Description of Artificial Sequence: Synthetic oligonucleotide
  Antisense strand to SEQ ID NO: 88160
cauaucgaugcaguacugu

SEQ ID NO: 88242 - RNA, 19 nt, Artificial Sequence
  Description of Artificial Sequence: Synthetic oligonucleotide
  Sense strand starting at position 803 of SEQ ID NO: 1108
aucgauaugcucuggagac

SEQ ID NO: 88243 - RNA, 19 nt, Artificial Sequence
  Description of Artificial Sequence: Synthetic oligonucleotide
  Antisense strand to SEQ ID NO: 88162
gucuccagagcauaucgau

SEQ ID NO: 88244 - RNA, 19 nt, Artificial Sequence
  Description of Artificial Sequence: Synthetic oligonucleotide
  Sense strand starting at position 805 of SEQ ID NO: 1108
cgauaugcucuggagaccu

SEQ ID NO: 88245 - RNA, 19 nt, Artificial Sequence
  Description of Artificial Sequence: Synthetic oligonucleotide
  Antisense strand to SEQ ID NO: 88164
aggucuccagagcauaucg

SEQ ID NO: 88246 - RNA, 19 nt, Artificial Sequence
  Description of Artificial Sequence: Synthetic oligonucleotide
  Sense strand starting at position 949 of SEQ ID NO: 1108
aaguucucauuguugggau

SEQ ID NO: 88247 - RNA, 19 nt, Artificial Sequence
  Description of Artificial Sequence: Synthetic oligonucleotide
  Antisense strand to SEQ ID NO: 88166
aucccaacaaugagaacuu

SEQ ID NO: 88248 - RNA, 19 nt, Artificial Sequence
  Description of Artificial Sequence: Synthetic oligonucleotide
  Sense strand starting at position 1334 of SEQ ID NO: 1108
ccaggaguucgggagagua

SEQ ID NO: 88249 - RNA, 19 nt, Artificial Sequence
  Description of Artificial Sequence: Synthetic oligonucleotide
  Antisense strand to SEQ ID NO: 88168
uacucucccgaacuccugg

SEQ ID NO: 88250 - RNA, 19 nt, Artificial Sequence
  Description of Artificial Sequence: Synthetic oligonucleotide
  Sense strand starting at position 1362 of SEQ ID NO: 1108
ggacccaugcuuugcagau

SEQ ID NO: 88251 - RNA, 19 nt, Artificial Sequence
  Description of Artificial Sequence: Synthetic oligonucleotide
  Antisense strand to SEQ ID NO: 88170
aucugcaaagcaugggucc

SEQ ID NO: 88252 - RNA, 19 nt, Artificial Sequence
  Description of Artificial Sequence: Synthetic oligonucleotide
  Sense strand starting at position 1363 of SEQ ID NO: 1108
gacccaugcuuugcagauu

SEQ ID NO: 88253 - RNA, 19 nt, Artificial Sequence
  Description of Artificial Sequence: Synthetic oligonucleotide
  Antisense strand to SEQ ID NO: 88172
aaucugcaaagcauggguc

SEQ ID NO: 88254 - RNA, 19 nt, Artificial Sequence
  Description of Artificial Sequence: Synthetic oligonucleotide
  Sense strand starting at position 1492 of SEQ ID NO: 1108
guaugcaguucccugagga

SEQ ID NO: 88255 - RNA, 19 nt, Artificial Sequence
  Description of Artificial Sequence: Synthetic oligonucleotide
  Antisense strand to SEQ ID NO: 88174
uccucagggaacugcauac

SEQ ID NO: 88256 - RNA, 19 nt, Artificial Sequence
  Description of Artificial Sequence: Synthetic oligonucleotide
  Sense strand starting at position 1697 of SEQ ID NO: 1108
aacggaaaccuuugaugua

SEQ ID NO: 88257 - RNA, 19 nt, Artificial Sequence
  Description of Artificial Sequence: Synthetic oligonucleotide
  Antisense strand to SEQ ID NO: 88176
uacaucaaagguuuccguu

SEQ ID NO: 88258 - RNA, 19 nt, Artificial Sequence
  Description of Artificial Sequence: Synthetic oligonucleotide
  Sense strand starting at position 1706 of SEQ ID NO: 1108
cuuugauguaguuaagcga

SEQ ID NO: 88259 - RNA, 19 nt, Artificial Sequence
  Description of Artificial Sequence: Synthetic oligonucleotide
  Antisense strand to SEQ ID NO: 88178
ucgcuuaacuacaucaaag

SEQ ID NO: 88260 - RNA, 19 nt, Artificial Sequence
  Description of Artificial Sequence: Synthetic oligonucleotide
  Sense strand starting at position 2154 of SEQ ID NO: 1108
cuauaauggcaucaguuau

SEQ ID NO: 88261 - RNA, 19 nt, Artificial Sequence
  Description of Artificial Sequence: Synthetic oligonucleotide
  Antisense strand to SEQ ID NO: 88180
auaacugaugccauuauag

SEQ ID NO: 88262 - RNA, 19 nt, Artificial Sequence
  Description of Artificial Sequence: Synthetic oligonucleotide
  Sense strand starting at position 2183 of SEQ ID NO: 1108
uguuauaggccucaggaga

SEQ ID NO: 88263 - RNA, 19 nt, Artificial Sequence
  Description of Artificial Sequence: Synthetic oligonucleotide
  Antisense strand to SEQ ID NO: 88182
ucuccugaggccuauaaca

SEQ ID NO: 88264 - RNA, 19 nt, Artificial Sequence
  Description of Artificial Sequence: Synthetic oligonucleotide
  Sense strand starting at position 2196 of SEQ ID NO: 1108
aggagaaugugaucuuccu

SEQ ID NO: 88265 - RNA, 19 nt, Artificial Sequence
  Description of Artificial Sequence: Synthetic oligonucleotide
  Antisense strand to SEQ ID NO: 88184
aggaagaucacauucuccu

SEQ ID NO: 88266 - RNA, 19 nt, Artificial Sequence
  Description of Artificial Sequence: Synthetic oligonucleotide
  Sense strand starting at position 2204 of SEQ ID NO: 1108
gugaucuuccugcagcgaa

SEQ ID NO: 88267 - RNA, 19 nt, Artificial Sequence
  Description of Artificial Sequence: Synthetic oligonucleotide
  Antisense strand to SEQ ID NO: 88186
uucgcugcaggaagaucac

SEQ ID NO: 88268 - RNA, 19 nt, Artificial Sequence
  Description of Artificial Sequence: Synthetic oligonucleotide
  Sense strand starting at position 2271 of SEQ ID NO: 1108
guaagcaaucagcacuaua

SEQ ID NO: 88269 - RNA, 19 nt, Artificial Sequence
  Description of Artificial Sequence: Synthetic oligonucleotide
  Antisense strand to SEQ ID NO: 88188
uauagugcugauugcuuac

SEQ ID NO: 88270 - RNA, 19 nt, Artificial Sequence
  Description of Artificial Sequence: Synthetic oligonucleotide
  Sense strand starting at position 2511 of SEQ ID NO: 1108
gauagaugcaggugagguu

SEQ ID NO: 88271 - RNA, 19 nt, Artificial Sequence
  Description of Artificial Sequence: Synthetic oligonucleotide
  Antisense strand to SEQ ID NO: 88190
aaccucaccugcaucuauc

SEQ ID NO: 88272 - RNA, 19 nt, Artificial Sequence
  Description of Artificial Sequence: Synthetic oligonucleotide
  Sense strand starting at position 2595 of SEQ ID NO: 1108
ucauuugacuuagaacuug

SEQ ID NO: 88273 - RNA, 19 nt, Artificial Sequence
  Description of Artificial Sequence: Synthetic oligonucleotide
  Antisense strand to SEQ ID NO: 88192
caaguucuaagucaaauga

SEQ ID NO: 88274 - RNA, 19 nt, Artificial Sequence
  Description of Artificial Sequence: Synthetic oligonucleotide
  Sense strand starting at position 2638 of SEQ ID NO: 1108
uuaguaggguugccagaua

SEQ ID NO: 88275 - RNA, 19 nt, Artificial Sequence
  Description of Artificial Sequence: Synthetic oligonucleotide
  Antisense strand to SEQ ID NO: 88194
uaucuggcaacccuacuaa

SEQ ID NO: 88276 - RNA, 19 nt, Artificial Sequence
  Description of Artificial Sequence: Synthetic oligonucleotide
  Sense strand starting at position 2712 of SEQ ID NO: 1108
aagcuuaagugugucccaa

SEQ ID NO: 88277 - RNA, 19 nt, Artificial Sequence
  Description of Artificial Sequence: Synthetic oligonucleotide
  Antisense strand to SEQ ID NO: 88196
uugggacacacuuaagcuu

SEQ ID NO: 88278 - RNA, 19 nt, Artificial Sequence
  Description of Artificial Sequence: Synthetic oligonucleotide
  Sense strand starting at position 2753 of SEQ ID NO: 1108
auuauuuggugcuuaucua

SEQ ID NO: 88279 - RNA, 19 nt, Artificial Sequence
  Description of Artificial Sequence: Synthetic oligonucleotide
  Antisense strand to SEQ ID NO: 88198
uagauaagcaccaaauaau

SEQ ID NO: 88280 - RNA, 19 nt, Artificial Sequence
  Description of Artificial Sequence: Synthetic oligonucleotide
  Sense strand starting at position 2757 of SEQ ID NO: 1108
uuuggugcuuaucuaaacu

SEQ ID NO: 88281 - RNA, 19 nt, Artificial Sequence
  Description of Artificial Sequence: Synthetic oligonucleotide
  Antisense strand to SEQ ID NO: 88200
aguuuagauaagcaccaaa

SEQ ID NO: 88282 - RNA, 19 nt, Artificial Sequence
  Description of Artificial Sequence: Synthetic oligonucleotide
  Sense strand starting at position 2829 of SEQ ID NO: 1108
uagagaugagguuguaugu

SEQ ID NO: 88283 - RNA, 19 nt, Artificial Sequence
  Description of Artificial Sequence: Synthetic oligonucleotide
  Antisense strand to SEQ ID NO: 88202
acauacaaccucaucucua

SEQ ID NO: 88284 - RNA, 19 nt, Artificial Sequence
  Description of Artificial Sequence: Synthetic oligonucleotide
  Sense strand starting at position 2941 of SEQ ID NO: 1108
uggccugcauccuuuauuu

SEQ ID NO: 88285 - RNA, 19 nt, Artificial Sequence
  Description of Artificial Sequence: Synthetic oligonucleotide
  Antisense strand to SEQ ID NO: 88204
aaauaaaggaugcaggcca

SEQ ID NO: 88286 - RNA, 19 nt, Artificial Sequence
  Description of Artificial Sequence: Synthetic oligonucleotide
  Sense strand starting at position 3296 of SEQ ID NO: 1108
ucuauuauuguagguuuga

SEQ ID NO: 88287 - RNA, 19 nt, Artificial Sequence
  Description of Artificial Sequence: Synthetic oligonucleotide
  Antisense strand to SEQ ID NO: 88206
ucaaaccuacaauaauaga

SEQ ID NO: 88288 - RNA, 19 nt, Artificial Sequence
  Description of Artificial Sequence: Synthetic oligonucleotide
  Sense strand starting at position 3297 of SEQ ID NO: 1108
cuauuauuguagguuugag

SEQ ID NO: 88289 - RNA, 19 nt, Artificial Sequence
  Description of Artificial Sequence: Synthetic oligonucleotide
  Antisense strand to SEQ ID NO: 88208
cucaaaccuacaauaauag

SEQ ID NO: 88290 - RNA, 19 nt, Artificial Sequence
  Description of Artificial Sequence: Synthetic oligonucleotide
  Sense strand starting at position 3309 of SEQ ID NO: 1108
guuugagacccagagccau

SEQ ID NO: 88291 - RNA, 19 nt, Artificial Sequence
  Description of Artificial Sequence: Synthetic oligonucleotide
  Antisense strand to SEQ ID NO: 88210
auggcucugggucucaaac

SEQ ID NO: 88292 - RNA, 19 nt, Artificial Sequence
  Description of Artificial Sequence: Synthetic oligonucleotide
  Sense strand starting at position 3331 of SEQ ID NO: 1108
acuguuggaucucuuguau

SEQ ID NO: 88293 - RNA, 19 nt, Artificial Sequence
  Description of Artificial Sequence: Synthetic oligonucleotide
  Antisense strand to SEQ ID NO: 88212
auacaagagauccaacagu

SEQ ID NO: 88294 - RNA, 19 nt, Artificial Sequence
  Description of Artificial Sequence: Synthetic oligonucleotide
  Sense strand starting at position 3443 of SEQ ID NO: 1108
aucucucuuguacaguaua

SEQ ID NO: 88295 - RNA, 19 nt, Artificial Sequence
  Description of Artificial Sequence: Synthetic oligonucleotide
  Antisense strand to SEQ ID NO: 88214
uauacuguacaagagagau

SEQ ID NO: 88296 - RNA, 19 nt, Artificial Sequence
  Description of Artificial Sequence: Synthetic oligonucleotide
  Sense strand starting at position 3446 of SEQ ID NO: 1108
ucucuuguacaguauagua

SEQ ID NO: 88297 - RNA, 19 nt, Artificial Sequence
  Description of Artificial Sequence: Synthetic oligonucleotide
  Antisense strand to SEQ ID NO: 88216
uacuauacuguacaagaga

SEQ ID NO: 88298 - RNA, 19 nt, Artificial Sequence
  Description of Artificial Sequence: Synthetic oligonucleotide
  Sense strand starting at position 3788 of SEQ ID NO: 1108
cuguaaucccauuacugag

SEQ ID NO: 88299 - RNA, 19 nt, Artificial Sequence
  Description of Artificial Sequence: Synthetic oligonucleotide
  Antisense strand to SEQ ID NO: 88218
cucaguaaugggauuacag

SEQ ID NO: 88300 - RNA, 19 nt, Artificial Sequence
  Description of Artificial Sequence: Synthetic oligonucleotide
  Sense strand starting at position 3807 of SEQ ID NO: 1109
ggaauugauucagcgcaag

SEQ ID NO: 88301 - RNA, 19 nt, Artificial Sequence
  Description of Artificial Sequence: Synthetic oligonucleotide
  Antisense strand to SEQ ID NO: 88220
cuugcgcugaaucaauucc

SEQ ID NO: 88302 - RNA, 19 nt, Artificial Sequence
  Description of Artificial Sequence: Synthetic oligonucleotide
  Sense strand starting at position 3767 of SEQ ID NO: 1109
ucaauaaacuggcugauau

SEQ ID NO: 88303 - RNA, 19 nt, Artificial Sequence
  Description of Artificial Sequence: Synthetic oligonucleotide
  Antisense strand to SEQ ID NO: 88222
auaucagccaguuuauuga

SEQ ID NO: 88304 - RNA, 19 nt, Artificial Sequence
  Description of Artificial Sequence: Synthetic oligonucleotide
  Sense strand starting at position 3559 of SEQ ID NO: 1109
gauuuagacugccuuugca

SEQ ID NO: 88305 - RNA, 19 nt, Artificial Sequence
  Description of Artificial Sequence: Synthetic oligonucleotide
  Antisense strand to SEQ ID NO: 88224
ugcaaaggcagucuaaauc

SEQ ID NO: 88306 - RNA, 19 nt, Artificial Sequence
  Description of Artificial Sequence: Synthetic oligonucleotide
  Sense strand starting at position 3412 of SEQ ID NO: 1109
caaagagaauucggucuuu

SEQ ID NO: 88307 - RNA, 19 nt, Artificial Sequence
  Description of Artificial Sequence: Synthetic oligonucleotide
  Antisense strand to SEQ ID NO: 88226
aaagaccgaauucucuuug

SEQ ID NO: 88308 - RNA, 19 nt, Artificial Sequence
  Description of Artificial Sequence: Synthetic oligonucleotide
  Sense strand starting at position 3367 of SEQ ID NO: 1109
gccucaauaucugguaguu

SEQ ID NO: 88309 - RNA, 19 nt, Artificial Sequence
  Description of Artificial Sequence: Synthetic oligonucleotide
  Antisense strand to SEQ ID NO: 88228
aacuaccagauauugaggc

SEQ ID NO: 88310 - RNA, 19 nt, Artificial Sequence
  Description of Artificial Sequence: Synthetic oligonucleotide
  Sense strand starting at position 3250 of SEQ ID NO: 1109
ggucuugcucucuaacaga

SEQ ID NO: 88311 - RNA, 19 nt, Artificial Sequence
  Description of Artificial Sequence: Synthetic oligonucleotide
  Antisense strand to SEQ ID NO: 88230
ucuguuagagagcaagacc

SEQ ID NO: 88312 - RNA, 19 nt, Artificial Sequence
  Description of Artificial Sequence: Synthetic oligonucleotide
  Sense strand starting at position 3249 of SEQ ID NO: 1109
gggucuugcucucuaacag

SEQ ID NO: 88313 - RNA, 19 nt, Artificial Sequence
  Description of Artificial Sequence: Synthetic oligonucleotide
  Antisense strand to SEQ ID NO: 88232
cuguuagagagcaagaccc

SEQ ID NO: 88314 - RNA, 19 nt, Artificial Sequence
  Description of Artificial Sequence: Synthetic oligonucleotide
  Sense strand starting at position 2638 of SEQ ID NO: 1109
gacagucucuguugccaca

SEQ ID NO: 88315 - RNA, 19 nt, Artificial Sequence
  Description of Artificial Sequence: Synthetic oligonucleotide
  Antisense strand to SEQ ID NO: 88234
uguggcaacagagacuguc

SEQ ID NO: 88316 - RNA, 19 nt, Artificial Sequence
  Description of Artificial Sequence: Synthetic oligonucleotide
  Sense strand starting at position 2573 of SEQ ID NO: 1109
uguuuccucugcgaguuau

SEQ ID NO: 88317 - RNA, 19 nt, Artificial Sequence
  Description of Artificial Sequence: Synthetic oligonucleotide
  Antisense strand to SEQ ID NO: 88236
auaacucgcagaggaaaca

SEQ ID NO: 88318 - RNA, 19 nt, Artificial Sequence
  Description of Artificial Sequence: Synthetic oligonucleotide
  Sense strand starting at position 2572 of SEQ ID NO: 1109
cuguuuccucugcgaguua

SEQ ID NO: 88319 - RNA, 19 nt, Artificial Sequence
  Description of Artificial Sequence: Synthetic oligonucleotide
  Antisense strand to SEQ ID NO: 88238
uaacucgcagaggaaacag

SEQ ID NO: 88320 - RNA, 19 nt, Artificial Sequence
  Description of Artificial Sequence: Synthetic oligonucleotide
  Sense strand starting at position 2571 of SEQ ID NO: 1109
gcuguuuccucugcgaguu

SEQ ID NO: 88321 - RNA, 19 nt, Artificial Sequence
  Description of Artificial Sequence: Synthetic oligonucleotide
  Antisense strand to SEQ ID NO: 88240
aacucgcagaggaaacagc

SEQ ID NO: 88322 - RNA, 19 nt, Artificial Sequence
  Description of Artificial Sequence: Synthetic oligonucleotide
  Sense strand starting at position 2570 of SEQ ID NO: 1109
ggcuguuuccucugcgagu

SEQ ID NO: 88323 - RNA, 19 nt, Artificial Sequence
  Description of Artificial Sequence: Synthetic oligonucleotide
  Antisense strand to SEQ ID NO: 88242
acucgcagaggaaacagcc

SEQ ID NO: 88324 - RNA, 19 nt, Artificial Sequence
  Description of Artificial Sequence: Synthetic oligonucleotide
  Sense strand starting at position 2427 of SEQ ID NO: 1109
cuuccuguuucgguuaaau

SEQ ID NO: 88325 - RNA, 19 nt, Artificial Sequence
  Description of Artificial Sequence: Synthetic oligonucleotide
  Antisense strand to SEQ ID NO: 88244
auuuaaccgaaacaggaag

SEQ ID NO: 88326 - RNA, 19 nt, Artificial Sequence
  Description of Artificial Sequence: Synthetic oligonucleotide
  Sense strand starting at position 2426 of SEQ ID NO: 1109
gcuuccuguuucgguuaaa

SEQ ID NO: 88327 - RNA, 19 nt, Artificial Sequence
  Description of Artificial Sequence: Synthetic oligonucleotide
  Antisense strand to SEQ ID NO: 88246
uuuaaccgaaacaggaagc

SEQ ID NO: 88328 - RNA, 19 nt, Artificial Sequence
  Description of Artificial Sequence: Synthetic oligonucleotide
  Sense strand starting at position 2425 of SEQ ID NO: 1109
ggcuuccuguuucgguuaa

SEQ ID NO: 88329 - RNA, 19 nt, Artificial Sequence
  Description of Artificial Sequence: Synthetic oligonucleotide
  Antisense strand to SEQ ID NO: 88248
uuaaccgaaacaggaagcc

SEQ ID NO: 88330 - RNA, 19 nt, Artificial Sequence
  Description of Artificial Sequence: Synthetic oligonucleotide
  Sense strand starting at position 1872 of SEQ ID NO: 1109
ccagccuuaccuggcgaaa

SEQ ID NO: 88331 - RNA, 19 nt, Artificial Sequence
  Description of Artificial Sequence: Synthetic oligonucleotide
  Antisense strand to SEQ ID NO: 88250
uuucgccagguaaggcugg

SEQ ID NO: 88332 - RNA, 19 nt, Artificial Sequence
  Description of Artificial Sequence: Synthetic oligonucleotide
  Sense strand starting at position 1434 of SEQ ID NO: 1109
agauaagucuuaggagagu

SEQ ID NO: 88333 - RNA, 19 nt, Artificial Sequence
  Description of Artificial Sequence: Synthetic oligonucleotide
  Antisense strand to SEQ ID NO: 88252
acucuccuaagacuuaucu

SEQ ID NO: 88334 - RNA, 19 nt, Artificial Sequence
  Description of Artificial Sequence: Synthetic oligonucleotide
  Sense strand starting at position 1432 of SEQ ID NO: 1109
auagauaagucuuaggaga

SEQ ID NO: 88335 - RNA, 19 nt, Artificial Sequence
  Description of Artificial Sequence: Synthetic oligonucleotide
  Antisense strand to SEQ ID NO: 88254
ucuccuaagacuuaucuau

SEQ ID NO: 88336 - RNA, 19 nt, Artificial Sequence
  Description of Artificial Sequence: Synthetic oligonucleotide
  Sense strand starting at position 673 of SEQ ID NO: 1109
gccuaacaaucggaggaaa

SEQ ID NO: 88337 - RNA, 19 nt, Artificial Sequence
  Description of Artificial Sequence: Synthetic oligonucleotide
  Antisense strand to SEQ ID NO: 88256
uuuccuccgauuguuaggc

SEQ ID NO: 88338 - RNA, 19 nt, Artificial Sequence
  Description of Artificial Sequence: Synthetic oligonucleotide
  Sense strand starting at position 672 of SEQ ID NO: 1109
ugccuaacaaucggaggaa

SEQ ID NO: 88339 - RNA, 19 nt, Artificial Sequence
  Description of Artificial Sequence: Synthetic oligonucleotide
  Antisense strand to SEQ ID NO: 88258
uuccuccgauuguuaggca

SEQ ID NO: 88340 - RNA, 19 nt, Artificial Sequence
  Description of Artificial Sequence: Synthetic oligonucleotide
  Sense strand starting at position 595 of SEQ ID NO: 1109
uuucuucuuugugagaguu

SEQ ID NO: 88341 - RNA, 19 nt, Artificial Sequence
  Description of Artificial Sequence: Synthetic oligonucleotide
  Antisense strand to SEQ ID NO: 88260
aacucucacaaagaagaaa

SEQ ID NO: 88342 - RNA, 19 nt, Artificial Sequence
  Description of Artificial Sequence: Synthetic oligonucleotide
  Sense strand starting at position 594 of SEQ ID NO: 1109
guuucuucuuugugagagu

SEQ ID NO: 88343 - RNA, 19 nt, Artificial Sequence
  Description of Artificial Sequence: Synthetic oligonucleotide
  Antisense strand to SEQ ID NO: 88262
acucucacaaagaagaaac

SEQ ID NO: 88344 - RNA, 19 nt, Artificial Sequence
  Description of Artificial Sequence: Synthetic oligonucleotide
  Sense strand starting at position 593 of SEQ ID NO: 1109
gguuucuucuuugugagag

SEQ ID NO: 88345 - RNA, 19 nt, Artificial Sequence
  Description of Artificial Sequence: Synthetic oligonucleotide
  Antisense strand to SEQ ID NO: 88264
cucucacaaagaagaaacc

SEQ ID NO: 88346 - RNA, 19 nt, Artificial Sequence
  Description of Artificial Sequence: Synthetic oligonucleotide
  Sense strand starting at position 592 of SEQ ID NO: 1109
ugguuucuucuuugugaga

SEQ ID NO: 88347 - RNA, 19 nt, Artificial Sequence
  Description of Artificial Sequence: Synthetic oligonucleotide
  Antisense strand to SEQ ID NO: 88266
ucucacaaagaagaaacca

SEQ ID NO: 88348 - RNA, 19 nt, Artificial Sequence
  Description of Artificial Sequence: Synthetic oligonucleotide
  Sense strand starting at position 590 of SEQ ID NO: 1109
aaugguuucuucuuuguga

SEQ ID NO: 88349 - RNA, 19 nt, Artificial Sequence
  Description of Artificial Sequence: Synthetic oligonucleotide
  Antisense strand to SEQ ID NO: 88268
ucacaaagaagaaaccauu

SEQ ID NO: 88350 - RNA, 19 nt, Artificial Sequence
  Description of Artificial Sequence: Synthetic oligonucleotide
  Sense strand starting at position 587 of SEQ ID NO: 1109
gagaaugguuucuucuuug

SEQ ID NO: 88351 - RNA, 19 nt, Artificial Sequence
  Description of Artificial Sequence: Synthetic oligonucleotide
  Antisense strand to SEQ ID NO: 88270
caaagaagaaaccauucuc

SEQ ID NO: 88352 - RNA, 19 nt, Artificial Sequence
  Description of Artificial Sequence: Synthetic oligonucleotide
  Sense strand starting at position 466 of SEQ ID NO: 1109
augcauguguuugcuuaaa

SEQ ID NO: 88353 - RNA, 19 nt, Artificial Sequence
  Description of Artificial Sequence: Synthetic oligonucleotide
  Antisense strand to SEQ ID NO: 88272
uuuaagcaaacacaugcau

SEQ ID NO: 88354 - RNA, 19 nt, Artificial Sequence
  Description of Artificial Sequence: Synthetic oligonucleotide
  Sense strand starting at position 465 of SEQ ID NO: 1109
uaugcauguguuugcuuaa

SEQ ID NO: 88355 - RNA, 19 nt, Artificial Sequence
  Description of Artificial Sequence: Synthetic oligonucleotide
  Antisense strand to SEQ ID NO: 88274
uuaagcaaacacaugcaua

SEQ ID NO: 88356 - RNA, 19 nt, Artificial Sequence
  Description of Artificial Sequence: Synthetic oligonucleotide
  Sense strand starting at position 464 of SEQ ID NO: 1109
cuaugcauguguuugcuua

SEQ ID NO: 88357 - RNA, 19 nt, Artificial Sequence
  Description of Artificial Sequence: Synthetic oligonucleotide
  Antisense strand to SEQ ID NO: 88276
uaagcaaacacaugcauag

SEQ ID NO: 88358 - RNA, 19 nt, Artificial Sequence
  Description of Artificial Sequence: Synthetic oligonucleotide
  Sense strand starting at position 459 of SEQ ID NO: 1109
cuuaucuaugcauguguuu

SEQ ID NO: 88359 - RNA, 19 nt, Artificial Sequence
  Description of Artificial Sequence: Synthetic oligonucleotide
  Antisense strand to SEQ ID NO: 88278
aaacacaugcauagauaag

SEQ ID NO: 88360 - RNA, 19 nt, Artificial Sequence
  Description of Artificial Sequence: Synthetic oligonucleotide
  Sense strand starting at position 455 of SEQ ID NO: 1109
agcacuuaucuaugcaugu

SEQ ID NO: 88361 - RNA, 19 nt, Artificial Sequence
  Description of Artificial Sequence: Synthetic oligonucleotide
  Antisense strand to SEQ ID NO: 88280
acaugcauagauaagugcu

SEQ ID NO: 88362 - RNA, 19 nt, Artificial Sequence
  Description of Artificial Sequence: Synthetic oligonucleotide
  Sense strand starting at position 394 of SEQ ID NO: 1109
accaaaguuuaagguuuau

SEQ ID NO: 88363 - RNA, 19 nt, Artificial Sequence
  Description of Artificial Sequence: Synthetic oligonucleotide
  Antisense strand to SEQ ID NO: 88282
auaaaccuuaaacuuuggu

SEQ ID NO: 88364 - RNA, 19 nt, Artificial Sequence
  Description of Artificial Sequence: Synthetic oligonucleotide
  Sense strand starting at position 357 of SEQ ID NO: 1109
gugccuuggugccuagaau

SEQ ID NO: 88365 - RNA, 19 nt, Artificial Sequence
  Description of Artificial Sequence: Synthetic oligonucleotide
  Antisense strand to SEQ ID NO: 88284
auucuaggcaccaaggcac

SEQ ID NO: 88366 - RNA, 19 nt, Artificial Sequence
  Description of Artificial Sequence: Synthetic oligonucleotide
  Sense strand starting at position 124 of SEQ ID NO: 1110
accugcugucguccugauu

SEQ ID NO: 88367 - RNA, 19 nt, Artificial Sequence
  Description of Artificial Sequence: Synthetic oligonucleotide
  Antisense strand to SEQ ID NO: 88286
aaucaggacgacagcaggu

SEQ ID NO: 88368 - RNA, 19 nt, Artificial Sequence
  Description of Artificial Sequence: Synthetic oligonucleotide
  Sense strand starting at position 125 of SEQ ID NO: 1110
ccugcugucguccugauua

SEQ ID NO: 88369 - RNA, 19 nt, Artificial Sequence
  Description of Artificial Sequence: Synthetic oligonucleotide
  Antisense strand to SEQ ID NO: 88288
uaaucaggacgacagcagg

SEQ ID NO: 88370 - RNA, 19 nt, Artificial Sequence
  Description of Artificial Sequence: Synthetic oligonucleotide
  Sense strand starting at position 319 of SEQ ID NO: 1110
ggauucaggcugugauauc

SEQ ID NO: 88371 - RNA, 19 nt, Artificial Sequence
  Description of Artificial Sequence: Synthetic oligonucleotide
  Antisense strand to SEQ ID NO: 88290
gauaucacagccugaaucc

SEQ ID NO: 88372 - RNA, 19 nt, Artificial Sequence
  Description of Artificial Sequence: Synthetic oligonucleotide
  Sense strand starting at position 328 of SEQ ID NO: 1110
cugugauaucaucacagca

SEQ ID NO: 88373 - RNA, 19 nt, Artificial Sequence
  Description of Artificial Sequence: Synthetic oligonucleotide
  Antisense strand to SEQ ID NO: 88292
ugcugugaugauaucacag

SEQ ID NO: 88374 - RNA, 19 nt, Artificial Sequence
  Description of Artificial Sequence: Synthetic oligonucleotide
  Sense strand starting at position 395 of SEQ ID NO: 1110
gagcauccuccaggacuau

SEQ ID NO: 88375 - RNA, 19 nt, Artificial Sequence
  Description of Artificial Sequence: Synthetic oligonucleotide
  Antisense strand to SEQ ID NO: 88294
auaguccuggaggaugcuc

SEQ ID NO: 88376 - RNA, 19 nt, Artificial Sequence
  Description of Artificial Sequence: Synthetic oligonucleotide
  Sense strand starting at position 396 of SEQ ID NO: 1110
agcauccuccaggacuauu

SEQ ID NO: 88377 - RNA, 19 nt, Artificial Sequence
  Description of Artificial Sequence: Synthetic oligonucleotide
  Antisense strand to SEQ ID NO: 88296
aauaguccuggaggaugcu

SEQ ID NO: 88378 - RNA, 19 nt, Artificial Sequence
  Description of Artificial Sequence: Synthetic oligonucleotide
  Sense strand starting at position 499 of SEQ ID NO: 1110
auaaauucuugagacagag

SEQ ID NO: 88379 - RNA, 19 nt, Artificial Sequence
  Description of Artificial Sequence: Synthetic oligonucleotide
  Antisense strand to SEQ ID NO: 88298
cucugucucaagaauuuau

SEQ ID NO: 88380 - RNA, 19 nt, Artificial Sequence
  Description of Artificial Sequence: Synthetic oligonucleotide
  Sense strand starting at position 898 of SEQ ID NO: 1110
gcgaccuuucuaggcuaaa

SEQ ID NO: 88381 - RNA, 19 nt, Artificial Sequence
  Description of Artificial Sequence: Synthetic oligonucleotide
  Antisense strand to SEQ ID NO: 88300
uuuagccuagaaaggucgc

SEQ ID NO: 88382 - RNA, 19 nt, Artificial Sequence
  Description of Artificial Sequence: Synthetic oligonucleotide
  Sense strand starting at position 899 of SEQ ID NO: 1110
cgaccuuucuaggcuaaac

SEQ ID NO: 88383 - RNA, 19 nt, Artificial Sequence
  Description of Artificial Sequence: Synthetic oligonucleotide
  Antisense strand to SEQ ID NO: 88302
guuuagccuagaaaggucg

SEQ ID NO: 88384 - RNA, 19 nt, Artificial Sequence
  Description of Artificial Sequence: Synthetic oligonucleotide
  Sense strand starting at position 953 of SEQ ID NO: 1110
uguggacaggucugggaua

SEQ ID NO: 88385 - RNA, 19 nt, Artificial Sequence
  Description of Artificial Sequence: Synthetic oligonucleotide
  Antisense strand to SEQ ID NO: 88304
uaucccagaccuguccaca

SEQ ID NO: 88386 - RNA, 19 nt, Artificial Sequence
  Description of Artificial Sequence: Synthetic oligonucleotide
  Sense strand starting at position 1099 of SEQ ID NO: 1110
acagaaucaugggaaauaa

SEQ ID NO: 88387 - RNA, 19 nt, Artificial Sequence
  Description of Artificial Sequence: Synthetic oligonucleotide
  Antisense strand to SEQ ID NO: 88306
uuauuucccaugauucugu

SEQ ID NO: 88388 - RNA, 19 nt, Artificial Sequence
  Description of Artificial Sequence: Synthetic oligonucleotide
  Sense strand starting at position 1109 of SEQ ID NO: 1110
gggaaauaaucacuugcuu

SEQ ID NO: 88389 - RNA, 19 nt, Artificial Sequence
  Description of Artificial Sequence: Synthetic oligonucleotide
  Antisense strand to SEQ ID NO: 88308
aagcaagugauuauuuccc

SEQ ID NO: 88390 - RNA, 19 nt, Artificial Sequence
  Description of Artificial Sequence: Synthetic oligonucleotide
  Sense strand starting at position 1117 of SEQ ID NO: 1110
aucacuugcuuugucugaa

SEQ ID NO: 88391 - RNA, 19 nt, Artificial Sequence
  Description of Artificial Sequence: Synthetic oligonucleotide
  Antisense strand to SEQ ID NO: 88310
uucagacaaagcaagugau

SEQ ID NO: 88392 - RNA, 19 nt, Artificial Sequence
  Description of Artificial Sequence: Synthetic oligonucleotide
  Sense strand starting at position 1151 of SEQ ID NO: 1110
ggugguuuguuacuuaaca

SEQ ID NO: 88393 - RNA, 19 nt, Artificial Sequence
  Description of Artificial Sequence: Synthetic oligonucleotide
  Antisense strand to SEQ ID NO: 88312
uguuaaguaacaaaccacc

SEQ ID NO: 88394 - RNA, 19 nt, Artificial Sequence
  Description of Artificial Sequence: Synthetic oligonucleotide
  Sense strand starting at position 1152 of SEQ ID NO: 1110
gugguuuguuacuuaacaa

SEQ ID NO: 88395 - RNA, 19 nt, Artificial Sequence
  Description of Artificial Sequence: Synthetic oligonucleotide
  Antisense strand to SEQ ID NO: 88314
uuguuaaguaacaaaccac

SEQ ID NO: 88396 - RNA, 19 nt, Artificial Sequence
  Description of Artificial Sequence: Synthetic oligonucleotide
  Sense strand starting at position 1335 of SEQ ID NO: 1110
cugcuuuaauuggcaaaca

SEQ ID NO: 88397 - RNA, 19 nt, Artificial Sequence
  Description of Artificial Sequence: Synthetic oligonucleotide
  Antisense strand to SEQ ID NO: 88316
uguuugccaauuaaagcag

SEQ ID NO: 88398 - RNA, 19 nt, Artificial Sequence
  Description of Artificial Sequence: Synthetic oligonucleotide
  Sense strand starting at position 1356 of SEQ ID NO: 1110
gggccugguaguuaucacu

SEQ ID NO: 88399 - RNA, 19 nt, Artificial Sequence
  Description of Artificial Sequence: Synthetic oligonucleotide
  Antisense strand to SEQ ID NO: 88318
agugauaacuaccaggccc

SEQ ID NO: 88400 - RNA, 19 nt, Artificial Sequence
  Description of Artificial Sequence: Synthetic oligonucleotide
  Sense strand starting at position 1455 of SEQ ID NO: 1110
accugugaguuguuccuau

SEQ ID NO: 88401 - RNA, 19 nt, Artificial Sequence
  Description of Artificial Sequence: Synthetic oligonucleotide
  Antisense strand to SEQ ID NO: 88320
auaggaacaacucacaggu

SEQ ID NO: 88402 - RNA, 19 nt, Artificial Sequence
  Description of Artificial Sequence: Synthetic oligonucleotide
  Sense strand starting at position 1576 of SEQ ID NO: 1110
uuccuuugguguccuugaa

SEQ ID NO: 88403 - RNA, 19 nt, Artificial Sequence
  Description of Artificial Sequence: Synthetic oligonucleotide
  Antisense strand to SEQ ID NO: 88322
uucaaggacaccaaaggaa

SEQ ID NO: 88404 - RNA, 19 nt, Artificial Sequence
  Description of Artificial Sequence: Synthetic oligonucleotide
  Sense strand starting at position 1738 of SEQ ID NO: 1110
cagagcuucugagucuaaa

SEQ ID NO: 88405 - RNA, 19 nt, Artificial Sequence
  Description of Artificial Sequence: Synthetic oligonucleotide
  Antisense strand to SEQ ID NO: 88324
uuuagacucagaagcucug

SEQ ID NO: 88406 - RNA, 19 nt, Artificial Sequence
  Description of Artificial Sequence: Synthetic oligonucleotide
  Sense strand starting at position 1741 of SEQ ID NO: 1110
agcuucugagucuaaaucu

SEQ ID NO: 88407 - RNA, 19 nt, Artificial Sequence
  Description of Artificial Sequence: Synthetic oligonucleotide
  Antisense strand to SEQ ID NO: 88326
agauuuagacucagaagcu

SEQ ID NO: 88408 - RNA, 19 nt, Artificial Sequence
  Description of Artificial Sequence: Synthetic oligonucleotide
  Sense strand starting at position 2071 of SEQ ID NO: 1110
ccuccuaggccucaaguua

SEQ ID NO: 88409 - RNA, 19 nt, Artificial Sequence
  Description of Artificial Sequence: Synthetic oligonucleotide
  Antisense strand to SEQ ID NO: 88328
uaacuugaggccuaggagg

SEQ ID NO: 88410 - RNA, 19 nt, Artificial Sequence
  Description of Artificial Sequence: Synthetic oligonucleotide
  Sense strand starting at position 2082 of SEQ ID NO: 1110
ucaaguuagccagacauca

SEQ ID NO: 88411 - RNA, 19 nt, Artificial Sequence
  Description of Artificial Sequence: Synthetic oligonucleotide
  Antisense strand to SEQ ID NO: 88330
ugaugucuggcuaacuuga

SEQ ID NO: 88412 - RNA, 19 nt, Artificial Sequence
  Description of Artificial Sequence: Synthetic oligonucleotide
  Sense strand starting at position 2105 of SEQ ID NO: 1110
agcccacagcuuuggauaa

SEQ ID NO: 88413 - RNA, 19 nt, Artificial Sequence
  Description of Artificial Sequence: Synthetic oligonucleotide
  Antisense strand to SEQ ID NO: 88332
uuauccaaagcugugggcu

SEQ ID NO: 88414 - RNA, 19 nt, Artificial Sequence
  Description of Artificial Sequence: Synthetic oligonucleotide
  Sense strand starting at position 2271 of SEQ ID NO: 1110
ccaggaagcuuuccucaac

SEQ ID NO: 88415 - RNA, 19 nt, Artificial Sequence
  Description of Artificial Sequence: Synthetic oligonucleotide
  Antisense strand to SEQ ID NO: 88334
guugaggaaagcuuccugg

SEQ ID NO: 88416 - RNA, 19 nt, Artificial Sequence
  Description of Artificial Sequence: Synthetic oligonucleotide
  Sense strand starting at position 2274 of SEQ ID NO: 1110
ggaagcuuuccucaacucu

SEQ ID NO: 88417 - RNA, 19 nt, Artificial Sequence
  Description of Artificial Sequence: Synthetic oligonucleotide
  Antisense strand to SEQ ID NO: 88336
agaguugaggaaagcuucc

SEQ ID NO: 88418 - RNA, 19 nt, Artificial Sequence
  Description of Artificial Sequence: Synthetic oligonucleotide
  Sense strand starting at position 2285 of SEQ ID NO: 1110
ucaacucuccuguauuagu

SEQ ID NO: 88419 - RNA, 19 nt, Artificial Sequence
  Description of Artificial Sequence: Synthetic oligonucleotide
  Antisense strand to SEQ ID NO: 88338
acuaauacaggagaguuga

SEQ ID NO: 88420 - RNA, 19 nt, Artificial Sequence
  Description of Artificial Sequence: Synthetic oligonucleotide
  Sense strand starting at position 2531 of SEQ ID NO: 1110
acugcuaauggcuaugagu

SEQ ID NO: 88421 - RNA, 19 nt, Artificial Sequence
  Description of Artificial Sequence: Synthetic oligonucleotide
  Antisense strand to SEQ ID NO: 88340
acucauagccauuagcagu

SEQ ID NO: 88422 - RNA, 19 nt, Artificial Sequence
  Description of Artificial Sequence: Synthetic oligonucleotide
  Sense strand starting at position 2533 of SEQ ID NO: 1110
ugcuaauggcuaugaguuu

SEQ ID NO: 88423 - RNA, 19 nt, Artificial Sequence
  Description of Artificial Sequence: Synthetic oligonucleotide
  Antisense strand to SEQ ID NO: 88342
aaacucauagccauuagca

SEQ ID NO: 88424 - RNA, 19 nt, Artificial Sequence
  Description of Artificial Sequence: Synthetic oligonucleotide
  Sense strand starting at position 2589 of SEQ ID NO: 1110
gugcuaauggcacaaucuu

SEQ ID NO: 88425 - RNA, 19 nt, Artificial Sequence
  Description of Artificial Sequence: Synthetic oligonucleotide
  Antisense strand to SEQ ID NO: 88344
aagauugugccauuagcac

SEQ ID NO: 88426 - RNA, 19 nt, Artificial Sequence
  Description of Artificial Sequence: Synthetic oligonucleotide
  Sense strand starting at position 2615 of SEQ ID NO: 1110
ugcuauaaccacugaauug

SEQ ID NO: 88427 - RNA, 19 nt, Artificial Sequence
  Description of Artificial Sequence: Synthetic oligonucleotide
  Antisense strand to SEQ ID NO: 88346
caauucagugguuauagca

SEQ ID NO: 88428 - RNA, 19 nt, Artificial Sequence
  Description of Artificial Sequence: Synthetic oligonucleotide
  Sense strand starting at position 2637 of SEQ ID NO: 1110
acuuaacaauggugaauuu

SEQ ID NO: 88429 - RNA, 19 nt, Artificial Sequence
  Description of Artificial Sequence: Synthetic oligonucleotide
  Antisense strand to SEQ ID NO: 88348
aaauucaccauuguuaagu

SEQ ID NO: 88430 - RNA, 19 nt, Artificial Sequence
  Description of Artificial Sequence: Synthetic oligonucleotide
  Sense strand starting at position 2815 of SEQ ID NO: 1110
ggcacugagccagauauug

SEQ ID NO: 88431 - RNA, 19 nt, Artificial Sequence
  Description of Artificial Sequence: Synthetic oligonucleotide
  Antisense strand to SEQ ID NO: 88350
caauaucuggcucagugcc

SEQ ID NO: 88432 - RNA, 19 nt, Artificial Sequence
  Description of Artificial Sequence: Synthetic oligonucleotide
  Sense strand starting at position 2834 of SEQ ID NO: 1110
aggauauacugaugaacag

SEQ ID NO: 88433 - RNA, 19 nt, Artificial Sequence
  Description of Artificial Sequence: Synthetic oligonucleotide
  Antisense strand to SEQ ID NO: 88352
cuguucaucaguauauccu

SEQ ID NO: 88434 - RNA, 19 nt, Artificial Sequence
  Description of Artificial Sequence: Synthetic oligonucleotide
  Sense strand starting at position 2893 of SEQ ID NO: 1110
cgaggagauggguguuaac

SEQ ID NO: 88435 - RNA, 19 nt, Artificial Sequence
  Description of Artificial Sequence: Synthetic oligonucleotide
  Antisense strand to SEQ ID NO: 88354
guuaacacccaucuccucg

SEQ ID NO: 88436 - RNA, 19 nt, Artificial Sequence
  Description of Artificial Sequence: Synthetic oligonucleotide
  Sense strand starting at position 2976 of SEQ ID NO: 1110
guccuacaaacgugguauu

SEQ ID NO: 88437 - RNA, 19 nt, Artificial Sequence
  Description of Artificial Sequence: Synthetic oligonucleotide
  Antisense strand to SEQ ID NO: 88356
aauaccacguuuguaggac

SEQ ID NO: 88438 - RNA, 19 nt, Artificial Sequence
  Description of Artificial Sequence: Synthetic oligonucleotide
  Sense strand starting at position 3039 of SEQ ID NO: 1110
aguggugaguuaccaaaug

SEQ ID NO: 88439 - RNA, 19 nt, Artificial Sequence
  Description of Artificial Sequence: Synthetic oligonucleotide
  Antisense strand to SEQ ID NO: 88358
cauuugguaacucaccacu

SEQ ID NO: 88440 - RNA, 19 nt, Artificial Sequence
  Description of Artificial Sequence: Synthetic oligonucleotide
  Sense strand starting at position 3047 of SEQ ID NO: 1110
guuaccaaaugagaaauga

SEQ ID NO: 88441 - RNA, 19 nt, Artificial Sequence
  Description of Artificial Sequence: Synthetic oligonucleotide
  Antisense strand to SEQ ID NO: 88360
ucauuucucauuugguaac

SEQ ID NO: 88442 - RNA, 19 nt, Artificial Sequence
  Description of Artificial Sequence: Synthetic oligonucleotide
  Sense strand starting at position 3140 of SEQ ID NO: 1110
guggacaaauucccugaaa

SEQ ID NO: 88443 - RNA, 19 nt, Artificial Sequence
  Description of Artificial Sequence: Synthetic oligonucleotide
  Antisense strand to SEQ ID NO: 88362
uuucagggaauuuguccac

SEQ ID NO: 88444 - RNA, 19 nt, Artificial Sequence
  Description of Artificial Sequence: Synthetic oligonucleotide
  Sense strand starting at position 3649 of SEQ ID NO: 1110
uaaacauuggcugggugaa

SEQ ID NO: 88445 - RNA, 19 nt, Artificial Sequence
  Description of Artificial Sequence: Synthetic oligonucleotide
  Antisense strand to SEQ ID NO: 88364
uucacccagccaauguuua

SEQ ID NO: 88446 - RNA, 19 nt, Artificial Sequence
  Description of Artificial Sequence: Synthetic oligonucleotide
  Sense strand starting at position 98 of SEQ ID NO: 1111
gagugucugguuuguauuu

SEQ ID NO: 88447 - RNA, 19 nt, Artificial Sequence
  Description of Artificial Sequence: Synthetic oligonucleotide
  Antisense strand to SEQ ID NO: 88366
aaauacaaaccagacacuc

SEQ ID NO: 88448 - RNA, 19 nt, Artificial Sequence
  Description of Artificial Sequence: Synthetic oligonucleotide
  Sense strand starting at position 593 of SEQ ID NO: 1111
agaggcuaagccugagaca

SEQ ID NO: 88449 - RNA, 19 nt, Artificial Sequence
  Description of Artificial Sequence: Synthetic oligonucleotide
  Antisense strand to SEQ ID NO: 88368
ugucucaggcuuagccucu

SEQ ID NO: 88450 - RNA, 19 nt, Artificial Sequence
  Description of Artificial Sequence: Synthetic oligonucleotide
  Sense strand starting at position 750 of SEQ ID NO: 1111
cagagauagcccuggcuca

SEQ ID NO: 88451 - RNA, 19 nt, Artificial Sequence
  Description of Artificial Sequence: Synthetic oligonucleotide
  Antisense strand to SEQ ID NO: 88370
ugagccagggcuaucucug

SEQ ID NO: 88452 - RNA, 19 nt, Artificial Sequence
  Description of Artificial Sequence: Synthetic oligonucleotide
  Sense strand starting at position 802 of SEQ ID NO: 1111
gagcuaagaggcuaauauc

SEQ ID NO: 88453 - RNA, 19 nt, Artificial Sequence
  Description of Artificial Sequence: Synthetic oligonucleotide
  Antisense strand to SEQ ID NO: 88372
gauauuagccucuuagcuc

SEQ ID NO: 88454 - RNA, 19 nt, Artificial Sequence
  Description of Artificial Sequence: Synthetic oligonucleotide
  Sense strand starting at position 816 of SEQ ID NO: 1111
auaucuaccuggcuagaaa

SEQ ID NO: 88455 - RNA, 19 nt, Artificial Sequence
  Description of Artificial Sequence: Synthetic oligonucleotide
  Antisense strand to SEQ ID NO: 88374
uuucuagccagguagauau

SEQ ID NO: 88456 - RNA, 19 nt, Artificial Sequence
  Description of Artificial Sequence: Synthetic oligonucleotide
  Sense strand starting at position 981 of SEQ ID NO: 1111
aagagaagucgcuagaggu

SEQ ID NO: 88457 - RNA, 19 nt, Artificial Sequence
  Description of Artificial Sequence: Synthetic oligonucleotide
  Antisense strand to SEQ ID NO: 88376
accucuagcgacuucucuu

SEQ ID NO: 88458 - RNA, 19 nt, Artificial Sequence
  Description of Artificial Sequence: Synthetic oligonucleotide
  Sense strand starting at position 988 of SEQ ID NO: 1111
gucgcuagaggucaccaau

SEQ ID NO: 88459 - RNA, 19 nt, Artificial Sequence
  Description of Artificial Sequence: Synthetic oligonucleotide
  Antisense strand to SEQ ID NO: 88378
auuggugaccucuagcgac

SEQ ID NO: 88460 - RNA, 19 nt, Artificial Sequence
  Description of Artificial Sequence: Synthetic oligonucleotide
  Sense strand starting at position 1110 of SEQ ID NO: 1111
uuaggagaccaguguacaa

SEQ ID NO: 88461 - RNA, 19 nt, Artificial Sequence
  Description of Artificial Sequence: Synthetic oligonucleotide
  Antisense strand to SEQ ID NO: 88380
uuguacacuggucuccuaa

SEQ ID NO: 88462 - RNA, 19 nt, Artificial Sequence
  Description of Artificial Sequence: Synthetic oligonucleotide
  Sense strand starting at position 1387 of SEQ ID NO: 1111
cuuggagguuacuccugaa

SEQ ID NO: 88463 - RNA, 19 nt, Artificial Sequence
  Description of Artificial Sequence: Synthetic oligonucleotide
  Antisense strand to SEQ ID NO: 88382
uucaggaguaaccuccaag

SEQ ID NO: 88464 - RNA, 19 nt, Artificial Sequence
  Description of Artificial Sequence: Synthetic oligonucleotide
  Sense strand starting at position 1934 of SEQ ID NO: 1111
cagacaaagccgcauugau

SEQ ID NO: 88465 - RNA, 19 nt, Artificial Sequence
  Description of Artificial Sequence: Synthetic oligonucleotide
  Antisense strand to SEQ ID NO: 88384
aucaaugcggcuuugucug

SEQ ID NO: 88466 - RNA, 19 nt, Artificial Sequence
  Description of Artificial Sequence: Synthetic oligonucleotide
  Sense strand starting at position 2367 of SEQ ID NO: 1111
agaugaaugaggcauugcu

SEQ ID NO: 88467 - RNA, 19 nt, Artificial Sequence
  Description of Artificial Sequence: Synthetic oligonucleotide
  Antisense strand to SEQ ID NO: 88386
agcaaugccucauucaucu

SEQ ID NO: 88468 - RNA, 19 nt, Artificial Sequence
  Description of Artificial Sequence: Synthetic oligonucleotide
  Sense strand starting at position 2530 of SEQ ID NO: 1111
aguggcaggguguauaaua

SEQ ID NO: 88469 - RNA, 19 nt, Artificial Sequence
  Description of Artificial Sequence: Synthetic oligonucleotide
  Antisense strand to SEQ ID NO: 88388
uauuauacacccugccacu

SEQ ID NO: 88470 - RNA, 19 nt, Artificial Sequence
  Description of Artificial Sequence: Synthetic oligonucleotide
  Sense strand starting at position 2697 of SEQ ID NO: 1111
ggugcuuucuauccaggaa

SEQ ID NO: 88471 - RNA, 19 nt, Artificial Sequence
  Description of Artificial Sequence: Synthetic oligonucleotide
  Antisense strand to SEQ ID NO: 88390
uuccuggauagaaagcacc

SEQ ID NO: 88472 - RNA, 19 nt, Artificial Sequence
  Description of Artificial Sequence: Synthetic oligonucleotide
  Sense strand starting at position 2700 of SEQ ID NO: 1111
gcuuucuauccaggaacca

SEQ ID NO: 88473 - RNA, 19 nt, Artificial Sequence
  Description of Artificial Sequence: Synthetic oligonucleotide
  Antisense strand to SEQ ID NO: 88392
ugguuccuggauagaaagc

SEQ ID NO: 88474 - RNA, 19 nt, Artificial Sequence
  Description of Artificial Sequence: Synthetic oligonucleotide
  Sense strand starting at position 2726 of SEQ ID NO: 1111
gugggcuugggcuaagaga

SEQ ID NO: 88475 - RNA, 19 nt, Artificial Sequence
  Description of Artificial Sequence: Synthetic oligonucleotide
  Antisense strand to SEQ ID NO: 88394
ucucuuagcccaagcccac

SEQ ID NO: 88476 - RNA, 19 nt, Artificial Sequence
  Description of Artificial Sequence: Synthetic oligonucleotide
  Sense strand starting at position 2765 of SEQ ID NO: 1111
ggaaucuuaucuucccuga

SEQ ID NO: 88477 - RNA, 19 nt, Artificial Sequence
  Description of Artificial Sequence: Synthetic oligonucleotide
  Antisense strand to SEQ ID NO: 88396
ucagggaagauaagauucc

SEQ ID NO: 88478 - RNA, 19 nt, Artificial Sequence
  Description of Artificial Sequence: Synthetic oligonucleotide
  Sense strand starting at position 2769 of SEQ ID NO: 1111
ucuuaucuucccugaugga

SEQ ID NO: 88479 - RNA, 19 nt, Artificial Sequence
  Description of Artificial Sequence: Synthetic oligonucleotide
  Antisense strand to SEQ ID NO: 88398
uccaucagggaagauaaga

SEQ ID NO: 88480 - RNA, 19 nt, Artificial Sequence
  Description of Artificial Sequence: Synthetic oligonucleotide
  Sense strand starting at position 2770 of SEQ ID NO: 1111
cuuaucuucccugauggau

SEQ ID NO: 88481 - RNA, 19 nt, Artificial Sequence
  Description of Artificial Sequence: Synthetic oligonucleotide
  Antisense strand to SEQ ID NO: 88400
auccaucagggaagauaag

SEQ ID NO: 88482 - RNA, 19 nt, Artificial Sequence
  Description of Artificial Sequence: Synthetic oligonucleotide
  Sense strand starting at position 2778 of SEQ ID NO: 1111
cccugauggaucugaacug

SEQ ID NO: 88483 - RNA, 19 nt, Artificial Sequence
  Description of Artificial Sequence: Synthetic oligonucleotide
  Antisense strand to SEQ ID NO: 88402
caguucagauccaucaggg

SEQ ID NO: 88484 - RNA, 19 nt, Artificial Sequence
  Description of Artificial Sequence: Synthetic oligonucleotide
  Sense strand starting at position 2970 of SEQ ID NO: 1111
cugagaucucacggcaaag

SEQ ID NO: 88485 - RNA, 19 nt, Artificial Sequence
  Description of Artificial Sequence: Synthetic oligonucleotide
  Antisense strand to SEQ ID NO: 88404
cuuugccgugagaucucag

SEQ ID NO: 88486 - RNA, 19 nt, Artificial Sequence
  Description of Artificial Sequence: Synthetic oligonucleotide
  Sense strand starting at position 3141 of SEQ ID NO: 1111
acacuugagcucugauucu

SEQ ID NO: 88487 - RNA, 19 nt, Artificial Sequence
  Description of Artificial Sequence: Synthetic oligonucleotide
  Antisense strand to SEQ ID NO: 88406
agaaucagagcucaagugu

SEQ ID NO: 88488 - RNA, 19 nt, Artificial Sequence
  Description of Artificial Sequence: Synthetic oligonucleotide
  Sense strand starting at position 3170 of SEQ ID NO: 1111
aacugugugacuugggaca

SEQ ID NO: 88489 - RNA, 19 nt, Artificial Sequence
  Description of Artificial Sequence: Synthetic oligonucleotide
  Antisense strand to SEQ ID NO: 88408
ugucccaagucacacaguu

SEQ ID NO: 88490 - RNA, 19 nt, Artificial Sequence
  Description of Artificial Sequence: Synthetic oligonucleotide
  Sense strand starting at position 3202 of SEQ ID NO: 1111
uccuuaucuguggagugga

SEQ ID NO: 88491 - RNA, 19 nt, Artificial Sequence
  Description of Artificial Sequence: Synthetic oligonucleotide
  Antisense strand to SEQ ID NO: 88410
uccacuccacagauaagga

SEQ ID NO: 88492 - RNA, 19 nt, Artificial Sequence
  Description of Artificial Sequence: Synthetic oligonucleotide
  Sense strand starting at position 3255 of SEQ ID NO: 1111
guggaaaucauaugaguuc

SEQ ID NO: 88493 - RNA, 19 nt, Artificial Sequence
  Description of Artificial Sequence: Synthetic oligonucleotide
  Antisense strand to SEQ ID NO: 88412
gaacucauaugauuuccac

SEQ ID NO: 88494 - RNA, 19 nt, Artificial Sequence
  Description of Artificial Sequence: Synthetic oligonucleotide
  Sense strand starting at position 3470 of SEQ ID NO: 1111
acugaauguucuucccaug

SEQ ID NO: 88495 - RNA, 19 nt, Artificial Sequence
  Description of Artificial Sequence: Synthetic oligonucleotide
  Antisense strand to SEQ ID NO: 88414
caugggaagaacauucagu

SEQ ID NO: 88496 - RNA, 19 nt, Artificial Sequence
  Description of Artificial Sequence: Synthetic oligonucleotide
  Sense strand starting at position 3637 of SEQ ID NO: 1111
gcccaaagacauggaaagu

SEQ ID NO: 88497 - RNA, 19 nt, Artificial Sequence
  Description of Artificial Sequence: Synthetic oligonucleotide
  Antisense strand to SEQ ID NO: 88416
acuuuccaugucuuugggc

SEQ ID NO: 88498 - RNA, 19 nt, Artificial Sequence
  Description of Artificial Sequence: Synthetic oligonucleotide
  Sense strand starting at position 3646 of SEQ ID NO: 1111
cauggaaaguuuguaugca

SEQ ID NO: 88499 - RNA, 19 nt, Artificial Sequence
  Description of Artificial Sequence: Synthetic oligonucleotide
  Antisense strand to SEQ ID NO: 88418
ugcauacaaacuuuccaug

SEQ ID NO: 88500 - RNA, 19 nt, Artificial Sequence
  Description of Artificial Sequence: Synthetic oligonucleotide
  Sense strand starting at position 3650 of SEQ ID NO: 1111
gaaaguuuguaugcagaca

SEQ ID NO: 88501 - RNA, 19 nt, Artificial Sequence
  Description of Artificial Sequence: Synthetic oligonucleotide
  Antisense strand to SEQ ID NO: 88420
ugucugcauacaaacuuuc

SEQ ID NO: 88502 - RNA, 19 nt, Artificial Sequence
  Description of Artificial Sequence: Synthetic oligonucleotide
  Sense strand starting at position 3699 of SEQ ID NO: 1111
auaugucaaugcccagaaa

SEQ ID NO: 88503 - RNA, 19 nt, Artificial Sequence
  Description of Artificial Sequence: Synthetic oligonucleotide
  Antisense strand to SEQ ID NO: 88422
uuucugggcauugacauau

SEQ ID NO: 88504 - RNA, 19 nt, Artificial Sequence
  Description of Artificial Sequence: Synthetic oligonucleotide
  Sense strand starting at position 3702 of SEQ ID NO: 1111
ugucaaugcccagaaaguu

SEQ ID NO: 88505 - RNA, 19 nt, Artificial Sequence
  Description of Artificial Sequence: Synthetic oligonucleotide
  Antisense strand to SEQ ID NO: 88424
aacuuucugggcauugaca

SEQ ID NO: 88506 - RNA, 19 nt, Artificial Sequence
  Description of Artificial Sequence: Synthetic oligonucleotide
  Sense strand starting at position 3710 of SEQ ID NO: 1111
cccagaaaguuccuugaga

SEQ ID NO: 88507 - RNA, 19 nt, Artificial Sequence
  Description of Artificial Sequence: Synthetic oligonucleotide
  Antisense strand to SEQ ID NO: 88426
ucucaaggaacuuucuggg

SEQ ID NO: 88508 - RNA, 19 nt, Artificial Sequence
  Description of Artificial Sequence: Synthetic oligonucleotide
  Sense strand starting at position 3711 of SEQ ID NO: 1111
ccagaaaguuccuugagau

SEQ ID NO: 88509 - RNA, 19 nt, Artificial Sequence
  Description of Artificial Sequence: Synthetic oligonucleotide
  Antisense strand to SEQ ID NO: 88428
aucucaaggaacuuucugg

SEQ ID NO: 88510 - RNA, 19 nt, Artificial Sequence
  Description of Artificial Sequence: Synthetic oligonucleotide
  Sense strand starting at position 3712 of SEQ ID NO: 1111
cagaaaguuccuugagauc

SEQ ID NO: 88511 - RNA, 19 nt, Artificial Sequence
  Description of Artificial Sequence: Synthetic oligonucleotide
  Antisense strand to SEQ ID NO: 88430
gaucucaaggaacuuucug

SEQ ID NO: 88512 - RNA, 19 nt, Artificial Sequence
  Description of Artificial Sequence: Synthetic oligonucleotide
  Sense strand starting at position 3725 of SEQ ID NO: 1111
gagaucagacacuguacau

SEQ ID NO: 88513 - RNA, 19 nt, Artificial Sequence
  Description of Artificial Sequence: Synthetic oligonucleotide
  Antisense strand to SEQ ID NO: 88432
auguacagugucugaucuc

SEQ ID NO: 88514 - RNA, 19 nt, Artificial Sequence
  Description of Artificial Sequence: Synthetic oligonucleotide
  Sense strand starting at position 3738 of SEQ ID NO: 1111
guacauuuaugggauacuu

SEQ ID NO: 88515 - RNA, 19 nt, Artificial Sequence
  Description of Artificial Sequence: Synthetic oligonucleotide
  Antisense strand to SEQ ID NO: 88434
aaguaucccauaaauguac

SEQ ID NO: 88516 - RNA, 19 nt, Artificial Sequence
  Description of Artificial Sequence: Synthetic oligonucleotide
  Sense strand starting at position 3746 of SEQ ID NO: 1111
augggauacuuucuaagug

SEQ ID NO: 88517 - RNA, 19 nt, Artificial Sequence
  Description of Artificial Sequence: Synthetic oligonucleotide
  Antisense strand to SEQ ID NO: 88436
cacuuagaaaguaucccau

SEQ ID NO: 88518 - RNA, 19 nt, Artificial Sequence
  Description of Artificial Sequence: Synthetic oligonucleotide
  Sense strand starting at position 3783 of SEQ ID NO: 1111
gcuggaucagugcauccau

SEQ ID NO: 88519 - RNA, 19 nt, Artificial Sequence
  Description of Artificial Sequence: Synthetic oligonucleotide
  Antisense strand to SEQ ID NO: 88438
auggaugcacugauccagc

SEQ ID NO: 88520 - RNA, 19 nt, Artificial Sequence
  Description of Artificial Sequence: Synthetic oligonucleotide
  Sense strand starting at position 3884 of SEQ ID NO: 1111
agaagucugccaugaagau

SEQ ID NO: 88521 - RNA, 19 nt, Artificial Sequence
  Description of Artificial Sequence: Synthetic oligonucleotide
  Antisense strand to SEQ ID NO: 88440
aucuucauggcagacuucu

SEQ ID NO: 88522 - RNA, 19 nt, Artificial Sequence
  Description of Artificial Sequence: Synthetic oligonucleotide
  Sense strand starting at position 3962 of SEQ ID NO: 1111
cagagcuccuuggcauaca

SEQ ID NO: 88523 - RNA, 19 nt, Artificial Sequence
  Description of Artificial Sequence: Synthetic oligonucleotide
  Antisense strand to SEQ ID NO: 88442
uguaugccaaggagcucug

SEQ ID NO: 88524 - RNA, 19 nt, Artificial Sequence
  Description of Artificial Sequence: Synthetic oligonucleotide
  Sense strand starting at position 3981 of SEQ ID NO: 1111
gcugcauuacuccaagauu

SEQ ID NO: 88525 - RNA, 19 nt, Artificial Sequence
  Description of Artificial Sequence: Synthetic oligonucleotide
  Antisense strand to SEQ ID NO: 88444
aaucuuggaguaaugcagc

SEQ ID NO: 88526 - RNA, 19 nt, Artificial Sequence
  Description of Artificial Sequence: Synthetic oligonucleotide
  Sense strand starting at position 14 of SEQ ID NO: 1112
gagccauuggcagaacauu

SEQ ID NO: 88527 - RNA, 19 nt, Artificial Sequence
  Description of Artificial Sequence: Synthetic oligonucleotide
  Antisense strand to SEQ ID NO: 88446
aauguucugccaauggcuc

SEQ ID NO: 88528 - RNA, 19 nt, Artificial Sequence
  Description of Artificial Sequence: Synthetic oligonucleotide
  Sense strand starting at position 144 of SEQ ID NO: 1112
cuggaaccagcuugagaaa

SEQ ID NO: 88529 - RNA, 19 nt, Artificial Sequence
  Description of Artificial Sequence: Synthetic oligonucleotide
  Antisense strand to SEQ ID NO: 88448
uuucucaagcugguuccag

SEQ ID NO: 88530 - RNA, 19 nt, Artificial Sequence
  Description of Artificial Sequence: Synthetic oligonucleotide
  Sense strand starting at position 201 of SEQ ID NO: 1112
ccacccucggcugagaaua

SEQ ID NO: 88531 - RNA, 19 nt, Artificial Sequence
  Description of Artificial Sequence: Synthetic oligonucleotide
  Antisense strand to SEQ ID NO: 88450
uauucucagccgagggugg

SEQ ID NO: 88532 - RNA, 19 nt, Artificial Sequence
  Description of Artificial Sequence: Synthetic oligonucleotide
  Sense strand starting at position 229 of SEQ ID NO: 1112
uugggagccuuuccagagu

SEQ ID NO: 88533 - RNA, 19 nt, Artificial Sequence
  Description of Artificial Sequence: Synthetic oligonucleotide
  Antisense strand to SEQ ID NO: 88452
acucuggaaaggcucccaa

SEQ ID NO: 88534 - RNA, 19 nt, Artificial Sequence
  Description of Artificial Sequence: Synthetic oligonucleotide
  Sense strand starting at position 498 of SEQ ID NO: 1112
ggaccuuuccuaggacaca

SEQ ID NO: 88535 - RNA, 19 nt, Artificial Sequence
  Description of Artificial Sequence: Synthetic oligonucleotide
  Antisense strand to SEQ ID NO: 88454
uguguccuaggaaaggucc

SEQ ID NO: 88536 - RNA, 19 nt, Artificial Sequence
  Description of Artificial Sequence: Synthetic oligonucleotide
  Sense strand starting at position 617 of SEQ ID NO: 1112
gguccugaucuaggacacu

SEQ ID NO: 88537 - RNA, 19 nt, Artificial Sequence
  Description of Artificial Sequence: Synthetic oligonucleotide
  Antisense strand to SEQ ID NO: 88456
aguguccuagaucaggacc

SEQ ID NO: 88538 - RNA, 19 nt, Artificial Sequence
  Description of Artificial Sequence: Synthetic oligonucleotide
  Sense strand starting at position 643 of SEQ ID NO: 1112
gcagauacauuuguagcuu

SEQ ID NO: 88539 - RNA, 19 nt, Artificial Sequence
  Description of Artificial Sequence: Synthetic oligonucleotide
  Antisense strand to SEQ ID NO: 88458
aagcuacaaauguaucugc

SEQ ID NO: 88540 - RNA, 19 nt, Artificial Sequence
  Description of Artificial Sequence: Synthetic oligonucleotide
  Sense strand starting at position 839 of SEQ ID NO: 1112
ggacccuuugcaggagaaa

SEQ ID NO: 88541 - RNA, 19 nt, Artificial Sequence
  Description of Artificial Sequence: Synthetic oligonucleotide
  Antisense strand to SEQ ID NO: 88460
uuucuccugcaaagggucc

SEQ ID NO: 88542 - RNA, 19 nt, Artificial Sequence
  Description of Artificial Sequence: Synthetic oligonucleotide
  Sense strand starting at position 948 of SEQ ID NO: 1112
gcccaaagugaaugaguca

SEQ ID NO: 88543 - RNA, 19 nt, Artificial Sequence
  Description of Artificial Sequence: Synthetic oligonucleotide
  Antisense strand to SEQ ID NO: 88462
ugacucauucacuuugggc

SEQ ID NO: 88544 - RNA, 19 nt, Artificial Sequence
  Description of Artificial Sequence: Synthetic oligonucleotide
  Sense strand starting at position 1057 of SEQ ID NO: 1112
cccacaauucugggaugca

SEQ ID NO: 88545 - RNA, 19 nt, Artificial Sequence
  Description of Artificial Sequence: Synthetic oligonucleotide
  Antisense strand to SEQ ID NO: 88464
ugcaucccagaauuguggg

SEQ ID NO: 88546 - RNA, 19 nt, Artificial Sequence
  Description of Artificial Sequence: Synthetic oligonucleotide
  Sense strand starting at position 1060 of SEQ ID NO: 1112
acaauucugggaugcaaca

SEQ ID NO: 88547 - RNA, 19 nt, Artificial Sequence
  Description of Artificial Sequence: Synthetic oligonucleotide
  Antisense strand to SEQ ID NO: 88466
uguugcaucccagaauugu

SEQ ID NO: 88548 - RNA, 19 nt, Artificial Sequence
  Description of Artificial Sequence: Synthetic oligonucleotide
  Sense strand starting at position 1079 of SEQ ID NO: 1112
gggagagauguauggcugu

SEQ ID NO: 88549 - RNA, 19 nt, Artificial Sequence
  Description of Artificial Sequence: Synthetic oligonucleotide
  Antisense strand to SEQ ID NO: 88468
acagccauacaucucuccc

SEQ ID NO: 88550 - RNA, 19 nt, Artificial Sequence
  Description of Artificial Sequence: Synthetic oligonucleotide
  Sense strand starting at position 1096 of SEQ ID NO: 1112
gucuuuaacaagugaguga

SEQ ID NO: 88551 - RNA, 19 nt, Artificial Sequence
  Description of Artificial Sequence: Synthetic oligonucleotide
  Antisense strand to SEQ ID NO: 88470
ucacucacuuguuaaagac

SEQ ID NO: 88552 - RNA, 19 nt, Artificial Sequence
  Description of Artificial Sequence: Synthetic oligonucleotide
  Sense strand starting at position 1109 of SEQ ID NO: 1112
gagugaggguuucuucuga

SEQ ID NO: 88553 - RNA, 19 nt, Artificial Sequence
  Description of Artificial Sequence: Synthetic oligonucleotide
  Antisense strand to SEQ ID NO: 88472
ucagaagaaacccucacuc

SEQ ID NO: 88554 - RNA, 19 nt, Artificial Sequence
  Description of Artificial Sequence: Synthetic oligonucleotide
  Sense strand starting at position 1265 of SEQ ID NO: 1112
gccugccuuguggaaacau

SEQ ID NO: 88555 - RNA, 19 nt, Artificial Sequence
  Description of Artificial Sequence: Synthetic oligonucleotide
  Antisense strand to SEQ ID NO: 88474
auguuuccacaaggcaggc

SEQ ID NO: 88556 - RNA, 19 nt, Artificial Sequence
  Description of Artificial Sequence: Synthetic oligonucleotide
  Sense strand starting at position 1708 of SEQ ID NO: 1112
cacugaggugcuuaucaaa

SEQ ID NO: 88557 - RNA, 19 nt, Artificial Sequence
  Description of Artificial Sequence: Synthetic oligonucleotide
  Antisense strand to SEQ ID NO: 88476
uuugauaagcaccucagug

SEQ ID NO: 88558 - RNA, 19 nt, Artificial Sequence
  Description of Artificial Sequence: Synthetic oligonucleotide
  Sense strand starting at position 1920 of SEQ ID NO: 1112
uccagaucgccugaaagcu

SEQ ID NO: 88559 - RNA, 19 nt, Artificial Sequence
  Description of Artificial Sequence: Synthetic oligonucleotide
  Antisense strand to SEQ ID NO: 88478
agcuuucaggcgaucugga

SEQ ID NO: 88560 - RNA, 19 nt, Artificial Sequence
  Description of Artificial Sequence: Synthetic oligonucleotide
  Sense strand starting at position 1929 of SEQ ID NO: 1112
ccugaaagcuccucuugaa

SEQ ID NO: 88561 - RNA, 19 nt, Artificial Sequence
  Description of Artificial Sequence: Synthetic oligonucleotide
  Antisense strand to SEQ ID NO: 88480
uucaagaggagcuuucagg

SEQ ID NO: 88562 - RNA, 19 nt, Artificial Sequence
  Description of Artificial Sequence: Synthetic oligonucleotide
  Sense strand starting at position 2142 of SEQ ID NO: 1112
uguagugagcuccacaaug

SEQ ID NO: 88563 - RNA, 19 nt, Artificial Sequence
  Description of Artificial Sequence: Synthetic oligonucleotide
  Antisense strand to SEQ ID NO: 88482
cauuguggagcucacuaca

SEQ ID NO: 88564 - RNA, 19 nt, Artificial Sequence
  Description of Artificial Sequence: Synthetic oligonucleotide
  Sense strand starting at position 2210 of SEQ ID NO: 1112
ggcacauguaagugaucau

SEQ ID NO: 88565 - RNA, 19 nt, Artificial Sequence
  Description of Artificial Sequence: Synthetic oligonucleotide
  Antisense strand to SEQ ID NO: 88484
augaucacuuacaugugcc

SEQ ID NO: 88566 - RNA, 19 nt, Artificial Sequence
  Description of Artificial Sequence: Synthetic oligonucleotide
  Sense strand starting at position 2213 of SEQ ID NO: 1112
acauguaagugaucaucag

SEQ ID NO: 88567 - RNA, 19 nt, Artificial Sequence
  Description of Artificial Sequence: Synthetic oligonucleotide
  Antisense strand to SEQ ID NO: 88486
cugaugaucacuuacaugu

SEQ ID NO: 88568 - RNA, 19 nt, Artificial Sequence
  Description of Artificial Sequence: Synthetic oligonucleotide
  Sense strand starting at position 2390 of SEQ ID NO: 1112
gaguuaaagcuccagacau

SEQ ID NO: 88569 - RNA, 19 nt, Artificial Sequence
  Description of Artificial Sequence: Synthetic oligonucleotide
  Antisense strand to SEQ ID NO: 88488
augucuggagcuuuaacuc

SEQ ID NO: 88570 - RNA, 19 nt, Artificial Sequence
  Description of Artificial Sequence: Synthetic oligonucleotide
  Sense strand starting at position 2392 of SEQ ID NO: 1112
guuaaagcuccagacauau

SEQ ID NO: 88571 - RNA, 19 nt, Artificial Sequence
  Description of Artificial Sequence: Synthetic oligonucleotide
  Antisense strand to SEQ ID NO: 88490
auaugucuggagcuuuaac

SEQ ID NO: 88572 - RNA, 19 nt, Artificial Sequence
  Description of Artificial Sequence: Synthetic oligonucleotide
  Sense strand starting at position 2787 of SEQ ID NO: 1112
ugaagcauagcuugacuga

SEQ ID NO: 88573 - RNA, 19 nt, Artificial Sequence
  Description of Artificial Sequence: Synthetic oligonucleotide
  Antisense strand to SEQ ID NO: 88492
ucagucaagcuaugcuuca

SEQ ID NO: 88574 - RNA, 19 nt, Artificial Sequence
  Description of Artificial Sequence: Synthetic oligonucleotide
  Sense strand starting at position 2790 of SEQ ID NO: 1112
agcauagcuugacugacaa

SEQ ID NO: 88575 - RNA, 19 nt, Artificial Sequence
  Description of Artificial Sequence: Synthetic oligonucleotide
  Antisense strand to SEQ ID NO: 88494
uugucagucaagcuaugcu

SEQ ID NO: 88576 - RNA, 19 nt, Artificial Sequence
  Description of Artificial Sequence: Synthetic oligonucleotide
  Sense strand starting at position 2927 of SEQ ID NO: 1112
uugagaggcuggucucaca

SEQ ID NO: 88577 - RNA, 19 nt, Artificial Sequence
  Description of Artificial Sequence: Synthetic oligonucleotide
  Antisense strand to SEQ ID NO: 88496
ugugagaccagccucucaa

SEQ ID NO: 88578 - RNA, 19 nt, Artificial Sequence
  Description of Artificial Sequence: Synthetic oligonucleotide
  Sense strand starting at position 3081 of SEQ ID NO: 1112
ggagcuucuuaacuacgau

SEQ ID NO: 88579 - RNA, 19 nt, Artificial Sequence
  Description of Artificial Sequence: Synthetic oligonucleotide
  Antisense strand to SEQ ID NO: 88498
aucguaguuaagaagcucc

SEQ ID NO: 88580 - RNA, 19 nt, Artificial Sequence
  Description of Artificial Sequence: Synthetic oligonucleotide
  Sense strand starting at position 3155 of SEQ ID NO: 1112
ccaagaaauuggcuugaag

SEQ ID NO: 88581 - RNA, 19 nt, Artificial Sequence
  Description of Artificial Sequence: Synthetic oligonucleotide
  Antisense strand to SEQ ID NO: 88500
cuucaagccaauuucuugg

SEQ ID NO: 88582 - RNA, 19 nt, Artificial Sequence
  Description of Artificial Sequence: Synthetic oligonucleotide
  Sense strand starting at position 3200 of SEQ ID NO: 1112
uguggauuaaauugggcau

SEQ ID NO: 88583 - RNA, 19 nt, Artificial Sequence
  Description of Artificial Sequence: Synthetic oligonucleotide
  Antisense strand to SEQ ID NO: 88502
augcccaauuuaauccaca

SEQ ID NO: 88584 - RNA, 19 nt, Artificial Sequence
  Description of Artificial Sequence: Synthetic oligonucleotide
  Sense strand starting at position 3201 of SEQ ID NO: 1112
guggauuaaauugggcauu

SEQ ID NO: 88585 - RNA, 19 nt, Artificial Sequence
  Description of Artificial Sequence: Synthetic oligonucleotide
  Antisense strand to SEQ ID NO: 88504
aaugcccaauuuaauccac

SEQ ID NO: 88586 - RNA, 19 nt, Artificial Sequence
  Description of Artificial Sequence: Synthetic oligonucleotide
  Sense strand starting at position 3234 of SEQ ID NO: 1112
ucgaauuaagcauaaguuc

SEQ ID NO: 88587 - RNA, 19 nt, Artificial Sequence
  Description of Artificial Sequence: Synthetic oligonucleotide
  Antisense strand to SEQ ID NO: 88506
gaacuuaugcuuaauucga

SEQ ID NO: 88588 - RNA, 19 nt, Artificial Sequence
  Description of Artificial Sequence: Synthetic oligonucleotide
  Sense strand starting at position 3265 of SEQ ID NO: 1112
gaaauaguguaauuagcaa

SEQ ID NO: 88589 - RNA, 19 nt, Artificial Sequence
  Description of Artificial Sequence: Synthetic oligonucleotide
  Antisense strand to SEQ ID NO: 88508
uugcuaauuacacuauuuc

SEQ ID NO: 88590 - RNA, 19 nt, Artificial Sequence
  Description of Artificial Sequence: Synthetic oligonucleotide
  Sense strand starting at position 3289 of SEQ ID NO: 1112
cagugaguuguugauguaa

SEQ ID NO: 88591 - RNA, 19 nt, Artificial Sequence
  Description of Artificial Sequence: Synthetic oligonucleotide
  Antisense strand to SEQ ID NO: 88510
uuacaucaacaacucacug

SEQ ID NO: 88592 - RNA, 19 nt, Artificial Sequence
  Description of Artificial Sequence: Synthetic oligonucleotide
  Sense strand starting at position 3305 of SEQ ID NO: 1112
uaaguugaugcauaauuga

SEQ ID NO: 88593 - RNA, 19 nt, Artificial Sequence
  Description of Artificial Sequence: Synthetic oligonucleotide
  Antisense strand to SEQ ID NO: 88512
ucaauuaugcaucaacuua

SEQ ID NO: 88594 - RNA, 19 nt, Artificial Sequence
  Description of Artificial Sequence: Synthetic oligonucleotide
  Sense strand starting at position 3320 of SEQ ID NO: 1112
uugauaguccaauaaaugu

SEQ ID NO: 88595 - RNA, 19 nt, Artificial Sequence
  Description of Artificial Sequence: Synthetic oligonucleotide
  Antisense strand to SEQ ID NO: 88514
acauuuauuggacuaucaa

SEQ ID NO: 88596 - RNA, 19 nt, Artificial Sequence
  Description of Artificial Sequence: Synthetic oligonucleotide
  Sense strand starting at position 3366 of SEQ ID NO: 1112
agugaaaucuagcucaacu

SEQ ID NO: 88597 - RNA, 19 nt, Artificial Sequence
  Description of Artificial Sequence: Synthetic oligonucleotide
  Antisense strand to SEQ ID NO: 88516
aguugagcuagauuucacu

SEQ ID NO: 88598 - RNA, 19 nt, Artificial Sequence
  Description of Artificial Sequence: Synthetic oligonucleotide
  Sense strand starting at position 3376 of SEQ ID NO: 1112
agcucaacucagcaaguaa

SEQ ID NO: 88599 - RNA, 19 nt, Artificial Sequence
  Description of Artificial Sequence: Synthetic oligonucleotide
  Antisense strand to SEQ ID NO: 88518
uuacuugcugaguugagcu

SEQ ID NO: 88600 - RNA, 19 nt, Artificial Sequence
  Description of Artificial Sequence: Synthetic oligonucleotide
  Sense strand starting at position 3388 of SEQ ID NO: 1112
caaguaaggucaguagaag

SEQ ID NO: 88601 - RNA, 19 nt, Artificial Sequence
  Description of Artificial Sequence: Synthetic oligonucleotide
  Antisense strand to SEQ ID NO: 88520
cuucuacugaccuuacuug

SEQ ID NO: 88602 - RNA, 19 nt, Artificial Sequence
  Description of Artificial Sequence: Synthetic oligonucleotide
  Sense strand starting at position 3450 of SEQ ID NO: 1112
cgagaaaggucagcucuga

SEQ ID NO: 88603 - RNA, 19 nt, Artificial Sequence
  Description of Artificial Sequence: Synthetic oligonucleotide
  Antisense strand to SEQ ID NO: 88522
ucagagcugaccuuucucg

SEQ ID NO: 88604 - RNA, 19 nt, Artificial Sequence
  Description of Artificial Sequence: Synthetic oligonucleotide
  Sense strand starting at position 3542 of SEQ ID NO: 1112
cagagcgcucaugaaacuu

SEQ ID NO: 88605 - RNA, 19 nt, Artificial Sequence
  Description of Artificial Sequence: Synthetic oligonucleotide
  Antisense strand to SEQ ID NO: 88524
aaguuucaugagcgcucug

SEQ ID NO: 88606 - RNA, 19 nt, Artificial Sequence
  Description of Artificial Sequence: Synthetic oligonucleotide
  Sense strand starting at position 53 of SEQ ID NO: 1113
agagacaaauuagaagaaa

SEQ ID NO: 88607 - RNA, 19 nt, Artificial Sequence
  Description of Artificial Sequence: Synthetic oligonucleotide
  Antisense strand to SEQ ID NO: 88526
uuucuucuaauuugucucu

SEQ ID NO: 88608 - RNA, 19 nt, Artificial Sequence
  Description of Artificial Sequence: Synthetic oligonucleotide
  Sense strand starting at position 103 of SEQ ID NO: 1113
uuagucauagcucaaagca

SEQ ID NO: 88609 - RNA, 19 nt, Artificial Sequence
  Description of Artificial Sequence: Synthetic oligonucleotide
  Antisense strand to SEQ ID NO: 88528
ugcuuugagcuaugacuaa

SEQ ID NO: 88610 - RNA, 19 nt, Artificial Sequence
  Description of Artificial Sequence: Synthetic oligonucleotide
  Sense strand starting at position 126 of SEQ ID NO: 1113
guuucuggauuugauccaa

SEQ ID NO: 88611 - RNA, 19 nt, Artificial Sequence
  Description of Artificial Sequence: Synthetic oligonucleotide
  Antisense strand to SEQ ID NO: 88530
uuggaucaaauccagaaac

SEQ ID NO: 88612 - RNA, 19 nt, Artificial Sequence
  Description of Artificial Sequence: Synthetic oligonucleotide
  Sense strand starting at position 168 of SEQ ID NO: 1113
gcuggauaagcucaaguca

SEQ ID NO: 88613 - RNA, 19 nt, Artificial Sequence
  Description of Artificial Sequence: Synthetic oligonucleotide
  Antisense strand to SEQ ID NO: 88532
ugacuugagcuuauccagc

SEQ ID NO: 88614 - RNA, 19 nt, Artificial Sequence
  Description of Artificial Sequence: Synthetic oligonucleotide
  Sense strand starting at position 302 of SEQ ID NO: 1113
gccaguguuuggccuauuu

SEQ ID NO: 88615 - RNA, 19 nt, Artificial Sequence
  Description of Artificial Sequence: Synthetic oligonucleotide
  Antisense strand to SEQ ID NO: 88534
aaauaggccaaacacuggc

SEQ ID NO: 88616 - RNA, 19 nt, Artificial Sequence
  Description of Artificial Sequence: Synthetic oligonucleotide
  Sense strand starting at position 321 of SEQ ID NO: 1113
gccuauucccaagacuuga

SEQ ID NO: 88617 - RNA, 19 nt, Artificial Sequence
  Description of Artificial Sequence: Synthetic oligonucleotide
  Antisense strand to SEQ ID NO: 88536
ucaagucuugggaauaggc

SEQ ID NO: 88618 - RNA, 19 nt, Artificial Sequence
  Description of Artificial Sequence: Synthetic oligonucleotide
  Sense strand starting at position 419 of SEQ ID NO: 1113
aguuaauucugaguacauu

SEQ ID NO: 88619 - RNA, 19 nt, Artificial Sequence
  Description of Artificial Sequence: Synthetic oligonucleotide
  Antisense strand to SEQ ID NO: 88538
aauguacucagaauuaacu

SEQ ID NO: 88620 - RNA, 19 nt, Artificial Sequence
  Description of Artificial Sequence: Synthetic oligonucleotide
  Sense strand starting at position 455 of SEQ ID NO: 1113
cagguaaauuccuuagagg

SEQ ID NO: 88621 - RNA, 19 nt, Artificial Sequence
  Description of Artificial Sequence: Synthetic oligonucleotide
  Antisense strand to SEQ ID NO: 88540
ccucuaaggaauuuaccug

SEQ ID NO: 88622 - RNA, 19 nt, Artificial Sequence
  Description of Artificial Sequence: Synthetic oligonucleotide
  Sense strand starting at position 476 of SEQ ID NO: 1113
aggaucuggccuuauacuu

SEQ ID NO: 88623 - RNA, 19 nt, Artificial Sequence
  Description of Artificial Sequence: Synthetic oligonucleotide
  Antisense strand to SEQ ID NO: 88542
aaguauaaggccagauccu

SEQ ID NO: 88624 - RNA, 19 nt, Artificial Sequence
  Description of Artificial Sequence: Synthetic oligonucleotide
  Sense strand starting at position 676 of SEQ ID NO: 1113
guagaugaagcucggagaa

SEQ ID NO: 88625 - RNA, 19 nt, Artificial Sequence
  Description of Artificial Sequence: Synthetic oligonucleotide
  Antisense strand to SEQ ID NO: 88544
uucuccgagcuucaucuac

SEQ ID NO: 88626 - RNA, 19 nt, Artificial Sequence
  Description of Artificial Sequence: Synthetic oligonucleotide
  Sense strand starting at position 784 of SEQ ID NO: 1113
gcugaaaucacagggaugu

SEQ ID NO: 88627 - RNA, 19 nt, Artificial Sequence
  Description of Artificial Sequence: Synthetic oligonucleotide
  Antisense strand to SEQ ID NO: 88546
acaucccugugauuucagc

SEQ ID NO: 88628 - RNA, 19 nt, Artificial Sequence
  Description of Artificial Sequence: Synthetic oligonucleotide
  Sense strand starting at position 797 of SEQ ID NO: 1113
ggaugugugauggagcagu

SEQ ID NO: 88629 - RNA, 19 nt, Artificial Sequence
  Description of Artificial Sequence: Synthetic oligonucleotide
  Antisense strand to SEQ ID NO: 88548
acugcuccaucacacaucc

SEQ ID NO: 88630 - RNA, 19 nt, Artificial Sequence
  Description of Artificial Sequence: Synthetic oligonucleotide
  Sense strand starting at position 1155 of SEQ ID NO: 1113
gagccauuggcagaacauu

SEQ ID NO: 88631 - RNA, 19 nt, Artificial Sequence
  Description of Artificial Sequence: Synthetic oligonucleotide
  Antisense strand to SEQ ID NO: 88550
aauguucugccaauggcuc

SEQ ID NO: 88632 - RNA, 19 nt, Artificial Sequence
  Description of Artificial Sequence: Synthetic oligonucleotide
  Sense strand starting at position 1285 of SEQ ID NO: 1113
cuggaaccagcuugagaaa

SEQ ID NO: 88633 - RNA, 19 nt, Artificial Sequence
  Description of Artificial Sequence: Synthetic oligonucleotide
  Antisense strand to SEQ ID NO: 88552
uuucucaagcugguuccag

SEQ ID NO: 88634 - RNA, 19 nt, Artificial Sequence
  Description of Artificial Sequence: Synthetic oligonucleotide
  Sense strand starting at position 1342 of SEQ ID NO: 1113
ccacccucggcugagaaua

SEQ ID NO: 88635 - RNA, 19 nt, Artificial Sequence
  Description of Artificial Sequence: Synthetic oligonucleotide
  Antisense strand to SEQ ID NO: 88554
uauucucagccgagggugg

SEQ ID NO: 88636 - RNA, 19 nt, Artificial Sequence
  Description of Artificial Sequence: Synthetic oligonucleotide
  Sense strand starting at position 1370 of SEQ ID NO: 1113
uugggagccuuuccagagu

SEQ ID NO: 88637 - RNA, 19 nt, Artificial Sequence
  Description of Artificial Sequence: Synthetic oligonucleotide
  Antisense strand to SEQ ID NO: 88556
acucuggaaaggcucccaa

SEQ ID NO: 88638 - RNA, 19 nt, Artificial Sequence
  Description of Artificial Sequence: Synthetic oligonucleotide
  Sense strand starting at position 1639 of SEQ ID NO: 1113
ggaccuuuccuaggacaca

SEQ ID NO: 88639 - RNA, 19 nt, Artificial Sequence
  Description of Artificial Sequence: Synthetic oligonucleotide
  Antisense strand to SEQ ID NO: 88558
uguguccuaggaaaggucc

SEQ ID NO: 88640 - RNA, 19 nt, Artificial Sequence
  Description of Artificial Sequence: Synthetic oligonucleotide
  Sense strand starting at position 1758 of SEQ ID NO: 1113
gguccugaucuaggacacu

SEQ ID NO: 88641 - RNA, 19 nt, Artificial Sequence
  Description of Artificial Sequence: Synthetic oligonucleotide
  Antisense strand to SEQ ID NO: 88560
aguguccuagaucaggacc

SEQ ID NO: 88642 - RNA, 19 nt, Artificial Sequence
  Description of Artificial Sequence: Synthetic oligonucleotide
  Sense strand starting at position 1784 of SEQ ID NO: 1113
gcagauacauuuguagcuu

SEQ ID NO: 88643 - RNA, 19 nt, Artificial Sequence
  Description of Artificial Sequence: Synthetic oligonucleotide
  Antisense strand to SEQ ID NO: 88562
aagcuacaaauguaucugc

SEQ ID NO: 88644 - RNA, 19 nt, Artificial Sequence
  Description of Artificial Sequence: Synthetic oligonucleotide
  Sense strand starting at position 1980 of SEQ ID NO: 1113
ggacccuuugcaggagaaa

SEQ ID NO: 88645 - RNA, 19 nt, Artificial Sequence
  Description of Artificial Sequence: Synthetic oligonucleotide
  Antisense strand to SEQ ID NO: 88564
uuucuccugcaaagggucc

SEQ ID NO: 88646 - RNA, 19 nt, Artificial Sequence
  Description of Artificial Sequence: Synthetic oligonucleotide
  Sense strand starting at position 2089 of SEQ ID NO: 1113
gcccaaagugaaugaguca

SEQ ID NO: 88647 - RNA, 19 nt, Artificial Sequence
  Description of Artificial Sequence: Synthetic oligonucleotide
  Antisense strand to SEQ ID NO: 88566
ugacucauucacuuugggc

SEQ ID NO: 88648 - RNA, 19 nt, Artificial Sequence
  Description of Artificial Sequence: Synthetic oligonucleotide
  Sense strand starting at position 2198 of SEQ ID NO: 1113
cccacaauucugggaugca

SEQ ID NO: 88649 - RNA, 19 nt, Artificial Sequence
  Description of Artificial Sequence: Synthetic oligonucleotide
  Antisense strand to SEQ ID NO: 88568
ugcaucccagaauuguggg

SEQ ID NO: 88650 - RNA, 19 nt, Artificial Sequence
  Description of Artificial Sequence: Synthetic oligonucleotide
  Sense strand starting at position 2201 of SEQ ID NO: 1113
acaauucugggaugcaaca

SEQ ID NO: 88651 - RNA, 19 nt, Artificial Sequence
  Description of Artificial Sequence: Synthetic oligonucleotide
  Antisense strand to SEQ ID NO: 88570
uguugcaucccagaauugu

SEQ ID NO: 88652 - RNA, 19 nt, Artificial Sequence
  Description of Artificial Sequence: Synthetic oligonucleotide
  Sense strand starting at position 2220 of SEQ ID NO: 1113
gggagagauguauggcugu

SEQ ID NO: 88653 - RNA, 19 nt, Artificial Sequence
  Description of Artificial Sequence: Synthetic oligonucleotide
  Antisense strand to SEQ ID NO: 88572
acagccauacaucucuccc

SEQ ID NO: 88654 - RNA, 19 nt, Artificial Sequence
  Description of Artificial Sequence: Synthetic oligonucleotide
  Sense strand starting at position 2237 of SEQ ID NO: 1113
gucuuuaacaagugaguga

SEQ ID NO: 88655 - RNA, 19 nt, Artificial Sequence
  Description of Artificial Sequence: Synthetic oligonucleotide
  Antisense strand to SEQ ID NO: 88574
ucacucacuuguuaaagac

SEQ ID NO: 88656 - RNA, 19 nt, Artificial Sequence
  Description of Artificial Sequence: Synthetic oligonucleotide
  Sense strand starting at position 2250 of SEQ ID NO: 1113
gagugaggguuucuucuga

SEQ ID NO: 88657 - RNA, 19 nt, Artificial Sequence
  Description of Artificial Sequence: Synthetic oligonucleotide
  Antisense strand to SEQ ID NO: 88576
ucagaagaaacccucacuc

SEQ ID NO: 88658 - RNA, 19 nt, Artificial Sequence
  Description of Artificial Sequence: Synthetic oligonucleotide
  Sense strand starting at position 2406 of SEQ ID NO: 1113
gccugccuuguggaaacau

SEQ ID NO: 88659 - RNA, 19 nt, Artificial Sequence
  Description of Artificial Sequence: Synthetic oligonucleotide
  Antisense strand to SEQ ID NO: 88578
auguuuccacaaggcaggc

SEQ ID NO: 88660 - RNA, 19 nt, Artificial Sequence
  Description of Artificial Sequence: Synthetic oligonucleotide
  Sense strand starting at position 2446 of SEQ ID NO: 1113
ugacccuucugccuugaau

SEQ ID NO: 88661 - RNA, 19 nt, Artificial Sequence
  Description of Artificial Sequence: Synthetic oligonucleotide
  Antisense strand to SEQ ID NO: 88580
auucaaggcagaaggguca

SEQ ID NO: 88662 - RNA, 19 nt, Artificial Sequence
  Description of Artificial Sequence: Synthetic oligonucleotide
  Sense strand starting at position 2849 of SEQ ID NO: 1113
cacugaggugcuuaucaaa

SEQ ID NO: 88663 - RNA, 19 nt, Artificial Sequence
  Description of Artificial Sequence: Synthetic oligonucleotide
  Antisense strand to SEQ ID NO: 88582
uuugauaagcaccucagug

SEQ ID NO: 88664 - RNA, 19 nt, Artificial Sequence
  Description of Artificial Sequence: Synthetic oligonucleotide
  Sense strand starting at position 3041 of SEQ ID NO: 1113
guguguucugccguucuuu

SEQ ID NO: 88665 - RNA, 19 nt, Artificial Sequence
  Description of Artificial Sequence: Synthetic oligonucleotide
  Antisense strand to SEQ ID NO: 88584
aaagaacggcagaacacac

SEQ ID NO: 88666 - RNA, 19 nt, Artificial Sequence
  Description of Artificial Sequence: Synthetic oligonucleotide
  Sense strand starting at position 3061 of SEQ ID NO: 1113
uccagaucgccugaaagcu

SEQ ID NO: 88667 - RNA, 19 nt, Artificial Sequence
  Description of Artificial Sequence: Synthetic oligonucleotide
  Antisense strand to SEQ ID NO: 88586
agcuuucaggcgaucugga

SEQ ID NO: 88668 - RNA, 19 nt, Artificial Sequence
  Description of Artificial Sequence: Synthetic oligonucleotide
  Sense strand starting at position 3070 of SEQ ID NO: 1113
ccugaaagcuccucuugaa

SEQ ID NO: 88669 - RNA, 19 nt, Artificial Sequence
  Description of Artificial Sequence: Synthetic oligonucleotide
  Antisense strand to SEQ ID NO: 88588
uucaagaggagcuuucagg

SEQ ID NO: 88670 - RNA, 19 nt, Artificial Sequence
  Description of Artificial Sequence: Synthetic oligonucleotide
  Sense strand starting at position 3283 of SEQ ID NO: 1113
uguagugagcuccacaaug

SEQ ID NO: 88671 - RNA, 19 nt, Artificial Sequence
  Description of Artificial Sequence: Synthetic oligonucleotide
  Antisense strand to SEQ ID NO: 88590
cauuguggagcucacuaca

SEQ ID NO: 88672 - RNA, 19 nt, Artificial Sequence
  Description of Artificial Sequence: Synthetic oligonucleotide
  Sense strand starting at position 3351 of SEQ ID NO: 1113
ggcacauguaagugaucau

SEQ ID NO: 88673 - RNA, 19 nt, Artificial Sequence
  Description of Artificial Sequence: Synthetic oligonucleotide
  Antisense strand to SEQ ID NO: 88592
augaucacuuacaugugcc

SEQ ID NO: 88674 - RNA, 19 nt, Artificial Sequence
  Description of Artificial Sequence: Synthetic oligonucleotide
  Sense strand starting at position 3354 of SEQ ID NO: 1113
acauguaagugaucaucag

SEQ ID NO: 88675 - RNA, 19 nt, Artificial Sequence
  Description of Artificial Sequence: Synthetic oligonucleotide
  Antisense strand to SEQ ID NO: 88594
cugaugaucacuuacaugu

SEQ ID NO: 88676 - RNA, 19 nt, Artificial Sequence
  Description of Artificial Sequence: Synthetic oligonucleotide
  Sense strand starting at position 3531 of SEQ ID NO: 1113
gaguuaaagcuccagacau

SEQ ID NO: 88677 - RNA, 19 nt, Artificial Sequence
  Description of Artificial Sequence: Synthetic oligonucleotide
  Antisense strand to SEQ ID NO: 88596
augucuggagcuuuaacuc

SEQ ID NO: 88678 - RNA, 19 nt, Artificial Sequence
  Description of Artificial Sequence: Synthetic oligonucleotide
  Sense strand starting at position 3533 of SEQ ID NO: 1113
guuaaagcuccagacauau

SEQ ID NO: 88679 - RNA, 19 nt, Artificial Sequence
  Description of Artificial Sequence: Synthetic oligonucleotide
  Antisense strand to SEQ ID NO: 88598
auaugucuggagcuuuaac

SEQ ID NO: 88680 - RNA, 19 nt, Artificial Sequence
  Description of Artificial Sequence: Synthetic oligonucleotide
  Sense strand starting at position 3714 of SEQ ID NO: 1113
aggaaagcuuaagagaaau

SEQ ID NO: 88681 - RNA, 19 nt, Artificial Sequence
  Description of Artificial Sequence: Synthetic oligonucleotide
  Antisense strand to SEQ ID NO: 88600
auuucucuuaagcuuuccu

SEQ ID NO: 88682 - RNA, 19 nt, Artificial Sequence
  Description of Artificial Sequence: Synthetic oligonucleotide
  Sense strand starting at position 3928 of SEQ ID NO: 1113
ugaagcauagcuugacuga

SEQ ID NO: 88683 - RNA, 19 nt, Artificial Sequence
  Description of Artificial Sequence: Synthetic oligonucleotide
  Antisense strand to SEQ ID NO: 88602
ucagucaagcuaugcuuca

SEQ ID NO: 88684 - RNA, 19 nt, Artificial Sequence
  Description of Artificial Sequence: Synthetic oligonucleotide
  Sense strand starting at position 3931 of SEQ ID NO: 1113
agcauagcuugacugacaa

SEQ ID NO: 88685 - RNA, 19 nt, Artificial Sequence
  Description of Artificial Sequence: Synthetic oligonucleotide
  Antisense strand to SEQ ID NO: 88604
uugucagucaagcuaugcu

SEQ ID NO: 88686 - RNA, 19 nt, Artificial Sequence
  Description of Artificial Sequence: Synthetic oligonucleotide
  Sense strand starting at position 160 of SEQ ID NO: 1114
gagccauuggcagaacauu

SEQ ID NO: 88687 - RNA, 19 nt, Artificial Sequence
  Description of Artificial Sequence: Synthetic oligonucleotide
  Antisense strand to SEQ ID NO: 88606
aauguucugccaauggcuc

SEQ ID NO: 88688 - RNA, 19 nt, Artificial Sequence
  Description of Artificial Sequence: Synthetic oligonucleotide
  Sense strand starting at position 290 of SEQ ID NO: 1114
cuggaaccagcuugagaaa

SEQ ID NO: 88689 - RNA, 19 nt, Artificial Sequence
  Description of Artificial Sequence: Synthetic oligonucleotide
  Antisense strand to SEQ ID NO: 88608
uuucucaagcugguuccag

SEQ ID NO: 88690 - RNA, 19 nt, Artificial Sequence
  Description of Artificial Sequence: Synthetic oligonucleotide
  Sense strand starting at position 347 of SEQ ID NO: 1114
ccacccucggcugagaaua

SEQ ID NO: 88691 - RNA, 19 nt, Artificial Sequence
  Description of Artificial Sequence: Synthetic oligonucleotide
  Antisense strand to SEQ ID NO: 88610
uauucucagccgagggugg

SEQ ID NO: 88692 - RNA, 19 nt, Artificial Sequence
  Description of Artificial Sequence: Synthetic oligonucleotide
  Sense strand starting at position 375 of SEQ ID NO: 1114
uugggagccuuuccagagu

SEQ ID NO: 88693 - RNA, 19 nt, Artificial Sequence
  Description of Artificial Sequence: Synthetic oligonucleotide
  Antisense strand to SEQ ID NO: 88612
acucuggaaaggcucccaa

SEQ ID NO: 88694 - RNA, 19 nt, Artificial Sequence
  Description of Artificial Sequence: Synthetic oligonucleotide
  Sense strand starting at position 644 of SEQ ID NO: 1114
ggaccuuuccuaggacaca

SEQ ID NO: 88695 - RNA, 19 nt, Artificial Sequence
  Description of Artificial Sequence: Synthetic oligonucleotide
  Antisense strand to SEQ ID NO: 88614
uguguccuaggaaaggucc

SEQ ID NO: 88696 - RNA, 19 nt, Artificial Sequence
  Description of Artificial Sequence: Synthetic oligonucleotide
  Sense strand starting at position 763 of SEQ ID NO: 1114
gguccugaucuaggacacu

SEQ ID NO: 88697 - RNA, 19 nt, Artificial Sequence
  Description of Artificial Sequence: Synthetic oligonucleotide
  Antisense strand to SEQ ID NO: 88616
aguguccuagaucaggacc

SEQ ID NO: 88698 - RNA, 19 nt, Artificial Sequence
  Description of Artificial Sequence: Synthetic oligonucleotide
  Sense strand starting at position 789 of SEQ ID NO: 1114
gcagauacauuuguagcuu

SEQ ID NO: 88699 - RNA, 19 nt, Artificial Sequence
  Description of Artificial Sequence: Synthetic oligonucleotide
  Antisense strand to SEQ ID NO: 88618
aagcuacaaauguaucugc

SEQ ID NO: 88700 - RNA, 19 nt, Artificial Sequence
  Description of Artificial Sequence: Synthetic oligonucleotide
  Sense strand starting at position 985 of SEQ ID NO: 1114
ggacccuuugcaggagaaa

SEQ ID NO: 88701 - RNA, 19 nt, Artificial Sequence
  Description of Artificial Sequence: Synthetic oligonucleotide
  Antisense strand to SEQ ID NO: 88620
uuucuccugcaaagggucc

SEQ ID NO: 88702 - RNA, 19 nt, Artificial Sequence
  Description of Artificial Sequence: Synthetic oligonucleotide
  Sense strand starting at position 1094 of SEQ ID NO: 1114
gcccaaagugaaugaguca

SEQ ID NO: 88703 - RNA, 19 nt, Artificial Sequence
  Description of Artificial Sequence: Synthetic oligonucleotide
  Antisense strand to SEQ ID NO: 88622
ugacucauucacuuugggc

SEQ ID NO: 88704 - RNA, 19 nt, Artificial Sequence
  Description of Artificial Sequence: Synthetic oligonucleotide
  Sense strand starting at position 1203 of SEQ ID NO: 1114
cccacaauucugggaugca

SEQ ID NO: 88705 - RNA, 19 nt, Artificial Sequence
  Description of Artificial Sequence: Synthetic oligonucleotide
  Antisense strand to SEQ ID NO: 88624
ugcaucccagaauuguggg

SEQ ID NO: 88706 - RNA, 19 nt, Artificial Sequence
  Description of Artificial Sequence: Synthetic oligonucleotide
  Sense strand starting at position 1206 of SEQ ID NO: 1114
acaauucugggaugcaaca

SEQ ID NO: 88707 - RNA, 19 nt, Artificial Sequence
  Description of Artificial Sequence: Synthetic oligonucleotide
  Antisense strand to SEQ ID NO: 88626
uguugcaucccagaauugu

SEQ ID NO: 88708 - RNA, 19 nt, Artificial Sequence
  Description of Artificial Sequence: Synthetic oligonucleotide
  Sense strand starting at position 1225 of SEQ ID NO: 1114
gggagagauguauggcugu

SEQ ID NO: 88709 - RNA, 19 nt, Artificial Sequence
  Description of Artificial Sequence: Synthetic oligonucleotide
  Antisense strand to SEQ ID NO: 88628
acagccauacaucucuccc

SEQ ID NO: 88710 - RNA, 19 nt, Artificial Sequence
  Description of Artificial Sequence: Synthetic oligonucleotide
  Sense strand starting at position 1242 of SEQ ID NO: 1114
gucuuuaacaagugaguga

SEQ ID NO: 88711 - RNA, 19 nt, Artificial Sequence
  Description of Artificial Sequence: Synthetic oligonucleotide
  Antisense strand to SEQ ID NO: 88630
ucacucacuuguuaaagac

SEQ ID NO: 88712 - RNA, 19 nt, Artificial Sequence
  Description of Artificial Sequence: Synthetic oligonucleotide
  Sense strand starting at position 1255 of SEQ ID NO: 1114
gagugaggguuucuucuga

SEQ ID NO: 88713 - RNA, 19 nt, Artificial Sequence
  Description of Artificial Sequence: Synthetic oligonucleotide
  Antisense strand to SEQ ID NO: 88632
ucagaagaaacccucacuc

SEQ ID NO: 88714 - RNA, 19 nt, Artificial Sequence
  Description of Artificial Sequence: Synthetic oligonucleotide
  Sense strand starting at position 1411 of SEQ ID NO: 1114
gccugccuuguggaaacau

SEQ ID NO: 88715 - RNA, 19 nt, Artificial Sequence
  Description of Artificial Sequence: Synthetic oligonucleotide
  Antisense strand to SEQ ID NO: 88634
auguuuccacaaggcaggc

SEQ ID NO: 88716 - RNA, 19 nt, Artificial Sequence
  Description of Artificial Sequence: Synthetic oligonucleotide
  Sense strand starting at position 1854 of SEQ ID NO: 1114
cacugaggugcuuaucaaa

SEQ ID NO: 88717 - RNA, 19 nt, Artificial Sequence
  Description of Artificial Sequence: Synthetic oligonucleotide
  Antisense strand to SEQ ID NO: 88636
uuugauaagcaccucagug

SEQ ID NO: 88718 - RNA, 19 nt, Artificial Sequence
  Description of Artificial Sequence: Synthetic oligonucleotide
  Sense strand starting at position 2066 of SEQ ID NO: 1114
uccagaucgccugaaagcu

SEQ ID NO: 88719 - RNA, 19 nt, Artificial Sequence
  Description of Artificial Sequence: Synthetic oligonucleotide
  Antisense strand to SEQ ID NO: 88638
agcuuucaggcgaucugga

SEQ ID NO: 88720 - RNA, 19 nt, Artificial Sequence
  Description of Artificial Sequence: Synthetic oligonucleotide
  Sense strand starting at position 2075 of SEQ ID NO: 1114
ccugaaagcuccucuugaa

SEQ ID NO: 88721 - RNA, 19 nt, Artificial Sequence
  Description of Artificial Sequence: Synthetic oligonucleotide
  Antisense strand to SEQ ID NO: 88640
uucaagaggagcuuucagg

SEQ ID NO: 88722 - RNA, 19 nt, Artificial Sequence
  Description of Artificial Sequence: Synthetic oligonucleotide
  Sense strand starting at position 2288 of SEQ ID NO: 1114
uguagugagcuccacaaug

SEQ ID NO: 88723 - RNA, 19 nt, Artificial Sequence
  Description of Artificial Sequence: Synthetic oligonucleotide
  Antisense strand to SEQ ID NO: 88642
cauuguggagcucacuaca

SEQ ID NO: 88724 - RNA, 19 nt, Artificial Sequence
  Description of Artificial Sequence: Synthetic oligonucleotide
  Sense strand starting at position 2356 of SEQ ID NO: 1114
ggcacauguaagugaucau

SEQ ID NO: 88725 - RNA, 19 nt, Artificial Sequence
  Description of Artificial Sequence: Synthetic oligonucleotide
  Antisense strand to SEQ ID NO: 88644
augaucacuuacaugugcc

SEQ ID NO: 88726 - RNA, 19 nt, Artificial Sequence
  Description of Artificial Sequence: Synthetic oligonucleotide
  Sense strand starting at position 2359 of SEQ ID NO: 1114
acauguaagugaucaucag

SEQ ID NO: 88727 - RNA, 19 nt, Artificial Sequence
  Description of Artificial Sequence: Synthetic oligonucleotide
  Antisense strand to SEQ ID NO: 88646
cugaugaucacuuacaugu

SEQ ID NO: 88728 - RNA, 19 nt, Artificial Sequence
  Description of Artificial Sequence: Synthetic oligonucleotide
  Sense strand starting at position 2536 of SEQ ID NO: 1114
gaguuaaagcuccagacau

SEQ ID NO: 88729 - RNA, 19 nt, Artificial Sequence
  Description of Artificial Sequence: Synthetic oligonucleotide
  Antisense strand to SEQ ID NO: 88648
augucuggagcuuuaacuc

SEQ ID NO: 88730 - RNA, 19 nt, Artificial Sequence
  Description of Artificial Sequence: Synthetic oligonucleotide
  Sense strand starting at position 2538 of SEQ ID NO: 1114
guuaaagcuccagacauau

SEQ ID NO: 88731 - RNA, 19 nt, Artificial Sequence
  Description of Artificial Sequence: Synthetic oligonucleotide
  Antisense strand to SEQ ID NO: 88650
auaugucuggagcuuuaac

SEQ ID NO: 88732 - RNA, 19 nt, Artificial Sequence
  Description of Artificial Sequence: Synthetic oligonucleotide
  Sense strand starting at position 2933 of SEQ ID NO: 1114
ugaagcauagcuugacuga

SEQ ID NO: 88733 - RNA, 19 nt, Artificial Sequence
  Description of Artificial Sequence: Synthetic oligonucleotide
  Antisense strand to SEQ ID NO: 88652
ucagucaagcuaugcuuca

SEQ ID NO: 88734 - RNA, 19 nt, Artificial Sequence
  Description of Artificial Sequence: Synthetic oligonucleotide
  Sense strand starting at position 2936 of SEQ ID NO: 1114
agcauagcuugacugacaa

SEQ ID NO: 88735 - RNA, 19 nt, Artificial Sequence
  Description of Artificial Sequence: Synthetic oligonucleotide
  Antisense strand to SEQ ID NO: 88654
uugucagucaagcuaugcu

SEQ ID NO: 88736 - RNA, 19 nt, Artificial Sequence
  Description of Artificial Sequence: Synthetic oligonucleotide
  Sense strand starting at position 3073 of SEQ ID NO: 1114
uugagaggcuggucucaca

SEQ ID NO: 88737 - RNA, 19 nt, Artificial Sequence
  Description of Artificial Sequence: Synthetic oligonucleotide
  Antisense strand to SEQ ID NO: 88656
ugugagaccagccucucaa

SEQ ID NO: 88738 - RNA, 19 nt, Artificial Sequence
  Description of Artificial Sequence: Synthetic oligonucleotide
  Sense strand starting at position 3227 of SEQ ID NO: 1114
ggagcuucuuaacuacgau

SEQ ID NO: 88739 - RNA, 19 nt, Artificial Sequence
  Description of Artificial Sequence: Synthetic oligonucleotide
  Antisense strand to SEQ ID NO: 88658
aucguaguuaagaagcucc

SEQ ID NO: 88740 - RNA, 19 nt, Artificial Sequence
  Description of Artificial Sequence: Synthetic oligonucleotide
  Sense strand starting at position 3301 of SEQ ID NO: 1114
ccaagaaauuggcuugaag

SEQ ID NO: 88741 - RNA, 19 nt, Artificial Sequence
  Description of Artificial Sequence: Synthetic oligonucleotide
  Antisense strand to SEQ ID NO: 88660
cuucaagccaauuucuugg

SEQ ID NO: 88742 - RNA, 19 nt, Artificial Sequence
  Description of Artificial Sequence: Synthetic oligonucleotide
  Sense strand starting at position 3346 of SEQ ID NO: 1114
uguggauuaaauugggcau

SEQ ID NO: 88743 - RNA, 19 nt, Artificial Sequence
  Description of Artificial Sequence: Synthetic oligonucleotide
  Antisense strand to SEQ ID NO: 88662
augcccaauuuaauccaca

SEQ ID NO: 88744 - RNA, 19 nt, Artificial Sequence
  Description of Artificial Sequence: Synthetic oligonucleotide
  Sense strand starting at position 3347 of SEQ ID NO: 1114
guggauuaaauugggcauu

SEQ ID NO: 88745 - RNA, 19 nt, Artificial Sequence
  Description of Artificial Sequence: Synthetic oligonucleotide
  Antisense strand to SEQ ID NO: 88664
aaugcccaauuuaauccac

SEQ ID NO: 88746 - RNA, 19 nt, Artificial Sequence
  Description of Artificial Sequence: Synthetic oligonucleotide
  Sense strand starting at position 3380 of SEQ ID NO: 1114
ucgaauuaagcauaaguuc

SEQ ID NO: 88747 - RNA, 19 nt, Artificial Sequence
  Description of Artificial Sequence: Synthetic oligonucleotide
  Antisense strand to SEQ ID NO: 88666
gaacuuaugcuuaauucga

SEQ ID NO: 88748 - RNA, 19 nt, Artificial Sequence
  Description of Artificial Sequence: Synthetic oligonucleotide
  Sense strand starting at position 3411 of SEQ ID NO: 1114
gaaauaguguaauuagcaa

SEQ ID NO: 88749 - RNA, 19 nt, Artificial Sequence
  Description of Artificial Sequence: Synthetic oligonucleotide
  Antisense strand to SEQ ID NO: 88668
uugcuaauuacacuauuuc

SEQ ID NO: 88750 - RNA, 19 nt, Artificial Sequence
  Description of Artificial Sequence: Synthetic oligonucleotide
  Sense strand starting at position 3435 of SEQ ID NO: 1114
cagugaguuguugauguaa

SEQ ID NO: 88751 - RNA, 19 nt, Artificial Sequence
  Description of Artificial Sequence: Synthetic oligonucleotide
  Antisense strand to SEQ ID NO: 88670
uuacaucaacaacucacug

SEQ ID NO: 88752 - RNA, 19 nt, Artificial Sequence
  Description of Artificial Sequence: Synthetic oligonucleotide
  Sense strand starting at position 3451 of SEQ ID NO: 1114
uaaguugaugcauaauuga

SEQ ID NO: 88753 - RNA, 19 nt, Artificial Sequence
  Description of Artificial Sequence: Synthetic oligonucleotide
  Antisense strand to SEQ ID NO: 88672
ucaauuaugcaucaacuua

SEQ ID NO: 88754 - RNA, 19 nt, Artificial Sequence
  Description of Artificial Sequence: Synthetic oligonucleotide
  Sense strand starting at position 3466 of SEQ ID NO: 1114
uugauaguccaauaaaugu

SEQ ID NO: 88755 - RNA, 19 nt, Artificial Sequence
  Description of Artificial Sequence: Synthetic oligonucleotide
  Antisense strand to SEQ ID NO: 88674
acauuuauuggacuaucaa

SEQ ID NO: 88756 - RNA, 19 nt, Artificial Sequence
  Description of Artificial Sequence: Synthetic oligonucleotide
  Sense strand starting at position 3512 of SEQ ID NO: 1114
agugaaaucuagcucaacu

SEQ ID NO: 88757 - RNA, 19 nt, Artificial Sequence
  Description of Artificial Sequence: Synthetic oligonucleotide
  Antisense strand to SEQ ID NO: 88676
aguugagcuagauuucacu

SEQ ID NO: 88758 - RNA, 19 nt, Artificial Sequence
  Description of Artificial Sequence: Synthetic oligonucleotide
  Sense strand starting at position 3522 of SEQ ID NO: 1114
agcucaacucagcaaguaa

SEQ ID NO: 88759 - RNA, 19 nt, Artificial Sequence
  Description of Artificial Sequence: Synthetic oligonucleotide
  Antisense strand to SEQ ID NO: 88678
uuacuugcugaguugagcu

SEQ ID NO: 88760 - RNA, 19 nt, Artificial Sequence
  Description of Artificial Sequence: Synthetic oligonucleotide
  Sense strand starting at position 3534 of SEQ ID NO: 1114
caaguaaggucaguagaag

SEQ ID NO: 88761 - RNA, 19 nt, Artificial Sequence
  Description of Artificial Sequence: Synthetic oligonucleotide
  Antisense strand to SEQ ID NO: 88680
cuucuacugaccuuacuug

SEQ ID NO: 88762 - RNA, 19 nt, Artificial Sequence
  Description of Artificial Sequence: Synthetic oligonucleotide
  Sense strand starting at position 3596 of SEQ ID NO: 1114
cgagaaaggucagcucuga

SEQ ID NO: 88763 - RNA, 19 nt, Artificial Sequence
  Description of Artificial Sequence: Synthetic oligonucleotide
  Antisense strand to SEQ ID NO: 88682
ucagagcugaccuuucucg

SEQ ID NO: 88764 - RNA, 19 nt, Artificial Sequence
  Description of Artificial Sequence: Synthetic oligonucleotide
  Sense strand starting at position 3688 of SEQ ID NO: 1114
cagagcgcucaugaaacuu

SEQ ID NO: 88765 - RNA, 19 nt, Artificial Sequence
  Description of Artificial Sequence: Synthetic oligonucleotide
  Antisense strand to SEQ ID NO: 88684
aaguuucaugagcgcucug

SEQ ID NO: 88766 - RNA, 19 nt, Artificial Sequence
  Description of Artificial Sequence: Synthetic oligonucleotide
  Sense strand starting at position 3959 of SEQ ID NO: 1115
accagagcuuaucugauau

SEQ ID NO: 88767 - RNA, 19 nt, Artificial Sequence
  Description of Artificial Sequence: Synthetic oligonucleotide
  Antisense strand to SEQ ID NO: 88686
auaucagauaagcucuggu

SEQ ID NO: 88768 - RNA, 19 nt, Artificial Sequence
  Description of Artificial Sequence: Synthetic oligonucleotide
  Sense strand starting at position 3898 of SEQ ID NO: 1115
aguccuaauguccaagacu

SEQ ID NO: 88769 - RNA, 19 nt, Artificial Sequence
  Description of Artificial Sequence: Synthetic oligonucleotide
  Antisense strand to SEQ ID NO: 88688
agucuuggacauuaggacu

SEQ ID NO: 88770 - RNA, 19 nt, Artificial Sequence
  Description of Artificial Sequence: Synthetic oligonucleotide
  Sense strand starting at position 3868 of SEQ ID NO: 1115
cauaaauggguuugucauu

SEQ ID NO: 88771 - RNA, 19 nt, Artificial Sequence
  Description of Artificial Sequence: Synthetic oligonucleotide
  Antisense strand to SEQ ID NO: 88690
aaugacaaacccauuuaug

SEQ ID NO: 88772 - RNA, 19 nt, Artificial Sequence
  Description of Artificial Sequence: Synthetic oligonucleotide
  Sense strand starting at position 3706 of SEQ ID NO: 1115
gcuacagauuuguaauaaa

SEQ ID NO: 88773 - RNA, 19 nt, Artificial Sequence
  Description of Artificial Sequence: Synthetic oligonucleotide
  Antisense strand to SEQ ID NO: 88692
uuuauuacaaaucuguagc

SEQ ID NO: 88774 - RNA, 19 nt, Artificial Sequence
  Description of Artificial Sequence: Synthetic oligonucleotide
  Sense strand starting at position 3690 of SEQ ID NO: 1115
guuaguugugaauaaagcu

SEQ ID NO: 88775 - RNA, 19 nt, Artificial Sequence
  Description of Artificial Sequence: Synthetic oligonucleotide
  Antisense strand to SEQ ID NO: 88694
agcuuuauucacaacuaac

SEQ ID NO: 88776 - RNA, 19 nt, Artificial Sequence
  Description of Artificial Sequence: Synthetic oligonucleotide
  Sense strand starting at position 3684 of SEQ ID NO: 1115
aaggauguuaguugugaau

SEQ ID NO: 88777 - RNA, 19 nt, Artificial Sequence
  Description of Artificial Sequence: Synthetic oligonucleotide
  Antisense strand to SEQ ID NO: 88696
auucacaacuaacauccuu

SEQ ID NO: 88778 - RNA, 19 nt, Artificial Sequence
  Description of Artificial Sequence: Synthetic oligonucleotide
  Sense strand starting at position 3683 of SEQ ID NO: 1115
uaaggauguuaguugugaa

SEQ ID NO: 88779 - RNA, 19 nt, Artificial Sequence
  Description of Artificial Sequence: Synthetic oligonucleotide
  Antisense strand to SEQ ID NO: 88698
uucacaacuaacauccuua

SEQ ID NO: 88780 - RNA, 19 nt, Artificial Sequence
  Description of Artificial Sequence: Synthetic oligonucleotide
  Sense strand starting at position 3655 of SEQ ID NO: 1115
ggacaaacgugggcauaua

SEQ ID NO: 88781 - RNA, 19 nt, Artificial Sequence
  Description of Artificial Sequence: Synthetic oligonucleotide
  Antisense strand to SEQ ID NO: 88700
uauaugcccacguuugucc

SEQ ID NO: 88782 - RNA, 19 nt, Artificial Sequence
  Description of Artificial Sequence: Synthetic oligonucleotide
  Sense strand starting at position 3618 of SEQ ID NO: 1115
gggauuauaugcucucuca

SEQ ID NO: 88783 - RNA, 19 nt, Artificial Sequence
  Description of Artificial Sequence: Synthetic oligonucleotide
  Antisense strand to SEQ ID NO: 88702
ugagagagcauauaauccc

SEQ ID NO: 88784 - RNA, 19 nt, Artificial Sequence
  Description of Artificial Sequence: Synthetic oligonucleotide
  Sense strand starting at position 3517 of SEQ ID NO: 1115
gcaccuucucuuugggaga

SEQ ID NO: 88785 - RNA, 19 nt, Artificial Sequence
  Description of Artificial Sequence: Synthetic oligonucleotide
  Antisense strand to SEQ ID NO: 88704
ucucccaaagagaaggugc

SEQ ID NO: 88786 - RNA, 19 nt, Artificial Sequence
  Description of Artificial Sequence: Synthetic oligonucleotide
  Sense strand starting at position 3483 of SEQ ID NO: 1115
gagauuaugcauggcuaaa

SEQ ID NO: 88787 - RNA, 19 nt, Artificial Sequence
  Description of Artificial Sequence: Synthetic oligonucleotide
  Antisense strand to SEQ ID NO: 88706
uuuagccaugcauaaucuc

SEQ ID NO: 88788 - RNA, 19 nt, Artificial Sequence
  Description of Artificial Sequence: Synthetic oligonucleotide
  Sense strand starting at position 3482 of SEQ ID NO: 1115
ggagauuaugcauggcuaa

SEQ ID NO: 88789 - RNA, 19 nt, Artificial Sequence
  Description of Artificial Sequence: Synthetic oligonucleotide
  Antisense strand to SEQ ID NO: 88708
uuagccaugcauaaucucc

SEQ ID NO: 88790 - RNA, 19 nt, Artificial Sequence
  Description of Artificial Sequence: Synthetic oligonucleotide
  Sense strand starting at position 3472 of SEQ ID NO: 1115
ugagauggguggagauuau

SEQ ID NO: 88791 - RNA, 19 nt, Artificial Sequence
  Description of Artificial Sequence: Synthetic oligonucleotide
  Antisense strand to SEQ ID NO: 88710
auaaucuccacccaucuca

SEQ ID NO: 88792 - RNA, 19 nt, Artificial Sequence
  Description of Artificial Sequence: Synthetic oligonucleotide
  Sense strand starting at position 3373 of SEQ ID NO: 1115
aauguucugguaggaugaa

SEQ ID NO: 88793 - RNA, 19 nt, Artificial Sequence
  Description of Artificial Sequence: Synthetic oligonucleotide
  Antisense strand to SEQ ID NO: 88712
uucauccuaccagaacauu

SEQ ID NO: 88794 - RNA, 19 nt, Artificial Sequence
  Description of Artificial Sequence: Synthetic oligonucleotide
  Sense strand starting at position 3366 of SEQ ID NO: 1115
uaaggauaauguucuggua

SEQ ID NO: 88795 - RNA, 19 nt, Artificial Sequence
  Description of Artificial Sequence: Synthetic oligonucleotide
  Antisense strand to SEQ ID NO: 88714
uaccagaacauuauccuua

SEQ ID NO: 88796 - RNA, 19 nt, Artificial Sequence
  Description of Artificial Sequence: Synthetic oligonucleotide
  Sense strand starting at position 3342 of SEQ ID NO: 1115
gcagacugcugauuaggaa

SEQ ID NO: 88797 - RNA, 19 nt, Artificial Sequence
  Description of Artificial Sequence: Synthetic oligonucleotide
  Antisense strand to SEQ ID NO: 88716
uuccuaaucagcagucugc

SEQ ID NO: 88798 - RNA, 19 nt, Artificial Sequence
  Description of Artificial Sequence: Synthetic oligonucleotide
  Sense strand starting at position 3321 of SEQ ID NO: 1115
gauaguuaggguuaguuag

SEQ ID NO: 88799 - RNA, 19 nt, Artificial Sequence
  Description of Artificial Sequence: Synthetic oligonucleotide
  Antisense strand to SEQ ID NO: 88718
cuaacuaacccuaacuauc

SEQ ID NO: 88800 - RNA, 19 nt, Artificial Sequence
  Description of Artificial Sequence: Synthetic oligonucleotide
  Sense strand starting at position 3259 of SEQ ID NO: 1115
ccauuaagauaggcguaau

SEQ ID NO: 88801 - RNA, 19 nt, Artificial Sequence
  Description of Artificial Sequence: Synthetic oligonucleotide
  Antisense strand to SEQ ID NO: 88720
auuacgccuaucuuaaugg

SEQ ID NO: 88802 - RNA, 19 nt, Artificial Sequence
  Description of Artificial Sequence: Synthetic oligonucleotide
  Sense strand starting at position 3258 of SEQ ID NO: 1115
cccauuaagauaggcguaa

SEQ ID NO: 88803 - RNA, 19 nt, Artificial Sequence
  Description of Artificial Sequence: Synthetic oligonucleotide
  Antisense strand to SEQ ID NO: 88722
uuacgccuaucuuaauggg

SEQ ID NO: 88804 - RNA, 19 nt, Artificial Sequence
  Description of Artificial Sequence: Synthetic oligonucleotide
  Sense strand starting at position 3246 of SEQ ID NO: 1115
ggacccaguugucccauua

SEQ ID NO: 88805 - RNA, 19 nt, Artificial Sequence
  Description of Artificial Sequence: Synthetic oligonucleotide
  Antisense strand to SEQ ID NO: 88724
uaaugggacaacugggucc

SEQ ID NO: 88806 - RNA, 19 nt, Artificial Sequence
  Description of Artificial Sequence: Synthetic oligonucleotide
  Sense strand starting at position 3184 of SEQ ID NO: 1115
ugauaaagugcggauaaua

SEQ ID NO: 88807 - RNA, 19 nt, Artificial Sequence
  Description of Artificial Sequence: Synthetic oligonucleotide
  Antisense strand to SEQ ID NO: 88726
uauuauccgcacuuuauca

SEQ ID NO: 88808 - RNA, 19 nt, Artificial Sequence
  Description of Artificial Sequence: Synthetic oligonucleotide
  Sense strand starting at position 3182 of SEQ ID NO: 1115
aaugauaaagugcggauaa

SEQ ID NO: 88809 - RNA, 19 nt, Artificial Sequence
  Description of Artificial Sequence: Synthetic oligonucleotide
  Antisense strand to SEQ ID NO: 88728
uuauccgcacuuuaucauu

SEQ ID NO: 88810 - RNA, 19 nt, Artificial Sequence
  Description of Artificial Sequence: Synthetic oligonucleotide
  Sense strand starting at position 3175 of SEQ ID NO: 1115
ggaauuuaaugauaaagug

SEQ ID NO: 88811 - RNA, 19 nt, Artificial Sequence
  Description of Artificial Sequence: Synthetic oligonucleotide
  Antisense strand to SEQ ID NO: 88730
cacuuuaucauuaaauucc

SEQ ID NO: 88812 - RNA, 19 nt, Artificial Sequence
  Description of Artificial Sequence: Synthetic oligonucleotide
  Sense strand starting at position 2962 of SEQ ID NO: 1115
gaauauucucagugccaga

SEQ ID NO: 88813 - RNA, 19 nt, Artificial Sequence
  Description of Artificial Sequence: Synthetic oligonucleotide
  Antisense strand to SEQ ID NO: 88732
ucuggcacugagaauauuc

SEQ ID NO: 88814 - RNA, 19 nt, Artificial Sequence
  Description of Artificial Sequence: Synthetic oligonucleotide
  Sense strand starting at position 2961 of SEQ ID NO: 1115
ggaauauucucagugccag

SEQ ID NO: 88815 - RNA, 19 nt, Artificial Sequence
  Description of Artificial Sequence: Synthetic oligonucleotide
  Antisense strand to SEQ ID NO: 88734
cuggcacugagaauauucc

SEQ ID NO: 88816 - RNA, 19 nt, Artificial Sequence
  Description of Artificial Sequence: Synthetic oligonucleotide
  Sense strand starting at position 2950 of SEQ ID NO: 1115
ugcugagucacggaauauu

SEQ ID NO: 88817 - RNA, 19 nt, Artificial Sequence
  Description of Artificial Sequence: Synthetic oligonucleotide
  Antisense strand to SEQ ID NO: 88736
aauauuccgugacucagca

SEQ ID NO: 88818 - RNA, 19 nt, Artificial Sequence
  Description of Artificial Sequence: Synthetic oligonucleotide
  Sense strand starting at position 2910 of SEQ ID NO: 1115
cucgaaauuauguggauuc

SEQ ID NO: 88819 - RNA, 19 nt, Artificial Sequence
  Description of Artificial Sequence: Synthetic oligonucleotide
  Antisense strand to SEQ ID NO: 88738
gaauccacauaauuucgag

SEQ ID NO: 88820 - RNA, 19 nt, Artificial Sequence
  Description of Artificial Sequence: Synthetic oligonucleotide
  Sense strand starting at position 2909 of SEQ ID NO: 1115
acucgaaauuauguggauu

SEQ ID NO: 88821 - RNA, 19 nt, Artificial Sequence
  Description of Artificial Sequence: Synthetic oligonucleotide
  Antisense strand to SEQ ID NO: 88740
aauccacauaauuucgagu

SEQ ID NO: 88822 - RNA, 19 nt, Artificial Sequence
  Description of Artificial Sequence: Synthetic oligonucleotide
  Sense strand starting at position 2751 of SEQ ID NO: 1115
uuuccugccgcugauuuaa

SEQ ID NO: 88823 - RNA, 19 nt, Artificial Sequence
  Description of Artificial Sequence: Synthetic oligonucleotide
  Antisense strand to SEQ ID NO: 88742
uuaaaucagcggcaggaaa

SEQ ID NO: 88824 - RNA, 19 nt, Artificial Sequence
  Description of Artificial Sequence: Synthetic oligonucleotide
  Sense strand starting at position 2472 of SEQ ID NO: 1115
uccggauugcgggaggagu

SEQ ID NO: 88825 - RNA, 19 nt, Artificial Sequence
  Description of Artificial Sequence: Synthetic oligonucleotide
  Antisense strand to SEQ ID NO: 88744
acuccucccgcaauccgga

SEQ ID NO: 88826 - RNA, 19 nt, Artificial Sequence
  Description of Artificial Sequence: Synthetic oligonucleotide
  Sense strand starting at position 1159 of SEQ ID NO: 1115
guaucuauuuaagaaguug

SEQ ID NO: 88827 - RNA, 19 nt, Artificial Sequence
  Description of Artificial Sequence: Synthetic oligonucleotide
  Antisense strand to SEQ ID NO: 88746
caacuucuuaaauagauac

SEQ ID NO: 88828 - RNA, 19 nt, Artificial Sequence
  Description of Artificial Sequence: Synthetic oligonucleotide
  Sense strand starting at position 1076 of SEQ ID NO: 1115
ccagaaucccguuaaguca

SEQ ID NO: 88829 - RNA, 19 nt, Artificial Sequence
  Description of Artificial Sequence: Synthetic oligonucleotide
  Antisense strand to SEQ ID NO: 88748
ugacuuaacgggauucugg

SEQ ID NO: 88830 - RNA, 19 nt, Artificial Sequence
  Description of Artificial Sequence: Synthetic oligonucleotide
  Sense strand starting at position 1050 of SEQ ID NO: 1115
agccgaaaugcagaauaau

SEQ ID NO: 88831 - RNA, 19 nt, Artificial Sequence
  Description of Artificial Sequence: Synthetic oligonucleotide
  Antisense strand to SEQ ID NO: 88750
auuauucugcauuucggcu

SEQ ID NO: 88832 - RNA, 19 nt, Artificial Sequence
  Description of Artificial Sequence: Synthetic oligonucleotide
  Sense strand starting at position 998 of SEQ ID NO: 1115
ggaguuucugauuaacgcu

SEQ ID NO: 88833 - RNA, 19 nt, Artificial Sequence
  Description of Artificial Sequence: Synthetic oligonucleotide
  Antisense strand to SEQ ID NO: 88752
agcguuaaucagaaacucc

SEQ ID NO: 88834 - RNA, 19 nt, Artificial Sequence
  Description of Artificial Sequence: Synthetic oligonucleotide
  Sense strand starting at position 732 of SEQ ID NO: 1115
cgcuuugugguucuuaauu

SEQ ID NO: 88835 - RNA, 19 nt, Artificial Sequence
  Description of Artificial Sequence: Synthetic oligonucleotide
  Antisense strand to SEQ ID NO: 88754
aauuaagaaccacaaagcg

SEQ ID NO: 88836 - RNA, 19 nt, Artificial Sequence
  Description of Artificial Sequence: Synthetic oligonucleotide
  Sense strand starting at position 731 of SEQ ID NO: 1115
ucgcuuugugguucuuaau

SEQ ID NO: 88837 - RNA, 19 nt, Artificial Sequence
  Description of Artificial Sequence: Synthetic oligonucleotide
  Antisense strand to SEQ ID NO: 88756
auuaagaaccacaaagcga

SEQ ID NO: 88838 - RNA, 19 nt, Artificial Sequence
  Description of Artificial Sequence: Synthetic oligonucleotide
  Sense strand starting at position 602 of SEQ ID NO: 1115
guugcuuugaaugaaagca

SEQ ID NO: 88839 - RNA, 19 nt, Artificial Sequence
  Description of Artificial Sequence: Synthetic oligonucleotide
  Antisense strand to SEQ ID NO: 88758
ugcuuucauucaaagcaac

SEQ ID NO: 88840 - RNA, 19 nt, Artificial Sequence
  Description of Artificial Sequence: Synthetic oligonucleotide
  Sense strand starting at position 446 of SEQ ID NO: 1115
uacguaucucaaugaugaa

SEQ ID NO: 88841 - RNA, 19 nt, Artificial Sequence
  Description of Artificial Sequence: Synthetic oligonucleotide
  Antisense strand to SEQ ID NO: 88760
uucaucauugagauacgua

SEQ ID NO: 88842 - RNA, 19 nt, Artificial Sequence
  Description of Artificial Sequence: Synthetic oligonucleotide
  Sense strand starting at position 282 of SEQ ID NO: 1115
agaagaauggcuugaggca

SEQ ID NO: 88843 - RNA, 19 nt, Artificial Sequence
  Description of Artificial Sequence: Synthetic oligonucleotide
  Antisense strand to SEQ ID NO: 88762
ugccucaagccauucuucu

SEQ ID NO: 88844 - RNA, 19 nt, Artificial Sequence
  Description of Artificial Sequence: Synthetic oligonucleotide
  Sense strand starting at position 130 of SEQ ID NO: 1115
guccaauucuuucucugga

SEQ ID NO: 88845 - RNA, 19 nt, Artificial Sequence
  Description of Artificial Sequence: Synthetic oligonucleotide
  Antisense strand to SEQ ID NO: 88764
uccagagaaagaauuggac

SEQ ID NO: 88846 - RNA, 19 nt, Artificial Sequence
  Description of Artificial Sequence: Synthetic oligonucleotide
  Sense strand starting at position 3955 of SEQ ID NO: 1116
cagguaacaugcucaaagu

SEQ ID NO: 88847 - RNA, 19 nt, Artificial Sequence
  Description of Artificial Sequence: Synthetic oligonucleotide
  Antisense strand to SEQ ID NO: 88766
acuuugagcauguuaccug

SEQ ID NO: 88848 - RNA, 19 nt, Artificial Sequence
  Description of Artificial Sequence: Synthetic oligonucleotide
  Sense strand starting at position 3947 of SEQ ID NO: 1116
gcgaaagucagguaacaug

SEQ ID NO: 88849 - RNA, 19 nt, Artificial Sequence
  Description of Artificial Sequence: Synthetic oligonucleotide
  Antisense strand to SEQ ID NO: 88768
cauguuaccugacuuucgc

SEQ ID NO: 88850 - RNA, 19 nt, Artificial Sequence
  Description of Artificial Sequence: Synthetic oligonucleotide
  Sense strand starting at position 3890 of SEQ ID NO: 1116
uuaugaauuagguguacug

SEQ ID NO: 88851 - RNA, 19 nt, Artificial Sequence
  Description of Artificial Sequence: Synthetic oligonucleotide
  Antisense strand to SEQ ID NO: 88770
caguacaccuaauucauaa

SEQ ID NO: 88852 - RNA, 19 nt, Artificial Sequence
  Description of Artificial Sequence: Synthetic oligonucleotide
  Sense strand starting at position 3832 of SEQ ID NO: 1116
uugccagucgcuguuguaa

SEQ ID NO: 88853 - RNA, 19 nt, Artificial Sequence
  Description of Artificial Sequence: Synthetic oligonucleotide
  Antisense strand to SEQ ID NO: 88772
uuacaacagcgacuggcaa

SEQ ID NO: 88854 - RNA, 19 nt, Artificial Sequence
  Description of Artificial Sequence: Synthetic oligonucleotide
  Sense strand starting at position 3721 of SEQ ID NO: 1116
ugcagauugcuauaguuua

SEQ ID NO: 88855 - RNA, 19 nt, Artificial Sequence
  Description of Artificial Sequence: Synthetic oligonucleotide
  Antisense strand to SEQ ID NO: 88774
uaaacuauagcaaucugca

SEQ ID NO: 88856 - RNA, 19 nt, Artificial Sequence
  Description of Artificial Sequence: Synthetic oligonucleotide
  Sense strand starting at position 3470 of SEQ ID NO: 1116
uucuacucugcccaggauu

SEQ ID NO: 88857 - RNA, 19 nt, Artificial Sequence
  Description of Artificial Sequence: Synthetic oligonucleotide
  Antisense strand to SEQ ID NO: 88776
aauccugggcagaguagaa

SEQ ID NO: 88858 - RNA, 19 nt, Artificial Sequence
  Description of Artificial Sequence: Synthetic oligonucleotide
  Sense strand starting at position 3301 of SEQ ID NO: 1116
gaguaugaacuggguguua

SEQ ID NO: 88859 - RNA, 19 nt, Artificial Sequence
  Description of Artificial Sequence: Synthetic oligonucleotide
  Antisense strand to SEQ ID NO: 88778
uaacacccaguucauacuc

SEQ ID NO: 88860 - RNA, 19 nt, Artificial Sequence
  Description of Artificial Sequence: Synthetic oligonucleotide
  Sense strand starting at position 3300 of SEQ ID NO: 1116
ggaguaugaacuggguguu

SEQ ID NO: 88861 - RNA, 19 nt, Artificial Sequence
  Description of Artificial Sequence: Synthetic oligonucleotide
  Antisense strand to SEQ ID NO: 88780
aacacccaguucauacucc

SEQ ID NO: 88862 - RNA, 19 nt, Artificial Sequence
  Description of Artificial Sequence: Synthetic oligonucleotide
  Sense strand starting at position 3277 of SEQ ID NO: 1116
agggauggcuuuguacaga

SEQ ID NO: 88863 - RNA, 19 nt, Artificial Sequence
  Description of Artificial Sequence: Synthetic oligonucleotide
  Antisense strand to SEQ ID NO: 88782
ucuguacaaagccaucccu

SEQ ID NO: 88864 - RNA, 19 nt, Artificial Sequence
  Description of Artificial Sequence: Synthetic oligonucleotide
  Sense strand starting at position 3276 of SEQ ID NO: 1116
uagggauggcuuuguacag

SEQ ID NO: 88865 - RNA, 19 nt, Artificial Sequence
  Description of Artificial Sequence: Synthetic oligonucleotide
  Antisense strand to SEQ ID NO: 88784
cuguacaaagccaucccua

SEQ ID NO: 88866 - RNA, 19 nt, Artificial Sequence
  Description of Artificial Sequence: Synthetic oligonucleotide
  Sense strand starting at position 3238 of SEQ ID NO: 1116
gcaugucauggagaccagu

SEQ ID NO: 88867 - RNA, 19 nt, Artificial Sequence
  Description of Artificial Sequence: Synthetic oligonucleotide
  Antisense strand to SEQ ID NO: 88786
acuggucuccaugacaugc

SEQ ID NO: 88868 - RNA, 19 nt, Artificial Sequence
  Description of Artificial Sequence: Synthetic oligonucleotide
  Sense strand starting at position 3197 of SEQ ID NO: 1116
ggcagacauaagugucaaa

SEQ ID NO: 88869 - RNA, 19 nt, Artificial Sequence
  Description of Artificial Sequence: Synthetic oligonucleotide
  Antisense strand to SEQ ID NO: 88788
uuugacacuuaugucugcc

SEQ ID NO: 88870 - RNA, 19 nt, Artificial Sequence
  Description of Artificial Sequence: Synthetic oligonucleotide
  Sense strand starting at position 3184 of SEQ ID NO: 1116
acaaaucauccagggcaga

SEQ ID NO: 88871 - RNA, 19 nt, Artificial Sequence
  Description of Artificial Sequence: Synthetic oligonucleotide
  Antisense strand to SEQ ID NO: 88790
ucugcccuggaugauuugu

SEQ ID NO: 88872 - RNA, 19 nt, Artificial Sequence
  Description of Artificial Sequence: Synthetic oligonucleotide
  Sense strand starting at position 3148 of SEQ ID NO: 1116
gauuguucuguggaugaca

SEQ ID NO: 88873 - RNA, 19 nt, Artificial Sequence
  Description of Artificial Sequence: Synthetic oligonucleotide
  Antisense strand to SEQ ID NO: 88792
ugucauccacagaacaauc

SEQ ID NO: 88874 - RNA, 19 nt, Artificial Sequence
  Description of Artificial Sequence: Synthetic oligonucleotide
  Sense strand starting at position 3146 of SEQ ID NO: 1116
cagauuguucuguggauga

SEQ ID NO: 88875 - RNA, 19 nt, Artificial Sequence
  Description of Artificial Sequence: Synthetic oligonucleotide
  Antisense strand to SEQ ID NO: 88794
ucauccacagaacaaucug

SEQ ID NO: 88876 - RNA, 19 nt, Artificial Sequence
  Description of Artificial Sequence: Synthetic oligonucleotide
  Sense strand starting at position 3145 of SEQ ID NO: 1116
ccagauuguucuguggaug

SEQ ID NO: 88877 - RNA, 19 nt, Artificial Sequence
  Description of Artificial Sequence: Synthetic oligonucleotide
  Antisense strand to SEQ ID NO: 88796
cauccacagaacaaucugg

SEQ ID NO: 88878 - RNA, 19 nt, Artificial Sequence
  Description of Artificial Sequence: Synthetic oligonucleotide
  Sense strand starting at position 3027 of SEQ ID NO: 1116
uugcuagagcuuuauaaau

SEQ ID NO: 88879 - RNA, 19 nt, Artificial Sequence
  Description of Artificial Sequence: Synthetic oligonucleotide
  Antisense strand to SEQ ID NO: 88798
auuuauaaagcucuagcaa

SEQ ID NO: 88880 - RNA, 19 nt, Artificial Sequence
  Description of Artificial Sequence: Synthetic oligonucleotide
  Sense strand starting at position 2917 of SEQ ID NO: 1116
cugcaaaucuugguauaaa

SEQ ID NO: 88881 - RNA, 19 nt, Artificial Sequence
  Description of Artificial Sequence: Synthetic oligonucleotide
  Antisense strand to SEQ ID NO: 88800
uuuauaccaagauuugcag

SEQ ID NO: 88882 - RNA, 19 nt, Artificial Sequence
  Description of Artificial Sequence: Synthetic oligonucleotide
  Sense strand starting at position 2916 of SEQ ID NO: 1116
acugcaaaucuugguauaa

SEQ ID NO: 88883 - RNA, 19 nt, Artificial Sequence
  Description of Artificial Sequence: Synthetic oligonucleotide
  Antisense strand to SEQ ID NO: 88802
uuauaccaagauuugcagu

SEQ ID NO: 88884 - RNA, 19 nt, Artificial Sequence
  Description of Artificial Sequence: Synthetic oligonucleotide
  Sense strand starting at position 2888 of SEQ ID NO: 1116
gcuagcugaagugaguaau

SEQ ID NO: 88885 - RNA, 19 nt, Artificial Sequence
  Description of Artificial Sequence: Synthetic oligonucleotide
  Antisense strand to SEQ ID NO: 88804
auuacucacuucagcuagc

SEQ ID NO: 88886 - RNA, 19 nt, Artificial Sequence
  Description of Artificial Sequence: Synthetic oligonucleotide
  Sense strand starting at position 2863 of SEQ ID NO: 1116
uuugaauguuaucuacuag

SEQ ID NO: 88887 - RNA, 19 nt, Artificial Sequence
  Description of Artificial Sequence: Synthetic oligonucleotide
  Antisense strand to SEQ ID NO: 88806
cuaguagauaacauucaaa

SEQ ID NO: 88888 - RNA, 19 nt, Artificial Sequence
  Description of Artificial Sequence: Synthetic oligonucleotide
  Sense strand starting at position 2807 of SEQ ID NO: 1116
guguauuucucagccacuc

SEQ ID NO: 88889 - RNA, 19 nt, Artificial Sequence
  Description of Artificial Sequence: Synthetic oligonucleotide
  Antisense strand to SEQ ID NO: 88808
gaguggcugagaaauacac

SEQ ID NO: 88890 - RNA, 19 nt, Artificial Sequence
  Description of Artificial Sequence: Synthetic oligonucleotide
  Sense strand starting at position 2377 of SEQ ID NO: 1116
cccuauaaagacugaguau

SEQ ID NO: 88891 - RNA, 19 nt, Artificial Sequence
  Description of Artificial Sequence: Synthetic oligonucleotide
  Antisense strand to SEQ ID NO: 88810
auacucagucuuuauaggg

SEQ ID NO: 88892 - RNA, 19 nt, Artificial Sequence
  Description of Artificial Sequence: Synthetic oligonucleotide
  Sense strand starting at position 2146 of SEQ ID NO: 1116
ucuuaagagcgcuaacuca

SEQ ID NO: 88893 - RNA, 19 nt, Artificial Sequence
  Description of Artificial Sequence: Synthetic oligonucleotide
  Antisense strand to SEQ ID NO: 88812
ugaguuagcgcucuuaaga

SEQ ID NO: 88894 - RNA, 19 nt, Artificial Sequence
  Description of Artificial Sequence: Synthetic oligonucleotide
  Sense strand starting at position 1579 of SEQ ID NO: 1116
ugagauguuuccuugugga

SEQ ID NO: 88895 - RNA, 19 nt, Artificial Sequence
  Description of Artificial Sequence: Synthetic oligonucleotide
  Antisense strand to SEQ ID NO: 88814
uccacaaggaaacaucuca

SEQ ID NO: 88896 - RNA, 19 nt, Artificial Sequence
  Description of Artificial Sequence: Synthetic oligonucleotide
  Sense strand starting at position 1511 of SEQ ID NO: 1116
gugggaauccucggaggua

SEQ ID NO: 88897 - RNA, 19 nt, Artificial Sequence
  Description of Artificial Sequence: Synthetic oligonucleotide
  Antisense strand to SEQ ID NO: 88816
uaccuccgaggauucccac

SEQ ID NO: 88898 - RNA, 19 nt, Artificial Sequence
  Description of Artificial Sequence: Synthetic oligonucleotide
  Sense strand starting at position 1414 of SEQ ID NO: 1116
agcagauagcuuuauauau

SEQ ID NO: 88899 - RNA, 19 nt, Artificial Sequence
  Description of Artificial Sequence: Synthetic oligonucleotide
  Antisense strand to SEQ ID NO: 88818
auauauaaagcuaucugcu

SEQ ID NO: 88900 - RNA, 19 nt, Artificial Sequence
  Description of Artificial Sequence: Synthetic oligonucleotide
  Sense strand starting at position 1195 of SEQ ID NO: 1116
ugaagagguuccuuugcaa

SEQ ID NO: 88901 - RNA, 19 nt, Artificial Sequence
  Description of Artificial Sequence: Synthetic oligonucleotide
  Antisense strand to SEQ ID NO: 88820
uugcaaaggaaccucuuca

SEQ ID NO: 88902 - RNA, 19 nt, Artificial Sequence
  Description of Artificial Sequence: Synthetic oligonucleotide
  Sense strand starting at position 1017 of SEQ ID NO: 1116
cuaggugcccuagauaaga

SEQ ID NO: 88903 - RNA, 19 nt, Artificial Sequence
  Description of Artificial Sequence: Synthetic oligonucleotide
  Antisense strand to SEQ ID NO: 88822
ucuuaucuagggcaccuag

SEQ ID NO: 88904 - RNA, 19 nt, Artificial Sequence
  Description of Artificial Sequence: Synthetic oligonucleotide
  Sense strand starting at position 933 of SEQ ID NO: 1116
cugacacaugcuuacaguu

SEQ ID NO: 88905 - RNA, 19 nt, Artificial Sequence
  Description of Artificial Sequence: Synthetic oligonucleotide
  Antisense strand to SEQ ID NO: 88824
aacuguaagcaugugucag

SEQ ID NO: 88906 - RNA, 19 nt, Artificial Sequence
  Description of Artificial Sequence: Synthetic oligonucleotide
  Sense strand starting at position 874 of SEQ ID NO: 1116
acaggcauauauccauaga

SEQ ID NO: 88907 - RNA, 19 nt, Artificial Sequence
  Description of Artificial Sequence: Synthetic oligonucleotide
  Antisense strand to SEQ ID NO: 88826
ucuauggauauaugccugu

SEQ ID NO: 88908 - RNA, 19 nt, Artificial Sequence
  Description of Artificial Sequence: Synthetic oligonucleotide
  Sense strand starting at position 742 of SEQ ID NO: 1116
augugagcauuaucucaua

SEQ ID NO: 88909 - RNA, 19 nt, Artificial Sequence
  Description of Artificial Sequence: Synthetic oligonucleotide
  Antisense strand to SEQ ID NO: 88828
uaugagauaaugcucacau

SEQ ID NO: 88910 - RNA, 19 nt, Artificial Sequence
  Description of Artificial Sequence: Synthetic oligonucleotide
  Sense strand starting at position 708 of SEQ ID NO: 1116
uaauauugggaauggcuua

SEQ ID NO: 88911 - RNA, 19 nt, Artificial Sequence
  Description of Artificial Sequence: Synthetic oligonucleotide
  Antisense strand to SEQ ID NO: 88830
uaagccauucccaauauua

SEQ ID NO: 88912 - RNA, 19 nt, Artificial Sequence
  Description of Artificial Sequence: Synthetic oligonucleotide
  Sense strand starting at position 696 of SEQ ID NO: 1116
cggaaugcacaauaauauu

SEQ ID NO: 88913 - RNA, 19 nt, Artificial Sequence
  Description of Artificial Sequence: Synthetic oligonucleotide
  Antisense strand to SEQ ID NO: 88832
aauauuauugugcauuccg

SEQ ID NO: 88914 - RNA, 19 nt, Artificial Sequence
  Description of Artificial Sequence: Synthetic oligonucleotide
  Sense strand starting at position 539 of SEQ ID NO: 1116
guggcaaucauacaugguu

SEQ ID NO: 88915 - RNA, 19 nt, Artificial Sequence
  Description of Artificial Sequence: Synthetic oligonucleotide
  Antisense strand to SEQ ID NO: 88834
aaccauguaugauugccac

SEQ ID NO: 88916 - RNA, 19 nt, Artificial Sequence
  Description of Artificial Sequence: Synthetic oligonucleotide
  Sense strand starting at position 328 of SEQ ID NO: 1116
uuccauuaggcugagacuu

SEQ ID NO: 88917 - RNA, 19 nt, Artificial Sequence
  Description of Artificial Sequence: Synthetic oligonucleotide
  Antisense strand to SEQ ID NO: 88836
aagucucagccuaauggaa

SEQ ID NO: 88918 - RNA, 19 nt, Artificial Sequence
  Description of Artificial Sequence: Synthetic oligonucleotide
  Sense strand starting at position 327 of SEQ ID NO: 1116
cuuccauuaggcugagacu

SEQ ID NO: 88919 - RNA, 19 nt, Artificial Sequence
  Description of Artificial Sequence: Synthetic oligonucleotide
  Antisense strand to SEQ ID NO: 88838
agucucagccuaauggaag

SEQ ID NO: 88920 - RNA, 19 nt, Artificial Sequence
  Description of Artificial Sequence: Synthetic oligonucleotide
  Sense strand starting at position 261 of SEQ ID NO: 1116
guaguugauccauaagcag

SEQ ID NO: 88921 - RNA, 19 nt, Artificial Sequence
  Description of Artificial Sequence: Synthetic oligonucleotide
  Antisense strand to SEQ ID NO: 88840
cugcuuauggaucaacuac

SEQ ID NO: 88922 - RNA, 19 nt, Artificial Sequence
  Description of Artificial Sequence: Synthetic oligonucleotide
  Sense strand starting at position 257 of SEQ ID NO: 1116
ccaaguaguugauccauaa

SEQ ID NO: 88923 - RNA, 19 nt, Artificial Sequence
  Description of Artificial Sequence: Synthetic oligonucleotide
  Antisense strand to SEQ ID NO: 88842
uuauggaucaacuacuugg

SEQ ID NO: 88924 - RNA, 19 nt, Artificial Sequence
  Description of Artificial Sequence: Synthetic oligonucleotide
  Sense strand starting at position 111 of SEQ ID NO: 1116
agauguaucuuauuccuuu

SEQ ID NO: 88925 - RNA, 19 nt, Artificial Sequence
  Description of Artificial Sequence: Synthetic oligonucleotide
  Antisense strand to SEQ ID NO: 88844
aaaggaauaagauacaucu

SEQ ID NO: 88926 - RNA, 19 nt, Artificial Sequence
  Description of Artificial Sequence: Synthetic oligonucleotide
  Sense strand starting at position 3941 of SEQ ID NO: 1117
guauguucccuacaaagcu

SEQ ID NO: 88927 - RNA, 19 nt, Artificial Sequence
  Description of Artificial Sequence: Synthetic oligonucleotide
  Antisense strand to SEQ ID NO: 88846
agcuuuguagggaacauac

SEQ ID NO: 88928 - RNA, 19 nt, Artificial Sequence
  Description of Artificial Sequence: Synthetic oligonucleotide
  Sense strand starting at position 3939 of SEQ ID NO: 1117
cuguauguucccuacaaag

SEQ ID NO: 88929 - RNA, 19 nt, Artificial Sequence
  Description of Artificial Sequence: Synthetic oligonucleotide
  Antisense strand to SEQ ID NO: 88848
cuuuguagggaacauacag

SEQ ID NO: 88930 - RNA, 19 nt, Artificial Sequence
  Description of Artificial Sequence: Synthetic oligonucleotide
  Sense strand starting at position 3938 of SEQ ID NO: 1117
acuguauguucccuacaaa

SEQ ID NO: 88931 - RNA, 19 nt, Artificial Sequence
  Description of Artificial Sequence: Synthetic oligonucleotide
  Antisense strand to SEQ ID NO: 88850
uuuguagggaacauacagu

SEQ ID NO: 88932 - RNA, 19 nt, Artificial Sequence
  Description of Artificial Sequence: Synthetic oligonucleotide
  Sense strand starting at position 3861 of SEQ ID NO: 1117
gguagaauuugggaagucu

SEQ ID NO: 88933 - RNA, 19 nt, Artificial Sequence
  Description of Artificial Sequence: Synthetic oligonucleotide
  Antisense strand to SEQ ID NO: 88852
agacuucccaaauucuacc

SEQ ID NO: 88934 - RNA, 19 nt, Artificial Sequence
  Description of Artificial Sequence: Synthetic oligonucleotide
  Sense strand starting at position 3859 of SEQ ID NO: 1117
cugguagaauuugggaagu

SEQ ID NO: 88935 - RNA, 19 nt, Artificial Sequence
  Description of Artificial Sequence: Synthetic oligonucleotide
  Antisense strand to SEQ ID NO: 88854
acuucccaaauucuaccag

SEQ ID NO: 88936 - RNA, 19 nt, Artificial Sequence
  Description of Artificial Sequence: Synthetic oligonucleotide
  Sense strand starting at position 3749 of SEQ ID NO: 1117
aggccaucugguuggaaga

SEQ ID NO: 88937 - RNA, 19 nt, Artificial Sequence
  Description of Artificial Sequence: Synthetic oligonucleotide
  Antisense strand to SEQ ID NO: 88856
ucuuccaaccagauggccu

SEQ ID NO: 88938 - RNA, 19 nt, Artificial Sequence
  Description of Artificial Sequence: Synthetic oligonucleotide
  Sense strand starting at position 3671 of SEQ ID NO: 1117
uguugaaugacggacuguu

SEQ ID NO: 88939 - RNA, 19 nt, Artificial Sequence
  Description of Artificial Sequence: Synthetic oligonucleotide
  Antisense strand to SEQ ID NO: 88858
aacaguccgucauucaaca

SEQ ID NO: 88940 - RNA, 19 nt, Artificial Sequence
  Description of Artificial Sequence: Synthetic oligonucleotide
  Sense strand starting at position 3666 of SEQ ID NO: 1117
aaucuuguugaaugacgga

SEQ ID NO: 88941 - RNA, 19 nt, Artificial Sequence
  Description of Artificial Sequence: Synthetic oligonucleotide
  Antisense strand to SEQ ID NO: 88860
uccgucauucaacaagauu

SEQ ID NO: 88942 - RNA, 19 nt, Artificial Sequence
  Description of Artificial Sequence: Synthetic oligonucleotide
  Sense strand starting at position 3617 of SEQ ID NO: 1117
guucucagcucuucugaga

SEQ ID NO: 88943 - RNA, 19 nt, Artificial Sequence
  Description of Artificial Sequence: Synthetic oligonucleotide
  Antisense strand to SEQ ID NO: 88862
ucucagaagagcugagaac

SEQ ID NO: 88944 - RNA, 19 nt, Artificial Sequence
  Description of Artificial Sequence: Synthetic oligonucleotide
  Sense strand starting at position 3594 of SEQ ID NO: 1117
ucaaaucgacgugguuaca

SEQ ID NO: 88945 - RNA, 19 nt, Artificial Sequence
  Description of Artificial Sequence: Synthetic oligonucleotide
  Antisense strand to SEQ ID NO: 88864
uguaaccacgucgauuuga

SEQ ID NO: 88946 - RNA, 19 nt, Artificial Sequence
  Description of Artificial Sequence: Synthetic oligonucleotide
  Sense strand starting at position 3505 of SEQ ID NO: 1117
uacucugugccucagagaa

SEQ ID NO: 88947 - RNA, 19 nt, Artificial Sequence
  Description of Artificial Sequence: Synthetic oligonucleotide
  Antisense strand to SEQ ID NO: 88866
uucucugaggcacagagua

SEQ ID NO: 88948 - RNA, 19 nt, Artificial Sequence
  Description of Artificial Sequence: Synthetic oligonucleotide
  Sense strand starting at position 3453 of SEQ ID NO: 1117
cuaggugcuaacugagaga

SEQ ID NO: 88949 - RNA, 19 nt, Artificial Sequence
  Description of Artificial Sequence: Synthetic oligonucleotide
  Antisense strand to SEQ ID NO: 88868
ucucucaguuagcaccuag

SEQ ID NO: 88950 - RNA, 19 nt, Artificial Sequence
  Description of Artificial Sequence: Synthetic oligonucleotide
  Sense strand starting at position 2560 of SEQ ID NO: 1117
gaaaguccuuugucccgga

SEQ ID NO: 88951 - RNA, 19 nt, Artificial Sequence
  Description of Artificial Sequence: Synthetic oligonucleotide
  Antisense strand to SEQ ID NO: 88870
uccgggacaaaggacuuuc

SEQ ID NO: 88952 - RNA, 19 nt, Artificial Sequence
  Description of Artificial Sequence: Synthetic oligonucleotide
  Sense strand starting at position 2412 of SEQ ID NO: 1117
gggucagucccagagcuga

SEQ ID NO: 88953 - RNA, 19 nt, Artificial Sequence
  Description of Artificial Sequence: Synthetic oligonucleotide
  Antisense strand to SEQ ID NO: 88872
ucagcucugggacugaccc

SEQ ID NO: 88954 - RNA, 19 nt, Artificial Sequence
  Description of Artificial Sequence: Synthetic oligonucleotide
  Sense strand starting at position 2363 of SEQ ID NO: 1117
cuggaaccguucuuaauag

SEQ ID NO: 88955 - RNA, 19 nt, Artificial Sequence
  Description of Artificial Sequence: Synthetic oligonucleotide
  Antisense strand to SEQ ID NO: 88874
cuauuaagaacgguuccag

SEQ ID NO: 88956 - RNA, 19 nt, Artificial Sequence
  Description of Artificial Sequence: Synthetic oligonucleotide
  Sense strand starting at position 2287 of SEQ ID NO: 1117
ugaggcgagagguacuauu

SEQ ID NO: 88957 - RNA, 19 nt, Artificial Sequence
  Description of Artificial Sequence: Synthetic oligonucleotide
  Antisense strand to SEQ ID NO: 88876
aauaguaccucucgccuca

SEQ ID NO: 88958 - RNA, 19 nt, Artificial Sequence
  Description of Artificial Sequence: Synthetic oligonucleotide
  Sense strand starting at position 2282 of SEQ ID NO: 1117
ugcgaugaggcgagaggua

SEQ ID NO: 88959 - RNA, 19 nt, Artificial Sequence
  Description of Artificial Sequence: Synthetic oligonucleotide
  Antisense strand to SEQ ID NO: 88878
uaccucucgccucaucgca

SEQ ID NO: 88960 - RNA, 19 nt, Artificial Sequence
  Description of Artificial Sequence: Synthetic oligonucleotide
  Sense strand starting at position 2262 of SEQ ID NO: 1117
cuccguuaugcacaauucu

SEQ ID NO: 88961 - RNA, 19 nt, Artificial Sequence
  Description of Artificial Sequence: Synthetic oligonucleotide
  Antisense strand to SEQ ID NO: 88880
agaauugugcauaacggag

SEQ ID NO: 88962 - RNA, 19 nt, Artificial Sequence
  Description of Artificial Sequence: Synthetic oligonucleotide
  Sense strand starting at position 2215 of SEQ ID NO: 1117
uccucauauuugucaggca

SEQ ID NO: 88963 - RNA, 19 nt, Artificial Sequence
  Description of Artificial Sequence: Synthetic oligonucleotide
  Antisense strand to SEQ ID NO: 88882
ugccugacaaauaugagga

SEQ ID NO: 88964 - RNA, 19 nt, Artificial Sequence
  Description of Artificial Sequence: Synthetic oligonucleotide
  Sense strand starting at position 2040 of SEQ ID NO: 1117
cgaggcacccugggaauua

SEQ ID NO: 88965 - RNA, 19 nt, Artificial Sequence
  Description of Artificial Sequence: Synthetic oligonucleotide
  Antisense strand to SEQ ID NO: 88884
uaauucccagggugccucg

SEQ ID NO: 88966 - RNA, 19 nt, Artificial Sequence
  Description of Artificial Sequence: Synthetic oligonucleotide
  Sense strand starting at position 1571 of SEQ ID NO: 1117
gagcgugucccggaacaug

SEQ ID NO: 88967 - RNA, 19 nt, Artificial Sequence
  Description of Artificial Sequence: Synthetic oligonucleotide
  Antisense strand to SEQ ID NO: 88886
cauguuccgggacacgcuc

SEQ ID NO: 88968 - RNA, 19 nt, Artificial Sequence
  Description of Artificial Sequence: Synthetic oligonucleotide
  Sense strand starting at position 1146 of SEQ ID NO: 1117
uaggguccugccuauuaca

SEQ ID NO: 88969 - RNA, 19 nt, Artificial Sequence
  Description of Artificial Sequence: Synthetic oligonucleotide
  Antisense strand to SEQ ID NO: 88888
uguaauaggcaggacccua

SEQ ID NO: 88970 - RNA, 19 nt, Artificial Sequence
  Description of Artificial Sequence: Synthetic oligonucleotide
  Sense strand starting at position 1066 of SEQ ID NO: 1117
cugauaaguggauggcuga

SEQ ID NO: 88971 - RNA, 19 nt, Artificial Sequence
  Description of Artificial Sequence: Synthetic oligonucleotide
  Antisense strand to SEQ ID NO: 88890
ucagccauccacuuaucag

SEQ ID NO: 88972 - RNA, 19 nt, Artificial Sequence
  Description of Artificial Sequence: Synthetic oligonucleotide
  Sense strand starting at position 1037 of SEQ ID NO: 1117
gguuaagcgacuuacccaa

SEQ ID NO: 88973 - RNA, 19 nt, Artificial Sequence
  Description of Artificial Sequence: Synthetic oligonucleotide
  Antisense strand to SEQ ID NO: 88892
uuggguaagucgcuuaacc

SEQ ID NO: 88974 - RNA, 19 nt, Artificial Sequence
  Description of Artificial Sequence: Synthetic oligonucleotide
  Sense strand starting at position 989 of SEQ ID NO: 1117
gggaaauuauugucuucuc

SEQ ID NO: 88975 - RNA, 19 nt, Artificial Sequence
  Description of Artificial Sequence: Synthetic oligonucleotide
  Antisense strand to SEQ ID NO: 88894
gagaagacaauaauuuccc

SEQ ID NO: 88976 - RNA, 19 nt, Artificial Sequence
  Description of Artificial Sequence: Synthetic oligonucleotide
  Sense strand starting at position 910 of SEQ ID NO: 1117
uguguuugcacgucauucu

SEQ ID NO: 88977 - RNA, 19 nt, Artificial Sequence
  Description of Artificial Sequence: Synthetic oligonucleotide
  Antisense strand to SEQ ID NO: 88896
agaaugacgugcaaacaca

SEQ ID NO: 88978 - RNA, 19 nt, Artificial Sequence
  Description of Artificial Sequence: Synthetic oligonucleotide
  Sense strand starting at position 898 of SEQ ID NO: 1117
augacaacacuuuguguuu

SEQ ID NO: 88979 - RNA, 19 nt, Artificial Sequence
  Description of Artificial Sequence: Synthetic oligonucleotide
  Antisense strand to SEQ ID NO: 88898
aaacacaaaguguugucau

SEQ ID NO: 88980 - RNA, 19 nt, Artificial Sequence
  Description of Artificial Sequence: Synthetic oligonucleotide
  Sense strand starting at position 749 of SEQ ID NO: 1117
uaaauacuugucgaccgaa

SEQ ID NO: 88981 - RNA, 19 nt, Artificial Sequence
  Description of Artificial Sequence: Synthetic oligonucleotide
  Antisense strand to SEQ ID NO: 88900
uucggucgacaaguauuua

SEQ ID NO: 88982 - RNA, 19 nt, Artificial Sequence
  Description of Artificial Sequence: Synthetic oligonucleotide
  Sense strand starting at position 699 of SEQ ID NO: 1117
gucuuucuguuugcuauuu

SEQ ID NO: 88983 - RNA, 19 nt, Artificial Sequence
  Description of Artificial Sequence: Synthetic oligonucleotide
  Antisense strand to SEQ ID NO: 88902
aaauagcaaacagaaagac

SEQ ID NO: 88984 - RNA, 19 nt, Artificial Sequence
  Description of Artificial Sequence: Synthetic oligonucleotide
  Sense strand starting at position 696 of SEQ ID NO: 1117
uuugucuuucuguuugcua

SEQ ID NO: 88985 - RNA, 19 nt, Artificial Sequence
  Description of Artificial Sequence: Synthetic oligonucleotide
  Antisense strand to SEQ ID NO: 88904
uagcaaacagaaagacaaa

SEQ ID NO: 88986 - RNA, 19 nt, Artificial Sequence
  Description of Artificial Sequence: Synthetic oligonucleotide
  Sense strand starting at position 664 of SEQ ID NO: 1117
aucacuguguaagauuuau

SEQ ID NO: 88987 - RNA, 19 nt, Artificial Sequence
  Description of Artificial Sequence: Synthetic oligonucleotide
  Antisense strand to SEQ ID NO: 88906
auaaaucuuacacagugau

SEQ ID NO: 88988 - RNA, 19 nt, Artificial Sequence
  Description of Artificial Sequence: Synthetic oligonucleotide
  Sense strand starting at position 661 of SEQ ID NO: 1117
uguaucacuguguaagauu

SEQ ID NO: 88989 - RNA, 19 nt, Artificial Sequence
  Description of Artificial Sequence: Synthetic oligonucleotide
  Antisense strand to SEQ ID NO: 88908
aaucuuacacagugauaca

SEQ ID NO: 88990 - RNA, 19 nt, Artificial Sequence
  Description of Artificial Sequence: Synthetic oligonucleotide
  Sense strand starting at position 660 of SEQ ID NO: 1117
uuguaucacuguguaagau

SEQ ID NO: 88991 - RNA, 19 nt, Artificial Sequence
  Description of Artificial Sequence: Synthetic oligonucleotide
  Antisense strand to SEQ ID NO: 88910
aucuuacacagugauacaa

SEQ ID NO: 88992 - RNA, 19 nt, Artificial Sequence
  Description of Artificial Sequence: Synthetic oligonucleotide
  Sense strand starting at position 659 of SEQ ID NO: 1117
auuguaucacuguguaaga

SEQ ID NO: 88993 - RNA, 19 nt, Artificial Sequence
  Description of Artificial Sequence: Synthetic oligonucleotide
  Antisense strand to SEQ ID NO: 88912
ucuuacacagugauacaau

SEQ ID NO: 88994 - RNA, 19 nt, Artificial Sequence
  Description of Artificial Sequence: Synthetic oligonucleotide
  Sense strand starting at position 307 of SEQ ID NO: 1117
ugagacugucccugacaca

SEQ ID NO: 88995 - RNA, 19 nt, Artificial Sequence
  Description of Artificial Sequence: Synthetic oligonucleotide
  Antisense strand to SEQ ID NO: 88914
ugugucagggacagucuca

SEQ ID NO: 88996 - RNA, 19 nt, Artificial Sequence
  Description of Artificial Sequence: Synthetic oligonucleotide
  Sense strand starting at position 173 of SEQ ID NO: 1117
gauccuugagcaggcauaa

SEQ ID NO: 88997 - RNA, 19 nt, Artificial Sequence
  Description of Artificial Sequence: Synthetic oligonucleotide
  Antisense strand to SEQ ID NO: 88916
uuaugccugcucaaggauc

SEQ ID NO: 88998 - RNA, 19 nt, Artificial Sequence
  Description of Artificial Sequence: Synthetic oligonucleotide
  Sense strand starting at position 167 of SEQ ID NO: 1117
ccuguugauccuugagcag

SEQ ID NO: 88999 - RNA, 19 nt, Artificial Sequence
  Description of Artificial Sequence: Synthetic oligonucleotide
  Antisense strand to SEQ ID NO: 88918
cugcucaaggaucaacagg

SEQ ID NO: 89000 - RNA, 19 nt, Artificial Sequence
  Description of Artificial Sequence: Synthetic oligonucleotide
  Sense strand starting at position 166 of SEQ ID NO: 1117
cccuguugauccuugagca

SEQ ID NO: 89001 - RNA, 19 nt, Artificial Sequence
  Description of Artificial Sequence: Synthetic oligonucleotide
  Antisense strand to SEQ ID NO: 88920
ugcucaaggaucaacaggg

SEQ ID NO: 89002 - RNA, 19 nt, Artificial Sequence
  Description of Artificial Sequence: Synthetic oligonucleotide
  Sense strand starting at position 69 of SEQ ID NO: 1117
auuguaugccaggaaccaa

SEQ ID NO: 89003 - RNA, 19 nt, Artificial Sequence
  Description of Artificial Sequence: Synthetic oligonucleotide
  Antisense strand to SEQ ID NO: 88922
uugguuccuggcauacaau

SEQ ID NO: 89004 - RNA, 19 nt, Artificial Sequence
  Description of Artificial Sequence: Synthetic oligonucleotide
  Sense strand starting at position 68 of SEQ ID NO: 1117
uauuguaugccaggaacca

SEQ ID NO: 89005 - RNA, 19 nt, Artificial Sequence
  Description of Artificial Sequence: Synthetic oligonucleotide
  Antisense strand to SEQ ID NO: 88924
ugguuccuggcauacaaua

SEQ ID NO: 89006 - RNA, 19 nt, Artificial Sequence
  Description of Artificial Sequence: Synthetic oligonucleotide
  Sense strand starting at position 99 of SEQ ID NO: 1118
agcuguuauuaucugaagu

SEQ ID NO: 89007 - RNA, 19 nt, Artificial Sequence
  Description of Artificial Sequence: Synthetic oligonucleotide
  Antisense strand to SEQ ID NO: 88926
acuucagauaauaacagcu

SEQ ID NO: 89008 - RNA, 19 nt, Artificial Sequence
  Description of Artificial Sequence: Synthetic oligonucleotide
  Sense strand starting at position 242 of SEQ ID NO: 1118
uacuguuauuuggagauaa

SEQ ID NO: 89009 - RNA, 19 nt, Artificial Sequence
  Description of Artificial Sequence: Synthetic oligonucleotide
  Antisense strand to SEQ ID NO: 88928
uuaucuccaaauaacagua

SEQ ID NO: 89010 - RNA, 19 nt, Artificial Sequence
  Description of Artificial Sequence: Synthetic oligonucleotide
  Sense strand starting at position 252 of SEQ ID NO: 1118
uggagauaaucucuacucu

SEQ ID NO: 89011 - RNA, 19 nt, Artificial Sequence
  Description of Artificial Sequence: Synthetic oligonucleotide
  Antisense strand to SEQ ID NO: 88930
agaguagagauuaucucca

SEQ ID NO: 89012 - RNA, 19 nt, Artificial Sequence
  Description of Artificial Sequence: Synthetic oligonucleotide
  Sense strand starting at position 333 of SEQ ID NO: 1118
gcuccaagucaacaucaga

SEQ ID NO: 89013 - RNA, 19 nt, Artificial Sequence
  Description of Artificial Sequence: Synthetic oligonucleotide
  Antisense strand to SEQ ID NO: 88932
ucugauguugacuuggagc

SEQ ID NO: 89014 - RNA, 19 nt, Artificial Sequence
  Description of Artificial Sequence: Synthetic oligonucleotide
  Sense strand starting at position 364 of SEQ ID NO: 1118
caucaaauaguugguauga

SEQ ID NO: 89015 - RNA, 19 nt, Artificial Sequence
  Description of Artificial Sequence: Synthetic oligonucleotide
  Antisense strand to SEQ ID NO: 88934
ucauaccaacuauuugaug

SEQ ID NO: 89016 - RNA, 19 nt, Artificial Sequence
  Description of Artificial Sequence: Synthetic oligonucleotide
  Sense strand starting at position 373 of SEQ ID NO: 1118
guugguaugagagauacuu

SEQ ID NO: 89017 - RNA, 19 nt, Artificial Sequence
  Description of Artificial Sequence: Synthetic oligonucleotide
  Antisense strand to SEQ ID NO: 88936
aaguaucucucauaccaac

SEQ ID NO: 89018 - RNA, 19 nt, Artificial Sequence
  Description of Artificial Sequence: Synthetic oligonucleotide
  Sense strand starting at position 398 of SEQ ID NO: 1118
cagauuaaguccuugugaa

SEQ ID NO: 89019 - RNA, 19 nt, Artificial Sequence
  Description of Artificial Sequence: Synthetic oligonucleotide
  Antisense strand to SEQ ID NO: 88938
uucacaaggacuuaaucug

SEQ ID NO: 89020 - RNA, 19 nt, Artificial Sequence
  Description of Artificial Sequence: Synthetic oligonucleotide
  Sense strand starting at position 399 of SEQ ID NO: 1118
agauuaaguccuugugaau

SEQ ID NO: 89021 - RNA, 19 nt, Artificial Sequence
  Description of Artificial Sequence: Synthetic oligonucleotide
  Antisense strand to SEQ ID NO: 88940
auucacaaggacuuaaucu

SEQ ID NO: 89022 - RNA, 19 nt, Artificial Sequence
  Description of Artificial Sequence: Synthetic oligonucleotide
  Sense strand starting at position 525 of SEQ ID NO: 1118
acagguguucuauguacca

SEQ ID NO: 89023 - RNA, 19 nt, Artificial Sequence
  Description of Artificial Sequence: Synthetic oligonucleotide
  Antisense strand to SEQ ID NO: 88942
ugguacauagaacaccugu

SEQ ID NO: 89024 - RNA, 19 nt, Artificial Sequence
  Description of Artificial Sequence: Synthetic oligonucleotide
  Sense strand starting at position 532 of SEQ ID NO: 1118
uucuauguaccaggcauua

SEQ ID NO: 89025 - RNA, 19 nt, Artificial Sequence
  Description of Artificial Sequence: Synthetic oligonucleotide
  Antisense strand to SEQ ID NO: 88944
uaaugccugguacauagaa

SEQ ID NO: 89026 - RNA, 19 nt, Artificial Sequence
  Description of Artificial Sequence: Synthetic oligonucleotide
  Sense strand starting at position 544 of SEQ ID NO: 1118
ggcauuaagugcuuuaaau

SEQ ID NO: 89027 - RNA, 19 nt, Artificial Sequence
  Description of Artificial Sequence: Synthetic oligonucleotide
  Antisense strand to SEQ ID NO: 88946
auuuaaagcacuuaaugcc

SEQ ID NO: 89028 - RNA, 19 nt, Artificial Sequence
  Description of Artificial Sequence: Synthetic oligonucleotide
  Sense strand starting at position 873 of SEQ ID NO: 1118
cuggaagacgagcgaaauu

SEQ ID NO: 89029 - RNA, 19 nt, Artificial Sequence
  Description of Artificial Sequence: Synthetic oligonucleotide
  Antisense strand to SEQ ID NO: 88948
aauuucgcucgucuuccag

SEQ ID NO: 89030 - RNA, 19 nt, Artificial Sequence
  Description of Artificial Sequence: Synthetic oligonucleotide
  Sense strand starting at position 947 of SEQ ID NO: 1118
accaguuucucucugauga

SEQ ID NO: 89031 - RNA, 19 nt, Artificial Sequence
  Description of Artificial Sequence: Synthetic oligonucleotide
  Antisense strand to SEQ ID NO: 88950
ucaucagagagaaacuggu

SEQ ID NO: 89032 - RNA, 19 nt, Artificial Sequence
  Description of Artificial Sequence: Synthetic oligonucleotide
  Sense strand starting at position 948 of SEQ ID NO: 1118
ccaguuucucucugaugag

SEQ ID NO: 89033 - RNA, 19 nt, Artificial Sequence
  Description of Artificial Sequence: Synthetic oligonucleotide
  Antisense strand to SEQ ID NO: 88952
cucaucagagagaaacugg

SEQ ID NO: 89034 - RNA, 19 nt, Artificial Sequence
  Description of Artificial Sequence: Synthetic oligonucleotide
  Sense strand starting at position 1200 of SEQ ID NO: 1118
agauacugcuuguucgaaa

SEQ ID NO: 89035 - RNA, 19 nt, Artificial Sequence
  Description of Artificial Sequence: Synthetic oligonucleotide
  Antisense strand to SEQ ID NO: 88954
uuucgaacaagcaguaucu

SEQ ID NO: 89036 - RNA, 19 nt, Artificial Sequence
  Description of Artificial Sequence: Synthetic oligonucleotide
  Sense strand starting at position 1273 of SEQ ID NO: 1118
acaggagauacguguuugu

SEQ ID NO: 89037 - RNA, 19 nt, Artificial Sequence
  Description of Artificial Sequence: Synthetic oligonucleotide
  Antisense strand to SEQ ID NO: 88956
acaaacacguaucuccugu

SEQ ID NO: 89038 - RNA, 19 nt, Artificial Sequence
  Description of Artificial Sequence: Synthetic oligonucleotide
  Sense strand starting at position 1432 of SEQ ID NO: 1118
ccgggagacucgcucaaga

SEQ ID NO: 89039 - RNA, 19 nt, Artificial Sequence
  Description of Artificial Sequence: Synthetic oligonucleotide
  Antisense strand to SEQ ID NO: 88958
ucuugagcgagucucccgg

SEQ ID NO: 89040 - RNA, 19 nt, Artificial Sequence
  Description of Artificial Sequence: Synthetic oligonucleotide
  Sense strand starting at position 1505 of SEQ ID NO: 1118
cggccuuggguagaguuua

SEQ ID NO: 89041 - RNA, 19 nt, Artificial Sequence
  Description of Artificial Sequence: Synthetic oligonucleotide
  Antisense strand to SEQ ID NO: 88960
uaaacucuacccaaggccg

SEQ ID NO: 89042 - RNA, 19 nt, Artificial Sequence
  Description of Artificial Sequence: Synthetic oligonucleotide
  Sense strand starting at position 2116 of SEQ ID NO: 1118
ucagacagggucugaucua

SEQ ID NO: 89043 - RNA, 19 nt, Artificial Sequence
  Description of Artificial Sequence: Synthetic oligonucleotide
  Antisense strand to SEQ ID NO: 88962
uagaucagacccugucuga

SEQ ID NO: 89044 - RNA, 19 nt, Artificial Sequence
  Description of Artificial Sequence: Synthetic oligonucleotide
  Sense strand starting at position 2284 of SEQ ID NO: 1118
agacauuggugcuuauuau

SEQ ID NO: 89045 - RNA, 19 nt, Artificial Sequence
  Description of Artificial Sequence: Synthetic oligonucleotide
  Antisense strand to SEQ ID NO: 88964
auaauaagcaccaaugucu

SEQ ID NO: 89046 - RNA, 19 nt, Artificial Sequence
  Description of Artificial Sequence: Synthetic oligonucleotide
  Sense strand starting at position 2285 of SEQ ID NO: 1118
gacauuggugcuuauuaug

SEQ ID NO: 89047 - RNA, 19 nt, Artificial Sequence
  Description of Artificial Sequence: Synthetic oligonucleotide
  Antisense strand to SEQ ID NO: 88966
cauaauaagcaccaauguc

SEQ ID NO: 89048 - RNA, 19 nt, Artificial Sequence
  Description of Artificial Sequence: Synthetic oligonucleotide
  Sense strand starting at position 2489 of SEQ ID NO: 1118
gauaguugucuuuguaaau

SEQ ID NO: 89049 - RNA, 19 nt, Artificial Sequence
  Description of Artificial Sequence: Synthetic oligonucleotide
  Antisense strand to SEQ ID NO: 88968
auuuacaaagacaacuauc

SEQ ID NO: 89050 - RNA, 19 nt, Artificial Sequence
  Description of Artificial Sequence: Synthetic oligonucleotide
  Sense strand starting at position 2490 of SEQ ID NO: 1118
auaguugucuuuguaaaug

SEQ ID NO: 89051 - RNA, 19 nt, Artificial Sequence
  Description of Artificial Sequence: Synthetic oligonucleotide
  Antisense strand to SEQ ID NO: 88970
cauuuacaaagacaacuau

SEQ ID NO: 89052 - RNA, 19 nt, Artificial Sequence
  Description of Artificial Sequence: Synthetic oligonucleotide
  Sense strand starting at position 2589 of SEQ ID NO: 1118
agugcaguagaacgauuau

SEQ ID NO: 89053 - RNA, 19 nt, Artificial Sequence
  Description of Artificial Sequence: Synthetic oligonucleotide
  Antisense strand to SEQ ID NO: 88972
auaaucguucuacugcacu

SEQ ID NO: 89054 - RNA, 19 nt, Artificial Sequence
  Description of Artificial Sequence: Synthetic oligonucleotide
  Sense strand starting at position 2598 of SEQ ID NO: 1118
gaacgauuauagcucauug

SEQ ID NO: 89055 - RNA, 19 nt, Artificial Sequence
  Description of Artificial Sequence: Synthetic oligonucleotide
  Antisense strand to SEQ ID NO: 88974
caaugagcuauaaucguuc

SEQ ID NO: 89056 - RNA, 19 nt, Artificial Sequence
  Description of Artificial Sequence: Synthetic oligonucleotide
  Sense strand starting at position 2806 of SEQ ID NO: 1118
gugauuacaggcugaguca

SEQ ID NO: 89057 - RNA, 19 nt, Artificial Sequence
  Description of Artificial Sequence: Synthetic oligonucleotide
  Antisense strand to SEQ ID NO: 88976
ugacucagccuguaaucac

SEQ ID NO: 89058 - RNA, 19 nt, Artificial Sequence
  Description of Artificial Sequence: Synthetic oligonucleotide
  Sense strand starting at position 2955 of SEQ ID NO: 1118
acuuacauccuuuguagua

SEQ ID NO: 89059 - RNA, 19 nt, Artificial Sequence
  Description of Artificial Sequence: Synthetic oligonucleotide
  Antisense strand to SEQ ID NO: 88978
uacuacaaaggauguaagu

SEQ ID NO: 89060 - RNA, 19 nt, Artificial Sequence
  Description of Artificial Sequence: Synthetic oligonucleotide
  Sense strand starting at position 3005 of SEQ ID NO: 1118
uuaauuguggauuaagguu

SEQ ID NO: 89061 - RNA, 19 nt, Artificial Sequence
  Description of Artificial Sequence: Synthetic oligonucleotide
  Antisense strand to SEQ ID NO: 88980
aaccuuaauccacaauuaa

SEQ ID NO: 89062 - RNA, 19 nt, Artificial Sequence
  Description of Artificial Sequence: Synthetic oligonucleotide
  Sense strand starting at position 3162 of SEQ ID NO: 1118
gauggagucucagugugua

SEQ ID NO: 89063 - RNA, 19 nt, Artificial Sequence
  Description of Artificial Sequence: Synthetic oligonucleotide
  Antisense strand to SEQ ID NO: 88982
uacacacugagacuccauc

SEQ ID NO: 89064 - RNA, 19 nt, Artificial Sequence
  Description of Artificial Sequence: Synthetic oligonucleotide
  Sense strand starting at position 3296 of SEQ ID NO: 1118
uauuacaaugcugguugaa

SEQ ID NO: 89065 - RNA, 19 nt, Artificial Sequence
  Description of Artificial Sequence: Synthetic oligonucleotide
  Antisense strand to SEQ ID NO: 88984
uucaaccagcauuguaaua

SEQ ID NO: 89066 - RNA, 19 nt, Artificial Sequence
  Description of Artificial Sequence: Synthetic oligonucleotide
  Sense strand starting at position 3298 of SEQ ID NO: 1118
uuacaaugcugguugaaua

SEQ ID NO: 89067 - RNA, 19 nt, Artificial Sequence
  Description of Artificial Sequence: Synthetic oligonucleotide
  Antisense strand to SEQ ID NO: 88986
uauucaaccagcauuguaa

SEQ ID NO: 89068 - RNA, 19 nt, Artificial Sequence
  Description of Artificial Sequence: Synthetic oligonucleotide
  Sense strand starting at position 3299 of SEQ ID NO: 1118
uacaaugcugguugaauau

SEQ ID NO: 89069 - RNA, 19 nt, Artificial Sequence
  Description of Artificial Sequence: Synthetic oligonucleotide
  Antisense strand to SEQ ID NO: 88988
auauucaaccagcauugua

SEQ ID NO: 89070 - RNA, 19 nt, Artificial Sequence
  Description of Artificial Sequence: Synthetic oligonucleotide
  Sense strand starting at position 3306 of SEQ ID NO: 1118
cugguugaauauccucaua

SEQ ID NO: 89071 - RNA, 19 nt, Artificial Sequence
  Description of Artificial Sequence: Synthetic oligonucleotide
  Antisense strand to SEQ ID NO: 88990
uaugaggauauucaaccag

SEQ ID NO: 89072 - RNA, 19 nt, Artificial Sequence
  Description of Artificial Sequence: Synthetic oligonucleotide
  Sense strand starting at position 3308 of SEQ ID NO: 1118
gguugaauauccucauagc

SEQ ID NO: 89073 - RNA, 19 nt, Artificial Sequence
  Description of Artificial Sequence: Synthetic oligonucleotide
  Antisense strand to SEQ ID NO: 88992
gcuaugaggauauucaacc

SEQ ID NO: 89074 - RNA, 19 nt, Artificial Sequence
  Description of Artificial Sequence: Synthetic oligonucleotide
  Sense strand starting at position 3309 of SEQ ID NO: 1118
guugaauauccucauagcu

SEQ ID NO: 89075 - RNA, 19 nt, Artificial Sequence
  Description of Artificial Sequence: Synthetic oligonucleotide
  Antisense strand to SEQ ID NO: 88994
agcuaugaggauauucaac

SEQ ID NO: 89076 - RNA, 19 nt, Artificial Sequence
  Description of Artificial Sequence: Synthetic oligonucleotide
  Sense strand starting at position 3488 of SEQ ID NO: 1118
guggaucauuccuugcacu

SEQ ID NO: 89077 - RNA, 19 nt, Artificial Sequence
  Description of Artificial Sequence: Synthetic oligonucleotide
  Antisense strand to SEQ ID NO: 88996
agugcaaggaaugauccac

SEQ ID NO: 89078 - RNA, 19 nt, Artificial Sequence
  Description of Artificial Sequence: Synthetic oligonucleotide
  Sense strand starting at position 3489 of SEQ ID NO: 1118
uggaucauuccuugcacua

SEQ ID NO: 89079 - RNA, 19 nt, Artificial Sequence
  Description of Artificial Sequence: Synthetic oligonucleotide
  Antisense strand to SEQ ID NO: 88998
uagugcaaggaaugaucca

SEQ ID NO: 89080 - RNA, 19 nt, Artificial Sequence
  Description of Artificial Sequence: Synthetic oligonucleotide
  Sense strand starting at position 3587 of SEQ ID NO: 1118
gauaccagacuuugguauu

SEQ ID NO: 89081 - RNA, 19 nt, Artificial Sequence
  Description of Artificial Sequence: Synthetic oligonucleotide
  Antisense strand to SEQ ID NO: 89000
aauaccaaagucugguauc

SEQ ID NO: 89082 - RNA, 19 nt, Artificial Sequence
  Description of Artificial Sequence: Synthetic oligonucleotide
  Sense strand starting at position 3658 of SEQ ID NO: 1118
agcugucauagugaagcuu

SEQ ID NO: 89083 - RNA, 19 nt, Artificial Sequence
  Description of Artificial Sequence: Synthetic oligonucleotide
  Antisense strand to SEQ ID NO: 89002
aagcuucacuaugacagcu

SEQ ID NO: 89084 - RNA, 19 nt, Artificial Sequence
  Description of Artificial Sequence: Synthetic oligonucleotide
  Sense strand starting at position 3676 of SEQ ID NO: 1118
ugcagcuuccuugaaauuc

SEQ ID NO: 89085 - RNA, 19 nt, Artificial Sequence
  Description of Artificial Sequence: Synthetic oligonucleotide
  Antisense strand to SEQ ID NO: 89004
gaauuucaaggaagcugca

SEQ ID NO: 89086 - RNA, 19 nt, Artificial Sequence
  Description of Artificial Sequence: Synthetic oligonucleotide
  Sense strand starting at position 25 of SEQ ID NO: 1119
ccacaauccuucguggcaa

SEQ ID NO: 89087 - RNA, 19 nt, Artificial Sequence
  Description of Artificial Sequence: Synthetic oligonucleotide
  Antisense strand to SEQ ID NO: 89006
uugccacgaaggauugugg

SEQ ID NO: 89088 - RNA, 19 nt, Artificial Sequence
  Description of Artificial Sequence: Synthetic oligonucleotide
  Sense strand starting at position 335 of SEQ ID NO: 1119
uucuaagaaugugcauagu

SEQ ID NO: 89089 - RNA, 19 nt, Artificial Sequence
  Description of Artificial Sequence: Synthetic oligonucleotide
  Antisense strand to SEQ ID NO: 89008
acuaugcacauucuuagaa

SEQ ID NO: 89090 - RNA, 19 nt, Artificial Sequence
  Description of Artificial Sequence: Synthetic oligonucleotide
  Sense strand starting at position 341 of SEQ ID NO: 1119
gaaugugcauagucucaga

SEQ ID NO: 89091 - RNA, 19 nt, Artificial Sequence
  Description of Artificial Sequence: Synthetic oligonucleotide
  Antisense strand to SEQ ID NO: 89010
ucugagacuaugcacauuc

SEQ ID NO: 89092 - RNA, 19 nt, Artificial Sequence
  Description of Artificial Sequence: Synthetic oligonucleotide
  Sense strand starting at position 526 of SEQ ID NO: 1119
augucugaugcacaacgaa

SEQ ID NO: 89093 - RNA, 19 nt, Artificial Sequence
  Description of Artificial Sequence: Synthetic oligonucleotide
  Antisense strand to SEQ ID NO: 89012
uucguugugcaucagacau

SEQ ID NO: 89094 - RNA, 19 nt, Artificial Sequence
  Description of Artificial Sequence: Synthetic oligonucleotide
  Sense strand starting at position 594 of SEQ ID NO: 1119
guaucaacucccugagccu

SEQ ID NO: 89095 - RNA, 19 nt, Artificial Sequence
  Description of Artificial Sequence: Synthetic oligonucleotide
  Antisense strand to SEQ ID NO: 89014
aggcucagggaguugauac

SEQ ID NO: 89096 - RNA, 19 nt, Artificial Sequence
  Description of Artificial Sequence: Synthetic oligonucleotide
  Sense strand starting at position 623 of SEQ ID NO: 1119
ccuaucagauggguaugau

SEQ ID NO: 89097 - RNA, 19 nt, Artificial Sequence
  Description of Artificial Sequence: Synthetic oligonucleotide
  Antisense strand to SEQ ID NO: 89016
aucauacccaucugauagg

SEQ ID NO: 89098 - RNA, 19 nt, Artificial Sequence
  Description of Artificial Sequence: Synthetic oligonucleotide
  Sense strand starting at position 1102 of SEQ ID NO: 1119
cacugugacuugcccaaga

SEQ ID NO: 89099 - RNA, 19 nt, Artificial Sequence
  Description of Artificial Sequence: Synthetic oligonucleotide
  Antisense strand to SEQ ID NO: 89018
ucuugggcaagucacagug

SEQ ID NO: 89100 - RNA, 19 nt, Artificial Sequence
  Description of Artificial Sequence: Synthetic oligonucleotide
  Sense strand starting at position 1124 of SEQ ID NO: 1119
cacugugagucaccaggaa

SEQ ID NO: 89101 - RNA, 19 nt, Artificial Sequence
  Description of Artificial Sequence: Synthetic oligonucleotide
  Antisense strand to SEQ ID NO: 89020
uuccuggugacucacagug

SEQ ID NO: 89102 - RNA, 19 nt, Artificial Sequence
  Description of Artificial Sequence: Synthetic oligonucleotide
  Sense strand starting at position 1234 of SEQ ID NO: 1119
uucucuuuggugggcagaa

SEQ ID NO: 89103 - RNA, 19 nt, Artificial Sequence
  Description of Artificial Sequence: Synthetic oligonucleotide
  Antisense strand to SEQ ID NO: 89022
uucugcccaccaaagagaa

SEQ ID NO: 89104 - RNA, 19 nt, Artificial Sequence
  Description of Artificial Sequence: Synthetic oligonucleotide
  Sense strand starting at position 1258 of SEQ ID NO: 1119
ugguuugacugagcuggaa

SEQ ID NO: 89105 - RNA, 19 nt, Artificial Sequence
  Description of Artificial Sequence: Synthetic oligonucleotide
  Antisense strand to SEQ ID NO: 89024
uuccagcucagucaaacca

SEQ ID NO: 89106 - RNA, 19 nt, Artificial Sequence
  Description of Artificial Sequence: Synthetic oligonucleotide
  Sense strand starting at position 1404 of SEQ ID NO: 1119
accucacaucccggucaaa

SEQ ID NO: 89107 - RNA, 19 nt, Artificial Sequence
  Description of Artificial Sequence: Synthetic oligonucleotide
  Antisense strand to SEQ ID NO: 89026
uuugaccgggaugugaggu

SEQ ID NO: 89108 - RNA, 19 nt, Artificial Sequence
  Description of Artificial Sequence: Synthetic oligonucleotide
  Sense strand starting at position 1482 of SEQ ID NO: 1119
guuggcuuugcacacaaau

SEQ ID NO: 89109 - RNA, 19 nt, Artificial Sequence
  Description of Artificial Sequence: Synthetic oligonucleotide
  Antisense strand to SEQ ID NO: 89028
auuugugugcaaagccaac

SEQ ID NO: 89110 - RNA, 19 nt, Artificial Sequence
  Description of Artificial Sequence: Synthetic oligonucleotide
  Sense strand starting at position 1558 of SEQ ID NO: 1119
gagugaacgucaguuacau

SEQ ID NO: 89111 - RNA, 19 nt, Artificial Sequence
  Description of Artificial Sequence: Synthetic oligonucleotide
  Antisense strand to SEQ ID NO: 89030
auguaacugacguucacuc

SEQ ID NO: 89112 - RNA, 19 nt, Artificial Sequence
  Description of Artificial Sequence: Synthetic oligonucleotide
  Sense strand starting at position 1641 of SEQ ID NO: 1119
ccagccauuugacagagaa

SEQ ID NO: 89113 - RNA, 19 nt, Artificial Sequence
  Description of Artificial Sequence: Synthetic oligonucleotide
  Antisense strand to SEQ ID NO: 89032
uucucugucaaauggcugg

SEQ ID NO: 89114 - RNA, 19 nt, Artificial Sequence
  Description of Artificial Sequence: Synthetic oligonucleotide
  Sense strand starting at position 1849 of SEQ ID NO: 1119
uugcgaugcggacauugaa

SEQ ID NO: 89115 - RNA, 19 nt, Artificial Sequence
  Description of Artificial Sequence: Synthetic oligonucleotide
  Antisense strand to SEQ ID NO: 89034
uucaauguccgcaucgcaa

SEQ ID NO: 89116 - RNA, 19 nt, Artificial Sequence
  Description of Artificial Sequence: Synthetic oligonucleotide
  Sense strand starting at position 2215 of SEQ ID NO: 1119
gcuugcuuacuagaagaac

SEQ ID NO: 89117 - RNA, 19 nt, Artificial Sequence
  Description of Artificial Sequence: Synthetic oligonucleotide
  Antisense strand to SEQ ID NO: 89036
guucuucuaguaagcaagc

SEQ ID NO: 89118 - RNA, 19 nt, Artificial Sequence
  Description of Artificial Sequence: Synthetic oligonucleotide
  Sense strand starting at position 2283 of SEQ ID NO: 1119
ggaaacagcuguccagaga

SEQ ID NO: 89119 - RNA, 19 nt, Artificial Sequence
  Description of Artificial Sequence: Synthetic oligonucleotide
  Antisense strand to SEQ ID NO: 89038
ucucuggacagcuguuucc

SEQ ID NO: 89120 - RNA, 19 nt, Artificial Sequence
  Description of Artificial Sequence: Synthetic oligonucleotide
  Sense strand starting at position 2361 of SEQ ID NO: 1119
agaucugucuggcugcaaa

SEQ ID NO: 89121 - RNA, 19 nt, Artificial Sequence
  Description of Artificial Sequence: Synthetic oligonucleotide
  Antisense strand to SEQ ID NO: 89040
uuugcagccagacagaucu

SEQ ID NO: 89122 - RNA, 19 nt, Artificial Sequence
  Description of Artificial Sequence: Synthetic oligonucleotide
  Sense strand starting at position 2383 of SEQ ID NO: 1119
agcuauugucuaggaggca

SEQ ID NO: 89123 - RNA, 19 nt, Artificial Sequence
  Description of Artificial Sequence: Synthetic oligonucleotide
  Antisense strand to SEQ ID NO: 89042
ugccuccuagacaauagcu

SEQ ID NO: 89124 - RNA, 19 nt, Artificial Sequence
  Description of Artificial Sequence: Synthetic oligonucleotide
  Sense strand starting at position 2450 of SEQ ID NO: 1119
accucaauccuuugagaga

SEQ ID NO: 89125 - RNA, 19 nt, Artificial Sequence
  Description of Artificial Sequence: Synthetic oligonucleotide
  Antisense strand to SEQ ID NO: 89044
ucucucaaaggauugaggu

SEQ ID NO: 89126 - RNA, 19 nt, Artificial Sequence
  Description of Artificial Sequence: Synthetic oligonucleotide
  Sense strand starting at position 2523 of SEQ ID NO: 1119
gaaugauucgugcaagguc

SEQ ID NO: 89127 - RNA, 19 nt, Artificial Sequence
  Description of Artificial Sequence: Synthetic oligonucleotide
  Antisense strand to SEQ ID NO: 89046
gaccuugcacgaaucauuc

SEQ ID NO: 89128 - RNA, 19 nt, Artificial Sequence
  Description of Artificial Sequence: Synthetic oligonucleotide
  Sense strand starting at position 2644 of SEQ ID NO: 1119
cagggagaagcuuguucuu

SEQ ID NO: 89129 - RNA, 19 nt, Artificial Sequence
  Description of Artificial Sequence: Synthetic oligonucleotide
  Antisense strand to SEQ ID NO: 89048
aagaacaagcuucucccug

SEQ ID NO: 89130 - RNA, 19 nt, Artificial Sequence
  Description of Artificial Sequence: Synthetic oligonucleotide
  Sense strand starting at position 2647 of SEQ ID NO: 1119
ggagaagcuuguucuuccu

SEQ ID NO: 89131 - RNA, 19 nt, Artificial Sequence
  Description of Artificial Sequence: Synthetic oligonucleotide
  Antisense strand to SEQ ID NO: 89050
aggaagaacaagcuucucc

SEQ ID NO: 89132 - RNA, 19 nt, Artificial Sequence
  Description of Artificial Sequence: Synthetic oligonucleotide
  Sense strand starting at position 2649 of SEQ ID NO: 1119
agaagcuuguucuuccuaa

SEQ ID NO: 89133 - RNA, 19 nt, Artificial Sequence
  Description of Artificial Sequence: Synthetic oligonucleotide
  Antisense strand to SEQ ID NO: 89052
uuaggaagaacaagcuucu

SEQ ID NO: 89134 - RNA, 19 nt, Artificial Sequence
  Description of Artificial Sequence: Synthetic oligonucleotide
  Sense strand starting at position 2650 of SEQ ID NO: 1119
gaagcuuguucuuccuaag

SEQ ID NO: 89135 - RNA, 19 nt, Artificial Sequence
  Description of Artificial Sequence: Synthetic oligonucleotide
  Antisense strand to SEQ ID NO: 89054
cuuaggaagaacaagcuuc

SEQ ID NO: 89136 - RNA, 19 nt, Artificial Sequence
  Description of Artificial Sequence: Synthetic oligonucleotide
  Sense strand starting at position 2761 of SEQ ID NO: 1119
ucuucuaggugggucaaua

SEQ ID NO: 89137 - RNA, 19 nt, Artificial Sequence
  Description of Artificial Sequence: Synthetic oligonucleotide
  Antisense strand to SEQ ID NO: 89056
uauugacccaccuagaaga

SEQ ID NO: 89138 - RNA, 19 nt, Artificial Sequence
  Description of Artificial Sequence: Synthetic oligonucleotide
  Sense strand starting at position 2998 of SEQ ID NO: 1119
augcaacauuucuggaaga

SEQ ID NO: 89139 - RNA, 19 nt, Artificial Sequence
  Description of Artificial Sequence: Synthetic oligonucleotide
  Antisense strand to SEQ ID NO: 89058
ucuuccagaaauguugcau

SEQ ID NO: 89140 - RNA, 19 nt, Artificial Sequence
  Description of Artificial Sequence: Synthetic oligonucleotide
  Sense strand starting at position 2999 of SEQ ID NO: 1119
ugcaacauuucuggaagaa

SEQ ID NO: 89141 - RNA, 19 nt, Artificial Sequence
  Description of Artificial Sequence: Synthetic oligonucleotide
  Antisense strand to SEQ ID NO: 89060
uucuuccagaaauguugca

SEQ ID NO: 89142 - RNA, 19 nt, Artificial Sequence
  Description of Artificial Sequence: Synthetic oligonucleotide
  Sense strand starting at position 3117 of SEQ ID NO: 1119
ggaguuaggauuggacacu

SEQ ID NO: 89143 - RNA, 19 nt, Artificial Sequence
  Description of Artificial Sequence: Synthetic oligonucleotide
  Antisense strand to SEQ ID NO: 89062
aguguccaauccuaacucc

SEQ ID NO: 89144 - RNA, 19 nt, Artificial Sequence
  Description of Artificial Sequence: Synthetic oligonucleotide
  Sense strand starting at position 3201 of SEQ ID NO: 1119
aggaguugcucuguuagac

SEQ ID NO: 89145 - RNA, 19 nt, Artificial Sequence
  Description of Artificial Sequence: Synthetic oligonucleotide
  Antisense strand to SEQ ID NO: 89064
gucuaacagagcaacuccu

SEQ ID NO: 89146 - RNA, 19 nt, Artificial Sequence
  Description of Artificial Sequence: Synthetic oligonucleotide
  Sense strand starting at position 3395 of SEQ ID NO: 1119
gacacagugcagugguuaa

SEQ ID NO: 89147 - RNA, 19 nt, Artificial Sequence
  Description of Artificial Sequence: Synthetic oligonucleotide
  Antisense strand to SEQ ID NO: 89066
uuaaccacugcacuguguc

SEQ ID NO: 89148 - RNA, 19 nt, Artificial Sequence
  Description of Artificial Sequence: Synthetic oligonucleotide
  Sense strand starting at position 3442 of SEQ ID NO: 1119
gggaucuucuggcugggua

SEQ ID NO: 89149 - RNA, 19 nt, Artificial Sequence
  Description of Artificial Sequence: Synthetic oligonucleotide
  Antisense strand to SEQ ID NO: 89068
uacccagccagaagauccc

SEQ ID NO: 89150 - RNA, 19 nt, Artificial Sequence
  Description of Artificial Sequence: Synthetic oligonucleotide
  Sense strand starting at position 3478 of SEQ ID NO: 1119
aguccuccuuugucuaaga

SEQ ID NO: 89151 - RNA, 19 nt, Artificial Sequence
  Description of Artificial Sequence: Synthetic oligonucleotide
  Antisense strand to SEQ ID NO: 89070
ucuuagacaaaggaggacu

SEQ ID NO: 89152 - RNA, 19 nt, Artificial Sequence
  Description of Artificial Sequence: Synthetic oligonucleotide
  Sense strand starting at position 3480 of SEQ ID NO: 1119
uccuccuuugucuaagagu

SEQ ID NO: 89153 - RNA, 19 nt, Artificial Sequence
  Description of Artificial Sequence: Synthetic oligonucleotide
  Antisense strand to SEQ ID NO: 89072
acucuuagacaaaggagga

SEQ ID NO: 89154 - RNA, 19 nt, Artificial Sequence
  Description of Artificial Sequence: Synthetic oligonucleotide
  Sense strand starting at position 3570 of SEQ ID NO: 1119
gcauuugauugugcacaga

SEQ ID NO: 89155 - RNA, 19 nt, Artificial Sequence
  Description of Artificial Sequence: Synthetic oligonucleotide
  Antisense strand to SEQ ID NO: 89074
ucugugcacaaucaaaugc

SEQ ID NO: 89156 - RNA, 19 nt, Artificial Sequence
  Description of Artificial Sequence: Synthetic oligonucleotide
  Sense strand starting at position 3698 of SEQ ID NO: 1119
acugacagcauguggaaua

SEQ ID NO: 89157 - RNA, 19 nt, Artificial Sequence
  Description of Artificial Sequence: Synthetic oligonucleotide
  Antisense strand to SEQ ID NO: 89076
uauuccacaugcugucagu

SEQ ID NO: 89158 - RNA, 19 nt, Artificial Sequence
  Description of Artificial Sequence: Synthetic oligonucleotide
  Sense strand starting at position 3714 of SEQ ID NO: 1119
auaauuguacauggucuau

SEQ ID NO: 89159 - RNA, 19 nt, Artificial Sequence
  Description of Artificial Sequence: Synthetic oligonucleotide
  Antisense strand to SEQ ID NO: 89078
auagaccauguacaauuau

SEQ ID NO: 89160 - RNA, 19 nt, Artificial Sequence
  Description of Artificial Sequence: Synthetic oligonucleotide
  Sense strand starting at position 3720 of SEQ ID NO: 1119
guacauggucuauggguaa

SEQ ID NO: 89161 - RNA, 19 nt, Artificial Sequence
  Description of Artificial Sequence: Synthetic oligonucleotide
  Antisense strand to SEQ ID NO: 89080
uuacccauagaccauguac

SEQ ID NO: 89162 - RNA, 19 nt, Artificial Sequence
  Description of Artificial Sequence: Synthetic oligonucleotide
  Sense strand starting at position 3723 of SEQ ID NO: 1119
cauggucuauggguaaaca

SEQ ID NO: 89163 - RNA, 19 nt, Artificial Sequence
  Description of Artificial Sequence: Synthetic oligonucleotide
  Antisense strand to SEQ ID NO: 89082
uguuuacccauagaccaug

SEQ ID NO: 89164 - RNA, 19 nt, Artificial Sequence
  Description of Artificial Sequence: Synthetic oligonucleotide
  Sense strand starting at position 3822 of SEQ ID NO: 1119
uuccauuuauaggaguaau

SEQ ID NO: 89165 - RNA, 19 nt, Artificial Sequence
  Description of Artificial Sequence: Synthetic oligonucleotide
  Antisense strand to SEQ ID NO: 89084
auuacuccuauaaauggaa

SEQ ID NO: 89166 - RNA, 19 nt, Artificial Sequence
  Description of Artificial Sequence: Synthetic oligonucleotide
  Sense strand starting at position 3975 of SEQ ID NO: 1120
ggccaaggaguguauguuu

SEQ ID NO: 89167 - RNA, 19 nt, Artificial Sequence
  Description of Artificial Sequence: Synthetic oligonucleotide
  Antisense strand to SEQ ID NO: 89086
aaacauacacuccuuggcc

SEQ ID NO: 89168 - RNA, 19 nt, Artificial Sequence
  Description of Artificial Sequence: Synthetic oligonucleotide
  Sense strand starting at position 3647 of SEQ ID NO: 1120
acacucguuccugggaaau

SEQ ID NO: 89169 - RNA, 19 nt, Artificial Sequence
  Description of Artificial Sequence: Synthetic oligonucleotide
  Antisense strand to SEQ ID NO: 89088
auuucccaggaacgagugu

SEQ ID NO: 89170 - RNA, 19 nt, Artificial Sequence
  Description of Artificial Sequence: Synthetic oligonucleotide
  Sense strand starting at position 3423 of SEQ ID NO: 1120
cccacaucucagggaaauc

SEQ ID NO: 89171 - RNA, 19 nt, Artificial Sequence
  Description of Artificial Sequence: Synthetic oligonucleotide
  Antisense strand to SEQ ID NO: 89090
gauuucccugagauguggg

SEQ ID NO: 89172 - RNA, 19 nt, Artificial Sequence
  Description of Artificial Sequence: Synthetic oligonucleotide
  Sense strand starting at position 3102 of SEQ ID NO: 1120
gcccacuucuccuuuggau

SEQ ID NO: 89173 - RNA, 19 nt, Artificial Sequence
  Description of Artificial Sequence: Synthetic oligonucleotide
  Antisense strand to SEQ ID NO: 89092
auccaaaggagaagugggc

SEQ ID NO: 89174 - RNA, 19 nt, Artificial Sequence
  Description of Artificial Sequence: Synthetic oligonucleotide
  Sense strand starting at position 3032 of SEQ ID NO: 1120
ggagcuucaccugguagga

SEQ ID NO: 89175 - RNA, 19 nt, Artificial Sequence
  Description of Artificial Sequence: Synthetic oligonucleotide
  Antisense strand to SEQ ID NO: 89094
uccuaccaggugaagcucc

SEQ ID NO: 89176 - RNA, 19 nt, Artificial Sequence
  Description of Artificial Sequence: Synthetic oligonucleotide
  Sense strand starting at position 2887 of SEQ ID NO: 1120
cauugagguccucagcuuu

SEQ ID NO: 89177 - RNA, 19 nt, Artificial Sequence
  Description of Artificial Sequence: Synthetic oligonucleotide
  Antisense strand to SEQ ID NO: 89096
aaagcugaggaccucaaug

SEQ ID NO: 89178 - RNA, 19 nt, Artificial Sequence
  Description of Artificial Sequence: Synthetic oligonucleotide
  Sense strand starting at position 2871 of SEQ ID NO: 1120
aucucuucccaguggacau

SEQ ID NO: 89179 - RNA, 19 nt, Artificial Sequence
  Description of Artificial Sequence: Synthetic oligonucleotide
  Antisense strand to SEQ ID NO: 89098
auguccacugggaagagau

SEQ ID NO: 89180 - RNA, 19 nt, Artificial Sequence
  Description of Artificial Sequence: Synthetic oligonucleotide
  Sense strand starting at position 2788 of SEQ ID NO: 1120
uugcacuuuccacaaggaa

SEQ ID NO: 89181 - RNA, 19 nt, Artificial Sequence
  Description of Artificial Sequence: Synthetic oligonucleotide
  Antisense strand to SEQ ID NO: 89100
uuccuuguggaaagugcaa

SEQ ID NO: 89182 - RNA, 19 nt, Artificial Sequence
  Description of Artificial Sequence: Synthetic oligonucleotide
  Sense strand starting at position 2772 of SEQ ID NO: 1120
ugaagaaccucucugauug

SEQ ID NO: 89183 - RNA, 19 nt, Artificial Sequence
  Description of Artificial Sequence: Synthetic oligonucleotide
  Antisense strand to SEQ ID NO: 89102
caaucagagagguucuuca

SEQ ID NO: 89184 - RNA, 19 nt, Artificial Sequence
  Description of Artificial Sequence: Synthetic oligonucleotide
  Sense strand starting at position 2756 of SEQ ID NO: 1120
gacuguuguaaggauguga

SEQ ID NO: 89185 - RNA, 19 nt, Artificial Sequence
  Description of Artificial Sequence: Synthetic oligonucleotide
  Antisense strand to SEQ ID NO: 89104
ucacauccuuacaacaguc

SEQ ID NO: 89186 - RNA, 19 nt, Artificial Sequence
  Description of Artificial Sequence: Synthetic oligonucleotide
  Sense strand starting at position 2747 of SEQ ID NO: 1120
ggccacuaagacuguugua

SEQ ID NO: 89187 - RNA, 19 nt, Artificial Sequence
  Description of Artificial Sequence: Synthetic oligonucleotide
  Antisense strand to SEQ ID NO: 89106
uacaacagucuuaguggcc

SEQ ID NO: 89188 - RNA, 19 nt, Artificial Sequence
  Description of Artificial Sequence: Synthetic oligonucleotide
  Sense strand starting at position 2707 of SEQ ID NO: 1120
ggaaacacucuuugcaucu

SEQ ID NO: 89189 - RNA, 19 nt, Artificial Sequence
  Description of Artificial Sequence: Synthetic oligonucleotide
  Antisense strand to SEQ ID NO: 89108
agaugcaaagaguguuucc

SEQ ID NO: 89190 - RNA, 19 nt, Artificial Sequence
  Description of Artificial Sequence: Synthetic oligonucleotide
  Sense strand starting at position 2706 of SEQ ID NO: 1120
cggaaacacucuuugcauc

SEQ ID NO: 89191 - RNA, 19 nt, Artificial Sequence
  Description of Artificial Sequence: Synthetic oligonucleotide
  Antisense strand to SEQ ID NO: 89110
gaugcaaagaguguuuccg

SEQ ID NO: 89192 - RNA, 19 nt, Artificial Sequence
  Description of Artificial Sequence: Synthetic oligonucleotide
  Sense strand starting at position 2694 of SEQ ID NO: 1120
ccuacuaaucuccggaaac

SEQ ID NO: 89193 - RNA, 19 nt, Artificial Sequence
  Description of Artificial Sequence: Synthetic oligonucleotide
  Antisense strand to SEQ ID NO: 89112
guuuccggagauuaguagg

SEQ ID NO: 89194 - RNA, 19 nt, Artificial Sequence
  Description of Artificial Sequence: Synthetic oligonucleotide
  Sense strand starting at position 2693 of SEQ ID NO: 1120
gccuacuaaucuccggaaa

SEQ ID NO: 89195 - RNA, 19 nt, Artificial Sequence
  Description of Artificial Sequence: Synthetic oligonucleotide
  Antisense strand to SEQ ID NO: 89114
uuuccggagauuaguaggc

SEQ ID NO: 89196 - RNA, 19 nt, Artificial Sequence
  Description of Artificial Sequence: Synthetic oligonucleotide
  Sense strand starting at position 2637 of SEQ ID NO: 1120
acccaaaguguuugaagau

SEQ ID NO: 89197 - RNA, 19 nt, Artificial Sequence
  Description of Artificial Sequence: Synthetic oligonucleotide
  Antisense strand to SEQ ID NO: 89116
aucuucaaacacuuugggu

SEQ ID NO: 89198 - RNA, 19 nt, Artificial Sequence
  Description of Artificial Sequence: Synthetic oligonucleotide
  Sense strand starting at position 2636 of SEQ ID NO: 1120
uacccaaaguguuugaaga

SEQ ID NO: 89199 - RNA, 19 nt, Artificial Sequence
  Description of Artificial Sequence: Synthetic oligonucleotide
  Antisense strand to SEQ ID NO: 89118
ucuucaaacacuuugggua

SEQ ID NO: 89200 - RNA, 19 nt, Artificial Sequence
  Description of Artificial Sequence: Synthetic oligonucleotide
  Sense strand starting at position 2559 of SEQ ID NO: 1120
ggcucuucugaagaucagu

SEQ ID NO: 89201 - RNA, 19 nt, Artificial Sequence
  Description of Artificial Sequence: Synthetic oligonucleotide
  Antisense strand to SEQ ID NO: 89120
acugaucuucagaagagcc

SEQ ID NO: 89202 - RNA, 19 nt, Artificial Sequence
  Description of Artificial Sequence: Synthetic oligonucleotide
  Sense strand starting at position 2312 of SEQ ID NO: 1120
ccgggacccucuucugauu

SEQ ID NO: 89203 - RNA, 19 nt, Artificial Sequence
  Description of Artificial Sequence: Synthetic oligonucleotide
  Antisense strand to SEQ ID NO: 89122
aaucagaagagggucccgg

SEQ ID NO: 89204 - RNA, 19 nt, Artificial Sequence
  Description of Artificial Sequence: Synthetic oligonucleotide
  Sense strand starting at position 2291 of SEQ ID NO: 1120
uuuagagugaaaugcagau

SEQ ID NO: 89205 - RNA, 19 nt, Artificial Sequence
  Description of Artificial Sequence: Synthetic oligonucleotide
  Antisense strand to SEQ ID NO: 89124
aucugcauuucacucuaaa

SEQ ID NO: 89206 - RNA, 19 nt, Artificial Sequence
  Description of Artificial Sequence: Synthetic oligonucleotide
  Sense strand starting at position 2221 of SEQ ID NO: 1120
cuuagaguuguauaagucu

SEQ ID NO: 89207 - RNA, 19 nt, Artificial Sequence
  Description of Artificial Sequence: Synthetic oligonucleotide
  Antisense strand to SEQ ID NO: 89126
agacuuauacaacucuaag

SEQ ID NO: 89208 - RNA, 19 nt, Artificial Sequence
  Description of Artificial Sequence: Synthetic oligonucleotide
  Sense strand starting at position 2135 of SEQ ID NO: 1120
gugcucuguggucugugau

SEQ ID NO: 89209 - RNA, 19 nt, Artificial Sequence
  Description of Artificial Sequence: Synthetic oligonucleotide
  Antisense strand to SEQ ID NO: 89128
aucacagaccacagagcac

SEQ ID NO: 89210 - RNA, 19 nt, Artificial Sequence
  Description of Artificial Sequence: Synthetic oligonucleotide
  Sense strand starting at position 2009 of SEQ ID NO: 1120
gagagucagucaccggaaa

SEQ ID NO: 89211 - RNA, 19 nt, Artificial Sequence
  Description of Artificial Sequence: Synthetic oligonucleotide
  Antisense strand to SEQ ID NO: 89130
uuuccggugacugacucuc

SEQ ID NO: 89212 - RNA, 19 nt, Artificial Sequence
  Description of Artificial Sequence: Synthetic oligonucleotide
  Sense strand starting at position 1449 of SEQ ID NO: 1120
ggaccuucugccuaaauca

SEQ ID NO: 89213 - RNA, 19 nt, Artificial Sequence
  Description of Artificial Sequence: Synthetic oligonucleotide
  Antisense strand to SEQ ID NO: 89132
ugauuuaggcagaaggucc

SEQ ID NO: 89214 - RNA, 19 nt, Artificial Sequence
  Description of Artificial Sequence: Synthetic oligonucleotide
  Sense strand starting at position 1367 of SEQ ID NO: 1120
agaguuuggugguuuagua

SEQ ID NO: 89215 - RNA, 19 nt, Artificial Sequence
  Description of Artificial Sequence: Synthetic oligonucleotide
  Antisense strand to SEQ ID NO: 89134
uacuaaaccaccaaacucu

SEQ ID NO: 89216 - RNA, 19 nt, Artificial Sequence
  Description of Artificial Sequence: Synthetic oligonucleotide
  Sense strand starting at position 1075 of SEQ ID NO: 1120
guccuaaggacguaucuuu

SEQ ID NO: 89217 - RNA, 19 nt, Artificial Sequence
  Description of Artificial Sequence: Synthetic oligonucleotide
  Antisense strand to SEQ ID NO: 89136
aaagauacguccuuaggac

SEQ ID NO: 89218 - RNA, 19 nt, Artificial Sequence
  Description of Artificial Sequence: Synthetic oligonucleotide
  Sense strand starting at position 1052 of SEQ ID NO: 1120
ugauuaguucuguaagauu

SEQ ID NO: 89219 - RNA, 19 nt, Artificial Sequence
  Description of Artificial Sequence: Synthetic oligonucleotide
  Antisense strand to SEQ ID NO: 89138
aaucuuacagaacuaauca

SEQ ID NO: 89220 - RNA, 19 nt, Artificial Sequence
  Description of Artificial Sequence: Synthetic oligonucleotide
  Sense strand starting at position 1051 of SEQ ID NO: 1120
augauuaguucuguaagau

SEQ ID NO: 89221 - RNA, 19 nt, Artificial Sequence
  Description of Artificial Sequence: Synthetic oligonucleotide
  Antisense strand to SEQ ID NO: 89140
aucuuacagaacuaaucau

SEQ ID NO: 89222 - RNA, 19 nt, Artificial Sequence
  Description of Artificial Sequence: Synthetic oligonucleotide
  Sense strand starting at position 1047 of SEQ ID NO: 1120
acccaugauuaguucugua

SEQ ID NO: 89223 - RNA, 19 nt, Artificial Sequence
  Description of Artificial Sequence: Synthetic oligonucleotide
  Antisense strand to SEQ ID NO: 89142
uacagaacuaaucaugggu

SEQ ID NO: 89224 - RNA, 19 nt, Artificial Sequence
  Description of Artificial Sequence: Synthetic oligonucleotide
  Sense strand starting at position 1012 of SEQ ID NO: 1120
uuuguaugagauugaaagu

SEQ ID NO: 89225 - RNA, 19 nt, Artificial Sequence
  Description of Artificial Sequence: Synthetic oligonucleotide
  Antisense strand to SEQ ID NO: 89144
acuuucaaucucauacaaa

SEQ ID NO: 89226 - RNA, 19 nt, Artificial Sequence
  Description of Artificial Sequence: Synthetic oligonucleotide
  Sense strand starting at position 982 of SEQ ID NO: 1120
guuucaacuguggauggau

SEQ ID NO: 89227 - RNA, 19 nt, Artificial Sequence
  Description of Artificial Sequence: Synthetic oligonucleotide
  Antisense strand to SEQ ID NO: 89146
auccauccacaguugaaac

SEQ ID NO: 89228 - RNA, 19 nt, Artificial Sequence
  Description of Artificial Sequence: Synthetic oligonucleotide
  Sense strand starting at position 619 of SEQ ID NO: 1120
uguguuugccaugauaaua

SEQ ID NO: 89229 - RNA, 19 nt, Artificial Sequence
  Description of Artificial Sequence: Synthetic oligonucleotide
  Antisense strand to SEQ ID NO: 89148
uauuaucauggcaaacaca

SEQ ID NO: 89230 - RNA, 19 nt, Artificial Sequence
  Description of Artificial Sequence: Synthetic oligonucleotide
  Sense strand starting at position 618 of SEQ ID NO: 1120
auguguuugccaugauaau

SEQ ID NO: 89231 - RNA, 19 nt, Artificial Sequence
  Description of Artificial Sequence: Synthetic oligonucleotide
  Antisense strand to SEQ ID NO: 89150
auuaucauggcaaacacau

SEQ ID NO: 89232 - RNA, 19 nt, Artificial Sequence
  Description of Artificial Sequence: Synthetic oligonucleotide
  Sense strand starting at position 447 of SEQ ID NO: 1120
gcuauuguacaauguauac

SEQ ID NO: 89233 - RNA, 19 nt, Artificial Sequence
  Description of Artificial Sequence: Synthetic oligonucleotide
  Antisense strand to SEQ ID NO: 89152
guauacauuguacaauagc

SEQ ID NO: 89234 - RNA, 19 nt, Artificial Sequence
  Description of Artificial Sequence: Synthetic oligonucleotide
  Sense strand starting at position 444 of SEQ ID NO: 1120
guagcuauuguacaaugua

SEQ ID NO: 89235 - RNA, 19 nt, Artificial Sequence
  Description of Artificial Sequence: Synthetic oligonucleotide
  Antisense strand to SEQ ID NO: 89154
uacauuguacaauagcuac

SEQ ID NO: 89236 - RNA, 19 nt, Artificial Sequence
  Description of Artificial Sequence: Synthetic oligonucleotide
  Sense strand starting at position 437 of SEQ ID NO: 1120
guuuaauguagcuauugua

SEQ ID NO: 89237 - RNA, 19 nt, Artificial Sequence
  Description of Artificial Sequence: Synthetic oligonucleotide
  Antisense strand to SEQ ID NO: 89156
uacaauagcuacauuaaac

SEQ ID NO: 89238 - RNA, 19 nt, Artificial Sequence
  Description of Artificial Sequence: Synthetic oligonucleotide
  Sense strand starting at position 414 of SEQ ID NO: 1120
ugaaguaauguguaucuua

SEQ ID NO: 89239 - RNA, 19 nt, Artificial Sequence
  Description of Artificial Sequence: Synthetic oligonucleotide
  Antisense strand to SEQ ID NO: 89158
uaagauacacauuacuuca

SEQ ID NO: 89240 - RNA, 19 nt, Artificial Sequence
  Description of Artificial Sequence: Synthetic oligonucleotide
  Sense strand starting at position 328 of SEQ ID NO: 1120
uguugaugacuauaguuaa

SEQ ID NO: 89241 - RNA, 19 nt, Artificial Sequence
  Description of Artificial Sequence: Synthetic oligonucleotide
  Antisense strand to SEQ ID NO: 89160
uuaacuauagucaucaaca

SEQ ID NO: 89242 - RNA, 19 nt, Artificial Sequence
  Description of Artificial Sequence: Synthetic oligonucleotide
  Sense strand starting at position 326 of SEQ ID NO: 1120
aguguugaugacuauaguu

SEQ ID NO: 89243 - RNA, 19 nt, Artificial Sequence
  Description of Artificial Sequence: Synthetic oligonucleotide
  Antisense strand to SEQ ID NO: 89162
aacuauagucaucaacacu

SEQ ID NO: 89244 - RNA, 19 nt, Artificial Sequence
  Description of Artificial Sequence: Synthetic oligonucleotide
  Sense strand starting at position 325 of SEQ ID NO: 1120
aaguguugaugacuauagu

SEQ ID NO: 89245 - RNA, 19 nt, Artificial Sequence
  Description of Artificial Sequence: Synthetic oligonucleotide
  Antisense strand to SEQ ID NO: 89164
acuauagucaucaacacuu

SEQ ID NO: 89246 - RNA, 19 nt, Artificial Sequence
  Description of Artificial Sequence: Synthetic oligonucleotide
  Sense strand starting at position 3892 of SEQ ID NO: 1121
uuaguagggcccugauaaa

SEQ ID NO: 89247 - RNA, 19 nt, Artificial Sequence
  Description of Artificial Sequence: Synthetic oligonucleotide
  Antisense strand to SEQ ID NO: 89166
uuuaucagggcccuacuaa

SEQ ID NO: 89248 - RNA, 19 nt, Artificial Sequence
  Description of Artificial Sequence: Synthetic oligonucleotide
  Sense strand starting at position 3838 of SEQ ID NO: 1121
agguuauggacuuguuuau

SEQ ID NO: 89249 - RNA, 19 nt, Artificial Sequence
  Description of Artificial Sequence: Synthetic oligonucleotide
  Antisense strand to SEQ ID NO: 89168
auaaacaaguccauaaccu

SEQ ID NO: 89250 - RNA, 19 nt, Artificial Sequence
  Description of Artificial Sequence: Synthetic oligonucleotide
  Sense strand starting at position 3752 of SEQ ID NO: 1121
cuaccaaaggcuuggauua

SEQ ID NO: 89251 - RNA, 19 nt, Artificial Sequence
  Description of Artificial Sequence: Synthetic oligonucleotide
  Antisense strand to SEQ ID NO: 89170
uaauccaagccuuugguag

SEQ ID NO: 89252 - RNA, 19 nt, Artificial Sequence
  Description of Artificial Sequence: Synthetic oligonucleotide
  Sense strand starting at position 3637 of SEQ ID NO: 1121
ugcuuaucuguuuaucauu

SEQ ID NO: 89253 - RNA, 19 nt, Artificial Sequence
  Description of Artificial Sequence: Synthetic oligonucleotide
  Antisense strand to SEQ ID NO: 89172
aaugauaaacagauaagca

SEQ ID NO: 89254 - RNA, 19 nt, Artificial Sequence
  Description of Artificial Sequence: Synthetic oligonucleotide
  Sense strand starting at position 3636 of SEQ ID NO: 1121
augcuuaucuguuuaucau

SEQ ID NO: 89255 - RNA, 19 nt, Artificial Sequence
  Description of Artificial Sequence: Synthetic oligonucleotide
  Antisense strand to SEQ ID NO: 89174
augauaaacagauaagcau

SEQ ID NO: 89256 - RNA, 19 nt, Artificial Sequence
  Description of Artificial Sequence: Synthetic oligonucleotide
  Sense strand starting at position 3608 of SEQ ID NO: 1121
gcccgauugauugauauua

SEQ ID NO: 89257 - RNA, 19 nt, Artificial Sequence
  Description of Artificial Sequence: Synthetic oligonucleotide
  Antisense strand to SEQ ID NO: 89176
uaauaucaaucaaucgggc

SEQ ID NO: 89258 - RNA, 19 nt, Artificial Sequence
  Description of Artificial Sequence: Synthetic oligonucleotide
  Sense strand starting at position 3606 of SEQ ID NO: 1121
cagcccgauugauugauau

SEQ ID NO: 89259 - RNA, 19 nt, Artificial Sequence
  Description of Artificial Sequence: Synthetic oligonucleotide
  Antisense strand to SEQ ID NO: 89178
auaucaaucaaucgggcug

SEQ ID NO: 89260 - RNA, 19 nt, Artificial Sequence
  Description of Artificial Sequence: Synthetic oligonucleotide
  Sense strand starting at position 3294 of SEQ ID NO: 1121
agcacugaugacugauuga

SEQ ID NO: 89261 - RNA, 19 nt, Artificial Sequence
  Description of Artificial Sequence: Synthetic oligonucleotide
  Antisense strand to SEQ ID NO: 89180
ucaaucagucaucagugcu

SEQ ID NO: 89262 - RNA, 19 nt, Artificial Sequence
  Description of Artificial Sequence: Synthetic oligonucleotide
  Sense strand starting at position 3006 of SEQ ID NO: 1121
aggacuugacggcacgaua

SEQ ID NO: 89263 - RNA, 19 nt, Artificial Sequence
  Description of Artificial Sequence: Synthetic oligonucleotide
  Antisense strand to SEQ ID NO: 89182
uaucgugccgucaaguccu

SEQ ID NO: 89264 - RNA, 19 nt, Artificial Sequence
  Description of Artificial Sequence: Synthetic oligonucleotide
  Sense strand starting at position 2984 of SEQ ID NO: 1121
agucuauaguccuuccuca

SEQ ID NO: 89265 - RNA, 19 nt, Artificial Sequence
  Description of Artificial Sequence: Synthetic oligonucleotide
  Antisense strand to SEQ ID NO: 89184
ugaggaaggacuauagacu

SEQ ID NO: 89266 - RNA, 19 nt, Artificial Sequence
  Description of Artificial Sequence: Synthetic oligonucleotide
  Sense strand starting at position 2964 of SEQ ID NO: 1121
cuucgagugacuuagaaua

SEQ ID NO: 89267 - RNA, 19 nt, Artificial Sequence
  Description of Artificial Sequence: Synthetic oligonucleotide
  Antisense strand to SEQ ID NO: 89186
uauucuaagucacucgaag

SEQ ID NO: 89268 - RNA, 19 nt, Artificial Sequence
  Description of Artificial Sequence: Synthetic oligonucleotide
  Sense strand starting at position 2962 of SEQ ID NO: 1121
ggcuucgagugacuuagaa

SEQ ID NO: 89269 - RNA, 19 nt, Artificial Sequence
  Description of Artificial Sequence: Synthetic oligonucleotide
  Antisense strand to SEQ ID NO: 89188
uucuaagucacucgaagcc

SEQ ID NO: 89270 - RNA, 19 nt, Artificial Sequence
  Description of Artificial Sequence: Synthetic oligonucleotide
  Sense strand starting at position 2830 of SEQ ID NO: 1121
gcaauaacuuuccuggaug

SEQ ID NO: 89271 - RNA, 19 nt, Artificial Sequence
  Description of Artificial Sequence: Synthetic oligonucleotide
  Antisense strand to SEQ ID NO: 89190
cauccaggaaaguuauugc

SEQ ID NO: 89272 - RNA, 19 nt, Artificial Sequence
  Description of Artificial Sequence: Synthetic oligonucleotide
  Sense strand starting at position 2829 of SEQ ID NO: 1121
ugcaauaacuuuccuggau

SEQ ID NO: 89273 - RNA, 19 nt, Artificial Sequence
  Description of Artificial Sequence: Synthetic oligonucleotide
  Antisense strand to SEQ ID NO: 89192
auccaggaaaguuauugca

SEQ ID NO: 89274 - RNA, 19 nt, Artificial Sequence
  Description of Artificial Sequence: Synthetic oligonucleotide
  Sense strand starting at position 2818 of SEQ ID NO: 1121
acaggaaccuuugcaauaa

SEQ ID NO: 89275 - RNA, 19 nt, Artificial Sequence
  Description of Artificial Sequence: Synthetic oligonucleotide
  Antisense strand to SEQ ID NO: 89194
uuauugcaaagguuccugu

SEQ ID NO: 89276 - RNA, 19 nt, Artificial Sequence
  Description of Artificial Sequence: Synthetic oligonucleotide
  Sense strand starting at position 2734 of SEQ ID NO: 1121
gcauuacccugggcauuua

SEQ ID NO: 89277 - RNA, 19 nt, Artificial Sequence
  Description of Artificial Sequence: Synthetic oligonucleotide
  Antisense strand to SEQ ID NO: 89196
uaaaugcccaggguaaugc

SEQ ID NO: 89278 - RNA, 19 nt, Artificial Sequence
  Description of Artificial Sequence: Synthetic oligonucleotide
  Sense strand starting at position 2631 of SEQ ID NO: 1121
agguguuucccauaaucua

SEQ ID NO: 89279 - RNA, 19 nt, Artificial Sequence
  Description of Artificial Sequence: Synthetic oligonucleotide
  Antisense strand to SEQ ID NO: 89198
uagauuaugggaaacaccu

SEQ ID NO: 89280 - RNA, 19 nt, Artificial Sequence
  Description of Artificial Sequence: Synthetic oligonucleotide
  Sense strand starting at position 2059 of SEQ ID NO: 1121
gaaguuacagcgggaauca

SEQ ID NO: 89281 - RNA, 19 nt, Artificial Sequence
  Description of Artificial Sequence: Synthetic oligonucleotide
  Antisense strand to SEQ ID NO: 89200
ugauucccgcuguaacuuc

SEQ ID NO: 89282 - RNA, 19 nt, Artificial Sequence
  Description of Artificial Sequence: Synthetic oligonucleotide
  Sense strand starting at position 2023 of SEQ ID NO: 1121
gauggcuaugccuaaugca

SEQ ID NO: 89283 - RNA, 19 nt, Artificial Sequence
  Description of Artificial Sequence: Synthetic oligonucleotide
  Antisense strand to SEQ ID NO: 89202
ugcauuaggcauagccauc

SEQ ID NO: 89284 - RNA, 19 nt, Artificial Sequence
  Description of Artificial Sequence: Synthetic oligonucleotide
  Sense strand starting at position 2020 of SEQ ID NO: 1121
ccagauggcuaugccuaau

SEQ ID NO: 89285 - RNA, 19 nt, Artificial Sequence
  Description of Artificial Sequence: Synthetic oligonucleotide
  Antisense strand to SEQ ID NO: 89204
auuaggcauagccaucugg

SEQ ID NO: 89286 - RNA, 19 nt, Artificial Sequence
  Description of Artificial Sequence: Synthetic oligonucleotide
  Sense strand starting at position 2019 of SEQ ID NO: 1121
cccagauggcuaugccuaa

SEQ ID NO: 89287 - RNA, 19 nt, Artificial Sequence
  Description of Artificial Sequence: Synthetic oligonucleotide
  Antisense strand to SEQ ID NO: 89206
uuaggcauagccaucuggg

SEQ ID NO: 89288 - RNA, 19 nt, Artificial Sequence
  Description of Artificial Sequence: Synthetic oligonucleotide
  Sense strand starting at position 1910 of SEQ ID NO: 1121
ugugaaguuuaaccaauuc

SEQ ID NO: 89289 - RNA, 19 nt, Artificial Sequence
  Description of Artificial Sequence: Synthetic oligonucleotide
  Antisense strand to SEQ ID NO: 89208
gaauugguuaaacuucaca

SEQ ID NO: 89290 - RNA, 19 nt, Artificial Sequence
  Description of Artificial Sequence: Synthetic oligonucleotide
  Sense strand starting at position 1907 of SEQ ID NO: 1121
uugugugaaguuuaaccaa

SEQ ID NO: 89291 - RNA, 19 nt, Artificial Sequence
  Description of Artificial Sequence: Synthetic oligonucleotide
  Antisense strand to SEQ ID NO: 89210
uugguuaaacuucacacaa

SEQ ID NO: 89292 - RNA, 19 nt, Artificial Sequence
  Description of Artificial Sequence: Synthetic oligonucleotide
  Sense strand starting at position 1878 of SEQ ID NO: 1121
ggagcuggucuccaagcaa

SEQ ID NO: 89293 - RNA, 19 nt, Artificial Sequence
  Description of Artificial Sequence: Synthetic oligonucleotide
  Antisense strand to SEQ ID NO: 89212
uugcuuggagaccagcucc

SEQ ID NO: 89294 - RNA, 19 nt, Artificial Sequence
  Description of Artificial Sequence: Synthetic oligonucleotide
  Sense strand starting at position 1627 of SEQ ID NO: 1121
auaugaaucuaggucuguu

SEQ ID NO: 89295 - RNA, 19 nt, Artificial Sequence
  Description of Artificial Sequence: Synthetic oligonucleotide
  Antisense strand to SEQ ID NO: 89214
aacagaccuagauucauau

SEQ ID NO: 89296 - RNA, 19 nt, Artificial Sequence
  Description of Artificial Sequence: Synthetic oligonucleotide
  Sense strand starting at position 1577 of SEQ ID NO: 1121
gguaaaguaacaugucaga

SEQ ID NO: 89297 - RNA, 19 nt, Artificial Sequence
  Description of Artificial Sequence: Synthetic oligonucleotide
  Antisense strand to SEQ ID NO: 89216
ucugacauguuacuuuacc

SEQ ID NO: 89298 - RNA, 19 nt, Artificial Sequence
  Description of Artificial Sequence: Synthetic oligonucleotide
  Sense strand starting at position 1546 of SEQ ID NO: 1121
ggccaaguaaccugagcuu

SEQ ID NO: 89299 - RNA, 19 nt, Artificial Sequence
  Description of Artificial Sequence: Synthetic oligonucleotide
  Antisense strand to SEQ ID NO: 89218
aagcucagguuacuuggcc

SEQ ID NO: 89300 - RNA, 19 nt, Artificial Sequence
  Description of Artificial Sequence: Synthetic oligonucleotide
  Sense strand starting at position 1537 of SEQ ID NO: 1121
acacuuuguggccaaguaa

SEQ ID NO: 89301 - RNA, 19 nt, Artificial Sequence
  Description of Artificial Sequence: Synthetic oligonucleotide
  Antisense strand to SEQ ID NO: 89220
uuacuuggccacaaagugu

SEQ ID NO: 89302 - RNA, 19 nt, Artificial Sequence
  Description of Artificial Sequence: Synthetic oligonucleotide
  Sense strand starting at position 1536 of SEQ ID NO: 1121
cacacuuuguggccaagua

SEQ ID NO: 89303 - RNA, 19 nt, Artificial Sequence
  Description of Artificial Sequence: Synthetic oligonucleotide
  Antisense strand to SEQ ID NO: 89222
uacuuggccacaaagugug

SEQ ID NO: 89304 - RNA, 19 nt, Artificial Sequence
  Description of Artificial Sequence: Synthetic oligonucleotide
  Sense strand starting at position 955 of SEQ ID NO: 1121
guuaucucugaauauugac

SEQ ID NO: 89305 - RNA, 19 nt, Artificial Sequence
  Description of Artificial Sequence: Synthetic oligonucleotide
  Antisense strand to SEQ ID NO: 89224
gucaauauucagagauaac

SEQ ID NO: 89306 - RNA, 19 nt, Artificial Sequence
  Description of Artificial Sequence: Synthetic oligonucleotide
  Sense strand starting at position 951 of SEQ ID NO: 1121
gaggguuaucucugaauau

SEQ ID NO: 89307 - RNA, 19 nt, Artificial Sequence
  Description of Artificial Sequence: Synthetic oligonucleotide
  Antisense strand to SEQ ID NO: 89226
auauucagagauaacccuc

SEQ ID NO: 89308 - RNA, 19 nt, Artificial Sequence
  Description of Artificial Sequence: Synthetic oligonucleotide
  Sense strand starting at position 882 of SEQ ID NO: 1121
ggaguuagagccugaagau

SEQ ID NO: 89309 - RNA, 19 nt, Artificial Sequence
  Description of Artificial Sequence: Synthetic oligonucleotide
  Antisense strand to SEQ ID NO: 89228
aucuucaggcucuaacucc

SEQ ID NO: 89310 - RNA, 19 nt, Artificial Sequence
  Description of Artificial Sequence: Synthetic oligonucleotide
  Sense strand starting at position 623 of SEQ ID NO: 1121
guaaauaagcugggcuuua

SEQ ID NO: 89311 - RNA, 19 nt, Artificial Sequence
  Description of Artificial Sequence: Synthetic oligonucleotide
  Antisense strand to SEQ ID NO: 89230
uaaagcccagcuuauuuac

SEQ ID NO: 89312 - RNA, 19 nt, Artificial Sequence
  Description of Artificial Sequence: Synthetic oligonucleotide
  Sense strand starting at position 622 of SEQ ID NO: 1121
gguaaauaagcugggcuuu

SEQ ID NO: 89313 - RNA, 19 nt, Artificial Sequence
  Description of Artificial Sequence: Synthetic oligonucleotide
  Antisense strand to SEQ ID NO: 89232
aaagcccagcuuauuuacc

SEQ ID NO: 89314 - RNA, 19 nt, Artificial Sequence
  Description of Artificial Sequence: Synthetic oligonucleotide
  Sense strand starting at position 609 of SEQ ID NO: 1121
auaguuuaucccugguaaa

SEQ ID NO: 89315 - RNA, 19 nt, Artificial Sequence
  Description of Artificial Sequence: Synthetic oligonucleotide
  Antisense strand to SEQ ID NO: 89234
uuuaccagggauaaacuau

SEQ ID NO: 89316 - RNA, 19 nt, Artificial Sequence
  Description of Artificial Sequence: Synthetic oligonucleotide
  Sense strand starting at position 572 of SEQ ID NO: 1121
caauguaucggguaagaac

SEQ ID NO: 89317 - RNA, 19 nt, Artificial Sequence
  Description of Artificial Sequence: Synthetic oligonucleotide
  Antisense strand to SEQ ID NO: 89236
guucuuacccgauacauug

SEQ ID NO: 89318 - RNA, 19 nt, Artificial Sequence
  Description of Artificial Sequence: Synthetic oligonucleotide
  Sense strand starting at position 569 of SEQ ID NO: 1121
ggccaauguaucggguaag

SEQ ID NO: 89319 - RNA, 19 nt, Artificial Sequence
  Description of Artificial Sequence: Synthetic oligonucleotide
  Antisense strand to SEQ ID NO: 89238
cuuacccgauacauuggcc

SEQ ID NO: 89320 - RNA, 19 nt, Artificial Sequence
  Description of Artificial Sequence: Synthetic oligonucleotide
  Sense strand starting at position 264 of SEQ ID NO: 1121
gaacuuguccugcaaggca

SEQ ID NO: 89321 - RNA, 19 nt, Artificial Sequence
  Description of Artificial Sequence: Synthetic oligonucleotide
  Antisense strand to SEQ ID NO: 89240
ugccuugcaggacaaguuc

SEQ ID NO: 89322 - RNA, 19 nt, Artificial Sequence
  Description of Artificial Sequence: Synthetic oligonucleotide
  Sense strand starting at position 111 of SEQ ID NO: 1121
ggaguagaaguucgaauau

SEQ ID NO: 89323 - RNA, 19 nt, Artificial Sequence
  Description of Artificial Sequence: Synthetic oligonucleotide
  Antisense strand to SEQ ID NO: 89242
auauucgaacuucuacucc

SEQ ID NO: 89324 - RNA, 19 nt, Artificial Sequence
  Description of Artificial Sequence: Synthetic oligonucleotide
  Sense strand starting at position 52 of SEQ ID NO: 1121
ggcaaacagguuugagaac

SEQ ID NO: 89325 - RNA, 19 nt, Artificial Sequence
  Description of Artificial Sequence: Synthetic oligonucleotide
  Antisense strand to SEQ ID NO: 89244
guucucaaaccuguuugcc

SEQ ID NO: 89326 - RNA, 19 nt, Artificial Sequence
  Description of Artificial Sequence: Synthetic oligonucleotide
  Sense strand starting at position 17 of SEQ ID NO: 1122
ccggcauucuucuuagaag

SEQ ID NO: 89327 - RNA, 19 nt, Artificial Sequence
  Description of Artificial Sequence: Synthetic oligonucleotide
  Antisense strand to SEQ ID NO: 89246
cuucuaagaagaaugccgg

SEQ ID NO: 89328 - RNA, 19 nt, Artificial Sequence
  Description of Artificial Sequence: Synthetic oligonucleotide
  Sense strand starting at position 119 of SEQ ID NO: 1122
auugucaaacgugaggaua

SEQ ID NO: 89329 - RNA, 19 nt, Artificial Sequence
  Description of Artificial Sequence: Synthetic oligonucleotide
  Antisense strand to SEQ ID NO: 89248
uauccucacguuugacaau

SEQ ID NO: 89330 - RNA, 19 nt, Artificial Sequence
  Description of Artificial Sequence: Synthetic oligonucleotide
  Sense strand starting at position 203 of SEQ ID NO: 1122
cccacauuuguucguguca

SEQ ID NO: 89331 - RNA, 19 nt, Artificial Sequence
  Description of Artificial Sequence: Synthetic oligonucleotide
  Antisense strand to SEQ ID NO: 89250
ugacacgaacaaauguggg

SEQ ID NO: 89332 - RNA, 19 nt, Artificial Sequence
  Description of Artificial Sequence: Synthetic oligonucleotide
  Sense strand starting at position 285 of SEQ ID NO: 1122
aggcaaguguguuuguaaa

SEQ ID NO: 89333 - RNA, 19 nt, Artificial Sequence
  Description of Artificial Sequence: Synthetic oligonucleotide
  Antisense strand to SEQ ID NO: 89252
uuuacaaacacacuugccu

SEQ ID NO: 89334 - RNA, 19 nt, Artificial Sequence
  Description of Artificial Sequence: Synthetic oligonucleotide
  Sense strand starting at position 287 of SEQ ID NO: 1122
gcaaguguguuuguaaaga

SEQ ID NO: 89335 - RNA, 19 nt, Artificial Sequence
  Description of Artificial Sequence: Synthetic oligonucleotide
  Antisense strand to SEQ ID NO: 89254
ucuuuacaaacacacuugc

SEQ ID NO: 89336 - RNA, 19 nt, Artificial Sequence
  Description of Artificial Sequence: Synthetic oligonucleotide
  Sense strand starting at position 329 of SEQ ID NO: 1122
uguccucauucgccauaaa

SEQ ID NO: 89337 - RNA, 19 nt, Artificial Sequence
  Description of Artificial Sequence: Synthetic oligonucleotide
  Antisense strand to SEQ ID NO: 89256
uuuauggcgaaugaggaca

SEQ ID NO: 89338 - RNA, 19 nt, Artificial Sequence
  Description of Artificial Sequence: Synthetic oligonucleotide
  Sense strand starting at position 448 of SEQ ID NO: 1122
guauguuacuguuugugaa

SEQ ID NO: 89339 - RNA, 19 nt, Artificial Sequence
  Description of Artificial Sequence: Synthetic oligonucleotide
  Antisense strand to SEQ ID NO: 89258
uucacaaacaguaacauac

SEQ ID NO: 89340 - RNA, 19 nt, Artificial Sequence
  Description of Artificial Sequence: Synthetic oligonucleotide
  Sense strand starting at position 449 of SEQ ID NO: 1122
uauguuacuguuugugaac

SEQ ID NO: 89341 - RNA, 19 nt, Artificial Sequence
  Description of Artificial Sequence: Synthetic oligonucleotide
  Antisense strand to SEQ ID NO: 89260
guucacaaacaguaacaua

SEQ ID NO: 89342 - RNA, 19 nt, Artificial Sequence
  Description of Artificial Sequence: Synthetic oligonucleotide
  Sense strand starting at position 450 of SEQ ID NO: 1122
auguuacuguuugugaaca

SEQ ID NO: 89343 - RNA, 19 nt, Artificial Sequence
  Description of Artificial Sequence: Synthetic oligonucleotide
  Antisense strand to SEQ ID NO: 89262
uguucacaaacaguaacau

SEQ ID NO: 89344 - RNA, 19 nt, Artificial Sequence
  Description of Artificial Sequence: Synthetic oligonucleotide
  Sense strand starting at position 455 of SEQ ID NO: 1122
acuguuugugaacacaaca

SEQ ID NO: 89345 - RNA, 19 nt, Artificial Sequence
  Description of Artificial Sequence: Synthetic oligonucleotide
  Antisense strand to SEQ ID NO: 89264
uguuguguucacaaacagu

SEQ ID NO: 89346 - RNA, 19 nt, Artificial Sequence
  Description of Artificial Sequence: Synthetic oligonucleotide
  Sense strand starting at position 682 of SEQ ID NO: 1122
ccaccuuccuggcuguaaa

SEQ ID NO: 89347 - RNA, 19 nt, Artificial Sequence
  Description of Artificial Sequence: Synthetic oligonucleotide
  Antisense strand to SEQ ID NO: 89266
uuuacagccaggaaggugg

SEQ ID NO: 89348 - RNA, 19 nt, Artificial Sequence
  Description of Artificial Sequence: Synthetic oligonucleotide
  Sense strand starting at position 806 of SEQ ID NO: 1122
uggacuuguugccuaaucu

SEQ ID NO: 89349 - RNA, 19 nt, Artificial Sequence
  Description of Artificial Sequence: Synthetic oligonucleotide
  Antisense strand to SEQ ID NO: 89268
agauuaggcaacaagucca

SEQ ID NO: 89350 - RNA, 19 nt, Artificial Sequence
  Description of Artificial Sequence: Synthetic oligonucleotide
  Sense strand starting at position 807 of SEQ ID NO: 1122
ggacuuguugccuaaucua

SEQ ID NO: 89351 - RNA, 19 nt, Artificial Sequence
  Description of Artificial Sequence: Synthetic oligonucleotide
  Antisense strand to SEQ ID NO: 89270
uagauuaggcaacaagucc

SEQ ID NO: 89352 - RNA, 19 nt, Artificial Sequence
  Description of Artificial Sequence: Synthetic oligonucleotide
  Sense strand starting at position 875 of SEQ ID NO: 1122
caguuacuacaaugcguaa

SEQ ID NO: 89353 - RNA, 19 nt, Artificial Sequence
  Description of Artificial Sequence: Synthetic oligonucleotide
  Antisense strand to SEQ ID NO: 89272
uuacgcauuguaguaacug

SEQ ID NO: 89354 - RNA, 19 nt, Artificial Sequence
  Description of Artificial Sequence: Synthetic oligonucleotide
  Sense strand starting at position 906 of SEQ ID NO: 1122
acguguuuacgugcaaggu

SEQ ID NO: 89355 - RNA, 19 nt, Artificial Sequence
  Description of Artificial Sequence: Synthetic oligonucleotide
  Antisense strand to SEQ ID NO: 89274
accuugcacguaaacacgu

SEQ ID NO: 89356 - RNA, 19 nt, Artificial Sequence
  Description of Artificial Sequence: Synthetic oligonucleotide
  Sense strand starting at position 1037 of SEQ ID NO: 1122
ccguaaucacucugggaaa

SEQ ID NO: 89357 - RNA, 19 nt, Artificial Sequence
  Description of Artificial Sequence: Synthetic oligonucleotide
  Antisense strand to SEQ ID NO: 89276
uuucccagagugauuacgg

SEQ ID NO: 89358 - RNA, 19 nt, Artificial Sequence
  Description of Artificial Sequence: Synthetic oligonucleotide
  Sense strand starting at position 1074 of SEQ ID NO: 1122
uccgaaagcaagugcuuua

SEQ ID NO: 89359 - RNA, 19 nt, Artificial Sequence
  Description of Artificial Sequence: Synthetic oligonucleotide
  Antisense strand to SEQ ID NO: 89278
uaaagcacuugcuuucgga

SEQ ID NO: 89360 - RNA, 19 nt, Artificial Sequence
  Description of Artificial Sequence: Synthetic oligonucleotide
  Sense strand starting at position 1126 of SEQ ID NO: 1122
gcuggcugucauuagaaca

SEQ ID NO: 89361 - RNA, 19 nt, Artificial Sequence
  Description of Artificial Sequence: Synthetic oligonucleotide
  Antisense strand to SEQ ID NO: 89280
uguucuaaugacagccagc

SEQ ID NO: 89362 - RNA, 19 nt, Artificial Sequence
  Description of Artificial Sequence: Synthetic oligonucleotide
  Sense strand starting at position 1273 of SEQ ID NO: 1122
ugcagugugccuggagaau

SEQ ID NO: 89363 - RNA, 19 nt, Artificial Sequence
  Description of Artificial Sequence: Synthetic oligonucleotide
  Antisense strand to SEQ ID NO: 89282
auucuccaggcacacugca

SEQ ID NO: 89364 - RNA, 19 nt, Artificial Sequence
  Description of Artificial Sequence: Synthetic oligonucleotide
  Sense strand starting at position 1555 of SEQ ID NO: 1122
gggaaacguccgcaguuua

SEQ ID NO: 89365 - RNA, 19 nt, Artificial Sequence
  Description of Artificial Sequence: Synthetic oligonucleotide
  Antisense strand to SEQ ID NO: 89284
uaaacugcggacguuuccc

SEQ ID NO: 89366 - RNA, 19 nt, Artificial Sequence
  Description of Artificial Sequence: Synthetic oligonucleotide
  Sense strand starting at position 1865 of SEQ ID NO: 1122
cggacggcucccggagaau

SEQ ID NO: 89367 - RNA, 19 nt, Artificial Sequence
  Description of Artificial Sequence: Synthetic oligonucleotide
  Antisense strand to SEQ ID NO: 89286
auucuccgggagccguccg

SEQ ID NO: 89368 - RNA, 19 nt, Artificial Sequence
  Description of Artificial Sequence: Synthetic oligonucleotide
  Sense strand starting at position 2304 of SEQ ID NO: 1122
uggcuuggcgaacgagauu

SEQ ID NO: 89369 - RNA, 19 nt, Artificial Sequence
  Description of Artificial Sequence: Synthetic oligonucleotide
  Antisense strand to SEQ ID NO: 89288
aaucucguucgccaagcca

SEQ ID NO: 89370 - RNA, 19 nt, Artificial Sequence
  Description of Artificial Sequence: Synthetic oligonucleotide
  Sense strand starting at position 2608 of SEQ ID NO: 1122
ucgguuguuacccgagaug

SEQ ID NO: 89371 - RNA, 19 nt, Artificial Sequence
  Description of Artificial Sequence: Synthetic oligonucleotide
  Antisense strand to SEQ ID NO: 89290
caucucggguaacaaccga

SEQ ID NO: 89372 - RNA, 19 nt, Artificial Sequence
  Description of Artificial Sequence: Synthetic oligonucleotide
  Sense strand starting at position 2753 of SEQ ID NO: 1122
ugagucaugucauuguuga

SEQ ID NO: 89373 - RNA, 19 nt, Artificial Sequence
  Description of Artificial Sequence: Synthetic oligonucleotide
  Antisense strand to SEQ ID NO: 89292
ucaacaaugacaugacuca

SEQ ID NO: 89374 - RNA, 19 nt, Artificial Sequence
  Description of Artificial Sequence: Synthetic oligonucleotide
  Sense strand starting at position 2754 of SEQ ID NO: 1122
gagucaugucauuguugac

SEQ ID NO: 89375 - RNA, 19 nt, Artificial Sequence
  Description of Artificial Sequence: Synthetic oligonucleotide
  Antisense strand to SEQ ID NO: 89294
gucaacaaugacaugacuc

SEQ ID NO: 89376 - RNA, 19 nt, Artificial Sequence
  Description of Artificial Sequence: Synthetic oligonucleotide
  Sense strand starting at position 2760 of SEQ ID NO: 1122
ugucauuguugacuccgaa

SEQ ID NO: 89377 - RNA, 19 nt, Artificial Sequence
  Description of Artificial Sequence: Synthetic oligonucleotide
  Antisense strand to SEQ ID NO: 89296
uucggagucaacaaugaca

SEQ ID NO: 89378 - RNA, 19 nt, Artificial Sequence
  Description of Artificial Sequence: Synthetic oligonucleotide
  Sense strand starting at position 2763 of SEQ ID NO: 1122
cauuguugacuccgaaucu

SEQ ID NO: 89379 - RNA, 19 nt, Artificial Sequence
  Description of Artificial Sequence: Synthetic oligonucleotide
  Antisense strand to SEQ ID NO: 89298
agauucggagucaacaaug

SEQ ID NO: 89380 - RNA, 19 nt, Artificial Sequence
  Description of Artificial Sequence: Synthetic oligonucleotide
  Sense strand starting at position 2819 of SEQ ID NO: 1122
cauuaucgguuaguugauu

SEQ ID NO: 89381 - RNA, 19 nt, Artificial Sequence
  Description of Artificial Sequence: Synthetic oligonucleotide
  Antisense strand to SEQ ID NO: 89300
aaucaacuaaccgauaaug

SEQ ID NO: 89382 - RNA, 19 nt, Artificial Sequence
  Description of Artificial Sequence: Synthetic oligonucleotide
  Sense strand starting at position 2841 of SEQ ID NO: 1122
uuccuuugaggucgagagu

SEQ ID NO: 89383 - RNA, 19 nt, Artificial Sequence
  Description of Artificial Sequence: Synthetic oligonucleotide
  Antisense strand to SEQ ID NO: 89302
acucucgaccucaaaggaa

SEQ ID NO: 89384 - RNA, 19 nt, Artificial Sequence
  Description of Artificial Sequence: Synthetic oligonucleotide
  Sense strand starting at position 2842 of SEQ ID NO: 1122
uccuuugaggucgagaguu

SEQ ID NO: 89385 - RNA, 19 nt, Artificial Sequence
  Description of Artificial Sequence: Synthetic oligonucleotide
  Antisense strand to SEQ ID NO: 89304
aacucucgaccucaaagga

SEQ ID NO: 89386 - RNA, 19 nt, Artificial Sequence
  Description of Artificial Sequence: Synthetic oligonucleotide
  Sense strand starting at position 2844 of SEQ ID NO: 1122
cuuugaggucgagaguuua

SEQ ID NO: 89387 - RNA, 19 nt, Artificial Sequence
  Description of Artificial Sequence: Synthetic oligonucleotide
  Antisense strand to SEQ ID NO: 89306
uaaacucucgaccucaaag

SEQ ID NO: 89388 - RNA, 19 nt, Artificial Sequence
  Description of Artificial Sequence: Synthetic oligonucleotide
  Sense strand starting at position 2862 of SEQ ID NO: 1122
aaagcaguccauugaaguu

SEQ ID NO: 89389 - RNA, 19 nt, Artificial Sequence
  Description of Artificial Sequence: Synthetic oligonucleotide
  Antisense strand to SEQ ID NO: 89308
aacuucaauggacugcuuu

SEQ ID NO: 89390 - RNA, 19 nt, Artificial Sequence
  Description of Artificial Sequence: Synthetic oligonucleotide
  Sense strand starting at position 3125 of SEQ ID NO: 1122
aucagagccuuuccugaga

SEQ ID NO: 89391 - RNA, 19 nt, Artificial Sequence
  Description of Artificial Sequence: Synthetic oligonucleotide
  Antisense strand to SEQ ID NO: 89310
ucucaggaaaggcucugau

SEQ ID NO: 89392 - RNA, 19 nt, Artificial Sequence
  Description of Artificial Sequence: Synthetic oligonucleotide
  Sense strand starting at position 3128 of SEQ ID NO: 1122
agagccuuuccugagaagu

SEQ ID NO: 89393 - RNA, 19 nt, Artificial Sequence
  Description of Artificial Sequence: Synthetic oligonucleotide
  Antisense strand to SEQ ID NO: 89312
acuucucaggaaaggcucu

SEQ ID NO: 89394 - RNA, 19 nt, Artificial Sequence
  Description of Artificial Sequence: Synthetic oligonucleotide
  Sense strand starting at position 3160 of SEQ ID NO: 1122
ugucauugccaucgaauuu

SEQ ID NO: 89395 - RNA, 19 nt, Artificial Sequence
  Description of Artificial Sequence: Synthetic oligonucleotide
  Antisense strand to SEQ ID NO: 89314
aaauucgauggcaaugaca

SEQ ID NO: 89396 - RNA, 19 nt, Artificial Sequence
  Description of Artificial Sequence: Synthetic oligonucleotide
  Sense strand starting at position 3172 of SEQ ID NO: 1122
cgaauuugcccuuggugga

SEQ ID NO: 89397 - RNA, 19 nt, Artificial Sequence
  Description of Artificial Sequence: Synthetic oligonucleotide
  Antisense strand to SEQ ID NO: 89316
uccaccaagggcaaauucg

SEQ ID NO: 89398 - RNA, 19 nt, Artificial Sequence
  Description of Artificial Sequence: Synthetic oligonucleotide
  Sense strand starting at position 3185 of SEQ ID NO: 1122
gguggagaucugugcaaca

SEQ ID NO: 89399 - RNA, 19 nt, Artificial Sequence
  Description of Artificial Sequence: Synthetic oligonucleotide
  Antisense strand to SEQ ID NO: 89318
uguugcacagaucuccacc

SEQ ID NO: 89400 - RNA, 19 nt, Artificial Sequence
  Description of Artificial Sequence: Synthetic oligonucleotide
  Sense strand starting at position 3386 of SEQ ID NO: 1122
cagugagugcuacacuauu

SEQ ID NO: 89401 - RNA, 19 nt, Artificial Sequence
  Description of Artificial Sequence: Synthetic oligonucleotide
  Antisense strand to SEQ ID NO: 89320
aauaguguagcacucacug

SEQ ID NO: 89402 - RNA, 19 nt, Artificial Sequence
  Description of Artificial Sequence: Synthetic oligonucleotide
  Sense strand starting at position 3922 of SEQ ID NO: 1122
agaguuagcuuagcuaaca

SEQ ID NO: 89403 - RNA, 19 nt, Artificial Sequence
  Description of Artificial Sequence: Synthetic oligonucleotide
  Antisense strand to SEQ ID NO: 89322
uguuagcuaagcuaacucu

SEQ ID NO: 89404 - RNA, 19 nt, Artificial Sequence
  Description of Artificial Sequence: Synthetic oligonucleotide
  Sense strand starting at position 3923 of SEQ ID NO: 1122
gaguuagcuuagcuaacau

SEQ ID NO: 89405 - RNA, 19 nt, Artificial Sequence
  Description of Artificial Sequence: Synthetic oligonucleotide
  Antisense strand to SEQ ID NO: 89324
auguuagcuaagcuaacuc

SEQ ID NO: 89406 - RNA, 19 nt, Artificial Sequence
  Description of Artificial Sequence: Synthetic oligonucleotide
  Sense strand starting at position 64 of SEQ ID NO: 1123
uggacuuguugccuaaucu

SEQ ID NO: 89407 - RNA, 19 nt, Artificial Sequence
  Description of Artificial Sequence: Synthetic oligonucleotide
  Antisense strand to SEQ ID NO: 89326
agauuaggcaacaagucca

SEQ ID NO: 89408 - RNA, 19 nt, Artificial Sequence
  Description of Artificial Sequence: Synthetic oligonucleotide
  Sense strand starting at position 65 of SEQ ID NO: 1123
ggacuuguugccuaaucua

SEQ ID NO: 89409 - RNA, 19 nt, Artificial Sequence
  Description of Artificial Sequence: Synthetic oligonucleotide
  Antisense strand to SEQ ID NO: 89328
uagauuaggcaacaagucc

SEQ ID NO: 89410 - RNA, 19 nt, Artificial Sequence
  Description of Artificial Sequence: Synthetic oligonucleotide
  Sense strand starting at position 164 of SEQ ID NO: 1123
acguguuuacgugcaaggu

SEQ ID NO: 89411 - RNA, 19 nt, Artificial Sequence
  Description of Artificial Sequence: Synthetic oligonucleotide
  Antisense strand to SEQ ID NO: 89330
accuugcacguaaacacgu

SEQ ID NO: 89412 - RNA, 19 nt, Artificial Sequence
  Description of Artificial Sequence: Synthetic oligonucleotide
  Sense strand starting at position 295 of SEQ ID NO: 1123
ccguaaucacucugggaaa

SEQ ID NO: 89413 - RNA, 19 nt, Artificial Sequence
  Description of Artificial Sequence: Synthetic oligonucleotide
  Antisense strand to SEQ ID NO: 89332
uuucccagagugauuacgg

SEQ ID NO: 89414 - RNA, 19 nt, Artificial Sequence
  Description of Artificial Sequence: Synthetic oligonucleotide
  Sense strand starting at position 384 of SEQ ID NO: 1123
gcuggcugucauuagaaca

SEQ ID NO: 89415 - RNA, 19 nt, Artificial Sequence
  Description of Artificial Sequence: Synthetic oligonucleotide
  Antisense strand to SEQ ID NO: 89334
uguucuaaugacagccagc

SEQ ID NO: 89416 - RNA, 19 nt, Artificial Sequence
  Description of Artificial Sequence: Synthetic oligonucleotide
  Sense strand starting at position 813 of SEQ ID NO: 1123
gggaaacguccgcaguuua

SEQ ID NO: 89417 - RNA, 19 nt, Artificial Sequence
  Description of Artificial Sequence: Synthetic oligonucleotide
  Antisense strand to SEQ ID NO: 89336
uaaacugcggacguuuccc

SEQ ID NO: 89418 - RNA, 19 nt, Artificial Sequence
  Description of Artificial Sequence: Synthetic oligonucleotide
  Sense strand starting at position 2011 of SEQ ID NO: 1123
ugagucaugucauuguuga

SEQ ID NO: 89419 - RNA, 19 nt, Artificial Sequence
  Description of Artificial Sequence: Synthetic oligonucleotide
  Antisense strand to SEQ ID NO: 89338
ucaacaaugacaugacuca

SEQ ID NO: 89420 - RNA, 19 nt, Artificial Sequence
  Description of Artificial Sequence: Synthetic oligonucleotide
  Sense strand starting at position 2012 of SEQ ID NO: 1123
gagucaugucauuguugac

SEQ ID NO: 89421 - RNA, 19 nt, Artificial Sequence
  Description of Artificial Sequence: Synthetic oligonucleotide
  Antisense strand to SEQ ID NO: 89340
gucaacaaugacaugacuc

SEQ ID NO: 89422 - RNA, 19 nt, Artificial Sequence
  Description of Artificial Sequence: Synthetic oligonucleotide
  Sense strand starting at position 2021 of SEQ ID NO: 1123
cauuguugacuccgaaucu

SEQ ID NO: 89423 - RNA, 19 nt, Artificial Sequence
  Description of Artificial Sequence: Synthetic oligonucleotide
  Antisense strand to SEQ ID NO: 89342
agauucggagucaacaaug

SEQ ID NO: 89424 - RNA, 19 nt, Artificial Sequence
  Description of Artificial Sequence: Synthetic oligonucleotide
  Sense strand starting at position 2100 of SEQ ID NO: 1123
uccuuugaggucgagaguu

SEQ ID NO: 89425 - RNA, 19 nt, Artificial Sequence
  Description of Artificial Sequence: Synthetic oligonucleotide
  Antisense strand to SEQ ID NO: 89344
aacucucgaccucaaagga

SEQ ID NO: 89426 - RNA, 19 nt, Artificial Sequence
  Description of Artificial Sequence: Synthetic oligonucleotide
  Sense strand starting at position 2102 of SEQ ID NO: 1123
cuuugaggucgagaguuua

SEQ ID NO: 89427 - RNA, 19 nt, Artificial Sequence
  Description of Artificial Sequence: Synthetic oligonucleotide
  Antisense strand to SEQ ID NO: 89346
uaaacucucgaccucaaag

SEQ ID NO: 89428 - RNA, 19 nt, Artificial Sequence
  Description of Artificial Sequence: Synthetic oligonucleotide
  Sense strand starting at position 2120 of SEQ ID NO: 1123
aaagcaguccauugaaguu

SEQ ID NO: 89429 - RNA, 19 nt, Artificial Sequence
  Description of Artificial Sequence: Synthetic oligonucleotide
  Antisense strand to SEQ ID NO: 89348
aacuucaauggacugcuuu

SEQ ID NO: 89430 - RNA, 19 nt, Artificial Sequence
  Description of Artificial Sequence: Synthetic oligonucleotide
  Sense strand starting at position 2383 of SEQ ID NO: 1123
aucagagccuuuccugaga

SEQ ID NO: 89431 - RNA, 19 nt, Artificial Sequence
  Description of Artificial Sequence: Synthetic oligonucleotide
  Antisense strand to SEQ ID NO: 89350
ucucaggaaaggcucugau

SEQ ID NO: 89432 - RNA, 19 nt, Artificial Sequence
  Description of Artificial Sequence: Synthetic oligonucleotide
  Sense strand starting at position 2386 of SEQ ID NO: 1123
agagccuuuccugagaagu

SEQ ID NO: 89433 - RNA, 19 nt, Artificial Sequence
  Description of Artificial Sequence: Synthetic oligonucleotide
  Antisense strand to SEQ ID NO: 89352
acuucucaggaaaggcucu

SEQ ID NO: 89434 - RNA, 19 nt, Artificial Sequence
  Description of Artificial Sequence: Synthetic oligonucleotide
  Sense strand starting at position 2418 of SEQ ID NO: 1123
ugucauugccaucgaauuu

SEQ ID NO: 89435 - RNA, 19 nt, Artificial Sequence
  Description of Artificial Sequence: Synthetic oligonucleotide
  Antisense strand to SEQ ID NO: 89354
aaauucgauggcaaugaca

SEQ ID NO: 89436 - RNA, 19 nt, Artificial Sequence
  Description of Artificial Sequence: Synthetic oligonucleotide
  Sense strand starting at position 2430 of SEQ ID NO: 1123
cgaauuugcccuuggugga

SEQ ID NO: 89437 - RNA, 19 nt, Artificial Sequence
  Description of Artificial Sequence: Synthetic oligonucleotide
  Antisense strand to SEQ ID NO: 89356
uccaccaagggcaaauucg

SEQ ID NO: 89438 - RNA, 19 nt, Artificial Sequence
  Description of Artificial Sequence: Synthetic oligonucleotide
  Sense strand starting at position 2443 of SEQ ID NO: 1123
gguggagaucugugcaaca

SEQ ID NO: 89439 - RNA, 19 nt, Artificial Sequence
  Description of Artificial Sequence: Synthetic oligonucleotide
  Antisense strand to SEQ ID NO: 89358
uguugcacagaucuccacc

SEQ ID NO: 89440 - RNA, 19 nt, Artificial Sequence
  Description of Artificial Sequence: Synthetic oligonucleotide
  Sense strand starting at position 2644 of SEQ ID NO: 1123
cagugagugcuacacuauu

SEQ ID NO: 89441 - RNA, 19 nt, Artificial Sequence
  Description of Artificial Sequence: Synthetic oligonucleotide
  Antisense strand to SEQ ID NO: 89360
aauaguguagcacucacug

SEQ ID NO: 89442 - RNA, 19 nt, Artificial Sequence
  Description of Artificial Sequence: Synthetic oligonucleotide
  Sense strand starting at position 3180 of SEQ ID NO: 1123
agaguuagcuuagcuaaca

SEQ ID NO: 89443 - RNA, 19 nt, Artificial Sequence
  Description of Artificial Sequence: Synthetic oligonucleotide
  Antisense strand to SEQ ID NO: 89362
uguuagcuaagcuaacucu

SEQ ID NO: 89444 - RNA, 19 nt, Artificial Sequence
  Description of Artificial Sequence: Synthetic oligonucleotide
  Sense strand starting at position 3181 of SEQ ID NO: 1123
gaguuagcuuagcuaacau

SEQ ID NO: 89445 - RNA, 19 nt, Artificial Sequence
  Description of Artificial Sequence: Synthetic oligonucleotide
  Antisense strand to SEQ ID NO: 89364
auguuagcuaagcuaacuc

SEQ ID NO: 89446 - RNA, 19 nt, Artificial Sequence
  Description of Artificial Sequence: Synthetic oligonucleotide
  Sense strand starting at position 3332 of SEQ ID NO: 1123
cugcuuucucaacaaagga

SEQ ID NO: 89447 - RNA, 19 nt, Artificial Sequence
  Description of Artificial Sequence: Synthetic oligonucleotide
  Antisense strand to SEQ ID NO: 89366
uccuuuguugagaaagcag

SEQ ID NO: 89448 - RNA, 19 nt, Artificial Sequence
  Description of Artificial Sequence: Synthetic oligonucleotide
  Sense strand starting at position 3345 of SEQ ID NO: 1123
aaaggaacuguuugguauu

SEQ ID NO: 89449 - RNA, 19 nt, Artificial Sequence
  Description of Artificial Sequence: Synthetic oligonucleotide
  Antisense strand to SEQ ID NO: 89368
aauaccaaacaguuccuuu

SEQ ID NO: 89450 - RNA, 19 nt, Artificial Sequence
  Description of Artificial Sequence: Synthetic oligonucleotide
  Sense strand starting at position 3382 of SEQ ID NO: 1123
ucuacuaaaggcuguguaa

SEQ ID NO: 89451 - RNA, 19 nt, Artificial Sequence
  Description of Artificial Sequence: Synthetic oligonucleotide
  Antisense strand to SEQ ID NO: 89370
uuacacagccuuuaguaga

SEQ ID NO: 89452 - RNA, 19 nt, Artificial Sequence
  Description of Artificial Sequence: Synthetic oligonucleotide
  Sense strand starting at position 3384 of SEQ ID NO: 1123
uacuaaaggcuguguaaac

SEQ ID NO: 89453 - RNA, 19 nt, Artificial Sequence
  Description of Artificial Sequence: Synthetic oligonucleotide
  Antisense strand to SEQ ID NO: 89372
guuuacacagccuuuagua

SEQ ID NO: 89454 - RNA, 19 nt, Artificial Sequence
  Description of Artificial Sequence: Synthetic oligonucleotide
  Sense strand starting at position 3385 of SEQ ID NO: 1123
acuaaaggcuguguaaacu

SEQ ID NO: 89455 - RNA, 19 nt, Artificial Sequence
  Description of Artificial Sequence: Synthetic oligonucleotide
  Antisense strand to SEQ ID NO: 89374
aguuuacacagccuuuagu

SEQ ID NO: 89456 - RNA, 19 nt, Artificial Sequence
  Description of Artificial Sequence: Synthetic oligonucleotide
  Sense strand starting at position 3432 of SEQ ID NO: 1123
cagaaagaugcuugucacu

SEQ ID NO: 89457 - RNA, 19 nt, Artificial Sequence
  Description of Artificial Sequence: Synthetic oligonucleotide
  Antisense strand to SEQ ID NO: 89376
agugacaagcaucuuucug

SEQ ID NO: 89458 - RNA, 19 nt, Artificial Sequence
  Description of Artificial Sequence: Synthetic oligonucleotide
  Sense strand starting at position 3434 of SEQ ID NO: 1123
gaaagaugcuugucacuca

SEQ ID NO: 89459 - RNA, 19 nt, Artificial Sequence
  Description of Artificial Sequence: Synthetic oligonucleotide
  Antisense strand to SEQ ID NO: 89378
ugagugacaagcaucuuuc

SEQ ID NO: 89460 - RNA, 19 nt, Artificial Sequence
  Description of Artificial Sequence: Synthetic oligonucleotide
  Sense strand starting at position 3437 of SEQ ID NO: 1123
agaugcuugucacucacaa

SEQ ID NO: 89461 - RNA, 19 nt, Artificial Sequence
  Description of Artificial Sequence: Synthetic oligonucleotide
  Antisense strand to SEQ ID NO: 89380
uugugagugacaagcaucu

SEQ ID NO: 89462 - RNA, 19 nt, Artificial Sequence
  Description of Artificial Sequence: Synthetic oligonucleotide
  Sense strand starting at position 3517 of SEQ ID NO: 1123
gcaccauuguuguuaauga

SEQ ID NO: 89463 - RNA, 19 nt, Artificial Sequence
  Description of Artificial Sequence: Synthetic oligonucleotide
  Antisense strand to SEQ ID NO: 89382
ucauuaacaacaauggugc

SEQ ID NO: 89464 - RNA, 19 nt, Artificial Sequence
  Description of Artificial Sequence: Synthetic oligonucleotide
  Sense strand starting at position 3527 of SEQ ID NO: 1123
uguuaaugaggccaugagu

SEQ ID NO: 89465 - RNA, 19 nt, Artificial Sequence
  Description of Artificial Sequence: Synthetic oligonucleotide
  Antisense strand to SEQ ID NO: 89384
acucauggccucauuaaca

SEQ ID NO: 89466 - RNA, 19 nt, Artificial Sequence
  Description of Artificial Sequence: Synthetic oligonucleotide
  Sense strand starting at position 3674 of SEQ ID NO: 1123
aaugcauuccaauguggca

SEQ ID NO: 89467 - RNA, 19 nt, Artificial Sequence
  Description of Artificial Sequence: Synthetic oligonucleotide
  Antisense strand to SEQ ID NO: 89386
ugccacauuggaaugcauu

SEQ ID NO: 89468 - RNA, 19 nt, Artificial Sequence
  Description of Artificial Sequence: Synthetic oligonucleotide
  Sense strand starting at position 3690 of SEQ ID NO: 1123
gcaguuauuuggcucuggu

SEQ ID NO: 89469 - RNA, 19 nt, Artificial Sequence
  Description of Artificial Sequence: Synthetic oligonucleotide
  Antisense strand to SEQ ID NO: 89388
accagagccaaauaacugc

SEQ ID NO: 89470 - RNA, 19 nt, Artificial Sequence
  Description of Artificial Sequence: Synthetic oligonucleotide
  Sense strand starting at position 3700 of SEQ ID NO: 1123
ggcucuggucuccagagga

SEQ ID NO: 89471 - RNA, 19 nt, Artificial Sequence
  Description of Artificial Sequence: Synthetic oligonucleotide
  Antisense strand to SEQ ID NO: 89390
uccucuggagaccagagcc

SEQ ID NO: 89472 - RNA, 19 nt, Artificial Sequence
  Description of Artificial Sequence: Synthetic oligonucleotide
  Sense strand starting at position 3720 of SEQ ID NO: 1123
cucgguucccaggauugaa

SEQ ID NO: 89473 - RNA, 19 nt, Artificial Sequence
  Description of Artificial Sequence: Synthetic oligonucleotide
  Antisense strand to SEQ ID NO: 89392
uucaauccugggaaccgag

SEQ ID NO: 89474 - RNA, 19 nt, Artificial Sequence
  Description of Artificial Sequence: Synthetic oligonucleotide
  Sense strand starting at position 3723 of SEQ ID NO: 1123
gguucccaggauugaaaca

SEQ ID NO: 89475 - RNA, 19 nt, Artificial Sequence
  Description of Artificial Sequence: Synthetic oligonucleotide
  Antisense strand to SEQ ID NO: 89394
uguuucaauccugggaacc

SEQ ID NO: 89476 - RNA, 19 nt, Artificial Sequence
  Description of Artificial Sequence: Synthetic oligonucleotide
  Sense strand starting at position 3750 of SEQ ID NO: 1123
aggaaagacguguagguaa

SEQ ID NO: 89477 - RNA, 19 nt, Artificial Sequence
  Description of Artificial Sequence: Synthetic oligonucleotide
  Antisense strand to SEQ ID NO: 89396
uuaccuacacgucuuuccu

SEQ ID NO: 89478 - RNA, 19 nt, Artificial Sequence
  Description of Artificial Sequence: Synthetic oligonucleotide
  Sense strand starting at position 3782 of SEQ ID NO: 1123
gugagauccaguuggauuc

SEQ ID NO: 89479 - RNA, 19 nt, Artificial Sequence
  Description of Artificial Sequence: Synthetic oligonucleotide
  Antisense strand to SEQ ID NO: 89398
gaauccaacuggaucucac

SEQ ID NO: 89480 - RNA, 19 nt, Artificial Sequence
  Description of Artificial Sequence: Synthetic oligonucleotide
  Sense strand starting at position 3909 of SEQ ID NO: 1123
uacugaugauguuugauau

SEQ ID NO: 89481 - RNA, 19 nt, Artificial Sequence
  Description of Artificial Sequence: Synthetic oligonucleotide
  Antisense strand to SEQ ID NO: 89400
auaucaaacaucaucagua

SEQ ID NO: 89482 - RNA, 19 nt, Artificial Sequence
  Description of Artificial Sequence: Synthetic oligonucleotide
  Sense strand starting at position 3910 of SEQ ID NO: 1123
acugaugauguuugauaug

SEQ ID NO: 89483 - RNA, 19 nt, Artificial Sequence
  Description of Artificial Sequence: Synthetic oligonucleotide
  Antisense strand to SEQ ID NO: 89402
cauaucaaacaucaucagu

SEQ ID NO: 89484 - RNA, 19 nt, Artificial Sequence
  Description of Artificial Sequence: Synthetic oligonucleotide
  Sense strand starting at position 3968 of SEQ ID NO: 1123
augcauuauguccaucuca

SEQ ID NO: 89485 - RNA, 19 nt, Artificial Sequence
  Description of Artificial Sequence: Synthetic oligonucleotide
  Antisense strand to SEQ ID NO: 89404
ugagauggacauaaugcau

SEQ ID NO: 89486 - RNA, 19 nt, Artificial Sequence
  Description of Artificial Sequence: Synthetic oligonucleotide
  Sense strand starting at position 3779 of SEQ ID NO: 1124
ggcauccagguuugaacaa

SEQ ID NO: 89487 - RNA, 19 nt, Artificial Sequence
  Description of Artificial Sequence: Synthetic oligonucleotide
  Antisense strand to SEQ ID NO: 89406
uuguucaaaccuggaugcc

SEQ ID NO: 89488 - RNA, 19 nt, Artificial Sequence
  Description of Artificial Sequence: Synthetic oligonucleotide
  Sense strand starting at position 3674 of SEQ ID NO: 1124
guaccuuauucucuuagag

SEQ ID NO: 89489 - RNA, 19 nt, Artificial Sequence
  Description of Artificial Sequence: Synthetic oligonucleotide
  Antisense strand to SEQ ID NO: 89408
cucuaagagaauaagguac

SEQ ID NO: 89490 - RNA, 19 nt, Artificial Sequence
  Description of Artificial Sequence: Synthetic oligonucleotide
  Sense strand starting at position 3673 of SEQ ID NO: 1124
gguaccuuauucucuuaga

SEQ ID NO: 89491 - RNA, 19 nt, Artificial Sequence
  Description of Artificial Sequence: Synthetic oligonucleotide
  Antisense strand to SEQ ID NO: 89410
ucuaagagaauaagguacc

SEQ ID NO: 89492 - RNA, 19 nt, Artificial Sequence
  Description of Artificial Sequence: Synthetic oligonucleotide
  Sense strand starting at position 3523 of SEQ ID NO: 1124
aaggaucugucuccugaca

SEQ ID NO: 89493 - RNA, 19 nt, Artificial Sequence
  Description of Artificial Sequence: Synthetic oligonucleotide
  Antisense strand to SEQ ID NO: 89412
ugucaggagacagauccuu

SEQ ID NO: 89494 - RNA, 19 nt, Artificial Sequence
  Description of Artificial Sequence: Synthetic oligonucleotide
  Sense strand starting at position 3210 of SEQ ID NO: 1124
acaaaucauccaggugcuu

SEQ ID NO: 89495 - RNA, 19 nt, Artificial Sequence
  Description of Artificial Sequence: Synthetic oligonucleotide
  Antisense strand to SEQ ID NO: 89414
aagcaccuggaugauuugu

SEQ ID NO: 89496 - RNA, 19 nt, Artificial Sequence
  Description of Artificial Sequence: Synthetic oligonucleotide
  Sense strand starting at position 3184 of SEQ ID NO: 1124
uggauuagagcaugaagca

SEQ ID NO: 89497 - RNA, 19 nt, Artificial Sequence
  Description of Artificial Sequence: Synthetic oligonucleotide
  Antisense strand to SEQ ID NO: 89416
ugcuucaugcucuaaucca

SEQ ID NO: 89498 - RNA, 19 nt, Artificial Sequence
  Description of Artificial Sequence: Synthetic oligonucleotide
  Sense strand starting at position 3093 of SEQ ID NO: 1124
acaguugaguugcuaagau

SEQ ID NO: 89499 - RNA, 19 nt, Artificial Sequence
  Description of Artificial Sequence: Synthetic oligonucleotide
  Antisense strand to SEQ ID NO: 89418
aucuuagcaacucaacugu

SEQ ID NO: 89500 - RNA, 19 nt, Artificial Sequence
  Description of Artificial Sequence: Synthetic oligonucleotide
  Sense strand starting at position 2977 of SEQ ID NO: 1124
agguguaagggccauguau

SEQ ID NO: 89501 - RNA, 19 nt, Artificial Sequence
  Description of Artificial Sequence: Synthetic oligonucleotide
  Antisense strand to SEQ ID NO: 89420
auacauggcccuuacaccu

SEQ ID NO: 89502 - RNA, 19 nt, Artificial Sequence
  Description of Artificial Sequence: Synthetic oligonucleotide
  Sense strand starting at position 2966 of SEQ ID NO: 1124
acuccugaugaagguguaa

SEQ ID NO: 89503 - RNA, 19 nt, Artificial Sequence
  Description of Artificial Sequence: Synthetic oligonucleotide
  Antisense strand to SEQ ID NO: 89422
uuacaccuucaucaggagu

SEQ ID NO: 89504 - RNA, 19 nt, Artificial Sequence
  Description of Artificial Sequence: Synthetic oligonucleotide
  Sense strand starting at position 2819 of SEQ ID NO: 1124
ugaauccaugccuagugaa

SEQ ID NO: 89505 - RNA, 19 nt, Artificial Sequence
  Description of Artificial Sequence: Synthetic oligonucleotide
  Antisense strand to SEQ ID NO: 89424
uucacuaggcauggauuca

SEQ ID NO: 89506 - RNA, 19 nt, Artificial Sequence
  Description of Artificial Sequence: Synthetic oligonucleotide
  Sense strand starting at position 2707 of SEQ ID NO: 1124
ugcaaagggucaucauaug

SEQ ID NO: 89507 - RNA, 19 nt, Artificial Sequence
  Description of Artificial Sequence: Synthetic oligonucleotide
  Antisense strand to SEQ ID NO: 89426
cauaugaugacccuuugca

SEQ ID NO: 89508 - RNA, 19 nt, Artificial Sequence
  Description of Artificial Sequence: Synthetic oligonucleotide
  Sense strand starting at position 2662 of SEQ ID NO: 1124
gcuguauuugguugacaca

SEQ ID NO: 89509 - RNA, 19 nt, Artificial Sequence
  Description of Artificial Sequence: Synthetic oligonucleotide
  Antisense strand to SEQ ID NO: 89428
ugugucaaccaaauacagc

SEQ ID NO: 89510 - RNA, 19 nt, Artificial Sequence
  Description of Artificial Sequence: Synthetic oligonucleotide
  Sense strand starting at position 2652 of SEQ ID NO: 1124
uucccagauggcuguauuu

SEQ ID NO: 89511 - RNA, 19 nt, Artificial Sequence
  Description of Artificial Sequence: Synthetic oligonucleotide
  Antisense strand to SEQ ID NO: 89430
aaauacagccaucugggaa

SEQ ID NO: 89512 - RNA, 19 nt, Artificial Sequence
  Description of Artificial Sequence: Synthetic oligonucleotide
  Sense strand starting at position 2419 of SEQ ID NO: 1124
gcaagaagacccuaucucu

SEQ ID NO: 89513 - RNA, 19 nt, Artificial Sequence
  Description of Artificial Sequence: Synthetic oligonucleotide
  Antisense strand to SEQ ID NO: 89432
agagauagggucuucuugc

SEQ ID NO: 89514 - RNA, 19 nt, Artificial Sequence
  Description of Artificial Sequence: Synthetic oligonucleotide
  Sense strand starting at position 2317 of SEQ ID NO: 1124
acagaaucugacugaaguc

SEQ ID NO: 89515 - RNA, 19 nt, Artificial Sequence
  Description of Artificial Sequence: Synthetic oligonucleotide
  Antisense strand to SEQ ID NO: 89434
gacuucagucagauucugu

SEQ ID NO: 89516 - RNA, 19 nt, Artificial Sequence
  Description of Artificial Sequence: Synthetic oligonucleotide
  Sense strand starting at position 2316 of SEQ ID NO: 1124
cacagaaucugacugaagu

SEQ ID NO: 89517 - RNA, 19 nt, Artificial Sequence
  Description of Artificial Sequence: Synthetic oligonucleotide
  Antisense strand to SEQ ID NO: 89436
acuucagucagauucugug

SEQ ID NO: 89518 - RNA, 19 nt, Artificial Sequence
  Description of Artificial Sequence: Synthetic oligonucleotide
  Sense strand starting at position 2282 of SEQ ID NO: 1124
aauguccuuuaaguggaaa

SEQ ID NO: 89519 - RNA, 19 nt, Artificial Sequence
  Description of Artificial Sequence: Synthetic oligonucleotide
  Antisense strand to SEQ ID NO: 89438
uuuccacuuaaaggacauu

SEQ ID NO: 89520 - RNA, 19 nt, Artificial Sequence
  Description of Artificial Sequence: Synthetic oligonucleotide
  Sense strand starting at position 2179 of SEQ ID NO: 1124
guuauaggaucaucaggau

SEQ ID NO: 89521 - RNA, 19 nt, Artificial Sequence
  Description of Artificial Sequence: Synthetic oligonucleotide
  Antisense strand to SEQ ID NO: 89440
auccugaugauccuauaac

SEQ ID NO: 89522 - RNA, 19 nt, Artificial Sequence
  Description of Artificial Sequence: Synthetic oligonucleotide
  Sense strand starting at position 1215 of SEQ ID NO: 1124
guaggagccauagaaguuu

SEQ ID NO: 89523 - RNA, 19 nt, Artificial Sequence
  Description of Artificial Sequence: Synthetic oligonucleotide
  Antisense strand to SEQ ID NO: 89442
aaacuucuauggcuccuac

SEQ ID NO: 89524 - RNA, 19 nt, Artificial Sequence
  Description of Artificial Sequence: Synthetic oligonucleotide
  Sense strand starting at position 1139 of SEQ ID NO: 1124
cucuguguuccugaaacac

SEQ ID NO: 89525 - RNA, 19 nt, Artificial Sequence
  Description of Artificial Sequence: Synthetic oligonucleotide
  Antisense strand to SEQ ID NO: 89444
guguuucaggaacacagag

SEQ ID NO: 89526 - RNA, 19 nt, Artificial Sequence
  Description of Artificial Sequence: Synthetic oligonucleotide
  Sense strand starting at position 1015 of SEQ ID NO: 1124
ggagugagugggcaguauu

SEQ ID NO: 89527 - RNA, 19 nt, Artificial Sequence
  Description of Artificial Sequence: Synthetic oligonucleotide
  Antisense strand to SEQ ID NO: 89446
aauacugcccacucacucc

SEQ ID NO: 89528 - RNA, 19 nt, Artificial Sequence
  Description of Artificial Sequence: Synthetic oligonucleotide
  Sense strand starting at position 1003 of SEQ ID NO: 1124
gaaugaaauuugggaguga

SEQ ID NO: 89529 - RNA, 19 nt, Artificial Sequence
  Description of Artificial Sequence: Synthetic oligonucleotide
  Antisense strand to SEQ ID NO: 89448
ucacucccaaauuucauuc

SEQ ID NO: 89530 - RNA, 19 nt, Artificial Sequence
  Description of Artificial Sequence: Synthetic oligonucleotide
  Sense strand starting at position 926 of SEQ ID NO: 1124
uaguuagaauagucuaaga

SEQ ID NO: 89531 - RNA, 19 nt, Artificial Sequence
  Description of Artificial Sequence: Synthetic oligonucleotide
  Antisense strand to SEQ ID NO: 89450
ucuuagacuauucuaacua

SEQ ID NO: 89532 - RNA, 19 nt, Artificial Sequence
  Description of Artificial Sequence: Synthetic oligonucleotide
  Sense strand starting at position 785 of SEQ ID NO: 1124
gacgaaauauuugacugga

SEQ ID NO: 89533 - RNA, 19 nt, Artificial Sequence
  Description of Artificial Sequence: Synthetic oligonucleotide
  Antisense strand to SEQ ID NO: 89452
uccagucaaauauuucguc

SEQ ID NO: 89534 - RNA, 19 nt, Artificial Sequence
  Description of Artificial Sequence: Synthetic oligonucleotide
  Sense strand starting at position 639 of SEQ ID NO: 1124
caggguauugcccacuuau

SEQ ID NO: 89535 - RNA, 19 nt, Artificial Sequence
  Description of Artificial Sequence: Synthetic oligonucleotide
  Antisense strand to SEQ ID NO: 89454
auaagugggcaauacccug

SEQ ID NO: 89536 - RNA, 19 nt, Artificial Sequence
  Description of Artificial Sequence: Synthetic oligonucleotide
  Sense strand starting at position 530 of SEQ ID NO: 1124
gguuguauuaaucagagca

SEQ ID NO: 89537 - RNA, 19 nt, Artificial Sequence
  Description of Artificial Sequence: Synthetic oligonucleotide
  Antisense strand to SEQ ID NO: 89456
ugcucugauuaauacaacc

SEQ ID NO: 89538 - RNA, 19 nt, Artificial Sequence
  Description of Artificial Sequence: Synthetic oligonucleotide
  Sense strand starting at position 521 of SEQ ID NO: 1124
acaucuagagguuguauua

SEQ ID NO: 89539 - RNA, 19 nt, Artificial Sequence
  Description of Artificial Sequence: Synthetic oligonucleotide
  Antisense strand to SEQ ID NO: 89458
uaauacaaccucuagaugu

SEQ ID NO: 89540 - RNA, 19 nt, Artificial Sequence
  Description of Artificial Sequence: Synthetic oligonucleotide
  Sense strand starting at position 518 of SEQ ID NO: 1124
gggacaucuagagguugua

SEQ ID NO: 89541 - RNA, 19 nt, Artificial Sequence
  Description of Artificial Sequence: Synthetic oligonucleotide
  Antisense strand to SEQ ID NO: 89460
uacaaccucuagauguccc

SEQ ID NO: 89542 - RNA, 19 nt, Artificial Sequence
  Description of Artificial Sequence: Synthetic oligonucleotide
  Sense strand starting at position 458 of SEQ ID NO: 1124
cagguauauggcugagaau

SEQ ID NO: 89543 - RNA, 19 nt, Artificial Sequence
  Description of Artificial Sequence: Synthetic oligonucleotide
  Antisense strand to SEQ ID NO: 89462
auucucagccauauaccug

SEQ ID NO: 89544 - RNA, 19 nt, Artificial Sequence
  Description of Artificial Sequence: Synthetic oligonucleotide
  Sense strand starting at position 457 of SEQ ID NO: 1124
gcagguauauggcugagaa

SEQ ID NO: 89545 - RNA, 19 nt, Artificial Sequence
  Description of Artificial Sequence: Synthetic oligonucleotide
  Antisense strand to SEQ ID NO: 89464
uucucagccauauaccugc

SEQ ID NO: 89546 - RNA, 19 nt, Artificial Sequence
  Description of Artificial Sequence: Synthetic oligonucleotide
  Sense strand starting at position 448 of SEQ ID NO: 1124
agucaagaagcagguauau

SEQ ID NO: 89547 - RNA, 19 nt, Artificial Sequence
  Description of Artificial Sequence: Synthetic oligonucleotide
  Antisense strand to SEQ ID NO: 89466
auauaccugcuucuugacu

SEQ ID NO: 89548 - RNA, 19 nt, Artificial Sequence
  Description of Artificial Sequence: Synthetic oligonucleotide
  Sense strand starting at position 432 of SEQ ID NO: 1124
ucuagucuccuggaauagu

SEQ ID NO: 89549 - RNA, 19 nt, Artificial Sequence
  Description of Artificial Sequence: Synthetic oligonucleotide
  Antisense strand to SEQ ID NO: 89468
acuauuccaggagacuaga

SEQ ID NO: 89550 - RNA, 19 nt, Artificial Sequence
  Description of Artificial Sequence: Synthetic oligonucleotide
  Sense strand starting at position 428 of SEQ ID NO: 1124
cucaucuagucuccuggaa

SEQ ID NO: 89551 - RNA, 19 nt, Artificial Sequence
  Description of Artificial Sequence: Synthetic oligonucleotide
  Antisense strand to SEQ ID NO: 89470
uuccaggagacuagaugag

SEQ ID NO: 89552 - RNA, 19 nt, Artificial Sequence
  Description of Artificial Sequence: Synthetic oligonucleotide
  Sense strand starting at position 385 of SEQ ID NO: 1124
gcuugagcuccuucuuguu

SEQ ID NO: 89553 - RNA, 19 nt, Artificial Sequence
  Description of Artificial Sequence: Synthetic oligonucleotide
  Antisense strand to SEQ ID NO: 89472
aacaagaaggagcucaagc

SEQ ID NO: 89554 - RNA, 19 nt, Artificial Sequence
  Description of Artificial Sequence: Synthetic oligonucleotide
  Sense strand starting at position 317 of SEQ ID NO: 1124
accagucagcuccauacuu

SEQ ID NO: 89555 - RNA, 19 nt, Artificial Sequence
  Description of Artificial Sequence: Synthetic oligonucleotide
  Antisense strand to SEQ ID NO: 89474
aaguauggagcugacuggu

SEQ ID NO: 89556 - RNA, 19 nt, Artificial Sequence
  Description of Artificial Sequence: Synthetic oligonucleotide
  Sense strand starting at position 176 of SEQ ID NO: 1124
cugagauggcuauauagca

SEQ ID NO: 89557 - RNA, 19 nt, Artificial Sequence
  Description of Artificial Sequence: Synthetic oligonucleotide
  Antisense strand to SEQ ID NO: 89476
ugcuauauagccaucucag

SEQ ID NO: 89558 - RNA, 19 nt, Artificial Sequence
  Description of Artificial Sequence: Synthetic oligonucleotide
  Sense strand starting at position 174 of SEQ ID NO: 1124
gucugagauggcuauauag

SEQ ID NO: 89559 - RNA, 19 nt, Artificial Sequence
  Description of Artificial Sequence: Synthetic oligonucleotide
  Antisense strand to SEQ ID NO: 89478
cuauauagccaucucagac

SEQ ID NO: 89560 - RNA, 19 nt, Artificial Sequence
  Description of Artificial Sequence: Synthetic oligonucleotide
  Sense strand starting at position 171 of SEQ ID NO: 1124
cuggucugagauggcuaua

SEQ ID NO: 89561 - RNA, 19 nt, Artificial Sequence
  Description of Artificial Sequence: Synthetic oligonucleotide
  Antisense strand to SEQ ID NO: 89480
uauagccaucucagaccag

SEQ ID NO: 89562 - RNA, 19 nt, Artificial Sequence
  Description of Artificial Sequence: Synthetic oligonucleotide
  Sense strand starting at position 165 of SEQ ID NO: 1124
ggaacucuggucugagaug

SEQ ID NO: 89563 - RNA, 19 nt, Artificial Sequence
  Description of Artificial Sequence: Synthetic oligonucleotide
  Antisense strand to SEQ ID NO: 89482
caucucagaccagaguucc

SEQ ID NO: 89564 - RNA, 19 nt, Artificial Sequence
  Description of Artificial Sequence: Synthetic oligonucleotide
  Sense strand starting at position 163 of SEQ ID NO: 1124
auggaacucuggucugaga

SEQ ID NO: 89565 - RNA, 19 nt, Artificial Sequence
  Description of Artificial Sequence: Synthetic oligonucleotide
  Antisense strand to SEQ ID NO: 89484
ucucagaccagaguuccau

SEQ ID NO: 89566 - RNA, 19 nt, Artificial Sequence
  Description of Artificial Sequence: Synthetic oligonucleotide
  Sense strand starting at position 3703 of SEQ ID NO: 1125
auguguugugaauaucuuu

SEQ ID NO: 89567 - RNA, 19 nt, Artificial Sequence
  Description of Artificial Sequence: Synthetic oligonucleotide
  Antisense strand to SEQ ID NO: 89486
aaagauauucacaacacau

SEQ ID NO: 89568 - RNA, 19 nt, Artificial Sequence
  Description of Artificial Sequence: Synthetic oligonucleotide
  Sense strand starting at position 3537 of SEQ ID NO: 1125
cuuuguagugaucacagca

SEQ ID NO: 89569 - RNA, 19 nt, Artificial Sequence
  Description of Artificial Sequence: Synthetic oligonucleotide
  Antisense strand to SEQ ID NO: 89488
ugcugugaucacuacaaag

SEQ ID NO: 89570 - RNA, 19 nt, Artificial Sequence
  Description of Artificial Sequence: Synthetic oligonucleotide
  Sense strand starting at position 3525 of SEQ ID NO: 1125
uguguuccucugcuuugua

SEQ ID NO: 89571 - RNA, 19 nt, Artificial Sequence
  Description of Artificial Sequence: Synthetic oligonucleotide
  Antisense strand to SEQ ID NO: 89490
uacaaagcagaggaacaca

SEQ ID NO: 89572 - RNA, 19 nt, Artificial Sequence
  Description of Artificial Sequence: Synthetic oligonucleotide
  Sense strand starting at position 3476 of SEQ ID NO: 1125
auaauugccauucgaugga

SEQ ID NO: 89573 - RNA, 19 nt, Artificial Sequence
  Description of Artificial Sequence: Synthetic oligonucleotide
  Antisense strand to SEQ ID NO: 89492
uccaucgaauggcaauuau

SEQ ID NO: 89574 - RNA, 19 nt, Artificial Sequence
  Description of Artificial Sequence: Synthetic oligonucleotide
  Sense strand starting at position 3424 of SEQ ID NO: 1125
gcaccuaugguguauaaga

SEQ ID NO: 89575 - RNA, 19 nt, Artificial Sequence
  Description of Artificial Sequence: Synthetic oligonucleotide
  Antisense strand to SEQ ID NO: 89494
ucuuauacaccauaggugc

SEQ ID NO: 89576 - RNA, 19 nt, Artificial Sequence
  Description of Artificial Sequence: Synthetic oligonucleotide
  Sense strand starting at position 3331 of SEQ ID NO: 1125
gggagagucucaccaaguu

SEQ ID NO: 89577 - RNA, 19 nt, Artificial Sequence
  Description of Artificial Sequence: Synthetic oligonucleotide
  Antisense strand to SEQ ID NO: 89496
aacuuggugagacucuccc

SEQ ID NO: 89578 - RNA, 19 nt, Artificial Sequence
  Description of Artificial Sequence: Synthetic oligonucleotide
  Sense strand starting at position 3320 of SEQ ID NO: 1125
uguguauuugugggagagu

SEQ ID NO: 89579 - RNA, 19 nt, Artificial Sequence
  Description of Artificial Sequence: Synthetic oligonucleotide
  Antisense strand to SEQ ID NO: 89498
acucucccacaaauacaca

SEQ ID NO: 89580 - RNA, 19 nt, Artificial Sequence
  Description of Artificial Sequence: Synthetic oligonucleotide
  Sense strand starting at position 3309 of SEQ ID NO: 1125
gcgugucuacuuguguauu

SEQ ID NO: 89581 - RNA, 19 nt, Artificial Sequence
  Description of Artificial Sequence: Synthetic oligonucleotide
  Antisense strand to SEQ ID NO: 89500
aauacacaaguagacacgc

SEQ ID NO: 89582 - RNA, 19 nt, Artificial Sequence
  Description of Artificial Sequence: Synthetic oligonucleotide
  Sense strand starting at position 3246 of SEQ ID NO: 1125
gauagacauuuagaguguu

SEQ ID NO: 89583 - RNA, 19 nt, Artificial Sequence
  Description of Artificial Sequence: Synthetic oligonucleotide
  Antisense strand to SEQ ID NO: 89502
aacacucuaaaugucuauc

SEQ ID NO: 89584 - RNA, 19 nt, Artificial Sequence
  Description of Artificial Sequence: Synthetic oligonucleotide
  Sense strand starting at position 3216 of SEQ ID NO: 1125
gcaucaugauuuguuagcu

SEQ ID NO: 89585 - RNA, 19 nt, Artificial Sequence
  Description of Artificial Sequence: Synthetic oligonucleotide
  Antisense strand to SEQ ID NO: 89504
agcuaacaaaucaugaugc

SEQ ID NO: 89586 - RNA, 19 nt, Artificial Sequence
  Description of Artificial Sequence: Synthetic oligonucleotide
  Sense strand starting at position 3213 of SEQ ID NO: 1125
agugcaucaugauuuguua

SEQ ID NO: 89587 - RNA, 19 nt, Artificial Sequence
  Description of Artificial Sequence: Synthetic oligonucleotide
  Antisense strand to SEQ ID NO: 89506
uaacaaaucaugaugcacu

SEQ ID NO: 89588 - RNA, 19 nt, Artificial Sequence
  Description of Artificial Sequence: Synthetic oligonucleotide
  Sense strand starting at position 3208 of SEQ ID NO: 1125
uuaugagugcaucaugauu

SEQ ID NO: 89589 - RNA, 19 nt, Artificial Sequence
  Description of Artificial Sequence: Synthetic oligonucleotide
  Antisense strand to SEQ ID NO: 89508
aaucaugaugcacucauaa

SEQ ID NO: 89590 - RNA, 19 nt, Artificial Sequence
  Description of Artificial Sequence: Synthetic oligonucleotide
  Sense strand starting at position 3203 of SEQ ID NO: 1125
ccaucuuaugagugcauca

SEQ ID NO: 89591 - RNA, 19 nt, Artificial Sequence
  Description of Artificial Sequence: Synthetic oligonucleotide
  Antisense strand to SEQ ID NO: 89510
ugaugcacucauaagaugg

SEQ ID NO: 89592 - RNA, 19 nt, Artificial Sequence
  Description of Artificial Sequence: Synthetic oligonucleotide
  Sense strand starting at position 3192 of SEQ ID NO: 1125
cgguguaguauccaucuua

SEQ ID NO: 89593 - RNA, 19 nt, Artificial Sequence
  Description of Artificial Sequence: Synthetic oligonucleotide
  Antisense strand to SEQ ID NO: 89512
uaagauggauacuacaccg

SEQ ID NO: 89594 - RNA, 19 nt, Artificial Sequence
  Description of Artificial Sequence: Synthetic oligonucleotide
  Sense strand starting at position 3160 of SEQ ID NO: 1125
ucuguauagccauaguuua

SEQ ID NO: 89595 - RNA, 19 nt, Artificial Sequence
  Description of Artificial Sequence: Synthetic oligonucleotide
  Antisense strand to SEQ ID NO: 89514
uaaacuauggcuauacaga

SEQ ID NO: 89596 - RNA, 19 nt, Artificial Sequence
  Description of Artificial Sequence: Synthetic oligonucleotide
  Sense strand starting at position 3154 of SEQ ID NO: 1125
aguugaucuguauagccau

SEQ ID NO: 89597 - RNA, 19 nt, Artificial Sequence
  Description of Artificial Sequence: Synthetic oligonucleotide
  Antisense strand to SEQ ID NO: 89516
auggcuauacagaucaacu

SEQ ID NO: 89598 - RNA, 19 nt, Artificial Sequence
  Description of Artificial Sequence: Synthetic oligonucleotide
  Sense strand starting at position 3024 of SEQ ID NO: 1125
uguacagguuacccugaua

SEQ ID NO: 89599 - RNA, 19 nt, Artificial Sequence
  Description of Artificial Sequence: Synthetic oligonucleotide
  Antisense strand to SEQ ID NO: 89518
uaucaggguaaccuguaca

SEQ ID NO: 89600 - RNA, 19 nt, Artificial Sequence
  Description of Artificial Sequence: Synthetic oligonucleotide
  Sense strand starting at position 2961 of SEQ ID NO: 1125
uguuaaugagcccaugcaa

SEQ ID NO: 89601 - RNA, 19 nt, Artificial Sequence
  Description of Artificial Sequence: Synthetic oligonucleotide
  Antisense strand to SEQ ID NO: 89520
uugcaugggcucauuaaca

SEQ ID NO: 89602 - RNA, 19 nt, Artificial Sequence
  Description of Artificial Sequence: Synthetic oligonucleotide
  Sense strand starting at position 2774 of SEQ ID NO: 1125
guggguauucaggagagcu

SEQ ID NO: 89603 - RNA, 19 nt, Artificial Sequence
  Description of Artificial Sequence: Synthetic oligonucleotide
  Antisense strand to SEQ ID NO: 89522
agcucuccugaauacccac

SEQ ID NO: 89604 - RNA, 19 nt, Artificial Sequence
  Description of Artificial Sequence: Synthetic oligonucleotide
  Sense strand starting at position 2540 of SEQ ID NO: 1125
uaggcaucccuuuguggaa

SEQ ID NO: 89605 - RNA, 19 nt, Artificial Sequence
  Description of Artificial Sequence: Synthetic oligonucleotide
  Antisense strand to SEQ ID NO: 89524
uuccacaaagggaugccua

SEQ ID NO: 89606 - RNA, 19 nt, Artificial Sequence
  Description of Artificial Sequence: Synthetic oligonucleotide
  Sense strand starting at position 2296 of SEQ ID NO: 1125
agcaguuacaggugaacau

SEQ ID NO: 89607 - RNA, 19 nt, Artificial Sequence
  Description of Artificial Sequence: Synthetic oligonucleotide
  Antisense strand to SEQ ID NO: 89526
auguucaccuguaacugcu

SEQ ID NO: 89608 - RNA, 19 nt, Artificial Sequence
  Description of Artificial Sequence: Synthetic oligonucleotide
  Sense strand starting at position 2200 of SEQ ID NO: 1125
ugugauauccucuacacug

SEQ ID NO: 89609 - RNA, 19 nt, Artificial Sequence
  Description of Artificial Sequence: Synthetic oligonucleotide
  Antisense strand to SEQ ID NO: 89528
caguguagaggauaucaca

SEQ ID NO: 89610 - RNA, 19 nt, Artificial Sequence
  Description of Artificial Sequence: Synthetic oligonucleotide
  Sense strand starting at position 2168 of SEQ ID NO: 1125
cauuaaaugugaguuuaag

SEQ ID NO: 89611 - RNA, 19 nt, Artificial Sequence
  Description of Artificial Sequence: Synthetic oligonucleotide
  Antisense strand to SEQ ID NO: 89530
cuuaaacucacauuuaaug

SEQ ID NO: 89612 - RNA, 19 nt, Artificial Sequence
  Description of Artificial Sequence: Synthetic oligonucleotide
  Sense strand starting at position 2108 of SEQ ID NO: 1125
cugaaugcucagcacuuau

SEQ ID NO: 89613 - RNA, 19 nt, Artificial Sequence
  Description of Artificial Sequence: Synthetic oligonucleotide
  Antisense strand to SEQ ID NO: 89532
auaagugcugagcauucag

SEQ ID NO: 89614 - RNA, 19 nt, Artificial Sequence
  Description of Artificial Sequence: Synthetic oligonucleotide
  Sense strand starting at position 2107 of SEQ ID NO: 1125
acugaaugcucagcacuua

SEQ ID NO: 89615 - RNA, 19 nt, Artificial Sequence
  Description of Artificial Sequence: Synthetic oligonucleotide
  Antisense strand to SEQ ID NO: 89534
uaagugcugagcauucagu

SEQ ID NO: 89616 - RNA, 19 nt, Artificial Sequence
  Description of Artificial Sequence: Synthetic oligonucleotide
  Sense strand starting at position 2052 of SEQ ID NO: 1125
acagguuucugacuuaguc

SEQ ID NO: 89617 - RNA, 19 nt, Artificial Sequence
  Description of Artificial Sequence: Synthetic oligonucleotide
  Antisense strand to SEQ ID NO: 89536
gacuaagucagaaaccugu

SEQ ID NO: 89618 - RNA, 19 nt, Artificial Sequence
  Description of Artificial Sequence: Synthetic oligonucleotide
  Sense strand starting at position 2048 of SEQ ID NO: 1125
guauacagguuucugacuu

SEQ ID NO: 89619 - RNA, 19 nt, Artificial Sequence
  Description of Artificial Sequence: Synthetic oligonucleotide
  Antisense strand to SEQ ID NO: 89538
aagucagaaaccuguauac

SEQ ID NO: 89620 - RNA, 19 nt, Artificial Sequence
  Description of Artificial Sequence: Synthetic oligonucleotide
  Sense strand starting at position 2039 of SEQ ID NO: 1125
gugagaauuguauacaggu

SEQ ID NO: 89621 - RNA, 19 nt, Artificial Sequence
  Description of Artificial Sequence: Synthetic oligonucleotide
  Antisense strand to SEQ ID NO: 89540
accuguauacaauucucac

SEQ ID NO: 89622 - RNA, 19 nt, Artificial Sequence
  Description of Artificial Sequence: Synthetic oligonucleotide
  Sense strand starting at position 747 of SEQ ID NO: 1125
uaggaagauuggcuaaauu

SEQ ID NO: 89623 - RNA, 19 nt, Artificial Sequence
  Description of Artificial Sequence: Synthetic oligonucleotide
  Antisense strand to SEQ ID NO: 89542
aauuuagccaaucuuccua

SEQ ID NO: 89624 - RNA, 19 nt, Artificial Sequence
  Description of Artificial Sequence: Synthetic oligonucleotide
  Sense strand starting at position 746 of SEQ ID NO: 1125
guaggaagauuggcuaaau

SEQ ID NO: 89625 - RNA, 19 nt, Artificial Sequence
  Description of Artificial Sequence: Synthetic oligonucleotide
  Antisense strand to SEQ ID NO: 89544
auuuagccaaucuuccuac

SEQ ID NO: 89626 - RNA, 19 nt, Artificial Sequence
  Description of Artificial Sequence: Synthetic oligonucleotide
  Sense strand starting at position 735 of SEQ ID NO: 1125
aaaggauauuaguaggaag

SEQ ID NO: 89627 - RNA, 19 nt, Artificial Sequence
  Description of Artificial Sequence: Synthetic oligonucleotide
  Antisense strand to SEQ ID NO: 89546
cuuccuacuaauauccuuu

SEQ ID NO: 89628 - RNA, 19 nt, Artificial Sequence
  Description of Artificial Sequence: Synthetic oligonucleotide
  Sense strand starting at position 635 of SEQ ID NO: 1125
gccauuucgguuuggagga

SEQ ID NO: 89629 - RNA, 19 nt, Artificial Sequence
  Description of Artificial Sequence: Synthetic oligonucleotide
  Antisense strand to SEQ ID NO: 89548
uccuccaaaccgaaauggc

SEQ ID NO: 89630 - RNA, 19 nt, Artificial Sequence
  Description of Artificial Sequence: Synthetic oligonucleotide
  Sense strand starting at position 522 of SEQ ID NO: 1125
aucugagccuggucaagaa

SEQ ID NO: 89631 - RNA, 19 nt, Artificial Sequence
  Description of Artificial Sequence: Synthetic oligonucleotide
  Antisense strand to SEQ ID NO: 89550
uucuugaccaggcucagau

SEQ ID NO: 89632 - RNA, 19 nt, Artificial Sequence
  Description of Artificial Sequence: Synthetic oligonucleotide
  Sense strand starting at position 519 of SEQ ID NO: 1125
guaaucugagccuggucaa

SEQ ID NO: 89633 - RNA, 19 nt, Artificial Sequence
  Description of Artificial Sequence: Synthetic oligonucleotide
  Antisense strand to SEQ ID NO: 89552
uugaccaggcucagauuac

SEQ ID NO: 89634 - RNA, 19 nt, Artificial Sequence
  Description of Artificial Sequence: Synthetic oligonucleotide
  Sense strand starting at position 455 of SEQ ID NO: 1125
cauguaaggcuugauauca

SEQ ID NO: 89635 - RNA, 19 nt, Artificial Sequence
  Description of Artificial Sequence: Synthetic oligonucleotide
  Antisense strand to SEQ ID NO: 89554
ugauaucaagccuuacaug

SEQ ID NO: 89636 - RNA, 19 nt, Artificial Sequence
  Description of Artificial Sequence: Synthetic oligonucleotide
  Sense strand starting at position 454 of SEQ ID NO: 1125
ucauguaaggcuugauauc

SEQ ID NO: 89637 - RNA, 19 nt, Artificial Sequence
  Description of Artificial Sequence: Synthetic oligonucleotide
  Antisense strand to SEQ ID NO: 89556
gauaucaagccuuacauga

SEQ ID NO: 89638 - RNA, 19 nt, Artificial Sequence
  Description of Artificial Sequence: Synthetic oligonucleotide
  Sense strand starting at position 423 of SEQ ID NO: 1125
guuguaucuccaggaaugg

SEQ ID NO: 89639 - RNA, 19 nt, Artificial Sequence
  Description of Artificial Sequence: Synthetic oligonucleotide
  Antisense strand to SEQ ID NO: 89558
ccauuccuggagauacaac

SEQ ID NO: 89640 - RNA, 19 nt, Artificial Sequence
  Description of Artificial Sequence: Synthetic oligonucleotide
  Sense strand starting at position 420 of SEQ ID NO: 1125
aaaguuguaucuccaggaa

SEQ ID NO: 89641 - RNA, 19 nt, Artificial Sequence
  Description of Artificial Sequence: Synthetic oligonucleotide
  Antisense strand to SEQ ID NO: 89560
uuccuggagauacaacuuu

SEQ ID NO: 89642 - RNA, 19 nt, Artificial Sequence
  Description of Artificial Sequence: Synthetic oligonucleotide
  Sense strand starting at position 407 of SEQ ID NO: 1125
agaucaaguggucaaaguu

SEQ ID NO: 89643 - RNA, 19 nt, Artificial Sequence
  Description of Artificial Sequence: Synthetic oligonucleotide
  Antisense strand to SEQ ID NO: 89562
aacuuugaccacuugaucu

SEQ ID NO: 89644 - RNA, 19 nt, Artificial Sequence
  Description of Artificial Sequence: Synthetic oligonucleotide
  Sense strand starting at position 404 of SEQ ID NO: 1125
ggcagaucaaguggucaaa

SEQ ID NO: 89645 - RNA, 19 nt, Artificial Sequence
  Description of Artificial Sequence: Synthetic oligonucleotide
  Antisense strand to SEQ ID NO: 89564
uuugaccacuugaucugcc

SEQ ID NO: 89646 - RNA, 19 nt, Artificial Sequence
  Description of Artificial Sequence: Synthetic oligonucleotide
  Sense strand starting at position 237 of SEQ ID NO: 1126
ugcaaaugacauugaguaa

SEQ ID NO: 89647 - RNA, 19 nt, Artificial Sequence
  Description of Artificial Sequence: Synthetic oligonucleotide
  Antisense strand to SEQ ID NO: 89566
uuacucaaugucauuugca

SEQ ID NO: 89648 - RNA, 19 nt, Artificial Sequence
  Description of Artificial Sequence: Synthetic oligonucleotide
  Sense strand starting at position 445 of SEQ ID NO: 1126
gcaguuugcgguccuggau

SEQ ID NO: 89649 - RNA, 19 nt, Artificial Sequence
  Description of Artificial Sequence: Synthetic oligonucleotide
  Antisense strand to SEQ ID NO: 89568
auccaggaccgcaaacugc

SEQ ID NO: 89650 - RNA, 19 nt, Artificial Sequence
  Description of Artificial Sequence: Synthetic oligonucleotide
  Sense strand starting at position 1116 of SEQ ID NO: 1126
ggcaguaagccauaugaaa

SEQ ID NO: 89651 - RNA, 19 nt, Artificial Sequence
  Description of Artificial Sequence: Synthetic oligonucleotide
  Antisense strand to SEQ ID NO: 89570
uuucauauggcuuacugcc

SEQ ID NO: 89652 - RNA, 19 nt, Artificial Sequence
  Description of Artificial Sequence: Synthetic oligonucleotide
  Sense strand starting at position 1207 of SEQ ID NO: 1126
gaaacuguccaguguggaa

SEQ ID NO: 89653 - RNA, 19 nt, Artificial Sequence
  Description of Artificial Sequence: Synthetic oligonucleotide
  Antisense strand to SEQ ID NO: 89572
uuccacacuggacaguuuc

SEQ ID NO: 89654 - RNA, 19 nt, Artificial Sequence
  Description of Artificial Sequence: Synthetic oligonucleotide
  Sense strand starting at position 1266 of SEQ ID NO: 1126
ggauuaucucuuggaguaa

SEQ ID NO: 89655 - RNA, 19 nt, Artificial Sequence
  Description of Artificial Sequence: Synthetic oligonucleotide
  Antisense strand to SEQ ID NO: 89574
uuacuccaagagauaaucc

SEQ ID NO: 89656 - RNA, 19 nt, Artificial Sequence
  Description of Artificial Sequence: Synthetic oligonucleotide
  Sense strand starting at position 1280 of SEQ ID NO: 1126
aguaacuuccuaggagacu

SEQ ID NO: 89657 - RNA, 19 nt, Artificial Sequence
  Description of Artificial Sequence: Synthetic oligonucleotide
  Antisense strand to SEQ ID NO: 89576
agucuccuaggaaguuacu

SEQ ID NO: 89658 - RNA, 19 nt, Artificial Sequence
  Description of Artificial Sequence: Synthetic oligonucleotide
  Sense strand starting at position 1291 of SEQ ID NO: 1126
aggagacuuugucuuguaa

SEQ ID NO: 89659 - RNA, 19 nt, Artificial Sequence
  Description of Artificial Sequence: Synthetic oligonucleotide
  Antisense strand to SEQ ID NO: 89578
uuacaagacaaagucuccu

SEQ ID NO: 89660 - RNA, 19 nt, Artificial Sequence
  Description of Artificial Sequence: Synthetic oligonucleotide
  Sense strand starting at position 1556 of SEQ ID NO: 1126
ucuagagauaagugaguuu

SEQ ID NO: 89661 - RNA, 19 nt, Artificial Sequence
  Description of Artificial Sequence: Synthetic oligonucleotide
  Antisense strand to SEQ ID NO: 89580
aaacucacuuaucucuaga

SEQ ID NO: 89662 - RNA, 19 nt, Artificial Sequence
  Description of Artificial Sequence: Synthetic oligonucleotide
  Sense strand starting at position 1688 of SEQ ID NO: 1126
auuugaaguuguucuagca

SEQ ID NO: 89663 - RNA, 19 nt, Artificial Sequence
  Description of Artificial Sequence: Synthetic oligonucleotide
  Antisense strand to SEQ ID NO: 89582
ugcuagaacaacuucaaau

SEQ ID NO: 89664 - RNA, 19 nt, Artificial Sequence
  Description of Artificial Sequence: Synthetic oligonucleotide
  Sense strand starting at position 1708 of SEQ ID NO: 1126
agucuauuugccugggcuu

SEQ ID NO: 89665 - RNA, 19 nt, Artificial Sequence
  Description of Artificial Sequence: Synthetic oligonucleotide
  Antisense strand to SEQ ID NO: 89584
aagcccaggcaaauagacu

SEQ ID NO: 89666 - RNA, 19 nt, Artificial Sequence
  Description of Artificial Sequence: Synthetic oligonucleotide
  Sense strand starting at position 1854 of SEQ ID NO: 1126
cuugacuucuauccagaug

SEQ ID NO: 89667 - RNA, 19 nt, Artificial Sequence
  Description of Artificial Sequence: Synthetic oligonucleotide
  Antisense strand to SEQ ID NO: 89586
caucuggauagaagucaag

SEQ ID NO: 89668 - RNA, 19 nt, Artificial Sequence
  Description of Artificial Sequence: Synthetic oligonucleotide
  Sense strand starting at position 1920 of SEQ ID NO: 1126
ugagcaacacucuguggaa

SEQ ID NO: 89669 - RNA, 19 nt, Artificial Sequence
  Description of Artificial Sequence: Synthetic oligonucleotide
  Antisense strand to SEQ ID NO: 89588
uuccacagaguguugcuca

SEQ ID NO: 89670 - RNA, 19 nt, Artificial Sequence
  Description of Artificial Sequence: Synthetic oligonucleotide
  Sense strand starting at position 2245 of SEQ ID NO: 1126
caucauuuccuguguuguu

SEQ ID NO: 89671 - RNA, 19 nt, Artificial Sequence
  Description of Artificial Sequence: Synthetic oligonucleotide
  Antisense strand to SEQ ID NO: 89590
aacaacacaggaaaugaug

SEQ ID NO: 89672 - RNA, 19 nt, Artificial Sequence
  Description of Artificial Sequence: Synthetic oligonucleotide
  Sense strand starting at position 2259 of SEQ ID NO: 1126
uuguucuccguggagaaua

SEQ ID NO: 89673 - RNA, 19 nt, Artificial Sequence
  Description of Artificial Sequence: Synthetic oligonucleotide
  Antisense strand to SEQ ID NO: 89592
uauucuccacggagaacaa

SEQ ID NO: 89674 - RNA, 19 nt, Artificial Sequence
  Description of Artificial Sequence: Synthetic oligonucleotide
  Sense strand starting at position 2277 of SEQ ID NO: 1126
accuaaucuguuuagucuu

SEQ ID NO: 89675 - RNA, 19 nt, Artificial Sequence
  Description of Artificial Sequence: Synthetic oligonucleotide
  Antisense strand to SEQ ID NO: 89594
aagacuaaacagauuaggu

SEQ ID NO: 89676 - RNA, 19 nt, Artificial Sequence
  Description of Artificial Sequence: Synthetic oligonucleotide
  Sense strand starting at position 2280 of SEQ ID NO: 1126
uaaucuguuuagucuugga

SEQ ID NO: 89677 - RNA, 19 nt, Artificial Sequence
  Description of Artificial Sequence: Synthetic oligonucleotide
  Antisense strand to SEQ ID NO: 89596
uccaagacuaaacagauua

SEQ ID NO: 89678 - RNA, 19 nt, Artificial Sequence
  Description of Artificial Sequence: Synthetic oligonucleotide
  Sense strand starting at position 2500 of SEQ ID NO: 1126
uuagguaacugguuaaaga

SEQ ID NO: 89679 - RNA, 19 nt, Artificial Sequence
  Description of Artificial Sequence: Synthetic oligonucleotide
  Antisense strand to SEQ ID NO: 89598
ucuuuaaccaguuaccuaa

SEQ ID NO: 89680 - RNA, 19 nt, Artificial Sequence
  Description of Artificial Sequence: Synthetic oligonucleotide
  Sense strand starting at position 2557 of SEQ ID NO: 1126
ccugcaugaccuuaugaaa

SEQ ID NO: 89681 - RNA, 19 nt, Artificial Sequence
  Description of Artificial Sequence: Synthetic oligonucleotide
  Antisense strand to SEQ ID NO: 89600
uuucauaaggucaugcagg

SEQ ID NO: 89682 - RNA, 19 nt, Artificial Sequence
  Description of Artificial Sequence: Synthetic oligonucleotide
  Sense strand starting at position 2577 of SEQ ID NO: 1126
gcauuaauaccucaucguu

SEQ ID NO: 89683 - RNA, 19 nt, Artificial Sequence
  Description of Artificial Sequence: Synthetic oligonucleotide
  Antisense strand to SEQ ID NO: 89602
aacgaugagguauuaaugc

SEQ ID NO: 89684 - RNA, 19 nt, Artificial Sequence
  Description of Artificial Sequence: Synthetic oligonucleotide
  Sense strand starting at position 2607 of SEQ ID NO: 1126
uuugucaacucuguaauag

SEQ ID NO: 89685 - RNA, 19 nt, Artificial Sequence
  Description of Artificial Sequence: Synthetic oligonucleotide
  Antisense strand to SEQ ID NO: 89604
cuauuacagaguugacaaa

SEQ ID NO: 89686 - RNA, 19 nt, Artificial Sequence
  Description of Artificial Sequence: Synthetic oligonucleotide
  Sense strand starting at position 2608 of SEQ ID NO: 1126
uugucaacucuguaauaga

SEQ ID NO: 89687 - RNA, 19 nt, Artificial Sequence
  Description of Artificial Sequence: Synthetic oligonucleotide
  Antisense strand to SEQ ID NO: 89606
ucuauuacagaguugacaa

SEQ ID NO: 89688 - RNA, 19 nt, Artificial Sequence
  Description of Artificial Sequence: Synthetic oligonucleotide
  Sense strand starting at position 3029 of SEQ ID NO: 1126
uuccgugaccuaugcauuu

SEQ ID NO: 89689 - RNA, 19 nt, Artificial Sequence
  Description of Artificial Sequence: Synthetic oligonucleotide
  Antisense strand to SEQ ID NO: 89608
aaaugcauaggucacggaa

SEQ ID NO: 89690 - RNA, 19 nt, Artificial Sequence
  Description of Artificial Sequence: Synthetic oligonucleotide
  Sense strand starting at position 3066 of SEQ ID NO: 1126
acuguaacuucuuuaugag

SEQ ID NO: 89691 - RNA, 19 nt, Artificial Sequence
  Description of Artificial Sequence: Synthetic oligonucleotide
  Antisense strand to SEQ ID NO: 89610
cucauaaagaaguuacagu

SEQ ID NO: 89692 - RNA, 19 nt, Artificial Sequence
  Description of Artificial Sequence: Synthetic oligonucleotide
  Sense strand starting at position 3067 of SEQ ID NO: 1126
cuguaacuucuuuaugagu

SEQ ID NO: 89693 - RNA, 19 nt, Artificial Sequence
  Description of Artificial Sequence: Synthetic oligonucleotide
  Antisense strand to SEQ ID NO: 89612
acucauaaagaaguuacag

SEQ ID NO: 89694 - RNA, 19 nt, Artificial Sequence
  Description of Artificial Sequence: Synthetic oligonucleotide
  Sense strand starting at position 3231 of SEQ ID NO: 1126
cuuuacuuuguguaugacu

SEQ ID NO: 89695 - RNA, 19 nt, Artificial Sequence
  Description of Artificial Sequence: Synthetic oligonucleotide
  Antisense strand to SEQ ID NO: 89614
agucauacacaaaguaaag

SEQ ID NO: 89696 - RNA, 19 nt, Artificial Sequence
  Description of Artificial Sequence: Synthetic oligonucleotide
  Sense strand starting at position 3252 of SEQ ID NO: 1126
agccaucaucauuggaauu

SEQ ID NO: 89697 - RNA, 19 nt, Artificial Sequence
  Description of Artificial Sequence: Synthetic oligonucleotide
  Antisense strand to SEQ ID NO: 89616
aauuccaaugaugauggcu

SEQ ID NO: 89698 - RNA, 19 nt, Artificial Sequence
  Description of Artificial Sequence: Synthetic oligonucleotide
  Sense strand starting at position 3263 of SEQ ID NO: 1126
uuggaauucucacucugag

SEQ ID NO: 89699 - RNA, 19 nt, Artificial Sequence
  Description of Artificial Sequence: Synthetic oligonucleotide
  Antisense strand to SEQ ID NO: 89618
cucagagugagaauuccaa

SEQ ID NO: 89700 - RNA, 19 nt, Artificial Sequence
  Description of Artificial Sequence: Synthetic oligonucleotide
  Sense strand starting at position 3293 of SEQ ID NO: 1126
acaguauacuagccuuauc

SEQ ID NO: 89701 - RNA, 19 nt, Artificial Sequence
  Description of Artificial Sequence: Synthetic oligonucleotide
  Antisense strand to SEQ ID NO: 89620
gauaaggcuaguauacugu

SEQ ID NO: 89702 - RNA, 19 nt, Artificial Sequence
  Description of Artificial Sequence: Synthetic oligonucleotide
  Sense strand starting at position 3320 of SEQ ID NO: 1126
gaagucugccacugaauua

SEQ ID NO: 89703 - RNA, 19 nt, Artificial Sequence
  Description of Artificial Sequence: Synthetic oligonucleotide
  Antisense strand to SEQ ID NO: 89622
uaauucaguggcagacuuc

SEQ ID NO: 89704 - RNA, 19 nt, Artificial Sequence
  Description of Artificial Sequence: Synthetic oligonucleotide
  Sense strand starting at position 3330 of SEQ ID NO: 1126
acugaauuaccuggcuaug

SEQ ID NO: 89705 - RNA, 19 nt, Artificial Sequence
  Description of Artificial Sequence: Synthetic oligonucleotide
  Antisense strand to SEQ ID NO: 89624
cauagccagguaauucagu

SEQ ID NO: 89706 - RNA, 19 nt, Artificial Sequence
  Description of Artificial Sequence: Synthetic oligonucleotide
  Sense strand starting at position 3472 of SEQ ID NO: 1126
agcuauucuguccaugacu

SEQ ID NO: 89707 - RNA, 19 nt, Artificial Sequence
  Description of Artificial Sequence: Synthetic oligonucleotide
  Antisense strand to SEQ ID NO: 89626
agucauggacagaauagcu

SEQ ID NO: 89708 - RNA, 19 nt, Artificial Sequence
  Description of Artificial Sequence: Synthetic oligonucleotide
  Sense strand starting at position 3474 of SEQ ID NO: 1126
cuauucuguccaugacucu

SEQ ID NO: 89709 - RNA, 19 nt, Artificial Sequence
  Description of Artificial Sequence: Synthetic oligonucleotide
  Antisense strand to SEQ ID NO: 89628
agagucauggacagaauag

SEQ ID NO: 89710 - RNA, 19 nt, Artificial Sequence
  Description of Artificial Sequence: Synthetic oligonucleotide
  Sense strand starting at position 3529 of SEQ ID NO: 1126
ucugacauggauuggguua

SEQ ID NO: 89711 - RNA, 19 nt, Artificial Sequence
  Description of Artificial Sequence: Synthetic oligonucleotide
  Antisense strand to SEQ ID NO: 89630
uaacccaauccaugucaga

SEQ ID NO: 89712 - RNA, 19 nt, Artificial Sequence
  Description of Artificial Sequence: Synthetic oligonucleotide
  Sense strand starting at position 3530 of SEQ ID NO: 1126
cugacauggauuggguuaa

SEQ ID NO: 89713 - RNA, 19 nt, Artificial Sequence
  Description of Artificial Sequence: Synthetic oligonucleotide
  Antisense strand to SEQ ID NO: 89632
uuaacccaauccaugucag

SEQ ID NO: 89714 - RNA, 19 nt, Artificial Sequence
  Description of Artificial Sequence: Synthetic oligonucleotide
  Sense strand starting at position 3542 of SEQ ID NO: 1126
ggguuaauaagguagcaau

SEQ ID NO: 89715 - RNA, 19 nt, Artificial Sequence
  Description of Artificial Sequence: Synthetic oligonucleotide
  Antisense strand to SEQ ID NO: 89634
auugcuaccuuauuaaccc

SEQ ID NO: 89716 - RNA, 19 nt, Artificial Sequence
  Description of Artificial Sequence: Synthetic oligonucleotide
  Sense strand starting at position 3572 of SEQ ID NO: 1126
ucaugaggauuguuuccuu

SEQ ID NO: 89717 - RNA, 19 nt, Artificial Sequence
  Description of Artificial Sequence: Synthetic oligonucleotide
  Antisense strand to SEQ ID NO: 89636
aaggaaacaauccucauga

SEQ ID NO: 89718 - RNA, 19 nt, Artificial Sequence
  Description of Artificial Sequence: Synthetic oligonucleotide
  Sense strand starting at position 3575 of SEQ ID NO: 1126
ugaggauuguuuccuuaug

SEQ ID NO: 89719 - RNA, 19 nt, Artificial Sequence
  Description of Artificial Sequence: Synthetic oligonucleotide
  Antisense strand to SEQ ID NO: 89638
cauaaggaaacaauccuca

SEQ ID NO: 89720 - RNA, 19 nt, Artificial Sequence
  Description of Artificial Sequence: Synthetic oligonucleotide
  Sense strand starting at position 3576 of SEQ ID NO: 1126
gaggauuguuuccuuaugu

SEQ ID NO: 89721 - RNA, 19 nt, Artificial Sequence
  Description of Artificial Sequence: Synthetic oligonucleotide
  Antisense strand to SEQ ID NO: 89640
acauaaggaaacaauccuc

SEQ ID NO: 89722 - RNA, 19 nt, Artificial Sequence
  Description of Artificial Sequence: Synthetic oligonucleotide
  Sense strand starting at position 3762 of SEQ ID NO: 1126
aacuuagacuuaguggauu

SEQ ID NO: 89723 - RNA, 19 nt, Artificial Sequence
  Description of Artificial Sequence: Synthetic oligonucleotide
  Antisense strand to SEQ ID NO: 89642
aauccacuaagucuaaguu

SEQ ID NO: 89724 - RNA, 19 nt, Artificial Sequence
  Description of Artificial Sequence: Synthetic oligonucleotide
  Sense strand starting at position 3850 of SEQ ID NO: 1126
ugcauagagcaguaacaau

SEQ ID NO: 89725 - RNA, 19 nt, Artificial Sequence
  Description of Artificial Sequence: Synthetic oligonucleotide
  Antisense strand to SEQ ID NO: 89644
auuguuacugcucuaugca

SEQ ID NO: 89726 - RNA, 19 nt, Artificial Sequence
  Description of Artificial Sequence: Synthetic oligonucleotide
  Sense strand starting at position 3832 of SEQ ID NO: 1127
ggauuauauucuguacuuu

SEQ ID NO: 89727 - RNA, 19 nt, Artificial Sequence
  Description of Artificial Sequence: Synthetic oligonucleotide
  Antisense strand to SEQ ID NO: 89646
aaaguacagaauauaaucc

SEQ ID NO: 89728 - RNA, 19 nt, Artificial Sequence
  Description of Artificial Sequence: Synthetic oligonucleotide
  Sense strand starting at position 3758 of SEQ ID NO: 1127
gaaauaagacucuguguuc

SEQ ID NO: 89729 - RNA, 19 nt, Artificial Sequence
  Description of Artificial Sequence: Synthetic oligonucleotide
  Antisense strand to SEQ ID NO: 89648
gaacacagagucuuauuuc

SEQ ID NO: 89730 - RNA, 19 nt, Artificial Sequence
  Description of Artificial Sequence: Synthetic oligonucleotide
  Sense strand starting at position 3724 of SEQ ID NO: 1127
acuguauaaggguaaaugu

SEQ ID NO: 89731 - RNA, 19 nt, Artificial Sequence
  Description of Artificial Sequence: Synthetic oligonucleotide
  Antisense strand to SEQ ID NO: 89650
acauuuacccuuauacagu

SEQ ID NO: 89732 - RNA, 19 nt, Artificial Sequence
  Description of Artificial Sequence: Synthetic oligonucleotide
  Sense strand starting at position 3714 of SEQ ID NO: 1127
augauugcacacuguauaa

SEQ ID NO: 89733 - RNA, 19 nt, Artificial Sequence
  Description of Artificial Sequence: Synthetic oligonucleotide
  Antisense strand to SEQ ID NO: 89652
uuauacagugugcaaucau

SEQ ID NO: 89734 - RNA, 19 nt, Artificial Sequence
  Description of Artificial Sequence: Synthetic oligonucleotide
  Sense strand starting at position 3581 of SEQ ID NO: 1127
cccagacuccugugauaac

SEQ ID NO: 89735 - RNA, 19 nt, Artificial Sequence
  Description of Artificial Sequence: Synthetic oligonucleotide
  Antisense strand to SEQ ID NO: 89654
guuaucacaggagucuggg

SEQ ID NO: 89736 - RNA, 19 nt, Artificial Sequence
  Description of Artificial Sequence: Synthetic oligonucleotide
  Sense strand starting at position 3554 of SEQ ID NO: 1127
gucucagagcaucaauuau

SEQ ID NO: 89737 - RNA, 19 nt, Artificial Sequence
  Description of Artificial Sequence: Synthetic oligonucleotide
  Antisense strand to SEQ ID NO: 89656
auaauugaugcucugagac

SEQ ID NO: 89738 - RNA, 19 nt, Artificial Sequence
  Description of Artificial Sequence: Synthetic oligonucleotide
  Sense strand starting at position 3551 of SEQ ID NO: 1127
ccugucucagagcaucaau

SEQ ID NO: 89739 - RNA, 19 nt, Artificial Sequence
  Description of Artificial Sequence: Synthetic oligonucleotide
  Antisense strand to SEQ ID NO: 89658
auugaugcucugagacagg

SEQ ID NO: 89740 - RNA, 19 nt, Artificial Sequence
  Description of Artificial Sequence: Synthetic oligonucleotide
  Sense strand starting at position 3475 of SEQ ID NO: 1127
gguggagauacauguauau

SEQ ID NO: 89741 - RNA, 19 nt, Artificial Sequence
  Description of Artificial Sequence: Synthetic oligonucleotide
  Antisense strand to SEQ ID NO: 89660
auauacauguaucuccacc

SEQ ID NO: 89742 - RNA, 19 nt, Artificial Sequence
  Description of Artificial Sequence: Synthetic oligonucleotide
  Sense strand starting at position 3469 of SEQ ID NO: 1127
aaacgugguggagauacau

SEQ ID NO: 89743 - RNA, 19 nt, Artificial Sequence
  Description of Artificial Sequence: Synthetic oligonucleotide
  Antisense strand to SEQ ID NO: 89662
auguaucuccaccacguuu

SEQ ID NO: 89744 - RNA, 19 nt, Artificial Sequence
  Description of Artificial Sequence: Synthetic oligonucleotide
  Sense strand starting at position 3406 of SEQ ID NO: 1127
ucuggauaugcccagaacu

SEQ ID NO: 89745 - RNA, 19 nt, Artificial Sequence
  Description of Artificial Sequence: Synthetic oligonucleotide
  Antisense strand to SEQ ID NO: 89664
aguucugggcauauccaga

SEQ ID NO: 89746 - RNA, 19 nt, Artificial Sequence
  Description of Artificial Sequence: Synthetic oligonucleotide
  Sense strand starting at position 3396 of SEQ ID NO: 1127
ccugacagacucuggauau

SEQ ID NO: 89747 - RNA, 19 nt, Artificial Sequence
  Description of Artificial Sequence: Synthetic oligonucleotide
  Antisense strand to SEQ ID NO: 89666
auauccagagucugucagg

SEQ ID NO: 89748 - RNA, 19 nt, Artificial Sequence
  Description of Artificial Sequence: Synthetic oligonucleotide
  Sense strand starting at position 3370 of SEQ ID NO: 1127
agggacaaguccucuucuu

SEQ ID NO: 89749 - RNA, 19 nt, Artificial Sequence
  Description of Artificial Sequence: Synthetic oligonucleotide
  Antisense strand to SEQ ID NO: 89668
aagaagaggacuugucccu

SEQ ID NO: 89750 - RNA, 19 nt, Artificial Sequence
  Description of Artificial Sequence: Synthetic oligonucleotide
  Sense strand starting at position 3300 of SEQ ID NO: 1127
cugcaagguuauccacaaa

SEQ ID NO: 89751 - RNA, 19 nt, Artificial Sequence
  Description of Artificial Sequence: Synthetic oligonucleotide
  Antisense strand to SEQ ID NO: 89670
uuuguggauaaccuugcag

SEQ ID NO: 89752 - RNA, 19 nt, Artificial Sequence
  Description of Artificial Sequence: Synthetic oligonucleotide
  Sense strand starting at position 3299 of SEQ ID NO: 1127
acugcaagguuauccacaa

SEQ ID NO: 89753 - RNA, 19 nt, Artificial Sequence
  Description of Artificial Sequence: Synthetic oligonucleotide
  Antisense strand to SEQ ID NO: 89672
uuguggauaaccuugcagu

SEQ ID NO: 89754 - RNA, 19 nt, Artificial Sequence
  Description of Artificial Sequence: Synthetic oligonucleotide
  Sense strand starting at position 3183 of SEQ ID NO: 1127
ucuacauguccacaggauu

SEQ ID NO: 89755 - RNA, 19 nt, Artificial Sequence
  Description of Artificial Sequence: Synthetic oligonucleotide
  Antisense strand to SEQ ID NO: 89674
aauccuguggacauguaga

SEQ ID NO: 89756 - RNA, 19 nt, Artificial Sequence
  Description of Artificial Sequence: Synthetic oligonucleotide
  Sense strand starting at position 3124 of SEQ ID NO: 1127
guguuuaugcugcuacuuu

SEQ ID NO: 89757 - RNA, 19 nt, Artificial Sequence
  Description of Artificial Sequence: Synthetic oligonucleotide
  Antisense strand to SEQ ID NO: 89676
aaaguagcagcauaaacac

SEQ ID NO: 89758 - RNA, 19 nt, Artificial Sequence
  Description of Artificial Sequence: Synthetic oligonucleotide
  Sense strand starting at position 3123 of SEQ ID NO: 1127
uguguuuaugcugcuacuu

SEQ ID NO: 89759 - RNA, 19 nt, Artificial Sequence
  Description of Artificial Sequence: Synthetic oligonucleotide
  Antisense strand to SEQ ID NO: 89678
aaguagcagcauaaacaca

SEQ ID NO: 89760 - RNA, 19 nt, Artificial Sequence
  Description of Artificial Sequence: Synthetic oligonucleotide
  Sense strand starting at position 2993 of SEQ ID NO: 1127
aagagacaugguugugaga

SEQ ID NO: 89761 - RNA, 19 nt, Artificial Sequence
  Description of Artificial Sequence: Synthetic oligonucleotide
  Antisense strand to SEQ ID NO: 89680
ucucacaaccaugucucuu

SEQ ID NO: 89762 - RNA, 19 nt, Artificial Sequence
  Description of Artificial Sequence: Synthetic oligonucleotide
  Sense strand starting at position 2959 of SEQ ID NO: 1127
ccggaugauggucacagau

SEQ ID NO: 89763 - RNA, 19 nt, Artificial Sequence
  Description of Artificial Sequence: Synthetic oligonucleotide
  Antisense strand to SEQ ID NO: 89682
aucugugaccaucauccgg

SEQ ID NO: 89764 - RNA, 19 nt, Artificial Sequence
  Description of Artificial Sequence: Synthetic oligonucleotide
  Sense strand starting at position 2958 of SEQ ID NO: 1127
accggaugauggucacaga

SEQ ID NO: 89765 - RNA, 19 nt, Artificial Sequence
  Description of Artificial Sequence: Synthetic oligonucleotide
  Antisense strand to SEQ ID NO: 89684
ucugugaccaucauccggu

SEQ ID NO: 89766 - RNA, 19 nt, Artificial Sequence
  Description of Artificial Sequence: Synthetic oligonucleotide
  Sense strand starting at position 2898 of SEQ ID NO: 1127
gcagcucugcucuuuguau

SEQ ID NO: 89767 - RNA, 19 nt, Artificial Sequence
  Description of Artificial Sequence: Synthetic oligonucleotide
  Antisense strand to SEQ ID NO: 89686
auacaaagagcagagcugc

SEQ ID NO: 89768 - RNA, 19 nt, Artificial Sequence
  Description of Artificial Sequence: Synthetic oligonucleotide
  Sense strand starting at position 2868 of SEQ ID NO: 1127
ggaagcagcucauuagaga

SEQ ID NO: 89769 - RNA, 19 nt, Artificial Sequence
  Description of Artificial Sequence: Synthetic oligonucleotide
  Antisense strand to SEQ ID NO: 89688
ucucuaaugagcugcuucc

SEQ ID NO: 89770 - RNA, 19 nt, Artificial Sequence
  Description of Artificial Sequence: Synthetic oligonucleotide
  Sense strand starting at position 2766 of SEQ ID NO: 1127
uucuaaugagagugagucu

SEQ ID NO: 89771 - RNA, 19 nt, Artificial Sequence
  Description of Artificial Sequence: Synthetic oligonucleotide
  Antisense strand to SEQ ID NO: 89690
agacucacucucauuagaa

SEQ ID NO: 89772 - RNA, 19 nt, Artificial Sequence
  Description of Artificial Sequence: Synthetic oligonucleotide
  Sense strand starting at position 2727 of SEQ ID NO: 1127
agauacugaucuuuguuua

SEQ ID NO: 89773 - RNA, 19 nt, Artificial Sequence
  Description of Artificial Sequence: Synthetic oligonucleotide
  Antisense strand to SEQ ID NO: 89692
uaaacaaagaucaguaucu

SEQ ID NO: 89774 - RNA, 19 nt, Artificial Sequence
  Description of Artificial Sequence: Synthetic oligonucleotide
  Sense strand starting at position 2724 of SEQ ID NO: 1127
ugaagauacugaucuuugu

SEQ ID NO: 89775 - RNA, 19 nt, Artificial Sequence
  Description of Artificial Sequence: Synthetic oligonucleotide
  Antisense strand to SEQ ID NO: 89694
acaaagaucaguaucuuca

SEQ ID NO: 89776 - RNA, 19 nt, Artificial Sequence
  Description of Artificial Sequence: Synthetic oligonucleotide
  Sense strand starting at position 2678 of SEQ ID NO: 1127
guaggcucugaauaaguga

SEQ ID NO: 89777 - RNA, 19 nt, Artificial Sequence
  Description of Artificial Sequence: Synthetic oligonucleotide
  Antisense strand to SEQ ID NO: 89696
ucacuuauucagagccuac

SEQ ID NO: 89778 - RNA, 19 nt, Artificial Sequence
  Description of Artificial Sequence: Synthetic oligonucleotide
  Sense strand starting at position 2674 of SEQ ID NO: 1127
cauuguaggcucugaauaa

SEQ ID NO: 89779 - RNA, 19 nt, Artificial Sequence
  Description of Artificial Sequence: Synthetic oligonucleotide
  Antisense strand to SEQ ID NO: 89698
uuauucagagccuacaaug

SEQ ID NO: 89780 - RNA, 19 nt, Artificial Sequence
  Description of Artificial Sequence: Synthetic oligonucleotide
  Sense strand starting at position 2670 of SEQ ID NO: 1127
gaaacauuguaggcucuga

SEQ ID NO: 89781 - RNA, 19 nt, Artificial Sequence
  Description of Artificial Sequence: Synthetic oligonucleotide
  Antisense strand to SEQ ID NO: 89700
ucagagccuacaauguuuc

SEQ ID NO: 89782 - RNA, 19 nt, Artificial Sequence
  Description of Artificial Sequence: Synthetic oligonucleotide
  Sense strand starting at position 2603 of SEQ ID NO: 1127
gaauuaguugguugugaaa

SEQ ID NO: 89783 - RNA, 19 nt, Artificial Sequence
  Description of Artificial Sequence: Synthetic oligonucleotide
  Antisense strand to SEQ ID NO: 89702
uuucacaaccaacuaauuc

SEQ ID NO: 89784 - RNA, 19 nt, Artificial Sequence
  Description of Artificial Sequence: Synthetic oligonucleotide
  Sense strand starting at position 2602 of SEQ ID NO: 1127
agaauuaguugguugugaa

SEQ ID NO: 89785 - RNA, 19 nt, Artificial Sequence
  Description of Artificial Sequence: Synthetic oligonucleotide
  Antisense strand to SEQ ID NO: 89704
uucacaaccaacuaauucu

SEQ ID NO: 89786 - RNA, 19 nt, Artificial Sequence
  Description of Artificial Sequence: Synthetic oligonucleotide
  Sense strand starting at position 2601 of SEQ ID NO: 1127
aagaauuaguugguuguga

SEQ ID NO: 89787 - RNA, 19 nt, Artificial Sequence
  Description of Artificial Sequence: Synthetic oligonucleotide
  Antisense strand to SEQ ID NO: 89706
ucacaaccaacuaauucuu

SEQ ID NO: 89788 - RNA, 19 nt, Artificial Sequence
  Description of Artificial Sequence: Synthetic oligonucleotide
  Sense strand starting at position 2599 of SEQ ID NO: 1127
agaagaauuaguugguugu

SEQ ID NO: 89789 - RNA, 19 nt, Artificial Sequence
  Description of Artificial Sequence: Synthetic oligonucleotide
  Antisense strand to SEQ ID NO: 89708
acaaccaacuaauucuucu

SEQ ID NO: 89790 - RNA, 19 nt, Artificial Sequence
  Description of Artificial Sequence: Synthetic oligonucleotide
  Sense strand starting at position 2461 of SEQ ID NO: 1127
uguagacaucuacacaagu

SEQ ID NO: 89791 - RNA, 19 nt, Artificial Sequence
  Description of Artificial Sequence: Synthetic oligonucleotide
  Antisense strand to SEQ ID NO: 89710
acuuguguagaugucuaca

SEQ ID NO: 89792 - RNA, 19 nt, Artificial Sequence
  Description of Artificial Sequence: Synthetic oligonucleotide
  Sense strand starting at position 2385 of SEQ ID NO: 1127
guacuaaucccugagguuu

SEQ ID NO: 89793 - RNA, 19 nt, Artificial Sequence
  Description of Artificial Sequence: Synthetic oligonucleotide
  Antisense strand to SEQ ID NO: 89712
aaaccucagggauuaguac

SEQ ID NO: 89794 - RNA, 19 nt, Artificial Sequence
  Description of Artificial Sequence: Synthetic oligonucleotide
  Sense strand starting at position 2209 of SEQ ID NO: 1127
gaaagugccuacuugaaac

SEQ ID NO: 89795 - RNA, 19 nt, Artificial Sequence
  Description of Artificial Sequence: Synthetic oligonucleotide
  Antisense strand to SEQ ID NO: 89714
guuucaaguaggcacuuuc

SEQ ID NO: 89796 - RNA, 19 nt, Artificial Sequence
  Description of Artificial Sequence: Synthetic oligonucleotide
  Sense strand starting at position 2206 of SEQ ID NO: 1127
uaggaaagugccuacuuga

SEQ ID NO: 89797 - RNA, 19 nt, Artificial Sequence
  Description of Artificial Sequence: Synthetic oligonucleotide
  Antisense strand to SEQ ID NO: 89716
ucaaguaggcacuuuccua

SEQ ID NO: 89798 - RNA, 19 nt, Artificial Sequence
  Description of Artificial Sequence: Synthetic oligonucleotide
  Sense strand starting at position 1373 of SEQ ID NO: 1127
acuacuaggucaguaaacu

SEQ ID NO: 89799 - RNA, 19 nt, Artificial Sequence
  Description of Artificial Sequence: Synthetic oligonucleotide
  Antisense strand to SEQ ID NO: 89718
aguuuacugaccuaguagu

SEQ ID NO: 89800 - RNA, 19 nt, Artificial Sequence
  Description of Artificial Sequence: Synthetic oligonucleotide
  Sense strand starting at position 1369 of SEQ ID NO: 1127
ggagacuacuaggucagua

SEQ ID NO: 89801 - RNA, 19 nt, Artificial Sequence
  Description of Artificial Sequence: Synthetic oligonucleotide
  Antisense strand to SEQ ID NO: 89720
uacugaccuaguagucucc

SEQ ID NO: 89802 - RNA, 19 nt, Artificial Sequence
  Description of Artificial Sequence: Synthetic oligonucleotide
  Sense strand starting at position 1127 of SEQ ID NO: 1127
gauaucuuuggaugucaga

SEQ ID NO: 89803 - RNA, 19 nt, Artificial Sequence
  Description of Artificial Sequence: Synthetic oligonucleotide
  Antisense strand to SEQ ID NO: 89722
ucugacauccaaagauauc

SEQ ID NO: 89804 - RNA, 19 nt, Artificial Sequence
  Description of Artificial Sequence: Synthetic oligonucleotide
  Sense strand starting at position 1123 of SEQ ID NO: 1127
ucaagauaucuuuggaugu

SEQ ID NO: 89805 - RNA, 19 nt, Artificial Sequence
  Description of Artificial Sequence: Synthetic oligonucleotide
  Antisense strand to SEQ ID NO: 89724
acauccaaagauaucuuga

SEQ ID NO: 89806 - RNA, 19 nt, Artificial Sequence
  Description of Artificial Sequence: Synthetic oligonucleotide
  Sense strand starting at position 3904 of SEQ ID NO: 1128
ugacucuguguguacauau

SEQ ID NO: 89807 - RNA, 19 nt, Artificial Sequence
  Description of Artificial Sequence: Synthetic oligonucleotide
  Antisense strand to SEQ ID NO: 89726
auauguacacacagaguca

SEQ ID NO: 89808 - RNA, 19 nt, Artificial Sequence
  Description of Artificial Sequence: Synthetic oligonucleotide
  Sense strand starting at position 3823 of SEQ ID NO: 1128
uguguauugagguauccaa

SEQ ID NO: 89809 - RNA, 19 nt, Artificial Sequence
  Description of Artificial Sequence: Synthetic oligonucleotide
  Antisense strand to SEQ ID NO: 89728
uuggauaccucaauacaca

SEQ ID NO: 89810 - RNA, 19 nt, Artificial Sequence
  Description of Artificial Sequence: Synthetic oligonucleotide
  Sense strand starting at position 3812 of SEQ ID NO: 1128
auguuugugcauguguauu

SEQ ID NO: 89811 - RNA, 19 nt, Artificial Sequence
  Description of Artificial Sequence: Synthetic oligonucleotide
  Antisense strand to SEQ ID NO: 89730
aauacacaugcacaaacau

SEQ ID NO: 89812 - RNA, 19 nt, Artificial Sequence
  Description of Artificial Sequence: Synthetic oligonucleotide
  Sense strand starting at position 3749 of SEQ ID NO: 1128
agugauaucuaggucacaa

SEQ ID NO: 89813 - RNA, 19 nt, Artificial Sequence
  Description of Artificial Sequence: Synthetic oligonucleotide
  Antisense strand to SEQ ID NO: 89732
uugugaccuagauaucacu

SEQ ID NO: 89814 - RNA, 19 nt, Artificial Sequence
  Description of Artificial Sequence: Synthetic oligonucleotide
  Sense strand starting at position 3748 of SEQ ID NO: 1128
uagugauaucuaggucaca

SEQ ID NO: 89815 - RNA, 19 nt, Artificial Sequence
  Description of Artificial Sequence: Synthetic oligonucleotide
  Antisense strand to SEQ ID NO: 89734
ugugaccuagauaucacua

SEQ ID NO: 89816 - RNA, 19 nt, Artificial Sequence
  Description of Artificial Sequence: Synthetic oligonucleotide
  Sense strand starting at position 3682 of SEQ ID NO: 1128
cugucagugguagaaauac

SEQ ID NO: 89817 - RNA, 19 nt, Artificial Sequence
  Description of Artificial Sequence: Synthetic oligonucleotide
  Antisense strand to SEQ ID NO: 89736
guauuucuaccacugacag

SEQ ID NO: 89818 - RNA, 19 nt, Artificial Sequence
  Description of Artificial Sequence: Synthetic oligonucleotide
  Sense strand starting at position 3678 of SEQ ID NO: 1128
uuuccugucagugguagaa

SEQ ID NO: 89819 - RNA, 19 nt, Artificial Sequence
  Description of Artificial Sequence: Synthetic oligonucleotide
  Antisense strand to SEQ ID NO: 89738
uucuaccacugacaggaaa

SEQ ID NO: 89820 - RNA, 19 nt, Artificial Sequence
  Description of Artificial Sequence: Synthetic oligonucleotide
  Sense strand starting at position 3650 of SEQ ID NO: 1128
gaauaaacaugugaggaaa

SEQ ID NO: 89821 - RNA, 19 nt, Artificial Sequence
  Description of Artificial Sequence: Synthetic oligonucleotide
  Antisense strand to SEQ ID NO: 89740
uuuccucacauguuuauuc

SEQ ID NO: 89822 - RNA, 19 nt, Artificial Sequence
  Description of Artificial Sequence: Synthetic oligonucleotide
  Sense strand starting at position 3583 of SEQ ID NO: 1128
caacaauauggugagcuuu

SEQ ID NO: 89823 - RNA, 19 nt, Artificial Sequence
  Description of Artificial Sequence: Synthetic oligonucleotide
  Antisense strand to SEQ ID NO: 89742
aaagcucaccauauuguug

SEQ ID NO: 89824 - RNA, 19 nt, Artificial Sequence
  Description of Artificial Sequence: Synthetic oligonucleotide
  Sense strand starting at position 3574 of SEQ ID NO: 1128
guuuguguacaacaauaug

SEQ ID NO: 89825 - RNA, 19 nt, Artificial Sequence
  Description of Artificial Sequence: Synthetic oligonucleotide
  Antisense strand to SEQ ID NO: 89744
cauauuguuguacacaaac

SEQ ID NO: 89826 - RNA, 19 nt, Artificial Sequence
  Description of Artificial Sequence: Synthetic oligonucleotide
  Sense strand starting at position 3410 of SEQ ID NO: 1128
gcaggacacuguccaagaa

SEQ ID NO: 89827 - RNA, 19 nt, Artificial Sequence
  Description of Artificial Sequence: Synthetic oligonucleotide
  Antisense strand to SEQ ID NO: 89746
uucuuggacaguguccugc

SEQ ID NO: 89828 - RNA, 19 nt, Artificial Sequence
  Description of Artificial Sequence: Synthetic oligonucleotide
  Sense strand starting at position 3254 of SEQ ID NO: 1128
ggauuuguguggaguagaa

SEQ ID NO: 89829 - RNA, 19 nt, Artificial Sequence
  Description of Artificial Sequence: Synthetic oligonucleotide
  Antisense strand to SEQ ID NO: 89748
uucuacuccacacaaaucc

SEQ ID NO: 89830 - RNA, 19 nt, Artificial Sequence
  Description of Artificial Sequence: Synthetic oligonucleotide
  Sense strand starting at position 3228 of SEQ ID NO: 1128
aaugacugugaaugugaau

SEQ ID NO: 89831 - RNA, 19 nt, Artificial Sequence
  Description of Artificial Sequence: Synthetic oligonucleotide
  Antisense strand to SEQ ID NO: 89750
auucacauucacagucauu

SEQ ID NO: 89832 - RNA, 19 nt, Artificial Sequence
  Description of Artificial Sequence: Synthetic oligonucleotide
  Sense strand starting at position 3224 of SEQ ID NO: 1128
uaggaaugacugugaaugu

SEQ ID NO: 89833 - RNA, 19 nt, Artificial Sequence
  Description of Artificial Sequence: Synthetic oligonucleotide
  Antisense strand to SEQ ID NO: 89752
acauucacagucauuccua

SEQ ID NO: 89834 - RNA, 19 nt, Artificial Sequence
  Description of Artificial Sequence: Synthetic oligonucleotide
  Sense strand starting at position 3204 of SEQ ID NO: 1128
ugaugucuuugacuaugaa

SEQ ID NO: 89835 - RNA, 19 nt, Artificial Sequence
  Description of Artificial Sequence: Synthetic oligonucleotide
  Antisense strand to SEQ ID NO: 89754
uucauagucaaagacauca

SEQ ID NO: 89836 - RNA, 19 nt, Artificial Sequence
  Description of Artificial Sequence: Synthetic oligonucleotide
  Sense strand starting at position 3198 of SEQ ID NO: 1128
guauauugaugucuuugac

SEQ ID NO: 89837 - RNA, 19 nt, Artificial Sequence
  Description of Artificial Sequence: Synthetic oligonucleotide
  Antisense strand to SEQ ID NO: 89756
gucaaagacaucaauauac

SEQ ID NO: 89838 - RNA, 19 nt, Artificial Sequence
  Description of Artificial Sequence: Synthetic oligonucleotide
  Sense strand starting at position 3117 of SEQ ID NO: 1128
guauaaaucugggauuugg

SEQ ID NO: 89839 - RNA, 19 nt, Artificial Sequence
  Description of Artificial Sequence: Synthetic oligonucleotide
  Antisense strand to SEQ ID NO: 89758
ccaaaucccagauuuauac

SEQ ID NO: 89840 - RNA, 19 nt, Artificial Sequence
  Description of Artificial Sequence: Synthetic oligonucleotide
  Sense strand starting at position 3115 of SEQ ID NO: 1128
ggguauaaaucugggauuu

SEQ ID NO: 89841 - RNA, 19 nt, Artificial Sequence
  Description of Artificial Sequence: Synthetic oligonucleotide
  Antisense strand to SEQ ID NO: 89760
aaaucccagauuuauaccc

SEQ ID NO: 89842 - RNA, 19 nt, Artificial Sequence
  Description of Artificial Sequence: Synthetic oligonucleotide
  Sense strand starting at position 3045 of SEQ ID NO: 1128
cuacauaugcgucaauaaa

SEQ ID NO: 89843 - RNA, 19 nt, Artificial Sequence
  Description of Artificial Sequence: Synthetic oligonucleotide
  Antisense strand to SEQ ID NO: 89762
uuuauugacgcauauguag

SEQ ID NO: 89844 - RNA, 19 nt, Artificial Sequence
  Description of Artificial Sequence: Synthetic oligonucleotide
  Sense strand starting at position 3007 of SEQ ID NO: 1128
agguccgugacaugauaga

SEQ ID NO: 89845 - RNA, 19 nt, Artificial Sequence
  Description of Artificial Sequence: Synthetic oligonucleotide
  Antisense strand to SEQ ID NO: 89764
ucuaucaugucacggaccu

SEQ ID NO: 89846 - RNA, 19 nt, Artificial Sequence
  Description of Artificial Sequence: Synthetic oligonucleotide
  Sense strand starting at position 3002 of SEQ ID NO: 1128
guagaagguccgugacaug

SEQ ID NO: 89847 - RNA, 19 nt, Artificial Sequence
  Description of Artificial Sequence: Synthetic oligonucleotide
  Antisense strand to SEQ ID NO: 89766
caugucacggaccuucuac

SEQ ID NO: 89848 - RNA, 19 nt, Artificial Sequence
  Description of Artificial Sequence: Synthetic oligonucleotide
  Sense strand starting at position 3001 of SEQ ID NO: 1128
gguagaagguccgugacau

SEQ ID NO: 89849 - RNA, 19 nt, Artificial Sequence
  Description of Artificial Sequence: Synthetic oligonucleotide
  Antisense strand to SEQ ID NO: 89768
augucacggaccuucuacc

SEQ ID NO: 89850 - RNA, 19 nt, Artificial Sequence
  Description of Artificial Sequence: Synthetic oligonucleotide
  Sense strand starting at position 2911 of SEQ ID NO: 1128
guuucuuccucaguuuaaa

SEQ ID NO: 89851 - RNA, 19 nt, Artificial Sequence
  Description of Artificial Sequence: Synthetic oligonucleotide
  Antisense strand to SEQ ID NO: 89770
uuuaaacugaggaagaaac

SEQ ID NO: 89852 - RNA, 19 nt, Artificial Sequence
  Description of Artificial Sequence: Synthetic oligonucleotide
  Sense strand starting at position 2909 of SEQ ID NO: 1128
uuguuucuuccucaguuua

SEQ ID NO: 89853 - RNA, 19 nt, Artificial Sequence
  Description of Artificial Sequence: Synthetic oligonucleotide
  Antisense strand to SEQ ID NO: 89772
uaaacugaggaagaaacaa

SEQ ID NO: 89854 - RNA, 19 nt, Artificial Sequence
  Description of Artificial Sequence: Synthetic oligonucleotide
  Sense strand starting at position 2701 of SEQ ID NO: 1128
cugggauagagaugcuaug

SEQ ID NO: 89855 - RNA, 19 nt, Artificial Sequence
  Description of Artificial Sequence: Synthetic oligonucleotide
  Antisense strand to SEQ ID NO: 89774
cauagcaucucuaucccag

SEQ ID NO: 89856 - RNA, 19 nt, Artificial Sequence
  Description of Artificial Sequence: Synthetic oligonucleotide
  Sense strand starting at position 2517 of SEQ ID NO: 1128
gcguuuaaauuguugagaa

SEQ ID NO: 89857 - RNA, 19 nt, Artificial Sequence
  Description of Artificial Sequence: Synthetic oligonucleotide
  Antisense strand to SEQ ID NO: 89776
uucucaacaauuuaaacgc

SEQ ID NO: 89858 - RNA, 19 nt, Artificial Sequence
  Description of Artificial Sequence: Synthetic oligonucleotide
  Sense strand starting at position 2479 of SEQ ID NO: 1128
ccugcugucugauuuggau

SEQ ID NO: 89859 - RNA, 19 nt, Artificial Sequence
  Description of Artificial Sequence: Synthetic oligonucleotide
  Antisense strand to SEQ ID NO: 89778
auccaaaucagacagcagg

SEQ ID NO: 89860 - RNA, 19 nt, Artificial Sequence
  Description of Artificial Sequence: Synthetic oligonucleotide
  Sense strand starting at position 2371 of SEQ ID NO: 1128
cugaguuuggacuguaauu

SEQ ID NO: 89861 - RNA, 19 nt, Artificial Sequence
  Description of Artificial Sequence: Synthetic oligonucleotide
  Antisense strand to SEQ ID NO: 89780
aauuacaguccaaacucag

SEQ ID NO: 89862 - RNA, 19 nt, Artificial Sequence
  Description of Artificial Sequence: Synthetic oligonucleotide
  Sense strand starting at position 2334 of SEQ ID NO: 1128
uuucuuguugcccauggaa

SEQ ID NO: 89863 - RNA, 19 nt, Artificial Sequence
  Description of Artificial Sequence: Synthetic oligonucleotide
  Antisense strand to SEQ ID NO: 89782
uuccaugggcaacaagaaa

SEQ ID NO: 89864 - RNA, 19 nt, Artificial Sequence
  Description of Artificial Sequence: Synthetic oligonucleotide
  Sense strand starting at position 1922 of SEQ ID NO: 1128
gagcaucccucuguggaau

SEQ ID NO: 89865 - RNA, 19 nt, Artificial Sequence
  Description of Artificial Sequence: Synthetic oligonucleotide
  Antisense strand to SEQ ID NO: 89784
auuccacagagggaugcuc

SEQ ID NO: 89866 - RNA, 19 nt, Artificial Sequence
  Description of Artificial Sequence: Synthetic oligonucleotide
  Sense strand starting at position 1921 of SEQ ID NO: 1128
ugagcaucccucuguggaa

SEQ ID NO: 89867 - RNA, 19 nt, Artificial Sequence
  Description of Artificial Sequence: Synthetic oligonucleotide
  Antisense strand to SEQ ID NO: 89786
uuccacagagggaugcuca

SEQ ID NO: 89868 - RNA, 19 nt, Artificial Sequence
  Description of Artificial Sequence: Synthetic oligonucleotide
  Sense strand starting at position 1595 of SEQ ID NO: 1128
ugggaaauuugugaacaaa

SEQ ID NO: 89869 - RNA, 19 nt, Artificial Sequence
  Description of Artificial Sequence: Synthetic oligonucleotide
  Antisense strand to SEQ ID NO: 89788
uuuguucacaaauuuccca

SEQ ID NO: 89870 - RNA, 19 nt, Artificial Sequence
  Description of Artificial Sequence: Synthetic oligonucleotide
  Sense strand starting at position 1594 of SEQ ID NO: 1128
cugggaaauuugugaacaa

SEQ ID NO: 89871 - RNA, 19 nt, Artificial Sequence
  Description of Artificial Sequence: Synthetic oligonucleotide
  Antisense strand to SEQ ID NO: 89790
uuguucacaaauuucccag

SEQ ID NO: 89872 - RNA, 19 nt, Artificial Sequence
  Description of Artificial Sequence: Synthetic oligonucleotide
  Sense strand starting at position 1422 of SEQ ID NO: 1128
guaaacuuacuuuguugaa

SEQ ID NO: 89873 - RNA, 19 nt, Artificial Sequence
  Description of Artificial Sequence: Synthetic oligonucleotide
  Antisense strand to SEQ ID NO: 89792
uucaacaaaguaaguuuac

SEQ ID NO: 89874 - RNA, 19 nt, Artificial Sequence
  Description of Artificial Sequence: Synthetic oligonucleotide
  Sense strand starting at position 1419 of SEQ ID NO: 1128
ucaguaaacuuacuuuguu

SEQ ID NO: 89875 - RNA, 19 nt, Artificial Sequence
  Description of Artificial Sequence: Synthetic oligonucleotide
  Antisense strand to SEQ ID NO: 89794
aacaaaguaaguuuacuga

SEQ ID NO: 89876 - RNA, 19 nt, Artificial Sequence
  Description of Artificial Sequence: Synthetic oligonucleotide
  Sense strand starting at position 1410 of SEQ ID NO: 1128
auuacuggcucaguaaacu

SEQ ID NO: 89877 - RNA, 19 nt, Artificial Sequence
  Description of Artificial Sequence: Synthetic oligonucleotide
  Antisense strand to SEQ ID NO: 89796
aguuuacugagccaguaau

SEQ ID NO: 89878 - RNA, 19 nt, Artificial Sequence
  Description of Artificial Sequence: Synthetic oligonucleotide
  Sense strand starting at position 1408 of SEQ ID NO: 1128
auauuacuggcucaguaaa

SEQ ID NO: 89879 - RNA, 19 nt, Artificial Sequence
  Description of Artificial Sequence: Synthetic oligonucleotide
  Antisense strand to SEQ ID NO: 89798
uuuacugagccaguaauau

SEQ ID NO: 89880 - RNA, 19 nt, Artificial Sequence
  Description of Artificial Sequence: Synthetic oligonucleotide
  Sense strand starting at position 1406 of SEQ ID NO: 1128
ggauauuacuggcucagua

SEQ ID NO: 89881 - RNA, 19 nt, Artificial Sequence
  Description of Artificial Sequence: Synthetic oligonucleotide
  Antisense strand to SEQ ID NO: 89800
uacugagccaguaauaucc

SEQ ID NO: 89882 - RNA, 19 nt, Artificial Sequence
  Description of Artificial Sequence: Synthetic oligonucleotide
  Sense strand starting at position 1068 of SEQ ID NO: 1128
caugacuuguaauuaugga

SEQ ID NO: 89883 - RNA, 19 nt, Artificial Sequence
  Description of Artificial Sequence: Synthetic oligonucleotide
  Antisense strand to SEQ ID NO: 89802
uccauaauuacaagucaug

SEQ ID NO: 89884 - RNA, 19 nt, Artificial Sequence
  Description of Artificial Sequence: Synthetic oligonucleotide
  Sense strand starting at position 1061 of SEQ ID NO: 1128
cucuuagcaugacuuguaa

SEQ ID NO: 89885 - RNA, 19 nt, Artificial Sequence
  Description of Artificial Sequence: Synthetic oligonucleotide
  Antisense strand to SEQ ID NO: 89804
uuacaagucaugcuaagag

SEQ ID NO: 89886 - RNA, 19 nt, Artificial Sequence
  Description of Artificial Sequence: Synthetic oligonucleotide
  Sense strand starting at position 3830 of SEQ ID NO: 1129
cugagauaguauguggcau

SEQ ID NO: 89887 - RNA, 19 nt, Artificial Sequence
  Description of Artificial Sequence: Synthetic oligonucleotide
  Antisense strand to SEQ ID NO: 89806
augccacauacuaucucag

SEQ ID NO: 89888 - RNA, 19 nt, Artificial Sequence
  Description of Artificial Sequence: Synthetic oligonucleotide
  Sense strand starting at position 3604 of SEQ ID NO: 1129
uccauauagcuugguuaaa

SEQ ID NO: 89889 - RNA, 19 nt, Artificial Sequence
  Description of Artificial Sequence: Synthetic oligonucleotide
  Antisense strand to SEQ ID NO: 89808
uuuaaccaagcuauaugga

SEQ ID NO: 89890 - RNA, 19 nt, Artificial Sequence
  Description of Artificial Sequence: Synthetic oligonucleotide
  Sense strand starting at position 3487 of SEQ ID NO: 1129
ccuauuuccuaugaagaug

SEQ ID NO: 89891 - RNA, 19 nt, Artificial Sequence
  Description of Artificial Sequence: Synthetic oligonucleotide
  Antisense strand to SEQ ID NO: 89810
caucuucauaggaaauagg

SEQ ID NO: 89892 - RNA, 19 nt, Artificial Sequence
  Description of Artificial Sequence: Synthetic oligonucleotide
  Sense strand starting at position 3484 of SEQ ID NO: 1129
uggccuauuuccuaugaag

SEQ ID NO: 89893 - RNA, 19 nt, Artificial Sequence
  Description of Artificial Sequence: Synthetic oligonucleotide
  Antisense strand to SEQ ID NO: 89812
cuucauaggaaauaggcca

SEQ ID NO: 89894 - RNA, 19 nt, Artificial Sequence
  Description of Artificial Sequence: Synthetic oligonucleotide
  Sense strand starting at position 3459 of SEQ ID NO: 1129
acaucaugguuccuggagu

SEQ ID NO: 89895 - RNA, 19 nt, Artificial Sequence
  Description of Artificial Sequence: Synthetic oligonucleotide
  Antisense strand to SEQ ID NO: 89814
acuccaggaaccaugaugu

SEQ ID NO: 89896 - RNA, 19 nt, Artificial Sequence
  Description of Artificial Sequence: Synthetic oligonucleotide
  Sense strand starting at position 3402 of SEQ ID NO: 1129
ugcugucagcuaggaaaga

SEQ ID NO: 89897 - RNA, 19 nt, Artificial Sequence
  Description of Artificial Sequence: Synthetic oligonucleotide
  Antisense strand to SEQ ID NO: 89816
ucuuuccuagcugacagca

SEQ ID NO: 89898 - RNA, 19 nt, Artificial Sequence
  Description of Artificial Sequence: Synthetic oligonucleotide
  Sense strand starting at position 3337 of SEQ ID NO: 1129
ggucuugugacgaguggug

SEQ ID NO: 89899 - RNA, 19 nt, Artificial Sequence
  Description of Artificial Sequence: Synthetic oligonucleotide
  Antisense strand to SEQ ID NO: 89818
caccacucgucacaagacc

SEQ ID NO: 89900 - RNA, 19 nt, Artificial Sequence
  Description of Artificial Sequence: Synthetic oligonucleotide
  Sense strand starting at position 2934 of SEQ ID NO: 1129
cucuaaaucugugucauac

SEQ ID NO: 89901 - RNA, 19 nt, Artificial Sequence
  Description of Artificial Sequence: Synthetic oligonucleotide
  Antisense strand to SEQ ID NO: 89820
guaugacacagauuuagag

SEQ ID NO: 89902 - RNA, 19 nt, Artificial Sequence
  Description of Artificial Sequence: Synthetic oligonucleotide
  Sense strand starting at position 2933 of SEQ ID NO: 1129
ccucuaaaucugugucaua

SEQ ID NO: 89903 - RNA, 19 nt, Artificial Sequence
  Description of Artificial Sequence: Synthetic oligonucleotide
  Antisense strand to SEQ ID NO: 89822
uaugacacagauuuagagg

SEQ ID NO: 89904 - RNA, 19 nt, Artificial Sequence
  Description of Artificial Sequence: Synthetic oligonucleotide
  Sense strand starting at position 2811 of SEQ ID NO: 1129
guaugucuguauuuccaaa

SEQ ID NO: 89905 - RNA, 19 nt, Artificial Sequence
  Description of Artificial Sequence: Synthetic oligonucleotide
  Antisense strand to SEQ ID NO: 89824
uuuggaaauacagacauac

SEQ ID NO: 89906 - RNA, 19 nt, Artificial Sequence
  Description of Artificial Sequence: Synthetic oligonucleotide
  Sense strand starting at position 2807 of SEQ ID NO: 1129
gugaguaugucuguauuuc

SEQ ID NO: 89907 - RNA, 19 nt, Artificial Sequence
  Description of Artificial Sequence: Synthetic oligonucleotide
  Antisense strand to SEQ ID NO: 89826
gaaauacagacauacucac

SEQ ID NO: 89908 - RNA, 19 nt, Artificial Sequence
  Description of Artificial Sequence: Synthetic oligonucleotide
  Sense strand starting at position 2369 of SEQ ID NO: 1129
caauguugagaccaguuua

SEQ ID NO: 89909 - RNA, 19 nt, Artificial Sequence
  Description of Artificial Sequence: Synthetic oligonucleotide
  Antisense strand to SEQ ID NO: 89828
uaaacuggucucaacauug

SEQ ID NO: 89910 - RNA, 19 nt, Artificial Sequence
  Description of Artificial Sequence: Synthetic oligonucleotide
  Sense strand starting at position 2281 of SEQ ID NO: 1129
cuccuaagugugggagaga

SEQ ID NO: 89911 - RNA, 19 nt, Artificial Sequence
  Description of Artificial Sequence: Synthetic oligonucleotide
  Antisense strand to SEQ ID NO: 89830
ucucucccacacuuaggag

SEQ ID NO: 89912 - RNA, 19 nt, Artificial Sequence
  Description of Artificial Sequence: Synthetic oligonucleotide
  Sense strand starting at position 2224 of SEQ ID NO: 1129
guugucaugcaauauauaa

SEQ ID NO: 89913 - RNA, 19 nt, Artificial Sequence
  Description of Artificial Sequence: Synthetic oligonucleotide
  Antisense strand to SEQ ID NO: 89832
uuauauauugcaugacaac

SEQ ID NO: 89914 - RNA, 19 nt, Artificial Sequence
  Description of Artificial Sequence: Synthetic oligonucleotide
  Sense strand starting at position 1322 of SEQ ID NO: 1129
gcaagaguaaugcagucua

SEQ ID NO: 89915 - RNA, 19 nt, Artificial Sequence
  Description of Artificial Sequence: Synthetic oligonucleotide
  Antisense strand to SEQ ID NO: 89834
uagacugcauuacucuugc

SEQ ID NO: 89916 - RNA, 19 nt, Artificial Sequence
  Description of Artificial Sequence: Synthetic oligonucleotide
  Sense strand starting at position 1271 of SEQ ID NO: 1129
gggugauggagcugagaua

SEQ ID NO: 89917 - RNA, 19 nt, Artificial Sequence
  Description of Artificial Sequence: Synthetic oligonucleotide
  Antisense strand to SEQ ID NO: 89836
uaucucagcuccaucaccc

SEQ ID NO: 89918 - RNA, 19 nt, Artificial Sequence
  Description of Artificial Sequence: Synthetic oligonucleotide
  Sense strand starting at position 1262 of SEQ ID NO: 1129
cagauaaccgggugaugga

SEQ ID NO: 89919 - RNA, 19 nt, Artificial Sequence
  Description of Artificial Sequence: Synthetic oligonucleotide
  Antisense strand to SEQ ID NO: 89838
uccaucacccgguuaucug

SEQ ID NO: 89920 - RNA, 19 nt, Artificial Sequence
  Description of Artificial Sequence: Synthetic oligonucleotide
  Sense strand starting at position 1260 of SEQ ID NO: 1129
cccagauaaccgggugaug

SEQ ID NO: 89921 - RNA, 19 nt, Artificial Sequence
  Description of Artificial Sequence: Synthetic oligonucleotide
  Antisense strand to SEQ ID NO: 89840
caucacccgguuaucuggg

SEQ ID NO: 89922 - RNA, 19 nt, Artificial Sequence
  Description of Artificial Sequence: Synthetic oligonucleotide
  Sense strand starting at position 1219 of SEQ ID NO: 1129
ccaggaguugaaggaguua

SEQ ID NO: 89923 - RNA, 19 nt, Artificial Sequence
  Description of Artificial Sequence: Synthetic oligonucleotide
  Antisense strand to SEQ ID NO: 89842
uaacuccuucaacuccugg

SEQ ID NO: 89924 - RNA, 19 nt, Artificial Sequence
  Description of Artificial Sequence: Synthetic oligonucleotide
  Sense strand starting at position 1124 of SEQ ID NO: 1129
guaaacuucugucuauuaa

SEQ ID NO: 89925 - RNA, 19 nt, Artificial Sequence
  Description of Artificial Sequence: Synthetic oligonucleotide
  Antisense strand to SEQ ID NO: 89844
uuaauagacagaaguuuac

SEQ ID NO: 89926 - RNA, 19 nt, Artificial Sequence
  Description of Artificial Sequence: Synthetic oligonucleotide
  Sense strand starting at position 1122 of SEQ ID NO: 1129
auguaaacuucugucuauu

SEQ ID NO: 89927 - RNA, 19 nt, Artificial Sequence
  Description of Artificial Sequence: Synthetic oligonucleotide
  Antisense strand to SEQ ID NO: 89846
aauagacagaaguuuacau

SEQ ID NO: 89928 - RNA, 19 nt, Artificial Sequence
  Description of Artificial Sequence: Synthetic oligonucleotide
  Sense strand starting at position 812 of SEQ ID NO: 1129
uuggguucucauggagaca

SEQ ID NO: 89929 - RNA, 19 nt, Artificial Sequence
  Description of Artificial Sequence: Synthetic oligonucleotide
  Antisense strand to SEQ ID NO: 89848
ugucuccaugagaacccaa

SEQ ID NO: 89930 - RNA, 19 nt, Artificial Sequence
  Description of Artificial Sequence: Synthetic oligonucleotide
  Sense strand starting at position 676 of SEQ ID NO: 1129
ggaccaggcuuccuuagau

SEQ ID NO: 89931 - RNA, 19 nt, Artificial Sequence
  Description of Artificial Sequence: Synthetic oligonucleotide
  Antisense strand to SEQ ID NO: 89850
aucuaaggaagccuggucc

SEQ ID NO: 89932 - RNA, 19 nt, Artificial Sequence
  Description of Artificial Sequence: Synthetic oligonucleotide
  Sense strand starting at position 592 of SEQ ID NO: 1129
cucauuucucuuugcugga

SEQ ID NO: 89933 - RNA, 19 nt, Artificial Sequence
  Description of Artificial Sequence: Synthetic oligonucleotide
  Antisense strand to SEQ ID NO: 89852
uccagcaaagagaaaugag

SEQ ID NO: 89934 - RNA, 19 nt, Artificial Sequence
  Description of Artificial Sequence: Synthetic oligonucleotide
  Sense strand starting at position 573 of SEQ ID NO: 1129
gaggguugggacugccaau

SEQ ID NO: 89935 - RNA, 19 nt, Artificial Sequence
  Description of Artificial Sequence: Synthetic oligonucleotide
  Antisense strand to SEQ ID NO: 89854
auuggcagucccaacccuc

SEQ ID NO: 89936 - RNA, 19 nt, Artificial Sequence
  Description of Artificial Sequence: Synthetic oligonucleotide
  Sense strand starting at position 561 of SEQ ID NO: 1129
ggccuuaugauggaggguu

SEQ ID NO: 89937 - RNA, 19 nt, Artificial Sequence
  Description of Artificial Sequence: Synthetic oligonucleotide
  Antisense strand to SEQ ID NO: 89856
aacccuccaucauaaggcc

SEQ ID NO: 89938 - RNA, 19 nt, Artificial Sequence
  Description of Artificial Sequence: Synthetic oligonucleotide
  Sense strand starting at position 502 of SEQ ID NO: 1129
cuuaauaaccaggguuauu

SEQ ID NO: 89939 - RNA, 19 nt, Artificial Sequence
  Description of Artificial Sequence: Synthetic oligonucleotide
  Antisense strand to SEQ ID NO: 89858
aauaacccugguuauuaag

SEQ ID NO: 89940 - RNA, 19 nt, Artificial Sequence
  Description of Artificial Sequence: Synthetic oligonucleotide
  Sense strand starting at position 501 of SEQ ID NO: 1129
ccuuaauaaccaggguuau

SEQ ID NO: 89941 - RNA, 19 nt, Artificial Sequence
  Description of Artificial Sequence: Synthetic oligonucleotide
  Antisense strand to SEQ ID NO: 89860
auaacccugguuauuaagg

SEQ ID NO: 89942 - RNA, 19 nt, Artificial Sequence
  Description of Artificial Sequence: Synthetic oligonucleotide
  Sense strand starting at position 492 of SEQ ID NO: 1129
gucugucuuccuuaauaac

SEQ ID NO: 89943 - RNA, 19 nt, Artificial Sequence
  Description of Artificial Sequence: Synthetic oligonucleotide
  Antisense strand to SEQ ID NO: 89862
guuauuaaggaagacagac

SEQ ID NO: 89944 - RNA, 19 nt, Artificial Sequence
  Description of Artificial Sequence: Synthetic oligonucleotide
  Sense strand starting at position 482 of SEQ ID NO: 1129
guaggauaaugucugucuu

SEQ ID NO: 89945 - RNA, 19 nt, Artificial Sequence
  Description of Artificial Sequence: Synthetic oligonucleotide
  Antisense strand to SEQ ID NO: 89864
aagacagacauuauccuac

SEQ ID NO: 89946 - RNA, 19 nt, Artificial Sequence
  Description of Artificial Sequence: Synthetic oligonucleotide
  Sense strand starting at position 473 of SEQ ID NO: 1129
gacagcugaguaggauaau

SEQ ID NO: 89947 - RNA, 19 nt, Artificial Sequence
  Description of Artificial Sequence: Synthetic oligonucleotide
  Antisense strand to SEQ ID NO: 89866
auuauccuacucagcuguc

SEQ ID NO: 89948 - RNA, 19 nt, Artificial Sequence
  Description of Artificial Sequence: Synthetic oligonucleotide
  Sense strand starting at position 471 of SEQ ID NO: 1129
gugacagcugaguaggaua

SEQ ID NO: 89949 - RNA, 19 nt, Artificial Sequence
  Description of Artificial Sequence: Synthetic oligonucleotide
  Antisense strand to SEQ ID NO: 89868
uauccuacucagcugucac

SEQ ID NO: 89950 - RNA, 19 nt, Artificial Sequence
  Description of Artificial Sequence: Synthetic oligonucleotide
  Sense strand starting at position 340 of SEQ ID NO: 1129
acuagagcagucugcauuu

SEQ ID NO: 89951 - RNA, 19 nt, Artificial Sequence
  Description of Artificial Sequence: Synthetic oligonucleotide
  Antisense strand to SEQ ID NO: 89870
aaaugcagacugcucuagu

SEQ ID NO: 89952 - RNA, 19 nt, Artificial Sequence
  Description of Artificial Sequence: Synthetic oligonucleotide
  Sense strand starting at position 327 of SEQ ID NO: 1129
aagguuuauuuguacuaga

SEQ ID NO: 89953 - RNA, 19 nt, Artificial Sequence
  Description of Artificial Sequence: Synthetic oligonucleotide
  Antisense strand to SEQ ID NO: 89872
ucuaguacaaauaaaccuu

SEQ ID NO: 89954 - RNA, 19 nt, Artificial Sequence
  Description of Artificial Sequence: Synthetic oligonucleotide
  Sense strand starting at position 243 of SEQ ID NO: 1129
gugugucuguaauuuauga

SEQ ID NO: 89955 - RNA, 19 nt, Artificial Sequence
  Description of Artificial Sequence: Synthetic oligonucleotide
  Antisense strand to SEQ ID NO: 89874
ucauaaauuacagacacac

SEQ ID NO: 89956 - RNA, 19 nt, Artificial Sequence
  Description of Artificial Sequence: Synthetic oligonucleotide
  Sense strand starting at position 155 of SEQ ID NO: 1129
uggacauuguuuccaagcu

SEQ ID NO: 89957 - RNA, 19 nt, Artificial Sequence
  Description of Artificial Sequence: Synthetic oligonucleotide
  Antisense strand to SEQ ID NO: 89876
agcuuggaaacaaugucca

SEQ ID NO: 89958 - RNA, 19 nt, Artificial Sequence
  Description of Artificial Sequence: Synthetic oligonucleotide
  Sense strand starting at position 147 of SEQ ID NO: 1129
cacagaguuggacauuguu

SEQ ID NO: 89959 - RNA, 19 nt, Artificial Sequence
  Description of Artificial Sequence: Synthetic oligonucleotide
  Antisense strand to SEQ ID NO: 89878
aacaauguccaacucugug

SEQ ID NO: 89960 - RNA, 19 nt, Artificial Sequence
  Description of Artificial Sequence: Synthetic oligonucleotide
  Sense strand starting at position 58 of SEQ ID NO: 1129
ggaggaggcugacugauau

SEQ ID NO: 89961 - RNA, 19 nt, Artificial Sequence
  Description of Artificial Sequence: Synthetic oligonucleotide
  Antisense strand to SEQ ID NO: 89880
auaucagucagccuccucc

SEQ ID NO: 89962 - RNA, 19 nt, Artificial Sequence
  Description of Artificial Sequence: Synthetic oligonucleotide
  Sense strand starting at position 38 of SEQ ID NO: 1129
uaggcaagcuuccuggaaa

SEQ ID NO: 89963 - RNA, 19 nt, Artificial Sequence
  Description of Artificial Sequence: Synthetic oligonucleotide
  Antisense strand to SEQ ID NO: 89882
uuuccaggaagcuugccua

SEQ ID NO: 89964 - RNA, 19 nt, Artificial Sequence
  Description of Artificial Sequence: Synthetic oligonucleotide
  Sense strand starting at position 30 of SEQ ID NO: 1129
ggacauauuaggcaagcuu

SEQ ID NO: 89965 - RNA, 19 nt, Artificial Sequence
  Description of Artificial Sequence: Synthetic oligonucleotide
  Antisense strand to SEQ ID NO: 89884
aagcuugccuaauaugucc

SEQ ID NO: 89966 - RNA, 19 nt, Artificial Sequence
  Description of Artificial Sequence: Synthetic oligonucleotide
  Sense strand starting at position 3930 of SEQ ID NO: 1130
auauuaagucaccagagca

SEQ ID NO: 89967 - RNA, 19 nt, Artificial Sequence
  Description of Artificial Sequence: Synthetic oligonucleotide
  Antisense strand to SEQ ID NO: 89886
ugcucuggugacuuaauau

SEQ ID NO: 89968 - RNA, 19 nt, Artificial Sequence
  Description of Artificial Sequence: Synthetic oligonucleotide
  Sense strand starting at position 3904 of SEQ ID NO: 1130
agacaaucuuggcucuaug

SEQ ID NO: 89969 - RNA, 19 nt, Artificial Sequence
  Description of Artificial Sequence: Synthetic oligonucleotide
  Antisense strand to SEQ ID NO: 89888
cauagagccaagauugucu

SEQ ID NO: 89970 - RNA, 19 nt, Artificial Sequence
  Description of Artificial Sequence: Synthetic oligonucleotide
  Sense strand starting at position 3773 of SEQ ID NO: 1130
agcugauaugugccucguu

SEQ ID NO: 89971 - RNA, 19 nt, Artificial Sequence
  Description of Artificial Sequence: Synthetic oligonucleotide
  Antisense strand to SEQ ID NO: 89890
aacgaggcacauaucagcu

SEQ ID NO: 89972 - RNA, 19 nt, Artificial Sequence
  Description of Artificial Sequence: Synthetic oligonucleotide
  Sense strand starting at position 3568 of SEQ ID NO: 1130
ccugauaaugccugaggga

SEQ ID NO: 89973 - RNA, 19 nt, Artificial Sequence
  Description of Artificial Sequence: Synthetic oligonucleotide
  Antisense strand to SEQ ID NO: 89892
ucccucaggcauuaucagg

SEQ ID NO: 89974 - RNA, 19 nt, Artificial Sequence
  Description of Artificial Sequence: Synthetic oligonucleotide
  Sense strand starting at position 3495 of SEQ ID NO: 1130
gaagaccucugugaaauuu

SEQ ID NO: 89975 - RNA, 19 nt, Artificial Sequence
  Description of Artificial Sequence: Synthetic oligonucleotide
  Antisense strand to SEQ ID NO: 89894
aaauuucacagaggucuuc

SEQ ID NO: 89976 - RNA, 19 nt, Artificial Sequence
  Description of Artificial Sequence: Synthetic oligonucleotide
  Sense strand starting at position 3494 of SEQ ID NO: 1130
ugaagaccucugugaaauu

SEQ ID NO: 89977 - RNA, 19 nt, Artificial Sequence
  Description of Artificial Sequence: Synthetic oligonucleotide
  Antisense strand to SEQ ID NO: 89896
aauuucacagaggucuuca

SEQ ID NO: 89978 - RNA, 19 nt, Artificial Sequence
  Description of Artificial Sequence: Synthetic oligonucleotide
  Sense strand starting at position 3492 of SEQ ID NO: 1130
ucugaagaccucugugaaa

SEQ ID NO: 89979 - RNA, 19 nt, Artificial Sequence
  Description of Artificial Sequence: Synthetic oligonucleotide
  Antisense strand to SEQ ID NO: 89898
uuucacagaggucuucaga

SEQ ID NO: 89980 - RNA, 19 nt, Artificial Sequence
  Description of Artificial Sequence: Synthetic oligonucleotide
  Sense strand starting at position 3457 of SEQ ID NO: 1130
uugugaccucuaggaauuc

SEQ ID NO: 89981 - RNA, 19 nt, Artificial Sequence
  Description of Artificial Sequence: Synthetic oligonucleotide
  Antisense strand to SEQ ID NO: 89900
gaauuccuagaggucacaa

SEQ ID NO: 89982 - RNA, 19 nt, Artificial Sequence
  Description of Artificial Sequence: Synthetic oligonucleotide
  Sense strand starting at position 3371 of SEQ ID NO: 1130
agaagauacugcuuuguca

SEQ ID NO: 89983 - RNA, 19 nt, Artificial Sequence
  Description of Artificial Sequence: Synthetic oligonucleotide
  Antisense strand to SEQ ID NO: 89902
ugacaaagcaguaucuucu

SEQ ID NO: 89984 - RNA, 19 nt, Artificial Sequence
  Description of Artificial Sequence: Synthetic oligonucleotide
  Sense strand starting at position 3320 of SEQ ID NO: 1130
uguucaggucaagagugaa

SEQ ID NO: 89985 - RNA, 19 nt, Artificial Sequence
  Description of Artificial Sequence: Synthetic oligonucleotide
  Antisense strand to SEQ ID NO: 89904
uucacucuugaccugaaca

SEQ ID NO: 89986 - RNA, 19 nt, Artificial Sequence
  Description of Artificial Sequence: Synthetic oligonucleotide
  Sense strand starting at position 3317 of SEQ ID NO: 1130
gaguguucaggucaagagu

SEQ ID NO: 89987 - RNA, 19 nt, Artificial Sequence
  Description of Artificial Sequence: Synthetic oligonucleotide
  Antisense strand to SEQ ID NO: 89906
acucuugaccugaacacuc

SEQ ID NO: 89988 - RNA, 19 nt, Artificial Sequence
  Description of Artificial Sequence: Synthetic oligonucleotide
  Sense strand starting at position 3233 of SEQ ID NO: 1130
gucuuuacauuucugucau

SEQ ID NO: 89989 - RNA, 19 nt, Artificial Sequence
  Description of Artificial Sequence: Synthetic oligonucleotide
  Antisense strand to SEQ ID NO: 89908
augacagaaauguaaagac

SEQ ID NO: 89990 - RNA, 19 nt, Artificial Sequence
  Description of Artificial Sequence: Synthetic oligonucleotide
  Sense strand starting at position 3222 of SEQ ID NO: 1130
aggaguauauggucuuuac

SEQ ID NO: 89991 - RNA, 19 nt, Artificial Sequence
  Description of Artificial Sequence: Synthetic oligonucleotide
  Antisense strand to SEQ ID NO: 89910
guaaagaccauauacuccu

SEQ ID NO: 89992 - RNA, 19 nt, Artificial Sequence
  Description of Artificial Sequence: Synthetic oligonucleotide
  Sense strand starting at position 3204 of SEQ ID NO: 1130
acccuuggucuagaaggua

SEQ ID NO: 89993 - RNA, 19 nt, Artificial Sequence
  Description of Artificial Sequence: Synthetic oligonucleotide
  Antisense strand to SEQ ID NO: 89912
uaccuucuagaccaagggu

SEQ ID NO: 89994 - RNA, 19 nt, Artificial Sequence
  Description of Artificial Sequence: Synthetic oligonucleotide
  Sense strand starting at position 3200 of SEQ ID NO: 1130
auauacccuuggucuagaa

SEQ ID NO: 89995 - RNA, 19 nt, Artificial Sequence
  Description of Artificial Sequence: Synthetic oligonucleotide
  Antisense strand to SEQ ID NO: 89914
uucuagaccaaggguauau

SEQ ID NO: 89996 - RNA, 19 nt, Artificial Sequence
  Description of Artificial Sequence: Synthetic oligonucleotide
  Sense strand starting at position 3146 of SEQ ID NO: 1130
uacuguauggcauaaguua

SEQ ID NO: 89997 - RNA, 19 nt, Artificial Sequence
  Description of Artificial Sequence: Synthetic oligonucleotide
  Antisense strand to SEQ ID NO: 89916
uaacuuaugccauacagua

SEQ ID NO: 89998 - RNA, 19 nt, Artificial Sequence
  Description of Artificial Sequence: Synthetic oligonucleotide
  Sense strand starting at position 3042 of SEQ ID NO: 1130
uagugaaugacaggagagu

SEQ ID NO: 89999 - RNA, 19 nt, Artificial Sequence
  Description of Artificial Sequence: Synthetic oligonucleotide
  Antisense strand to SEQ ID NO: 89918
acucuccugucauucacua

SEQ ID NO: 90000 - RNA, 19 nt, Artificial Sequence
  Description of Artificial Sequence: Synthetic oligonucleotide
  Sense strand starting at position 3032 of SEQ ID NO: 1130
uuaaucuucuuagugaaug

SEQ ID NO: 90001 - RNA, 19 nt, Artificial Sequence
  Description of Artificial Sequence: Synthetic oligonucleotide
  Antisense strand to SEQ ID NO: 89920
cauucacuaagaagauuaa

SEQ ID NO: 90002 - RNA, 19 nt, Artificial Sequence
  Description of Artificial Sequence: Synthetic oligonucleotide
  Sense strand starting at position 2990 of SEQ ID NO: 1130
auuauuucuugucaagaag

SEQ ID NO: 90003 - RNA, 19 nt, Artificial Sequence
  Description of Artificial Sequence: Synthetic oligonucleotide
  Antisense strand to SEQ ID NO: 89922
cuucuugacaagaaauaau

SEQ ID NO: 90004 - RNA, 19 nt, Artificial Sequence
  Description of Artificial Sequence: Synthetic oligonucleotide
  Sense strand starting at position 2951 of SEQ ID NO: 1130
aggaauguacaguguacau

SEQ ID NO: 90005 - RNA, 19 nt, Artificial Sequence
  Description of Artificial Sequence: Synthetic oligonucleotide
  Antisense strand to SEQ ID NO: 89924
auguacacuguacauuccu

SEQ ID NO: 90006 - RNA, 19 nt, Artificial Sequence
  Description of Artificial Sequence: Synthetic oligonucleotide
  Sense strand starting at position 2575 of SEQ ID NO: 1130
ugaucauugugacuaaacu

SEQ ID NO: 90007 - RNA, 19 nt, Artificial Sequence
  Description of Artificial Sequence: Synthetic oligonucleotide
  Antisense strand to SEQ ID NO: 89926
aguuuagucacaaugauca

SEQ ID NO: 90008 - RNA, 19 nt, Artificial Sequence
  Description of Artificial Sequence: Synthetic oligonucleotide
  Sense strand starting at position 2570 of SEQ ID NO: 1130
ggugaugaucauugugacu

SEQ ID NO: 90009 - RNA, 19 nt, Artificial Sequence
  Description of Artificial Sequence: Synthetic oligonucleotide
  Antisense strand to SEQ ID NO: 89928
agucacaaugaucaucacc

SEQ ID NO: 90010 - RNA, 19 nt, Artificial Sequence
  Description of Artificial Sequence: Synthetic oligonucleotide
  Sense strand starting at position 2569 of SEQ ID NO: 1130
uggugaugaucauugugac

SEQ ID NO: 90011 - RNA, 19 nt, Artificial Sequence
  Description of Artificial Sequence: Synthetic oligonucleotide
  Antisense strand to SEQ ID NO: 89930
gucacaaugaucaucacca

SEQ ID NO: 90012 - RNA, 19 nt, Artificial Sequence
  Description of Artificial Sequence: Synthetic oligonucleotide
  Sense strand starting at position 2546 of SEQ ID NO: 1130
caagaugguuuccucagau

SEQ ID NO: 90013 - RNA, 19 nt, Artificial Sequence
  Description of Artificial Sequence: Synthetic oligonucleotide
  Antisense strand to SEQ ID NO: 89932
aucugaggaaaccaucuug

SEQ ID NO: 90014 - RNA, 19 nt, Artificial Sequence
  Description of Artificial Sequence: Synthetic oligonucleotide
  Sense strand starting at position 2545 of SEQ ID NO: 1130
ucaagaugguuuccucaga

SEQ ID NO: 90015 - RNA, 19 nt, Artificial Sequence
  Description of Artificial Sequence: Synthetic oligonucleotide
  Antisense strand to SEQ ID NO: 89934
ucugaggaaaccaucuuga

SEQ ID NO: 90016 - RNA, 19 nt, Artificial Sequence
  Description of Artificial Sequence: Synthetic oligonucleotide
  Sense strand starting at position 2312 of SEQ ID NO: 1130
accagagauccuugccaua

SEQ ID NO: 90017 - RNA, 19 nt, Artificial Sequence
  Description of Artificial Sequence: Synthetic oligonucleotide
  Antisense strand to SEQ ID NO: 89936
uauggcaaggaucucuggu

SEQ ID NO: 90018 - RNA, 19 nt, Artificial Sequence
  Description of Artificial Sequence: Synthetic oligonucleotide
  Sense strand starting at position 2289 of SEQ ID NO: 1130
cucaaagagugacuucuga

SEQ ID NO: 90019 - RNA, 19 nt, Artificial Sequence
  Description of Artificial Sequence: Synthetic oligonucleotide
  Antisense strand to SEQ ID NO: 89938
ucagaagucacucuuugag

SEQ ID NO: 90020 - RNA, 19 nt, Artificial Sequence
  Description of Artificial Sequence: Synthetic oligonucleotide
  Sense strand starting at position 1832 of SEQ ID NO: 1130
aggcaagauuuccagaaac

SEQ ID NO: 90021 - RNA, 19 nt, Artificial Sequence
  Description of Artificial Sequence: Synthetic oligonucleotide
  Antisense strand to SEQ ID NO: 89940
guuucuggaaaucuugccu

SEQ ID NO: 90022 - RNA, 19 nt, Artificial Sequence
  Description of Artificial Sequence: Synthetic oligonucleotide
  Sense strand starting at position 1784 of SEQ ID NO: 1130
agaauaagcccuugaugaa

SEQ ID NO: 90023 - RNA, 19 nt, Artificial Sequence
  Description of Artificial Sequence: Synthetic oligonucleotide
  Antisense strand to SEQ ID NO: 89942
uucaucaagggcuuauucu

SEQ ID NO: 90024 - RNA, 19 nt, Artificial Sequence
  Description of Artificial Sequence: Synthetic oligonucleotide
  Sense strand starting at position 1573 of SEQ ID NO: 1130
gaauaauacucagugugug

SEQ ID NO: 90025 - RNA, 19 nt, Artificial Sequence
  Description of Artificial Sequence: Synthetic oligonucleotide
  Antisense strand to SEQ ID NO: 89944
cacacacugaguauuauuc

SEQ ID NO: 90026 - RNA, 19 nt, Artificial Sequence
  Description of Artificial Sequence: Synthetic oligonucleotide
  Sense strand starting at position 1571 of SEQ ID NO: 1130
gugaauaauacucagugug

SEQ ID NO: 90027 - RNA, 19 nt, Artificial Sequence
  Description of Artificial Sequence: Synthetic oligonucleotide
  Antisense strand to SEQ ID NO: 89946
cacacugaguauuauucac

SEQ ID NO: 90028 - RNA, 19 nt, Artificial Sequence
  Description of Artificial Sequence: Synthetic oligonucleotide
  Sense strand starting at position 1570 of SEQ ID NO: 1130
ggugaauaauacucagugu

SEQ ID NO: 90029 - RNA, 19 nt, Artificial Sequence
  Description of Artificial Sequence: Synthetic oligonucleotide
  Antisense strand to SEQ ID NO: 89948
acacugaguauuauucacc

SEQ ID NO: 90030 - RNA, 19 nt, Artificial Sequence
  Description of Artificial Sequence: Synthetic oligonucleotide
  Sense strand starting at position 1558 of SEQ ID NO: 1130
ucauauggugauggugaau

SEQ ID NO: 90031 - RNA, 19 nt, Artificial Sequence
  Description of Artificial Sequence: Synthetic oligonucleotide
  Antisense strand to SEQ ID NO: 89950
auucaccaucaccauauga

SEQ ID NO: 90032 - RNA, 19 nt, Artificial Sequence
  Description of Artificial Sequence: Synthetic oligonucleotide
  Sense strand starting at position 622 of SEQ ID NO: 1130
gaguuaaacugagcaagca

SEQ ID NO: 90033 - RNA, 19 nt, Artificial Sequence
  Description of Artificial Sequence: Synthetic oligonucleotide
  Antisense strand to SEQ ID NO: 89952
ugcuugcucaguuuaacuc

SEQ ID NO: 90034 - RNA, 19 nt, Artificial Sequence
  Description of Artificial Sequence: Synthetic oligonucleotide
  Sense strand starting at position 620 of SEQ ID NO: 1130
gugaguuaaacugagcaag

SEQ ID NO: 90035 - RNA, 19 nt, Artificial Sequence
  Description of Artificial Sequence: Synthetic oligonucleotide
  Antisense strand to SEQ ID NO: 89954
cuugcucaguuuaacucac

SEQ ID NO: 90036 - RNA, 19 nt, Artificial Sequence
  Description of Artificial Sequence: Synthetic oligonucleotide
  Sense strand starting at position 431 of SEQ ID NO: 1130
gagaguaguuaaguggcaa

SEQ ID NO: 90037 - RNA, 19 nt, Artificial Sequence
  Description of Artificial Sequence: Synthetic oligonucleotide
  Antisense strand to SEQ ID NO: 89956
uugccacuuaacuacucuc

SEQ ID NO: 90038 - RNA, 19 nt, Artificial Sequence
  Description of Artificial Sequence: Synthetic oligonucleotide
  Sense strand starting at position 424 of SEQ ID NO: 1130
cucccuggagaguaguuaa

SEQ ID NO: 90039 - RNA, 19 nt, Artificial Sequence
  Description of Artificial Sequence: Synthetic oligonucleotide
  Antisense strand to SEQ ID NO: 89958
uuaacuacucuccagggag

SEQ ID NO: 90040 - RNA, 19 nt, Artificial Sequence
  Description of Artificial Sequence: Synthetic oligonucleotide
  Sense strand starting at position 416 of SEQ ID NO: 1130
gacucuuccucccuggaga

SEQ ID NO: 90041 - RNA, 19 nt, Artificial Sequence
  Description of Artificial Sequence: Synthetic oligonucleotide
  Antisense strand to SEQ ID NO: 89960
ucuccagggaggaagaguc

SEQ ID NO: 90042 - RNA, 19 nt, Artificial Sequence
  Description of Artificial Sequence: Synthetic oligonucleotide
  Sense strand starting at position 278 of SEQ ID NO: 1130
ucacuuagccauggauuga

SEQ ID NO: 90043 - RNA, 19 nt, Artificial Sequence
  Description of Artificial Sequence: Synthetic oligonucleotide
  Antisense strand to SEQ ID NO: 89962
ucaauccauggcuaaguga

SEQ ID NO: 90044 - RNA, 19 nt, Artificial Sequence
  Description of Artificial Sequence: Synthetic oligonucleotide
  Sense strand starting at position 157 of SEQ ID NO: 1130
uuguuugagagugguauuu

SEQ ID NO: 90045 - RNA, 19 nt, Artificial Sequence
  Description of Artificial Sequence: Synthetic oligonucleotide
  Antisense strand to SEQ ID NO: 89964
aaauaccacucucaaacaa

SEQ ID NO: 90046 - RNA, 19 nt, Artificial Sequence
  Description of Artificial Sequence: Synthetic oligonucleotide
  Sense strand starting at position 3920 of SEQ ID NO: 1131
acauucuuggagcauguau

SEQ ID NO: 90047 - RNA, 19 nt, Artificial Sequence
  Description of Artificial Sequence: Synthetic oligonucleotide
  Antisense strand to SEQ ID NO: 89966
auacaugcuccaagaaugu

SEQ ID NO: 90048 - RNA, 19 nt, Artificial Sequence
  Description of Artificial Sequence: Synthetic oligonucleotide
  Sense strand starting at position 3876 of SEQ ID NO: 1131
ugauuagagcagugaauuc

SEQ ID NO: 90049 - RNA, 19 nt, Artificial Sequence
  Description of Artificial Sequence: Synthetic oligonucleotide
  Antisense strand to SEQ ID NO: 89968
gaauucacugcucuaauca

SEQ ID NO: 90050 - RNA, 19 nt, Artificial Sequence
  Description of Artificial Sequence: Synthetic oligonucleotide
  Sense strand starting at position 3873 of SEQ ID NO: 1131
gugugauuagagcagugaa

SEQ ID NO: 90051 - RNA, 19 nt, Artificial Sequence
  Description of Artificial Sequence: Synthetic oligonucleotide
  Antisense strand to SEQ ID NO: 89970
uucacugcucuaaucacac

SEQ ID NO: 90052 - RNA, 19 nt, Artificial Sequence
  Description of Artificial Sequence: Synthetic oligonucleotide
  Sense strand starting at position 3768 of SEQ ID NO: 1131
cugcuucuaccugagggau

SEQ ID NO: 90053 - RNA, 19 nt, Artificial Sequence
  Description of Artificial Sequence: Synthetic oligonucleotide
  Antisense strand to SEQ ID NO: 89972
aucccucagguagaagcag

SEQ ID NO: 90054 - RNA, 19 nt, Artificial Sequence
  Description of Artificial Sequence: Synthetic oligonucleotide
  Sense strand starting at position 3767 of SEQ ID NO: 1131
ucugcuucuaccugaggga

SEQ ID NO: 90055 - RNA, 19 nt, Artificial Sequence
  Description of Artificial Sequence: Synthetic oligonucleotide
  Antisense strand to SEQ ID NO: 89974
ucccucagguagaagcaga

SEQ ID NO: 90056 - RNA, 19 nt, Artificial Sequence
  Description of Artificial Sequence: Synthetic oligonucleotide
  Sense strand starting at position 3732 of SEQ ID NO: 1131
gagggugguuagguagaaa

SEQ ID NO: 90057 - RNA, 19 nt, Artificial Sequence
  Description of Artificial Sequence: Synthetic oligonucleotide
  Antisense strand to SEQ ID NO: 89976
uuucuaccuaaccacccuc

SEQ ID NO: 90058 - RNA, 19 nt, Artificial Sequence
  Description of Artificial Sequence: Synthetic oligonucleotide
  Sense strand starting at position 3701 of SEQ ID NO: 1131
cuugacauugccuaauguu

SEQ ID NO: 90059 - RNA, 19 nt, Artificial Sequence
  Description of Artificial Sequence: Synthetic oligonucleotide
  Antisense strand to SEQ ID NO: 89978
aacauuaggcaaugucaag

SEQ ID NO: 90060 - RNA, 19 nt, Artificial Sequence
  Description of Artificial Sequence: Synthetic oligonucleotide
  Sense strand starting at position 3624 of SEQ ID NO: 1131
gcucaaugaagauguugaa

SEQ ID NO: 90061 - RNA, 19 nt, Artificial Sequence
  Description of Artificial Sequence: Synthetic oligonucleotide
  Antisense strand to SEQ ID NO: 89980
uucaacaucuucauugagc

SEQ ID NO: 90062 - RNA, 19 nt, Artificial Sequence
  Description of Artificial Sequence: Synthetic oligonucleotide
  Sense strand starting at position 3613 of SEQ ID NO: 1131
agugaauuauggcucaaug

SEQ ID NO: 90063 - RNA, 19 nt, Artificial Sequence
  Description of Artificial Sequence: Synthetic oligonucleotide
  Antisense strand to SEQ ID NO: 89982
cauugagccauaauucacu

SEQ ID NO: 90064 - RNA, 19 nt, Artificial Sequence
  Description of Artificial Sequence: Synthetic oligonucleotide
  Sense strand starting at position 3504 of SEQ ID NO: 1131
uucuuuguggaguaaugaa

SEQ ID NO: 90065 - RNA, 19 nt, Artificial Sequence
  Description of Artificial Sequence: Synthetic oligonucleotide
  Antisense strand to SEQ ID NO: 89984
uucauuacuccacaaagaa

SEQ ID NO: 90066 - RNA, 19 nt, Artificial Sequence
  Description of Artificial Sequence: Synthetic oligonucleotide
  Sense strand starting at position 3429 of SEQ ID NO: 1131
aggaaauaucaguggcuuc

SEQ ID NO: 90067 - RNA, 19 nt, Artificial Sequence
  Description of Artificial Sequence: Synthetic oligonucleotide
  Antisense strand to SEQ ID NO: 89986
gaagccacugauauuuccu

SEQ ID NO: 90068 - RNA, 19 nt, Artificial Sequence
  Description of Artificial Sequence: Synthetic oligonucleotide
  Sense strand starting at position 3428 of SEQ ID NO: 1131
gaggaaauaucaguggcuu

SEQ ID NO: 90069 - RNA, 19 nt, Artificial Sequence
  Description of Artificial Sequence: Synthetic oligonucleotide
  Antisense strand to SEQ ID NO: 89988
aagccacugauauuuccuc

SEQ ID NO: 90070 - RNA, 19 nt, Artificial Sequence
  Description of Artificial Sequence: Synthetic oligonucleotide
  Sense strand starting at position 3415 of SEQ ID NO: 1131
gugcacauccucugaggaa

SEQ ID NO: 90071 - RNA, 19 nt, Artificial Sequence
  Description of Artificial Sequence: Synthetic oligonucleotide
  Antisense strand to SEQ ID NO: 89990
uuccucagaggaugugcac

SEQ ID NO: 90072 - RNA, 19 nt, Artificial Sequence
  Description of Artificial Sequence: Synthetic oligonucleotide
  Sense strand starting at position 3270 of SEQ ID NO: 1131
uaggcaaaucuguagaacu

SEQ ID NO: 90073 - RNA, 19 nt, Artificial Sequence
  Description of Artificial Sequence: Synthetic oligonucleotide
  Antisense strand to SEQ ID NO: 89992
aguucuacagauuugccua

SEQ ID NO: 90074 - RNA, 19 nt, Artificial Sequence
  Description of Artificial Sequence: Synthetic oligonucleotide
  Sense strand starting at position 3091 of SEQ ID NO: 1131
gggucuacuuacucagagu

SEQ ID NO: 90075 - RNA, 19 nt, Artificial Sequence
  Description of Artificial Sequence: Synthetic oligonucleotide
  Antisense strand to SEQ ID NO: 89994
acucugaguaaguagaccc

SEQ ID NO: 90076 - RNA, 19 nt, Artificial Sequence
  Description of Artificial Sequence: Synthetic oligonucleotide
  Sense strand starting at position 3052 of SEQ ID NO: 1131
gggaauuccuuuccuauca

SEQ ID NO: 90077 - RNA, 19 nt, Artificial Sequence
  Description of Artificial Sequence: Synthetic oligonucleotide
  Antisense strand to SEQ ID NO: 89996
ugauaggaaaggaauuccc

SEQ ID NO: 90078 - RNA, 19 nt, Artificial Sequence
  Description of Artificial Sequence: Synthetic oligonucleotide
  Sense strand starting at position 2874 of SEQ ID NO: 1131
cacuaugugcuugauagac

SEQ ID NO: 90079 - RNA, 19 nt, Artificial Sequence
  Description of Artificial Sequence: Synthetic oligonucleotide
  Antisense strand to SEQ ID NO: 89998
gucuaucaagcacauagug

SEQ ID NO: 90080 - RNA, 19 nt, Artificial Sequence
  Description of Artificial Sequence: Synthetic oligonucleotide
  Sense strand starting at position 2873 of SEQ ID NO: 1131
acacuaugugcuugauaga

SEQ ID NO: 90081 - RNA, 19 nt, Artificial Sequence
  Description of Artificial Sequence: Synthetic oligonucleotide
  Antisense strand to SEQ ID NO: 90000
ucuaucaagcacauagugu

SEQ ID NO: 90082 - RNA, 19 nt, Artificial Sequence
  Description of Artificial Sequence: Synthetic oligonucleotide
  Sense strand starting at position 2872 of SEQ ID NO: 1131
gacacuaugugcuugauag

SEQ ID NO: 90083 - RNA, 19 nt, Artificial Sequence
  Description of Artificial Sequence: Synthetic oligonucleotide
  Antisense strand to SEQ ID NO: 90002
cuaucaagcacauaguguc

SEQ ID NO: 90084 - RNA, 19 nt, Artificial Sequence
  Description of Artificial Sequence: Synthetic oligonucleotide
  Sense strand starting at position 2759 of SEQ ID NO: 1131
ugauacucacaaugaguau

SEQ ID NO: 90085 - RNA, 19 nt, Artificial Sequence
  Description of Artificial Sequence: Synthetic oligonucleotide
  Antisense strand to SEQ ID NO: 90004
auacucauugugaguauca

SEQ ID NO: 90086 - RNA, 19 nt, Artificial Sequence
  Description of Artificial Sequence: Synthetic oligonucleotide
  Sense strand starting at position 2702 of SEQ ID NO: 1131
cugagugaucucuggaaau

SEQ ID NO: 90087 - RNA, 19 nt, Artificial Sequence
  Description of Artificial Sequence: Synthetic oligonucleotide
  Antisense strand to SEQ ID NO: 90006
auuuccagagaucacucag

SEQ ID NO: 90088 - RNA, 19 nt, Artificial Sequence
  Description of Artificial Sequence: Synthetic oligonucleotide
  Sense strand starting at position 2695 of SEQ ID NO: 1131
augauaacugagugaucuc

SEQ ID NO: 90089 - RNA, 19 nt, Artificial Sequence
  Description of Artificial Sequence: Synthetic oligonucleotide
  Antisense strand to SEQ ID NO: 90008
gagaucacucaguuaucau

SEQ ID NO: 90090 - RNA, 19 nt, Artificial Sequence
  Description of Artificial Sequence: Synthetic oligonucleotide
  Sense strand starting at position 2694 of SEQ ID NO: 1131
uaugauaacugagugaucu

SEQ ID NO: 90091 - RNA, 19 nt, Artificial Sequence
  Description of Artificial Sequence: Synthetic oligonucleotide
  Antisense strand to SEQ ID NO: 90010
agaucacucaguuaucaua

SEQ ID NO: 90092 - RNA, 19 nt, Artificial Sequence
  Description of Artificial Sequence: Synthetic oligonucleotide
  Sense strand starting at position 2691 of SEQ ID NO: 1131
gcauaugauaacugaguga

SEQ ID NO: 90093 - RNA, 19 nt, Artificial Sequence
  Description of Artificial Sequence: Synthetic oligonucleotide
  Antisense strand to SEQ ID NO: 90012
ucacucaguuaucauaugc

SEQ ID NO: 90094 - RNA, 19 nt, Artificial Sequence
  Description of Artificial Sequence: Synthetic oligonucleotide
  Sense strand starting at position 2641 of SEQ ID NO: 1131
cccuuagucggaggaauug

SEQ ID NO: 90095 - RNA, 19 nt, Artificial Sequence
  Description of Artificial Sequence: Synthetic oligonucleotide
  Antisense strand to SEQ ID NO: 90014
caauuccuccgacuaaggg

SEQ ID NO: 90096 - RNA, 19 nt, Artificial Sequence
  Description of Artificial Sequence: Synthetic oligonucleotide
  Sense strand starting at position 2580 of SEQ ID NO: 1131
uguggucuagagcaaagaa

SEQ ID NO: 90097 - RNA, 19 nt, Artificial Sequence
  Description of Artificial Sequence: Synthetic oligonucleotide
  Antisense strand to SEQ ID NO: 90016
uucuuugcucuagaccaca

SEQ ID NO: 90098 - RNA, 19 nt, Artificial Sequence
  Description of Artificial Sequence: Synthetic oligonucleotide
  Sense strand starting at position 2577 of SEQ ID NO: 1131
uucuguggucuagagcaaa

SEQ ID NO: 90099 - RNA, 19 nt, Artificial Sequence
  Description of Artificial Sequence: Synthetic oligonucleotide
  Antisense strand to SEQ ID NO: 90018
uuugcucuagaccacagaa

SEQ ID NO: 90100 - RNA, 19 nt, Artificial Sequence
  Description of Artificial Sequence: Synthetic oligonucleotide
  Sense strand starting at position 2575 of SEQ ID NO: 1131
gauucuguggucuagagca

SEQ ID NO: 90101 - RNA, 19 nt, Artificial Sequence
  Description of Artificial Sequence: Synthetic oligonucleotide
  Antisense strand to SEQ ID NO: 90020
ugcucuagaccacagaauc

SEQ ID NO: 90102 - RNA, 19 nt, Artificial Sequence
  Description of Artificial Sequence: Synthetic oligonucleotide
  Sense strand starting at position 2573 of SEQ ID NO: 1131
uugauucuguggucuagag

SEQ ID NO: 90103 - RNA, 19 nt, Artificial Sequence
  Description of Artificial Sequence: Synthetic oligonucleotide
  Antisense strand to SEQ ID NO: 90022
cucuagaccacagaaucaa

SEQ ID NO: 90104 - RNA, 19 nt, Artificial Sequence
  Description of Artificial Sequence: Synthetic oligonucleotide
  Sense strand starting at position 2313 of SEQ ID NO: 1131
guguccucugaggaaacau

SEQ ID NO: 90105 - RNA, 19 nt, Artificial Sequence
  Description of Artificial Sequence: Synthetic oligonucleotide
  Antisense strand to SEQ ID NO: 90024
auguuuccucagaggacac

SEQ ID NO: 90106 - RNA, 19 nt, Artificial Sequence
  Description of Artificial Sequence: Synthetic oligonucleotide
  Sense strand starting at position 1566 of SEQ ID NO: 1131
aguaccgauucccuuaaua

SEQ ID NO: 90107 - RNA, 19 nt, Artificial Sequence
  Description of Artificial Sequence: Synthetic oligonucleotide
  Antisense strand to SEQ ID NO: 90026
uauuaagggaaucgguacu

SEQ ID NO: 90108 - RNA, 19 nt, Artificial Sequence
  Description of Artificial Sequence: Synthetic oligonucleotide
  Sense strand starting at position 635 of SEQ ID NO: 1131
guccuugacccaugaagag

SEQ ID NO: 90109 - RNA, 19 nt, Artificial Sequence
  Description of Artificial Sequence: Synthetic oligonucleotide
  Antisense strand to SEQ ID NO: 90028
cucuucaugggucaaggac

SEQ ID NO: 90110 - RNA, 19 nt, Artificial Sequence
  Description of Artificial Sequence: Synthetic oligonucleotide
  Sense strand starting at position 587 of SEQ ID NO: 1131
gaaucaguuccuuggagca

SEQ ID NO: 90111 - RNA, 19 nt, Artificial Sequence
  Description of Artificial Sequence: Synthetic oligonucleotide
  Antisense strand to SEQ ID NO: 90030
ugcuccaaggaacugauuc

SEQ ID NO: 90112 - RNA, 19 nt, Artificial Sequence
  Description of Artificial Sequence: Synthetic oligonucleotide
  Sense strand starting at position 328 of SEQ ID NO: 1131
cuguacuuugcagaaggaa

SEQ ID NO: 90113 - RNA, 19 nt, Artificial Sequence
  Description of Artificial Sequence: Synthetic oligonucleotide
  Antisense strand to SEQ ID NO: 90032
uuccuucugcaaaguacag

SEQ ID NO: 90114 - RNA, 19 nt, Artificial Sequence
  Description of Artificial Sequence: Synthetic oligonucleotide
  Sense strand starting at position 306 of SEQ ID NO: 1131
gaaggaguucagugacugu

SEQ ID NO: 90115 - RNA, 19 nt, Artificial Sequence
  Description of Artificial Sequence: Synthetic oligonucleotide
  Antisense strand to SEQ ID NO: 90034
acagucacugaacuccuuc

SEQ ID NO: 90116 - RNA, 19 nt, Artificial Sequence
  Description of Artificial Sequence: Synthetic oligonucleotide
  Sense strand starting at position 267 of SEQ ID NO: 1131
agucaaugggcugaucuua

SEQ ID NO: 90117 - RNA, 19 nt, Artificial Sequence
  Description of Artificial Sequence: Synthetic oligonucleotide
  Antisense strand to SEQ ID NO: 90036
uaagaucagcccauugacu

SEQ ID NO: 90118 - RNA, 19 nt, Artificial Sequence
  Description of Artificial Sequence: Synthetic oligonucleotide
  Sense strand starting at position 266 of SEQ ID NO: 1131
aagucaaugggcugaucuu

SEQ ID NO: 90119 - RNA, 19 nt, Artificial Sequence
  Description of Artificial Sequence: Synthetic oligonucleotide
  Antisense strand to SEQ ID NO: 90038
aagaucagcccauugacuu

SEQ ID NO: 90120 - RNA, 19 nt, Artificial Sequence
  Description of Artificial Sequence: Synthetic oligonucleotide
  Sense strand starting at position 102 of SEQ ID NO: 1131
ccauaaauucguuguauuu

SEQ ID NO: 90121 - RNA, 19 nt, Artificial Sequence
  Description of Artificial Sequence: Synthetic oligonucleotide
  Antisense strand to SEQ ID NO: 90040
aaauacaacgaauuuaugg

SEQ ID NO: 90122 - RNA, 19 nt, Artificial Sequence
  Description of Artificial Sequence: Synthetic oligonucleotide
  Sense strand starting at position 54 of SEQ ID NO: 1131
guuaguauugaaggaggaa

SEQ ID NO: 90123 - RNA, 19 nt, Artificial Sequence
  Description of Artificial Sequence: Synthetic oligonucleotide
  Antisense strand to SEQ ID NO: 90042
uuccuccuucaauacuaac

SEQ ID NO: 90124 - RNA, 19 nt, Artificial Sequence
  Description of Artificial Sequence: Synthetic oligonucleotide
  Sense strand starting at position 46 of SEQ ID NO: 1131
caaagaagguuaguauuga

SEQ ID NO: 90125 - RNA, 19 nt, Artificial Sequence
  Description of Artificial Sequence: Synthetic oligonucleotide
  Antisense strand to SEQ ID NO: 90044
ucaauacuaaccuucuuug

SEQ ID NO: 90126 - RNA, 19 nt, Artificial Sequence
  Description of Artificial Sequence: Synthetic oligonucleotide
  Sense strand starting at position 3981 of SEQ ID NO: 1132
ugaaucauguauguccaaa

SEQ ID NO: 90127 - RNA, 19 nt, Artificial Sequence
  Description of Artificial Sequence: Synthetic oligonucleotide
  Antisense strand to SEQ ID NO: 90046
uuuggacauacaugauuca

SEQ ID NO: 90128 - RNA, 19 nt, Artificial Sequence
  Description of Artificial Sequence: Synthetic oligonucleotide
  Sense strand starting at position 3980 of SEQ ID NO: 1132
uugaaucauguauguccaa

SEQ ID NO: 90129 - RNA, 19 nt, Artificial Sequence
  Description of Artificial Sequence: Synthetic oligonucleotide
  Antisense strand to SEQ ID NO: 90048
uuggacauacaugauucaa

SEQ ID NO: 90130 - RNA, 19 nt, Artificial Sequence
  Description of Artificial Sequence: Synthetic oligonucleotide
  Sense strand starting at position 3968 of SEQ ID NO: 1132
ccuacaacguucuugaauc

SEQ ID NO: 90131 - RNA, 19 nt, Artificial Sequence
  Description of Artificial Sequence: Synthetic oligonucleotide
  Antisense strand to SEQ ID NO: 90050
gauucaagaacguuguagg

SEQ ID NO: 90132 - RNA, 19 nt, Artificial Sequence
  Description of Artificial Sequence: Synthetic oligonucleotide
  Sense strand starting at position 3837 of SEQ ID NO: 1132
ggauucuguucuccuaguu

SEQ ID NO: 90133 - RNA, 19 nt, Artificial Sequence
  Description of Artificial Sequence: Synthetic oligonucleotide
  Antisense strand to SEQ ID NO: 90052
aacuaggagaacagaaucc

SEQ ID NO: 90134 - RNA, 19 nt, Artificial Sequence
  Description of Artificial Sequence: Synthetic oligonucleotide
  Sense strand starting at position 3836 of SEQ ID NO: 1132
gggauucuguucuccuagu

SEQ ID NO: 90135 - RNA, 19 nt, Artificial Sequence
  Description of Artificial Sequence: Synthetic oligonucleotide
  Antisense strand to SEQ ID NO: 90054
acuaggagaacagaauccc

SEQ ID NO: 90136 - RNA, 19 nt, Artificial Sequence
  Description of Artificial Sequence: Synthetic oligonucleotide
  Sense strand starting at position 3834 of SEQ ID NO: 1132
gagggauucuguucuccua

SEQ ID NO: 90137 - RNA, 19 nt, Artificial Sequence
  Description of Artificial Sequence: Synthetic oligonucleotide
  Antisense strand to SEQ ID NO: 90056
uaggagaacagaaucccuc

SEQ ID NO: 90138 - RNA, 19 nt, Artificial Sequence
  Description of Artificial Sequence: Synthetic oligonucleotide
  Sense strand starting at position 3518 of SEQ ID NO: 1132
gggagauauugagaaguua

SEQ ID NO: 90139 - RNA, 19 nt, Artificial Sequence
  Description of Artificial Sequence: Synthetic oligonucleotide
  Antisense strand to SEQ ID NO: 90058
uaacuucucaauaucuccc

SEQ ID NO: 90140 - RNA, 19 nt, Artificial Sequence
  Description of Artificial Sequence: Synthetic oligonucleotide
  Sense strand starting at position 3433 of SEQ ID NO: 1132
augagauucuguucccugu

SEQ ID NO: 90141 - RNA, 19 nt, Artificial Sequence
  Description of Artificial Sequence: Synthetic oligonucleotide
  Antisense strand to SEQ ID NO: 90060
acagggaacagaaucucau

SEQ ID NO: 90142 - RNA, 19 nt, Artificial Sequence
  Description of Artificial Sequence: Synthetic oligonucleotide
  Sense strand starting at position 3431 of SEQ ID NO: 1132
ggaugagauucuguucccu

SEQ ID NO: 90143 - RNA, 19 nt, Artificial Sequence
  Description of Artificial Sequence: Synthetic oligonucleotide
  Antisense strand to SEQ ID NO: 90062
agggaacagaaucucaucc

SEQ ID NO: 90144 - RNA, 19 nt, Artificial Sequence
  Description of Artificial Sequence: Synthetic oligonucleotide
  Sense strand starting at position 3062 of SEQ ID NO: 1132
ugucuugggaaguagacau

SEQ ID NO: 90145 - RNA, 19 nt, Artificial Sequence
  Description of Artificial Sequence: Synthetic oligonucleotide
  Antisense strand to SEQ ID NO: 90064
augucuacuucccaagaca

SEQ ID NO: 90146 - RNA, 19 nt, Artificial Sequence
  Description of Artificial Sequence: Synthetic oligonucleotide
  Sense strand starting at position 3056 of SEQ ID NO: 1132
gaaaccugucuugggaagu

SEQ ID NO: 90147 - RNA, 19 nt, Artificial Sequence
  Description of Artificial Sequence: Synthetic oligonucleotide
  Antisense strand to SEQ ID NO: 90066
acuucccaagacagguuuc

SEQ ID NO: 90148 - RNA, 19 nt, Artificial Sequence
  Description of Artificial Sequence: Synthetic oligonucleotide
  Sense strand starting at position 3053 of SEQ ID NO: 1132
uuugaaaccugucuuggga

SEQ ID NO: 90149 - RNA, 19 nt, Artificial Sequence
  Description of Artificial Sequence: Synthetic oligonucleotide
  Antisense strand to SEQ ID NO: 90068
ucccaagacagguuucaaa

SEQ ID NO: 90150 - RNA, 19 nt, Artificial Sequence
  Description of Artificial Sequence: Synthetic oligonucleotide
  Sense strand starting at position 2888 of SEQ ID NO: 1132
agagcuaaguaugacauuu

SEQ ID NO: 90151 - RNA, 19 nt, Artificial Sequence
  Description of Artificial Sequence: Synthetic oligonucleotide
  Antisense strand to SEQ ID NO: 90070
aaaugucauacuuagcucu

SEQ ID NO: 90152 - RNA, 19 nt, Artificial Sequence
  Description of Artificial Sequence: Synthetic oligonucleotide
  Sense strand starting at position 2887 of SEQ ID NO: 1132
aagagcuaaguaugacauu

SEQ ID NO: 90153 - RNA, 19 nt, Artificial Sequence
  Description of Artificial Sequence: Synthetic oligonucleotide
  Antisense strand to SEQ ID NO: 90072
aaugucauacuuagcucuu

SEQ ID NO: 90154 - RNA, 19 nt, Artificial Sequence
  Description of Artificial Sequence: Synthetic oligonucleotide
  Sense strand starting at position 2881 of SEQ ID NO: 1132
gcaagaaagagcuaaguau

SEQ ID NO: 90155 - RNA, 19 nt, Artificial Sequence
  Description of Artificial Sequence: Synthetic oligonucleotide
  Antisense strand to SEQ ID NO: 90074
auacuuagcucuuucuugc

SEQ ID NO: 90156 - RNA, 19 nt, Artificial Sequence
  Description of Artificial Sequence: Synthetic oligonucleotide
  Sense strand starting at position 2851 of SEQ ID NO: 1132
cacugagcuguuuguaaua

SEQ ID NO: 90157 - RNA, 19 nt, Artificial Sequence
  Description of Artificial Sequence: Synthetic oligonucleotide
  Antisense strand to SEQ ID NO: 90076
uauuacaaacagcucagug

SEQ ID NO: 90158 - RNA, 19 nt, Artificial Sequence
  Description of Artificial Sequence: Synthetic oligonucleotide
  Sense strand starting at position 2788 of SEQ ID NO: 1132
cugugaguaucaguucuca

SEQ ID NO: 90159 - RNA, 19 nt, Artificial Sequence
  Description of Artificial Sequence: Synthetic oligonucleotide
  Antisense strand to SEQ ID NO: 90078
ugagaacugauacucacag

SEQ ID NO: 90160 - RNA, 19 nt, Artificial Sequence
  Description of Artificial Sequence: Synthetic oligonucleotide
  Sense strand starting at position 2779 of SEQ ID NO: 1132
ugauacucacugugaguau

SEQ ID NO: 90161 - RNA, 19 nt, Artificial Sequence
  Description of Artificial Sequence: Synthetic oligonucleotide
  Antisense strand to SEQ ID NO: 90080
auacucacagugaguauca

SEQ ID NO: 90162 - RNA, 19 nt, Artificial Sequence
  Description of Artificial Sequence: Synthetic oligonucleotide
  Sense strand starting at position 2777 of SEQ ID NO: 1132
uaugauacucacugugagu

SEQ ID NO: 90163 - RNA, 19 nt, Artificial Sequence
  Description of Artificial Sequence: Synthetic oligonucleotide
  Antisense strand to SEQ ID NO: 90082
acucacagugaguaucaua

SEQ ID NO: 90164 - RNA, 19 nt, Artificial Sequence
  Description of Artificial Sequence: Synthetic oligonucleotide
  Sense strand starting at position 2776 of SEQ ID NO: 1132
cuaugauacucacugugag

SEQ ID NO: 90165 - RNA, 19 nt, Artificial Sequence
  Description of Artificial Sequence: Synthetic oligonucleotide
  Antisense strand to SEQ ID NO: 90084
cucacagugaguaucauag

SEQ ID NO: 90166 - RNA, 19 nt, Artificial Sequence
  Description of Artificial Sequence: Synthetic oligonucleotide
  Sense strand starting at position 2767 of SEQ ID NO: 1132
agaguauuacuaugauacu

SEQ ID NO: 90167 - RNA, 19 nt, Artificial Sequence
  Description of Artificial Sequence: Synthetic oligonucleotide
  Antisense strand to SEQ ID NO: 90086
aguaucauaguaauacucu

SEQ ID NO: 90168 - RNA, 19 nt, Artificial Sequence
  Description of Artificial Sequence: Synthetic oligonucleotide
  Sense strand starting at position 2764 of SEQ ID NO: 1132
gcuagaguauuacuaugau

SEQ ID NO: 90169 - RNA, 19 nt, Artificial Sequence
  Description of Artificial Sequence: Synthetic oligonucleotide
  Antisense strand to SEQ ID NO: 90088
aucauaguaauacucuagc

SEQ ID NO: 90170 - RNA, 19 nt, Artificial Sequence
  Description of Artificial Sequence: Synthetic oligonucleotide
  Sense strand starting at position 2722 of SEQ ID NO: 1132
cuggguaaucucugaaagu

SEQ ID NO: 90171 - RNA, 19 nt, Artificial Sequence
  Description of Artificial Sequence: Synthetic oligonucleotide
  Antisense strand to SEQ ID NO: 90090
acuuucagagauuacccag

SEQ ID NO: 90172 - RNA, 19 nt, Artificial Sequence
  Description of Artificial Sequence: Synthetic oligonucleotide
  Sense strand starting at position 2714 of SEQ ID NO: 1132
uaugauaacuggguaaucu

SEQ ID NO: 90173 - RNA, 19 nt, Artificial Sequence
  Description of Artificial Sequence: Synthetic oligonucleotide
  Antisense strand to SEQ ID NO: 90092
agauuacccaguuaucaua

SEQ ID NO: 90174 - RNA, 19 nt, Artificial Sequence
  Description of Artificial Sequence: Synthetic oligonucleotide
  Sense strand starting at position 2711 of SEQ ID NO: 1132
gcauaugauaacuggguaa

SEQ ID NO: 90175 - RNA, 19 nt, Artificial Sequence
  Description of Artificial Sequence: Synthetic oligonucleotide
  Antisense strand to SEQ ID NO: 90094
uuacccaguuaucauaugc

SEQ ID NO: 90176 - RNA, 19 nt, Artificial Sequence
  Description of Artificial Sequence: Synthetic oligonucleotide
  Sense strand starting at position 2710 of SEQ ID NO: 1132
ugcauaugauaacugggua

SEQ ID NO: 90177 - RNA, 19 nt, Artificial Sequence
  Description of Artificial Sequence: Synthetic oligonucleotide
  Antisense strand to SEQ ID NO: 90096
uacccaguuaucauaugca

SEQ ID NO: 90178 - RNA, 19 nt, Artificial Sequence
  Description of Artificial Sequence: Synthetic oligonucleotide
  Sense strand starting at position 2675 of SEQ ID NO: 1132
acuuguauugaaugugcua

SEQ ID NO: 90179 - RNA, 19 nt, Artificial Sequence
  Description of Artificial Sequence: Synthetic oligonucleotide
  Antisense strand to SEQ ID NO: 90098
uagcacauucaauacaagu

SEQ ID NO: 90180 - RNA, 19 nt, Artificial Sequence
  Description of Artificial Sequence: Synthetic oligonucleotide
  Sense strand starting at position 2616 of SEQ ID NO: 1132
gagaaugauugagaauaaa

SEQ ID NO: 90181 - RNA, 19 nt, Artificial Sequence
  Description of Artificial Sequence: Synthetic oligonucleotide
  Antisense strand to SEQ ID NO: 90100
uuuauucucaaucauucuc

SEQ ID NO: 90182 - RNA, 19 nt, Artificial Sequence
  Description of Artificial Sequence: Synthetic oligonucleotide
  Sense strand starting at position 2593 of SEQ ID NO: 1132
uugauucugucaccuaaag

SEQ ID NO: 90183 - RNA, 19 nt, Artificial Sequence
  Description of Artificial Sequence: Synthetic oligonucleotide
  Antisense strand to SEQ ID NO: 90102
cuuuaggugacagaaucaa

SEQ ID NO: 90184 - RNA, 19 nt, Artificial Sequence
  Description of Artificial Sequence: Synthetic oligonucleotide
  Sense strand starting at position 2589 of SEQ ID NO: 1132
ugaguugauucugucaccu

SEQ ID NO: 90185 - RNA, 19 nt, Artificial Sequence
  Description of Artificial Sequence: Synthetic oligonucleotide
  Antisense strand to SEQ ID NO: 90104
aggugacagaaucaacuca

SEQ ID NO: 90186 - RNA, 19 nt, Artificial Sequence
  Description of Artificial Sequence: Synthetic oligonucleotide
  Sense strand starting at position 2568 of SEQ ID NO: 1132
gcagauucgguggauuaaa

SEQ ID NO: 90187 - RNA, 19 nt, Artificial Sequence
  Description of Artificial Sequence: Synthetic oligonucleotide
  Antisense strand to SEQ ID NO: 90106
uuuaauccaccgaaucugc

SEQ ID NO: 90188 - RNA, 19 nt, Artificial Sequence
  Description of Artificial Sequence: Synthetic oligonucleotide
  Sense strand starting at position 2567 of SEQ ID NO: 1132
agcagauucgguggauuaa

SEQ ID NO: 90189 - RNA, 19 nt, Artificial Sequence
  Description of Artificial Sequence: Synthetic oligonucleotide
  Antisense strand to SEQ ID NO: 90108
uuaauccaccgaaucugcu

SEQ ID NO: 90190 - RNA, 19 nt, Artificial Sequence
  Description of Artificial Sequence: Synthetic oligonucleotide
  Sense strand starting at position 2565 of SEQ ID NO: 1132
caagcagauucgguggauu

SEQ ID NO: 90191 - RNA, 19 nt, Artificial Sequence
  Description of Artificial Sequence: Synthetic oligonucleotide
  Antisense strand to SEQ ID NO: 90110
aauccaccgaaucugcuug

SEQ ID NO: 90192 - RNA, 19 nt, Artificial Sequence
  Description of Artificial Sequence: Synthetic oligonucleotide
  Sense strand starting at position 2329 of SEQ ID NO: 1132
augcauguccucugaggaa

SEQ ID NO: 90193 - RNA, 19 nt, Artificial Sequence
  Description of Artificial Sequence: Synthetic oligonucleotide
  Antisense strand to SEQ ID NO: 90112
uuccucagaggacaugcau

SEQ ID NO: 90194 - RNA, 19 nt, Artificial Sequence
  Description of Artificial Sequence: Synthetic oligonucleotide
  Sense strand starting at position 1623 of SEQ ID NO: 1132
cuggguguugcaggacaua

SEQ ID NO: 90195 - RNA, 19 nt, Artificial Sequence
  Description of Artificial Sequence: Synthetic oligonucleotide
  Antisense strand to SEQ ID NO: 90114
uauguccugcaacacccag

SEQ ID NO: 90196 - RNA, 19 nt, Artificial Sequence
  Description of Artificial Sequence: Synthetic oligonucleotide
  Sense strand starting at position 1530 of SEQ ID NO: 1132
ggaaacugcgauugcucua

SEQ ID NO: 90197 - RNA, 19 nt, Artificial Sequence
  Description of Artificial Sequence: Synthetic oligonucleotide
  Antisense strand to SEQ ID NO: 90116
uagagcaaucgcaguuucc

SEQ ID NO: 90198 - RNA, 19 nt, Artificial Sequence
  Description of Artificial Sequence: Synthetic oligonucleotide
  Sense strand starting at position 689 of SEQ ID NO: 1132
cugaccuuuggaggacauu

SEQ ID NO: 90199 - RNA, 19 nt, Artificial Sequence
  Description of Artificial Sequence: Synthetic oligonucleotide
  Antisense strand to SEQ ID NO: 90118
aauguccuccaaaggucag

SEQ ID NO: 90200 - RNA, 19 nt, Artificial Sequence
  Description of Artificial Sequence: Synthetic oligonucleotide
  Sense strand starting at position 489 of SEQ ID NO: 1132
ucccaacgucuggauuaca

SEQ ID NO: 90201 - RNA, 19 nt, Artificial Sequence
  Description of Artificial Sequence: Synthetic oligonucleotide
  Antisense strand to SEQ ID NO: 90120
uguaauccagacguuggga

SEQ ID NO: 90202 - RNA, 19 nt, Artificial Sequence
  Description of Artificial Sequence: Synthetic oligonucleotide
  Sense strand starting at position 487 of SEQ ID NO: 1132
cuucccaacgucuggauua

SEQ ID NO: 90203 - RNA, 19 nt, Artificial Sequence
  Description of Artificial Sequence: Synthetic oligonucleotide
  Antisense strand to SEQ ID NO: 90122
uaauccagacguugggaag

SEQ ID NO: 90204 - RNA, 19 nt, Artificial Sequence
  Description of Artificial Sequence: Synthetic oligonucleotide
  Sense strand starting at position 348 of SEQ ID NO: 1132
cuguacuuuacaggaggaa

SEQ ID NO: 90205 - RNA, 19 nt, Artificial Sequence
  Description of Artificial Sequence: Synthetic oligonucleotide
  Antisense strand to SEQ ID NO: 90124
uuccuccuguaaaguacag

SEQ ID NO: 90206 - RNA, 19 nt, Artificial Sequence
  Description of Artificial Sequence: Synthetic oligonucleotide
  Sense strand starting at position 3979 of SEQ ID NO: 1133
uacggauauagaggugaau

SEQ ID NO: 90207 - RNA, 19 nt, Artificial Sequence
  Description of Artificial Sequence: Synthetic oligonucleotide
  Antisense strand to SEQ ID NO: 90126
auucaccucuauauccgua

SEQ ID NO: 90208 - RNA, 19 nt, Artificial Sequence
  Description of Artificial Sequence: Synthetic oligonucleotide
  Sense strand starting at position 3958 of SEQ ID NO: 1133
uggaucauguauguccaaa

SEQ ID NO: 90209 - RNA, 19 nt, Artificial Sequence
  Description of Artificial Sequence: Synthetic oligonucleotide
  Antisense strand to SEQ ID NO: 90128
uuuggacauacaugaucca

SEQ ID NO: 90210 - RNA, 19 nt, Artificial Sequence
  Description of Artificial Sequence: Synthetic oligonucleotide
  Sense strand starting at position 3957 of SEQ ID NO: 1133
uuggaucauguauguccaa

SEQ ID NO: 90211 - RNA, 19 nt, Artificial Sequence
  Description of Artificial Sequence: Synthetic oligonucleotide
  Antisense strand to SEQ ID NO: 90130
uuggacauacaugauccaa

SEQ ID NO: 90212 - RNA, 19 nt, Artificial Sequence
  Description of Artificial Sequence: Synthetic oligonucleotide
  Sense strand starting at position 3951 of SEQ ID NO: 1133
acauucuuggaucauguau

SEQ ID NO: 90213 - RNA, 19 nt, Artificial Sequence
  Description of Artificial Sequence: Synthetic oligonucleotide
  Antisense strand to SEQ ID NO: 90132
auacaugauccaagaaugu

SEQ ID NO: 90214 - RNA, 19 nt, Artificial Sequence
  Description of Artificial Sequence: Synthetic oligonucleotide
  Sense strand starting at position 3814 of SEQ ID NO: 1133
ggauucuauucuccuaguu

SEQ ID NO: 90215 - RNA, 19 nt, Artificial Sequence
  Description of Artificial Sequence: Synthetic oligonucleotide
  Antisense strand to SEQ ID NO: 90134
aacuaggagaauagaaucc

SEQ ID NO: 90216 - RNA, 19 nt, Artificial Sequence
  Description of Artificial Sequence: Synthetic oligonucleotide
  Sense strand starting at position 3813 of SEQ ID NO: 1133
gggauucuauucuccuagu

SEQ ID NO: 90217 - RNA, 19 nt, Artificial Sequence
  Description of Artificial Sequence: Synthetic oligonucleotide
  Antisense strand to SEQ ID NO: 90136
acuaggagaauagaauccc

SEQ ID NO: 90218 - RNA, 19 nt, Artificial Sequence
  Description of Artificial Sequence: Synthetic oligonucleotide
  Sense strand starting at position 3811 of SEQ ID NO: 1133
gagggauucuauucuccua

SEQ ID NO: 90219 - RNA, 19 nt, Artificial Sequence
  Description of Artificial Sequence: Synthetic oligonucleotide
  Antisense strand to SEQ ID NO: 90138
uaggagaauagaaucccuc

SEQ ID NO: 90220 - RNA, 19 nt, Artificial Sequence
  Description of Artificial Sequence: Synthetic oligonucleotide
  Sense strand starting at position 3776 of SEQ ID NO: 1133
gagaaaguauaguuuccca

SEQ ID NO: 90221 - RNA, 19 nt, Artificial Sequence
  Description of Artificial Sequence: Synthetic oligonucleotide
  Antisense strand to SEQ ID NO: 90140
ugggaaacuauacuuucuc

SEQ ID NO: 90222 - RNA, 19 nt, Artificial Sequence
  Description of Artificial Sequence: Synthetic oligonucleotide
  Sense strand starting at position 3547 of SEQ ID NO: 1133
gaguaaugacaauguucua

SEQ ID NO: 90223 - RNA, 19 nt, Artificial Sequence
  Description of Artificial Sequence: Synthetic oligonucleotide
  Antisense strand to SEQ ID NO: 90142
uagaacauugucauuacuc

SEQ ID NO: 90224 - RNA, 19 nt, Artificial Sequence
  Description of Artificial Sequence: Synthetic oligonucleotide
  Sense strand starting at position 3538 of SEQ ID NO: 1133
uucuuuguggaguaaugac

SEQ ID NO: 90225 - RNA, 19 nt, Artificial Sequence
  Description of Artificial Sequence: Synthetic oligonucleotide
  Antisense strand to SEQ ID NO: 90144
gucauuacuccacaaagaa

SEQ ID NO: 90226 - RNA, 19 nt, Artificial Sequence
  Description of Artificial Sequence: Synthetic oligonucleotide
  Sense strand starting at position 3413 of SEQ ID NO: 1133
ggacgagauucuguucccu

SEQ ID NO: 90227 - RNA, 19 nt, Artificial Sequence
  Description of Artificial Sequence: Synthetic oligonucleotide
  Antisense strand to SEQ ID NO: 90146
agggaacagaaucucgucc

SEQ ID NO: 90228 - RNA, 19 nt, Artificial Sequence
  Description of Artificial Sequence: Synthetic oligonucleotide
  Sense strand starting at position 3039 of SEQ ID NO: 1133
gaaaccucucuugggaagu

SEQ ID NO: 90229 - RNA, 19 nt, Artificial Sequence
  Description of Artificial Sequence: Synthetic oligonucleotide
  Antisense strand to SEQ ID NO: 90148
acuucccaagagagguuuc

SEQ ID NO: 90230 - RNA, 19 nt, Artificial Sequence
  Description of Artificial Sequence: Synthetic oligonucleotide
  Sense strand starting at position 3036 of SEQ ID NO: 1133
uuugaaaccucucuuggga

SEQ ID NO: 90231 - RNA, 19 nt, Artificial Sequence
  Description of Artificial Sequence: Synthetic oligonucleotide
  Antisense strand to SEQ ID NO: 90150
ucccaagagagguuucaaa

SEQ ID NO: 90232 - RNA, 19 nt, Artificial Sequence
  Description of Artificial Sequence: Synthetic oligonucleotide
  Sense strand starting at position 3027 of SEQ ID NO: 1133
cugagauuauuugaaaccu

SEQ ID NO: 90233 - RNA, 19 nt, Artificial Sequence
  Description of Artificial Sequence: Synthetic oligonucleotide
  Antisense strand to SEQ ID NO: 90152
agguuucaaauaaucucag

SEQ ID NO: 90234 - RNA, 19 nt, Artificial Sequence
  Description of Artificial Sequence: Synthetic oligonucleotide
  Sense strand starting at position 2974 of SEQ ID NO: 1133
auuaauugccuguauagag

SEQ ID NO: 90235 - RNA, 19 nt, Artificial Sequence
  Description of Artificial Sequence: Synthetic oligonucleotide
  Antisense strand to SEQ ID NO: 90154
cucuauacaggcaauuaau

SEQ ID NO: 90236 - RNA, 19 nt, Artificial Sequence
  Description of Artificial Sequence: Synthetic oligonucleotide
  Sense strand starting at position 2885 of SEQ ID NO: 1133
acacuauaugccugauaga

SEQ ID NO: 90237 - RNA, 19 nt, Artificial Sequence
  Description of Artificial Sequence: Synthetic oligonucleotide
  Antisense strand to SEQ ID NO: 90156
ucuaucaggcauauagugu

SEQ ID NO: 90238 - RNA, 19 nt, Artificial Sequence
  Description of Artificial Sequence: Synthetic oligonucleotide
  Sense strand starting at position 2801 of SEQ ID NO: 1133
uguaauggccauuauaaac

SEQ ID NO: 90239 - RNA, 19 nt, Artificial Sequence
  Description of Artificial Sequence: Synthetic oligonucleotide
  Antisense strand to SEQ ID NO: 90158
guuuauaauggccauuaca

SEQ ID NO: 90240 - RNA, 19 nt, Artificial Sequence
  Description of Artificial Sequence: Synthetic oligonucleotide
  Sense strand starting at position 2798 of SEQ ID NO: 1133
auauguaauggccauuaua

SEQ ID NO: 90241 - RNA, 19 nt, Artificial Sequence
  Description of Artificial Sequence: Synthetic oligonucleotide
  Antisense strand to SEQ ID NO: 90160
uauaauggccauuacauau

SEQ ID NO: 90242 - RNA, 19 nt, Artificial Sequence
  Description of Artificial Sequence: Synthetic oligonucleotide
  Sense strand starting at position 2784 of SEQ ID NO: 1133
gaguaucaguucucauaug

SEQ ID NO: 90243 - RNA, 19 nt, Artificial Sequence
  Description of Artificial Sequence: Synthetic oligonucleotide
  Antisense strand to SEQ ID NO: 90162
cauaugagaacugauacuc

SEQ ID NO: 90244 - RNA, 19 nt, Artificial Sequence
  Description of Artificial Sequence: Synthetic oligonucleotide
  Sense strand starting at position 2780 of SEQ ID NO: 1133
cuaugaguaucaguucuca

SEQ ID NO: 90245 - RNA, 19 nt, Artificial Sequence
  Description of Artificial Sequence: Synthetic oligonucleotide
  Antisense strand to SEQ ID NO: 90164
ugagaacugauacucauag

SEQ ID NO: 90246 - RNA, 19 nt, Artificial Sequence
  Description of Artificial Sequence: Synthetic oligonucleotide
  Sense strand starting at position 2771 of SEQ ID NO: 1133
ugauacucacuaugaguau

SEQ ID NO: 90247 - RNA, 19 nt, Artificial Sequence
  Description of Artificial Sequence: Synthetic oligonucleotide
  Antisense strand to SEQ ID NO: 90166
auacucauagugaguauca

SEQ ID NO: 90248 - RNA, 19 nt, Artificial Sequence
  Description of Artificial Sequence: Synthetic oligonucleotide
  Sense strand starting at position 2714 of SEQ ID NO: 1133
cuugguaaccuauagaagu

SEQ ID NO: 90249 - RNA, 19 nt, Artificial Sequence
  Description of Artificial Sequence: Synthetic oligonucleotide
  Antisense strand to SEQ ID NO: 90168
acuucuauagguuaccaag

SEQ ID NO: 90250 - RNA, 19 nt, Artificial Sequence
  Description of Artificial Sequence: Synthetic oligonucleotide
  Sense strand starting at position 2702 of SEQ ID NO: 1133
ugcauaugauaacuuggua

SEQ ID NO: 90251 - RNA, 19 nt, Artificial Sequence
  Description of Artificial Sequence: Synthetic oligonucleotide
  Antisense strand to SEQ ID NO: 90170
uaccaaguuaucauaugca

SEQ ID NO: 90252 - RNA, 19 nt, Artificial Sequence
  Description of Artificial Sequence: Synthetic oligonucleotide
  Sense strand starting at position 2676 of SEQ ID NO: 1133
gaauccauugccggaauca

SEQ ID NO: 90253 - RNA, 19 nt, Artificial Sequence
  Description of Artificial Sequence: Synthetic oligonucleotide
  Antisense strand to SEQ ID NO: 90172
ugauuccggcaauggauuc

SEQ ID NO: 90254 - RNA, 19 nt, Artificial Sequence
  Description of Artificial Sequence: Synthetic oligonucleotide
  Sense strand starting at position 2672 of SEQ ID NO: 1133
uauugaauccauugccgga

SEQ ID NO: 90255 - RNA, 19 nt, Artificial Sequence
  Description of Artificial Sequence: Synthetic oligonucleotide
  Antisense strand to SEQ ID NO: 90174
uccggcaauggauucaaua

SEQ ID NO: 90256 - RNA, 19 nt, Artificial Sequence
  Description of Artificial Sequence: Synthetic oligonucleotide
  Sense strand starting at position 2650 of SEQ ID NO: 1133
uuuccuuuagucgaagcaa

SEQ ID NO: 90257 - RNA, 19 nt, Artificial Sequence
  Description of Artificial Sequence: Synthetic oligonucleotide
  Antisense strand to SEQ ID NO: 90176
uugcuucgacuaaaggaaa

SEQ ID NO: 90258 - RNA, 19 nt, Artificial Sequence
  Description of Artificial Sequence: Synthetic oligonucleotide
  Sense strand starting at position 2608 of SEQ ID NO: 1133
gagaaugauugagaauaag

SEQ ID NO: 90259 - RNA, 19 nt, Artificial Sequence
  Description of Artificial Sequence: Synthetic oligonucleotide
  Antisense strand to SEQ ID NO: 90178
cuuauucucaaucauucuc

SEQ ID NO: 90260 - RNA, 19 nt, Artificial Sequence
  Description of Artificial Sequence: Synthetic oligonucleotide
  Sense strand starting at position 2336 of SEQ ID NO: 1133
gagguuacaucagcucuga

SEQ ID NO: 90261 - RNA, 19 nt, Artificial Sequence
  Description of Artificial Sequence: Synthetic oligonucleotide
  Antisense strand to SEQ ID NO: 90180
ucagagcugauguaaccuc

SEQ ID NO: 90262 - RNA, 19 nt, Artificial Sequence
  Description of Artificial Sequence: Synthetic oligonucleotide
  Sense strand starting at position 1850 of SEQ ID NO: 1133
gaggcaaacugaguccuau

SEQ ID NO: 90263 - RNA, 19 nt, Artificial Sequence
  Description of Artificial Sequence: Synthetic oligonucleotide
  Antisense strand to SEQ ID NO: 90182
auaggacucaguuugccuc

SEQ ID NO: 90264 - RNA, 19 nt, Artificial Sequence
  Description of Artificial Sequence: Synthetic oligonucleotide
  Sense strand starting at position 1731 of SEQ ID NO: 1133
ugcaaaucugcccaagaug

SEQ ID NO: 90265 - RNA, 19 nt, Artificial Sequence
  Description of Artificial Sequence: Synthetic oligonucleotide
  Antisense strand to SEQ ID NO: 90184
caucuugggcagauuugca

SEQ ID NO: 90266 - RNA, 19 nt, Artificial Sequence
  Description of Artificial Sequence: Synthetic oligonucleotide
  Sense strand starting at position 1705 of SEQ ID NO: 1133
ccugaagcauuugacaauu

SEQ ID NO: 90267 - RNA, 19 nt, Artificial Sequence
  Description of Artificial Sequence: Synthetic oligonucleotide
  Antisense strand to SEQ ID NO: 90186
aauugucaaaugcuucagg

SEQ ID NO: 90268 - RNA, 19 nt, Artificial Sequence
  Description of Artificial Sequence: Synthetic oligonucleotide
  Sense strand starting at position 1544 of SEQ ID NO: 1133
cugggauugcucuaucuuc

SEQ ID NO: 90269 - RNA, 19 nt, Artificial Sequence
  Description of Artificial Sequence: Synthetic oligonucleotide
  Antisense strand to SEQ ID NO: 90188
gaagauagagcaaucccag

SEQ ID NO: 90270 - RNA, 19 nt, Artificial Sequence
  Description of Artificial Sequence: Synthetic oligonucleotide
  Sense strand starting at position 715 of SEQ ID NO: 1133
uuagaaaucucagaagaga

SEQ ID NO: 90271 - RNA, 19 nt, Artificial Sequence
  Description of Artificial Sequence: Synthetic oligonucleotide
  Antisense strand to SEQ ID NO: 90190
ucucuucugagauuucuaa

SEQ ID NO: 90272 - RNA, 19 nt, Artificial Sequence
  Description of Artificial Sequence: Synthetic oligonucleotide
  Sense strand starting at position 694 of SEQ ID NO: 1133
ggcccugaccguuagaaga

SEQ ID NO: 90273 - RNA, 19 nt, Artificial Sequence
  Description of Artificial Sequence: Synthetic oligonucleotide
  Antisense strand to SEQ ID NO: 90192
ucuucuaacggucagggcc

SEQ ID NO: 90274 - RNA, 19 nt, Artificial Sequence
  Description of Artificial Sequence: Synthetic oligonucleotide
  Sense strand starting at position 564 of SEQ ID NO: 1133
ugccguugccagaggugau

SEQ ID NO: 90275 - RNA, 19 nt, Artificial Sequence
  Description of Artificial Sequence: Synthetic oligonucleotide
  Antisense strand to SEQ ID NO: 90194
aucaccucuggcaacggca

SEQ ID NO: 90276 - RNA, 19 nt, Artificial Sequence
  Description of Artificial Sequence: Synthetic oligonucleotide
  Sense strand starting at position 526 of SEQ ID NO: 1133
agaacauaugucuggcuua

SEQ ID NO: 90277 - RNA, 19 nt, Artificial Sequence
  Description of Artificial Sequence: Synthetic oligonucleotide
  Antisense strand to SEQ ID NO: 90196
uaagccagacauauguucu

SEQ ID NO: 90278 - RNA, 19 nt, Artificial Sequence
  Description of Artificial Sequence: Synthetic oligonucleotide
  Sense strand starting at position 304 of SEQ ID NO: 1133
agugaaucuuaaccagacu

SEQ ID NO: 90279 - RNA, 19 nt, Artificial Sequence
  Description of Artificial Sequence: Synthetic oligonucleotide
  Antisense strand to SEQ ID NO: 90198
agucugguuaagauucacu

SEQ ID NO: 90280 - RNA, 19 nt, Artificial Sequence
  Description of Artificial Sequence: Synthetic oligonucleotide
  Sense strand starting at position 154 of SEQ ID NO: 1133
agaaucucucugcacugaa

SEQ ID NO: 90281 - RNA, 19 nt, Artificial Sequence
  Description of Artificial Sequence: Synthetic oligonucleotide
  Antisense strand to SEQ ID NO: 90200
uucagugcagagagauucu

SEQ ID NO: 90282 - RNA, 19 nt, Artificial Sequence
  Description of Artificial Sequence: Synthetic oligonucleotide
  Sense strand starting at position 61 of SEQ ID NO: 1133
aucucagacugguuaaaca

SEQ ID NO: 90283 - RNA, 19 nt, Artificial Sequence
  Description of Artificial Sequence: Synthetic oligonucleotide
  Antisense strand to SEQ ID NO: 90202
uguuuaaccagucugagau

SEQ ID NO: 90284 - RNA, 19 nt, Artificial Sequence
  Description of Artificial Sequence: Synthetic oligonucleotide
  Sense strand starting at position 24 of SEQ ID NO: 1133
cagugcagugggugauuua

SEQ ID NO: 90285 - RNA, 19 nt, Artificial Sequence
  Description of Artificial Sequence: Synthetic oligonucleotide
  Antisense strand to SEQ ID NO: 90204
uaaaucacccacugcacug

SEQ ID NO: 90286 - RNA, 19 nt, Artificial Sequence
  Description of Artificial Sequence: Synthetic oligonucleotide
  Sense strand starting at position 178 of SEQ ID NO: 1134
cacucuugucagggaaaca

SEQ ID NO: 90287 - RNA, 19 nt, Artificial Sequence
  Description of Artificial Sequence: Synthetic oligonucleotide
  Antisense strand to SEQ ID NO: 90206
uguuucccugacaagagug

SEQ ID NO: 90288 - RNA, 19 nt, Artificial Sequence
  Description of Artificial Sequence: Synthetic oligonucleotide
  Sense strand starting at position 214 of SEQ ID NO: 1134
ggauaagucccauggacuu

SEQ ID NO: 90289 - RNA, 19 nt, Artificial Sequence
  Description of Artificial Sequence: Synthetic oligonucleotide
  Antisense strand to SEQ ID NO: 90208
aaguccaugggacuuaucc

SEQ ID NO: 90290 - RNA, 19 nt, Artificial Sequence
  Description of Artificial Sequence: Synthetic oligonucleotide
  Sense strand starting at position 245 of SEQ ID NO: 1134
uguaacaguccauaucauu

SEQ ID NO: 90291 - RNA, 19 nt, Artificial Sequence
  Description of Artificial Sequence: Synthetic oligonucleotide
  Antisense strand to SEQ ID NO: 90210
aaugauauggacuguuaca

SEQ ID NO: 90292 - RNA, 19 nt, Artificial Sequence
  Description of Artificial Sequence: Synthetic oligonucleotide
  Sense strand starting at position 298 of SEQ ID NO: 1134
gcaucucaaggaugggaau

SEQ ID NO: 90293 - RNA, 19 nt, Artificial Sequence
  Description of Artificial Sequence: Synthetic oligonucleotide
  Antisense strand to SEQ ID NO: 90212
auucccauccuugagaugc

SEQ ID NO: 90294 - RNA, 19 nt, Artificial Sequence
  Description of Artificial Sequence: Synthetic oligonucleotide
  Sense strand starting at position 329 of SEQ ID NO: 1134
auuucugaguccuuugugu

SEQ ID NO: 90295 - RNA, 19 nt, Artificial Sequence
  Description of Artificial Sequence: Synthetic oligonucleotide
  Antisense strand to SEQ ID NO: 90214
acacaaaggacucagaaau

SEQ ID NO: 90296 - RNA, 19 nt, Artificial Sequence
  Description of Artificial Sequence: Synthetic oligonucleotide
  Sense strand starting at position 334 of SEQ ID NO: 1134
ugaguccuuugugucaaca

SEQ ID NO: 90297 - RNA, 19 nt, Artificial Sequence
  Description of Artificial Sequence: Synthetic oligonucleotide
  Antisense strand to SEQ ID NO: 90216
uguugacacaaaggacuca

SEQ ID NO: 90298 - RNA, 19 nt, Artificial Sequence
  Description of Artificial Sequence: Synthetic oligonucleotide
  Sense strand starting at position 357 of SEQ ID NO: 1134
ucugaacuguguccucaau

SEQ ID NO: 90299 - RNA, 19 nt, Artificial Sequence
  Description of Artificial Sequence: Synthetic oligonucleotide
  Antisense strand to SEQ ID NO: 90218
auugaggacacaguucaga

SEQ ID NO: 90300 - RNA, 19 nt, Artificial Sequence
  Description of Artificial Sequence: Synthetic oligonucleotide
  Sense strand starting at position 359 of SEQ ID NO: 1134
ugaacuguguccucaauuc

SEQ ID NO: 90301 - RNA, 19 nt, Artificial Sequence
  Description of Artificial Sequence: Synthetic oligonucleotide
  Antisense strand to SEQ ID NO: 90220
gaauugaggacacaguuca

SEQ ID NO: 90302 - RNA, 19 nt, Artificial Sequence
  Description of Artificial Sequence: Synthetic oligonucleotide
  Sense strand starting at position 374 of SEQ ID NO: 1134
auuccuguuguuugaauga

SEQ ID NO: 90303 - RNA, 19 nt, Artificial Sequence
  Description of Artificial Sequence: Synthetic oligonucleotide
  Antisense strand to SEQ ID NO: 90222
ucauucaaacaacaggaau

SEQ ID NO: 90304 - RNA, 19 nt, Artificial Sequence
  Description of Artificial Sequence: Synthetic oligonucleotide
  Sense strand starting at position 438 of SEQ ID NO: 1134
cuugauaaucaaggccaga

SEQ ID NO: 90305 - RNA, 19 nt, Artificial Sequence
  Description of Artificial Sequence: Synthetic oligonucleotide
  Antisense strand to SEQ ID NO: 90224
ucuggccuugauuaucaag

SEQ ID NO: 90306 - RNA, 19 nt, Artificial Sequence
  Description of Artificial Sequence: Synthetic oligonucleotide
  Sense strand starting at position 558 of SEQ ID NO: 1134
agagcuguuacuuggagua

SEQ ID NO: 90307 - RNA, 19 nt, Artificial Sequence
  Description of Artificial Sequence: Synthetic oligonucleotide
  Antisense strand to SEQ ID NO: 90226
uacuccaaguaacagcucu

SEQ ID NO: 90308 - RNA, 19 nt, Artificial Sequence
  Description of Artificial Sequence: Synthetic oligonucleotide
  Sense strand starting at position 570 of SEQ ID NO: 1134
uggaguagaguccaucacu

SEQ ID NO: 90309 - RNA, 19 nt, Artificial Sequence
  Description of Artificial Sequence: Synthetic oligonucleotide
  Antisense strand to SEQ ID NO: 90228
agugauggacucuacucca

SEQ ID NO: 90310 - RNA, 19 nt, Artificial Sequence
  Description of Artificial Sequence: Synthetic oligonucleotide
  Sense strand starting at position 573 of SEQ ID NO: 1134
aguagaguccaucacuauc

SEQ ID NO: 90311 - RNA, 19 nt, Artificial Sequence
  Description of Artificial Sequence: Synthetic oligonucleotide
  Antisense strand to SEQ ID NO: 90230
gauagugauggacucuacu

SEQ ID NO: 90312 - RNA, 19 nt, Artificial Sequence
  Description of Artificial Sequence: Synthetic oligonucleotide
  Sense strand starting at position 749 of SEQ ID NO: 1134
agggucagggucugagaaa

SEQ ID NO: 90313 - RNA, 19 nt, Artificial Sequence
  Description of Artificial Sequence: Synthetic oligonucleotide
  Antisense strand to SEQ ID NO: 90232
uuucucagacccugacccu

SEQ ID NO: 90314 - RNA, 19 nt, Artificial Sequence
  Description of Artificial Sequence: Synthetic oligonucleotide
  Sense strand starting at position 891 of SEQ ID NO: 1134
ggaucacugagcugagaug

SEQ ID NO: 90315 - RNA, 19 nt, Artificial Sequence
  Description of Artificial Sequence: Synthetic oligonucleotide
  Antisense strand to SEQ ID NO: 90234
caucucagcucagugaucc

SEQ ID NO: 90316 - RNA, 19 nt, Artificial Sequence
  Description of Artificial Sequence: Synthetic oligonucleotide
  Sense strand starting at position 952 of SEQ ID NO: 1134
gugccuaacccucaaguau

SEQ ID NO: 90317 - RNA, 19 nt, Artificial Sequence
  Description of Artificial Sequence: Synthetic oligonucleotide
  Antisense strand to SEQ ID NO: 90236
auacuugaggguuaggcac

SEQ ID NO: 90318 - RNA, 19 nt, Artificial Sequence
  Description of Artificial Sequence: Synthetic oligonucleotide
  Sense strand starting at position 1148 of SEQ ID NO: 1134
gaguaucagaguuggagga

SEQ ID NO: 90319 - RNA, 19 nt, Artificial Sequence
  Description of Artificial Sequence: Synthetic oligonucleotide
  Antisense strand to SEQ ID NO: 90238
uccuccaacucugauacuc

SEQ ID NO: 90320 - RNA, 19 nt, Artificial Sequence
  Description of Artificial Sequence: Synthetic oligonucleotide
  Sense strand starting at position 1149 of SEQ ID NO: 1134
aguaucagaguuggaggaa

SEQ ID NO: 90321 - RNA, 19 nt, Artificial Sequence
  Description of Artificial Sequence: Synthetic oligonucleotide
  Antisense strand to SEQ ID NO: 90240
uuccuccaacucugauacu

SEQ ID NO: 90322 - RNA, 19 nt, Artificial Sequence
  Description of Artificial Sequence: Synthetic oligonucleotide
  Sense strand starting at position 1324 of SEQ ID NO: 1134
uguccuugaccuugugaaa

SEQ ID NO: 90323 - RNA, 19 nt, Artificial Sequence
  Description of Artificial Sequence: Synthetic oligonucleotide
  Antisense strand to SEQ ID NO: 90242
uuucacaaggucaaggaca

SEQ ID NO: 90324 - RNA, 19 nt, Artificial Sequence
  Description of Artificial Sequence: Synthetic oligonucleotide
  Sense strand starting at position 1404 of SEQ ID NO: 1134
ggguguaugacccacuugu

SEQ ID NO: 90325 - RNA, 19 nt, Artificial Sequence
  Description of Artificial Sequence: Synthetic oligonucleotide
  Antisense strand to SEQ ID NO: 90244
acaagugggucauacaccc

SEQ ID NO: 90326 - RNA, 19 nt, Artificial Sequence
  Description of Artificial Sequence: Synthetic oligonucleotide
  Sense strand starting at position 1431 of SEQ ID NO: 1134
cuaagauaggccuauguac

SEQ ID NO: 90327 - RNA, 19 nt, Artificial Sequence
  Description of Artificial Sequence: Synthetic oligonucleotide
  Antisense strand to SEQ ID NO: 90246
guacauaggccuaucuuag

SEQ ID NO: 90328 - RNA, 19 nt, Artificial Sequence
  Description of Artificial Sequence: Synthetic oligonucleotide
  Sense strand starting at position 1496 of SEQ ID NO: 1134
cagagcuugcaacgagaaa

SEQ ID NO: 90329 - RNA, 19 nt, Artificial Sequence
  Description of Artificial Sequence: Synthetic oligonucleotide
  Antisense strand to SEQ ID NO: 90248
uuucucguugcaagcucug

SEQ ID NO: 90330 - RNA, 19 nt, Artificial Sequence
  Description of Artificial Sequence: Synthetic oligonucleotide
  Sense strand starting at position 2091 of SEQ ID NO: 1134
gguuuaauuguggaucccu

SEQ ID NO: 90331 - RNA, 19 nt, Artificial Sequence
  Description of Artificial Sequence: Synthetic oligonucleotide
  Antisense strand to SEQ ID NO: 90250
agggauccacaauuaaacc

SEQ ID NO: 90332 - RNA, 19 nt, Artificial Sequence
  Description of Artificial Sequence: Synthetic oligonucleotide
  Sense strand starting at position 2157 of SEQ ID NO: 1134
ugcaaacggaucugaaguu

SEQ ID NO: 90333 - RNA, 19 nt, Artificial Sequence
  Description of Artificial Sequence: Synthetic oligonucleotide
  Antisense strand to SEQ ID NO: 90252
aacuucagauccguuugca

SEQ ID NO: 90334 - RNA, 19 nt, Artificial Sequence
  Description of Artificial Sequence: Synthetic oligonucleotide
  Sense strand starting at position 2666 of SEQ ID NO: 1134
aggagaagguucuuccuga

SEQ ID NO: 90335 - RNA, 19 nt, Artificial Sequence
  Description of Artificial Sequence: Synthetic oligonucleotide
  Antisense strand to SEQ ID NO: 90254
ucaggaagaaccuucuccu

SEQ ID NO: 90336 - RNA, 19 nt, Artificial Sequence
  Description of Artificial Sequence: Synthetic oligonucleotide
  Sense strand starting at position 2667 of SEQ ID NO: 1134
ggagaagguucuuccugag

SEQ ID NO: 90337 - RNA, 19 nt, Artificial Sequence
  Description of Artificial Sequence: Synthetic oligonucleotide
  Antisense strand to SEQ ID NO: 90256
cucaggaagaaccuucucc

SEQ ID NO: 90338 - RNA, 19 nt, Artificial Sequence
  Description of Artificial Sequence: Synthetic oligonucleotide
  Sense strand starting at position 2671 of SEQ ID NO: 1134
aagguucuuccugagguga

SEQ ID NO: 90339 - RNA, 19 nt, Artificial Sequence
  Description of Artificial Sequence: Synthetic oligonucleotide
  Antisense strand to SEQ ID NO: 90258
ucaccucaggaagaaccuu

SEQ ID NO: 90340 - RNA, 19 nt, Artificial Sequence
  Description of Artificial Sequence: Synthetic oligonucleotide
  Sense strand starting at position 2686 of SEQ ID NO: 1134
gugauuguggacugaggaa

SEQ ID NO: 90341 - RNA, 19 nt, Artificial Sequence
  Description of Artificial Sequence: Synthetic oligonucleotide
  Antisense strand to SEQ ID NO: 90260
uuccucaguccacaaucac

SEQ ID NO: 90342 - RNA, 19 nt, Artificial Sequence
  Description of Artificial Sequence: Synthetic oligonucleotide
  Sense strand starting at position 2865 of SEQ ID NO: 1134
aggaaaucucgaugacggu

SEQ ID NO: 90343 - RNA, 19 nt, Artificial Sequence
  Description of Artificial Sequence: Synthetic oligonucleotide
  Antisense strand to SEQ ID NO: 90262
accgucaucgagauuuccu

SEQ ID NO: 90344 - RNA, 19 nt, Artificial Sequence
  Description of Artificial Sequence: Synthetic oligonucleotide
  Sense strand starting at position 3160 of SEQ ID NO: 1134
uguggauuccuuuacauag

SEQ ID NO: 90345 - RNA, 19 nt, Artificial Sequence
  Description of Artificial Sequence: Synthetic oligonucleotide
  Antisense strand to SEQ ID NO: 90264
cuauguaaaggaauccaca

SEQ ID NO: 90346 - RNA, 19 nt, Artificial Sequence
  Description of Artificial Sequence: Synthetic oligonucleotide
  Sense strand starting at position 3281 of SEQ ID NO: 1134
gagguagugucuucaggga

SEQ ID NO: 90347 - RNA, 19 nt, Artificial Sequence
  Description of Artificial Sequence: Synthetic oligonucleotide
  Antisense strand to SEQ ID NO: 90266
ucccugaagacacuaccuc

SEQ ID NO: 90348 - RNA, 19 nt, Artificial Sequence
  Description of Artificial Sequence: Synthetic oligonucleotide
  Sense strand starting at position 3295 of SEQ ID NO: 1134
agggaauaucauggcaucu

SEQ ID NO: 90349 - RNA, 19 nt, Artificial Sequence
  Description of Artificial Sequence: Synthetic oligonucleotide
  Antisense strand to SEQ ID NO: 90268
agaugccaugauauucccu

SEQ ID NO: 90350 - RNA, 19 nt, Artificial Sequence
  Description of Artificial Sequence: Synthetic oligonucleotide
  Sense strand starting at position 3455 of SEQ ID NO: 1134
ugaaaugugcaaggcugaa

SEQ ID NO: 90351 - RNA, 19 nt, Artificial Sequence
  Description of Artificial Sequence: Synthetic oligonucleotide
  Antisense strand to SEQ ID NO: 90270
uucagccuugcacauuuca

SEQ ID NO: 90352 - RNA, 19 nt, Artificial Sequence
  Description of Artificial Sequence: Synthetic oligonucleotide
  Sense strand starting at position 3562 of SEQ ID NO: 1134
cuuaaugaauaccugugau

SEQ ID NO: 90353 - RNA, 19 nt, Artificial Sequence
  Description of Artificial Sequence: Synthetic oligonucleotide
  Antisense strand to SEQ ID NO: 90272
aucacagguauucauuaag

SEQ ID NO: 90354 - RNA, 19 nt, Artificial Sequence
  Description of Artificial Sequence: Synthetic oligonucleotide
  Sense strand starting at position 3574 of SEQ ID NO: 1134
cugugauaaugcuugaagu

SEQ ID NO: 90355 - RNA, 19 nt, Artificial Sequence
  Description of Artificial Sequence: Synthetic oligonucleotide
  Antisense strand to SEQ ID NO: 90274
acuucaagcauuaucacag

SEQ ID NO: 90356 - RNA, 19 nt, Artificial Sequence
  Description of Artificial Sequence: Synthetic oligonucleotide
  Sense strand starting at position 3575 of SEQ ID NO: 1134
ugugauaaugcuugaaguu

SEQ ID NO: 90357 - RNA, 19 nt, Artificial Sequence
  Description of Artificial Sequence: Synthetic oligonucleotide
  Antisense strand to SEQ ID NO: 90276
aacuucaagcauuaucaca

SEQ ID NO: 90358 - RNA, 19 nt, Artificial Sequence
  Description of Artificial Sequence: Synthetic oligonucleotide
  Sense strand starting at position 3576 of SEQ ID NO: 1134
gugauaaugcuugaaguuu

SEQ ID NO: 90359 - RNA, 19 nt, Artificial Sequence
  Description of Artificial Sequence: Synthetic oligonucleotide
  Antisense strand to SEQ ID NO: 90278
aaacuucaagcauuaucac

SEQ ID NO: 90360 - RNA, 19 nt, Artificial Sequence
  Description of Artificial Sequence: Synthetic oligonucleotide
  Sense strand starting at position 3582 of SEQ ID NO: 1134
augcuugaaguuuguauau

SEQ ID NO: 90361 - RNA, 19 nt, Artificial Sequence
  Description of Artificial Sequence: Synthetic oligonucleotide
  Antisense strand to SEQ ID NO: 90280
auauacaaacuucaagcau

SEQ ID NO: 90362 - RNA, 19 nt, Artificial Sequence
  Description of Artificial Sequence: Synthetic oligonucleotide
  Sense strand starting at position 3878 of SEQ ID NO: 1134
ugaagaugcuuguucuuug

SEQ ID NO: 90363 - RNA, 19 nt, Artificial Sequence
  Description of Artificial Sequence: Synthetic oligonucleotide
  Antisense strand to SEQ ID NO: 90282
caaagaacaagcaucuuca

SEQ ID NO: 90364 - RNA, 19 nt, Artificial Sequence
  Description of Artificial Sequence: Synthetic oligonucleotide
  Sense strand starting at position 3917 of SEQ ID NO: 1134
ggauauuaguuccuucuuc

SEQ ID NO: 90365 - RNA, 19 nt, Artificial Sequence
  Description of Artificial Sequence: Synthetic oligonucleotide
  Antisense strand to SEQ ID NO: 90284
gaagaaggaacuaauaucc

SEQ ID NO: 90366 - RNA, 19 nt, Artificial Sequence
  Description of Artificial Sequence: Synthetic oligonucleotide
  Sense strand starting at position 3968 of SEQ ID NO: 1135
ccucuugcugaagggauau

SEQ ID NO: 90367 - RNA, 19 nt, Artificial Sequence
  Description of Artificial Sequence: Synthetic oligonucleotide
  Antisense strand to SEQ ID NO: 90286
auaucccuucagcaagagg

SEQ ID NO: 90368 - RNA, 19 nt, Artificial Sequence
  Description of Artificial Sequence: Synthetic oligonucleotide
  Sense strand starting at position 3882 of SEQ ID NO: 1135
aggaauguggcuugggaau

SEQ ID NO: 90369 - RNA, 19 nt, Artificial Sequence
  Description of Artificial Sequence: Synthetic oligonucleotide
  Antisense strand to SEQ ID NO: 90288
auucccaagccacauuccu

SEQ ID NO: 90370 - RNA, 19 nt, Artificial Sequence
  Description of Artificial Sequence: Synthetic oligonucleotide
  Sense strand starting at position 3869 of SEQ ID NO: 1135
gugaauugucucuaggaau

SEQ ID NO: 90371 - RNA, 19 nt, Artificial Sequence
  Description of Artificial Sequence: Synthetic oligonucleotide
  Antisense strand to SEQ ID NO: 90290
auuccuagagacaauucac

SEQ ID NO: 90372 - RNA, 19 nt, Artificial Sequence
  Description of Artificial Sequence: Synthetic oligonucleotide
  Sense strand starting at position 3868 of SEQ ID NO: 1135
agugaauugucucuaggaa

SEQ ID NO: 90373 - RNA, 19 nt, Artificial Sequence
  Description of Artificial Sequence: Synthetic oligonucleotide
  Antisense strand to SEQ ID NO: 90292
uuccuagagacaauucacu

SEQ ID NO: 90374 - RNA, 19 nt, Artificial Sequence
  Description of Artificial Sequence: Synthetic oligonucleotide
  Sense strand starting at position 3865 of SEQ ID NO: 1135
gaaagugaauugucucuag

SEQ ID NO: 90375 - RNA, 19 nt, Artificial Sequence
  Description of Artificial Sequence: Synthetic oligonucleotide
  Antisense strand to SEQ ID NO: 90294
cuagagacaauucacuuuc

SEQ ID NO: 90376 - RNA, 19 nt, Artificial Sequence
  Description of Artificial Sequence: Synthetic oligonucleotide
  Sense strand starting at position 3730 of SEQ ID NO: 1135
cucccuguacuugauaguu

SEQ ID NO: 90377 - RNA, 19 nt, Artificial Sequence
  Description of Artificial Sequence: Synthetic oligonucleotide
  Antisense strand to SEQ ID NO: 90296
aacuaucaaguacagggag

SEQ ID NO: 90378 - RNA, 19 nt, Artificial Sequence
  Description of Artificial Sequence: Synthetic oligonucleotide
  Sense strand starting at position 3697 of SEQ ID NO: 1135
auaacacauguuuauggua

SEQ ID NO: 90379 - RNA, 19 nt, Artificial Sequence
  Description of Artificial Sequence: Synthetic oligonucleotide
  Antisense strand to SEQ ID NO: 90298
uaccauaaacauguguuau

SEQ ID NO: 90380 - RNA, 19 nt, Artificial Sequence
  Description of Artificial Sequence: Synthetic oligonucleotide
  Sense strand starting at position 3509 of SEQ ID NO: 1135
guuucuguaggaugacaua

SEQ ID NO: 90381 - RNA, 19 nt, Artificial Sequence
  Description of Artificial Sequence: Synthetic oligonucleotide
  Antisense strand to SEQ ID NO: 90300
uaugucauccuacagaaac

SEQ ID NO: 90382 - RNA, 19 nt, Artificial Sequence
  Description of Artificial Sequence: Synthetic oligonucleotide
  Sense strand starting at position 3443 of SEQ ID NO: 1135
gagguuagugaugguagua

SEQ ID NO: 90383 - RNA, 19 nt, Artificial Sequence
  Description of Artificial Sequence: Synthetic oligonucleotide
  Antisense strand to SEQ ID NO: 90302
uacuaccaucacuaaccuc

SEQ ID NO: 90384 - RNA, 19 nt, Artificial Sequence
  Description of Artificial Sequence: Synthetic oligonucleotide
  Sense strand starting at position 3425 of SEQ ID NO: 1135
caauguauuguugaugaug

SEQ ID NO: 90385 - RNA, 19 nt, Artificial Sequence
  Description of Artificial Sequence: Synthetic oligonucleotide
  Antisense strand to SEQ ID NO: 90304
caucaucaacaauacauug

SEQ ID NO: 90386 - RNA, 19 nt, Artificial Sequence
  Description of Artificial Sequence: Synthetic oligonucleotide
  Sense strand starting at position 3396 of SEQ ID NO: 1135
guuggugugagucaugaac

SEQ ID NO: 90387 - RNA, 19 nt, Artificial Sequence
  Description of Artificial Sequence: Synthetic oligonucleotide
  Antisense strand to SEQ ID NO: 90306
guucaugacucacaccaac

SEQ ID NO: 90388 - RNA, 19 nt, Artificial Sequence
  Description of Artificial Sequence: Synthetic oligonucleotide
  Sense strand starting at position 3365 of SEQ ID NO: 1135
aaugguccaugagcauaaa

SEQ ID NO: 90389 - RNA, 19 nt, Artificial Sequence
  Description of Artificial Sequence: Synthetic oligonucleotide
  Antisense strand to SEQ ID NO: 90308
uuuaugcucauggaccauu

SEQ ID NO: 90390 - RNA, 19 nt, Artificial Sequence
  Description of Artificial Sequence: Synthetic oligonucleotide
  Sense strand starting at position 3322 of SEQ ID NO: 1135
uuagcuucccaugggauau

SEQ ID NO: 90391 - RNA, 19 nt, Artificial Sequence
  Description of Artificial Sequence: Synthetic oligonucleotide
  Antisense strand to SEQ ID NO: 90310
auaucccaugggaagcuaa

SEQ ID NO: 90392 - RNA, 19 nt, Artificial Sequence
  Description of Artificial Sequence: Synthetic oligonucleotide
  Sense strand starting at position 3321 of SEQ ID NO: 1135
uuuagcuucccaugggaua

SEQ ID NO: 90393 - RNA, 19 nt, Artificial Sequence
  Description of Artificial Sequence: Synthetic oligonucleotide
  Antisense strand to SEQ ID NO: 90312
uaucccaugggaagcuaaa

SEQ ID NO: 90394 - RNA, 19 nt, Artificial Sequence
  Description of Artificial Sequence: Synthetic oligonucleotide
  Sense strand starting at position 3138 of SEQ ID NO: 1135
cugggagugagauguauua

SEQ ID NO: 90395 - RNA, 19 nt, Artificial Sequence
  Description of Artificial Sequence: Synthetic oligonucleotide
  Antisense strand to SEQ ID NO: 90314
uaauacaucucacucccag

SEQ ID NO: 90396 - RNA, 19 nt, Artificial Sequence
  Description of Artificial Sequence: Synthetic oligonucleotide
  Sense strand starting at position 3109 of SEQ ID NO: 1135
gauguugggugaucugaga

SEQ ID NO: 90397 - RNA, 19 nt, Artificial Sequence
  Description of Artificial Sequence: Synthetic oligonucleotide
  Antisense strand to SEQ ID NO: 90316
ucucagaucacccaacauc

SEQ ID NO: 90398 - RNA, 19 nt, Artificial Sequence
  Description of Artificial Sequence: Synthetic oligonucleotide
  Sense strand starting at position 3107 of SEQ ID NO: 1135
gggauguugggugaucuga

SEQ ID NO: 90399 - RNA, 19 nt, Artificial Sequence
  Description of Artificial Sequence: Synthetic oligonucleotide
  Antisense strand to SEQ ID NO: 90318
ucagaucacccaacauccc

SEQ ID NO: 90400 - RNA, 19 nt, Artificial Sequence
  Description of Artificial Sequence: Synthetic oligonucleotide
  Sense strand starting at position 3082 of SEQ ID NO: 1135
agauguaauuggcuccuga

SEQ ID NO: 90401 - RNA, 19 nt, Artificial Sequence
  Description of Artificial Sequence: Synthetic oligonucleotide
  Antisense strand to SEQ ID NO: 90320
ucaggagccaauuacaucu

SEQ ID NO: 90402 - RNA, 19 nt, Artificial Sequence
  Description of Artificial Sequence: Synthetic oligonucleotide
  Sense strand starting at position 3067 of SEQ ID NO: 1135
gggcaugguuuguugagau

SEQ ID NO: 90403 - RNA, 19 nt, Artificial Sequence
  Description of Artificial Sequence: Synthetic oligonucleotide
  Antisense strand to SEQ ID NO: 90322
aucucaacaaaccaugccc

SEQ ID NO: 90404 - RNA, 19 nt, Artificial Sequence
  Description of Artificial Sequence: Synthetic oligonucleotide
  Sense strand starting at position 2969 of SEQ ID NO: 1135
aacuuaugugucugauaug

SEQ ID NO: 90405 - RNA, 19 nt, Artificial Sequence
  Description of Artificial Sequence: Synthetic oligonucleotide
  Antisense strand to SEQ ID NO: 90324
cauaucagacacauaaguu

SEQ ID NO: 90406 - RNA, 19 nt, Artificial Sequence
  Description of Artificial Sequence: Synthetic oligonucleotide
  Sense strand starting at position 2966 of SEQ ID NO: 1135
guaaacuuaugugucugau

SEQ ID NO: 90407 - RNA, 19 nt, Artificial Sequence
  Description of Artificial Sequence: Synthetic oligonucleotide
  Antisense strand to SEQ ID NO: 90326
aucagacacauaaguuuac

SEQ ID NO: 90408 - RNA, 19 nt, Artificial Sequence
  Description of Artificial Sequence: Synthetic oligonucleotide
  Sense strand starting at position 2879 of SEQ ID NO: 1135
uugcacuuugagggagaau

SEQ ID NO: 90409 - RNA, 19 nt, Artificial Sequence
  Description of Artificial Sequence: Synthetic oligonucleotide
  Antisense strand to SEQ ID NO: 90328
auucucccucaaagugcaa

SEQ ID NO: 90410 - RNA, 19 nt, Artificial Sequence
  Description of Artificial Sequence: Synthetic oligonucleotide
  Sense strand starting at position 2587 of SEQ ID NO: 1135
ggagaaggcuguucucuag

SEQ ID NO: 90411 - RNA, 19 nt, Artificial Sequence
  Description of Artificial Sequence: Synthetic oligonucleotide
  Antisense strand to SEQ ID NO: 90330
cuagagaacagccuucucc

SEQ ID NO: 90412 - RNA, 19 nt, Artificial Sequence
  Description of Artificial Sequence: Synthetic oligonucleotide
  Sense strand starting at position 2552 of SEQ ID NO: 1135
gcuagauacuugccagaua

SEQ ID NO: 90413 - RNA, 19 nt, Artificial Sequence
  Description of Artificial Sequence: Synthetic oligonucleotide
  Antisense strand to SEQ ID NO: 90332
uaucuggcaaguaucuagc

SEQ ID NO: 90414 - RNA, 19 nt, Artificial Sequence
  Description of Artificial Sequence: Synthetic oligonucleotide
  Sense strand starting at position 2399 of SEQ ID NO: 1135
caaagagguuccuugcuca

SEQ ID NO: 90415 - RNA, 19 nt, Artificial Sequence
  Description of Artificial Sequence: Synthetic oligonucleotide
  Antisense strand to SEQ ID NO: 90334
ugagcaaggaaccucuuug

SEQ ID NO: 90416 - RNA, 19 nt, Artificial Sequence
  Description of Artificial Sequence: Synthetic oligonucleotide
  Sense strand starting at position 2306 of SEQ ID NO: 1135
gaauaucacugggcaugua

SEQ ID NO: 90417 - RNA, 19 nt, Artificial Sequence
  Description of Artificial Sequence: Synthetic oligonucleotide
  Antisense strand to SEQ ID NO: 90336
uacaugcccagugauauuc

SEQ ID NO: 90418 - RNA, 19 nt, Artificial Sequence
  Description of Artificial Sequence: Synthetic oligonucleotide
  Sense strand starting at position 2305 of SEQ ID NO: 1135
agaauaucacugggcaugu

SEQ ID NO: 90419 - RNA, 19 nt, Artificial Sequence
  Description of Artificial Sequence: Synthetic oligonucleotide
  Antisense strand to SEQ ID NO: 90338
acaugcccagugauauucu

SEQ ID NO: 90420 - RNA, 19 nt, Artificial Sequence
  Description of Artificial Sequence: Synthetic oligonucleotide
  Sense strand starting at position 2303 of SEQ ID NO: 1135
agagaauaucacugggcau

SEQ ID NO: 90421 - RNA, 19 nt, Artificial Sequence
  Description of Artificial Sequence: Synthetic oligonucleotide
  Antisense strand to SEQ ID NO: 90340
augcccagugauauucucu

SEQ ID NO: 90422 - RNA, 19 nt, Artificial Sequence
  Description of Artificial Sequence: Synthetic oligonucleotide
  Sense strand starting at position 2302 of SEQ ID NO: 1135
cagagaauaucacugggca

SEQ ID NO: 90423 - RNA, 19 nt, Artificial Sequence
  Description of Artificial Sequence: Synthetic oligonucleotide
  Antisense strand to SEQ ID NO: 90342
ugcccagugauauucucug

SEQ ID NO: 90424 - RNA, 19 nt, Artificial Sequence
  Description of Artificial Sequence: Synthetic oligonucleotide
  Sense strand starting at position 2279 of SEQ ID NO: 1135
gcaccuaauugaguaauga

SEQ ID NO: 90425 - RNA, 19 nt, Artificial Sequence
  Description of Artificial Sequence: Synthetic oligonucleotide
  Antisense strand to SEQ ID NO: 90344
ucauuacucaauuaggugc

SEQ ID NO: 90426 - RNA, 19 nt, Artificial Sequence
  Description of Artificial Sequence: Synthetic oligonucleotide
  Sense strand starting at position 2108 of SEQ ID NO: 1135
accaguugcuuccugagau

SEQ ID NO: 90427 - RNA, 19 nt, Artificial Sequence
  Description of Artificial Sequence: Synthetic oligonucleotide
  Antisense strand to SEQ ID NO: 90346
aucucaggaagcaacuggu

SEQ ID NO: 90428 - RNA, 19 nt, Artificial Sequence
  Description of Artificial Sequence: Synthetic oligonucleotide
  Sense strand starting at position 1691 of SEQ ID NO: 1135
uugucucagcaucaggaau

SEQ ID NO: 90429 - RNA, 19 nt, Artificial Sequence
  Description of Artificial Sequence: Synthetic oligonucleotide
  Antisense strand to SEQ ID NO: 90348
auuccugaugcugagacaa

SEQ ID NO: 90430 - RNA, 19 nt, Artificial Sequence
  Description of Artificial Sequence: Synthetic oligonucleotide
  Sense strand starting at position 1670 of SEQ ID NO: 1135
acuuguuuccucuaaaguc

SEQ ID NO: 90431 - RNA, 19 nt, Artificial Sequence
  Description of Artificial Sequence: Synthetic oligonucleotide
  Antisense strand to SEQ ID NO: 90350
gacuuuagaggaaacaagu

SEQ ID NO: 90432 - RNA, 19 nt, Artificial Sequence
  Description of Artificial Sequence: Synthetic oligonucleotide
  Sense strand starting at position 1664 of SEQ ID NO: 1135
ugagauacuuguuuccucu

SEQ ID NO: 90433 - RNA, 19 nt, Artificial Sequence
  Description of Artificial Sequence: Synthetic oligonucleotide
  Antisense strand to SEQ ID NO: 90352
agaggaaacaaguaucuca

SEQ ID NO: 90434 - RNA, 19 nt, Artificial Sequence
  Description of Artificial Sequence: Synthetic oligonucleotide
  Sense strand starting at position 1663 of SEQ ID NO: 1135
uugagauacuuguuuccuc

SEQ ID NO: 90435 - RNA, 19 nt, Artificial Sequence
  Description of Artificial Sequence: Synthetic oligonucleotide
  Antisense strand to SEQ ID NO: 90354
gaggaaacaaguaucucaa

SEQ ID NO: 90436 - RNA, 19 nt, Artificial Sequence
  Description of Artificial Sequence: Synthetic oligonucleotide
  Sense strand starting at position 1608 of SEQ ID NO: 1135
gguuaauuagcaugucuaa

SEQ ID NO: 90437 - RNA, 19 nt, Artificial Sequence
  Description of Artificial Sequence: Synthetic oligonucleotide
  Antisense strand to SEQ ID NO: 90356
uuagacaugcuaauuaacc

SEQ ID NO: 90438 - RNA, 19 nt, Artificial Sequence
  Description of Artificial Sequence: Synthetic oligonucleotide
  Sense strand starting at position 1602 of SEQ ID NO: 1135
augaaugguuaauuagcau

SEQ ID NO: 90439 - RNA, 19 nt, Artificial Sequence
  Description of Artificial Sequence: Synthetic oligonucleotide
  Antisense strand to SEQ ID NO: 90358
augcuaauuaaccauucau

SEQ ID NO: 90440 - RNA, 19 nt, Artificial Sequence
  Description of Artificial Sequence: Synthetic oligonucleotide
  Sense strand starting at position 1510 of SEQ ID NO: 1135
gugauaacauugucaggag

SEQ ID NO: 90441 - RNA, 19 nt, Artificial Sequence
  Description of Artificial Sequence: Synthetic oligonucleotide
  Antisense strand to SEQ ID NO: 90360
cuccugacaauguuaucac

SEQ ID NO: 90442 - RNA, 19 nt, Artificial Sequence
  Description of Artificial Sequence: Synthetic oligonucleotide
  Sense strand starting at position 1353 of SEQ ID NO: 1135
gccacaagccaguauuauu

SEQ ID NO: 90443 - RNA, 19 nt, Artificial Sequence
  Description of Artificial Sequence: Synthetic oligonucleotide
  Antisense strand to SEQ ID NO: 90362
aauaauacuggcuuguggc

SEQ ID NO: 90444 - RNA, 19 nt, Artificial Sequence
  Description of Artificial Sequence: Synthetic oligonucleotide
  Sense strand starting at position 1311 of SEQ ID NO: 1135
ggacucccugcaugaagaa

SEQ ID NO: 90445 - RNA, 19 nt, Artificial Sequence
  Description of Artificial Sequence: Synthetic oligonucleotide
  Antisense strand to SEQ ID NO: 90364
uucuucaugcagggagucc

SEQ ID NO: 90446 - RNA, 19 nt, Artificial Sequence
  Description of Artificial Sequence: Synthetic oligonucleotide
  Sense strand starting at position 3678 of SEQ ID NO: 1136
gcagaugugaggugauauu

SEQ ID NO: 90447 - RNA, 19 nt, Artificial Sequence
  Description of Artificial Sequence: Synthetic oligonucleotide
  Antisense strand to SEQ ID NO: 90366
aauaucaccucacaucugc

SEQ ID NO: 90448 - RNA, 19 nt, Artificial Sequence
  Description of Artificial Sequence: Synthetic oligonucleotide
  Sense strand starting at position 3510 of SEQ ID NO: 1136
uguugaaucacauaguagu

SEQ ID NO: 90449 - RNA, 19 nt, Artificial Sequence
  Description of Artificial Sequence: Synthetic oligonucleotide
  Antisense strand to SEQ ID NO: 90368
acuacuaugugauucaaca

SEQ ID NO: 90450 - RNA, 19 nt, Artificial Sequence
  Description of Artificial Sequence: Synthetic oligonucleotide
  Sense strand starting at position 3434 of SEQ ID NO: 1136
caauaaauuugggagugca

SEQ ID NO: 90451 - RNA, 19 nt, Artificial Sequence
  Description of Artificial Sequence: Synthetic oligonucleotide
  Antisense strand to SEQ ID NO: 90370
ugcacucccaaauuuauug

SEQ ID NO: 90452 - RNA, 19 nt, Artificial Sequence
  Description of Artificial Sequence: Synthetic oligonucleotide
  Sense strand starting at position 3407 of SEQ ID NO: 1136
auaucuugacuguaguaaa

SEQ ID NO: 90453 - RNA, 19 nt, Artificial Sequence
  Description of Artificial Sequence: Synthetic oligonucleotide
  Antisense strand to SEQ ID NO: 90372
uuuacuacagucaagauau

SEQ ID NO: 90454 - RNA, 19 nt, Artificial Sequence
  Description of Artificial Sequence: Synthetic oligonucleotide
  Sense strand starting at position 3405 of SEQ ID NO: 1136
cuauaucuugacuguagua

SEQ ID NO: 90455 - RNA, 19 nt, Artificial Sequence
  Description of Artificial Sequence: Synthetic oligonucleotide
  Antisense strand to SEQ ID NO: 90374
uacuacagucaagauauag

SEQ ID NO: 90456 - RNA, 19 nt, Artificial Sequence
  Description of Artificial Sequence: Synthetic oligonucleotide
  Sense strand starting at position 3334 of SEQ ID NO: 1136
guuguauuccauuacacuu

SEQ ID NO: 90457 - RNA, 19 nt, Artificial Sequence
  Description of Artificial Sequence: Synthetic oligonucleotide
  Antisense strand to SEQ ID NO: 90376
aaguguaauggaauacaac

SEQ ID NO: 90458 - RNA, 19 nt, Artificial Sequence
  Description of Artificial Sequence: Synthetic oligonucleotide
  Sense strand starting at position 3320 of SEQ ID NO: 1136
uuauauaaggcugaguugu

SEQ ID NO: 90459 - RNA, 19 nt, Artificial Sequence
  Description of Artificial Sequence: Synthetic oligonucleotide
  Antisense strand to SEQ ID NO: 90378
acaacucagccuuauauaa

SEQ ID NO: 90460 - RNA, 19 nt, Artificial Sequence
  Description of Artificial Sequence: Synthetic oligonucleotide
  Sense strand starting at position 2949 of SEQ ID NO: 1136
gguguucuccaggaaugac

SEQ ID NO: 90461 - RNA, 19 nt, Artificial Sequence
  Description of Artificial Sequence: Synthetic oligonucleotide
  Antisense strand to SEQ ID NO: 90380
gucauuccuggagaacacc

SEQ ID NO: 90462 - RNA, 19 nt, Artificial Sequence
  Description of Artificial Sequence: Synthetic oligonucleotide
  Sense strand starting at position 2948 of SEQ ID NO: 1136
agguguucuccaggaauga

SEQ ID NO: 90463 - RNA, 19 nt, Artificial Sequence
  Description of Artificial Sequence: Synthetic oligonucleotide
  Antisense strand to SEQ ID NO: 90382
ucauuccuggagaacaccu

SEQ ID NO: 90464 - RNA, 19 nt, Artificial Sequence
  Description of Artificial Sequence: Synthetic oligonucleotide
  Sense strand starting at position 2946 of SEQ ID NO: 1136
ucagguguucuccaggaau

SEQ ID NO: 90465 - RNA, 19 nt, Artificial Sequence
  Description of Artificial Sequence: Synthetic oligonucleotide
  Antisense strand to SEQ ID NO: 90384
auuccuggagaacaccuga

SEQ ID NO: 90466 - RNA, 19 nt, Artificial Sequence
  Description of Artificial Sequence: Synthetic oligonucleotide
  Sense strand starting at position 2915 of SEQ ID NO: 1136
uugcacugauggucccaaa

SEQ ID NO: 90467 - RNA, 19 nt, Artificial Sequence
  Description of Artificial Sequence: Synthetic oligonucleotide
  Antisense strand to SEQ ID NO: 90386
uuugggaccaucagugcaa

SEQ ID NO: 90468 - RNA, 19 nt, Artificial Sequence
  Description of Artificial Sequence: Synthetic oligonucleotide
  Sense strand starting at position 2794 of SEQ ID NO: 1136
gccuaaauggacuaucacu

SEQ ID NO: 90469 - RNA, 19 nt, Artificial Sequence
  Description of Artificial Sequence: Synthetic oligonucleotide
  Antisense strand to SEQ ID NO: 90388
agugauaguccauuuaggc

SEQ ID NO: 90470 - RNA, 19 nt, Artificial Sequence
  Description of Artificial Sequence: Synthetic oligonucleotide
  Sense strand starting at position 2752 of SEQ ID NO: 1136
uggagauguaucggacaua

SEQ ID NO: 90471 - RNA, 19 nt, Artificial Sequence
  Description of Artificial Sequence: Synthetic oligonucleotide
  Antisense strand to SEQ ID NO: 90390
uauguccgauacaucucca

SEQ ID NO: 90472 - RNA, 19 nt, Artificial Sequence
  Description of Artificial Sequence: Synthetic oligonucleotide
  Sense strand starting at position 2742 of SEQ ID NO: 1136
aguaguaguauggagaugu

SEQ ID NO: 90473 - RNA, 19 nt, Artificial Sequence
  Description of Artificial Sequence: Synthetic oligonucleotide
  Antisense strand to SEQ ID NO: 90392
acaucuccauacuacuacu

SEQ ID NO: 90474 - RNA, 19 nt, Artificial Sequence
  Description of Artificial Sequence: Synthetic oligonucleotide
  Sense strand starting at position 2740 of SEQ ID NO: 1136
acaguaguaguauggagau

SEQ ID NO: 90475 - RNA, 19 nt, Artificial Sequence
  Description of Artificial Sequence: Synthetic oligonucleotide
  Antisense strand to SEQ ID NO: 90394
aucuccauacuacuacugu

SEQ ID NO: 90476 - RNA, 19 nt, Artificial Sequence
  Description of Artificial Sequence: Synthetic oligonucleotide
  Sense strand starting at position 2600 of SEQ ID NO: 1136
ugggcacaugccuaaagau

SEQ ID NO: 90477 - RNA, 19 nt, Artificial Sequence
  Description of Artificial Sequence: Synthetic oligonucleotide
  Antisense strand to SEQ ID NO: 90396
aucuuuaggcaugugccca

SEQ ID NO: 90478 - RNA, 19 nt, Artificial Sequence
  Description of Artificial Sequence: Synthetic oligonucleotide
  Sense strand starting at position 2563 of SEQ ID NO: 1136
ugccuaaagguguaauaag

SEQ ID NO: 90479 - RNA, 19 nt, Artificial Sequence
  Description of Artificial Sequence: Synthetic oligonucleotide
  Antisense strand to SEQ ID NO: 90398
cuuauuacaccuuuaggca

SEQ ID NO: 90480 - RNA, 19 nt, Artificial Sequence
  Description of Artificial Sequence: Synthetic oligonucleotide
  Sense strand starting at position 2399 of SEQ ID NO: 1136
gaagaaggcugcuccuaag

SEQ ID NO: 90481 - RNA, 19 nt, Artificial Sequence
  Description of Artificial Sequence: Synthetic oligonucleotide
  Antisense strand to SEQ ID NO: 90400
cuuaggagcagccuucuuc

SEQ ID NO: 90482 - RNA, 19 nt, Artificial Sequence
  Description of Artificial Sequence: Synthetic oligonucleotide
  Sense strand starting at position 2151 of SEQ ID NO: 1136
augugcauuccugacaaca

SEQ ID NO: 90483 - RNA, 19 nt, Artificial Sequence
  Description of Artificial Sequence: Synthetic oligonucleotide
  Antisense strand to SEQ ID NO: 90402
uguugucaggaaugcacau

SEQ ID NO: 90484 - RNA, 19 nt, Artificial Sequence
  Description of Artificial Sequence: Synthetic oligonucleotide
  Sense strand starting at position 1530 of SEQ ID NO: 1136
gcuugugaaagccagaaca

SEQ ID NO: 90485 - RNA, 19 nt, Artificial Sequence
  Description of Artificial Sequence: Synthetic oligonucleotide
  Antisense strand to SEQ ID NO: 90404
uguucuggcuuucacaagc

SEQ ID NO: 90486 - RNA, 19 nt, Artificial Sequence
  Description of Artificial Sequence: Synthetic oligonucleotide
  Sense strand starting at position 1338 of SEQ ID NO: 1136
cuggauaguuuccuaacaa

SEQ ID NO: 90487 - RNA, 19 nt, Artificial Sequence
  Description of Artificial Sequence: Synthetic oligonucleotide
  Antisense strand to SEQ ID NO: 90406
uuguuaggaaacuauccag

SEQ ID NO: 90488 - RNA, 19 nt, Artificial Sequence
  Description of Artificial Sequence: Synthetic oligonucleotide
  Sense strand starting at position 1337 of SEQ ID NO: 1136
ccuggauaguuuccuaaca

SEQ ID NO: 90489 - RNA, 19 nt, Artificial Sequence
  Description of Artificial Sequence: Synthetic oligonucleotide
  Antisense strand to SEQ ID NO: 90408
uguuaggaaacuauccagg

SEQ ID NO: 90490 - RNA, 19 nt, Artificial Sequence
  Description of Artificial Sequence: Synthetic oligonucleotide
  Sense strand starting at position 1328 of SEQ ID NO: 1136
uggauaaauccuggauagu

SEQ ID NO: 90491 - RNA, 19 nt, Artificial Sequence
  Description of Artificial Sequence: Synthetic oligonucleotide
  Antisense strand to SEQ ID NO: 90410
acuauccaggauuuaucca

SEQ ID NO: 90492 - RNA, 19 nt, Artificial Sequence
  Description of Artificial Sequence: Synthetic oligonucleotide
  Sense strand starting at position 985 of SEQ ID NO: 1136
gcagcagauguccacaaau

SEQ ID NO: 90493 - RNA, 19 nt, Artificial Sequence
  Description of Artificial Sequence: Synthetic oligonucleotide
  Antisense strand to SEQ ID NO: 90412
auuuguggacaucugcugc

SEQ ID NO: 90494 - RNA, 19 nt, Artificial Sequence
  Description of Artificial Sequence: Synthetic oligonucleotide
  Sense strand starting at position 889 of SEQ ID NO: 1136
ucuguagucauugggauac

SEQ ID NO: 90495 - RNA, 19 nt, Artificial Sequence
  Description of Artificial Sequence: Synthetic oligonucleotide
  Antisense strand to SEQ ID NO: 90414
guaucccaaugacuacaga

SEQ ID NO: 90496 - RNA, 19 nt, Artificial Sequence
  Description of Artificial Sequence: Synthetic oligonucleotide
  Sense strand starting at position 888 of SEQ ID NO: 1136
aucuguagucauugggaua

SEQ ID NO: 90497 - RNA, 19 nt, Artificial Sequence
  Description of Artificial Sequence: Synthetic oligonucleotide
  Antisense strand to SEQ ID NO: 90416
uaucccaaugacuacagau

SEQ ID NO: 90498 - RNA, 19 nt, Artificial Sequence
  Description of Artificial Sequence: Synthetic oligonucleotide
  Sense strand starting at position 848 of SEQ ID NO: 1136
gaauauagcugagugacca

SEQ ID NO: 90499 - RNA, 19 nt, Artificial Sequence
  Description of Artificial Sequence: Synthetic oligonucleotide
  Antisense strand to SEQ ID NO: 90418
uggucacucagcuauauuc

SEQ ID NO: 90500 - RNA, 19 nt, Artificial Sequence
  Description of Artificial Sequence: Synthetic oligonucleotide
  Sense strand starting at position 710 of SEQ ID NO: 1136
ggaauuaucccuugaacua

SEQ ID NO: 90501 - RNA, 19 nt, Artificial Sequence
  Description of Artificial Sequence: Synthetic oligonucleotide
  Antisense strand to SEQ ID NO: 90420
uaguucaagggauaauucc

SEQ ID NO: 90502 - RNA, 19 nt, Artificial Sequence
  Description of Artificial Sequence: Synthetic oligonucleotide
  Sense strand starting at position 631 of SEQ ID NO: 1136
gguuuagguauugauauuc

SEQ ID NO: 90503 - RNA, 19 nt, Artificial Sequence
  Description of Artificial Sequence: Synthetic oligonucleotide
  Antisense strand to SEQ ID NO: 90422
gaauaucaauaccuaaacc

SEQ ID NO: 90504 - RNA, 19 nt, Artificial Sequence
  Description of Artificial Sequence: Synthetic oligonucleotide
  Sense strand starting at position 551 of SEQ ID NO: 1136
aauagugaugccuguggga

SEQ ID NO: 90505 - RNA, 19 nt, Artificial Sequence
  Description of Artificial Sequence: Synthetic oligonucleotide
  Antisense strand to SEQ ID NO: 90424
ucccacaggcaucacuauu

SEQ ID NO: 90506 - RNA, 19 nt, Artificial Sequence
  Description of Artificial Sequence: Synthetic oligonucleotide
  Sense strand starting at position 416 of SEQ ID NO: 1136
ucagucaggcuguaaucaa

SEQ ID NO: 90507 - RNA, 19 nt, Artificial Sequence
  Description of Artificial Sequence: Synthetic oligonucleotide
  Antisense strand to SEQ ID NO: 90426
uugauuacagccugacuga

SEQ ID NO: 90508 - RNA, 19 nt, Artificial Sequence
  Description of Artificial Sequence: Synthetic oligonucleotide
  Sense strand starting at position 299 of SEQ ID NO: 1136
augcaaacugaaugcuauu

SEQ ID NO: 90509 - RNA, 19 nt, Artificial Sequence
  Description of Artificial Sequence: Synthetic oligonucleotide
  Antisense strand to SEQ ID NO: 90428
aauagcauucaguuugcau

SEQ ID NO: 90510 - RNA, 19 nt, Artificial Sequence
  Description of Artificial Sequence: Synthetic oligonucleotide
  Sense strand starting at position 263 of SEQ ID NO: 1136
accugaucaugucuauauu

SEQ ID NO: 90511 - RNA, 19 nt, Artificial Sequence
  Description of Artificial Sequence: Synthetic oligonucleotide
  Antisense strand to SEQ ID NO: 90430
aauauagacaugaucaggu

SEQ ID NO: 90512 - RNA, 19 nt, Artificial Sequence
  Description of Artificial Sequence: Synthetic oligonucleotide
  Sense strand starting at position 240 of SEQ ID NO: 1136
gugcaucucauguaaugga

SEQ ID NO: 90513 - RNA, 19 nt, Artificial Sequence
  Description of Artificial Sequence: Synthetic oligonucleotide
  Antisense strand to SEQ ID NO: 90432
uccauuacaugagaugcac

SEQ ID NO: 90514 - RNA, 19 nt, Artificial Sequence
  Description of Artificial Sequence: Synthetic oligonucleotide
  Sense strand starting at position 188 of SEQ ID NO: 1136
ugaagaugacuuugguaug

SEQ ID NO: 90515 - RNA, 19 nt, Artificial Sequence
  Description of Artificial Sequence: Synthetic oligonucleotide
  Antisense strand to SEQ ID NO: 90434
cauaccaaagucaucuuca

SEQ ID NO: 90516 - RNA, 19 nt, Artificial Sequence
  Description of Artificial Sequence: Synthetic oligonucleotide
  Sense strand starting at position 182 of SEQ ID NO: 1136
gcuugaugaagaugacuuu

SEQ ID NO: 90517 - RNA, 19 nt, Artificial Sequence
  Description of Artificial Sequence: Synthetic oligonucleotide
  Antisense strand to SEQ ID NO: 90436
aaagucaucuucaucaagc

SEQ ID NO: 90518 - RNA, 19 nt, Artificial Sequence
  Description of Artificial Sequence: Synthetic oligonucleotide
  Sense strand starting at position 173 of SEQ ID NO: 1136
aauggaugggcuugaugaa

SEQ ID NO: 90519 - RNA, 19 nt, Artificial Sequence
  Description of Artificial Sequence: Synthetic oligonucleotide
  Antisense strand to SEQ ID NO: 90438
uucaucaagcccauccauu

SEQ ID NO: 90520 - RNA, 19 nt, Artificial Sequence
  Description of Artificial Sequence: Synthetic oligonucleotide
  Sense strand starting at position 137 of SEQ ID NO: 1136
uuggacucgaaaugaaguu

SEQ ID NO: 90521 - RNA, 19 nt, Artificial Sequence
  Description of Artificial Sequence: Synthetic oligonucleotide
  Antisense strand to SEQ ID NO: 90440
aacuucauuucgaguccaa

SEQ ID NO: 90522 - RNA, 19 nt, Artificial Sequence
  Description of Artificial Sequence: Synthetic oligonucleotide
  Sense strand starting at position 133 of SEQ ID NO: 1136
cugcuuggacucgaaauga

SEQ ID NO: 90523 - RNA, 19 nt, Artificial Sequence
  Description of Artificial Sequence: Synthetic oligonucleotide
  Antisense strand to SEQ ID NO: 90442
ucauuucgaguccaagcag

SEQ ID NO: 90524 - RNA, 19 nt, Artificial Sequence
  Description of Artificial Sequence: Synthetic oligonucleotide
  Sense strand starting at position 82 of SEQ ID NO: 1136
gugugcucuuuauuugaag

SEQ ID NO: 90525 - RNA, 19 nt, Artificial Sequence
  Description of Artificial Sequence: Synthetic oligonucleotide
  Antisense strand to SEQ ID NO: 90444
cuucaaauaaagagcacac

SEQ ID NO: 90526 - RNA, 19 nt, Artificial Sequence
  Description of Artificial Sequence: Synthetic oligonucleotide
  Sense strand starting at position 301 of SEQ ID NO: 1137
uuaauuguagucuaaaggu

SEQ ID NO: 90527 - RNA, 19 nt, Artificial Sequence
  Description of Artificial Sequence: Synthetic oligonucleotide
  Antisense strand to SEQ ID NO: 90446
accuuuagacuacaauuaa

SEQ ID NO: 90528 - RNA, 19 nt, Artificial Sequence
  Description of Artificial Sequence: Synthetic oligonucleotide
  Sense strand starting at position 351 of SEQ ID NO: 1137
gcagauaauucuccacugu

SEQ ID NO: 90529 - RNA, 19 nt, Artificial Sequence
  Description of Artificial Sequence: Synthetic oligonucleotide
  Antisense strand to SEQ ID NO: 90448
acaguggagaauuaucugc

SEQ ID NO: 90530 - RNA, 19 nt, Artificial Sequence
  Description of Artificial Sequence: Synthetic oligonucleotide
  Sense strand starting at position 530 of SEQ ID NO: 1137
uugauaauugccugcuaca

SEQ ID NO: 90531 - RNA, 19 nt, Artificial Sequence
  Description of Artificial Sequence: Synthetic oligonucleotide
  Antisense strand to SEQ ID NO: 90450
uguagcaggcaauuaucaa

SEQ ID NO: 90532 - RNA, 19 nt, Artificial Sequence
  Description of Artificial Sequence: Synthetic oligonucleotide
  Sense strand starting at position 560 of SEQ ID NO: 1137
uuguaauagagaugucaga

SEQ ID NO: 90533 - RNA, 19 nt, Artificial Sequence
  Description of Artificial Sequence: Synthetic oligonucleotide
  Antisense strand to SEQ ID NO: 90452
ucugacaucucuauuacaa

SEQ ID NO: 90534 - RNA, 19 nt, Artificial Sequence
  Description of Artificial Sequence: Synthetic oligonucleotide
  Sense strand starting at position 732 of SEQ ID NO: 1137
cucgacagauuccugaauu

SEQ ID NO: 90535 - RNA, 19 nt, Artificial Sequence
  Description of Artificial Sequence: Synthetic oligonucleotide
  Antisense strand to SEQ ID NO: 90454
aauucaggaaucugucgag

SEQ ID NO: 90536 - RNA, 19 nt, Artificial Sequence
  Description of Artificial Sequence: Synthetic oligonucleotide
  Sense strand starting at position 733 of SEQ ID NO: 1137
ucgacagauuccugaauuu

SEQ ID NO: 90537 - RNA, 19 nt, Artificial Sequence
  Description of Artificial Sequence: Synthetic oligonucleotide
  Antisense strand to SEQ ID NO: 90456
aaauucaggaaucugucga

SEQ ID NO: 90538 - RNA, 19 nt, Artificial Sequence
  Description of Artificial Sequence: Synthetic oligonucleotide
  Sense strand starting at position 764 of SEQ ID NO: 1137
gcuagaauucugcaucuuc

SEQ ID NO: 90539 - RNA, 19 nt, Artificial Sequence
  Description of Artificial Sequence: Synthetic oligonucleotide
  Antisense strand to SEQ ID NO: 90458
gaagaugcagaauucuagc

SEQ ID NO: 90540 - RNA, 19 nt, Artificial Sequence
  Description of Artificial Sequence: Synthetic oligonucleotide
  Sense strand starting at position 865 of SEQ ID NO: 1137
gggagacaccagugguaau

SEQ ID NO: 90541 - RNA, 19 nt, Artificial Sequence
  Description of Artificial Sequence: Synthetic oligonucleotide
  Antisense strand to SEQ ID NO: 90460
auuaccacuggugucuccc

SEQ ID NO: 90542 - RNA, 19 nt, Artificial Sequence
  Description of Artificial Sequence: Synthetic oligonucleotide
  Sense strand starting at position 962 of SEQ ID NO: 1137
augugacauccuggacauc

SEQ ID NO: 90543 - RNA, 19 nt, Artificial Sequence
  Description of Artificial Sequence: Synthetic oligonucleotide
  Antisense strand to SEQ ID NO: 90462
gauguccaggaugucacau

SEQ ID NO: 90544 - RNA, 19 nt, Artificial Sequence
  Description of Artificial Sequence: Synthetic oligonucleotide
  Sense strand starting at position 1030 of SEQ ID NO: 1137
ccuagcucagccugugaaa

SEQ ID NO: 90545 - RNA, 19 nt, Artificial Sequence
  Description of Artificial Sequence: Synthetic oligonucleotide
  Antisense strand to SEQ ID NO: 90464
uuucacaggcugagcuagg

SEQ ID NO: 90546 - RNA, 19 nt, Artificial Sequence
  Description of Artificial Sequence: Synthetic oligonucleotide
  Sense strand starting at position 1440 of SEQ ID NO: 1137
ggaguugaguuguccugga

SEQ ID NO: 90547 - RNA, 19 nt, Artificial Sequence
  Description of Artificial Sequence: Synthetic oligonucleotide
  Antisense strand to SEQ ID NO: 90466
uccaggacaacucaacucc

SEQ ID NO: 90548 - RNA, 19 nt, Artificial Sequence
  Description of Artificial Sequence: Synthetic oligonucleotide
  Sense strand starting at position 1444 of SEQ ID NO: 1137
uugaguuguccuggacaaa

SEQ ID NO: 90549 - RNA, 19 nt, Artificial Sequence
  Description of Artificial Sequence: Synthetic oligonucleotide
  Antisense strand to SEQ ID NO: 90468
uuuguccaggacaacucaa

SEQ ID NO: 90550 - RNA, 19 nt, Artificial Sequence
  Description of Artificial Sequence: Synthetic oligonucleotide
  Sense strand starting at position 1492 of SEQ ID NO: 1137
aguccaaugucucuaagac

SEQ ID NO: 90551 - RNA, 19 nt, Artificial Sequence
  Description of Artificial Sequence: Synthetic oligonucleotide
  Antisense strand to SEQ ID NO: 90470
gucuuagagacauuggacu

SEQ ID NO: 90552 - RNA, 19 nt, Artificial Sequence
  Description of Artificial Sequence: Synthetic oligonucleotide
  Sense strand starting at position 1493 of SEQ ID NO: 1137
guccaaugucucuaagacc

SEQ ID NO: 90553 - RNA, 19 nt, Artificial Sequence
  Description of Artificial Sequence: Synthetic oligonucleotide
  Antisense strand to SEQ ID NO: 90472
ggucuuagagacauuggac

SEQ ID NO: 90554 - RNA, 19 nt, Artificial Sequence
  Description of Artificial Sequence: Synthetic oligonucleotide
  Sense strand starting at position 1639 of SEQ ID NO: 1137
auguuucuguuucuccaaa

SEQ ID NO: 90555 - RNA, 19 nt, Artificial Sequence
  Description of Artificial Sequence: Synthetic oligonucleotide
  Antisense strand to SEQ ID NO: 90474
uuuggagaaacagaaacau

SEQ ID NO: 90556 - RNA, 19 nt, Artificial Sequence
  Description of Artificial Sequence: Synthetic oligonucleotide
  Sense strand starting at position 1703 of SEQ ID NO: 1137
uggagaucauaggaaacau

SEQ ID NO: 90557 - RNA, 19 nt, Artificial Sequence
  Description of Artificial Sequence: Synthetic oligonucleotide
  Antisense strand to SEQ ID NO: 90476
auguuuccuaugaucucca

SEQ ID NO: 90558 - RNA, 19 nt, Artificial Sequence
  Description of Artificial Sequence: Synthetic oligonucleotide
  Sense strand starting at position 1722 of SEQ ID NO: 1137
gugccagccugaguagaaa

SEQ ID NO: 90559 - RNA, 19 nt, Artificial Sequence
  Description of Artificial Sequence: Synthetic oligonucleotide
  Antisense strand to SEQ ID NO: 90478
uuucuacucaggcuggcac

SEQ ID NO: 90560 - RNA, 19 nt, Artificial Sequence
  Description of Artificial Sequence: Synthetic oligonucleotide
  Sense strand starting at position 2117 of SEQ ID NO: 1137
gcccaagacuagguuugua

SEQ ID NO: 90561 - RNA, 19 nt, Artificial Sequence
  Description of Artificial Sequence: Synthetic oligonucleotide
  Antisense strand to SEQ ID NO: 90480
uacaaaccuagucuugggc

SEQ ID NO: 90562 - RNA, 19 nt, Artificial Sequence
  Description of Artificial Sequence: Synthetic oligonucleotide
  Sense strand starting at position 2288 of SEQ ID NO: 1137
uuuacaauuuccugggaau

SEQ ID NO: 90563 - RNA, 19 nt, Artificial Sequence
  Description of Artificial Sequence: Synthetic oligonucleotide
  Antisense strand to SEQ ID NO: 90482
auucccaggaaauuguaaa

SEQ ID NO: 90564 - RNA, 19 nt, Artificial Sequence
  Description of Artificial Sequence: Synthetic oligonucleotide
  Sense strand starting at position 2291 of SEQ ID NO: 1137
acaauuuccugggaauuag

SEQ ID NO: 90565 - RNA, 19 nt, Artificial Sequence
  Description of Artificial Sequence: Synthetic oligonucleotide
  Antisense strand to SEQ ID NO: 90484
cuaauucccaggaaauugu

SEQ ID NO: 90566 - RNA, 19 nt, Artificial Sequence
  Description of Artificial Sequence: Synthetic oligonucleotide
  Sense strand starting at position 2301 of SEQ ID NO: 1137
gggaauuaguaugacauaa

SEQ ID NO: 90567 - RNA, 19 nt, Artificial Sequence
  Description of Artificial Sequence: Synthetic oligonucleotide
  Antisense strand to SEQ ID NO: 90486
uuaugucauacuaauuccc

SEQ ID NO: 90568 - RNA, 19 nt, Artificial Sequence
  Description of Artificial Sequence: Synthetic oligonucleotide
  Sense strand starting at position 2319 of SEQ ID NO: 1137
auucuuucuugagucauga

SEQ ID NO: 90569 - RNA, 19 nt, Artificial Sequence
  Description of Artificial Sequence: Synthetic oligonucleotide
  Antisense strand to SEQ ID NO: 90488
ucaugacucaagaaagaau

SEQ ID NO: 90570 - RNA, 19 nt, Artificial Sequence
  Description of Artificial Sequence: Synthetic oligonucleotide
  Sense strand starting at position 2373 of SEQ ID NO: 1137
gaaauaauuggacguccau

SEQ ID NO: 90571 - RNA, 19 nt, Artificial Sequence
  Description of Artificial Sequence: Synthetic oligonucleotide
  Antisense strand to SEQ ID NO: 90490
auggacguccaauuauuuc

SEQ ID NO: 90572 - RNA, 19 nt, Artificial Sequence
  Description of Artificial Sequence: Synthetic oligonucleotide
  Sense strand starting at position 2379 of SEQ ID NO: 1137
auuggacguccauauguaa

SEQ ID NO: 90573 - RNA, 19 nt, Artificial Sequence
  Description of Artificial Sequence: Synthetic oligonucleotide
  Antisense strand to SEQ ID NO: 90492
uuacauauggacguccaau

SEQ ID NO: 90574 - RNA, 19 nt, Artificial Sequence
  Description of Artificial Sequence: Synthetic oligonucleotide
  Sense strand starting at position 3027 of SEQ ID NO: 1137
ggcaaaguauuugaagagu

SEQ ID NO: 90575 - RNA, 19 nt, Artificial Sequence
  Description of Artificial Sequence: Synthetic oligonucleotide
  Antisense strand to SEQ ID NO: 90494
acucuucaaauacuuugcc

SEQ ID NO: 90576 - RNA, 19 nt, Artificial Sequence
  Description of Artificial Sequence: Synthetic oligonucleotide
  Sense strand starting at position 3059 of SEQ ID NO: 1137
aagauauauggguggcagu

SEQ ID NO: 90577 - RNA, 19 nt, Artificial Sequence
  Description of Artificial Sequence: Synthetic oligonucleotide
  Antisense strand to SEQ ID NO: 90496
acugccacccauauaucuu

SEQ ID NO: 90578 - RNA, 19 nt, Artificial Sequence
  Description of Artificial Sequence: Synthetic oligonucleotide
  Sense strand starting at position 3060 of SEQ ID NO: 1137
agauauauggguggcaguu

SEQ ID NO: 90579 - RNA, 19 nt, Artificial Sequence
  Description of Artificial Sequence: Synthetic oligonucleotide
  Antisense strand to SEQ ID NO: 90498
aacugccacccauauaucu

SEQ ID NO: 90580 - RNA, 19 nt, Artificial Sequence
  Description of Artificial Sequence: Synthetic oligonucleotide
  Sense strand starting at position 3072 of SEQ ID NO: 1137
ggcaguuaagcacaugaaa

SEQ ID NO: 90581 - RNA, 19 nt, Artificial Sequence
  Description of Artificial Sequence: Synthetic oligonucleotide
  Antisense strand to SEQ ID NO: 90500
uuucaugugcuuaacugcc

SEQ ID NO: 90582 - RNA, 19 nt, Artificial Sequence
  Description of Artificial Sequence: Synthetic oligonucleotide
  Sense strand starting at position 3101 of SEQ ID NO: 1137
ccuaaucagucauuagaga

SEQ ID NO: 90583 - RNA, 19 nt, Artificial Sequence
  Description of Artificial Sequence: Synthetic oligonucleotide
  Antisense strand to SEQ ID NO: 90502
ucucuaaugacugauuagg

SEQ ID NO: 90584 - RNA, 19 nt, Artificial Sequence
  Description of Artificial Sequence: Synthetic oligonucleotide
  Sense strand starting at position 3229 of SEQ ID NO: 1137
caagucauugcugguagaa

SEQ ID NO: 90585 - RNA, 19 nt, Artificial Sequence
  Description of Artificial Sequence: Synthetic oligonucleotide
  Antisense strand to SEQ ID NO: 90504
uucuaccagcaaugacuug

SEQ ID NO: 90586 - RNA, 19 nt, Artificial Sequence
  Description of Artificial Sequence: Synthetic oligonucleotide
  Sense strand starting at position 3709 of SEQ ID NO: 1137
aggugauagaacuguugua

SEQ ID NO: 90587 - RNA, 19 nt, Artificial Sequence
  Description of Artificial Sequence: Synthetic oligonucleotide
  Antisense strand to SEQ ID NO: 90506
uacaacaguucuaucaccu

SEQ ID NO: 90588 - RNA, 19 nt, Artificial Sequence
  Description of Artificial Sequence: Synthetic oligonucleotide
  Sense strand starting at position 3716 of SEQ ID NO: 1137
agaacuguuguaugucuua

SEQ ID NO: 90589 - RNA, 19 nt, Artificial Sequence
  Description of Artificial Sequence: Synthetic oligonucleotide
  Antisense strand to SEQ ID NO: 90508
uaagacauacaacaguucu

SEQ ID NO: 90590 - RNA, 19 nt, Artificial Sequence
  Description of Artificial Sequence: Synthetic oligonucleotide
  Sense strand starting at position 3744 of SEQ ID NO: 1137
ggguuuaccugacuauaua

SEQ ID NO: 90591 - RNA, 19 nt, Artificial Sequence
  Description of Artificial Sequence: Synthetic oligonucleotide
  Antisense strand to SEQ ID NO: 90510
uauauagucagguaaaccc

SEQ ID NO: 90592 - RNA, 19 nt, Artificial Sequence
  Description of Artificial Sequence: Synthetic oligonucleotide
  Sense strand starting at position 3745 of SEQ ID NO: 1137
gguuuaccugacuauauau

SEQ ID NO: 90593 - RNA, 19 nt, Artificial Sequence
  Description of Artificial Sequence: Synthetic oligonucleotide
  Antisense strand to SEQ ID NO: 90512
auauauagucagguaaacc

SEQ ID NO: 90594 - RNA, 19 nt, Artificial Sequence
  Description of Artificial Sequence: Synthetic oligonucleotide
  Sense strand starting at position 3765 of SEQ ID NO: 1137
uuaguuaaagcucauagaa

SEQ ID NO: 90595 - RNA, 19 nt, Artificial Sequence
  Description of Artificial Sequence: Synthetic oligonucleotide
  Antisense strand to SEQ ID NO: 90514
uucuaugagcuuuaacuaa

SEQ ID NO: 90596 - RNA, 19 nt, Artificial Sequence
  Description of Artificial Sequence: Synthetic oligonucleotide
  Sense strand starting at position 3775 of SEQ ID NO: 1137
cucauagaauuggauaauu

SEQ ID NO: 90597 - RNA, 19 nt, Artificial Sequence
  Description of Artificial Sequence: Synthetic oligonucleotide
  Antisense strand to SEQ ID NO: 90516
aauuauccaauucuaugag

SEQ ID NO: 90598 - RNA, 19 nt, Artificial Sequence
  Description of Artificial Sequence: Synthetic oligonucleotide
  Sense strand starting at position 3921 of SEQ ID NO: 1137
auacaagauuuaggaucau

SEQ ID NO: 90599 - RNA, 19 nt, Artificial Sequence
  Description of Artificial Sequence: Synthetic oligonucleotide
  Antisense strand to SEQ ID NO: 90518
augauccuaaaucuuguau

SEQ ID NO: 90600 - RNA, 19 nt, Artificial Sequence
  Description of Artificial Sequence: Synthetic oligonucleotide
  Sense strand starting at position 3927 of SEQ ID NO: 1137
gauuuaggaucaugguuau

SEQ ID NO: 90601 - RNA, 19 nt, Artificial Sequence
  Description of Artificial Sequence: Synthetic oligonucleotide
  Antisense strand to SEQ ID NO: 90520
auaaccaugauccuaaauc

SEQ ID NO: 90602 - RNA, 19 nt, Artificial Sequence
  Description of Artificial Sequence: Synthetic oligonucleotide
  Sense strand starting at position 3930 of SEQ ID NO: 1137
uuaggaucaugguuauauu

SEQ ID NO: 90603 - RNA, 19 nt, Artificial Sequence
  Description of Artificial Sequence: Synthetic oligonucleotide
  Antisense strand to SEQ ID NO: 90522
aauauaaccaugauccuaa

SEQ ID NO: 90604 - RNA, 19 nt, Artificial Sequence
  Description of Artificial Sequence: Synthetic oligonucleotide
  Sense strand starting at position 3968 of SEQ ID NO: 1137
augggugaaggcugaauua

SEQ ID NO: 90605 - RNA, 19 nt, Artificial Sequence
  Description of Artificial Sequence: Synthetic oligonucleotide
  Antisense strand to SEQ ID NO: 90524
uaauucagccuucacccau

SEQ ID NO: 90606 - RNA, 19 nt, Artificial Sequence
  Description of Artificial Sequence: Synthetic oligonucleotide
  Sense strand starting at position 44 of SEQ ID NO: 1138
uuguaauuugacuguagcu

SEQ ID NO: 90607 - RNA, 19 nt, Artificial Sequence
  Description of Artificial Sequence: Synthetic oligonucleotide
  Antisense strand to SEQ ID NO: 90526
agcuacagucaaauuacaa

SEQ ID NO: 90608 - RNA, 19 nt, Artificial Sequence
  Description of Artificial Sequence: Synthetic oligonucleotide
  Sense strand starting at position 88 of SEQ ID NO: 1138
gguagucaaagugagaugu

SEQ ID NO: 90609 - RNA, 19 nt, Artificial Sequence
  Description of Artificial Sequence: Synthetic oligonucleotide
  Antisense strand to SEQ ID NO: 90528
acaucucacuuugacuacc

SEQ ID NO: 90610 - RNA, 19 nt, Artificial Sequence
  Description of Artificial Sequence: Synthetic oligonucleotide
  Sense strand starting at position 92 of SEQ ID NO: 1138
gucaaagugagauguuacu

SEQ ID NO: 90611 - RNA, 19 nt, Artificial Sequence
  Description of Artificial Sequence: Synthetic oligonucleotide
  Antisense strand to SEQ ID NO: 90530
aguaacaucucacuuugac

SEQ ID NO: 90612 - RNA, 19 nt, Artificial Sequence
  Description of Artificial Sequence: Synthetic oligonucleotide
  Sense strand starting at position 179 of SEQ ID NO: 1138
augugacuccauugaaguu

SEQ ID NO: 90613 - RNA, 19 nt, Artificial Sequence
  Description of Artificial Sequence: Synthetic oligonucleotide
  Antisense strand to SEQ ID NO: 90532
aacuucaauggagucacau

SEQ ID NO: 90614 - RNA, 19 nt, Artificial Sequence
  Description of Artificial Sequence: Synthetic oligonucleotide
  Sense strand starting at position 246 of SEQ ID NO: 1138
auuuguugcuucuuuggua

SEQ ID NO: 90615 - RNA, 19 nt, Artificial Sequence
  Description of Artificial Sequence: Synthetic oligonucleotide
  Antisense strand to SEQ ID NO: 90534
uaccaaagaagcaacaaau

SEQ ID NO: 90616 - RNA, 19 nt, Artificial Sequence
  Description of Artificial Sequence: Synthetic oligonucleotide
  Sense strand starting at position 253 of SEQ ID NO: 1138
gcuucuuugguauaucuau

SEQ ID NO: 90617 - RNA, 19 nt, Artificial Sequence
  Description of Artificial Sequence: Synthetic oligonucleotide
  Antisense strand to SEQ ID NO: 90536
auagauauaccaaagaagc

SEQ ID NO: 90618 - RNA, 19 nt, Artificial Sequence
  Description of Artificial Sequence: Synthetic oligonucleotide
  Sense strand starting at position 536 of SEQ ID NO: 1138
auuuccgguuucuuaguua

SEQ ID NO: 90619 - RNA, 19 nt, Artificial Sequence
  Description of Artificial Sequence: Synthetic oligonucleotide
  Antisense strand to SEQ ID NO: 90538
uaacuaagaaaccggaaau

SEQ ID NO: 90620 - RNA, 19 nt, Artificial Sequence
  Description of Artificial Sequence: Synthetic oligonucleotide
  Sense strand starting at position 594 of SEQ ID NO: 1138
ucugucauacacuggaaau

SEQ ID NO: 90621 - RNA, 19 nt, Artificial Sequence
  Description of Artificial Sequence: Synthetic oligonucleotide
  Antisense strand to SEQ ID NO: 90540
auuuccaguguaugacaga

SEQ ID NO: 90622 - RNA, 19 nt, Artificial Sequence
  Description of Artificial Sequence: Synthetic oligonucleotide
  Sense strand starting at position 622 of SEQ ID NO: 1138
guauuaauguccucucaga

SEQ ID NO: 90623 - RNA, 19 nt, Artificial Sequence
  Description of Artificial Sequence: Synthetic oligonucleotide
  Antisense strand to SEQ ID NO: 90542
ucugagaggacauuaauac

SEQ ID NO: 90624 - RNA, 19 nt, Artificial Sequence
  Description of Artificial Sequence: Synthetic oligonucleotide
  Sense strand starting at position 667 of SEQ ID NO: 1138
cugauacccucuuugaguu

SEQ ID NO: 90625 - RNA, 19 nt, Artificial Sequence
  Description of Artificial Sequence: Synthetic oligonucleotide
  Antisense strand to SEQ ID NO: 90544
aacucaaagaggguaucag

SEQ ID NO: 90626 - RNA, 19 nt, Artificial Sequence
  Description of Artificial Sequence: Synthetic oligonucleotide
  Sense strand starting at position 668 of SEQ ID NO: 1138
ugauacccucuuugaguuu

SEQ ID NO: 90627 - RNA, 19 nt, Artificial Sequence
  Description of Artificial Sequence: Synthetic oligonucleotide
  Antisense strand to SEQ ID NO: 90546
aaacucaaagaggguauca

SEQ ID NO: 90628 - RNA, 19 nt, Artificial Sequence
  Description of Artificial Sequence: Synthetic oligonucleotide
  Sense strand starting at position 803 of SEQ ID NO: 1138
uuuccuggugcagagauaa

SEQ ID NO: 90629 - RNA, 19 nt, Artificial Sequence
  Description of Artificial Sequence: Synthetic oligonucleotide
  Antisense strand to SEQ ID NO: 90548
uuaucucugcaccaggaaa

SEQ ID NO: 90630 - RNA, 19 nt, Artificial Sequence
  Description of Artificial Sequence: Synthetic oligonucleotide
  Sense strand starting at position 837 of SEQ ID NO: 1138
cuggguuguacugaccaaa

SEQ ID NO: 90631 - RNA, 19 nt, Artificial Sequence
  Description of Artificial Sequence: Synthetic oligonucleotide
  Antisense strand to SEQ ID NO: 90550
uuuggucaguacaacccag

SEQ ID NO: 90632 - RNA, 19 nt, Artificial Sequence
  Description of Artificial Sequence: Synthetic oligonucleotide
  Sense strand starting at position 1061 of SEQ ID NO: 1138
gccugugaaagucagaaga

SEQ ID NO: 90633 - RNA, 19 nt, Artificial Sequence
  Description of Artificial Sequence: Synthetic oligonucleotide
  Antisense strand to SEQ ID NO: 90552
ucuucugacuuucacaggc

SEQ ID NO: 90634 - RNA, 19 nt, Artificial Sequence
  Description of Artificial Sequence: Synthetic oligonucleotide
  Sense strand starting at position 1717 of SEQ ID NO: 1138
uucuguagaauggauguua

SEQ ID NO: 90635 - RNA, 19 nt, Artificial Sequence
  Description of Artificial Sequence: Synthetic oligonucleotide
  Antisense strand to SEQ ID NO: 90554
uaacauccauucuacagaa

SEQ ID NO: 90636 - RNA, 19 nt, Artificial Sequence
  Description of Artificial Sequence: Synthetic oligonucleotide
  Sense strand starting at position 1772 of SEQ ID NO: 1138
agggaauugugagcucugu

SEQ ID NO: 90637 - RNA, 19 nt, Artificial Sequence
  Description of Artificial Sequence: Synthetic oligonucleotide
  Antisense strand to SEQ ID NO: 90556
acagagcucacaauucccu

SEQ ID NO: 90638 - RNA, 19 nt, Artificial Sequence
  Description of Artificial Sequence: Synthetic oligonucleotide
  Sense strand starting at position 2160 of SEQ ID NO: 1138
cuguguacucaccaagaug

SEQ ID NO: 90639 - RNA, 19 nt, Artificial Sequence
  Description of Artificial Sequence: Synthetic oligonucleotide
  Antisense strand to SEQ ID NO: 90558
caucuuggugaguacacag

SEQ ID NO: 90640 - RNA, 19 nt, Artificial Sequence
  Description of Artificial Sequence: Synthetic oligonucleotide
  Sense strand starting at position 2294 of SEQ ID NO: 1138
guagucacuccuuauucca

SEQ ID NO: 90641 - RNA, 19 nt, Artificial Sequence
  Description of Artificial Sequence: Synthetic oligonucleotide
  Antisense strand to SEQ ID NO: 90560
uggaauaaggagugacuac

SEQ ID NO: 90642 - RNA, 19 nt, Artificial Sequence
  Description of Artificial Sequence: Synthetic oligonucleotide
  Sense strand starting at position 2466 of SEQ ID NO: 1138
gugucagaacuccauucuu

SEQ ID NO: 90643 - RNA, 19 nt, Artificial Sequence
  Description of Artificial Sequence: Synthetic oligonucleotide
  Antisense strand to SEQ ID NO: 90562
aagaauggaguucugacac

SEQ ID NO: 90644 - RNA, 19 nt, Artificial Sequence
  Description of Artificial Sequence: Synthetic oligonucleotide
  Sense strand starting at position 2476 of SEQ ID NO: 1138
uccauucuucuuuaugguu

SEQ ID NO: 90645 - RNA, 19 nt, Artificial Sequence
  Description of Artificial Sequence: Synthetic oligonucleotide
  Antisense strand to SEQ ID NO: 90564
aaccauaaagaagaaugga

SEQ ID NO: 90646 - RNA, 19 nt, Artificial Sequence
  Description of Artificial Sequence: Synthetic oligonucleotide
  Sense strand starting at position 2485 of SEQ ID NO: 1138
cuuuaugguugaguaauau

SEQ ID NO: 90647 - RNA, 19 nt, Artificial Sequence
  Description of Artificial Sequence: Synthetic oligonucleotide
  Antisense strand to SEQ ID NO: 90566
auauuacucaaccauaaag

SEQ ID NO: 90648 - RNA, 19 nt, Artificial Sequence
  Description of Artificial Sequence: Synthetic oligonucleotide
  Sense strand starting at position 2719 of SEQ ID NO: 1138
ggcauuugcagccauguau

SEQ ID NO: 90649 - RNA, 19 nt, Artificial Sequence
  Description of Artificial Sequence: Synthetic oligonucleotide
  Antisense strand to SEQ ID NO: 90568
auacauggcugcaaaugcc

SEQ ID NO: 90650 - RNA, 19 nt, Artificial Sequence
  Description of Artificial Sequence: Synthetic oligonucleotide
  Sense strand starting at position 2747 of SEQ ID NO: 1138
agcauuuccuuugcuguau

SEQ ID NO: 90651 - RNA, 19 nt, Artificial Sequence
  Description of Artificial Sequence: Synthetic oligonucleotide
  Antisense strand to SEQ ID NO: 90570
auacagcaaaggaaaugcu

SEQ ID NO: 90652 - RNA, 19 nt, Artificial Sequence
  Description of Artificial Sequence: Synthetic oligonucleotide
  Sense strand starting at position 2843 of SEQ ID NO: 1138
ugaacucauugguugcuua

SEQ ID NO: 90653 - RNA, 19 nt, Artificial Sequence
  Description of Artificial Sequence: Synthetic oligonucleotide
  Antisense strand to SEQ ID NO: 90572
uaagcaaccaaugaguuca

SEQ ID NO: 90654 - RNA, 19 nt, Artificial Sequence
  Description of Artificial Sequence: Synthetic oligonucleotide
  Sense strand starting at position 2844 of SEQ ID NO: 1138
gaacucauugguugcuuaa

SEQ ID NO: 90655 - RNA, 19 nt, Artificial Sequence
  Description of Artificial Sequence: Synthetic oligonucleotide
  Antisense strand to SEQ ID NO: 90574
uuaagcaaccaaugaguuc

SEQ ID NO: 90656 - RNA, 19 nt, Artificial Sequence
  Description of Artificial Sequence: Synthetic oligonucleotide
  Sense strand starting at position 2846 of SEQ ID NO: 1138
acucauugguugcuuaaga

SEQ ID NO: 90657 - RNA, 19 nt, Artificial Sequence
  Description of Artificial Sequence: Synthetic oligonucleotide
  Antisense strand to SEQ ID NO: 90576
ucuuaagcaaccaaugagu

SEQ ID NO: 90658 - RNA, 19 nt, Artificial Sequence
  Description of Artificial Sequence: Synthetic oligonucleotide
  Sense strand starting at position 2919 of SEQ ID NO: 1138
ugugguuacggaugauacu

SEQ ID NO: 90659 - RNA, 19 nt, Artificial Sequence
  Description of Artificial Sequence: Synthetic oligonucleotide
  Antisense strand to SEQ ID NO: 90578
aguaucauccguaaccaca

SEQ ID NO: 90660 - RNA, 19 nt, Artificial Sequence
  Description of Artificial Sequence: Synthetic oligonucleotide
  Sense strand starting at position 2920 of SEQ ID NO: 1138
gugguuacggaugauacuu

SEQ ID NO: 90661 - RNA, 19 nt, Artificial Sequence
  Description of Artificial Sequence: Synthetic oligonucleotide
  Antisense strand to SEQ ID NO: 90580
aaguaucauccguaaccac

SEQ ID NO: 90662 - RNA, 19 nt, Artificial Sequence
  Description of Artificial Sequence: Synthetic oligonucleotide
  Sense strand starting at position 2925 of SEQ ID NO: 1138
uacggaugauacuuuguau

SEQ ID NO: 90663 - RNA, 19 nt, Artificial Sequence
  Description of Artificial Sequence: Synthetic oligonucleotide
  Antisense strand to SEQ ID NO: 90582
auacaaaguaucauccgua

SEQ ID NO: 90664 - RNA, 19 nt, Artificial Sequence
  Description of Artificial Sequence: Synthetic oligonucleotide
  Sense strand starting at position 2928 of SEQ ID NO: 1138
ggaugauacuuuguaugau

SEQ ID NO: 90665 - RNA, 19 nt, Artificial Sequence
  Description of Artificial Sequence: Synthetic oligonucleotide
  Antisense strand to SEQ ID NO: 90584
aucauacaaaguaucaucc

SEQ ID NO: 90666 - RNA, 19 nt, Artificial Sequence
  Description of Artificial Sequence: Synthetic oligonucleotide
  Sense strand starting at position 2991 of SEQ ID NO: 1138
aauggucuacccugcagaa

SEQ ID NO: 90667 - RNA, 19 nt, Artificial Sequence
  Description of Artificial Sequence: Synthetic oligonucleotide
  Antisense strand to SEQ ID NO: 90586
uucugcaggguagaccauu

SEQ ID NO: 90668 - RNA, 19 nt, Artificial Sequence
  Description of Artificial Sequence: Synthetic oligonucleotide
  Sense strand starting at position 3005 of SEQ ID NO: 1138
cagaauguuccaugugcaa

SEQ ID NO: 90669 - RNA, 19 nt, Artificial Sequence
  Description of Artificial Sequence: Synthetic oligonucleotide
  Antisense strand to SEQ ID NO: 90588
uugcacauggaacauucug

SEQ ID NO: 90670 - RNA, 19 nt, Artificial Sequence
  Description of Artificial Sequence: Synthetic oligonucleotide
  Sense strand starting at position 3064 of SEQ ID NO: 1138
caacaagaugucuguuaga

SEQ ID NO: 90671 - RNA, 19 nt, Artificial Sequence
  Description of Artificial Sequence: Synthetic oligonucleotide
  Antisense strand to SEQ ID NO: 90590
ucuaacagacaucuuguug

SEQ ID NO: 90672 - RNA, 19 nt, Artificial Sequence
  Description of Artificial Sequence: Synthetic oligonucleotide
  Sense strand starting at position 3069 of SEQ ID NO: 1138
agaugucuguuagauuuaa

SEQ ID NO: 90673 - RNA, 19 nt, Artificial Sequence
  Description of Artificial Sequence: Synthetic oligonucleotide
  Antisense strand to SEQ ID NO: 90592
uuaaaucuaacagacaucu

SEQ ID NO: 90674 - RNA, 19 nt, Artificial Sequence
  Description of Artificial Sequence: Synthetic oligonucleotide
  Sense strand starting at position 3344 of SEQ ID NO: 1138
gccauuaauuucgucuuaa

SEQ ID NO: 90675 - RNA, 19 nt, Artificial Sequence
  Description of Artificial Sequence: Synthetic oligonucleotide
  Antisense strand to SEQ ID NO: 90594
uuaagacgaaauuaauggc

SEQ ID NO: 90676 - RNA, 19 nt, Artificial Sequence
  Description of Artificial Sequence: Synthetic oligonucleotide
  Sense strand starting at position 3362 of SEQ ID NO: 1138
aagucuauuucguccagua

SEQ ID NO: 90677 - RNA, 19 nt, Artificial Sequence
  Description of Artificial Sequence: Synthetic oligonucleotide
  Antisense strand to SEQ ID NO: 90596
uacuggacgaaauagacuu

SEQ ID NO: 90678 - RNA, 19 nt, Artificial Sequence
  Description of Artificial Sequence: Synthetic oligonucleotide
  Sense strand starting at position 3364 of SEQ ID NO: 1138
gucuauuucguccaguauu

SEQ ID NO: 90679 - RNA, 19 nt, Artificial Sequence
  Description of Artificial Sequence: Synthetic oligonucleotide
  Antisense strand to SEQ ID NO: 90598
aauacuggacgaaauagac

SEQ ID NO: 90680 - RNA, 19 nt, Artificial Sequence
  Description of Artificial Sequence: Synthetic oligonucleotide
  Sense strand starting at position 3367 of SEQ ID NO: 1138
uauuucguccaguauugua

SEQ ID NO: 90681 - RNA, 19 nt, Artificial Sequence
  Description of Artificial Sequence: Synthetic oligonucleotide
  Antisense strand to SEQ ID NO: 90600
uacaauacuggacgaaaua

SEQ ID NO: 90682 - RNA, 19 nt, Artificial Sequence
  Description of Artificial Sequence: Synthetic oligonucleotide
  Sense strand starting at position 3474 of SEQ ID NO: 1138
gugugucuuauagauagca

SEQ ID NO: 90683 - RNA, 19 nt, Artificial Sequence
  Description of Artificial Sequence: Synthetic oligonucleotide
  Antisense strand to SEQ ID NO: 90602
ugcuaucuauaagacacac

SEQ ID NO: 90684 - RNA, 19 nt, Artificial Sequence
  Description of Artificial Sequence: Synthetic oligonucleotide
  Sense strand starting at position 3752 of SEQ ID NO: 1138
cuuagugguuuccuuggga

SEQ ID NO: 90685 - RNA, 19 nt, Artificial Sequence
  Description of Artificial Sequence: Synthetic oligonucleotide
  Antisense strand to SEQ ID NO: 90604
ucccaaggaaaccacuaag

SEQ ID NO: 90686 - RNA, 19 nt, Artificial Sequence
  Description of Artificial Sequence: Synthetic oligonucleotide
  Sense strand starting at position 3946 of SEQ ID NO: 1139
gccuauauuuccucucugu

SEQ ID NO: 90687 - RNA, 19 nt, Artificial Sequence
  Description of Artificial Sequence: Synthetic oligonucleotide
  Antisense strand to SEQ ID NO: 90606
acagagaggaaauauaggc

SEQ ID NO: 90688 - RNA, 19 nt, Artificial Sequence
  Description of Artificial Sequence: Synthetic oligonucleotide
  Sense strand starting at position 3902 of SEQ ID NO: 1139
ugaagacauugauaaugau

SEQ ID NO: 90689 - RNA, 19 nt, Artificial Sequence
  Description of Artificial Sequence: Synthetic oligonucleotide
  Antisense strand to SEQ ID NO: 90608
aucauuaucaaugucuuca

SEQ ID NO: 90690 - RNA, 19 nt, Artificial Sequence
  Description of Artificial Sequence: Synthetic oligonucleotide
  Sense strand starting at position 3817 of SEQ ID NO: 1139
auauaaucacgagguacuu

SEQ ID NO: 90691 - RNA, 19 nt, Artificial Sequence
  Description of Artificial Sequence: Synthetic oligonucleotide
  Antisense strand to SEQ ID NO: 90610
aaguaccucgugauuauau

SEQ ID NO: 90692 - RNA, 19 nt, Artificial Sequence
  Description of Artificial Sequence: Synthetic oligonucleotide
  Sense strand starting at position 3798 of SEQ ID NO: 1139
auguuauacguauauacac

SEQ ID NO: 90693 - RNA, 19 nt, Artificial Sequence
  Description of Artificial Sequence: Synthetic oligonucleotide
  Antisense strand to SEQ ID NO: 90612
guguauauacguauaacau

SEQ ID NO: 90694 - RNA, 19 nt, Artificial Sequence
  Description of Artificial Sequence: Synthetic oligonucleotide
  Sense strand starting at position 3500 of SEQ ID NO: 1139
ggaaguaucugucugucaa

SEQ ID NO: 90695 - RNA, 19 nt, Artificial Sequence
  Description of Artificial Sequence: Synthetic oligonucleotide
  Antisense strand to SEQ ID NO: 90614
uugacagacagauacuucc

SEQ ID NO: 90696 - RNA, 19 nt, Artificial Sequence
  Description of Artificial Sequence: Synthetic oligonucleotide
  Sense strand starting at position 3434 of SEQ ID NO: 1139
gcauuuaaguagcucauga

SEQ ID NO: 90697 - RNA, 19 nt, Artificial Sequence
  Description of Artificial Sequence: Synthetic oligonucleotide
  Antisense strand to SEQ ID NO: 90616
ucaugagcuacuuaaaugc

SEQ ID NO: 90698 - RNA, 19 nt, Artificial Sequence
  Description of Artificial Sequence: Synthetic oligonucleotide
  Sense strand starting at position 3354 of SEQ ID NO: 1139
aggaaugugucaccaucaa

SEQ ID NO: 90699 - RNA, 19 nt, Artificial Sequence
  Description of Artificial Sequence: Synthetic oligonucleotide
  Antisense strand to SEQ ID NO: 90618
uugauggugacacauuccu

SEQ ID NO: 90700 - RNA, 19 nt, Artificial Sequence
  Description of Artificial Sequence: Synthetic oligonucleotide
  Sense strand starting at position 3343 of SEQ ID NO: 1139
uuggguuaccaaggaaugu

SEQ ID NO: 90701 - RNA, 19 nt, Artificial Sequence
  Description of Artificial Sequence: Synthetic oligonucleotide
  Antisense strand to SEQ ID NO: 90620
acauuccuugguaacccaa

SEQ ID NO: 90702 - RNA, 19 nt, Artificial Sequence
  Description of Artificial Sequence: Synthetic oligonucleotide
  Sense strand starting at position 3040 of SEQ ID NO: 1139
ggaagaacuuuggcaccaa

SEQ ID NO: 90703 - RNA, 19 nt, Artificial Sequence
  Description of Artificial Sequence: Synthetic oligonucleotide
  Antisense strand to SEQ ID NO: 90622
uuggugccaaaguucuucc

SEQ ID NO: 90704 - RNA, 19 nt, Artificial Sequence
  Description of Artificial Sequence: Synthetic oligonucleotide
  Sense strand starting at position 2912 of SEQ ID NO: 1139
augagacuuucuguaaauc

SEQ ID NO: 90705 - RNA, 19 nt, Artificial Sequence
  Description of Artificial Sequence: Synthetic oligonucleotide
  Antisense strand to SEQ ID NO: 90624
gauuuacagaaagucucau

SEQ ID NO: 90706 - RNA, 19 nt, Artificial Sequence
  Description of Artificial Sequence: Synthetic oligonucleotide
  Sense strand starting at position 2910 of SEQ ID NO: 1139
auaugagacuuucuguaaa

SEQ ID NO: 90707 - RNA, 19 nt, Artificial Sequence
  Description of Artificial Sequence: Synthetic oligonucleotide
  Antisense strand to SEQ ID NO: 90626
uuuacagaaagucucauau

SEQ ID NO: 90708 - RNA, 19 nt, Artificial Sequence
  Description of Artificial Sequence: Synthetic oligonucleotide
  Sense strand starting at position 2673 of SEQ ID NO: 1139
acagauacgucccuuagga

SEQ ID NO: 90709 - RNA, 19 nt, Artificial Sequence
  Description of Artificial Sequence: Synthetic oligonucleotide
  Antisense strand to SEQ ID NO: 90628
uccuaagggacguaucugu

SEQ ID NO: 90710 - RNA, 19 nt, Artificial Sequence
  Description of Artificial Sequence: Synthetic oligonucleotide
  Sense strand starting at position 2626 of SEQ ID NO: 1139
cccucuggauuccuauaga

SEQ ID NO: 90711 - RNA, 19 nt, Artificial Sequence
  Description of Artificial Sequence: Synthetic oligonucleotide
  Antisense strand to SEQ ID NO: 90630
ucuauaggaauccagaggg

SEQ ID NO: 90712 - RNA, 19 nt, Artificial Sequence
  Description of Artificial Sequence: Synthetic oligonucleotide
  Sense strand starting at position 2575 of SEQ ID NO: 1139
guucgacuuccagaauuac

SEQ ID NO: 90713 - RNA, 19 nt, Artificial Sequence
  Description of Artificial Sequence: Synthetic oligonucleotide
  Antisense strand to SEQ ID NO: 90632
guaauucuggaagucgaac

SEQ ID NO: 90714 - RNA, 19 nt, Artificial Sequence
  Description of Artificial Sequence: Synthetic oligonucleotide
  Sense strand starting at position 2469 of SEQ ID NO: 1139
ggauaauccuucccagguu

SEQ ID NO: 90715 - RNA, 19 nt, Artificial Sequence
  Description of Artificial Sequence: Synthetic oligonucleotide
  Antisense strand to SEQ ID NO: 90634
aaccugggaaggauuaucc

SEQ ID NO: 90716 - RNA, 19 nt, Artificial Sequence
  Description of Artificial Sequence: Synthetic oligonucleotide
  Sense strand starting at position 2457 of SEQ ID NO: 1139
gucugaucacagggauaau

SEQ ID NO: 90717 - RNA, 19 nt, Artificial Sequence
  Description of Artificial Sequence: Synthetic oligonucleotide
  Antisense strand to SEQ ID NO: 90636
auuaucccugugaucagac

SEQ ID NO: 90718 - RNA, 19 nt, Artificial Sequence
  Description of Artificial Sequence: Synthetic oligonucleotide
  Sense strand starting at position 2447 of SEQ ID NO: 1139
ucaucuuccugucugauca

SEQ ID NO: 90719 - RNA, 19 nt, Artificial Sequence
  Description of Artificial Sequence: Synthetic oligonucleotide
  Antisense strand to SEQ ID NO: 90638
ugaucagacaggaagauga

SEQ ID NO: 90720 - RNA, 19 nt, Artificial Sequence
  Description of Artificial Sequence: Synthetic oligonucleotide
  Sense strand starting at position 2415 of SEQ ID NO: 1139
uugguagggauguagcaau

SEQ ID NO: 90721 - RNA, 19 nt, Artificial Sequence
  Description of Artificial Sequence: Synthetic oligonucleotide
  Antisense strand to SEQ ID NO: 90640
auugcuacaucccuaccaa

SEQ ID NO: 90722 - RNA, 19 nt, Artificial Sequence
  Description of Artificial Sequence: Synthetic oligonucleotide
  Sense strand starting at position 2349 of SEQ ID NO: 1139
ugagaucugcacgguuaga

SEQ ID NO: 90723 - RNA, 19 nt, Artificial Sequence
  Description of Artificial Sequence: Synthetic oligonucleotide
  Antisense strand to SEQ ID NO: 90642
ucuaaccgugcagaucuca

SEQ ID NO: 90724 - RNA, 19 nt, Artificial Sequence
  Description of Artificial Sequence: Synthetic oligonucleotide
  Sense strand starting at position 2203 of SEQ ID NO: 1139
agugacuucugagcuaaua

SEQ ID NO: 90725 - RNA, 19 nt, Artificial Sequence
  Description of Artificial Sequence: Synthetic oligonucleotide
  Antisense strand to SEQ ID NO: 90644
uauuagcucagaagucacu

SEQ ID NO: 90726 - RNA, 19 nt, Artificial Sequence
  Description of Artificial Sequence: Synthetic oligonucleotide
  Sense strand starting at position 2196 of SEQ ID NO: 1139
guuaauaagugacuucuga

SEQ ID NO: 90727 - RNA, 19 nt, Artificial Sequence
  Description of Artificial Sequence: Synthetic oligonucleotide
  Antisense strand to SEQ ID NO: 90646
ucagaagucacuuauuaac

SEQ ID NO: 90728 - RNA, 19 nt, Artificial Sequence
  Description of Artificial Sequence: Synthetic oligonucleotide
  Sense strand starting at position 2192 of SEQ ID NO: 1139
ggugguuaauaagugacuu

SEQ ID NO: 90729 - RNA, 19 nt, Artificial Sequence
  Description of Artificial Sequence: Synthetic oligonucleotide
  Antisense strand to SEQ ID NO: 90648
aagucacuuauuaaccacc

SEQ ID NO: 90730 - RNA, 19 nt, Artificial Sequence
  Description of Artificial Sequence: Synthetic oligonucleotide
  Sense strand starting at position 2186 of SEQ ID NO: 1139
uuguuaggugguuaauaag

SEQ ID NO: 90731 - RNA, 19 nt, Artificial Sequence
  Description of Artificial Sequence: Synthetic oligonucleotide
  Antisense strand to SEQ ID NO: 90650
cuuauuaaccaccuaacaa

SEQ ID NO: 90732 - RNA, 19 nt, Artificial Sequence
  Description of Artificial Sequence: Synthetic oligonucleotide
  Sense strand starting at position 2185 of SEQ ID NO: 1139
uuuguuaggugguuaauaa

SEQ ID NO: 90733 - RNA, 19 nt, Artificial Sequence
  Description of Artificial Sequence: Synthetic oligonucleotide
  Antisense strand to SEQ ID NO: 90652
uuauuaaccaccuaacaaa

SEQ ID NO: 90734 - RNA, 19 nt, Artificial Sequence
  Description of Artificial Sequence: Synthetic oligonucleotide
  Sense strand starting at position 2182 of SEQ ID NO: 1139
guauuuguuaggugguuaa

SEQ ID NO: 90735 - RNA, 19 nt, Artificial Sequence
  Description of Artificial Sequence: Synthetic oligonucleotide
  Antisense strand to SEQ ID NO: 90654
uuaaccaccuaacaaauac

SEQ ID NO: 90736 - RNA, 19 nt, Artificial Sequence
  Description of Artificial Sequence: Synthetic oligonucleotide
  Sense strand starting at position 2181 of SEQ ID NO: 1139
aguauuuguuaggugguua

SEQ ID NO: 90737 - RNA, 19 nt, Artificial Sequence
  Description of Artificial Sequence: Synthetic oligonucleotide
  Antisense strand to SEQ ID NO: 90656
uaaccaccuaacaaauacu

SEQ ID NO: 90738 - RNA, 19 nt, Artificial Sequence
  Description of Artificial Sequence: Synthetic oligonucleotide
  Sense strand starting at position 1259 of SEQ ID NO: 1139
aagguauguguacacaaau

SEQ ID NO: 90739 - RNA, 19 nt, Artificial Sequence
  Description of Artificial Sequence: Synthetic oligonucleotide
  Antisense strand to SEQ ID NO: 90658
auuuguguacacauaccuu

SEQ ID NO: 90740 - RNA, 19 nt, Artificial Sequence
  Description of Artificial Sequence: Synthetic oligonucleotide
  Sense strand starting at position 1185 of SEQ ID NO: 1139
uagguuuaucuuggaauuc

SEQ ID NO: 90741 - RNA, 19 nt, Artificial Sequence
  Description of Artificial Sequence: Synthetic oligonucleotide
  Antisense strand to SEQ ID NO: 90660
gaauuccaagauaaaccua

SEQ ID NO: 90742 - RNA, 19 nt, Artificial Sequence
  Description of Artificial Sequence: Synthetic oligonucleotide
  Sense strand starting at position 1181 of SEQ ID NO: 1139
aaguuagguuuaucuugga

SEQ ID NO: 90743 - RNA, 19 nt, Artificial Sequence
  Description of Artificial Sequence: Synthetic oligonucleotide
  Antisense strand to SEQ ID NO: 90662
uccaagauaaaccuaacuu

SEQ ID NO: 90744 - RNA, 19 nt, Artificial Sequence
  Description of Artificial Sequence: Synthetic oligonucleotide
  Sense strand starting at position 731 of SEQ ID NO: 1139
gcuccuuaccuuugggaca

SEQ ID NO: 90745 - RNA, 19 nt, Artificial Sequence
  Description of Artificial Sequence: Synthetic oligonucleotide
  Antisense strand to SEQ ID NO: 90664
ugucccaaagguaaggagc

SEQ ID NO: 90746 - RNA, 19 nt, Artificial Sequence
  Description of Artificial Sequence: Synthetic oligonucleotide
  Sense strand starting at position 680 of SEQ ID NO: 1139
augugucugccucagagaa

SEQ ID NO: 90747 - RNA, 19 nt, Artificial Sequence
  Description of Artificial Sequence: Synthetic oligonucleotide
  Antisense strand to SEQ ID NO: 90666
uucucugaggcagacacau

SEQ ID NO: 90748 - RNA, 19 nt, Artificial Sequence
  Description of Artificial Sequence: Synthetic oligonucleotide
  Sense strand starting at position 489 of SEQ ID NO: 1139
auuaguaguaagugcaaga

SEQ ID NO: 90749 - RNA, 19 nt, Artificial Sequence
  Description of Artificial Sequence: Synthetic oligonucleotide
  Antisense strand to SEQ ID NO: 90668
ucuugcacuuacuacuaau

SEQ ID NO: 90750 - RNA, 19 nt, Artificial Sequence
  Description of Artificial Sequence: Synthetic oligonucleotide
  Sense strand starting at position 447 of SEQ ID NO: 1139
agaggcauuuaacaaucaa

SEQ ID NO: 90751 - RNA, 19 nt, Artificial Sequence
  Description of Artificial Sequence: Synthetic oligonucleotide
  Antisense strand to SEQ ID NO: 90670
uugauuguuaaaugccucu

SEQ ID NO: 90752 - RNA, 19 nt, Artificial Sequence
  Description of Artificial Sequence: Synthetic oligonucleotide
  Sense strand starting at position 324 of SEQ ID NO: 1139
gcuagaauguggcuagaau

SEQ ID NO: 90753 - RNA, 19 nt, Artificial Sequence
  Description of Artificial Sequence: Synthetic oligonucleotide
  Antisense strand to SEQ ID NO: 90672
auucuagccacauucuagc

SEQ ID NO: 90754 - RNA, 19 nt, Artificial Sequence
  Description of Artificial Sequence: Synthetic oligonucleotide
  Sense strand starting at position 313 of SEQ ID NO: 1139
uguuuaaacuagcuagaau

SEQ ID NO: 90755 - RNA, 19 nt, Artificial Sequence
  Description of Artificial Sequence: Synthetic oligonucleotide
  Antisense strand to SEQ ID NO: 90674
auucuagcuaguuuaaaca

SEQ ID NO: 90756 - RNA, 19 nt, Artificial Sequence
  Description of Artificial Sequence: Synthetic oligonucleotide
  Sense strand starting at position 305 of SEQ ID NO: 1139
ucuuucuguguuuaaacua

SEQ ID NO: 90757 - RNA, 19 nt, Artificial Sequence
  Description of Artificial Sequence: Synthetic oligonucleotide
  Antisense strand to SEQ ID NO: 90676
uaguuuaaacacagaaaga

SEQ ID NO: 90758 - RNA, 19 nt, Artificial Sequence
  Description of Artificial Sequence: Synthetic oligonucleotide
  Sense strand starting at position 231 of SEQ ID NO: 1139
cuggguaaucccuaaguac

SEQ ID NO: 90759 - RNA, 19 nt, Artificial Sequence
  Description of Artificial Sequence: Synthetic oligonucleotide
  Antisense strand to SEQ ID NO: 90678
guacuuagggauuacccag

SEQ ID NO: 90760 - RNA, 19 nt, Artificial Sequence
  Description of Artificial Sequence: Synthetic oligonucleotide
  Sense strand starting at position 222 of SEQ ID NO: 1139
uccagaucucuggguaauc

SEQ ID NO: 90761 - RNA, 19 nt, Artificial Sequence
  Description of Artificial Sequence: Synthetic oligonucleotide
  Antisense strand to SEQ ID NO: 90680
gauuacccagagaucugga

SEQ ID NO: 90762 - RNA, 19 nt, Artificial Sequence
  Description of Artificial Sequence: Synthetic oligonucleotide
  Sense strand starting at position 220 of SEQ ID NO: 1139
cuuccagaucucuggguaa

SEQ ID NO: 90763 - RNA, 19 nt, Artificial Sequence
  Description of Artificial Sequence: Synthetic oligonucleotide
  Antisense strand to SEQ ID NO: 90682
uuacccagagaucuggaag

SEQ ID NO: 90764 - RNA, 19 nt, Artificial Sequence
  Description of Artificial Sequence: Synthetic oligonucleotide
  Sense strand starting at position 97 of SEQ ID NO: 1139
ugaucuuggagcugucaca

SEQ ID NO: 90765 - RNA, 19 nt, Artificial Sequence
  Description of Artificial Sequence: Synthetic oligonucleotide
  Antisense strand to SEQ ID NO: 90684
ugugacagcuccaagauca

SEQ ID NO: 90766 - RNA, 19 nt, Artificial Sequence
  Description of Artificial Sequence: Synthetic oligonucleotide
  Sense strand starting at position 3777 of SEQ ID NO: 1140
guuguuuggaagcauuauu

SEQ ID NO: 90767 - RNA, 19 nt, Artificial Sequence
  Description of Artificial Sequence: Synthetic oligonucleotide
  Antisense strand to SEQ ID NO: 90686
aauaaugcuuccaaacaac

SEQ ID NO: 90768 - RNA, 19 nt, Artificial Sequence
  Description of Artificial Sequence: Synthetic oligonucleotide
  Sense strand starting at position 3770 of SEQ ID NO: 1140
guuauucguuguuuggaag

SEQ ID NO: 90769 - RNA, 19 nt, Artificial Sequence
  Description of Artificial Sequence: Synthetic oligonucleotide
  Antisense strand to SEQ ID NO: 90688
cuuccaaacaacgaauaac

SEQ ID NO: 90770 - RNA, 19 nt, Artificial Sequence
  Description of Artificial Sequence: Synthetic oligonucleotide
  Sense strand starting at position 3769 of SEQ ID NO: 1140
uguuauucguuguuuggaa

SEQ ID NO: 90771 - RNA, 19 nt, Artificial Sequence
  Description of Artificial Sequence: Synthetic oligonucleotide
  Antisense strand to SEQ ID NO: 90690
uuccaaacaacgaauaaca

SEQ ID NO: 90772 - RNA, 19 nt, Artificial Sequence
  Description of Artificial Sequence: Synthetic oligonucleotide
  Sense strand starting at position 3714 of SEQ ID NO: 1140
acaugaguuuacuuuacua

SEQ ID NO: 90773 - RNA, 19 nt, Artificial Sequence
  Description of Artificial Sequence: Synthetic oligonucleotide
  Antisense strand to SEQ ID NO: 90692
uaguaaaguaaacucaugu

SEQ ID NO: 90774 - RNA, 19 nt, Artificial Sequence
  Description of Artificial Sequence: Synthetic oligonucleotide
  Sense strand starting at position 3711 of SEQ ID NO: 1140
cuuacaugaguuuacuuua

SEQ ID NO: 90775 - RNA, 19 nt, Artificial Sequence
  Description of Artificial Sequence: Synthetic oligonucleotide
  Antisense strand to SEQ ID NO: 90694
uaaaguaaacucauguaag

SEQ ID NO: 90776 - RNA, 19 nt, Artificial Sequence
  Description of Artificial Sequence: Synthetic oligonucleotide
  Sense strand starting at position 3708 of SEQ ID NO: 1140
guacuuacaugaguuuacu

SEQ ID NO: 90777 - RNA, 19 nt, Artificial Sequence
  Description of Artificial Sequence: Synthetic oligonucleotide
  Antisense strand to SEQ ID NO: 90696
aguaaacucauguaaguac

SEQ ID NO: 90778 - RNA, 19 nt, Artificial Sequence
  Description of Artificial Sequence: Synthetic oligonucleotide
  Sense strand starting at position 3660 of SEQ ID NO: 1140
guuguuguuauuugaguuu

SEQ ID NO: 90779 - RNA, 19 nt, Artificial Sequence
  Description of Artificial Sequence: Synthetic oligonucleotide
  Antisense strand to SEQ ID NO: 90698
aaacucaaauaacaacaac

SEQ ID NO: 90780 - RNA, 19 nt, Artificial Sequence
  Description of Artificial Sequence: Synthetic oligonucleotide
  Sense strand starting at position 3490 of SEQ ID NO: 1140
uuugcuugucacuagggaa

SEQ ID NO: 90781 - RNA, 19 nt, Artificial Sequence
  Description of Artificial Sequence: Synthetic oligonucleotide
  Antisense strand to SEQ ID NO: 90700
uucccuagugacaagcaaa

SEQ ID NO: 90782 - RNA, 19 nt, Artificial Sequence
  Description of Artificial Sequence: Synthetic oligonucleotide
  Sense strand starting at position 3486 of SEQ ID NO: 1140
aguauuugcuugucacuag

SEQ ID NO: 90783 - RNA, 19 nt, Artificial Sequence
  Description of Artificial Sequence: Synthetic oligonucleotide
  Antisense strand to SEQ ID NO: 90702
cuagugacaagcaaauacu

SEQ ID NO: 90784 - RNA, 19 nt, Artificial Sequence
  Description of Artificial Sequence: Synthetic oligonucleotide
  Sense strand starting at position 3484 of SEQ ID NO: 1140
agaguauuugcuugucacu

SEQ ID NO: 90785 - RNA, 19 nt, Artificial Sequence
  Description of Artificial Sequence: Synthetic oligonucleotide
  Antisense strand to SEQ ID NO: 90704
agugacaagcaaauacucu

SEQ ID NO: 90786 - RNA, 19 nt, Artificial Sequence
  Description of Artificial Sequence: Synthetic oligonucleotide
  Sense strand starting at position 3483 of SEQ ID NO: 1140
aagaguauuugcuugucac

SEQ ID NO: 90787 - RNA, 19 nt, Artificial Sequence
  Description of Artificial Sequence: Synthetic oligonucleotide
  Antisense strand to SEQ ID NO: 90706
gugacaagcaaauacucuu

SEQ ID NO: 90788 - RNA, 19 nt, Artificial Sequence
  Description of Artificial Sequence: Synthetic oligonucleotide
  Sense strand starting at position 3447 of SEQ ID NO: 1140
gaacuuagacucgauguuu

SEQ ID NO: 90789 - RNA, 19 nt, Artificial Sequence
  Description of Artificial Sequence: Synthetic oligonucleotide
  Antisense strand to SEQ ID NO: 90708
aaacaucgagucuaaguuc

SEQ ID NO: 90790 - RNA, 19 nt, Artificial Sequence
  Description of Artificial Sequence: Synthetic oligonucleotide
  Sense strand starting at position 3446 of SEQ ID NO: 1140
agaacuuagacucgauguu

SEQ ID NO: 90791 - RNA, 19 nt, Artificial Sequence
  Description of Artificial Sequence: Synthetic oligonucleotide
  Antisense strand to SEQ ID NO: 90710
aacaucgagucuaaguucu

SEQ ID NO: 90792 - RNA, 19 nt, Artificial Sequence
  Description of Artificial Sequence: Synthetic oligonucleotide
  Sense strand starting at position 3314 of SEQ ID NO: 1140
uuccuagaacugcaaguuu

SEQ ID NO: 90793 - RNA, 19 nt, Artificial Sequence
  Description of Artificial Sequence: Synthetic oligonucleotide
  Antisense strand to SEQ ID NO: 90712
aaacuugcaguucuaggaa

SEQ ID NO: 90794 - RNA, 19 nt, Artificial Sequence
  Description of Artificial Sequence: Synthetic oligonucleotide
  Sense strand starting at position 3137 of SEQ ID NO: 1140
gaagcaucagcccaguuau

SEQ ID NO: 90795 - RNA, 19 nt, Artificial Sequence
  Description of Artificial Sequence: Synthetic oligonucleotide
  Antisense strand to SEQ ID NO: 90714
auaacugggcugaugcuuc

SEQ ID NO: 90796 - RNA, 19 nt, Artificial Sequence
  Description of Artificial Sequence: Synthetic oligonucleotide
  Sense strand starting at position 3106 of SEQ ID NO: 1140
gcuccaugcucuuugaaau

SEQ ID NO: 90797 - RNA, 19 nt, Artificial Sequence
  Description of Artificial Sequence: Synthetic oligonucleotide
  Antisense strand to SEQ ID NO: 90716
auuucaaagagcauggagc

SEQ ID NO: 90798 - RNA, 19 nt, Artificial Sequence
  Description of Artificial Sequence: Synthetic oligonucleotide
  Sense strand starting at position 2966 of SEQ ID NO: 1140
acaauauucugagggaaag

SEQ ID NO: 90799 - RNA, 19 nt, Artificial Sequence
  Description of Artificial Sequence: Synthetic oligonucleotide
  Antisense strand to SEQ ID NO: 90718
cuuucccucagaauauugu

SEQ ID NO: 90800 - RNA, 19 nt, Artificial Sequence
  Description of Artificial Sequence: Synthetic oligonucleotide
  Sense strand starting at position 2881 of SEQ ID NO: 1140
gauuaaucuuuggauggag

SEQ ID NO: 90801 - RNA, 19 nt, Artificial Sequence
  Description of Artificial Sequence: Synthetic oligonucleotide
  Antisense strand to SEQ ID NO: 90720
cuccauccaaagauuaauc

SEQ ID NO: 90802 - RNA, 19 nt, Artificial Sequence
  Description of Artificial Sequence: Synthetic oligonucleotide
  Sense strand starting at position 2791 of SEQ ID NO: 1140
uccacucaucuggagguuu

SEQ ID NO: 90803 - RNA, 19 nt, Artificial Sequence
  Description of Artificial Sequence: Synthetic oligonucleotide
  Antisense strand to SEQ ID NO: 90722
aaaccuccagaugagugga

SEQ ID NO: 90804 - RNA, 19 nt, Artificial Sequence
  Description of Artificial Sequence: Synthetic oligonucleotide
  Sense strand starting at position 2750 of SEQ ID NO: 1140
cagcaaagaccagguguau

SEQ ID NO: 90805 - RNA, 19 nt, Artificial Sequence
  Description of Artificial Sequence: Synthetic oligonucleotide
  Antisense strand to SEQ ID NO: 90724
auacaccuggucuuugcug

SEQ ID NO: 90806 - RNA, 19 nt, Artificial Sequence
  Description of Artificial Sequence: Synthetic oligonucleotide
  Sense strand starting at position 2704 of SEQ ID NO: 1140
auuuacucguguuaaagaa

SEQ ID NO: 90807 - RNA, 19 nt, Artificial Sequence
  Description of Artificial Sequence: Synthetic oligonucleotide
  Antisense strand to SEQ ID NO: 90726
uucuuuaacacgaguaaau

SEQ ID NO: 90808 - RNA, 19 nt, Artificial Sequence
  Description of Artificial Sequence: Synthetic oligonucleotide
  Sense strand starting at position 2699 of SEQ ID NO: 1140
ggcuuauuuacucguguua

SEQ ID NO: 90809 - RNA, 19 nt, Artificial Sequence
  Description of Artificial Sequence: Synthetic oligonucleotide
  Antisense strand to SEQ ID NO: 90728
uaacacgaguaaauaagcc

SEQ ID NO: 90810 - RNA, 19 nt, Artificial Sequence
  Description of Artificial Sequence: Synthetic oligonucleotide
  Sense strand starting at position 2698 of SEQ ID NO: 1140
uggcuuauuuacucguguu

SEQ ID NO: 90811 - RNA, 19 nt, Artificial Sequence
  Description of Artificial Sequence: Synthetic oligonucleotide
  Antisense strand to SEQ ID NO: 90730
aacacgaguaaauaagcca

SEQ ID NO: 90812 - RNA, 19 nt, Artificial Sequence
  Description of Artificial Sequence: Synthetic oligonucleotide
  Sense strand starting at position 2686 of SEQ ID NO: 1140
gaagucuaggaauggcuua

SEQ ID NO: 90813 - RNA, 19 nt, Artificial Sequence
  Description of Artificial Sequence: Synthetic oligonucleotide
  Antisense strand to SEQ ID NO: 90732
uaagccauuccuagacuuc

SEQ ID NO: 90814 - RNA, 19 nt, Artificial Sequence
  Description of Artificial Sequence: Synthetic oligonucleotide
  Sense strand starting at position 2544 of SEQ ID NO: 1140
uugauaucucagugauguu

SEQ ID NO: 90815 - RNA, 19 nt, Artificial Sequence
  Description of Artificial Sequence: Synthetic oligonucleotide
  Antisense strand to SEQ ID NO: 90734
aacaucacugagauaucaa

SEQ ID NO: 90816 - RNA, 19 nt, Artificial Sequence
  Description of Artificial Sequence: Synthetic oligonucleotide
  Sense strand starting at position 2508 of SEQ ID NO: 1140
auuucuagaugaugccaua

SEQ ID NO: 90817 - RNA, 19 nt, Artificial Sequence
  Description of Artificial Sequence: Synthetic oligonucleotide
  Antisense strand to SEQ ID NO: 90736
uauggcaucaucuagaaau

SEQ ID NO: 90818 - RNA, 19 nt, Artificial Sequence
  Description of Artificial Sequence: Synthetic oligonucleotide
  Sense strand starting at position 2266 of SEQ ID NO: 1140
cugugaauugcacauggca

SEQ ID NO: 90819 - RNA, 19 nt, Artificial Sequence
  Description of Artificial Sequence: Synthetic oligonucleotide
  Antisense strand to SEQ ID NO: 90738
ugccaugugcaauucacag

SEQ ID NO: 90820 - RNA, 19 nt, Artificial Sequence
  Description of Artificial Sequence: Synthetic oligonucleotide
  Sense strand starting at position 2257 of SEQ ID NO: 1140
gagggagcucugugaauug

SEQ ID NO: 90821 - RNA, 19 nt, Artificial Sequence
  Description of Artificial Sequence: Synthetic oligonucleotide
  Antisense strand to SEQ ID NO: 90740
caauucacagagcucccuc

SEQ ID NO: 90822 - RNA, 19 nt, Artificial Sequence
  Description of Artificial Sequence: Synthetic oligonucleotide
  Sense strand starting at position 2178 of SEQ ID NO: 1140
cccaguuccucccugcaua

SEQ ID NO: 90823 - RNA, 19 nt, Artificial Sequence
  Description of Artificial Sequence: Synthetic oligonucleotide
  Antisense strand to SEQ ID NO: 90742
uaugcagggaggaacuggg

SEQ ID NO: 90824 - RNA, 19 nt, Artificial Sequence
  Description of Artificial Sequence: Synthetic oligonucleotide
  Sense strand starting at position 568 of SEQ ID NO: 1140
uaaaguguucgcuugcauu

SEQ ID NO: 90825 - RNA, 19 nt, Artificial Sequence
  Description of Artificial Sequence: Synthetic oligonucleotide
  Antisense strand to SEQ ID NO: 90744
aaugcaagcgaacacuuua

SEQ ID NO: 90826 - RNA, 19 nt, Artificial Sequence
  Description of Artificial Sequence: Synthetic oligonucleotide
  Sense strand starting at position 563 of SEQ ID NO: 1140
guuuguaaaguguucgcuu

SEQ ID NO: 90827 - RNA, 19 nt, Artificial Sequence
  Description of Artificial Sequence: Synthetic oligonucleotide
  Antisense strand to SEQ ID NO: 90746
aagcgaacacuuuacaaac

SEQ ID NO: 90828 - RNA, 19 nt, Artificial Sequence
  Description of Artificial Sequence: Synthetic oligonucleotide
  Sense strand starting at position 446 of SEQ ID NO: 1140
ggucucagacauuauucuu

SEQ ID NO: 90829 - RNA, 19 nt, Artificial Sequence
  Description of Artificial Sequence: Synthetic oligonucleotide
  Antisense strand to SEQ ID NO: 90748
aagaauaaugucugagacc

SEQ ID NO: 90830 - RNA, 19 nt, Artificial Sequence
  Description of Artificial Sequence: Synthetic oligonucleotide
  Sense strand starting at position 328 of SEQ ID NO: 1140
aacugugacccaugcuuga

SEQ ID NO: 90831 - RNA, 19 nt, Artificial Sequence
  Description of Artificial Sequence: Synthetic oligonucleotide
  Antisense strand to SEQ ID NO: 90750
ucaagcaugggucacaguu

SEQ ID NO: 90832 - RNA, 19 nt, Artificial Sequence
  Description of Artificial Sequence: Synthetic oligonucleotide
  Sense strand starting at position 214 of SEQ ID NO: 1140
ggaaacaccugagcuuaua

SEQ ID NO: 90833 - RNA, 19 nt, Artificial Sequence
  Description of Artificial Sequence: Synthetic oligonucleotide
  Antisense strand to SEQ ID NO: 90752
uauaagcucagguguuucc

SEQ ID NO: 90834 - RNA, 19 nt, Artificial Sequence
  Description of Artificial Sequence: Synthetic oligonucleotide
  Sense strand starting at position 92 of SEQ ID NO: 1140
ucaguucuuuacccagauu

SEQ ID NO: 90835 - RNA, 19 nt, Artificial Sequence
  Description of Artificial Sequence: Synthetic oligonucleotide
  Antisense strand to SEQ ID NO: 90754
aaucuggguaaagaacuga

SEQ ID NO: 90836 - RNA, 19 nt, Artificial Sequence
  Description of Artificial Sequence: Synthetic oligonucleotide
  Sense strand starting at position 91 of SEQ ID NO: 1140
cucaguucuuuacccagau

SEQ ID NO: 90837 - RNA, 19 nt, Artificial Sequence
  Description of Artificial Sequence: Synthetic oligonucleotide
  Antisense strand to SEQ ID NO: 90756
aucuggguaaagaacugag

SEQ ID NO: 90838 - RNA, 19 nt, Artificial Sequence
  Description of Artificial Sequence: Synthetic oligonucleotide
  Sense strand starting at position 79 of SEQ ID NO: 1140
aagggugucuuucucaguu

SEQ ID NO: 90839 - RNA, 19 nt, Artificial Sequence
  Description of Artificial Sequence: Synthetic oligonucleotide
  Antisense strand to SEQ ID NO: 90758
aacugagaaagacacccuu

SEQ ID NO: 90840 - RNA, 19 nt, Artificial Sequence
  Description of Artificial Sequence: Synthetic oligonucleotide
  Sense strand starting at position 72 of SEQ ID NO: 1140
ugcaaagaagggugucuuu

SEQ ID NO: 90841 - RNA, 19 nt, Artificial Sequence
  Description of Artificial Sequence: Synthetic oligonucleotide
  Antisense strand to SEQ ID NO: 90760
aaagacacccuucuuugca

SEQ ID NO: 90842 - RNA, 19 nt, Artificial Sequence
  Description of Artificial Sequence: Synthetic oligonucleotide
  Sense strand starting at position 61 of SEQ ID NO: 1140
gagacagucuuugcaaaga

SEQ ID NO: 90843 - RNA, 19 nt, Artificial Sequence
  Description of Artificial Sequence: Synthetic oligonucleotide
  Antisense strand to SEQ ID NO: 90762
ucuuugcaaagacugucuc

SEQ ID NO: 90844 - RNA, 19 nt, Artificial Sequence
  Description of Artificial Sequence: Synthetic oligonucleotide
  Sense strand starting at position 59 of SEQ ID NO: 1140
uagagacagucuuugcaaa

SEQ ID NO: 90845 - RNA, 19 nt, Artificial Sequence
  Description of Artificial Sequence: Synthetic oligonucleotide
  Antisense strand to SEQ ID NO: 90764
uuugcaaagacugucucua

SEQ ID NO: 90846 - RNA, 19 nt, Artificial Sequence
  Description of Artificial Sequence: Synthetic oligonucleotide
  Sense strand starting at position 3616 of SEQ ID NO: 1141
cagaaauaacucugauggu

SEQ ID NO: 90847 - RNA, 19 nt, Artificial Sequence
  Description of Artificial Sequence: Synthetic oligonucleotide
  Antisense strand to SEQ ID NO: 90766
accaucagaguuauuucug

SEQ ID NO: 90848 - RNA, 19 nt, Artificial Sequence
  Description of Artificial Sequence: Synthetic oligonucleotide
  Sense strand starting at position 3435 of SEQ ID NO: 1141
gaucuuugugagugaaaca

SEQ ID NO: 90849 - RNA, 19 nt, Artificial Sequence
  Description of Artificial Sequence: Synthetic oligonucleotide
  Antisense strand to SEQ ID NO: 90768
uguuucacucacaaagauc

SEQ ID NO: 90850 - RNA, 19 nt, Artificial Sequence
  Description of Artificial Sequence: Synthetic oligonucleotide
  Sense strand starting at position 3434 of SEQ ID NO: 1141
agaucuuugugagugaaac

SEQ ID NO: 90851 - RNA, 19 nt, Artificial Sequence
  Description of Artificial Sequence: Synthetic oligonucleotide
  Antisense strand to SEQ ID NO: 90770
guuucacucacaaagaucu

SEQ ID NO: 90852 - RNA, 19 nt, Artificial Sequence
  Description of Artificial Sequence: Synthetic oligonucleotide
  Sense strand starting at position 3429 of SEQ ID NO: 1141
agagaagaucuuugugagu

SEQ ID NO: 90853 - RNA, 19 nt, Artificial Sequence
  Description of Artificial Sequence: Synthetic oligonucleotide
  Antisense strand to SEQ ID NO: 90772
acucacaaagaucuucucu

SEQ ID NO: 90854 - RNA, 19 nt, Artificial Sequence
  Description of Artificial Sequence: Synthetic oligonucleotide
  Sense strand starting at position 3166 of SEQ ID NO: 1141
ucaggaaacaguuggguaa

SEQ ID NO: 90855 - RNA, 19 nt, Artificial Sequence
  Description of Artificial Sequence: Synthetic oligonucleotide
  Antisense strand to SEQ ID NO: 90774
uuacccaacuguuuccuga

SEQ ID NO: 90856 - RNA, 19 nt, Artificial Sequence
  Description of Artificial Sequence: Synthetic oligonucleotide
  Sense strand starting at position 3063 of SEQ ID NO: 1141
uggugugcccagcuaaguu

SEQ ID NO: 90857 - RNA, 19 nt, Artificial Sequence
  Description of Artificial Sequence: Synthetic oligonucleotide
  Antisense strand to SEQ ID NO: 90776
aacuuagcugggcacacca

SEQ ID NO: 90858 - RNA, 19 nt, Artificial Sequence
  Description of Artificial Sequence: Synthetic oligonucleotide
  Sense strand starting at position 2992 of SEQ ID NO: 1141
agugcuuaaauugggaaca

SEQ ID NO: 90859 - RNA, 19 nt, Artificial Sequence
  Description of Artificial Sequence: Synthetic oligonucleotide
  Antisense strand to SEQ ID NO: 90778
uguucccaauuuaagcacu

SEQ ID NO: 90860 - RNA, 19 nt, Artificial Sequence
  Description of Artificial Sequence: Synthetic oligonucleotide
  Sense strand starting at position 2889 of SEQ ID NO: 1141
ggagcuguucuuggaauua

SEQ ID NO: 90861 - RNA, 19 nt, Artificial Sequence
  Description of Artificial Sequence: Synthetic oligonucleotide
  Antisense strand to SEQ ID NO: 90780
uaauuccaagaacagcucc

SEQ ID NO: 90862 - RNA, 19 nt, Artificial Sequence
  Description of Artificial Sequence: Synthetic oligonucleotide
  Sense strand starting at position 2585 of SEQ ID NO: 1141
gauguuguuccugacacaa

SEQ ID NO: 90863 - RNA, 19 nt, Artificial Sequence
  Description of Artificial Sequence: Synthetic oligonucleotide
  Antisense strand to SEQ ID NO: 90782
uugugucaggaacaacauc

SEQ ID NO: 90864 - RNA, 19 nt, Artificial Sequence
  Description of Artificial Sequence: Synthetic oligonucleotide
  Sense strand starting at position 2498 of SEQ ID NO: 1141
ucgugugaccaagauacau

SEQ ID NO: 90865 - RNA, 19 nt, Artificial Sequence
  Description of Artificial Sequence: Synthetic oligonucleotide
  Antisense strand to SEQ ID NO: 90784
auguaucuuggucacacga

SEQ ID NO: 90866 - RNA, 19 nt, Artificial Sequence
  Description of Artificial Sequence: Synthetic oligonucleotide
  Sense strand starting at position 2408 of SEQ ID NO: 1141
uggagauuggcccauugcu

SEQ ID NO: 90867 - RNA, 19 nt, Artificial Sequence
  Description of Artificial Sequence: Synthetic oligonucleotide
  Antisense strand to SEQ ID NO: 90786
agcaaugggccaaucucca

SEQ ID NO: 90868 - RNA, 19 nt, Artificial Sequence
  Description of Artificial Sequence: Synthetic oligonucleotide
  Sense strand starting at position 2396 of SEQ ID NO: 1141
ucaucaccucuguggagau

SEQ ID NO: 90869 - RNA, 19 nt, Artificial Sequence
  Description of Artificial Sequence: Synthetic oligonucleotide
  Antisense strand to SEQ ID NO: 90788
aucuccacagaggugauga

SEQ ID NO: 90870 - RNA, 19 nt, Artificial Sequence
  Description of Artificial Sequence: Synthetic oligonucleotide
  Sense strand starting at position 2395 of SEQ ID NO: 1141
gucaucaccucuguggaga

SEQ ID NO: 90871 - RNA, 19 nt, Artificial Sequence
  Description of Artificial Sequence: Synthetic oligonucleotide
  Antisense strand to SEQ ID NO: 90790
ucuccacagaggugaugac

SEQ ID NO: 90872 - RNA, 19 nt, Artificial Sequence
  Description of Artificial Sequence: Synthetic oligonucleotide
  Sense strand starting at position 2335 of SEQ ID NO: 1141
ggaagaccuuccuugucua

SEQ ID NO: 90873 - RNA, 19 nt, Artificial Sequence
  Description of Artificial Sequence: Synthetic oligonucleotide
  Antisense strand to SEQ ID NO: 90792
uagacaaggaaggucuucc

SEQ ID NO: 90874 - RNA, 19 nt, Artificial Sequence
  Description of Artificial Sequence: Synthetic oligonucleotide
  Sense strand starting at position 2277 of SEQ ID NO: 1141
guugaauucuauguaggau

SEQ ID NO: 90875 - RNA, 19 nt, Artificial Sequence
  Description of Artificial Sequence: Synthetic oligonucleotide
  Antisense strand to SEQ ID NO: 90794
auccuacauagaauucaac

SEQ ID NO: 90876 - RNA, 19 nt, Artificial Sequence
  Description of Artificial Sequence: Synthetic oligonucleotide
  Sense strand starting at position 2276 of SEQ ID NO: 1141
uguugaauucuauguagga

SEQ ID NO: 90877 - RNA, 19 nt, Artificial Sequence
  Description of Artificial Sequence: Synthetic oligonucleotide
  Antisense strand to SEQ ID NO: 90796
uccuacauagaauucaaca

SEQ ID NO: 90878 - RNA, 19 nt, Artificial Sequence
  Description of Artificial Sequence: Synthetic oligonucleotide
  Sense strand starting at position 2265 of SEQ ID NO: 1141
guugcagcugcuguugaau

SEQ ID NO: 90879 - RNA, 19 nt, Artificial Sequence
  Description of Artificial Sequence: Synthetic oligonucleotide
  Antisense strand to SEQ ID NO: 90798
auucaacagcagcugcaac

SEQ ID NO: 90880 - RNA, 19 nt, Artificial Sequence
  Description of Artificial Sequence: Synthetic oligonucleotide
  Sense strand starting at position 2238 of SEQ ID NO: 1141
ggaugauguccuugggagg

SEQ ID NO: 90881 - RNA, 19 nt, Artificial Sequence
  Description of Artificial Sequence: Synthetic oligonucleotide
  Antisense strand to SEQ ID NO: 90800
ccucccaaggacaucaucc

SEQ ID NO: 90882 - RNA, 19 nt, Artificial Sequence
  Description of Artificial Sequence: Synthetic oligonucleotide
  Sense strand starting at position 2229 of SEQ ID NO: 1141
ggcuaaucuggaugauguc

SEQ ID NO: 90883 - RNA, 19 nt, Artificial Sequence
  Description of Artificial Sequence: Synthetic oligonucleotide
  Antisense strand to SEQ ID NO: 90802
gacaucauccagauuagcc

SEQ ID NO: 90884 - RNA, 19 nt, Artificial Sequence
  Description of Artificial Sequence: Synthetic oligonucleotide
  Sense strand starting at position 2083 of SEQ ID NO: 1141
ggaugauugaucuggguau

SEQ ID NO: 90885 - RNA, 19 nt, Artificial Sequence
  Description of Artificial Sequence: Synthetic oligonucleotide
  Antisense strand to SEQ ID NO: 90804
auacccagaucaaucaucc

SEQ ID NO: 90886 - RNA, 19 nt, Artificial Sequence
  Description of Artificial Sequence: Synthetic oligonucleotide
  Sense strand starting at position 2081 of SEQ ID NO: 1141
guggaugauugaucugggu

SEQ ID NO: 90887 - RNA, 19 nt, Artificial Sequence
  Description of Artificial Sequence: Synthetic oligonucleotide
  Antisense strand to SEQ ID NO: 90806
acccagaucaaucauccac

SEQ ID NO: 90888 - RNA, 19 nt, Artificial Sequence
  Description of Artificial Sequence: Synthetic oligonucleotide
  Sense strand starting at position 2072 of SEQ ID NO: 1141
agccauggaguggaugauu

SEQ ID NO: 90889 - RNA, 19 nt, Artificial Sequence
  Description of Artificial Sequence: Synthetic oligonucleotide
  Antisense strand to SEQ ID NO: 90808
aaucauccacuccauggcu

SEQ ID NO: 90890 - RNA, 19 nt, Artificial Sequence
  Description of Artificial Sequence: Synthetic oligonucleotide
  Sense strand starting at position 2052 of SEQ ID NO: 1141
gccacaugucauuggagga

SEQ ID NO: 90891 - RNA, 19 nt, Artificial Sequence
  Description of Artificial Sequence: Synthetic oligonucleotide
  Antisense strand to SEQ ID NO: 90810
uccuccaaugacauguggc

SEQ ID NO: 90892 - RNA, 19 nt, Artificial Sequence
  Description of Artificial Sequence: Synthetic oligonucleotide
  Sense strand starting at position 2024 of SEQ ID NO: 1141
uuauauauccuccaguuga

SEQ ID NO: 90893 - RNA, 19 nt, Artificial Sequence
  Description of Artificial Sequence: Synthetic oligonucleotide
  Antisense strand to SEQ ID NO: 90812
ucaacuggaggauauauaa

SEQ ID NO: 90894 - RNA, 19 nt, Artificial Sequence
  Description of Artificial Sequence: Synthetic oligonucleotide
  Sense strand starting at position 1996 of SEQ ID NO: 1141
uuguguugccaggaaguaa

SEQ ID NO: 90895 - RNA, 19 nt, Artificial Sequence
  Description of Artificial Sequence: Synthetic oligonucleotide
  Antisense strand to SEQ ID NO: 90814
uuacuuccuggcaacacaa

SEQ ID NO: 90896 - RNA, 19 nt, Artificial Sequence
  Description of Artificial Sequence: Synthetic oligonucleotide
  Sense strand starting at position 1586 of SEQ ID NO: 1141
gacaaauuguacuuaguug

SEQ ID NO: 90897 - RNA, 19 nt, Artificial Sequence
  Description of Artificial Sequence: Synthetic oligonucleotide
  Antisense strand to SEQ ID NO: 90816
caacuaaguacaauuuguc

SEQ ID NO: 90898 - RNA, 19 nt, Artificial Sequence
  Description of Artificial Sequence: Synthetic oligonucleotide
  Sense strand starting at position 1501 of SEQ ID NO: 1141
cuaaauauuugggaguaaa

SEQ ID NO: 90899 - RNA, 19 nt, Artificial Sequence
  Description of Artificial Sequence: Synthetic oligonucleotide
  Antisense strand to SEQ ID NO: 90818
uuuacucccaaauauuuag

SEQ ID NO: 90900 - RNA, 19 nt, Artificial Sequence
  Description of Artificial Sequence: Synthetic oligonucleotide
  Sense strand starting at position 1500 of SEQ ID NO: 1141
acuaaauauuugggaguaa

SEQ ID NO: 90901 - RNA, 19 nt, Artificial Sequence
  Description of Artificial Sequence: Synthetic oligonucleotide
  Antisense strand to SEQ ID NO: 90820
uuacucccaaauauuuagu

SEQ ID NO: 90902 - RNA, 19 nt, Artificial Sequence
  Description of Artificial Sequence: Synthetic oligonucleotide
  Sense strand starting at position 1499 of SEQ ID NO: 1141
gacuaaauauuugggagua

SEQ ID NO: 90903 - RNA, 19 nt, Artificial Sequence
  Description of Artificial Sequence: Synthetic oligonucleotide
  Antisense strand to SEQ ID NO: 90822
uacucccaaauauuuaguc

SEQ ID NO: 90904 - RNA, 19 nt, Artificial Sequence
  Description of Artificial Sequence: Synthetic oligonucleotide
  Sense strand starting at position 1368 of SEQ ID NO: 1141
uaguuauaucagggaccca

SEQ ID NO: 90905 - RNA, 19 nt, Artificial Sequence
  Description of Artificial Sequence: Synthetic oligonucleotide
  Antisense strand to SEQ ID NO: 90824
ugggucccugauauaacua

SEQ ID NO: 90906 - RNA, 19 nt, Artificial Sequence
  Description of Artificial Sequence: Synthetic oligonucleotide
  Sense strand starting at position 764 of SEQ ID NO: 1141
acuaucagcugucuuaaga

SEQ ID NO: 90907 - RNA, 19 nt, Artificial Sequence
  Description of Artificial Sequence: Synthetic oligonucleotide
  Antisense strand to SEQ ID NO: 90826
ucuuaagacagcugauagu

SEQ ID NO: 90908 - RNA, 19 nt, Artificial Sequence
  Description of Artificial Sequence: Synthetic oligonucleotide
  Sense strand starting at position 687 of SEQ ID NO: 1141
ugcaaugacauggguugau

SEQ ID NO: 90909 - RNA, 19 nt, Artificial Sequence
  Description of Artificial Sequence: Synthetic oligonucleotide
  Antisense strand to SEQ ID NO: 90828
aucaacccaugucauugca

SEQ ID NO: 90910 - RNA, 19 nt, Artificial Sequence
  Description of Artificial Sequence: Synthetic oligonucleotide
  Sense strand starting at position 673 of SEQ ID NO: 1141
uggugcuagaaucaugcaa

SEQ ID NO: 90911 - RNA, 19 nt, Artificial Sequence
  Description of Artificial Sequence: Synthetic oligonucleotide
  Antisense strand to SEQ ID NO: 90830
uugcaugauucuagcacca

SEQ ID NO: 90912 - RNA, 19 nt, Artificial Sequence
  Description of Artificial Sequence: Synthetic oligonucleotide
  Sense strand starting at position 544 of SEQ ID NO: 1141
aucugaaguguccauugca

SEQ ID NO: 90913 - RNA, 19 nt, Artificial Sequence
  Description of Artificial Sequence: Synthetic oligonucleotide
  Antisense strand to SEQ ID NO: 90832
ugcaauggacacuucagau

SEQ ID NO: 90914 - RNA, 19 nt, Artificial Sequence
  Description of Artificial Sequence: Synthetic oligonucleotide
  Sense strand starting at position 495 of SEQ ID NO: 1141
ugaguaaauuaaucagcuu

SEQ ID NO: 90915 - RNA, 19 nt, Artificial Sequence
  Description of Artificial Sequence: Synthetic oligonucleotide
  Antisense strand to SEQ ID NO: 90834
aagcugauuaauuuacuca

SEQ ID NO: 90916 - RNA, 19 nt, Artificial Sequence
  Description of Artificial Sequence: Synthetic oligonucleotide
  Sense strand starting at position 250 of SEQ ID NO: 1141
ggaucuuccaccuggauga

SEQ ID NO: 90917 - RNA, 19 nt, Artificial Sequence
  Description of Artificial Sequence: Synthetic oligonucleotide
  Antisense strand to SEQ ID NO: 90836
ucauccagguggaagaucc

SEQ ID NO: 90918 - RNA, 19 nt, Artificial Sequence
  Description of Artificial Sequence: Synthetic oligonucleotide
  Sense strand starting at position 120 of SEQ ID NO: 1141
ugguuugaauuaucaugaa

SEQ ID NO: 90919 - RNA, 19 nt, Artificial Sequence
  Description of Artificial Sequence: Synthetic oligonucleotide
  Antisense strand to SEQ ID NO: 90838
uucaugauaauucaaacca

SEQ ID NO: 90920 - RNA, 19 nt, Artificial Sequence
  Description of Artificial Sequence: Synthetic oligonucleotide
  Sense strand starting at position 118 of SEQ ID NO: 1141
gcugguuugaauuaucaug

SEQ ID NO: 90921 - RNA, 19 nt, Artificial Sequence
  Description of Artificial Sequence: Synthetic oligonucleotide
  Antisense strand to SEQ ID NO: 90840
caugauaauucaaaccagc

SEQ ID NO: 90922 - RNA, 19 nt, Artificial Sequence
  Description of Artificial Sequence: Synthetic oligonucleotide
  Sense strand starting at position 111 of SEQ ID NO: 1141
aaacucagcugguuugaau

SEQ ID NO: 90923 - RNA, 19 nt, Artificial Sequence
  Description of Artificial Sequence: Synthetic oligonucleotide
  Antisense strand to SEQ ID NO: 90842
auucaaaccagcugaguuu

SEQ ID NO: 90924 - RNA, 19 nt, Artificial Sequence
  Description of Artificial Sequence: Synthetic oligonucleotide
  Sense strand starting at position 59 of SEQ ID NO: 1141
uucccagagguaugaucuu

SEQ ID NO: 90925 - RNA, 19 nt, Artificial Sequence
  Description of Artificial Sequence: Synthetic oligonucleotide
  Antisense strand to SEQ ID NO: 90844
aagaucauaccucugggaa

SEQ ID NO: 90926 - RNA, 19 nt, Artificial Sequence
  Description of Artificial Sequence: Synthetic oligonucleotide
  Sense strand starting at position 3428 of SEQ ID NO: 1143
gguucucccugcuuugaaa

SEQ ID NO: 90927 - RNA, 19 nt, Artificial Sequence
  Description of Artificial Sequence: Synthetic oligonucleotide
  Antisense strand to SEQ ID NO: 90846
uuucaaagcagggagaacc

SEQ ID NO: 90928 - RNA, 19 nt, Artificial Sequence
  Description of Artificial Sequence: Synthetic oligonucleotide
  Sense strand starting at position 3352 of SEQ ID NO: 1143
cagccuguguucugaacua

SEQ ID NO: 90929 - RNA, 19 nt, Artificial Sequence
  Description of Artificial Sequence: Synthetic oligonucleotide
  Antisense strand to SEQ ID NO: 90848
uaguucagaacacaggcug

SEQ ID NO: 90930 - RNA, 19 nt, Artificial Sequence
  Description of Artificial Sequence: Synthetic oligonucleotide
  Sense strand starting at position 2610 of SEQ ID NO: 1143
aguuuaauguaccaugcau

SEQ ID NO: 90931 - RNA, 19 nt, Artificial Sequence
  Description of Artificial Sequence: Synthetic oligonucleotide
  Antisense strand to SEQ ID NO: 90850
augcaugguacauuaaacu

SEQ ID NO: 90932 - RNA, 19 nt, Artificial Sequence
  Description of Artificial Sequence: Synthetic oligonucleotide
  Sense strand starting at position 2602 of SEQ ID NO: 1143
guccucaaaguuuaaugua

SEQ ID NO: 90933 - RNA, 19 nt, Artificial Sequence
  Description of Artificial Sequence: Synthetic oligonucleotide
  Antisense strand to SEQ ID NO: 90852
uacauuaaacuuugaggac

SEQ ID NO: 90934 - RNA, 19 nt, Artificial Sequence
  Description of Artificial Sequence: Synthetic oligonucleotide
  Sense strand starting at position 2595 of SEQ ID NO: 1143
aagcgcuguccucaaaguu

SEQ ID NO: 90935 - RNA, 19 nt, Artificial Sequence
  Description of Artificial Sequence: Synthetic oligonucleotide
  Antisense strand to SEQ ID NO: 90854
aacuuugaggacagcgcuu

SEQ ID NO: 90936 - RNA, 19 nt, Artificial Sequence
  Description of Artificial Sequence: Synthetic oligonucleotide
  Sense strand starting at position 2578 of SEQ ID NO: 1143
uccucagagugcuuggaaa

SEQ ID NO: 90937 - RNA, 19 nt, Artificial Sequence
  Description of Artificial Sequence: Synthetic oligonucleotide
  Antisense strand to SEQ ID NO: 90856
uuuccaagcacucugagga

SEQ ID NO: 90938 - RNA, 19 nt, Artificial Sequence
  Description of Artificial Sequence: Synthetic oligonucleotide
  Sense strand starting at position 2486 of SEQ ID NO: 1143
ugauaaaugugugccuguu

SEQ ID NO: 90939 - RNA, 19 nt, Artificial Sequence
  Description of Artificial Sequence: Synthetic oligonucleotide
  Antisense strand to SEQ ID NO: 90858
aacaggcacacauuuauca

SEQ ID NO: 90940 - RNA, 19 nt, Artificial Sequence
  Description of Artificial Sequence: Synthetic oligonucleotide
  Sense strand starting at position 2485 of SEQ ID NO: 1143
gugauaaaugugugccugu

SEQ ID NO: 90941 - RNA, 19 nt, Artificial Sequence
  Description of Artificial Sequence: Synthetic oligonucleotide
  Antisense strand to SEQ ID NO: 90860
acaggcacacauuuaucac

SEQ ID NO: 90942 - RNA, 19 nt, Artificial Sequence
  Description of Artificial Sequence: Synthetic oligonucleotide
  Sense strand starting at position 2392 of SEQ ID NO: 1143
cucuguuggccauaacuuu

SEQ ID NO: 90943 - RNA, 19 nt, Artificial Sequence
  Description of Artificial Sequence: Synthetic oligonucleotide
  Antisense strand to SEQ ID NO: 90862
aaaguuauggccaacagag

SEQ ID NO: 90944 - RNA, 19 nt, Artificial Sequence
  Description of Artificial Sequence: Synthetic oligonucleotide
  Sense strand starting at position 2390 of SEQ ID NO: 1143
gacucuguuggccauaacu

SEQ ID NO: 90945 - RNA, 19 nt, Artificial Sequence
  Description of Artificial Sequence: Synthetic oligonucleotide
  Antisense strand to SEQ ID NO: 90864
aguuauggccaacagaguc

SEQ ID NO: 90946 - RNA, 19 nt, Artificial Sequence
  Description of Artificial Sequence: Synthetic oligonucleotide
  Sense strand starting at position 2388 of SEQ ID NO: 1143
gugacucuguuggccauaa

SEQ ID NO: 90947 - RNA, 19 nt, Artificial Sequence
  Description of Artificial Sequence: Synthetic oligonucleotide
  Antisense strand to SEQ ID NO: 90866
uuauggccaacagagucac

SEQ ID NO: 90948 - RNA, 19 nt, Artificial Sequence
  Description of Artificial Sequence: Synthetic oligonucleotide
  Sense strand starting at position 2386 of SEQ ID NO: 1143
cagugacucuguuggccau

SEQ ID NO: 90949 - RNA, 19 nt, Artificial Sequence
  Description of Artificial Sequence: Synthetic oligonucleotide
  Antisense strand to SEQ ID NO: 90868
auggccaacagagucacug

SEQ ID NO: 90950 - RNA, 19 nt, Artificial Sequence
  Description of Artificial Sequence: Synthetic oligonucleotide
  Sense strand starting at position 2268 of SEQ ID NO: 1143
agaggcuucugcucccgaa

SEQ ID NO: 90951 - RNA, 19 nt, Artificial Sequence
  Description of Artificial Sequence: Synthetic oligonucleotide
  Antisense strand to SEQ ID NO: 90870
uucgggagcagaagccucu

SEQ ID NO: 90952 - RNA, 19 nt, Artificial Sequence
  Description of Artificial Sequence: Synthetic oligonucleotide
  Sense strand starting at position 2132 of SEQ ID NO: 1143
aggaccaccuccuagagau

SEQ ID NO: 90953 - RNA, 19 nt, Artificial Sequence
  Description of Artificial Sequence: Synthetic oligonucleotide
  Antisense strand to SEQ ID NO: 90872
aucucuaggaggugguccu

SEQ ID NO: 90954 - RNA, 19 nt, Artificial Sequence
  Description of Artificial Sequence: Synthetic oligonucleotide
  Sense strand starting at position 2063 of SEQ ID NO: 1143
uuguuagucuaguuaccca

SEQ ID NO: 90955 - RNA, 19 nt, Artificial Sequence
  Description of Artificial Sequence: Synthetic oligonucleotide
  Antisense strand to SEQ ID NO: 90874
uggguaacuagacuaacaa

SEQ ID NO: 90956 - RNA, 19 nt, Artificial Sequence
  Description of Artificial Sequence: Synthetic oligonucleotide
  Sense strand starting at position 2058 of SEQ ID NO: 1143
caccuuuguuagucuaguu

SEQ ID NO: 90957 - RNA, 19 nt, Artificial Sequence
  Description of Artificial Sequence: Synthetic oligonucleotide
  Antisense strand to SEQ ID NO: 90876
aacuagacuaacaaaggug

SEQ ID NO: 90958 - RNA, 19 nt, Artificial Sequence
  Description of Artificial Sequence: Synthetic oligonucleotide
  Sense strand starting at position 2057 of SEQ ID NO: 1143
gcaccuuuguuagucuagu

SEQ ID NO: 90959 - RNA, 19 nt, Artificial Sequence
  Description of Artificial Sequence: Synthetic oligonucleotide
  Antisense strand to SEQ ID NO: 90878
acuagacuaacaaaggugc

SEQ ID NO: 90960 - RNA, 19 nt, Artificial Sequence
  Description of Artificial Sequence: Synthetic oligonucleotide
  Sense strand starting at position 1881 of SEQ ID NO: 1143
aguaccugagauugugaga

SEQ ID NO: 90961 - RNA, 19 nt, Artificial Sequence
  Description of Artificial Sequence: Synthetic oligonucleotide
  Antisense strand to SEQ ID NO: 90880
ucucacaaucucagguacu

SEQ ID NO: 90962 - RNA, 19 nt, Artificial Sequence
  Description of Artificial Sequence: Synthetic oligonucleotide
  Sense strand starting at position 1857 of SEQ ID NO: 1143
ggccuugcccuggaaaguu

SEQ ID NO: 90963 - RNA, 19 nt, Artificial Sequence
  Description of Artificial Sequence: Synthetic oligonucleotide
  Antisense strand to SEQ ID NO: 90882
aacuuuccagggcaaggcc

SEQ ID NO: 90964 - RNA, 19 nt, Artificial Sequence
  Description of Artificial Sequence: Synthetic oligonucleotide
  Sense strand starting at position 1856 of SEQ ID NO: 1143
gggccuugcccuggaaagu

SEQ ID NO: 90965 - RNA, 19 nt, Artificial Sequence
  Description of Artificial Sequence: Synthetic oligonucleotide
  Antisense strand to SEQ ID NO: 90884
acuuuccagggcaaggccc

SEQ ID NO: 90966 - RNA, 19 nt, Artificial Sequence
  Description of Artificial Sequence: Synthetic oligonucleotide
  Sense strand starting at position 1626 of SEQ ID NO: 1143
gguugcauucucuacccaa

SEQ ID NO: 90967 - RNA, 19 nt, Artificial Sequence
  Description of Artificial Sequence: Synthetic oligonucleotide
  Antisense strand to SEQ ID NO: 90886
uuggguagagaaugcaacc

SEQ ID NO: 90968 - RNA, 19 nt, Artificial Sequence
  Description of Artificial Sequence: Synthetic oligonucleotide
  Sense strand starting at position 1596 of SEQ ID NO: 1143
gccuguagugcuggucauu

SEQ ID NO: 90969 - RNA, 19 nt, Artificial Sequence
  Description of Artificial Sequence: Synthetic oligonucleotide
  Antisense strand to SEQ ID NO: 90888
aaugaccagcacuacaggc

SEQ ID NO: 90970 - RNA, 19 nt, Artificial Sequence
  Description of Artificial Sequence: Synthetic oligonucleotide
  Sense strand starting at position 1509 of SEQ ID NO: 1143
gugugaucuuaggagauuc

SEQ ID NO: 90971 - RNA, 19 nt, Artificial Sequence
  Description of Artificial Sequence: Synthetic oligonucleotide
  Antisense strand to SEQ ID NO: 90890
gaaucuccuaagaucacac

SEQ ID NO: 90972 - RNA, 19 nt, Artificial Sequence
  Description of Artificial Sequence: Synthetic oligonucleotide
  Sense strand starting at position 1477 of SEQ ID NO: 1143
gauguuaucccugaguuua

SEQ ID NO: 90973 - RNA, 19 nt, Artificial Sequence
  Description of Artificial Sequence: Synthetic oligonucleotide
  Antisense strand to SEQ ID NO: 90892
uaaacucagggauaacauc

SEQ ID NO: 90974 - RNA, 19 nt, Artificial Sequence
  Description of Artificial Sequence: Synthetic oligonucleotide
  Sense strand starting at position 1476 of SEQ ID NO: 1143
agauguuaucccugaguuu

SEQ ID NO: 90975 - RNA, 19 nt, Artificial Sequence
  Description of Artificial Sequence: Synthetic oligonucleotide
  Antisense strand to SEQ ID NO: 90894
aaacucagggauaacaucu

SEQ ID NO: 90976 - RNA, 19 nt, Artificial Sequence
  Description of Artificial Sequence: Synthetic oligonucleotide
  Sense strand starting at position 1473 of SEQ ID NO: 1143
guuagauguuaucccugag

SEQ ID NO: 90977 - RNA, 19 nt, Artificial Sequence
  Description of Artificial Sequence: Synthetic oligonucleotide
  Antisense strand to SEQ ID NO: 90896
cucagggauaacaucuaac

SEQ ID NO: 90978 - RNA, 19 nt, Artificial Sequence
  Description of Artificial Sequence: Synthetic oligonucleotide
  Sense strand starting at position 1408 of SEQ ID NO: 1143
agcagaagauugggucaga

SEQ ID NO: 90979 - RNA, 19 nt, Artificial Sequence
  Description of Artificial Sequence: Synthetic oligonucleotide
  Antisense strand to SEQ ID NO: 90898
ucugacccaaucuucugcu

SEQ ID NO: 90980 - RNA, 19 nt, Artificial Sequence
  Description of Artificial Sequence: Synthetic oligonucleotide
  Sense strand starting at position 1111 of SEQ ID NO: 1143
ccagguugucuguaaagac

SEQ ID NO: 90981 - RNA, 19 nt, Artificial Sequence
  Description of Artificial Sequence: Synthetic oligonucleotide
  Antisense strand to SEQ ID NO: 90900
gucuuuacagacaaccugg

SEQ ID NO: 90982 - RNA, 19 nt, Artificial Sequence
  Description of Artificial Sequence: Synthetic oligonucleotide
  Sense strand starting at position 1108 of SEQ ID NO: 1143
uaaccagguugucuguaaa

SEQ ID NO: 90983 - RNA, 19 nt, Artificial Sequence
  Description of Artificial Sequence: Synthetic oligonucleotide
  Antisense strand to SEQ ID NO: 90902
uuuacagacaaccugguua

SEQ ID NO: 90984 - RNA, 19 nt, Artificial Sequence
  Description of Artificial Sequence: Synthetic oligonucleotide
  Sense strand starting at position 1107 of SEQ ID NO: 1143
auaaccagguugucuguaa

SEQ ID NO: 90985 - RNA, 19 nt, Artificial Sequence
  Description of Artificial Sequence: Synthetic oligonucleotide
  Antisense strand to SEQ ID NO: 90904
uuacagacaaccugguuau

SEQ ID NO: 90986 - RNA, 19 nt, Artificial Sequence
  Description of Artificial Sequence: Synthetic oligonucleotide
  Sense strand starting at position 40 of SEQ ID NO: 1143
cgggcucacugguguaaug

SEQ ID NO: 90987 - RNA, 19 nt, Artificial Sequence
  Description of Artificial Sequence: Synthetic oligonucleotide
  Antisense strand to SEQ ID NO: 90906
cauuacaccagugagcccg

SEQ ID NO: 90988 - RNA, 19 nt, Artificial Sequence
  Description of Artificial Sequence: Synthetic oligonucleotide
  Sense strand starting at position 3511 of SEQ ID NO: 1142
agaaauaaacgguggcuca

SEQ ID NO: 90989 - RNA, 19 nt, Artificial Sequence
  Description of Artificial Sequence: Synthetic oligonucleotide
  Antisense strand to SEQ ID NO: 90908
ugagccaccguuuauuucu

SEQ ID NO: 90990 - RNA, 19 nt, Artificial Sequence
  Description of Artificial Sequence: Synthetic oligonucleotide
  Sense strand starting at position 3427 of SEQ ID NO: 1142
cugccuguggagugagaau

SEQ ID NO: 90991 - RNA, 19 nt, Artificial Sequence
  Description of Artificial Sequence: Synthetic oligonucleotide
  Antisense strand to SEQ ID NO: 90910
auucucacuccacaggcag

SEQ ID NO: 90992 - RNA, 19 nt, Artificial Sequence
  Description of Artificial Sequence: Synthetic oligonucleotide
  Sense strand starting at position 3402 of SEQ ID NO: 1142
cacuaucucccguaaggca

SEQ ID NO: 90993 - RNA, 19 nt, Artificial Sequence
  Description of Artificial Sequence: Synthetic oligonucleotide
  Antisense strand to SEQ ID NO: 90912
ugccuuacgggagauagug

SEQ ID NO: 90994 - RNA, 19 nt, Artificial Sequence
  Description of Artificial Sequence: Synthetic oligonucleotide
  Sense strand starting at position 3154 of SEQ ID NO: 1142
gaggaagccugaguuggaa

SEQ ID NO: 90995 - RNA, 19 nt, Artificial Sequence
  Description of Artificial Sequence: Synthetic oligonucleotide
  Antisense strand to SEQ ID NO: 90914
uuccaacucaggcuuccuc

SEQ ID NO: 90996 - RNA, 19 nt, Artificial Sequence
  Description of Artificial Sequence: Synthetic oligonucleotide
  Sense strand starting at position 2936 of SEQ ID NO: 1142
ccaggucaccagugauaug

SEQ ID NO: 90997 - RNA, 19 nt, Artificial Sequence
  Description of Artificial Sequence: Synthetic oligonucleotide
  Antisense strand to SEQ ID NO: 90916
cauaucacuggugaccugg

SEQ ID NO: 90998 - RNA, 19 nt, Artificial Sequence
  Description of Artificial Sequence: Synthetic oligonucleotide
  Sense strand starting at position 2933 of SEQ ID NO: 1142
gggccaggucaccagugau

SEQ ID NO: 90999 - RNA, 19 nt, Artificial Sequence
  Description of Artificial Sequence: Synthetic oligonucleotide
  Antisense strand to SEQ ID NO: 90918
aucacuggugaccuggccc

SEQ ID NO: 91000 - RNA, 19 nt, Artificial Sequence
  Description of Artificial Sequence: Synthetic oligonucleotide
  Sense strand starting at position 2847 of SEQ ID NO: 1142
gcaagaagauugucacgag

SEQ ID NO: 91001 - RNA, 19 nt, Artificial Sequence
  Description of Artificial Sequence: Synthetic oligonucleotide
  Antisense strand to SEQ ID NO: 90920
cucgugacaaucuucuugc

SEQ ID NO: 91002 - RNA, 19 nt, Artificial Sequence
  Description of Artificial Sequence: Synthetic oligonucleotide
  Sense strand starting at position 2821 of SEQ ID NO: 1142
ucaggacuuucuguuauaa

SEQ ID NO: 91003 - RNA, 19 nt, Artificial Sequence
  Description of Artificial Sequence: Synthetic oligonucleotide
  Antisense strand to SEQ ID NO: 90922
uuauaacagaaaguccuga

SEQ ID NO: 91004 - RNA, 19 nt, Artificial Sequence
  Description of Artificial Sequence: Synthetic oligonucleotide
  Sense strand starting at position 2665 of SEQ ID NO: 1142
uuaaucaugguuggagagu

SEQ ID NO: 91005 - RNA, 19 nt, Artificial Sequence
  Description of Artificial Sequence: Synthetic oligonucleotide
  Antisense strand to SEQ ID NO: 90924
acucuccaaccaugauuaa

SEQ ID NO: 91006 - RNA, 19 nt, Artificial Sequence
  Description of Artificial Sequence: Synthetic oligonucleotide
  Sense strand starting at position 2663 of SEQ ID NO: 1142
cauuaaucaugguuggaga

SEQ ID NO: 91007 - RNA, 19 nt, Artificial Sequence
  Description of Artificial Sequence: Synthetic oligonucleotide
  Antisense strand to SEQ ID NO: 90926
ucuccaaccaugauuaaug

SEQ ID NO: 91008 - RNA, 19 nt, Artificial Sequence
  Description of Artificial Sequence: Synthetic oligonucleotide
  Sense strand starting at position 2661 of SEQ ID NO: 1142
cccauuaaucaugguugga

SEQ ID NO: 91009 - RNA, 19 nt, Artificial Sequence
  Description of Artificial Sequence: Synthetic oligonucleotide
  Antisense strand to SEQ ID NO: 90928
uccaaccaugauuaauggg

SEQ ID NO: 91010 - RNA, 19 nt, Artificial Sequence
  Description of Artificial Sequence: Synthetic oligonucleotide
  Sense strand starting at position 2513 of SEQ ID NO: 1142
uagucaaggguaggugaau

SEQ ID NO: 91011 - RNA, 19 nt, Artificial Sequence
  Description of Artificial Sequence: Synthetic oligonucleotide
  Antisense strand to SEQ ID NO: 90930
auucaccuacccuugacua

SEQ ID NO: 91012 - RNA, 19 nt, Artificial Sequence
  Description of Artificial Sequence: Synthetic oligonucleotide
  Sense strand starting at position 2498 of SEQ ID NO: 1142
acaguagcuuuauuauagu

SEQ ID NO: 91013 - RNA, 19 nt, Artificial Sequence
  Description of Artificial Sequence: Synthetic oligonucleotide
  Antisense strand to SEQ ID NO: 90932
acuauaauaaagcuacugu

SEQ ID NO: 91014 - RNA, 19 nt, Artificial Sequence
  Description of Artificial Sequence: Synthetic oligonucleotide
  Sense strand starting at position 2493 of SEQ ID NO: 1142
auggaacaguagcuuuauu

SEQ ID NO: 91015 - RNA, 19 nt, Artificial Sequence
  Description of Artificial Sequence: Synthetic oligonucleotide
  Antisense strand to SEQ ID NO: 90934
aauaaagcuacuguuccau

SEQ ID NO: 91016 - RNA, 19 nt, Artificial Sequence
  Description of Artificial Sequence: Synthetic oligonucleotide
  Sense strand starting at position 2440 of SEQ ID NO: 1142
gcauguuacagucagguca

SEQ ID NO: 91017 - RNA, 19 nt, Artificial Sequence
  Description of Artificial Sequence: Synthetic oligonucleotide
  Antisense strand to SEQ ID NO: 90936
ugaccugacuguaacaugc

SEQ ID NO: 91018 - RNA, 19 nt, Artificial Sequence
  Description of Artificial Sequence: Synthetic oligonucleotide
  Sense strand starting at position 2402 of SEQ ID NO: 1142
ggacaauaucccuguuaaa

SEQ ID NO: 91019 - RNA, 19 nt, Artificial Sequence
  Description of Artificial Sequence: Synthetic oligonucleotide
  Antisense strand to SEQ ID NO: 90938
uuuaacagggauauugucc

SEQ ID NO: 91020 - RNA, 19 nt, Artificial Sequence
  Description of Artificial Sequence: Synthetic oligonucleotide
  Sense strand starting at position 2401 of SEQ ID NO: 1142
aggacaauaucccuguuaa

SEQ ID NO: 91021 - RNA, 19 nt, Artificial Sequence
  Description of Artificial Sequence: Synthetic oligonucleotide
  Antisense strand to SEQ ID NO: 90940
uuaacagggauauuguccu

SEQ ID NO: 91022 - RNA, 19 nt, Artificial Sequence
  Description of Artificial Sequence: Synthetic oligonucleotide
  Sense strand starting at position 2225 of SEQ ID NO: 1142
ggugcaucugggcaagaga

SEQ ID NO: 91023 - RNA, 19 nt, Artificial Sequence
  Description of Artificial Sequence: Synthetic oligonucleotide
  Antisense strand to SEQ ID NO: 90942
ucucuugcccagaugcacc

SEQ ID NO: 91024 - RNA, 19 nt, Artificial Sequence
  Description of Artificial Sequence: Synthetic oligonucleotide
  Sense strand starting at position 2161 of SEQ ID NO: 1142
gugacacugggagguuuaa

SEQ ID NO: 91025 - RNA, 19 nt, Artificial Sequence
  Description of Artificial Sequence: Synthetic oligonucleotide
  Antisense strand to SEQ ID NO: 90944
uuaaaccucccagugucac

SEQ ID NO: 91026 - RNA, 19 nt, Artificial Sequence
  Description of Artificial Sequence: Synthetic oligonucleotide
  Sense strand starting at position 1680 of SEQ ID NO: 1142
accagcuucgcaggaaaga

SEQ ID NO: 91027 - RNA, 19 nt, Artificial Sequence
  Description of Artificial Sequence: Synthetic oligonucleotide
  Antisense strand to SEQ ID NO: 90946
ucuuuccugcgaagcuggu

SEQ ID NO: 91028 - RNA, 19 nt, Artificial Sequence
  Description of Artificial Sequence: Synthetic oligonucleotide
  Sense strand starting at position 1607 of SEQ ID NO: 1142
gugccugguguccaggaaa

SEQ ID NO: 91029 - RNA, 19 nt, Artificial Sequence
  Description of Artificial Sequence: Synthetic oligonucleotide
  Antisense strand to SEQ ID NO: 90948
uuuccuggacaccaggcac

SEQ ID NO: 91030 - RNA, 19 nt, Artificial Sequence
  Description of Artificial Sequence: Synthetic oligonucleotide
  Sense strand starting at position 1388 of SEQ ID NO: 1142
gaaggauuccuggguccuc

SEQ ID NO: 91031 - RNA, 19 nt, Artificial Sequence
  Description of Artificial Sequence: Synthetic oligonucleotide
  Antisense strand to SEQ ID NO: 90950
gaggacccaggaauccuuc

SEQ ID NO: 91032 - RNA, 19 nt, Artificial Sequence
  Description of Artificial Sequence: Synthetic oligonucleotide
  Sense strand starting at position 1351 of SEQ ID NO: 1142
aggagauucuugucacugg

SEQ ID NO: 91033 - RNA, 19 nt, Artificial Sequence
  Description of Artificial Sequence: Synthetic oligonucleotide
  Antisense strand to SEQ ID NO: 90952
ccagugacaagaaucuccu

SEQ ID NO: 91034 - RNA, 19 nt, Artificial Sequence
  Description of Artificial Sequence: Synthetic oligonucleotide
  Sense strand starting at position 1343 of SEQ ID NO: 1142
ucuuucucaggagauucuu

SEQ ID NO: 91035 - RNA, 19 nt, Artificial Sequence
  Description of Artificial Sequence: Synthetic oligonucleotide
  Antisense strand to SEQ ID NO: 90954
aagaaucuccugagaaaga

SEQ ID NO: 91036 - RNA, 19 nt, Artificial Sequence
  Description of Artificial Sequence: Synthetic oligonucleotide
  Sense strand starting at position 1279 of SEQ ID NO: 1142
ucuggaugccuugggugau

SEQ ID NO: 91037 - RNA, 19 nt, Artificial Sequence
  Description of Artificial Sequence: Synthetic oligonucleotide
  Antisense strand to SEQ ID NO: 90956
aucacccaaggcauccaga

SEQ ID NO: 91038 - RNA, 19 nt, Artificial Sequence
  Description of Artificial Sequence: Synthetic oligonucleotide
  Sense strand starting at position 1229 of SEQ ID NO: 1142
ggagauucuucccucgauc

SEQ ID NO: 91039 - RNA, 19 nt, Artificial Sequence
  Description of Artificial Sequence: Synthetic oligonucleotide
  Antisense strand to SEQ ID NO: 90958
gaucgagggaagaaucucc

SEQ ID NO: 91040 - RNA, 19 nt, Artificial Sequence
  Description of Artificial Sequence: Synthetic oligonucleotide
  Sense strand starting at position 1228 of SEQ ID NO: 1142
aggagauucuucccucgau

SEQ ID NO: 91041 - RNA, 19 nt, Artificial Sequence
  Description of Artificial Sequence: Synthetic oligonucleotide
  Antisense strand to SEQ ID NO: 90960
aucgagggaagaaucuccu

SEQ ID NO: 91042 - RNA, 19 nt, Artificial Sequence
  Description of Artificial Sequence: Synthetic oligonucleotide
  Sense strand starting at position 1027 of SEQ ID NO: 1142
gacuuuccagauggaaguu

SEQ ID NO: 91043 - RNA, 19 nt, Artificial Sequence
  Description of Artificial Sequence: Synthetic oligonucleotide
  Antisense strand to SEQ ID NO: 90962
aacuuccaucuggaaaguc

SEQ ID NO: 91044 - RNA, 19 nt, Artificial Sequence
  Description of Artificial Sequence: Synthetic oligonucleotide
  Sense strand starting at position 1026 of SEQ ID NO: 1142
ugacuuuccagauggaagu

SEQ ID NO: 91045 - RNA, 19 nt, Artificial Sequence
  Description of Artificial Sequence: Synthetic oligonucleotide
  Antisense strand to SEQ ID NO: 90964
acuuccaucuggaaaguca

SEQ ID NO: 91046 - RNA, 19 nt, Artificial Sequence
  Description of Artificial Sequence: Synthetic oligonucleotide
  Sense strand starting at position 1021 of SEQ ID NO: 1142
aauggugacuuuccagaug

SEQ ID NO: 91047 - RNA, 19 nt, Artificial Sequence
  Description of Artificial Sequence: Synthetic oligonucleotide
  Antisense strand to SEQ ID NO: 90966
caucuggaaagucaccauu

SEQ ID NO: 91048 - RNA, 19 nt, Artificial Sequence
  Description of Artificial Sequence: Synthetic oligonucleotide
  Sense strand starting at position 908 of SEQ ID NO: 1142
ggguuugaagcaggaauca

SEQ ID NO: 91049 - RNA, 19 nt, Artificial Sequence
  Description of Artificial Sequence: Synthetic oligonucleotide
  Antisense strand to SEQ ID NO: 90968
ugauuccugcuucaaaccc

SEQ ID NO: 91050 - RNA, 19 nt, Artificial Sequence
  Description of Artificial Sequence: Synthetic oligonucleotide
  Sense strand starting at position 798 of SEQ ID NO: 1142
uggaaaucuggcugaguga

SEQ ID NO: 91051 - RNA, 19 nt, Artificial Sequence
  Description of Artificial Sequence: Synthetic oligonucleotide
  Antisense strand to SEQ ID NO: 90970
ucacucagccagauuucca

SEQ ID NO: 91052 - RNA, 19 nt, Artificial Sequence
  Description of Artificial Sequence: Synthetic oligonucleotide
  Sense strand starting at position 797 of SEQ ID NO: 1142
cuggaaaucuggcugagug

SEQ ID NO: 91053 - RNA, 19 nt, Artificial Sequence
  Description of Artificial Sequence: Synthetic oligonucleotide
  Antisense strand to SEQ ID NO: 90972
cacucagccagauuuccag

SEQ ID NO: 91054 - RNA, 19 nt, Artificial Sequence
  Description of Artificial Sequence: Synthetic oligonucleotide
  Sense strand starting at position 643 of SEQ ID NO: 1142
gaaugacccucccugaagu

SEQ ID NO: 91055 - RNA, 19 nt, Artificial Sequence
  Description of Artificial Sequence: Synthetic oligonucleotide
  Antisense strand to SEQ ID NO: 90974
acuucagggagggucauuc

SEQ ID NO: 91056 - RNA, 19 nt, Artificial Sequence
  Description of Artificial Sequence: Synthetic oligonucleotide
  Sense strand starting at position 628 of SEQ ID NO: 1142
augccuguccagggugaau

SEQ ID NO: 91057 - RNA, 19 nt, Artificial Sequence
  Description of Artificial Sequence: Synthetic oligonucleotide
  Antisense strand to SEQ ID NO: 90976
auucacccuggacaggcau

SEQ ID NO: 91058 - RNA, 19 nt, Artificial Sequence
  Description of Artificial Sequence: Synthetic oligonucleotide
  Sense strand starting at position 528 of SEQ ID NO: 1142
cccuucucucuuugagaag

SEQ ID NO: 91059 - RNA, 19 nt, Artificial Sequence
  Description of Artificial Sequence: Synthetic oligonucleotide
  Antisense strand to SEQ ID NO: 90978
cuucucaaagagagaaggg

SEQ ID NO: 91060 - RNA, 19 nt, Artificial Sequence
  Description of Artificial Sequence: Synthetic oligonucleotide
  Sense strand starting at position 527 of SEQ ID NO: 1142
gcccuucucucuuugagaa

SEQ ID NO: 91061 - RNA, 19 nt, Artificial Sequence
  Description of Artificial Sequence: Synthetic oligonucleotide
  Antisense strand to SEQ ID NO: 90980
uucucaaagagagaagggc

SEQ ID NO: 91062 - RNA, 19 nt, Artificial Sequence
  Description of Artificial Sequence: Synthetic oligonucleotide
  Sense strand starting at position 446 of SEQ ID NO: 1142
ggaagcuuuccagaucuua

SEQ ID NO: 91063 - RNA, 19 nt, Artificial Sequence
  Description of Artificial Sequence: Synthetic oligonucleotide
  Antisense strand to SEQ ID NO: 90982
uaagaucuggaaagcuucc

SEQ ID NO: 91064 - RNA, 19 nt, Artificial Sequence
  Description of Artificial Sequence: Synthetic oligonucleotide
  Sense strand starting at position 443 of SEQ ID NO: 1142
gcaggaagcuuuccagauc

SEQ ID NO: 91065 - RNA, 19 nt, Artificial Sequence
  Description of Artificial Sequence: Synthetic oligonucleotide
  Antisense strand to SEQ ID NO: 90984
gaucuggaaagcuuccugc

SEQ ID NO: 91066 - RNA, 19 nt, Artificial Sequence
  Description of Artificial Sequence: Synthetic oligonucleotide
  Sense strand starting at position 211 of SEQ ID NO: 1142
ccacuugcucaaggaaaug

SEQ ID NO: 91067 - RNA, 19 nt, Artificial Sequence
  Description of Artificial Sequence: Synthetic oligonucleotide
  Antisense strand to SEQ ID NO: 90986
cauuuccuugagcaagugg

SEQ ID NO: 91068 - RNA, 19 nt, Artificial Sequence
  Description of Artificial Sequence: Synthetic oligonucleotide
  Sense strand starting at position 23 of SEQ ID NO: 1144
cuccaagauggauguguau

SEQ ID NO: 91069 - RNA, 19 nt, Artificial Sequence
  Description of Artificial Sequence: Synthetic oligonucleotide
  Antisense strand to SEQ ID NO: 90988
auacacauccaucuuggag

SEQ ID NO: 91070 - RNA, 19 nt, Artificial Sequence
  Description of Artificial Sequence: Synthetic oligonucleotide
  Sense strand starting at position 25 of SEQ ID NO: 1144
ccaagauggauguguauug

SEQ ID NO: 91071 - RNA, 19 nt, Artificial Sequence
  Description of Artificial Sequence: Synthetic oligonucleotide
  Antisense strand to SEQ ID NO: 90990
caauacacauccaucuugg

SEQ ID NO: 91072 - RNA, 19 nt, Artificial Sequence
  Description of Artificial Sequence: Synthetic oligonucleotide
  Sense strand starting at position 355 of SEQ ID NO: 1144
ggaggugauucuuuccaca

SEQ ID NO: 91073 - RNA, 19 nt, Artificial Sequence
  Description of Artificial Sequence: Synthetic oligonucleotide
  Antisense strand to SEQ ID NO: 90992
uguggaaagaaucaccucc

SEQ ID NO: 91074 - RNA, 19 nt, Artificial Sequence
  Description of Artificial Sequence: Synthetic oligonucleotide
  Sense strand starting at position 357 of SEQ ID NO: 1144
aggugauucuuuccacaac

SEQ ID NO: 91075 - RNA, 19 nt, Artificial Sequence
  Description of Artificial Sequence: Synthetic oligonucleotide
  Antisense strand to SEQ ID NO: 90994
guuguggaaagaaucaccu

SEQ ID NO: 91076 - RNA, 19 nt, Artificial Sequence
  Description of Artificial Sequence: Synthetic oligonucleotide
  Sense strand starting at position 440 of SEQ ID NO: 1144
gggcuuuguaaccagagag

SEQ ID NO: 91077 - RNA, 19 nt, Artificial Sequence
  Description of Artificial Sequence: Synthetic oligonucleotide
  Antisense strand to SEQ ID NO: 90996
cucucugguuacaaagccc

SEQ ID NO: 91078 - RNA, 19 nt, Artificial Sequence
  Description of Artificial Sequence: Synthetic oligonucleotide
  Sense strand starting at position 640 of SEQ ID NO: 1144
gauucuuuauagcugguau

SEQ ID NO: 91079 - RNA, 19 nt, Artificial Sequence
  Description of Artificial Sequence: Synthetic oligonucleotide
  Antisense strand to SEQ ID NO: 90998
auaccagcuauaaagaauc

SEQ ID NO: 91080 - RNA, 19 nt, Artificial Sequence
  Description of Artificial Sequence: Synthetic oligonucleotide
  Sense strand starting at position 642 of SEQ ID NO: 1144
uucuuuauagcugguauuu

SEQ ID NO: 91081 - RNA, 19 nt, Artificial Sequence
  Description of Artificial Sequence: Synthetic oligonucleotide
  Antisense strand to SEQ ID NO: 91000
aaauaccagcuauaaagaa

SEQ ID NO: 91082 - RNA, 19 nt, Artificial Sequence
  Description of Artificial Sequence: Synthetic oligonucleotide
  Sense strand starting at position 682 of SEQ ID NO: 1144
uuucgucauugaucaaaug

SEQ ID NO: 91083 - RNA, 19 nt, Artificial Sequence
  Description of Artificial Sequence: Synthetic oligonucleotide
  Antisense strand to SEQ ID NO: 91002
cauuugaucaaugacgaaa

SEQ ID NO: 91084 - RNA, 19 nt, Artificial Sequence
  Description of Artificial Sequence: Synthetic oligonucleotide
  Sense strand starting at position 683 of SEQ ID NO: 1144
uucgucauugaucaaaugu

SEQ ID NO: 91085 - RNA, 19 nt, Artificial Sequence
  Description of Artificial Sequence: Synthetic oligonucleotide
  Antisense strand to SEQ ID NO: 91004
acauuugaucaaugacgaa

SEQ ID NO: 91086 - RNA, 19 nt, Artificial Sequence
  Description of Artificial Sequence: Synthetic oligonucleotide
  Sense strand starting at position 774 of SEQ ID NO: 1144
gaggacuguccuggucaca

SEQ ID NO: 91087 - RNA, 19 nt, Artificial Sequence
  Description of Artificial Sequence: Synthetic oligonucleotide
  Antisense strand to SEQ ID NO: 91006
ugugaccaggacaguccuc

SEQ ID NO: 91088 - RNA, 19 nt, Artificial Sequence
  Description of Artificial Sequence: Synthetic oligonucleotide
  Sense strand starting at position 816 of SEQ ID NO: 1144
gggcuaaauaaauguguca

SEQ ID NO: 91089 - RNA, 19 nt, Artificial Sequence
  Description of Artificial Sequence: Synthetic oligonucleotide
  Antisense strand to SEQ ID NO: 91008
ugacacauuuauuuagccc

SEQ ID NO: 91090 - RNA, 19 nt, Artificial Sequence
  Description of Artificial Sequence: Synthetic oligonucleotide
  Sense strand starting at position 819 of SEQ ID NO: 1144
cuaaauaaaugugucacuu

SEQ ID NO: 91091 - RNA, 19 nt, Artificial Sequence
  Description of Artificial Sequence: Synthetic oligonucleotide
  Antisense strand to SEQ ID NO: 91010
aagugacacauuuauuuag

SEQ ID NO: 91092 - RNA, 19 nt, Artificial Sequence
  Description of Artificial Sequence: Synthetic oligonucleotide
  Sense strand starting at position 823 of SEQ ID NO: 1144
auaaaugugucacuuuauc

SEQ ID NO: 91093 - RNA, 19 nt, Artificial Sequence
  Description of Artificial Sequence: Synthetic oligonucleotide
  Antisense strand to SEQ ID NO: 91012
gauaaagugacacauuuau

SEQ ID NO: 91094 - RNA, 19 nt, Artificial Sequence
  Description of Artificial Sequence: Synthetic oligonucleotide
  Sense strand starting at position 1324 of SEQ ID NO: 1144
gggucacugagagagucuu

SEQ ID NO: 91095 - RNA, 19 nt, Artificial Sequence
  Description of Artificial Sequence: Synthetic oligonucleotide
  Antisense strand to SEQ ID NO: 91014
aagacucucucagugaccc

SEQ ID NO: 91096 - RNA, 19 nt, Artificial Sequence
  Description of Artificial Sequence: Synthetic oligonucleotide
  Sense strand starting at position 1460 of SEQ ID NO: 1144
ugcuguccaccugauaaau

SEQ ID NO: 91097 - RNA, 19 nt, Artificial Sequence
  Description of Artificial Sequence: Synthetic oligonucleotide
  Antisense strand to SEQ ID NO: 91016
auuuaucagguggacagca

SEQ ID NO: 91098 - RNA, 19 nt, Artificial Sequence
  Description of Artificial Sequence: Synthetic oligonucleotide
  Sense strand starting at position 1514 of SEQ ID NO: 1144
gggugaggcuuucccugau

SEQ ID NO: 91099 - RNA, 19 nt, Artificial Sequence
  Description of Artificial Sequence: Synthetic oligonucleotide
  Antisense strand to SEQ ID NO: 91018
aucagggaaagccucaccc

SEQ ID NO: 91100 - RNA, 19 nt, Artificial Sequence
  Description of Artificial Sequence: Synthetic oligonucleotide
  Sense strand starting at position 1740 of SEQ ID NO: 1144
aagguuugcucucccaaga

SEQ ID NO: 91101 - RNA, 19 nt, Artificial Sequence
  Description of Artificial Sequence: Synthetic oligonucleotide
  Antisense strand to SEQ ID NO: 91020
ucuugggagagcaaaccuu

SEQ ID NO: 91102 - RNA, 19 nt, Artificial Sequence
  Description of Artificial Sequence: Synthetic oligonucleotide
  Sense strand starting at position 1860 of SEQ ID NO: 1144
gacagcucuuacuuggaga

SEQ ID NO: 91103 - RNA, 19 nt, Artificial Sequence
  Description of Artificial Sequence: Synthetic oligonucleotide
  Antisense strand to SEQ ID NO: 91022
ucuccaaguaagagcuguc

SEQ ID NO: 91104 - RNA, 19 nt, Artificial Sequence
  Description of Artificial Sequence: Synthetic oligonucleotide
  Sense strand starting at position 1862 of SEQ ID NO: 1144
cagcucuuacuuggagaca

SEQ ID NO: 91105 - RNA, 19 nt, Artificial Sequence
  Description of Artificial Sequence: Synthetic oligonucleotide
  Antisense strand to SEQ ID NO: 91024
ugucuccaaguaagagcug

SEQ ID NO: 91106 - RNA, 19 nt, Artificial Sequence
  Description of Artificial Sequence: Synthetic oligonucleotide
  Sense strand starting at position 2135 of SEQ ID NO: 1144
gccaucugacagcaacauu

SEQ ID NO: 91107 - RNA, 19 nt, Artificial Sequence
  Description of Artificial Sequence: Synthetic oligonucleotide
  Antisense strand to SEQ ID NO: 91026
aauguugcugucagauggc

SEQ ID NO: 91108 - RNA, 19 nt, Artificial Sequence
  Description of Artificial Sequence: Synthetic oligonucleotide
  Sense strand starting at position 2413 of SEQ ID NO: 1144
cuacauaggugaccuagau

SEQ ID NO: 91109 - RNA, 19 nt, Artificial Sequence
  Description of Artificial Sequence: Synthetic oligonucleotide
  Antisense strand to SEQ ID NO: 91028
aucuaggucaccuauguag

SEQ ID NO: 91110 - RNA, 19 nt, Artificial Sequence
  Description of Artificial Sequence: Synthetic oligonucleotide
  Sense strand starting at position 2558 of SEQ ID NO: 1144
ggcugguugcuugcgugaa

SEQ ID NO: 91111 - RNA, 19 nt, Artificial Sequence
  Description of Artificial Sequence: Synthetic oligonucleotide
  Antisense strand to SEQ ID NO: 91030
uucacgcaagcaaccagcc

SEQ ID NO: 91112 - RNA, 19 nt, Artificial Sequence
  Description of Artificial Sequence: Synthetic oligonucleotide
  Sense strand starting at position 2620 of SEQ ID NO: 1144
ugucccacugcugaguaaa

SEQ ID NO: 91113 - RNA, 19 nt, Artificial Sequence
  Description of Artificial Sequence: Synthetic oligonucleotide
  Antisense strand to SEQ ID NO: 91032
uuuacucagcagugggaca

SEQ ID NO: 91114 - RNA, 19 nt, Artificial Sequence
  Description of Artificial Sequence: Synthetic oligonucleotide
  Sense strand starting at position 2691 of SEQ ID NO: 1144
agaggugucuaccuccaga

SEQ ID NO: 91115 - RNA, 19 nt, Artificial Sequence
  Description of Artificial Sequence: Synthetic oligonucleotide
  Antisense strand to SEQ ID NO: 91034
ucuggagguagacaccucu

SEQ ID NO: 91116 - RNA, 19 nt, Artificial Sequence
  Description of Artificial Sequence: Synthetic oligonucleotide
  Sense strand starting at position 2694 of SEQ ID NO: 1144
ggugucuaccuccagaaau

SEQ ID NO: 91117 - RNA, 19 nt, Artificial Sequence
  Description of Artificial Sequence: Synthetic oligonucleotide
  Antisense strand to SEQ ID NO: 91036
auuucuggagguagacacc

SEQ ID NO: 91118 - RNA, 19 nt, Artificial Sequence
  Description of Artificial Sequence: Synthetic oligonucleotide
  Sense strand starting at position 2735 of SEQ ID NO: 1144
gccucugaugcccauagau

SEQ ID NO: 91119 - RNA, 19 nt, Artificial Sequence
  Description of Artificial Sequence: Synthetic oligonucleotide
  Antisense strand to SEQ ID NO: 91038
aucuaugggcaucagaggc

SEQ ID NO: 91120 - RNA, 19 nt, Artificial Sequence
  Description of Artificial Sequence: Synthetic oligonucleotide
  Sense strand starting at position 2852 of SEQ ID NO: 1144
ggaggcagcaaguaacauu

SEQ ID NO: 91121 - RNA, 19 nt, Artificial Sequence
  Description of Artificial Sequence: Synthetic oligonucleotide
  Antisense strand to SEQ ID NO: 91040
aauguuacuugcugccucc

SEQ ID NO: 91122 - RNA, 19 nt, Artificial Sequence
  Description of Artificial Sequence: Synthetic oligonucleotide
  Sense strand starting at position 3063 of SEQ ID NO: 1144
aguagaguuaauugggagu

SEQ ID NO: 91123 - RNA, 19 nt, Artificial Sequence
  Description of Artificial Sequence: Synthetic oligonucleotide
  Antisense strand to SEQ ID NO: 91042
acucccaauuaacucuacu

SEQ ID NO: 91124 - RNA, 19 nt, Artificial Sequence
  Description of Artificial Sequence: Synthetic oligonucleotide
  Sense strand starting at position 3128 of SEQ ID NO: 1144
agagaaggauccgauaaca

SEQ ID NO: 91125 - RNA, 19 nt, Artificial Sequence
  Description of Artificial Sequence: Synthetic oligonucleotide
  Antisense strand to SEQ ID NO: 91044
uguuaucggauccuucucu

SEQ ID NO: 91126 - RNA, 19 nt, Artificial Sequence
  Description of Artificial Sequence: Synthetic oligonucleotide
  Sense strand starting at position 3231 of SEQ ID NO: 1144
cccucagaguuaucccacu

SEQ ID NO: 91127 - RNA, 19 nt, Artificial Sequence
  Description of Artificial Sequence: Synthetic oligonucleotide
  Antisense strand to SEQ ID NO: 91046
agugggauaacucugaggg

SEQ ID NO: 91128 - RNA, 19 nt, Artificial Sequence
  Description of Artificial Sequence: Synthetic oligonucleotide
  Sense strand starting at position 3290 of SEQ ID NO: 1144
ccagucuugguugagaaug

SEQ ID NO: 91129 - RNA, 19 nt, Artificial Sequence
  Description of Artificial Sequence: Synthetic oligonucleotide
  Antisense strand to SEQ ID NO: 91048
cauucucaaccaagacugg

SEQ ID NO: 91130 - RNA, 19 nt, Artificial Sequence
  Description of Artificial Sequence: Synthetic oligonucleotide
  Sense strand starting at position 3615 of SEQ ID NO: 1144
cuagccagaggguguuaau

SEQ ID NO: 91131 - RNA, 19 nt, Artificial Sequence
  Description of Artificial Sequence: Synthetic oligonucleotide
  Antisense strand to SEQ ID NO: 91050
auuaacacccucuggcuag

SEQ ID NO: 91132 - RNA, 19 nt, Artificial Sequence
  Description of Artificial Sequence: Synthetic oligonucleotide
  Sense strand starting at position 3663 of SEQ ID NO: 1144
ggagaugucagugauggca

SEQ ID NO: 91133 - RNA, 19 nt, Artificial Sequence
  Description of Artificial Sequence: Synthetic oligonucleotide
  Antisense strand to SEQ ID NO: 91052
ugccaucacugacaucucc

SEQ ID NO: 91134 - RNA, 19 nt, Artificial Sequence
  Description of Artificial Sequence: Synthetic oligonucleotide
  Sense strand starting at position 3795 of SEQ ID NO: 1144
agcugcaauugauugcaaa

SEQ ID NO: 91135 - RNA, 19 nt, Artificial Sequence
  Description of Artificial Sequence: Synthetic oligonucleotide
  Antisense strand to SEQ ID NO: 91054
uuugcaaucaauugcagcu

SEQ ID NO: 91136 - RNA, 19 nt, Artificial Sequence
  Description of Artificial Sequence: Synthetic oligonucleotide
  Sense strand starting at position 3847 of SEQ ID NO: 1144
ugaggucagaacugugauu

SEQ ID NO: 91137 - RNA, 19 nt, Artificial Sequence
  Description of Artificial Sequence: Synthetic oligonucleotide
  Antisense strand to SEQ ID NO: 91056
aaucacaguucugaccuca

SEQ ID NO: 91138 - RNA, 19 nt, Artificial Sequence
  Description of Artificial Sequence: Synthetic oligonucleotide
  Sense strand starting at position 3849 of SEQ ID NO: 1144
aggucagaacugugauuga

SEQ ID NO: 91139 - RNA, 19 nt, Artificial Sequence
  Description of Artificial Sequence: Synthetic oligonucleotide
  Antisense strand to SEQ ID NO: 91058
ucaaucacaguucugaccu

SEQ ID NO: 91140 - RNA, 19 nt, Artificial Sequence
  Description of Artificial Sequence: Synthetic oligonucleotide
  Sense strand starting at position 3852 of SEQ ID NO: 1144
ucagaacugugauugacua

SEQ ID NO: 91141 - RNA, 19 nt, Artificial Sequence
  Description of Artificial Sequence: Synthetic oligonucleotide
  Antisense strand to SEQ ID NO: 91060
uagucaaucacaguucuga

SEQ ID NO: 91142 - RNA, 19 nt, Artificial Sequence
  Description of Artificial Sequence: Synthetic oligonucleotide
  Sense strand starting at position 3856 of SEQ ID NO: 1144
aacugugauugacuaguga

SEQ ID NO: 91143 - RNA, 19 nt, Artificial Sequence
  Description of Artificial Sequence: Synthetic oligonucleotide
  Antisense strand to SEQ ID NO: 91062
ucacuagucaaucacaguu

SEQ ID NO: 91144 - RNA, 19 nt, Artificial Sequence
  Description of Artificial Sequence: Synthetic oligonucleotide
  Sense strand starting at position 3878 of SEQ ID NO: 1144
cugccauggguguaagagu

SEQ ID NO: 91145 - RNA, 19 nt, Artificial Sequence
  Description of Artificial Sequence: Synthetic oligonucleotide
  Antisense strand to SEQ ID NO: 91064
acucuuacacccauggcag

SEQ ID NO: 91146 - RNA, 19 nt, Artificial Sequence
  Description of Artificial Sequence: Synthetic oligonucleotide
  Sense strand starting at position 3955 of SEQ ID NO: 1144
caggauuuaugugagcaau

SEQ ID NO: 91147 - RNA, 19 nt, Artificial Sequence
  Description of Artificial Sequence: Synthetic oligonucleotide
  Antisense strand to SEQ ID NO: 91066
auugcucacauaaauccug

SEQ ID NO: 91148 - RNA, 19 nt, Artificial Sequence
  Description of Artificial Sequence: Synthetic oligonucleotide
  Sense strand starting at position 3901 of SEQ ID NO: 1145
ucaucaccugcaugggauu

SEQ ID NO: 91149 - RNA, 19 nt, Artificial Sequence
  Description of Artificial Sequence: Synthetic oligonucleotide
  Antisense strand to SEQ ID NO: 91068
aaucccaugcaggugauga

SEQ ID NO: 91150 - RNA, 19 nt, Artificial Sequence
  Description of Artificial Sequence: Synthetic oligonucleotide
  Sense strand starting at position 3794 of SEQ ID NO: 1145
guguaugauguccaaaucu

SEQ ID NO: 91151 - RNA, 19 nt, Artificial Sequence
  Description of Artificial Sequence: Synthetic oligonucleotide
  Antisense strand to SEQ ID NO: 91070
agauuuggacaucauacac

SEQ ID NO: 91152 - RNA, 19 nt, Artificial Sequence
  Description of Artificial Sequence: Synthetic oligonucleotide
  Sense strand starting at position 3793 of SEQ ID NO: 1145
aguguaugauguccaaauc

SEQ ID NO: 91153 - RNA, 19 nt, Artificial Sequence
  Description of Artificial Sequence: Synthetic oligonucleotide
  Antisense strand to SEQ ID NO: 91072
gauuuggacaucauacacu

SEQ ID NO: 91154 - RNA, 19 nt, Artificial Sequence
  Description of Artificial Sequence: Synthetic oligonucleotide
  Sense strand starting at position 3430 of SEQ ID NO: 1145
gguuaagaccucuggaccu

SEQ ID NO: 91155 - RNA, 19 nt, Artificial Sequence
  Description of Artificial Sequence: Synthetic oligonucleotide
  Antisense strand to SEQ ID NO: 91074
agguccagaggucuuaacc

SEQ ID NO: 91156 - RNA, 19 nt, Artificial Sequence
  Description of Artificial Sequence: Synthetic oligonucleotide
  Sense strand starting at position 3415 of SEQ ID NO: 1145
aggaauccaugagaagguu

SEQ ID NO: 91157 - RNA, 19 nt, Artificial Sequence
  Description of Artificial Sequence: Synthetic oligonucleotide
  Antisense strand to SEQ ID NO: 91076
aaccuucucauggauuccu

SEQ ID NO: 91158 - RNA, 19 nt, Artificial Sequence
  Description of Artificial Sequence: Synthetic oligonucleotide
  Sense strand starting at position 3310 of SEQ ID NO: 1145
ucauuaaugucaucguuau

SEQ ID NO: 91159 - RNA, 19 nt, Artificial Sequence
  Description of Artificial Sequence: Synthetic oligonucleotide
  Antisense strand to SEQ ID NO: 91078
auaacgaugacauuaauga

SEQ ID NO: 91160 - RNA, 19 nt, Artificial Sequence
  Description of Artificial Sequence: Synthetic oligonucleotide
  Sense strand starting at position 3301 of SEQ ID NO: 1145
gaaugaugaucauuaaugu

SEQ ID NO: 91161 - RNA, 19 nt, Artificial Sequence
  Description of Artificial Sequence: Synthetic oligonucleotide
  Antisense strand to SEQ ID NO: 91080
acauuaaugaucaucauuc

SEQ ID NO: 91162 - RNA, 19 nt, Artificial Sequence
  Description of Artificial Sequence: Synthetic oligonucleotide
  Sense strand starting at position 3261 of SEQ ID NO: 1145
gugucuaucauguaguaaa

SEQ ID NO: 91163 - RNA, 19 nt, Artificial Sequence
  Description of Artificial Sequence: Synthetic oligonucleotide
  Antisense strand to SEQ ID NO: 91082
uuuacuacaugauagacac

SEQ ID NO: 91164 - RNA, 19 nt, Artificial Sequence
  Description of Artificial Sequence: Synthetic oligonucleotide
  Sense strand starting at position 3254 of SEQ ID NO: 1145
uggaauagugucuaucaug

SEQ ID NO: 91165 - RNA, 19 nt, Artificial Sequence
  Description of Artificial Sequence: Synthetic oligonucleotide
  Antisense strand to SEQ ID NO: 91084
caugauagacacuauucca

SEQ ID NO: 91166 - RNA, 19 nt, Artificial Sequence
  Description of Artificial Sequence: Synthetic oligonucleotide
  Sense strand starting at position 3253 of SEQ ID NO: 1145
uuggaauagugucuaucau

SEQ ID NO: 91167 - RNA, 19 nt, Artificial Sequence
  Description of Artificial Sequence: Synthetic oligonucleotide
  Antisense strand to SEQ ID NO: 91086
augauagacacuauuccaa

SEQ ID NO: 91168 - RNA, 19 nt, Artificial Sequence
  Description of Artificial Sequence: Synthetic oligonucleotide
  Sense strand starting at position 2847 of SEQ ID NO: 1145
uggcauccuucucuggaaa

SEQ ID NO: 91169 - RNA, 19 nt, Artificial Sequence
  Description of Artificial Sequence: Synthetic oligonucleotide
  Antisense strand to SEQ ID NO: 91088
uuuccagagaaggaugcca

SEQ ID NO: 91170 - RNA, 19 nt, Artificial Sequence
  Description of Artificial Sequence: Synthetic oligonucleotide
  Sense strand starting at position 2846 of SEQ ID NO: 1145
cuggcauccuucucuggaa

SEQ ID NO: 91171 - RNA, 19 nt, Artificial Sequence
  Description of Artificial Sequence: Synthetic oligonucleotide
  Antisense strand to SEQ ID NO: 91090
uuccagagaaggaugccag

SEQ ID NO: 91172 - RNA, 19 nt, Artificial Sequence
  Description of Artificial Sequence: Synthetic oligonucleotide
  Sense strand starting at position 2795 of SEQ ID NO: 1145
aaagguauguuacaaggaa

SEQ ID NO: 91173 - RNA, 19 nt, Artificial Sequence
  Description of Artificial Sequence: Synthetic oligonucleotide
  Antisense strand to SEQ ID NO: 91092
uuccuuguaacauaccuuu

SEQ ID NO: 91174 - RNA, 19 nt, Artificial Sequence
  Description of Artificial Sequence: Synthetic oligonucleotide
  Sense strand starting at position 2711 of SEQ ID NO: 1145
uuuacuuucccauguguaa

SEQ ID NO: 91175 - RNA, 19 nt, Artificial Sequence
  Description of Artificial Sequence: Synthetic oligonucleotide
  Antisense strand to SEQ ID NO: 91094
uuacacaugggaaaguaaa

SEQ ID NO: 91176 - RNA, 19 nt, Artificial Sequence
  Description of Artificial Sequence: Synthetic oligonucleotide
  Sense strand starting at position 2674 of SEQ ID NO: 1145
guguguggcauugaacaaa

SEQ ID NO: 91177 - RNA, 19 nt, Artificial Sequence
  Description of Artificial Sequence: Synthetic oligonucleotide
  Antisense strand to SEQ ID NO: 91096
uuuguucaaugccacacac

SEQ ID NO: 91178 - RNA, 19 nt, Artificial Sequence
  Description of Artificial Sequence: Synthetic oligonucleotide
  Sense strand starting at position 2667 of SEQ ID NO: 1145
agaauaaguguguggcauu

SEQ ID NO: 91179 - RNA, 19 nt, Artificial Sequence
  Description of Artificial Sequence: Synthetic oligonucleotide
  Antisense strand to SEQ ID NO: 91098
aaugccacacacuuauucu

SEQ ID NO: 91180 - RNA, 19 nt, Artificial Sequence
  Description of Artificial Sequence: Synthetic oligonucleotide
  Sense strand starting at position 2666 of SEQ ID NO: 1145
aagaauaaguguguggcau

SEQ ID NO: 91181 - RNA, 19 nt, Artificial Sequence
  Description of Artificial Sequence: Synthetic oligonucleotide
  Antisense strand to SEQ ID NO: 91100
augccacacacuuauucuu

SEQ ID NO: 91182 - RNA, 19 nt, Artificial Sequence
  Description of Artificial Sequence: Synthetic oligonucleotide
  Sense strand starting at position 2592 of SEQ ID NO: 1145
guaucuuguuuaccucuga

SEQ ID NO: 91183 - RNA, 19 nt, Artificial Sequence
  Description of Artificial Sequence: Synthetic oligonucleotide
  Antisense strand to SEQ ID NO: 91102
ucagagguaaacaagauac

SEQ ID NO: 91184 - RNA, 19 nt, Artificial Sequence
  Description of Artificial Sequence: Synthetic oligonucleotide
  Sense strand starting at position 2588 of SEQ ID NO: 1145
augaguaucuuguuuaccu

SEQ ID NO: 91185 - RNA, 19 nt, Artificial Sequence
  Description of Artificial Sequence: Synthetic oligonucleotide
  Antisense strand to SEQ ID NO: 91104
agguaaacaagauacucau

SEQ ID NO: 91186 - RNA, 19 nt, Artificial Sequence
  Description of Artificial Sequence: Synthetic oligonucleotide
  Sense strand starting at position 2584 of SEQ ID NO: 1145
uuccaugaguaucuuguuu

SEQ ID NO: 91187 - RNA, 19 nt, Artificial Sequence
  Description of Artificial Sequence: Synthetic oligonucleotide
  Antisense strand to SEQ ID NO: 91106
aaacaagauacucauggaa

SEQ ID NO: 91188 - RNA, 19 nt, Artificial Sequence
  Description of Artificial Sequence: Synthetic oligonucleotide
  Sense strand starting at position 2509 of SEQ ID NO: 1145
cagcacugucuggaauuau

SEQ ID NO: 91189 - RNA, 19 nt, Artificial Sequence
  Description of Artificial Sequence: Synthetic oligonucleotide
  Antisense strand to SEQ ID NO: 91108
auaauuccagacagugcug

SEQ ID NO: 91190 - RNA, 19 nt, Artificial Sequence
  Description of Artificial Sequence: Synthetic oligonucleotide
  Sense strand starting at position 2281 of SEQ ID NO: 1145
aggagucugcuguauuacu

SEQ ID NO: 91191 - RNA, 19 nt, Artificial Sequence
  Description of Artificial Sequence: Synthetic oligonucleotide
  Antisense strand to SEQ ID NO: 91110
aguaauacagcagacuccu

SEQ ID NO: 91192 - RNA, 19 nt, Artificial Sequence
  Description of Artificial Sequence: Synthetic oligonucleotide
  Sense strand starting at position 1424 of SEQ ID NO: 1145
aguggcagaguguguaaau

SEQ ID NO: 91193 - RNA, 19 nt, Artificial Sequence
  Description of Artificial Sequence: Synthetic oligonucleotide
  Antisense strand to SEQ ID NO: 91112
auuuacacacucugccacu

SEQ ID NO: 91194 - RNA, 19 nt, Artificial Sequence
  Description of Artificial Sequence: Synthetic oligonucleotide
  Sense strand starting at position 1287 of SEQ ID NO: 1145
aagugccuugcaugacuua

SEQ ID NO: 91195 - RNA, 19 nt, Artificial Sequence
  Description of Artificial Sequence: Synthetic oligonucleotide
  Antisense strand to SEQ ID NO: 91114
uaagucaugcaaggcacuu

SEQ ID NO: 91196 - RNA, 19 nt, Artificial Sequence
  Description of Artificial Sequence: Synthetic oligonucleotide
  Sense strand starting at position 1283 of SEQ ID NO: 1145
uaugaagugccuugcauga

SEQ ID NO: 91197 - RNA, 19 nt, Artificial Sequence
  Description of Artificial Sequence: Synthetic oligonucleotide
  Antisense strand to SEQ ID NO: 91116
ucaugcaaggcacuucaua

SEQ ID NO: 91198 - RNA, 19 nt, Artificial Sequence
  Description of Artificial Sequence: Synthetic oligonucleotide
  Sense strand starting at position 1268 of SEQ ID NO: 1145
uuaugugccagguauuaug

SEQ ID NO: 91199 - RNA, 19 nt, Artificial Sequence
  Description of Artificial Sequence: Synthetic oligonucleotide
  Antisense strand to SEQ ID NO: 91118
cauaauaccuggcacauaa

SEQ ID NO: 91200 - RNA, 19 nt, Artificial Sequence
  Description of Artificial Sequence: Synthetic oligonucleotide
  Sense strand starting at position 867 of SEQ ID NO: 1145
uugguauuucucugcuaaa

SEQ ID NO: 91201 - RNA, 19 nt, Artificial Sequence
  Description of Artificial Sequence: Synthetic oligonucleotide
  Antisense strand to SEQ ID NO: 91120
uuuagcagagaaauaccaa

SEQ ID NO: 91202 - RNA, 19 nt, Artificial Sequence
  Description of Artificial Sequence: Synthetic oligonucleotide
  Sense strand starting at position 866 of SEQ ID NO: 1145
uuugguauuucucugcuaa

SEQ ID NO: 91203 - RNA, 19 nt, Artificial Sequence
  Description of Artificial Sequence: Synthetic oligonucleotide
  Antisense strand to SEQ ID NO: 91122
uuagcagagaaauaccaaa

SEQ ID NO: 91204 - RNA, 19 nt, Artificial Sequence
  Description of Artificial Sequence: Synthetic oligonucleotide
  Sense strand starting at position 802 of SEQ ID NO: 1145
ggaugugggucuuugagga

SEQ ID NO: 91205 - RNA, 19 nt, Artificial Sequence
  Description of Artificial Sequence: Synthetic oligonucleotide
  Antisense strand to SEQ ID NO: 91124
uccucaaagacccacaucc

SEQ ID NO: 91206 - RNA, 19 nt, Artificial Sequence
  Description of Artificial Sequence: Synthetic oligonucleotide
  Sense strand starting at position 695 of SEQ ID NO: 1145
augugcaaguacucaaagu

SEQ ID NO: 91207 - RNA, 19 nt, Artificial Sequence
  Description of Artificial Sequence: Synthetic oligonucleotide
  Antisense strand to SEQ ID NO: 91126
acuuugaguacuugcacau

SEQ ID NO: 91208 - RNA, 19 nt, Artificial Sequence
  Description of Artificial Sequence: Synthetic oligonucleotide
  Sense strand starting at position 687 of SEQ ID NO: 1145
augagaagaugugcaagua

SEQ ID NO: 91209 - RNA, 19 nt, Artificial Sequence
  Description of Artificial Sequence: Synthetic oligonucleotide
  Antisense strand to SEQ ID NO: 91128
uacuugcacaucuucucau

SEQ ID NO: 91210 - RNA, 19 nt, Artificial Sequence
  Description of Artificial Sequence: Synthetic oligonucleotide
  Sense strand starting at position 615 of SEQ ID NO: 1145
cccauuuaguuuguuaucu

SEQ ID NO: 91211 - RNA, 19 nt, Artificial Sequence
  Description of Artificial Sequence: Synthetic oligonucleotide
  Antisense strand to SEQ ID NO: 91130
agauaacaaacuaaauggg

SEQ ID NO: 91212 - RNA, 19 nt, Artificial Sequence
  Description of Artificial Sequence: Synthetic oligonucleotide
  Sense strand starting at position 547 of SEQ ID NO: 1145
aguuaaccaucucuggaau

SEQ ID NO: 91213 - RNA, 19 nt, Artificial Sequence
  Description of Artificial Sequence: Synthetic oligonucleotide
  Antisense strand to SEQ ID NO: 91132
auuccagagaugguuaacu

SEQ ID NO: 91214 - RNA, 19 nt, Artificial Sequence
  Description of Artificial Sequence: Synthetic oligonucleotide
  Sense strand starting at position 534 of SEQ ID NO: 1145
uguugagccguugaguuaa

SEQ ID NO: 91215 - RNA, 19 nt, Artificial Sequence
  Description of Artificial Sequence: Synthetic oligonucleotide
  Antisense strand to SEQ ID NO: 91134
uuaacucaacggcucaaca

SEQ ID NO: 91216 - RNA, 19 nt, Artificial Sequence
  Description of Artificial Sequence: Synthetic oligonucleotide
  Sense strand starting at position 397 of SEQ ID NO: 1145
gggagagcugugugauaag

SEQ ID NO: 91217 - RNA, 19 nt, Artificial Sequence
  Description of Artificial Sequence: Synthetic oligonucleotide
  Antisense strand to SEQ ID NO: 91136
cuuaucacacagcucuccc

SEQ ID NO: 91218 - RNA, 19 nt, Artificial Sequence
  Description of Artificial Sequence: Synthetic oligonucleotide
  Sense strand starting at position 284 of SEQ ID NO: 1145
ugagaaucgcgugaacucu

SEQ ID NO: 91219 - RNA, 19 nt, Artificial Sequence
  Description of Artificial Sequence: Synthetic oligonucleotide
  Antisense strand to SEQ ID NO: 91138
agaguucacgcgauucuca

SEQ ID NO: 91220 - RNA, 19 nt, Artificial Sequence
  Description of Artificial Sequence: Synthetic oligonucleotide
  Sense strand starting at position 283 of SEQ ID NO: 1145
augagaaucgcgugaacuc

SEQ ID NO: 91221 - RNA, 19 nt, Artificial Sequence
  Description of Artificial Sequence: Synthetic oligonucleotide
  Antisense strand to SEQ ID NO: 91140
gaguucacgcgauucucau

SEQ ID NO: 91222 - RNA, 19 nt, Artificial Sequence
  Description of Artificial Sequence: Synthetic oligonucleotide
  Sense strand starting at position 16 of SEQ ID NO: 1145
ucagaaugauuguaaggau

SEQ ID NO: 91223 - RNA, 19 nt, Artificial Sequence
  Description of Artificial Sequence: Synthetic oligonucleotide
  Antisense strand to SEQ ID NO: 91142
auccuuacaaucauucuga

SEQ ID NO: 91224 - RNA, 19 nt, Artificial Sequence
  Description of Artificial Sequence: Synthetic oligonucleotide
  Sense strand starting at position 13 of SEQ ID NO: 1145
aucucagaaugauuguaag

SEQ ID NO: 91225 - RNA, 19 nt, Artificial Sequence
  Description of Artificial Sequence: Synthetic oligonucleotide
  Antisense strand to SEQ ID NO: 91144
cuuacaaucauucugagau

SEQ ID NO: 91226 - RNA, 19 nt, Artificial Sequence
  Description of Artificial Sequence: Synthetic oligonucleotide
  Sense strand starting at position 10 of SEQ ID NO: 1145
ucaaucucagaaugauugu

SEQ ID NO: 91227 - RNA, 19 nt, Artificial Sequence
  Description of Artificial Sequence: Synthetic oligonucleotide
  Antisense strand to SEQ ID NO: 91146
acaaucauucugagauuga

SEQ ID NO: 91228 - RNA, 19 nt, Artificial Sequence
  Description of Artificial Sequence: Synthetic oligonucleotide
  Sense strand starting at position 3966 of SEQ ID NO: 1146
gauuaaguuucucuuugug

SEQ ID NO: 91229 - RNA, 19 nt, Artificial Sequence
  Description of Artificial Sequence: Synthetic oligonucleotide
  Antisense strand to SEQ ID NO: 91148
cacaaagagaaacuuaauc

SEQ ID NO: 91230 - RNA, 19 nt, Artificial Sequence
  Description of Artificial Sequence: Synthetic oligonucleotide
  Sense strand starting at position 3965 of SEQ ID NO: 1146
ggauuaaguuucucuuugu

SEQ ID NO: 91231 - RNA, 19 nt, Artificial Sequence
  Description of Artificial Sequence: Synthetic oligonucleotide
  Antisense strand to SEQ ID NO: 91150
acaaagagaaacuuaaucc

SEQ ID NO: 91232 - RNA, 19 nt, Artificial Sequence
  Description of Artificial Sequence: Synthetic oligonucleotide
  Sense strand starting at position 3895 of SEQ ID NO: 1146
ugaauccuguucuugagaa

SEQ ID NO: 91233 - RNA, 19 nt, Artificial Sequence
  Description of Artificial Sequence: Synthetic oligonucleotide
  Antisense strand to SEQ ID NO: 91152
uucucaagaacaggauuca

SEQ ID NO: 91234 - RNA, 19 nt, Artificial Sequence
  Description of Artificial Sequence: Synthetic oligonucleotide
  Sense strand starting at position 3893 of SEQ ID NO: 1146
gcugaauccuguucuugag

SEQ ID NO: 91235 - RNA, 19 nt, Artificial Sequence
  Description of Artificial Sequence: Synthetic oligonucleotide
  Antisense strand to SEQ ID NO: 91154
cucaagaacaggauucagc

SEQ ID NO: 91236 - RNA, 19 nt, Artificial Sequence
  Description of Artificial Sequence: Synthetic oligonucleotide
  Sense strand starting at position 3697 of SEQ ID NO: 1146
gauagucuccgagagucag

SEQ ID NO: 91237 - RNA, 19 nt, Artificial Sequence
  Description of Artificial Sequence: Synthetic oligonucleotide
  Antisense strand to SEQ ID NO: 91156
cugacucucggagacuauc

SEQ ID NO: 91238 - RNA, 19 nt, Artificial Sequence
  Description of Artificial Sequence: Synthetic oligonucleotide
  Sense strand starting at position 3694 of SEQ ID NO: 1146
acugauagucuccgagagu

SEQ ID NO: 91239 - RNA, 19 nt, Artificial Sequence
  Description of Artificial Sequence: Synthetic oligonucleotide
  Antisense strand to SEQ ID NO: 91158
acucucggagacuaucagu

SEQ ID NO: 91240 - RNA, 19 nt, Artificial Sequence
  Description of Artificial Sequence: Synthetic oligonucleotide
  Sense strand starting at position 3693 of SEQ ID NO: 1146
cacugauagucuccgagag

SEQ ID NO: 91241 - RNA, 19 nt, Artificial Sequence
  Description of Artificial Sequence: Synthetic oligonucleotide
  Antisense strand to SEQ ID NO: 91160
cucucggagacuaucagug

SEQ ID NO: 91242 - RNA, 19 nt, Artificial Sequence
  Description of Artificial Sequence: Synthetic oligonucleotide
  Sense strand starting at position 3345 of SEQ ID NO: 1146
guucuaacucucuaggaug

SEQ ID NO: 91243 - RNA, 19 nt, Artificial Sequence
  Description of Artificial Sequence: Synthetic oligonucleotide
  Antisense strand to SEQ ID NO: 91162
cauccuagagaguuagaac

SEQ ID NO: 91244 - RNA, 19 nt, Artificial Sequence
  Description of Artificial Sequence: Synthetic oligonucleotide
  Sense strand starting at position 3344 of SEQ ID NO: 1146
uguucuaacucucuaggau

SEQ ID NO: 91245 - RNA, 19 nt, Artificial Sequence
  Description of Artificial Sequence: Synthetic oligonucleotide
  Antisense strand to SEQ ID NO: 91164
auccuagagaguuagaaca

SEQ ID NO: 91246 - RNA, 19 nt, Artificial Sequence
  Description of Artificial Sequence: Synthetic oligonucleotide
  Sense strand starting at position 3316 of SEQ ID NO: 1146
auguucuaacuccaggauu

SEQ ID NO: 91247 - RNA, 19 nt, Artificial Sequence
  Description of Artificial Sequence: Synthetic oligonucleotide
  Antisense strand to SEQ ID NO: 91166
aauccuggaguuagaacau

SEQ ID NO: 91248 - RNA, 19 nt, Artificial Sequence
  Description of Artificial Sequence: Synthetic oligonucleotide
  Sense strand starting at position 3308 of SEQ ID NO: 1146
aggcacagauguucuaacu

SEQ ID NO: 91249 - RNA, 19 nt, Artificial Sequence
  Description of Artificial Sequence: Synthetic oligonucleotide
  Antisense strand to SEQ ID NO: 91168
aguuagaacaucugugccu

SEQ ID NO: 91250 - RNA, 19 nt, Artificial Sequence
  Description of Artificial Sequence: Synthetic oligonucleotide
  Sense strand starting at position 3222 of SEQ ID NO: 1146
gggucaagaaucugcauga

SEQ ID NO: 91251 - RNA, 19 nt, Artificial Sequence
  Description of Artificial Sequence: Synthetic oligonucleotide
  Antisense strand to SEQ ID NO: 91170
ucaugcagauucuugaccc

SEQ ID NO: 91252 - RNA, 19 nt, Artificial Sequence
  Description of Artificial Sequence: Synthetic oligonucleotide
  Sense strand starting at position 3169 of SEQ ID NO: 1146
uuuaucugugaaugagagu

SEQ ID NO: 91253 - RNA, 19 nt, Artificial Sequence
  Description of Artificial Sequence: Synthetic oligonucleotide
  Antisense strand to SEQ ID NO: 91172
acucucauucacagauaaa

SEQ ID NO: 91254 - RNA, 19 nt, Artificial Sequence
  Description of Artificial Sequence: Synthetic oligonucleotide
  Sense strand starting at position 3165 of SEQ ID NO: 1146
cuuguuuaucugugaauga

SEQ ID NO: 91255 - RNA, 19 nt, Artificial Sequence
  Description of Artificial Sequence: Synthetic oligonucleotide
  Antisense strand to SEQ ID NO: 91174
ucauucacagauaaacaag

SEQ ID NO: 91256 - RNA, 19 nt, Artificial Sequence
  Description of Artificial Sequence: Synthetic oligonucleotide
  Sense strand starting at position 3164 of SEQ ID NO: 1146
ucuuguuuaucugugaaug

SEQ ID NO: 91257 - RNA, 19 nt, Artificial Sequence
  Description of Artificial Sequence: Synthetic oligonucleotide
  Antisense strand to SEQ ID NO: 91176
cauucacagauaaacaaga

SEQ ID NO: 91258 - RNA, 19 nt, Artificial Sequence
  Description of Artificial Sequence: Synthetic oligonucleotide
  Sense strand starting at position 3162 of SEQ ID NO: 1146
agucuuguuuaucugugaa

SEQ ID NO: 91259 - RNA, 19 nt, Artificial Sequence
  Description of Artificial Sequence: Synthetic oligonucleotide
  Antisense strand to SEQ ID NO: 91178
uucacagauaaacaagacu

SEQ ID NO: 91260 - RNA, 19 nt, Artificial Sequence
  Description of Artificial Sequence: Synthetic oligonucleotide
  Sense strand starting at position 3161 of SEQ ID NO: 1146
gagucuuguuuaucuguga

SEQ ID NO: 91261 - RNA, 19 nt, Artificial Sequence
  Description of Artificial Sequence: Synthetic oligonucleotide
  Antisense strand to SEQ ID NO: 91180
ucacagauaaacaagacuc

SEQ ID NO: 91262 - RNA, 19 nt, Artificial Sequence
  Description of Artificial Sequence: Synthetic oligonucleotide
  Sense strand starting at position 3159 of SEQ ID NO: 1146
cugagucuuguuuaucugu

SEQ ID NO: 91263 - RNA, 19 nt, Artificial Sequence
  Description of Artificial Sequence: Synthetic oligonucleotide
  Antisense strand to SEQ ID NO: 91182
acagauaaacaagacucag

SEQ ID NO: 91264 - RNA, 19 nt, Artificial Sequence
  Description of Artificial Sequence: Synthetic oligonucleotide
  Sense strand starting at position 3078 of SEQ ID NO: 1146
gguagccucacagauggua

SEQ ID NO: 91265 - RNA, 19 nt, Artificial Sequence
  Description of Artificial Sequence: Synthetic oligonucleotide
  Antisense strand to SEQ ID NO: 91184
uaccaucugugaggcuacc

SEQ ID NO: 91266 - RNA, 19 nt, Artificial Sequence
  Description of Artificial Sequence: Synthetic oligonucleotide
  Sense strand starting at position 2465 of SEQ ID NO: 1146
agcugaugagcugaaauau

SEQ ID NO: 91267 - RNA, 19 nt, Artificial Sequence
  Description of Artificial Sequence: Synthetic oligonucleotide
  Antisense strand to SEQ ID NO: 91186
auauuucagcucaucagcu

SEQ ID NO: 91268 - RNA, 19 nt, Artificial Sequence
  Description of Artificial Sequence: Synthetic oligonucleotide
  Sense strand starting at position 2367 of SEQ ID NO: 1146
ggcuguaagccagggauau

SEQ ID NO: 91269 - RNA, 19 nt, Artificial Sequence
  Description of Artificial Sequence: Synthetic oligonucleotide
  Antisense strand to SEQ ID NO: 91188
auaucccuggcuuacagcc

SEQ ID NO: 91270 - RNA, 19 nt, Artificial Sequence
  Description of Artificial Sequence: Synthetic oligonucleotide
  Sense strand starting at position 2355 of SEQ ID NO: 1146
ggaaauaguggaggcugua

SEQ ID NO: 91271 - RNA, 19 nt, Artificial Sequence
  Description of Artificial Sequence: Synthetic oligonucleotide
  Antisense strand to SEQ ID NO: 91190
uacagccuccacuauuucc

SEQ ID NO: 91272 - RNA, 19 nt, Artificial Sequence
  Description of Artificial Sequence: Synthetic oligonucleotide
  Sense strand starting at position 2287 of SEQ ID NO: 1146
uccuccaguggugaaagau

SEQ ID NO: 91273 - RNA, 19 nt, Artificial Sequence
  Description of Artificial Sequence: Synthetic oligonucleotide
  Antisense strand to SEQ ID NO: 91192
aucuuucaccacuggagga

SEQ ID NO: 91274 - RNA, 19 nt, Artificial Sequence
  Description of Artificial Sequence: Synthetic oligonucleotide
  Sense strand starting at position 2284 of SEQ ID NO: 1146
ggcuccuccaguggugaaa

SEQ ID NO: 91275 - RNA, 19 nt, Artificial Sequence
  Description of Artificial Sequence: Synthetic oligonucleotide
  Antisense strand to SEQ ID NO: 91194
uuucaccacuggaggagcc

SEQ ID NO: 91276 - RNA, 19 nt, Artificial Sequence
  Description of Artificial Sequence: Synthetic oligonucleotide
  Sense strand starting at position 2283 of SEQ ID NO: 1146
gggcuccuccaguggugaa

SEQ ID NO: 91277 - RNA, 19 nt, Artificial Sequence
  Description of Artificial Sequence: Synthetic oligonucleotide
  Antisense strand to SEQ ID NO: 91196
uucaccacuggaggagccc

SEQ ID NO: 91278 - RNA, 19 nt, Artificial Sequence
  Description of Artificial Sequence: Synthetic oligonucleotide
  Sense strand starting at position 955 of SEQ ID NO: 1146
cccugagcguaaucagaga

SEQ ID NO: 91279 - RNA, 19 nt, Artificial Sequence
  Description of Artificial Sequence: Synthetic oligonucleotide
  Antisense strand to SEQ ID NO: 91198
ucucugauuacgcucaggg

SEQ ID NO: 91280 - RNA, 19 nt, Artificial Sequence
  Description of Artificial Sequence: Synthetic oligonucleotide
  Sense strand starting at position 747 of SEQ ID NO: 1146
gucaguuguuuccugauga

SEQ ID NO: 91281 - RNA, 19 nt, Artificial Sequence
  Description of Artificial Sequence: Synthetic oligonucleotide
  Antisense strand to SEQ ID NO: 91200
ucaucaggaaacaacugac

SEQ ID NO: 91282 - RNA, 19 nt, Artificial Sequence
  Description of Artificial Sequence: Synthetic oligonucleotide
  Sense strand starting at position 472 of SEQ ID NO: 1146
cagugugauaaacgguaca

SEQ ID NO: 91283 - RNA, 19 nt, Artificial Sequence
  Description of Artificial Sequence: Synthetic oligonucleotide
  Antisense strand to SEQ ID NO: 91202
uguaccguuuaucacacug

SEQ ID NO: 91284 - RNA, 19 nt, Artificial Sequence
  Description of Artificial Sequence: Synthetic oligonucleotide
  Sense strand starting at position 465 of SEQ ID NO: 1146
augcaaucagugugauaaa

SEQ ID NO: 91285 - RNA, 19 nt, Artificial Sequence
  Description of Artificial Sequence: Synthetic oligonucleotide
  Antisense strand to SEQ ID NO: 91204
uuuaucacacugauugcau

SEQ ID NO: 91286 - RNA, 19 nt, Artificial Sequence
  Description of Artificial Sequence: Synthetic oligonucleotide
  Sense strand starting at position 463 of SEQ ID NO: 1146
ggaugcaaucagugugaua

SEQ ID NO: 91287 - RNA, 19 nt, Artificial Sequence
  Description of Artificial Sequence: Synthetic oligonucleotide
  Antisense strand to SEQ ID NO: 91206
uaucacacugauugcaucc

SEQ ID NO: 91288 - RNA, 19 nt, Artificial Sequence
  Description of Artificial Sequence: Synthetic oligonucleotide
  Sense strand starting at position 418 of SEQ ID NO: 1146
agaaguccuggucaaaucu

SEQ ID NO: 91289 - RNA, 19 nt, Artificial Sequence
  Description of Artificial Sequence: Synthetic oligonucleotide
  Antisense strand to SEQ ID NO: 91208
agauuugaccaggacuucu

SEQ ID NO: 91290 - RNA, 19 nt, Artificial Sequence
  Description of Artificial Sequence: Synthetic oligonucleotide
  Sense strand starting at position 415 of SEQ ID NO: 1146
cucagaaguccuggucaaa

SEQ ID NO: 91291 - RNA, 19 nt, Artificial Sequence
  Description of Artificial Sequence: Synthetic oligonucleotide
  Antisense strand to SEQ ID NO: 91210
uuugaccaggacuucugag

SEQ ID NO: 91292 - RNA, 19 nt, Artificial Sequence
  Description of Artificial Sequence: Synthetic oligonucleotide
  Sense strand starting at position 387 of SEQ ID NO: 1146
ggauucucccacuggaaca

SEQ ID NO: 91293 - RNA, 19 nt, Artificial Sequence
  Description of Artificial Sequence: Synthetic oligonucleotide
  Antisense strand to SEQ ID NO: 91212
uguuccagugggagaaucc

SEQ ID NO: 91294 - RNA, 19 nt, Artificial Sequence
  Description of Artificial Sequence: Synthetic oligonucleotide
  Sense strand starting at position 361 of SEQ ID NO: 1146
ucccucauuccuggagaaa

SEQ ID NO: 91295 - RNA, 19 nt, Artificial Sequence
  Description of Artificial Sequence: Synthetic oligonucleotide
  Antisense strand to SEQ ID NO: 91214
uuucuccaggaaugaggga

SEQ ID NO: 91296 - RNA, 19 nt, Artificial Sequence
  Description of Artificial Sequence: Synthetic oligonucleotide
  Sense strand starting at position 198 of SEQ ID NO: 1146
cuugcucaagauugaagau

SEQ ID NO: 91297 - RNA, 19 nt, Artificial Sequence
  Description of Artificial Sequence: Synthetic oligonucleotide
  Antisense strand to SEQ ID NO: 91216
aucuucaaucuugagcaag

SEQ ID NO: 91298 - RNA, 19 nt, Artificial Sequence
  Description of Artificial Sequence: Synthetic oligonucleotide
  Sense strand starting at position 190 of SEQ ID NO: 1146
acaagugacuugcucaaga

SEQ ID NO: 91299 - RNA, 19 nt, Artificial Sequence
  Description of Artificial Sequence: Synthetic oligonucleotide
  Antisense strand to SEQ ID NO: 91218
ucuugagcaagucacuugu

SEQ ID NO: 91300 - RNA, 19 nt, Artificial Sequence
  Description of Artificial Sequence: Synthetic oligonucleotide
  Sense strand starting at position 188 of SEQ ID NO: 1146
ggacaagugacuugcucaa

SEQ ID NO: 91301 - RNA, 19 nt, Artificial Sequence
  Description of Artificial Sequence: Synthetic oligonucleotide
  Antisense strand to SEQ ID NO: 91220
uugagcaagucacuugucc

SEQ ID NO: 91302 - RNA, 19 nt, Artificial Sequence
  Description of Artificial Sequence: Synthetic oligonucleotide
  Sense strand starting at position 125 of SEQ ID NO: 1146
auacuccugccagguaaga

SEQ ID NO: 91303 - RNA, 19 nt, Artificial Sequence
  Description of Artificial Sequence: Synthetic oligonucleotide
  Antisense strand to SEQ ID NO: 91222
ucuuaccuggcaggaguau

SEQ ID NO: 91304 - RNA, 19 nt, Artificial Sequence
  Description of Artificial Sequence: Synthetic oligonucleotide
  Sense strand starting at position 98 of SEQ ID NO: 1146
ggagcauuauuaccaauaa

SEQ ID NO: 91305 - RNA, 19 nt, Artificial Sequence
  Description of Artificial Sequence: Synthetic oligonucleotide
  Antisense strand to SEQ ID NO: 91224
uuauugguaauaaugcucc

SEQ ID NO: 91306 - RNA, 19 nt, Artificial Sequence
  Description of Artificial Sequence: Synthetic oligonucleotide
  Sense strand starting at position 95 of SEQ ID NO: 1146
gagggagcauuauuaccaa

SEQ ID NO: 91307 - RNA, 19 nt, Artificial Sequence
  Description of Artificial Sequence: Synthetic oligonucleotide
  Antisense strand to SEQ ID NO: 91226
uugguaauaaugcucccuc

SEQ ID NO: 91308 - RNA, 19 nt, Artificial Sequence
  Description of Artificial Sequence: Synthetic oligonucleotide
  Sense strand starting at position 9 of SEQ ID NO: 1147
gauggagauuuaugaucca

SEQ ID NO: 91309 - RNA, 19 nt, Artificial Sequence
  Description of Artificial Sequence: Synthetic oligonucleotide
  Antisense strand to SEQ ID NO: 91228
uggaucauaaaucuccauc

SEQ ID NO: 91310 - RNA, 19 nt, Artificial Sequence
  Description of Artificial Sequence: Synthetic oligonucleotide
  Sense strand starting at position 46 of SEQ ID NO: 1147
cuggauguuugugauauag

SEQ ID NO: 91311 - RNA, 19 nt, Artificial Sequence
  Description of Artificial Sequence: Synthetic oligonucleotide
  Antisense strand to SEQ ID NO: 91230
cuauaucacaaacauccag

SEQ ID NO: 91312 - RNA, 19 nt, Artificial Sequence
  Description of Artificial Sequence: Synthetic oligonucleotide
  Sense strand starting at position 48 of SEQ ID NO: 1147
ggauguuugugauauagga

SEQ ID NO: 91313 - RNA, 19 nt, Artificial Sequence
  Description of Artificial Sequence: Synthetic oligonucleotide
  Antisense strand to SEQ ID NO: 91232
uccuauaucacaaacaucc

SEQ ID NO: 91314 - RNA, 19 nt, Artificial Sequence
  Description of Artificial Sequence: Synthetic oligonucleotide
  Sense strand starting at position 50 of SEQ ID NO: 1147
auguuugugauauaggaug

SEQ ID NO: 91315 - RNA, 19 nt, Artificial Sequence
  Description of Artificial Sequence: Synthetic oligonucleotide
  Antisense strand to SEQ ID NO: 91234
cauccuauaucacaaacau

SEQ ID NO: 91316 - RNA, 19 nt, Artificial Sequence
  Description of Artificial Sequence: Synthetic oligonucleotide
  Sense strand starting at position 52 of SEQ ID NO: 1147
guuugugauauaggaugga

SEQ ID NO: 91317 - RNA, 19 nt, Artificial Sequence
  Description of Artificial Sequence: Synthetic oligonucleotide
  Antisense strand to SEQ ID NO: 91236
uccauccuauaucacaaac

SEQ ID NO: 91318 - RNA, 19 nt, Artificial Sequence
  Description of Artificial Sequence: Synthetic oligonucleotide
  Sense strand starting at position 98 of SEQ ID NO: 1147
accgauauuuacugaggau

SEQ ID NO: 91319 - RNA, 19 nt, Artificial Sequence
  Description of Artificial Sequence: Synthetic oligonucleotide
  Antisense strand to SEQ ID NO: 91238
auccucaguaaauaucggu

SEQ ID NO: 91320 - RNA, 19 nt, Artificial Sequence
  Description of Artificial Sequence: Synthetic oligonucleotide
  Sense strand starting at position 130 of SEQ ID NO: 1147
gaggaagaauuguauacau

SEQ ID NO: 91321 - RNA, 19 nt, Artificial Sequence
  Description of Artificial Sequence: Synthetic oligonucleotide
  Antisense strand to SEQ ID NO: 91240
auguauacaauucuuccuc

SEQ ID NO: 91322 - RNA, 19 nt, Artificial Sequence
  Description of Artificial Sequence: Synthetic oligonucleotide
  Sense strand starting at position 139 of SEQ ID NO: 1147
uuguauacauugucucauu

SEQ ID NO: 91323 - RNA, 19 nt, Artificial Sequence
  Description of Artificial Sequence: Synthetic oligonucleotide
  Antisense strand to SEQ ID NO: 91242
aaugagacaauguauacaa

SEQ ID NO: 91324 - RNA, 19 nt, Artificial Sequence
  Description of Artificial Sequence: Synthetic oligonucleotide
  Sense strand starting at position 201 of SEQ ID NO: 1147
guaauugccugucucuuua

SEQ ID NO: 91325 - RNA, 19 nt, Artificial Sequence
  Description of Artificial Sequence: Synthetic oligonucleotide
  Antisense strand to SEQ ID NO: 91244
uaaagagacaggcaauuac

SEQ ID NO: 91326 - RNA, 19 nt, Artificial Sequence
  Description of Artificial Sequence: Synthetic oligonucleotide
  Sense strand starting at position 1269 of SEQ ID NO: 1147
ugucuacucaagugcagua

SEQ ID NO: 91327 - RNA, 19 nt, Artificial Sequence
  Description of Artificial Sequence: Synthetic oligonucleotide
  Antisense strand to SEQ ID NO: 91246
uacugcacuugaguagaca

SEQ ID NO: 91328 - RNA, 19 nt, Artificial Sequence
  Description of Artificial Sequence: Synthetic oligonucleotide
  Sense strand starting at position 1386 of SEQ ID NO: 1147
ugagcaaaugguugugaga

SEQ ID NO: 91329 - RNA, 19 nt, Artificial Sequence
  Description of Artificial Sequence: Synthetic oligonucleotide
  Antisense strand to SEQ ID NO: 91248
ucucacaaccauuugcuca

SEQ ID NO: 91330 - RNA, 19 nt, Artificial Sequence
  Description of Artificial Sequence: Synthetic oligonucleotide
  Sense strand starting at position 1389 of SEQ ID NO: 1147
gcaaaugguugugagauga

SEQ ID NO: 91331 - RNA, 19 nt, Artificial Sequence
  Description of Artificial Sequence: Synthetic oligonucleotide
  Antisense strand to SEQ ID NO: 91250
ucaucucacaaccauuugc

SEQ ID NO: 91332 - RNA, 19 nt, Artificial Sequence
  Description of Artificial Sequence: Synthetic oligonucleotide
  Sense strand starting at position 2185 of SEQ ID NO: 1147
ggcuacagcugucuauaca

SEQ ID NO: 91333 - RNA, 19 nt, Artificial Sequence
  Description of Artificial Sequence: Synthetic oligonucleotide
  Antisense strand to SEQ ID NO: 91252
uguauagacagcuguagcc

SEQ ID NO: 91334 - RNA, 19 nt, Artificial Sequence
  Description of Artificial Sequence: Synthetic oligonucleotide
  Sense strand starting at position 2186 of SEQ ID NO: 1147
gcuacagcugucuauacaa

SEQ ID NO: 91335 - RNA, 19 nt, Artificial Sequence
  Description of Artificial Sequence: Synthetic oligonucleotide
  Antisense strand to SEQ ID NO: 91254
uuguauagacagcuguagc

SEQ ID NO: 91336 - RNA, 19 nt, Artificial Sequence
  Description of Artificial Sequence: Synthetic oligonucleotide
  Sense strand starting at position 2193 of SEQ ID NO: 1147
cugucuauacaauggucau

SEQ ID NO: 91337 - RNA, 19 nt, Artificial Sequence
  Description of Artificial Sequence: Synthetic oligonucleotide
  Antisense strand to SEQ ID NO: 91256
augaccauuguauagacag

SEQ ID NO: 91338 - RNA, 19 nt, Artificial Sequence
  Description of Artificial Sequence: Synthetic oligonucleotide
  Sense strand starting at position 2196 of SEQ ID NO: 1147
ucuauacaauggucaugaa

SEQ ID NO: 91339 - RNA, 19 nt, Artificial Sequence
  Description of Artificial Sequence: Synthetic oligonucleotide
  Antisense strand to SEQ ID NO: 91258
uucaugaccauuguauaga

SEQ ID NO: 91340 - RNA, 19 nt, Artificial Sequence
  Description of Artificial Sequence: Synthetic oligonucleotide
  Sense strand starting at position 2278 of SEQ ID NO: 1147
gggcucucguucucugcaa

SEQ ID NO: 91341 - RNA, 19 nt, Artificial Sequence
  Description of Artificial Sequence: Synthetic oligonucleotide
  Antisense strand to SEQ ID NO: 91260
uugcagagaacgagagccc

SEQ ID NO: 91342 - RNA, 19 nt, Artificial Sequence
  Description of Artificial Sequence: Synthetic oligonucleotide
  Sense strand starting at position 2280 of SEQ ID NO: 1147
gcucucguucucugcaaga

SEQ ID NO: 91343 - RNA, 19 nt, Artificial Sequence
  Description of Artificial Sequence: Synthetic oligonucleotide
  Antisense strand to SEQ ID NO: 91262
ucuugcagagaacgagagc

SEQ ID NO: 91344 - RNA, 19 nt, Artificial Sequence
  Description of Artificial Sequence: Synthetic oligonucleotide
  Sense strand starting at position 2372 of SEQ ID NO: 1147
accagaauggcucaggcaa

SEQ ID NO: 91345 - RNA, 19 nt, Artificial Sequence
  Description of Artificial Sequence: Synthetic oligonucleotide
  Antisense strand to SEQ ID NO: 91264
uugccugagccauucuggu

SEQ ID NO: 91346 - RNA, 19 nt, Artificial Sequence
  Description of Artificial Sequence: Synthetic oligonucleotide
  Sense strand starting at position 2819 of SEQ ID NO: 1147
guuaaugaucaauguccau

SEQ ID NO: 91347 - RNA, 19 nt, Artificial Sequence
  Description of Artificial Sequence: Synthetic oligonucleotide
  Antisense strand to SEQ ID NO: 91266
auggacauugaucauuaac

SEQ ID NO: 91348 - RNA, 19 nt, Artificial Sequence
  Description of Artificial Sequence: Synthetic oligonucleotide
  Sense strand starting at position 2899 of SEQ ID NO: 1147
uuugaucuaugcccuaaag

SEQ ID NO: 91349 - RNA, 19 nt, Artificial Sequence
  Description of Artificial Sequence: Synthetic oligonucleotide
  Antisense strand to SEQ ID NO: 91268
cuuuagggcauagaucaaa

SEQ ID NO: 91350 - RNA, 19 nt, Artificial Sequence
  Description of Artificial Sequence: Synthetic oligonucleotide
  Sense strand starting at position 2918 of SEQ ID NO: 1147
ggagccagguggucucaau

SEQ ID NO: 91351 - RNA, 19 nt, Artificial Sequence
  Description of Artificial Sequence: Synthetic oligonucleotide
  Antisense strand to SEQ ID NO: 91270
auugagaccaccuggcucc

SEQ ID NO: 91352 - RNA, 19 nt, Artificial Sequence
  Description of Artificial Sequence: Synthetic oligonucleotide
  Sense strand starting at position 2928 of SEQ ID NO: 1147
ggucucaauccaggugauc

SEQ ID NO: 91353 - RNA, 19 nt, Artificial Sequence
  Description of Artificial Sequence: Synthetic oligonucleotide
  Antisense strand to SEQ ID NO: 91272
gaucaccuggauugagacc

SEQ ID NO: 91354 - RNA, 19 nt, Artificial Sequence
  Description of Artificial Sequence: Synthetic oligonucleotide
  Sense strand starting at position 3004 of SEQ ID NO: 1147
guggauuuguaagcugguu

SEQ ID NO: 91355 - RNA, 19 nt, Artificial Sequence
  Description of Artificial Sequence: Synthetic oligonucleotide
  Antisense strand to SEQ ID NO: 91274
aaccagcuuacaaauccac

SEQ ID NO: 91356 - RNA, 19 nt, Artificial Sequence
  Description of Artificial Sequence: Synthetic oligonucleotide
  Sense strand starting at position 3009 of SEQ ID NO: 1147
uuuguaagcugguugaaga

SEQ ID NO: 91357 - RNA, 19 nt, Artificial Sequence
  Description of Artificial Sequence: Synthetic oligonucleotide
  Antisense strand to SEQ ID NO: 91276
ucuucaaccagcuuacaaa

SEQ ID NO: 91358 - RNA, 19 nt, Artificial Sequence
  Description of Artificial Sequence: Synthetic oligonucleotide
  Sense strand starting at position 3092 of SEQ ID NO: 1147
aggcacuauuugggacaua

SEQ ID NO: 91359 - RNA, 19 nt, Artificial Sequence
  Description of Artificial Sequence: Synthetic oligonucleotide
  Antisense strand to SEQ ID NO: 91278
uaugucccaaauagugccu

SEQ ID NO: 91360 - RNA, 19 nt, Artificial Sequence
  Description of Artificial Sequence: Synthetic oligonucleotide
  Sense strand starting at position 3093 of SEQ ID NO: 1147
ggcacuauuugggacauaa

SEQ ID NO: 91361 - RNA, 19 nt, Artificial Sequence
  Description of Artificial Sequence: Synthetic oligonucleotide
  Antisense strand to SEQ ID NO: 91280
uuaugucccaaauagugcc

SEQ ID NO: 91362 - RNA, 19 nt, Artificial Sequence
  Description of Artificial Sequence: Synthetic oligonucleotide
  Sense strand starting at position 3103 of SEQ ID NO: 1147
gggacauaauuauaccaaa

SEQ ID NO: 91363 - RNA, 19 nt, Artificial Sequence
  Description of Artificial Sequence: Synthetic oligonucleotide
  Antisense strand to SEQ ID NO: 91282
uuugguauaauuauguccc

SEQ ID NO: 91364 - RNA, 19 nt, Artificial Sequence
  Description of Artificial Sequence: Synthetic oligonucleotide
  Sense strand starting at position 3155 of SEQ ID NO: 1147
ucaccagaguccuauauuu

SEQ ID NO: 91365 - RNA, 19 nt, Artificial Sequence
  Description of Artificial Sequence: Synthetic oligonucleotide
  Antisense strand to SEQ ID NO: 91284
aaauauaggacucugguga

SEQ ID NO: 91366 - RNA, 19 nt, Artificial Sequence
  Description of Artificial Sequence: Synthetic oligonucleotide
  Sense strand starting at position 3210 of SEQ ID NO: 1147
uguggauugggagacuguu

SEQ ID NO: 91367 - RNA, 19 nt, Artificial Sequence
  Description of Artificial Sequence: Synthetic oligonucleotide
  Antisense strand to SEQ ID NO: 91286
aacagucucccaauccaca

SEQ ID NO: 91368 - RNA, 19 nt, Artificial Sequence
  Description of Artificial Sequence: Synthetic oligonucleotide
  Sense strand starting at position 3216 of SEQ ID NO: 1147
uugggagacuguuuacaau

SEQ ID NO: 91369 - RNA, 19 nt, Artificial Sequence
  Description of Artificial Sequence: Synthetic oligonucleotide
  Antisense strand to SEQ ID NO: 91288
auuguaaacagucucccaa

SEQ ID NO: 91370 - RNA, 19 nt, Artificial Sequence
  Description of Artificial Sequence: Synthetic oligonucleotide
  Sense strand starting at position 3225 of SEQ ID NO: 1147
uguuuacaauggucugaag

SEQ ID NO: 91371 - RNA, 19 nt, Artificial Sequence
  Description of Artificial Sequence: Synthetic oligonucleotide
  Antisense strand to SEQ ID NO: 91290
cuucagaccauuguaaaca

SEQ ID NO: 91372 - RNA, 19 nt, Artificial Sequence
  Description of Artificial Sequence: Synthetic oligonucleotide
  Sense strand starting at position 3328 of SEQ ID NO: 1147
ccagauugggcuugagaug

SEQ ID NO: 91373 - RNA, 19 nt, Artificial Sequence
  Description of Artificial Sequence: Synthetic oligonucleotide
  Antisense strand to SEQ ID NO: 91292
caucucaagcccaaucugg

SEQ ID NO: 91374 - RNA, 19 nt, Artificial Sequence
  Description of Artificial Sequence: Synthetic oligonucleotide
  Sense strand starting at position 3333 of SEQ ID NO: 1147
uugggcuugagaugguaaa

SEQ ID NO: 91375 - RNA, 19 nt, Artificial Sequence
  Description of Artificial Sequence: Synthetic oligonucleotide
  Antisense strand to SEQ ID NO: 91294
uuuaccaucucaagcccaa

SEQ ID NO: 91376 - RNA, 19 nt, Artificial Sequence
  Description of Artificial Sequence: Synthetic oligonucleotide
  Sense strand starting at position 3369 of SEQ ID NO: 1147
ucuucuaucuaagggagga

SEQ ID NO: 91377 - RNA, 19 nt, Artificial Sequence
  Description of Artificial Sequence: Synthetic oligonucleotide
  Antisense strand to SEQ ID NO: 91296
uccucccuuagauagaaga

SEQ ID NO: 91378 - RNA, 19 nt, Artificial Sequence
  Description of Artificial Sequence: Synthetic oligonucleotide
  Sense strand starting at position 3399 of SEQ ID NO: 1147
gggaaugagugaucccuac

SEQ ID NO: 91379 - RNA, 19 nt, Artificial Sequence
  Description of Artificial Sequence: Synthetic oligonucleotide
  Antisense strand to SEQ ID NO: 91298
guagggaucacucauuccc

SEQ ID NO: 91380 - RNA, 19 nt, Artificial Sequence
  Description of Artificial Sequence: Synthetic oligonucleotide
  Sense strand starting at position 3692 of SEQ ID NO: 1147
gggcucugacgucagcaaa

SEQ ID NO: 91381 - RNA, 19 nt, Artificial Sequence
  Description of Artificial Sequence: Synthetic oligonucleotide
  Antisense strand to SEQ ID NO: 91300
uuugcugacgucagagccc

SEQ ID NO: 91382 - RNA, 19 nt, Artificial Sequence
  Description of Artificial Sequence: Synthetic oligonucleotide
  Sense strand starting at position 3799 of SEQ ID NO: 1147
gcagauacuucugagagug

SEQ ID NO: 91383 - RNA, 19 nt, Artificial Sequence
  Description of Artificial Sequence: Synthetic oligonucleotide
  Antisense strand to SEQ ID NO: 91302
cacucucagaaguaucugc

SEQ ID NO: 91384 - RNA, 19 nt, Artificial Sequence
  Description of Artificial Sequence: Synthetic oligonucleotide
  Sense strand starting at position 3801 of SEQ ID NO: 1147
agauacuucugagagugcu

SEQ ID NO: 91385 - RNA, 19 nt, Artificial Sequence
  Description of Artificial Sequence: Synthetic oligonucleotide
  Antisense strand to SEQ ID NO: 91304
agcacucucagaaguaucu

SEQ ID NO: 91386 - RNA, 19 nt, Artificial Sequence
  Description of Artificial Sequence: Synthetic oligonucleotide
  Sense strand starting at position 3807 of SEQ ID NO: 1147
uucugagagugcucaggaa

SEQ ID NO: 91387 - RNA, 19 nt, Artificial Sequence
  Description of Artificial Sequence: Synthetic oligonucleotide
  Antisense strand to SEQ ID NO: 91306
uuccugagcacucucagaa

SEQ ID NO: 91388 - RNA, 19 nt, Artificial Sequence
  Description of Artificial Sequence: Synthetic oligonucleotide
  Sense strand starting at position 969 of SEQ ID NO: 1148
guauaacccagguagucua

SEQ ID NO: 91389 - RNA, 19 nt, Artificial Sequence
  Description of Artificial Sequence: Synthetic oligonucleotide
  Antisense strand to SEQ ID NO: 91308
uagacuaccuggguuauac

SEQ ID NO: 91390 - RNA, 19 nt, Artificial Sequence
  Description of Artificial Sequence: Synthetic oligonucleotide
  Sense strand starting at position 977 of SEQ ID NO: 1148
cagguagucuacuuaggua

SEQ ID NO: 91391 - RNA, 19 nt, Artificial Sequence
  Description of Artificial Sequence: Synthetic oligonucleotide
  Antisense strand to SEQ ID NO: 91310
uaccuaaguagacuaccug

SEQ ID NO: 91392 - RNA, 19 nt, Artificial Sequence
  Description of Artificial Sequence: Synthetic oligonucleotide
  Sense strand starting at position 980 of SEQ ID NO: 1148
guagucuacuuagguauuu

SEQ ID NO: 91393 - RNA, 19 nt, Artificial Sequence
  Description of Artificial Sequence: Synthetic oligonucleotide
  Antisense strand to SEQ ID NO: 91312
aaauaccuaaguagacuac

SEQ ID NO: 91394 - RNA, 19 nt, Artificial Sequence
  Description of Artificial Sequence: Synthetic oligonucleotide
  Sense strand starting at position 2044 of SEQ ID NO: 1148
cugucagcagcuugacaau

SEQ ID NO: 91395 - RNA, 19 nt, Artificial Sequence
  Description of Artificial Sequence: Synthetic oligonucleotide
  Antisense strand to SEQ ID NO: 91314
auugucaagcugcugacag

SEQ ID NO: 91396 - RNA, 19 nt, Artificial Sequence
  Description of Artificial Sequence: Synthetic oligonucleotide
  Sense strand starting at position 2047 of SEQ ID NO: 1148
ucagcagcuugacaauauu

SEQ ID NO: 91397 - RNA, 19 nt, Artificial Sequence
  Description of Artificial Sequence: Synthetic oligonucleotide
  Antisense strand to SEQ ID NO: 91316
aauauugucaagcugcuga

SEQ ID NO: 91398 - RNA, 19 nt, Artificial Sequence
  Description of Artificial Sequence: Synthetic oligonucleotide
  Sense strand starting at position 2066 of SEQ ID NO: 1148
uuuagugccuguugaauuu

SEQ ID NO: 91399 - RNA, 19 nt, Artificial Sequence
  Description of Artificial Sequence: Synthetic oligonucleotide
  Antisense strand to SEQ ID NO: 91318
aaauucaacaggcacuaaa

SEQ ID NO: 91400 - RNA, 19 nt, Artificial Sequence
  Description of Artificial Sequence: Synthetic oligonucleotide
  Sense strand starting at position 2117 of SEQ ID NO: 1148
aagugagucuauucuguga

SEQ ID NO: 91401 - RNA, 19 nt, Artificial Sequence
  Description of Artificial Sequence: Synthetic oligonucleotide
  Antisense strand to SEQ ID NO: 91320
ucacagaauagacucacuu

SEQ ID NO: 91402 - RNA, 19 nt, Artificial Sequence
  Description of Artificial Sequence: Synthetic oligonucleotide
  Sense strand starting at position 2119 of SEQ ID NO: 1148
gugagucuauucugugaaa

SEQ ID NO: 91403 - RNA, 19 nt, Artificial Sequence
  Description of Artificial Sequence: Synthetic oligonucleotide
  Antisense strand to SEQ ID NO: 91322
uuucacagaauagacucac

SEQ ID NO: 91404 - RNA, 19 nt, Artificial Sequence
  Description of Artificial Sequence: Synthetic oligonucleotide
  Sense strand starting at position 2170 of SEQ ID NO: 1148
cuuuaagucucuucuggag

SEQ ID NO: 91405 - RNA, 19 nt, Artificial Sequence
  Description of Artificial Sequence: Synthetic oligonucleotide
  Antisense strand to SEQ ID NO: 91324
cuccagaagagacuuaaag

SEQ ID NO: 91406 - RNA, 19 nt, Artificial Sequence
  Description of Artificial Sequence: Synthetic oligonucleotide
  Sense strand starting at position 2198 of SEQ ID NO: 1148
gguccaggucugcaaauca

SEQ ID NO: 91407 - RNA, 19 nt, Artificial Sequence
  Description of Artificial Sequence: Synthetic oligonucleotide
  Antisense strand to SEQ ID NO: 91326
ugauuugcagaccuggacc

SEQ ID NO: 91408 - RNA, 19 nt, Artificial Sequence
  Description of Artificial Sequence: Synthetic oligonucleotide
  Sense strand starting at position 2205 of SEQ ID NO: 1148
gucugcaaaucauaaagga

SEQ ID NO: 91409 - RNA, 19 nt, Artificial Sequence
  Description of Artificial Sequence: Synthetic oligonucleotide
  Antisense strand to SEQ ID NO: 91328
uccuuuaugauuugcagac

SEQ ID NO: 91410 - RNA, 19 nt, Artificial Sequence
  Description of Artificial Sequence: Synthetic oligonucleotide
  Sense strand starting at position 2231 of SEQ ID NO: 1148
gaaggauucugccuuccug

SEQ ID NO: 91411 - RNA, 19 nt, Artificial Sequence
  Description of Artificial Sequence: Synthetic oligonucleotide
  Antisense strand to SEQ ID NO: 91330
caggaaggcagaauccuuc

SEQ ID NO: 91412 - RNA, 19 nt, Artificial Sequence
  Description of Artificial Sequence: Synthetic oligonucleotide
  Sense strand starting at position 2420 of SEQ ID NO: 1148
gcucuacugucuuuaggag

SEQ ID NO: 91413 - RNA, 19 nt, Artificial Sequence
  Description of Artificial Sequence: Synthetic oligonucleotide
  Antisense strand to SEQ ID NO: 91332
cuccuaaagacaguagagc

SEQ ID NO: 91414 - RNA, 19 nt, Artificial Sequence
  Description of Artificial Sequence: Synthetic oligonucleotide
  Sense strand starting at position 2421 of SEQ ID NO: 1148
cucuacugucuuuaggagu

SEQ ID NO: 91415 - RNA, 19 nt, Artificial Sequence
  Description of Artificial Sequence: Synthetic oligonucleotide
  Antisense strand to SEQ ID NO: 91334
acuccuaaagacaguagag

SEQ ID NO: 91416 - RNA, 19 nt, Artificial Sequence
  Description of Artificial Sequence: Synthetic oligonucleotide
  Sense strand starting at position 2779 of SEQ ID NO: 1148
ccugcuagcaagugaguua

SEQ ID NO: 91417 - RNA, 19 nt, Artificial Sequence
  Description of Artificial Sequence: Synthetic oligonucleotide
  Antisense strand to SEQ ID NO: 91336
uaacucacuugcuagcagg

SEQ ID NO: 91418 - RNA, 19 nt, Artificial Sequence
  Description of Artificial Sequence: Synthetic oligonucleotide
  Sense strand starting at position 2780 of SEQ ID NO: 1148
cugcuagcaagugaguuaa

SEQ ID NO: 91419 - RNA, 19 nt, Artificial Sequence
  Description of Artificial Sequence: Synthetic oligonucleotide
  Antisense strand to SEQ ID NO: 91338
uuaacucacuugcuagcag

SEQ ID NO: 91420 - RNA, 19 nt, Artificial Sequence
  Description of Artificial Sequence: Synthetic oligonucleotide
  Sense strand starting at position 2782 of SEQ ID NO: 1148
gcuagcaagugaguuaacu

SEQ ID NO: 91421 - RNA, 19 nt, Artificial Sequence
  Description of Artificial Sequence: Synthetic oligonucleotide
  Antisense strand to SEQ ID NO: 91340
aguuaacucacuugcuagc

SEQ ID NO: 91422 - RNA, 19 nt, Artificial Sequence
  Description of Artificial Sequence: Synthetic oligonucleotide
  Sense strand starting at position 2829 of SEQ ID NO: 1148
gaaagagggugaugaucau

SEQ ID NO: 91423 - RNA, 19 nt, Artificial Sequence
  Description of Artificial Sequence: Synthetic oligonucleotide
  Antisense strand to SEQ ID NO: 91342
augaucaucacccucuuuc

SEQ ID NO: 91424 - RNA, 19 nt, Artificial Sequence
  Description of Artificial Sequence: Synthetic oligonucleotide
  Sense strand starting at position 2835 of SEQ ID NO: 1148
gggugaugaucauaagguc

SEQ ID NO: 91425 - RNA, 19 nt, Artificial Sequence
  Description of Artificial Sequence: Synthetic oligonucleotide
  Antisense strand to SEQ ID NO: 91344
gaccuuaugaucaucaccc

SEQ ID NO: 91426 - RNA, 19 nt, Artificial Sequence
  Description of Artificial Sequence: Synthetic oligonucleotide
  Sense strand starting at position 2861 of SEQ ID NO: 1148
uaggguuagugugaagauu

SEQ ID NO: 91427 - RNA, 19 nt, Artificial Sequence
  Description of Artificial Sequence: Synthetic oligonucleotide
  Antisense strand to SEQ ID NO: 91346
aaucuucacacuaacccua

SEQ ID NO: 91428 - RNA, 19 nt, Artificial Sequence
  Description of Artificial Sequence: Synthetic oligonucleotide
  Sense strand starting at position 2912 of SEQ ID NO: 1148
agugucuagugacagguaa

SEQ ID NO: 91429 - RNA, 19 nt, Artificial Sequence
  Description of Artificial Sequence: Synthetic oligonucleotide
  Antisense strand to SEQ ID NO: 91348
uuaccugucacuagacacu

SEQ ID NO: 91430 - RNA, 19 nt, Artificial Sequence
  Description of Artificial Sequence: Synthetic oligonucleotide
  Sense strand starting at position 2914 of SEQ ID NO: 1148
ugucuagugacagguaaac

SEQ ID NO: 91431 - RNA, 19 nt, Artificial Sequence
  Description of Artificial Sequence: Synthetic oligonucleotide
  Antisense strand to SEQ ID NO: 91350
guuuaccugucacuagaca

SEQ ID NO: 91432 - RNA, 19 nt, Artificial Sequence
  Description of Artificial Sequence: Synthetic oligonucleotide
  Sense strand starting at position 2927 of SEQ ID NO: 1148
guaaacacucuguaagggu

SEQ ID NO: 91433 - RNA, 19 nt, Artificial Sequence
  Description of Artificial Sequence: Synthetic oligonucleotide
  Antisense strand to SEQ ID NO: 91352
acccuuacagaguguuuac

SEQ ID NO: 91434 - RNA, 19 nt, Artificial Sequence
  Description of Artificial Sequence: Synthetic oligonucleotide
  Sense strand starting at position 2936 of SEQ ID NO: 1148
cuguaaggguuugcuauca

SEQ ID NO: 91435 - RNA, 19 nt, Artificial Sequence
  Description of Artificial Sequence: Synthetic oligonucleotide
  Antisense strand to SEQ ID NO: 91354
ugauagcaaacccuuacag

SEQ ID NO: 91436 - RNA, 19 nt, Artificial Sequence
  Description of Artificial Sequence: Synthetic oligonucleotide
  Sense strand starting at position 2941 of SEQ ID NO: 1148
aggguuugcuaucauuauu

SEQ ID NO: 91437 - RNA, 19 nt, Artificial Sequence
  Description of Artificial Sequence: Synthetic oligonucleotide
  Antisense strand to SEQ ID NO: 91356
aauaaugauagcaaacccu

SEQ ID NO: 91438 - RNA, 19 nt, Artificial Sequence
  Description of Artificial Sequence: Synthetic oligonucleotide
  Sense strand starting at position 2944 of SEQ ID NO: 1148
guuugcuaucauuauuauc

SEQ ID NO: 91439 - RNA, 19 nt, Artificial Sequence
  Description of Artificial Sequence: Synthetic oligonucleotide
  Antisense strand to SEQ ID NO: 91358
gauaauaaugauagcaaac

SEQ ID NO: 91440 - RNA, 19 nt, Artificial Sequence
  Description of Artificial Sequence: Synthetic oligonucleotide
  Sense strand starting at position 3346 of SEQ ID NO: 1148
gagugcaugugccagucau

SEQ ID NO: 91441 - RNA, 19 nt, Artificial Sequence
  Description of Artificial Sequence: Synthetic oligonucleotide
  Antisense strand to SEQ ID NO: 91360
augacuggcacaugcacuc

SEQ ID NO: 91442 - RNA, 19 nt, Artificial Sequence
  Description of Artificial Sequence: Synthetic oligonucleotide
  Sense strand starting at position 3350 of SEQ ID NO: 1148
gcaugugccagucauuguu

SEQ ID NO: 91443 - RNA, 19 nt, Artificial Sequence
  Description of Artificial Sequence: Synthetic oligonucleotide
  Antisense strand to SEQ ID NO: 91362
aacaaugacuggcacaugc

SEQ ID NO: 91444 - RNA, 19 nt, Artificial Sequence
  Description of Artificial Sequence: Synthetic oligonucleotide
  Sense strand starting at position 3365 of SEQ ID NO: 1148
uguucuaagcucugaaugu

SEQ ID NO: 91445 - RNA, 19 nt, Artificial Sequence
  Description of Artificial Sequence: Synthetic oligonucleotide
  Antisense strand to SEQ ID NO: 91364
acauucagagcuuagaaca

SEQ ID NO: 91446 - RNA, 19 nt, Artificial Sequence
  Description of Artificial Sequence: Synthetic oligonucleotide
  Sense strand starting at position 3366 of SEQ ID NO: 1148
guucuaagcucugaaugug

SEQ ID NO: 91447 - RNA, 19 nt, Artificial Sequence
  Description of Artificial Sequence: Synthetic oligonucleotide
  Antisense strand to SEQ ID NO: 91366
cacauucagagcuuagaac

SEQ ID NO: 91448 - RNA, 19 nt, Artificial Sequence
  Description of Artificial Sequence: Synthetic oligonucleotide
  Sense strand starting at position 3369 of SEQ ID NO: 1148
cuaagcucugaauguguau

SEQ ID NO: 91449 - RNA, 19 nt, Artificial Sequence
  Description of Artificial Sequence: Synthetic oligonucleotide
  Antisense strand to SEQ ID NO: 91368
auacacauucagagcuuag

SEQ ID NO: 91450 - RNA, 19 nt, Artificial Sequence
  Description of Artificial Sequence: Synthetic oligonucleotide
  Sense strand starting at position 3419 of SEQ ID NO: 1148
ucaggugcaucuugcagau

SEQ ID NO: 91451 - RNA, 19 nt, Artificial Sequence
  Description of Artificial Sequence: Synthetic oligonucleotide
  Antisense strand to SEQ ID NO: 91370
aucugcaagaugcaccuga

SEQ ID NO: 91452 - RNA, 19 nt, Artificial Sequence
  Description of Artificial Sequence: Synthetic oligonucleotide
  Sense strand starting at position 3423 of SEQ ID NO: 1148
gugcaucuugcagaugcaa

SEQ ID NO: 91453 - RNA, 19 nt, Artificial Sequence
  Description of Artificial Sequence: Synthetic oligonucleotide
  Antisense strand to SEQ ID NO: 91372
uugcaucugcaagaugcac

SEQ ID NO: 91454 - RNA, 19 nt, Artificial Sequence
  Description of Artificial Sequence: Synthetic oligonucleotide
  Sense strand starting at position 3608 of SEQ ID NO: 1148
cauguucugucgcaugagu

SEQ ID NO: 91455 - RNA, 19 nt, Artificial Sequence
  Description of Artificial Sequence: Synthetic oligonucleotide
  Antisense strand to SEQ ID NO: 91374
acucaugcgacagaacaug

SEQ ID NO: 91456 - RNA, 19 nt, Artificial Sequence
  Description of Artificial Sequence: Synthetic oligonucleotide
  Sense strand starting at position 3610 of SEQ ID NO: 1148
uguucugucgcaugaguaa

SEQ ID NO: 91457 - RNA, 19 nt, Artificial Sequence
  Description of Artificial Sequence: Synthetic oligonucleotide
  Antisense strand to SEQ ID NO: 91376
uuacucaugcgacagaaca

SEQ ID NO: 91458 - RNA, 19 nt, Artificial Sequence
  Description of Artificial Sequence: Synthetic oligonucleotide
  Sense strand starting at position 3724 of SEQ ID NO: 1148
gugggaaugcugugucacu

SEQ ID NO: 91459 - RNA, 19 nt, Artificial Sequence
  Description of Artificial Sequence: Synthetic oligonucleotide
  Antisense strand to SEQ ID NO: 91378
agugacacagcauucccac

SEQ ID NO: 91460 - RNA, 19 nt, Artificial Sequence
  Description of Artificial Sequence: Synthetic oligonucleotide
  Sense strand starting at position 3879 of SEQ ID NO: 1148
gagggaaucuucuggugcu

SEQ ID NO: 91461 - RNA, 19 nt, Artificial Sequence
  Description of Artificial Sequence: Synthetic oligonucleotide
  Antisense strand to SEQ ID NO: 91380
agcaccagaagauucccuc

SEQ ID NO: 91462 - RNA, 19 nt, Artificial Sequence
  Description of Artificial Sequence: Synthetic oligonucleotide
  Sense strand starting at position 3882 of SEQ ID NO: 1148
ggaaucuucuggugcucga

SEQ ID NO: 91463 - RNA, 19 nt, Artificial Sequence
  Description of Artificial Sequence: Synthetic oligonucleotide
  Antisense strand to SEQ ID NO: 91382
ucgagcaccagaagauucc

SEQ ID NO: 91464 - RNA, 19 nt, Artificial Sequence
  Description of Artificial Sequence: Synthetic oligonucleotide
  Sense strand starting at position 3967 of SEQ ID NO: 1148
uguauauguauauggaagu

SEQ ID NO: 91465 - RNA, 19 nt, Artificial Sequence
  Description of Artificial Sequence: Synthetic oligonucleotide
  Antisense strand to SEQ ID NO: 91384
acuuccauauacauauaca

SEQ ID NO: 91466 - RNA, 19 nt, Artificial Sequence
  Description of Artificial Sequence: Synthetic oligonucleotide
  Sense strand starting at position 3978 of SEQ ID NO: 1148
auggaagucucauauuuga

SEQ ID NO: 91467 - RNA, 19 nt, Artificial Sequence
  Description of Artificial Sequence: Synthetic oligonucleotide
  Antisense strand to SEQ ID NO: 91386
ucaaauaugagacuuccau

SEQ ID NO: 91468 - RNA, 19 nt, Artificial Sequence
  Description of Artificial Sequence: Synthetic oligonucleotide
  Sense strand starting at position 3785 of SEQ ID NO: 1149
aauaauuggcgauagaguc

SEQ ID NO: 91469 - RNA, 19 nt, Artificial Sequence
  Description of Artificial Sequence: Synthetic oligonucleotide
  Antisense strand to SEQ ID NO: 91388
gacucuaucgccaauuauu

SEQ ID NO: 91470 - RNA, 19 nt, Artificial Sequence
  Description of Artificial Sequence: Synthetic oligonucleotide
  Sense strand starting at position 3780 of SEQ ID NO: 1149
acuggaauaauuggcgaua

SEQ ID NO: 91471 - RNA, 19 nt, Artificial Sequence
  Description of Artificial Sequence: Synthetic oligonucleotide
  Antisense strand to SEQ ID NO: 91390
uaucgccaauuauuccagu

SEQ ID NO: 91472 - RNA, 19 nt, Artificial Sequence
  Description of Artificial Sequence: Synthetic oligonucleotide
  Sense strand starting at position 3751 of SEQ ID NO: 1149
gagaauggguugggauuua

SEQ ID NO: 91473 - RNA, 19 nt, Artificial Sequence
  Description of Artificial Sequence: Synthetic oligonucleotide
  Antisense strand to SEQ ID NO: 91392
uaaaucccaacccauucuc

SEQ ID NO: 91474 - RNA, 19 nt, Artificial Sequence
  Description of Artificial Sequence: Synthetic oligonucleotide
  Sense strand starting at position 3560 of SEQ ID NO: 1149
gguuauuggaaauauggcu

SEQ ID NO: 91475 - RNA, 19 nt, Artificial Sequence
  Description of Artificial Sequence: Synthetic oligonucleotide
  Antisense strand to SEQ ID NO: 91394
agccauauuuccaauaacc

SEQ ID NO: 91476 - RNA, 19 nt, Artificial Sequence
  Description of Artificial Sequence: Synthetic oligonucleotide
  Sense strand starting at position 3527 of SEQ ID NO: 1149
agaagaguuuaguuagagu

SEQ ID NO: 91477 - RNA, 19 nt, Artificial Sequence
  Description of Artificial Sequence: Synthetic oligonucleotide
  Antisense strand to SEQ ID NO: 91396
acucuaacuaaacucuucu

SEQ ID NO: 91478 - RNA, 19 nt, Artificial Sequence
  Description of Artificial Sequence: Synthetic oligonucleotide
  Sense strand starting at position 3513 of SEQ ID NO: 1149
uggguuuaagucugagaag

SEQ ID NO: 91479 - RNA, 19 nt, Artificial Sequence
  Description of Artificial Sequence: Synthetic oligonucleotide
  Antisense strand to SEQ ID NO: 91398
cuucucagacuuaaaccca

SEQ ID NO: 91480 - RNA, 19 nt, Artificial Sequence
  Description of Artificial Sequence: Synthetic oligonucleotide
  Sense strand starting at position 3411 of SEQ ID NO: 1149
uguuuaacucuuugggaca

SEQ ID NO: 91481 - RNA, 19 nt, Artificial Sequence
  Description of Artificial Sequence: Synthetic oligonucleotide
  Antisense strand to SEQ ID NO: 91400
ugucccaaagaguuaaaca

SEQ ID NO: 91482 - RNA, 19 nt, Artificial Sequence
  Description of Artificial Sequence: Synthetic oligonucleotide
  Sense strand starting at position 3410 of SEQ ID NO: 1149
uuguuuaacucuuugggac

SEQ ID NO: 91483 - RNA, 19 nt, Artificial Sequence
  Description of Artificial Sequence: Synthetic oligonucleotide
  Antisense strand to SEQ ID NO: 91402
gucccaaagaguuaaacaa

SEQ ID NO: 91484 - RNA, 19 nt, Artificial Sequence
  Description of Artificial Sequence: Synthetic oligonucleotide
  Sense strand starting at position 3017 of SEQ ID NO: 1149
aagaguuuagcuugaaucu

SEQ ID NO: 91485 - RNA, 19 nt, Artificial Sequence
  Description of Artificial Sequence: Synthetic oligonucleotide
  Antisense strand to SEQ ID NO: 91404
agauucaagcuaaacucuu

SEQ ID NO: 91486 - RNA, 19 nt, Artificial Sequence
  Description of Artificial Sequence: Synthetic oligonucleotide
  Sense strand starting at position 3015 of SEQ ID NO: 1149
acaagaguuuagcuugaau

SEQ ID NO: 91487 - RNA, 19 nt, Artificial Sequence
  Description of Artificial Sequence: Synthetic oligonucleotide
  Antisense strand to SEQ ID NO: 91406
auucaagcuaaacucuugu

SEQ ID NO: 91488 - RNA, 19 nt, Artificial Sequence
  Description of Artificial Sequence: Synthetic oligonucleotide
  Sense strand starting at position 2936 of SEQ ID NO: 1149
aguguacuagaaggcaaua

SEQ ID NO: 91489 - RNA, 19 nt, Artificial Sequence
  Description of Artificial Sequence: Synthetic oligonucleotide
  Antisense strand to SEQ ID NO: 91408
uauugccuucuaguacacu

SEQ ID NO: 91490 - RNA, 19 nt, Artificial Sequence
  Description of Artificial Sequence: Synthetic oligonucleotide
  Sense strand starting at position 2874 of SEQ ID NO: 1149
uuuacugacugugcagaaa

SEQ ID NO: 91491 - RNA, 19 nt, Artificial Sequence
  Description of Artificial Sequence: Synthetic oligonucleotide
  Antisense strand to SEQ ID NO: 91410
uuucugcacagucaguaaa

SEQ ID NO: 91492 - RNA, 19 nt, Artificial Sequence
  Description of Artificial Sequence: Synthetic oligonucleotide
  Sense strand starting at position 2695 of SEQ ID NO: 1149
caugauuaugccuaaggua

SEQ ID NO: 91493 - RNA, 19 nt, Artificial Sequence
  Description of Artificial Sequence: Synthetic oligonucleotide
  Antisense strand to SEQ ID NO: 91412
uaccuuaggcauaaucaug

SEQ ID NO: 91494 - RNA, 19 nt, Artificial Sequence
  Description of Artificial Sequence: Synthetic oligonucleotide
  Sense strand starting at position 2694 of SEQ ID NO: 1149
acaugauuaugccuaaggu

SEQ ID NO: 91495 - RNA, 19 nt, Artificial Sequence
  Description of Artificial Sequence: Synthetic oligonucleotide
  Antisense strand to SEQ ID NO: 91414
accuuaggcauaaucaugu

SEQ ID NO: 91496 - RNA, 19 nt, Artificial Sequence
  Description of Artificial Sequence: Synthetic oligonucleotide
  Sense strand starting at position 2657 of SEQ ID NO: 1149
acgaaugaaucucuaguga

SEQ ID NO: 91497 - RNA, 19 nt, Artificial Sequence
  Description of Artificial Sequence: Synthetic oligonucleotide
  Antisense strand to SEQ ID NO: 91416
ucacuagagauucauucgu

SEQ ID NO: 91498 - RNA, 19 nt, Artificial Sequence
  Description of Artificial Sequence: Synthetic oligonucleotide
  Sense strand starting at position 2650 of SEQ ID NO: 1149
agucaucacgaaugaaucu

SEQ ID NO: 91499 - RNA, 19 nt, Artificial Sequence
  Description of Artificial Sequence: Synthetic oligonucleotide
  Antisense strand to SEQ ID NO: 91418
agauucauucgugaugacu

SEQ ID NO: 91500 - RNA, 19 nt, Artificial Sequence
  Description of Artificial Sequence: Synthetic oligonucleotide
  Sense strand starting at position 2647 of SEQ ID NO: 1149
ggcagucaucacgaaugaa

SEQ ID NO: 91501 - RNA, 19 nt, Artificial Sequence
  Description of Artificial Sequence: Synthetic oligonucleotide
  Antisense strand to SEQ ID NO: 91420
uucauucgugaugacugcc

SEQ ID NO: 91502 - RNA, 19 nt, Artificial Sequence
  Description of Artificial Sequence: Synthetic oligonucleotide
  Sense strand starting at position 2468 of SEQ ID NO: 1149
ugccuuagggcacaaagau

SEQ ID NO: 91503 - RNA, 19 nt, Artificial Sequence
  Description of Artificial Sequence: Synthetic oligonucleotide
  Antisense strand to SEQ ID NO: 91422
aucuuugugcccuaaggca

SEQ ID NO: 91504 - RNA, 19 nt, Artificial Sequence
  Description of Artificial Sequence: Synthetic oligonucleotide
  Sense strand starting at position 2362 of SEQ ID NO: 1149
ugaauugaucacugccauu

SEQ ID NO: 91505 - RNA, 19 nt, Artificial Sequence
  Description of Artificial Sequence: Synthetic oligonucleotide
  Antisense strand to SEQ ID NO: 91424
aauggcagugaucaauuca

SEQ ID NO: 91506 - RNA, 19 nt, Artificial Sequence
  Description of Artificial Sequence: Synthetic oligonucleotide
  Sense strand starting at position 2361 of SEQ ID NO: 1149
cugaauugaucacugccau

SEQ ID NO: 91507 - RNA, 19 nt, Artificial Sequence
  Description of Artificial Sequence: Synthetic oligonucleotide
  Antisense strand to SEQ ID NO: 91426
auggcagugaucaauucag

SEQ ID NO: 91508 - RNA, 19 nt, Artificial Sequence
  Description of Artificial Sequence: Synthetic oligonucleotide
  Sense strand starting at position 1837 of SEQ ID NO: 1149
ggucacucccaggguagaa

SEQ ID NO: 91509 - RNA, 19 nt, Artificial Sequence
  Description of Artificial Sequence: Synthetic oligonucleotide
  Antisense strand to SEQ ID NO: 91428
uucuacccugggagugacc

SEQ ID NO: 91510 - RNA, 19 nt, Artificial Sequence
  Description of Artificial Sequence: Synthetic oligonucleotide
  Sense strand starting at position 1730 of SEQ ID NO: 1149
acucuauuccaaggugaag

SEQ ID NO: 91511 - RNA, 19 nt, Artificial Sequence
  Description of Artificial Sequence: Synthetic oligonucleotide
  Antisense strand to SEQ ID NO: 91430
cuucaccuuggaauagagu

SEQ ID NO: 91512 - RNA, 19 nt, Artificial Sequence
  Description of Artificial Sequence: Synthetic oligonucleotide
  Sense strand starting at position 1696 of SEQ ID NO: 1149
gcauauuauuaaguugaac

SEQ ID NO: 91513 - RNA, 19 nt, Artificial Sequence
  Description of Artificial Sequence: Synthetic oligonucleotide
  Antisense strand to SEQ ID NO: 91432
guucaacuuaauaauaugc

SEQ ID NO: 91514 - RNA, 19 nt, Artificial Sequence
  Description of Artificial Sequence: Synthetic oligonucleotide
  Sense strand starting at position 1692 of SEQ ID NO: 1149
ggaggcauauuauuaaguu

SEQ ID NO: 91515 - RNA, 19 nt, Artificial Sequence
  Description of Artificial Sequence: Synthetic oligonucleotide
  Antisense strand to SEQ ID NO: 91434
aacuuaauaauaugccucc

SEQ ID NO: 91516 - RNA, 19 nt, Artificial Sequence
  Description of Artificial Sequence: Synthetic oligonucleotide
  Sense strand starting at position 1603 of SEQ ID NO: 1149
ggaucuaauugguuauauu

SEQ ID NO: 91517 - RNA, 19 nt, Artificial Sequence
  Description of Artificial Sequence: Synthetic oligonucleotide
  Antisense strand to SEQ ID NO: 91436
aauauaaccaauuagaucc

SEQ ID NO: 91518 - RNA, 19 nt, Artificial Sequence
  Description of Artificial Sequence: Synthetic oligonucleotide
  Sense strand starting at position 1602 of SEQ ID NO: 1149
uggaucuaauugguuauau

SEQ ID NO: 91519 - RNA, 19 nt, Artificial Sequence
  Description of Artificial Sequence: Synthetic oligonucleotide
  Antisense strand to SEQ ID NO: 91438
auauaaccaauuagaucca

SEQ ID NO: 91520 - RNA, 19 nt, Artificial Sequence
  Description of Artificial Sequence: Synthetic oligonucleotide
  Sense strand starting at position 1532 of SEQ ID NO: 1149
gcauuucugcacggacagu

SEQ ID NO: 91521 - RNA, 19 nt, Artificial Sequence
  Description of Artificial Sequence: Synthetic oligonucleotide
  Antisense strand to SEQ ID NO: 91440
acuguccgugcagaaaugc

SEQ ID NO: 91522 - RNA, 19 nt, Artificial Sequence
  Description of Artificial Sequence: Synthetic oligonucleotide
  Sense strand starting at position 1261 of SEQ ID NO: 1149
uucccugaaccuugagaau

SEQ ID NO: 91523 - RNA, 19 nt, Artificial Sequence
  Description of Artificial Sequence: Synthetic oligonucleotide
  Antisense strand to SEQ ID NO: 91442
auucucaagguucagggaa

SEQ ID NO: 91524 - RNA, 19 nt, Artificial Sequence
  Description of Artificial Sequence: Synthetic oligonucleotide
  Sense strand starting at position 1108 of SEQ ID NO: 1149
cccuaaguuugaccagauu

SEQ ID NO: 91525 - RNA, 19 nt, Artificial Sequence
  Description of Artificial Sequence: Synthetic oligonucleotide
  Antisense strand to SEQ ID NO: 91444
aaucuggucaaacuuaggg

SEQ ID NO: 91526 - RNA, 19 nt, Artificial Sequence
  Description of Artificial Sequence: Synthetic oligonucleotide
  Sense strand starting at position 889 of SEQ ID NO: 1149
augaguuugagauagcauu

SEQ ID NO: 91527 - RNA, 19 nt, Artificial Sequence
  Description of Artificial Sequence: Synthetic oligonucleotide
  Antisense strand to SEQ ID NO: 91446
aaugcuaucucaaacucau

SEQ ID NO: 91528 - RNA, 19 nt, Artificial Sequence
  Description of Artificial Sequence: Synthetic oligonucleotide
  Sense strand starting at position 884 of SEQ ID NO: 1149
cuuguaugaguuugagaua

SEQ ID NO: 91529 - RNA, 19 nt, Artificial Sequence
  Description of Artificial Sequence: Synthetic oligonucleotide
  Antisense strand to SEQ ID NO: 91448
uaucucaaacucauacaag

SEQ ID NO: 91530 - RNA, 19 nt, Artificial Sequence
  Description of Artificial Sequence: Synthetic oligonucleotide
  Sense strand starting at position 821 of SEQ ID NO: 1149
gaaagucuucccugagaug

SEQ ID NO: 91531 - RNA, 19 nt, Artificial Sequence
  Description of Artificial Sequence: Synthetic oligonucleotide
  Antisense strand to SEQ ID NO: 91450
caucucagggaagacuuuc

SEQ ID NO: 91532 - RNA, 19 nt, Artificial Sequence
  Description of Artificial Sequence: Synthetic oligonucleotide
  Sense strand starting at position 819 of SEQ ID NO: 1149
aagaaagucuucccugaga

SEQ ID NO: 91533 - RNA, 19 nt, Artificial Sequence
  Description of Artificial Sequence: Synthetic oligonucleotide
  Antisense strand to SEQ ID NO: 91452
ucucagggaagacuuucuu

SEQ ID NO: 91534 - RNA, 19 nt, Artificial Sequence
  Description of Artificial Sequence: Synthetic oligonucleotide
  Sense strand starting at position 762 of SEQ ID NO: 1149
augcauuguaggugggaga

SEQ ID NO: 91535 - RNA, 19 nt, Artificial Sequence
  Description of Artificial Sequence: Synthetic oligonucleotide
  Antisense strand to SEQ ID NO: 91454
ucucccaccuacaaugcau

SEQ ID NO: 91536 - RNA, 19 nt, Artificial Sequence
  Description of Artificial Sequence: Synthetic oligonucleotide
  Sense strand starting at position 736 of SEQ ID NO: 1149
aucugagcccugcaaagaa

SEQ ID NO: 91537 - RNA, 19 nt, Artificial Sequence
  Description of Artificial Sequence: Synthetic oligonucleotide
  Antisense strand to SEQ ID NO: 91456
uucuuugcagggcucagau

SEQ ID NO: 91538 - RNA, 19 nt, Artificial Sequence
  Description of Artificial Sequence: Synthetic oligonucleotide
  Sense strand starting at position 304 of SEQ ID NO: 1149
agaagucuugcacagcaga

SEQ ID NO: 91539 - RNA, 19 nt, Artificial Sequence
  Description of Artificial Sequence: Synthetic oligonucleotide
  Antisense strand to SEQ ID NO: 91458
ucugcugugcaagacuucu

SEQ ID NO: 91540 - RNA, 19 nt, Artificial Sequence
  Description of Artificial Sequence: Synthetic oligonucleotide
  Sense strand starting at position 177 of SEQ ID NO: 1149
gaaagucaguucucaaagg

SEQ ID NO: 91541 - RNA, 19 nt, Artificial Sequence
  Description of Artificial Sequence: Synthetic oligonucleotide
  Antisense strand to SEQ ID NO: 91460
ccuuugagaacugacuuuc

SEQ ID NO: 91542 - RNA, 19 nt, Artificial Sequence
  Description of Artificial Sequence: Synthetic oligonucleotide
  Sense strand starting at position 173 of SEQ ID NO: 1149
gagggaaagucaguucuca

SEQ ID NO: 91543 - RNA, 19 nt, Artificial Sequence
  Description of Artificial Sequence: Synthetic oligonucleotide
  Antisense strand to SEQ ID NO: 91462
ugagaacugacuuucccuc

SEQ ID NO: 91544 - RNA, 19 nt, Artificial Sequence
  Description of Artificial Sequence: Synthetic oligonucleotide
  Sense strand starting at position 46 of SEQ ID NO: 1149
gcguuagacgcuuucacag

SEQ ID NO: 91545 - RNA, 19 nt, Artificial Sequence
  Description of Artificial Sequence: Synthetic oligonucleotide
  Antisense strand to SEQ ID NO: 91464
cugugaaagcgucuaacgc

SEQ ID NO: 91546 - RNA, 19 nt, Artificial Sequence
  Description of Artificial Sequence: Synthetic oligonucleotide
  Sense strand starting at position 45 of SEQ ID NO: 1149
ggcguuagacgcuuucaca

SEQ ID NO: 91547 - RNA, 19 nt, Artificial Sequence
  Description of Artificial Sequence: Synthetic oligonucleotide
  Antisense strand to SEQ ID NO: 91466
ugugaaagcgucuaacgcc

SEQ ID NO: 91548 - RNA, 19 nt, Artificial Sequence
  Description of Artificial Sequence: Synthetic oligonucleotide
  Sense strand starting at position 331 of SEQ ID NO: 1150
augacaagucuguaauauu

SEQ ID NO: 91549 - RNA, 19 nt, Artificial Sequence
  Description of Artificial Sequence: Synthetic oligonucleotide
  Antisense strand to SEQ ID NO: 91468
aauauuacagacuugucau

SEQ ID NO: 91550 - RNA, 19 nt, Artificial Sequence
  Description of Artificial Sequence: Synthetic oligonucleotide
  Sense strand starting at position 339 of SEQ ID NO: 1150
ucuguaauauuugcugcau

SEQ ID NO: 91551 - RNA, 19 nt, Artificial Sequence
  Description of Artificial Sequence: Synthetic oligonucleotide
  Antisense strand to SEQ ID NO: 91470
augcagcaaauauuacaga

SEQ ID NO: 91552 - RNA, 19 nt, Artificial Sequence
  Description of Artificial Sequence: Synthetic oligonucleotide
  Sense strand starting at position 340 of SEQ ID NO: 1150
cuguaauauuugcugcaua

SEQ ID NO: 91553 - RNA, 19 nt, Artificial Sequence
  Description of Artificial Sequence: Synthetic oligonucleotide
  Antisense strand to SEQ ID NO: 91472
uaugcagcaaauauuacag

SEQ ID NO: 91554 - RNA, 19 nt, Artificial Sequence
  Description of Artificial Sequence: Synthetic oligonucleotide
  Sense strand starting at position 371 of SEQ ID NO: 1150
aguauugggccaggugaaa

SEQ ID NO: 91555 - RNA, 19 nt, Artificial Sequence
  Description of Artificial Sequence: Synthetic oligonucleotide
  Antisense strand to SEQ ID NO: 91474
uuucaccuggcccaauacu

SEQ ID NO: 91556 - RNA, 19 nt, Artificial Sequence
  Description of Artificial Sequence: Synthetic oligonucleotide
  Sense strand starting at position 402 of SEQ ID NO: 1150
caaguugguucugcaauuu

SEQ ID NO: 91557 - RNA, 19 nt, Artificial Sequence
  Description of Artificial Sequence: Synthetic oligonucleotide
  Antisense strand to SEQ ID NO: 91476
aaauugcagaaccaacuug

SEQ ID NO: 91558 - RNA, 19 nt, Artificial Sequence
  Description of Artificial Sequence: Synthetic oligonucleotide
  Sense strand starting at position 478 of SEQ ID NO: 1150
augguagaauccuugaaau

SEQ ID NO: 91559 - RNA, 19 nt, Artificial Sequence
  Description of Artificial Sequence: Synthetic oligonucleotide
  Antisense strand to SEQ ID NO: 91478
auuucaaggauucuaccau

SEQ ID NO: 91560 - RNA, 19 nt, Artificial Sequence
  Description of Artificial Sequence: Synthetic oligonucleotide
  Sense strand starting at position 555 of SEQ ID NO: 1150
ccacauaaguguuuauaau

SEQ ID NO: 91561 - RNA, 19 nt, Artificial Sequence
  Description of Artificial Sequence: Synthetic oligonucleotide
  Antisense strand to SEQ ID NO: 91480
auuauaaacacuuaugugg

SEQ ID NO: 91562 - RNA, 19 nt, Artificial Sequence
  Description of Artificial Sequence: Synthetic oligonucleotide
  Sense strand starting at position 704 of SEQ ID NO: 1150
gucuuuagggcucaauuag

SEQ ID NO: 91563 - RNA, 19 nt, Artificial Sequence
  Description of Artificial Sequence: Synthetic oligonucleotide
  Antisense strand to SEQ ID NO: 91482
cuaauugagcccuaaagac

SEQ ID NO: 91564 - RNA, 19 nt, Artificial Sequence
  Description of Artificial Sequence: Synthetic oligonucleotide
  Sense strand starting at position 710 of SEQ ID NO: 1150
agggcucaauuaguuacaa

SEQ ID NO: 91565 - RNA, 19 nt, Artificial Sequence
  Description of Artificial Sequence: Synthetic oligonucleotide
  Antisense strand to SEQ ID NO: 91484
uuguaacuaauugagcccu

SEQ ID NO: 91566 - RNA, 19 nt, Artificial Sequence
  Description of Artificial Sequence: Synthetic oligonucleotide
  Sense strand starting at position 782 of SEQ ID NO: 1150
uuccauuacugcucaggaa

SEQ ID NO: 91567 - RNA, 19 nt, Artificial Sequence
  Description of Artificial Sequence: Synthetic oligonucleotide
  Antisense strand to SEQ ID NO: 91486
uuccugagcaguaauggaa

SEQ ID NO: 91568 - RNA, 19 nt, Artificial Sequence
  Description of Artificial Sequence: Synthetic oligonucleotide
  Sense strand starting at position 1032 of SEQ ID NO: 1150
cagacuuaguaauugcuga

SEQ ID NO: 91569 - RNA, 19 nt, Artificial Sequence
  Description of Artificial Sequence: Synthetic oligonucleotide
  Antisense strand to SEQ ID NO: 91488
ucagcaauuacuaagucug

SEQ ID NO: 91570 - RNA, 19 nt, Artificial Sequence
  Description of Artificial Sequence: Synthetic oligonucleotide
  Sense strand starting at position 1124 of SEQ ID NO: 1150
ugauauggcuuuccaaauc

SEQ ID NO: 91571 - RNA, 19 nt, Artificial Sequence
  Description of Artificial Sequence: Synthetic oligonucleotide
  Antisense strand to SEQ ID NO: 91490
gauuuggaaagccauauca

SEQ ID NO: 91572 - RNA, 19 nt, Artificial Sequence
  Description of Artificial Sequence: Synthetic oligonucleotide
  Sense strand starting at position 1320 of SEQ ID NO: 1150
uuaauacugcaguggaaac

SEQ ID NO: 91573 - RNA, 19 nt, Artificial Sequence
  Description of Artificial Sequence: Synthetic oligonucleotide
  Antisense strand to SEQ ID NO: 91492
guuuccacugcaguauuaa

SEQ ID NO: 91574 - RNA, 19 nt, Artificial Sequence
  Description of Artificial Sequence: Synthetic oligonucleotide
  Sense strand starting at position 1407 of SEQ ID NO: 1150
gugaucaaucaauguccaa

SEQ ID NO: 91575 - RNA, 19 nt, Artificial Sequence
  Description of Artificial Sequence: Synthetic oligonucleotide
  Antisense strand to SEQ ID NO: 91494
uuggacauugauugaucac

SEQ ID NO: 91576 - RNA, 19 nt, Artificial Sequence
  Description of Artificial Sequence: Synthetic oligonucleotide
  Sense strand starting at position 1490 of SEQ ID NO: 1150
uggaauaccuaguuugaca

SEQ ID NO: 91577 - RNA, 19 nt, Artificial Sequence
  Description of Artificial Sequence: Synthetic oligonucleotide
  Antisense strand to SEQ ID NO: 91496
ugucaaacuagguauucca

SEQ ID NO: 91578 - RNA, 19 nt, Artificial Sequence
  Description of Artificial Sequence: Synthetic oligonucleotide
  Sense strand starting at position 1492 of SEQ ID NO: 1150
gaauaccuaguuugacagu

SEQ ID NO: 91579 - RNA, 19 nt, Artificial Sequence
  Description of Artificial Sequence: Synthetic oligonucleotide
  Antisense strand to SEQ ID NO: 91498
acugucaaacuagguauuc

SEQ ID NO: 91580 - RNA, 19 nt, Artificial Sequence
  Description of Artificial Sequence: Synthetic oligonucleotide
  Sense strand starting at position 1503 of SEQ ID NO: 1150
uugacaguucucuacuuua

SEQ ID NO: 91581 - RNA, 19 nt, Artificial Sequence
  Description of Artificial Sequence: Synthetic oligonucleotide
  Antisense strand to SEQ ID NO: 91500
uaaaguagagaacugucaa

SEQ ID NO: 91582 - RNA, 19 nt, Artificial Sequence
  Description of Artificial Sequence: Synthetic oligonucleotide
  Sense strand starting at position 1557 of SEQ ID NO: 1150
cauaguagguaccuaguaa

SEQ ID NO: 91583 - RNA, 19 nt, Artificial Sequence
  Description of Artificial Sequence: Synthetic oligonucleotide
  Antisense strand to SEQ ID NO: 91502
uuacuagguaccuacuaug

SEQ ID NO: 91584 - RNA, 19 nt, Artificial Sequence
  Description of Artificial Sequence: Synthetic oligonucleotide
  Sense strand starting at position 1558 of SEQ ID NO: 1150
auaguagguaccuaguaaa

SEQ ID NO: 91585 - RNA, 19 nt, Artificial Sequence
  Description of Artificial Sequence: Synthetic oligonucleotide
  Antisense strand to SEQ ID NO: 91504
uuuacuagguaccuacuau

SEQ ID NO: 91586 - RNA, 19 nt, Artificial Sequence
  Description of Artificial Sequence: Synthetic oligonucleotide
  Sense strand starting at position 1622 of SEQ ID NO: 1150
cuuugaggccagugggaaa

SEQ ID NO: 91587 - RNA, 19 nt, Artificial Sequence
  Description of Artificial Sequence: Synthetic oligonucleotide
  Antisense strand to SEQ ID NO: 91506
uuucccacuggccucaaag

SEQ ID NO: 91588 - RNA, 19 nt, Artificial Sequence
  Description of Artificial Sequence: Synthetic oligonucleotide
  Sense strand starting at position 1908 of SEQ ID NO: 1150
ucacaugguuaucuaaagu

SEQ ID NO: 91589 - RNA, 19 nt, Artificial Sequence
  Description of Artificial Sequence: Synthetic oligonucleotide
  Antisense strand to SEQ ID NO: 91508
acuuuagauaaccauguga

SEQ ID NO: 91590 - RNA, 19 nt, Artificial Sequence
  Description of Artificial Sequence: Synthetic oligonucleotide
  Sense strand starting at position 1933 of SEQ ID NO: 1150
aaucgaguugguuacuaaa

SEQ ID NO: 91591 - RNA, 19 nt, Artificial Sequence
  Description of Artificial Sequence: Synthetic oligonucleotide
  Antisense strand to SEQ ID NO: 91510
uuuaguaaccaacucgauu

SEQ ID NO: 91592 - RNA, 19 nt, Artificial Sequence
  Description of Artificial Sequence: Synthetic oligonucleotide
  Sense strand starting at position 1955 of SEQ ID NO: 1150
gggugaguuucacucugag

SEQ ID NO: 91593 - RNA, 19 nt, Artificial Sequence
  Description of Artificial Sequence: Synthetic oligonucleotide
  Antisense strand to SEQ ID NO: 91512
cucagagugaaacucaccc

SEQ ID NO: 91594 - RNA, 19 nt, Artificial Sequence
  Description of Artificial Sequence: Synthetic oligonucleotide
  Sense strand starting at position 1970 of SEQ ID NO: 1150
ugagguuuccacuagcaac

SEQ ID NO: 91595 - RNA, 19 nt, Artificial Sequence
  Description of Artificial Sequence: Synthetic oligonucleotide
  Antisense strand to SEQ ID NO: 91514
guugcuaguggaaaccuca

SEQ ID NO: 91596 - RNA, 19 nt, Artificial Sequence
  Description of Artificial Sequence: Synthetic oligonucleotide
  Sense strand starting at position 2025 of SEQ ID NO: 1150
uaauacugacagugugaca

SEQ ID NO: 91597 - RNA, 19 nt, Artificial Sequence
  Description of Artificial Sequence: Synthetic oligonucleotide
  Antisense strand to SEQ ID NO: 91516
ugucacacugucaguauua

SEQ ID NO: 91598 - RNA, 19 nt, Artificial Sequence
  Description of Artificial Sequence: Synthetic oligonucleotide
  Sense strand starting at position 2062 of SEQ ID NO: 1150
acagauugaugugcaaauc

SEQ ID NO: 91599 - RNA, 19 nt, Artificial Sequence
  Description of Artificial Sequence: Synthetic oligonucleotide
  Antisense strand to SEQ ID NO: 91518
gauuugcacaucaaucugu

SEQ ID NO: 91600 - RNA, 19 nt, Artificial Sequence
  Description of Artificial Sequence: Synthetic oligonucleotide
  Sense strand starting at position 2063 of SEQ ID NO: 1150
cagauugaugugcaaauca

SEQ ID NO: 91601 - RNA, 19 nt, Artificial Sequence
  Description of Artificial Sequence: Synthetic oligonucleotide
  Antisense strand to SEQ ID NO: 91520
ugauuugcacaucaaucug

SEQ ID NO: 91602 - RNA, 19 nt, Artificial Sequence
  Description of Artificial Sequence: Synthetic oligonucleotide
  Sense strand starting at position 2136 of SEQ ID NO: 1150
gcacacugccaugauacaa

SEQ ID NO: 91603 - RNA, 19 nt, Artificial Sequence
  Description of Artificial Sequence: Synthetic oligonucleotide
  Antisense strand to SEQ ID NO: 91522
uuguaucauggcagugugc

SEQ ID NO: 91604 - RNA, 19 nt, Artificial Sequence
  Description of Artificial Sequence: Synthetic oligonucleotide
  Sense strand starting at position 2157 of SEQ ID NO: 1150
ucaagagaugcggagaagu

SEQ ID NO: 91605 - RNA, 19 nt, Artificial Sequence
  Description of Artificial Sequence: Synthetic oligonucleotide
  Antisense strand to SEQ ID NO: 91524
acuucuccgcaucucuuga

SEQ ID NO: 91606 - RNA, 19 nt, Artificial Sequence
  Description of Artificial Sequence: Synthetic oligonucleotide
  Sense strand starting at position 2170 of SEQ ID NO: 1150
agaaguuaucauuaugcac

SEQ ID NO: 91607 - RNA, 19 nt, Artificial Sequence
  Description of Artificial Sequence: Synthetic oligonucleotide
  Antisense strand to SEQ ID NO: 91526
gugcauaaugauaacuucu

SEQ ID NO: 91608 - RNA, 19 nt, Artificial Sequence
  Description of Artificial Sequence: Synthetic oligonucleotide
  Sense strand starting at position 2435 of SEQ ID NO: 1150
guuugauggauuuggccuu

SEQ ID NO: 91609 - RNA, 19 nt, Artificial Sequence
  Description of Artificial Sequence: Synthetic oligonucleotide
  Antisense strand to SEQ ID NO: 91528
aaggccaaauccaucaaac

SEQ ID NO: 91610 - RNA, 19 nt, Artificial Sequence
  Description of Artificial Sequence: Synthetic oligonucleotide
  Sense strand starting at position 2573 of SEQ ID NO: 1150
aggaaagaucggugagacu

SEQ ID NO: 91611 - RNA, 19 nt, Artificial Sequence
  Description of Artificial Sequence: Synthetic oligonucleotide
  Antisense strand to SEQ ID NO: 91530
agucucaccgaucuuuccu

SEQ ID NO: 91612 - RNA, 19 nt, Artificial Sequence
  Description of Artificial Sequence: Synthetic oligonucleotide
  Sense strand starting at position 2861 of SEQ ID NO: 1150
guaucaaagggcuauguua

SEQ ID NO: 91613 - RNA, 19 nt, Artificial Sequence
  Description of Artificial Sequence: Synthetic oligonucleotide
  Antisense strand to SEQ ID NO: 91532
uaacauagcccuuugauac

SEQ ID NO: 91614 - RNA, 19 nt, Artificial Sequence
  Description of Artificial Sequence: Synthetic oligonucleotide
  Sense strand starting at position 2863 of SEQ ID NO: 1150
aucaaagggcuauguuauu

SEQ ID NO: 91615 - RNA, 19 nt, Artificial Sequence
  Description of Artificial Sequence: Synthetic oligonucleotide
  Antisense strand to SEQ ID NO: 91534
aauaacauagcccuuugau

SEQ ID NO: 91616 - RNA, 19 nt, Artificial Sequence
  Description of Artificial Sequence: Synthetic oligonucleotide
  Sense strand starting at position 2967 of SEQ ID NO: 1150
cccagagaguuuccacauc

SEQ ID NO: 91617 - RNA, 19 nt, Artificial Sequence
  Description of Artificial Sequence: Synthetic oligonucleotide
  Antisense strand to SEQ ID NO: 91536
gauguggaaacucucuggg

SEQ ID NO: 91618 - RNA, 19 nt, Artificial Sequence
  Description of Artificial Sequence: Synthetic oligonucleotide
  Sense strand starting at position 3146 of SEQ ID NO: 1150
acaguuucugaauagagca

SEQ ID NO: 91619 - RNA, 19 nt, Artificial Sequence
  Description of Artificial Sequence: Synthetic oligonucleotide
  Antisense strand to SEQ ID NO: 91538
ugcucuauucagaaacugu

SEQ ID NO: 91620 - RNA, 19 nt, Artificial Sequence
  Description of Artificial Sequence: Synthetic oligonucleotide
  Sense strand starting at position 3272 of SEQ ID NO: 1150
aaaugauaggcuuggguua

SEQ ID NO: 91621 - RNA, 19 nt, Artificial Sequence
  Description of Artificial Sequence: Synthetic oligonucleotide
  Antisense strand to SEQ ID NO: 91540
uaacccaagccuaucauuu

SEQ ID NO: 91622 - RNA, 19 nt, Artificial Sequence
  Description of Artificial Sequence: Synthetic oligonucleotide
  Sense strand starting at position 3273 of SEQ ID NO: 1150
aaugauaggcuuggguuau

SEQ ID NO: 91623 - RNA, 19 nt, Artificial Sequence
  Description of Artificial Sequence: Synthetic oligonucleotide
  Antisense strand to SEQ ID NO: 91542
auaacccaagccuaucauu

SEQ ID NO: 91624 - RNA, 19 nt, Artificial Sequence
  Description of Artificial Sequence: Synthetic oligonucleotide
  Sense strand starting at position 3285 of SEQ ID NO: 1150
ggguuauuaggaggcacaa

SEQ ID NO: 91625 - RNA, 19 nt, Artificial Sequence
  Description of Artificial Sequence: Synthetic oligonucleotide
  Antisense strand to SEQ ID NO: 91544
uugugccuccuaauaaccc

SEQ ID NO: 91626 - RNA, 19 nt, Artificial Sequence
  Description of Artificial Sequence: Synthetic oligonucleotide
  Sense strand starting at position 3610 of SEQ ID NO: 1150
cugugcuauccugaaauau

SEQ ID NO: 91627 - RNA, 19 nt, Artificial Sequence
  Description of Artificial Sequence: Synthetic oligonucleotide
  Antisense strand to SEQ ID NO: 91546
auauuucaggauagcacag

SEQ ID NO: 91628 - RNA, 19 nt, Artificial Sequence
  Description of Artificial Sequence: Synthetic oligonucleotide
  Sense strand starting at position 3977 of SEQ ID NO: 1151
ggucauuugaaauguggcu

SEQ ID NO: 91629 - RNA, 19 nt, Artificial Sequence
  Description of Artificial Sequence: Synthetic oligonucleotide
  Antisense strand to SEQ ID NO: 91548
agccacauuucaaaugacc

SEQ ID NO: 91630 - RNA, 19 nt, Artificial Sequence
  Description of Artificial Sequence: Synthetic oligonucleotide
  Sense strand starting at position 3965 of SEQ ID NO: 1151
gucuaauaugguggucauu

SEQ ID NO: 91631 - RNA, 19 nt, Artificial Sequence
  Description of Artificial Sequence: Synthetic oligonucleotide
  Antisense strand to SEQ ID NO: 91550
aaugaccaccauauuagac

SEQ ID NO: 91632 - RNA, 19 nt, Artificial Sequence
  Description of Artificial Sequence: Synthetic oligonucleotide
  Sense strand starting at position 3943 of SEQ ID NO: 1151
ggaaauguucuguaucucu

SEQ ID NO: 91633 - RNA, 19 nt, Artificial Sequence
  Description of Artificial Sequence: Synthetic oligonucleotide
  Antisense strand to SEQ ID NO: 91552
agagauacagaacauuucc

SEQ ID NO: 91634 - RNA, 19 nt, Artificial Sequence
  Description of Artificial Sequence: Synthetic oligonucleotide
  Sense strand starting at position 3020 of SEQ ID NO: 1151
gcucuauguaugcaaagag

SEQ ID NO: 91635 - RNA, 19 nt, Artificial Sequence
  Description of Artificial Sequence: Synthetic oligonucleotide
  Antisense strand to SEQ ID NO: 91554
cucuuugcauacauagagc

SEQ ID NO: 91636 - RNA, 19 nt, Artificial Sequence
  Description of Artificial Sequence: Synthetic oligonucleotide
  Sense strand starting at position 3019 of SEQ ID NO: 1151
ugcucuauguaugcaaaga

SEQ ID NO: 91637 - RNA, 19 nt, Artificial Sequence
  Description of Artificial Sequence: Synthetic oligonucleotide
  Antisense strand to SEQ ID NO: 91556
ucuuugcauacauagagca

SEQ ID NO: 91638 - RNA, 19 nt, Artificial Sequence
  Description of Artificial Sequence: Synthetic oligonucleotide
  Sense strand starting at position 3010 of SEQ ID NO: 1151
gguauagcuugcucuaugu

SEQ ID NO: 91639 - RNA, 19 nt, Artificial Sequence
  Description of Artificial Sequence: Synthetic oligonucleotide
  Antisense strand to SEQ ID NO: 91558
acauagagcaagcuauacc

SEQ ID NO: 91640 - RNA, 19 nt, Artificial Sequence
  Description of Artificial Sequence: Synthetic oligonucleotide
  Sense strand starting at position 3007 of SEQ ID NO: 1151
ucugguauagcuugcucua

SEQ ID NO: 91641 - RNA, 19 nt, Artificial Sequence
  Description of Artificial Sequence: Synthetic oligonucleotide
  Antisense strand to SEQ ID NO: 91560
uagagcaagcuauaccaga

SEQ ID NO: 91642 - RNA, 19 nt, Artificial Sequence
  Description of Artificial Sequence: Synthetic oligonucleotide
  Sense strand starting at position 3000 of SEQ ID NO: 1151
cugauucucugguauagcu

SEQ ID NO: 91643 - RNA, 19 nt, Artificial Sequence
  Description of Artificial Sequence: Synthetic oligonucleotide
  Antisense strand to SEQ ID NO: 91562
agcuauaccagagaaucag

SEQ ID NO: 91644 - RNA, 19 nt, Artificial Sequence
  Description of Artificial Sequence: Synthetic oligonucleotide
  Sense strand starting at position 2998 of SEQ ID NO: 1151
aucugauucucugguauag

SEQ ID NO: 91645 - RNA, 19 nt, Artificial Sequence
  Description of Artificial Sequence: Synthetic oligonucleotide
  Antisense strand to SEQ ID NO: 91564
cuauaccagagaaucagau

SEQ ID NO: 91646 - RNA, 19 nt, Artificial Sequence
  Description of Artificial Sequence: Synthetic oligonucleotide
  Sense strand starting at position 2996 of SEQ ID NO: 1151
cuaucugauucucugguau

SEQ ID NO: 91647 - RNA, 19 nt, Artificial Sequence
  Description of Artificial Sequence: Synthetic oligonucleotide
  Antisense strand to SEQ ID NO: 91566
auaccagagaaucagauag

SEQ ID NO: 91648 - RNA, 19 nt, Artificial Sequence
  Description of Artificial Sequence: Synthetic oligonucleotide
  Sense strand starting at position 2995 of SEQ ID NO: 1151
gcuaucugauucucuggua

SEQ ID NO: 91649 - RNA, 19 nt, Artificial Sequence
  Description of Artificial Sequence: Synthetic oligonucleotide
  Antisense strand to SEQ ID NO: 91568
uaccagagaaucagauagc

SEQ ID NO: 91650 - RNA, 19 nt, Artificial Sequence
  Description of Artificial Sequence: Synthetic oligonucleotide
  Sense strand starting at position 2989 of SEQ ID NO: 1151
gggcuugcuaucugauucu

SEQ ID NO: 91651 - RNA, 19 nt, Artificial Sequence
  Description of Artificial Sequence: Synthetic oligonucleotide
  Antisense strand to SEQ ID NO: 91570
agaaucagauagcaagccc

SEQ ID NO: 91652 - RNA, 19 nt, Artificial Sequence
  Description of Artificial Sequence: Synthetic oligonucleotide
  Sense strand starting at position 2880 of SEQ ID NO: 1151
aggucagaguaauagaaua

SEQ ID NO: 91653 - RNA, 19 nt, Artificial Sequence
  Description of Artificial Sequence: Synthetic oligonucleotide
  Antisense strand to SEQ ID NO: 91572
uauucuauuacucugaccu

SEQ ID NO: 91654 - RNA, 19 nt, Artificial Sequence
  Description of Artificial Sequence: Synthetic oligonucleotide
  Sense strand starting at position 2317 of SEQ ID NO: 1151
ggcugacauugagaaccau

SEQ ID NO: 91655 - RNA, 19 nt, Artificial Sequence
  Description of Artificial Sequence: Synthetic oligonucleotide
  Antisense strand to SEQ ID NO: 91574
augguucucaaugucagcc

SEQ ID NO: 91656 - RNA, 19 nt, Artificial Sequence
  Description of Artificial Sequence: Synthetic oligonucleotide
  Sense strand starting at position 2101 of SEQ ID NO: 1151
gguucuaggccugggaaca

SEQ ID NO: 91657 - RNA, 19 nt, Artificial Sequence
  Description of Artificial Sequence: Synthetic oligonucleotide
  Antisense strand to SEQ ID NO: 91576
uguucccaggccuagaacc

SEQ ID NO: 91658 - RNA, 19 nt, Artificial Sequence
  Description of Artificial Sequence: Synthetic oligonucleotide
  Sense strand starting at position 1704 of SEQ ID NO: 1151
gcagcuaugccuccuguuu

SEQ ID NO: 91659 - RNA, 19 nt, Artificial Sequence
  Description of Artificial Sequence: Synthetic oligonucleotide
  Antisense strand to SEQ ID NO: 91578
aaacaggaggcauagcugc

SEQ ID NO: 91660 - RNA, 19 nt, Artificial Sequence
  Description of Artificial Sequence: Synthetic oligonucleotide
  Sense strand starting at position 1268 of SEQ ID NO: 1151
cuuauaaucuugggccuca

SEQ ID NO: 91661 - RNA, 19 nt, Artificial Sequence
  Description of Artificial Sequence: Synthetic oligonucleotide
  Antisense strand to SEQ ID NO: 91580
ugaggcccaagauuauaag

SEQ ID NO: 91662 - RNA, 19 nt, Artificial Sequence
  Description of Artificial Sequence: Synthetic oligonucleotide
  Sense strand starting at position 998 of SEQ ID NO: 1151
ggucuucuauuugggaaag

SEQ ID NO: 91663 - RNA, 19 nt, Artificial Sequence
  Description of Artificial Sequence: Synthetic oligonucleotide
  Antisense strand to SEQ ID NO: 91582
cuuucccaaauagaagacc

SEQ ID NO: 91664 - RNA, 19 nt, Artificial Sequence
  Description of Artificial Sequence: Synthetic oligonucleotide
  Sense strand starting at position 914 of SEQ ID NO: 1151
guccuacuuccuugaugag

SEQ ID NO: 91665 - RNA, 19 nt, Artificial Sequence
  Description of Artificial Sequence: Synthetic oligonucleotide
  Antisense strand to SEQ ID NO: 91584
cucaucaaggaaguaggac

SEQ ID NO: 91666 - RNA, 19 nt, Artificial Sequence
  Description of Artificial Sequence: Synthetic oligonucleotide
  Sense strand starting at position 913 of SEQ ID NO: 1151
gguccuacuuccuugauga

SEQ ID NO: 91667 - RNA, 19 nt, Artificial Sequence
  Description of Artificial Sequence: Synthetic oligonucleotide
  Antisense strand to SEQ ID NO: 91586
ucaucaaggaaguaggacc

SEQ ID NO: 91668 - RNA, 19 nt, Artificial Sequence
  Description of Artificial Sequence: Synthetic oligonucleotide
  Sense strand starting at position 877 of SEQ ID NO: 1151
cuuuguaugugagcuggga

SEQ ID NO: 91669 - RNA, 19 nt, Artificial Sequence
  Description of Artificial Sequence: Synthetic oligonucleotide
  Antisense strand to SEQ ID NO: 91588
ucccagcucacauacaaag

SEQ ID NO: 91670 - RNA, 19 nt, Artificial Sequence
  Description of Artificial Sequence: Synthetic oligonucleotide
  Sense strand starting at position 870 of SEQ ID NO: 1151
cugguaacuuuguauguga

SEQ ID NO: 91671 - RNA, 19 nt, Artificial Sequence
  Description of Artificial Sequence: Synthetic oligonucleotide
  Antisense strand to SEQ ID NO: 91590
ucacauacaaaguuaccag

SEQ ID NO: 91672 - RNA, 19 nt, Artificial Sequence
  Description of Artificial Sequence: Synthetic oligonucleotide
  Sense strand starting at position 859 of SEQ ID NO: 1151
ggugucuuucucugguaac

SEQ ID NO: 91673 - RNA, 19 nt, Artificial Sequence
  Description of Artificial Sequence: Synthetic oligonucleotide
  Antisense strand to SEQ ID NO: 91592
guuaccagagaaagacacc

SEQ ID NO: 91674 - RNA, 19 nt, Artificial Sequence
  Description of Artificial Sequence: Synthetic oligonucleotide
  Sense strand starting at position 858 of SEQ ID NO: 1151
aggugucuuucucugguaa

SEQ ID NO: 91675 - RNA, 19 nt, Artificial Sequence
  Description of Artificial Sequence: Synthetic oligonucleotide
  Antisense strand to SEQ ID NO: 91594
uuaccagagaaagacaccu

SEQ ID NO: 91676 - RNA, 19 nt, Artificial Sequence
  Description of Artificial Sequence: Synthetic oligonucleotide
  Sense strand starting at position 824 of SEQ ID NO: 1151
ucaugauaagccugaggga

SEQ ID NO: 91677 - RNA, 19 nt, Artificial Sequence
  Description of Artificial Sequence: Synthetic oligonucleotide
  Antisense strand to SEQ ID NO: 91596
ucccucaggcuuaucauga

SEQ ID NO: 91678 - RNA, 19 nt, Artificial Sequence
  Description of Artificial Sequence: Synthetic oligonucleotide
  Sense strand starting at position 810 of SEQ ID NO: 1151
cugauagggcugugucaug

SEQ ID NO: 91679 - RNA, 19 nt, Artificial Sequence
  Description of Artificial Sequence: Synthetic oligonucleotide
  Antisense strand to SEQ ID NO: 91598
caugacacagcccuaucag

SEQ ID NO: 91680 - RNA, 19 nt, Artificial Sequence
  Description of Artificial Sequence: Synthetic oligonucleotide
  Sense strand starting at position 808 of SEQ ID NO: 1151
uccugauagggcuguguca

SEQ ID NO: 91681 - RNA, 19 nt, Artificial Sequence
  Description of Artificial Sequence: Synthetic oligonucleotide
  Antisense strand to SEQ ID NO: 91600
ugacacagcccuaucagga

SEQ ID NO: 91682 - RNA, 19 nt, Artificial Sequence
  Description of Artificial Sequence: Synthetic oligonucleotide
  Sense strand starting at position 797 of SEQ ID NO: 1151
agcuguuuauguccugaua

SEQ ID NO: 91683 - RNA, 19 nt, Artificial Sequence
  Description of Artificial Sequence: Synthetic oligonucleotide
  Antisense strand to SEQ ID NO: 91602
uaucaggacauaaacagcu

SEQ ID NO: 91684 - RNA, 19 nt, Artificial Sequence
  Description of Artificial Sequence: Synthetic oligonucleotide
  Sense strand starting at position 787 of SEQ ID NO: 1151
ugcucaaucuagcuguuua

SEQ ID NO: 91685 - RNA, 19 nt, Artificial Sequence
  Description of Artificial Sequence: Synthetic oligonucleotide
  Antisense strand to SEQ ID NO: 91604
uaaacagcuagauugagca

SEQ ID NO: 91686 - RNA, 19 nt, Artificial Sequence
  Description of Artificial Sequence: Synthetic oligonucleotide
  Sense strand starting at position 776 of SEQ ID NO: 1151
agagccaauucugcucaau

SEQ ID NO: 91687 - RNA, 19 nt, Artificial Sequence
  Description of Artificial Sequence: Synthetic oligonucleotide
  Antisense strand to SEQ ID NO: 91606
auugagcagaauuggcucu

SEQ ID NO: 91688 - RNA, 19 nt, Artificial Sequence
  Description of Artificial Sequence: Synthetic oligonucleotide
  Sense strand starting at position 716 of SEQ ID NO: 1151
auaucuaccaccgggagua

SEQ ID NO: 91689 - RNA, 19 nt, Artificial Sequence
  Description of Artificial Sequence: Synthetic oligonucleotide
  Antisense strand to SEQ ID NO: 91608
uacucccggugguagauau

SEQ ID NO: 91690 - RNA, 19 nt, Artificial Sequence
  Description of Artificial Sequence: Synthetic oligonucleotide
  Sense strand starting at position 659 of SEQ ID NO: 1151
ugggcagaucaguaagcau

SEQ ID NO: 91691 - RNA, 19 nt, Artificial Sequence
  Description of Artificial Sequence: Synthetic oligonucleotide
  Antisense strand to SEQ ID NO: 91610
augcuuacugaucugccca

SEQ ID NO: 91692 - RNA, 19 nt, Artificial Sequence
  Description of Artificial Sequence: Synthetic oligonucleotide
  Sense strand starting at position 509 of SEQ ID NO: 1151
cuauaaucuccaggccagu

SEQ ID NO: 91693 - RNA, 19 nt, Artificial Sequence
  Description of Artificial Sequence: Synthetic oligonucleotide
  Antisense strand to SEQ ID NO: 91612
acuggccuggagauuauag

SEQ ID NO: 91694 - RNA, 19 nt, Artificial Sequence
  Description of Artificial Sequence: Synthetic oligonucleotide
  Sense strand starting at position 446 of SEQ ID NO: 1151
agaguuaacuaagaagaag

SEQ ID NO: 91695 - RNA, 19 nt, Artificial Sequence
  Description of Artificial Sequence: Synthetic oligonucleotide
  Antisense strand to SEQ ID NO: 91614
cuucuucuuaguuaacucu

SEQ ID NO: 91696 - RNA, 19 nt, Artificial Sequence
  Description of Artificial Sequence: Synthetic oligonucleotide
  Sense strand starting at position 398 of SEQ ID NO: 1151
uuacucugggcauauauca

SEQ ID NO: 91697 - RNA, 19 nt, Artificial Sequence
  Description of Artificial Sequence: Synthetic oligonucleotide
  Antisense strand to SEQ ID NO: 91616
ugauauaugcccagaguaa

SEQ ID NO: 91698 - RNA, 19 nt, Artificial Sequence
  Description of Artificial Sequence: Synthetic oligonucleotide
  Sense strand starting at position 396 of SEQ ID NO: 1151
cuuuacucugggcauauau

SEQ ID NO: 91699 - RNA, 19 nt, Artificial Sequence
  Description of Artificial Sequence: Synthetic oligonucleotide
  Antisense strand to SEQ ID NO: 91618
auauaugcccagaguaaag

SEQ ID NO: 91700 - RNA, 19 nt, Artificial Sequence
  Description of Artificial Sequence: Synthetic oligonucleotide
  Sense strand starting at position 395 of SEQ ID NO: 1151
ucuuuacucugggcauaua

SEQ ID NO: 91701 - RNA, 19 nt, Artificial Sequence
  Description of Artificial Sequence: Synthetic oligonucleotide
  Antisense strand to SEQ ID NO: 91620
uauaugcccagaguaaaga

SEQ ID NO: 91702 - RNA, 19 nt, Artificial Sequence
  Description of Artificial Sequence: Synthetic oligonucleotide
  Sense strand starting at position 394 of SEQ ID NO: 1151
uucuuuacucugggcauau

SEQ ID NO: 91703 - RNA, 19 nt, Artificial Sequence
  Description of Artificial Sequence: Synthetic oligonucleotide
  Antisense strand to SEQ ID NO: 91622
auaugcccagaguaaagaa

SEQ ID NO: 91704 - RNA, 19 nt, Artificial Sequence
  Description of Artificial Sequence: Synthetic oligonucleotide
  Sense strand starting at position 392 of SEQ ID NO: 1151
aguucuuuacucugggcau

SEQ ID NO: 91705 - RNA, 19 nt, Artificial Sequence
  Description of Artificial Sequence: Synthetic oligonucleotide
  Antisense strand to SEQ ID NO: 91624
augcccagaguaaagaacu

SEQ ID NO: 91706 - RNA, 19 nt, Artificial Sequence
  Description of Artificial Sequence: Synthetic oligonucleotide
  Sense strand starting at position 385 of SEQ ID NO: 1151
ggccuaaaguucuuuacuc

SEQ ID NO: 91707 - RNA, 19 nt, Artificial Sequence
  Description of Artificial Sequence: Synthetic oligonucleotide
  Antisense strand to SEQ ID NO: 91626
gaguaaagaacuuuaggcc

SEQ ID NO: 91708 - RNA, 19 nt, Artificial Sequence
  Description of Artificial Sequence: Synthetic oligonucleotide
  Sense strand starting at position 3902 of SEQ ID NO: 1152
ccugcucuaccaggaaaga

SEQ ID NO: 91709 - RNA, 19 nt, Artificial Sequence
  Description of Artificial Sequence: Synthetic oligonucleotide
  Antisense strand to SEQ ID NO: 91628
ucuuuccugguagagcagg

SEQ ID NO: 91710 - RNA, 19 nt, Artificial Sequence
  Description of Artificial Sequence: Synthetic oligonucleotide
  Sense strand starting at position 3765 of SEQ ID NO: 1152
gccacuuugguuuaaggau

SEQ ID NO: 91711 - RNA, 19 nt, Artificial Sequence
  Description of Artificial Sequence: Synthetic oligonucleotide
  Antisense strand to SEQ ID NO: 91630
auccuuaaaccaaaguggc

SEQ ID NO: 91712 - RNA, 19 nt, Artificial Sequence
  Description of Artificial Sequence: Synthetic oligonucleotide
  Sense strand starting at position 3679 of SEQ ID NO: 1152
acugcugaugcuuggagau

SEQ ID NO: 91713 - RNA, 19 nt, Artificial Sequence
  Description of Artificial Sequence: Synthetic oligonucleotide
  Antisense strand to SEQ ID NO: 91632
aucuccaagcaucagcagu

SEQ ID NO: 91714 - RNA, 19 nt, Artificial Sequence
  Description of Artificial Sequence: Synthetic oligonucleotide
  Sense strand starting at position 3567 of SEQ ID NO: 1152
guugauucaguggaguauu

SEQ ID NO: 91715 - RNA, 19 nt, Artificial Sequence
  Description of Artificial Sequence: Synthetic oligonucleotide
  Antisense strand to SEQ ID NO: 91634
aauacuccacugaaucaac

SEQ ID NO: 91716 - RNA, 19 nt, Artificial Sequence
  Description of Artificial Sequence: Synthetic oligonucleotide
  Sense strand starting at position 3564 of SEQ ID NO: 1152
uuuguugauucaguggagu

SEQ ID NO: 91717 - RNA, 19 nt, Artificial Sequence
  Description of Artificial Sequence: Synthetic oligonucleotide
  Antisense strand to SEQ ID NO: 91636
acuccacugaaucaacaaa

SEQ ID NO: 91718 - RNA, 19 nt, Artificial Sequence
  Description of Artificial Sequence: Synthetic oligonucleotide
  Sense strand starting at position 3496 of SEQ ID NO: 1152
augauccuugcucaguuua

SEQ ID NO: 91719 - RNA, 19 nt, Artificial Sequence
  Description of Artificial Sequence: Synthetic oligonucleotide
  Antisense strand to SEQ ID NO: 91638
uaaacugagcaaggaucau

SEQ ID NO: 91720 - RNA, 19 nt, Artificial Sequence
  Description of Artificial Sequence: Synthetic oligonucleotide
  Sense strand starting at position 3339 of SEQ ID NO: 1152
cccucauucuagcugagau

SEQ ID NO: 91721 - RNA, 19 nt, Artificial Sequence
  Description of Artificial Sequence: Synthetic oligonucleotide
  Antisense strand to SEQ ID NO: 91640
aucucagcuagaaugaggg

SEQ ID NO: 91722 - RNA, 19 nt, Artificial Sequence
  Description of Artificial Sequence: Synthetic oligonucleotide
  Sense strand starting at position 3319 of SEQ ID NO: 1152
guuggauucugggccacuu

SEQ ID NO: 91723 - RNA, 19 nt, Artificial Sequence
  Description of Artificial Sequence: Synthetic oligonucleotide
  Antisense strand to SEQ ID NO: 91642
aaguggcccagaauccaac

SEQ ID NO: 91724 - RNA, 19 nt, Artificial Sequence
  Description of Artificial Sequence: Synthetic oligonucleotide
  Sense strand starting at position 3284 of SEQ ID NO: 1152
auaggacuugccugucaca

SEQ ID NO: 91725 - RNA, 19 nt, Artificial Sequence
  Description of Artificial Sequence: Synthetic oligonucleotide
  Antisense strand to SEQ ID NO: 91644
ugugacaggcaaguccuau

SEQ ID NO: 91726 - RNA, 19 nt, Artificial Sequence
  Description of Artificial Sequence: Synthetic oligonucleotide
  Sense strand starting at position 3253 of SEQ ID NO: 1152
acuuacauuuaaggaaaga

SEQ ID NO: 91727 - RNA, 19 nt, Artificial Sequence
  Description of Artificial Sequence: Synthetic oligonucleotide
  Antisense strand to SEQ ID NO: 91646
ucuuuccuuaaauguaagu

SEQ ID NO: 91728 - RNA, 19 nt, Artificial Sequence
  Description of Artificial Sequence: Synthetic oligonucleotide
  Sense strand starting at position 3228 of SEQ ID NO: 1152
gaaacagucugguccaaau

SEQ ID NO: 91729 - RNA, 19 nt, Artificial Sequence
  Description of Artificial Sequence: Synthetic oligonucleotide
  Antisense strand to SEQ ID NO: 91648
auuuggaccagacuguuuc

SEQ ID NO: 91730 - RNA, 19 nt, Artificial Sequence
  Description of Artificial Sequence: Synthetic oligonucleotide
  Sense strand starting at position 3158 of SEQ ID NO: 1152
agagccauuguguacuuau

SEQ ID NO: 91731 - RNA, 19 nt, Artificial Sequence
  Description of Artificial Sequence: Synthetic oligonucleotide
  Antisense strand to SEQ ID NO: 91650
auaaguacacaauggcucu

SEQ ID NO: 91732 - RNA, 19 nt, Artificial Sequence
  Description of Artificial Sequence: Synthetic oligonucleotide
  Sense strand starting at position 3157 of SEQ ID NO: 1152
gagagccauuguguacuua

SEQ ID NO: 91733 - RNA, 19 nt, Artificial Sequence
  Description of Artificial Sequence: Synthetic oligonucleotide
  Antisense strand to SEQ ID NO: 91652
uaaguacacaauggcucuc

SEQ ID NO: 91734 - RNA, 19 nt, Artificial Sequence
  Description of Artificial Sequence: Synthetic oligonucleotide
  Sense strand starting at position 3007 of SEQ ID NO: 1152
cugguuuauuuauagagac

SEQ ID NO: 91735 - RNA, 19 nt, Artificial Sequence
  Description of Artificial Sequence: Synthetic oligonucleotide
  Antisense strand to SEQ ID NO: 91654
gucucuauaaauaaaccag

SEQ ID NO: 91736 - RNA, 19 nt, Artificial Sequence
  Description of Artificial Sequence: Synthetic oligonucleotide
  Sense strand starting at position 2997 of SEQ ID NO: 1152
ucuuuacucccugguuuau

SEQ ID NO: 91737 - RNA, 19 nt, Artificial Sequence
  Description of Artificial Sequence: Synthetic oligonucleotide
  Antisense strand to SEQ ID NO: 91656
auaaaccagggaguaaaga

SEQ ID NO: 91738 - RNA, 19 nt, Artificial Sequence
  Description of Artificial Sequence: Synthetic oligonucleotide
  Sense strand starting at position 2964 of SEQ ID NO: 1152
auagcaacgcuuuacugaa

SEQ ID NO: 91739 - RNA, 19 nt, Artificial Sequence
  Description of Artificial Sequence: Synthetic oligonucleotide
  Antisense strand to SEQ ID NO: 91658
uucaguaaagcguugcuau

SEQ ID NO: 91740 - RNA, 19 nt, Artificial Sequence
  Description of Artificial Sequence: Synthetic oligonucleotide
  Sense strand starting at position 2791 of SEQ ID NO: 1152
cucacuaaccaguguuaug

SEQ ID NO: 91741 - RNA, 19 nt, Artificial Sequence
  Description of Artificial Sequence: Synthetic oligonucleotide
  Antisense strand to SEQ ID NO: 91660
cauaacacugguuagugag

SEQ ID NO: 91742 - RNA, 19 nt, Artificial Sequence
  Description of Artificial Sequence: Synthetic oligonucleotide
  Sense strand starting at position 2762 of SEQ ID NO: 1152
aguugcaaucgaugggaga

SEQ ID NO: 91743 - RNA, 19 nt, Artificial Sequence
  Description of Artificial Sequence: Synthetic oligonucleotide
  Antisense strand to SEQ ID NO: 91662
ucucccaucgauugcaacu

SEQ ID NO: 91744 - RNA, 19 nt, Artificial Sequence
  Description of Artificial Sequence: Synthetic oligonucleotide
  Sense strand starting at position 2696 of SEQ ID NO: 1152
cccugagccuuccugagaa

SEQ ID NO: 91745 - RNA, 19 nt, Artificial Sequence
  Description of Artificial Sequence: Synthetic oligonucleotide
  Antisense strand to SEQ ID NO: 91664
uucucaggaaggcucaggg

SEQ ID NO: 91746 - RNA, 19 nt, Artificial Sequence
  Description of Artificial Sequence: Synthetic oligonucleotide
  Sense strand starting at position 2571 of SEQ ID NO: 1152
uccugagcccuccaaguaa

SEQ ID NO: 91747 - RNA, 19 nt, Artificial Sequence
  Description of Artificial Sequence: Synthetic oligonucleotide
  Antisense strand to SEQ ID NO: 91666
uuacuuggagggcucagga

SEQ ID NO: 91748 - RNA, 19 nt, Artificial Sequence
  Description of Artificial Sequence: Synthetic oligonucleotide
  Sense strand starting at position 2520 of SEQ ID NO: 1152
agagcuuucccagaguaac

SEQ ID NO: 91749 - RNA, 19 nt, Artificial Sequence
  Description of Artificial Sequence: Synthetic oligonucleotide
  Antisense strand to SEQ ID NO: 91668
guuacucugggaaagcucu

SEQ ID NO: 91750 - RNA, 19 nt, Artificial Sequence
  Description of Artificial Sequence: Synthetic oligonucleotide
  Sense strand starting at position 2517 of SEQ ID NO: 1152
cacagagcuuucccagagu

SEQ ID NO: 91751 - RNA, 19 nt, Artificial Sequence
  Description of Artificial Sequence: Synthetic oligonucleotide
  Antisense strand to SEQ ID NO: 91670
acucugggaaagcucugug

SEQ ID NO: 91752 - RNA, 19 nt, Artificial Sequence
  Description of Artificial Sequence: Synthetic oligonucleotide
  Sense strand starting at position 1481 of SEQ ID NO: 1152
aggauuaaguuucccaaug

SEQ ID NO: 91753 - RNA, 19 nt, Artificial Sequence
  Description of Artificial Sequence: Synthetic oligonucleotide
  Antisense strand to SEQ ID NO: 91672
cauugggaaacuuaauccu

SEQ ID NO: 91754 - RNA, 19 nt, Artificial Sequence
  Description of Artificial Sequence: Synthetic oligonucleotide
  Sense strand starting at position 1095 of SEQ ID NO: 1152
gauaucuuugggugcaaau

SEQ ID NO: 91755 - RNA, 19 nt, Artificial Sequence
  Description of Artificial Sequence: Synthetic oligonucleotide
  Antisense strand to SEQ ID NO: 91674
auuugcacccaaagauauc

SEQ ID NO: 91756 - RNA, 19 nt, Artificial Sequence
  Description of Artificial Sequence: Synthetic oligonucleotide
  Sense strand starting at position 1094 of SEQ ID NO: 1152
ggauaucuuugggugcaaa

SEQ ID NO: 91757 - RNA, 19 nt, Artificial Sequence
  Description of Artificial Sequence: Synthetic oligonucleotide
  Antisense strand to SEQ ID NO: 91676
uuugcacccaaagauaucc

SEQ ID NO: 91758 - RNA, 19 nt, Artificial Sequence
  Description of Artificial Sequence: Synthetic oligonucleotide
  Sense strand starting at position 1070 of SEQ ID NO: 1152
auguuuauagcagauguua

SEQ ID NO: 91759 - RNA, 19 nt, Artificial Sequence
  Description of Artificial Sequence: Synthetic oligonucleotide
  Antisense strand to SEQ ID NO: 91678
uaacaucugcuauaaacau

SEQ ID NO: 91760 - RNA, 19 nt, Artificial Sequence
  Description of Artificial Sequence: Synthetic oligonucleotide
  Sense strand starting at position 1010 of SEQ ID NO: 1152
gcucacauacucggauaaa

SEQ ID NO: 91761 - RNA, 19 nt, Artificial Sequence
  Description of Artificial Sequence: Synthetic oligonucleotide
  Antisense strand to SEQ ID NO: 91680
uuuauccgaguaugugagc

SEQ ID NO: 91762 - RNA, 19 nt, Artificial Sequence
  Description of Artificial Sequence: Synthetic oligonucleotide
  Sense strand starting at position 934 of SEQ ID NO: 1152
aguaaaccauguuuacuaa

SEQ ID NO: 91763 - RNA, 19 nt, Artificial Sequence
  Description of Artificial Sequence: Synthetic oligonucleotide
  Antisense strand to SEQ ID NO: 91682
uuaguaaacaugguuuacu

SEQ ID NO: 91764 - RNA, 19 nt, Artificial Sequence
  Description of Artificial Sequence: Synthetic oligonucleotide
  Sense strand starting at position 931 of SEQ ID NO: 1152
ccaaguaaaccauguuuac

SEQ ID NO: 91765 - RNA, 19 nt, Artificial Sequence
  Description of Artificial Sequence: Synthetic oligonucleotide
  Antisense strand to SEQ ID NO: 91684
guaaacaugguuuacuugg

SEQ ID NO: 91766 - RNA, 19 nt, Artificial Sequence
  Description of Artificial Sequence: Synthetic oligonucleotide
  Sense strand starting at position 920 of SEQ ID NO: 1152
gucgacacucuccaaguaa

SEQ ID NO: 91767 - RNA, 19 nt, Artificial Sequence
  Description of Artificial Sequence: Synthetic oligonucleotide
  Antisense strand to SEQ ID NO: 91686
uuacuuggagagugucgac

SEQ ID NO: 91768 - RNA, 19 nt, Artificial Sequence
  Description of Artificial Sequence: Synthetic oligonucleotide
  Sense strand starting at position 846 of SEQ ID NO: 1152
ucugaucauguguaguacu

SEQ ID NO: 91769 - RNA, 19 nt, Artificial Sequence
  Description of Artificial Sequence: Synthetic oligonucleotide
  Antisense strand to SEQ ID NO: 91688
aguacuacacaugaucaga

SEQ ID NO: 91770 - RNA, 19 nt, Artificial Sequence
  Description of Artificial Sequence: Synthetic oligonucleotide
  Sense strand starting at position 839 of SEQ ID NO: 1152
gguaguuucugaucaugug

SEQ ID NO: 91771 - RNA, 19 nt, Artificial Sequence
  Description of Artificial Sequence: Synthetic oligonucleotide
  Antisense strand to SEQ ID NO: 91690
cacaugaucagaaacuacc

SEQ ID NO: 91772 - RNA, 19 nt, Artificial Sequence
  Description of Artificial Sequence: Synthetic oligonucleotide
  Sense strand starting at position 819 of SEQ ID NO: 1152
cauaaacgugaucaugauu

SEQ ID NO: 91773 - RNA, 19 nt, Artificial Sequence
  Description of Artificial Sequence: Synthetic oligonucleotide
  Antisense strand to SEQ ID NO: 91692
aaucaugaucacguuuaug

SEQ ID NO: 91774 - RNA, 19 nt, Artificial Sequence
  Description of Artificial Sequence: Synthetic oligonucleotide
  Sense strand starting at position 818 of SEQ ID NO: 1152
acauaaacgugaucaugau

SEQ ID NO: 91775 - RNA, 19 nt, Artificial Sequence
  Description of Artificial Sequence: Synthetic oligonucleotide
  Antisense strand to SEQ ID NO: 91694
aucaugaucacguuuaugu

SEQ ID NO: 91776 - RNA, 19 nt, Artificial Sequence
  Description of Artificial Sequence: Synthetic oligonucleotide
  Sense strand starting at position 691 of SEQ ID NO: 1152
aagucucuggcauacagua

SEQ ID NO: 91777 - RNA, 19 nt, Artificial Sequence
  Description of Artificial Sequence: Synthetic oligonucleotide
  Antisense strand to SEQ ID NO: 91696
uacuguaugccagagacuu

SEQ ID NO: 91778 - RNA, 19 nt, Artificial Sequence
  Description of Artificial Sequence: Synthetic oligonucleotide
  Sense strand starting at position 686 of SEQ ID NO: 1152
auccuaagucucuggcaua

SEQ ID NO: 91779 - RNA, 19 nt, Artificial Sequence
  Description of Artificial Sequence: Synthetic oligonucleotide
  Antisense strand to SEQ ID NO: 91698
uaugccagagacuuaggau

SEQ ID NO: 91780 - RNA, 19 nt, Artificial Sequence
  Description of Artificial Sequence: Synthetic oligonucleotide
  Sense strand starting at position 599 of SEQ ID NO: 1152
cgcaucugagcccaacaua

SEQ ID NO: 91781 - RNA, 19 nt, Artificial Sequence
  Description of Artificial Sequence: Synthetic oligonucleotide
  Antisense strand to SEQ ID NO: 91700
uauguugggcucagaugcg

SEQ ID NO: 91782 - RNA, 19 nt, Artificial Sequence
  Description of Artificial Sequence: Synthetic oligonucleotide
  Sense strand starting at position 536 of SEQ ID NO: 1152
ggaauuagagcuugaacac

SEQ ID NO: 91783 - RNA, 19 nt, Artificial Sequence
  Description of Artificial Sequence: Synthetic oligonucleotide
  Antisense strand to SEQ ID NO: 91702
guguucaagcucuaauucc

SEQ ID NO: 91784 - RNA, 19 nt, Artificial Sequence
  Description of Artificial Sequence: Synthetic oligonucleotide
  Sense strand starting at position 395 of SEQ ID NO: 1152
augucucuaugucuaaauu

SEQ ID NO: 91785 - RNA, 19 nt, Artificial Sequence
  Description of Artificial Sequence: Synthetic oligonucleotide
  Antisense strand to SEQ ID NO: 91704
aauuuagacauagagacau

SEQ ID NO: 91786 - RNA, 19 nt, Artificial Sequence
  Description of Artificial Sequence: Synthetic oligonucleotide
  Sense strand starting at position 393 of SEQ ID NO: 1152
guaugucucuaugucuaaa

SEQ ID NO: 91787 - RNA, 19 nt, Artificial Sequence
  Description of Artificial Sequence: Synthetic oligonucleotide
  Antisense strand to SEQ ID NO: 91706
uuuagacauagagacauac

SEQ ID NO: 91788 - RNA, 19 nt, Artificial Sequence
  Description of Artificial Sequence: Synthetic oligonucleotide
  Sense strand starting at position 3820 of SEQ ID NO: 1153
gucucaucucgagauucuu

SEQ ID NO: 91789 - RNA, 19 nt, Artificial Sequence
  Description of Artificial Sequence: Synthetic oligonucleotide
  Antisense strand to SEQ ID NO: 91708
aagaaucucgagaugagac

SEQ ID NO: 91790 - RNA, 19 nt, Artificial Sequence
  Description of Artificial Sequence: Synthetic oligonucleotide
  Sense strand starting at position 3818 of SEQ ID NO: 1153
uggucucaucucgagauuc

SEQ ID NO: 91791 - RNA, 19 nt, Artificial Sequence
  Description of Artificial Sequence: Synthetic oligonucleotide
  Antisense strand to SEQ ID NO: 91710
gaaucucgagaugagacca

SEQ ID NO: 91792 - RNA, 19 nt, Artificial Sequence
  Description of Artificial Sequence: Synthetic oligonucleotide
  Sense strand starting at position 3626 of SEQ ID NO: 1153
cucccaaggcucuaugaga

SEQ ID NO: 91793 - RNA, 19 nt, Artificial Sequence
  Description of Artificial Sequence: Synthetic oligonucleotide
  Antisense strand to SEQ ID NO: 91712
ucucauagagccuugggag

SEQ ID NO: 91794 - RNA, 19 nt, Artificial Sequence
  Description of Artificial Sequence: Synthetic oligonucleotide
  Sense strand starting at position 3570 of SEQ ID NO: 1153
cucacugcucuggagacua

SEQ ID NO: 91795 - RNA, 19 nt, Artificial Sequence
  Description of Artificial Sequence: Synthetic oligonucleotide
  Antisense strand to SEQ ID NO: 91714
uagucuccagagcagugag

SEQ ID NO: 91796 - RNA, 19 nt, Artificial Sequence
  Description of Artificial Sequence: Synthetic oligonucleotide
  Sense strand starting at position 3557 of SEQ ID NO: 1153
agagauguauucucucacu

SEQ ID NO: 91797 - RNA, 19 nt, Artificial Sequence
  Description of Artificial Sequence: Synthetic oligonucleotide
  Antisense strand to SEQ ID NO: 91716
agugagagaauacaucucu

SEQ ID NO: 91798 - RNA, 19 nt, Artificial Sequence
  Description of Artificial Sequence: Synthetic oligonucleotide
  Sense strand starting at position 3501 of SEQ ID NO: 1153
acauauuaguuuccuaggu

SEQ ID NO: 91799 - RNA, 19 nt, Artificial Sequence
  Description of Artificial Sequence: Synthetic oligonucleotide
  Antisense strand to SEQ ID NO: 91718
accuaggaaacuaauaugu

SEQ ID NO: 91800 - RNA, 19 nt, Artificial Sequence
  Description of Artificial Sequence: Synthetic oligonucleotide
  Sense strand starting at position 3428 of SEQ ID NO: 1153
uagguuucugcagacuauu

SEQ ID NO: 91801 - RNA, 19 nt, Artificial Sequence
  Description of Artificial Sequence: Synthetic oligonucleotide
  Antisense strand to SEQ ID NO: 91720
aauagucugcagaaaccua

SEQ ID NO: 91802 - RNA, 19 nt, Artificial Sequence
  Description of Artificial Sequence: Synthetic oligonucleotide
  Sense strand starting at position 3388 of SEQ ID NO: 1153
acagacaggugucucuauu

SEQ ID NO: 91803 - RNA, 19 nt, Artificial Sequence
  Description of Artificial Sequence: Synthetic oligonucleotide
  Antisense strand to SEQ ID NO: 91722
aauagagacaccugucugu

SEQ ID NO: 91804 - RNA, 19 nt, Artificial Sequence
  Description of Artificial Sequence: Synthetic oligonucleotide
  Sense strand starting at position 3289 of SEQ ID NO: 1153
ugucauauuuguguacuaa

SEQ ID NO: 91805 - RNA, 19 nt, Artificial Sequence
  Description of Artificial Sequence: Synthetic oligonucleotide
  Antisense strand to SEQ ID NO: 91724
uuaguacacaaauaugaca

SEQ ID NO: 91806 - RNA, 19 nt, Artificial Sequence
  Description of Artificial Sequence: Synthetic oligonucleotide
  Sense strand starting at position 3246 of SEQ ID NO: 1153
cuuggaucuccagaccagu

SEQ ID NO: 91807 - RNA, 19 nt, Artificial Sequence
  Description of Artificial Sequence: Synthetic oligonucleotide
  Antisense strand to SEQ ID NO: 91726
acuggucuggagauccaag

SEQ ID NO: 91808 - RNA, 19 nt, Artificial Sequence
  Description of Artificial Sequence: Synthetic oligonucleotide
  Sense strand starting at position 3086 of SEQ ID NO: 1153
cgggaaguagcccagagau

SEQ ID NO: 91809 - RNA, 19 nt, Artificial Sequence
  Description of Artificial Sequence: Synthetic oligonucleotide
  Antisense strand to SEQ ID NO: 91728
aucucugggcuacuucccg

SEQ ID NO: 91810 - RNA, 19 nt, Artificial Sequence
  Description of Artificial Sequence: Synthetic oligonucleotide
  Sense strand starting at position 3041 of SEQ ID NO: 1153
gccucauaggaagaagcau

SEQ ID NO: 91811 - RNA, 19 nt, Artificial Sequence
  Description of Artificial Sequence: Synthetic oligonucleotide
  Antisense strand to SEQ ID NO: 91730
augcuucuuccuaugaggc

SEQ ID NO: 91812 - RNA, 19 nt, Artificial Sequence
  Description of Artificial Sequence: Synthetic oligonucleotide
  Sense strand starting at position 2976 of SEQ ID NO: 1153
aguggacauucucuagauu

SEQ ID NO: 91813 - RNA, 19 nt, Artificial Sequence
  Description of Artificial Sequence: Synthetic oligonucleotide
  Antisense strand to SEQ ID NO: 91732
aaucuagagaauguccacu

SEQ ID NO: 91814 - RNA, 19 nt, Artificial Sequence
  Description of Artificial Sequence: Synthetic oligonucleotide
  Sense strand starting at position 2889 of SEQ ID NO: 1153
gacagauaagcauguauuc

SEQ ID NO: 91815 - RNA, 19 nt, Artificial Sequence
  Description of Artificial Sequence: Synthetic oligonucleotide
  Antisense strand to SEQ ID NO: 91734
gaauacaugcuuaucuguc

SEQ ID NO: 91816 - RNA, 19 nt, Artificial Sequence
  Description of Artificial Sequence: Synthetic oligonucleotide
  Sense strand starting at position 2847 of SEQ ID NO: 1153
guuauagaguuccuugaau

SEQ ID NO: 91817 - RNA, 19 nt, Artificial Sequence
  Description of Artificial Sequence: Synthetic oligonucleotide
  Antisense strand to SEQ ID NO: 91736
auucaaggaacucuauaac

SEQ ID NO: 91818 - RNA, 19 nt, Artificial Sequence
  Description of Artificial Sequence: Synthetic oligonucleotide
  Sense strand starting at position 2822 of SEQ ID NO: 1153
agugucagacaauaugcua

SEQ ID NO: 91819 - RNA, 19 nt, Artificial Sequence
  Description of Artificial Sequence: Synthetic oligonucleotide
  Antisense strand to SEQ ID NO: 91738
uagcauauugucugacacu

SEQ ID NO: 91820 - RNA, 19 nt, Artificial Sequence
  Description of Artificial Sequence: Synthetic oligonucleotide
  Sense strand starting at position 2812 of SEQ ID NO: 1153
uuuauugaggagugucaga

SEQ ID NO: 91821 - RNA, 19 nt, Artificial Sequence
  Description of Artificial Sequence: Synthetic oligonucleotide
  Antisense strand to SEQ ID NO: 91740
ucugacacuccucaauaaa

SEQ ID NO: 91822 - RNA, 19 nt, Artificial Sequence
  Description of Artificial Sequence: Synthetic oligonucleotide
  Sense strand starting at position 2718 of SEQ ID NO: 1153
ugaacagucugauuccaac

SEQ ID NO: 91823 - RNA, 19 nt, Artificial Sequence
  Description of Artificial Sequence: Synthetic oligonucleotide
  Antisense strand to SEQ ID NO: 91742
guuggaaucagacuguuca

SEQ ID NO: 91824 - RNA, 19 nt, Artificial Sequence
  Description of Artificial Sequence: Synthetic oligonucleotide
  Sense strand starting at position 2679 of SEQ ID NO: 1153
ugauguuugacguagcaaa

SEQ ID NO: 91825 - RNA, 19 nt, Artificial Sequence
  Description of Artificial Sequence: Synthetic oligonucleotide
  Antisense strand to SEQ ID NO: 91744
uuugcuacgucaaacauca

SEQ ID NO: 91826 - RNA, 19 nt, Artificial Sequence
  Description of Artificial Sequence: Synthetic oligonucleotide
  Sense strand starting at position 2526 of SEQ ID NO: 1153
ggucaugaguuuccugaua

SEQ ID NO: 91827 - RNA, 19 nt, Artificial Sequence
  Description of Artificial Sequence: Synthetic oligonucleotide
  Antisense strand to SEQ ID NO: 91746
uaucaggaaacucaugacc

SEQ ID NO: 91828 - RNA, 19 nt, Artificial Sequence
  Description of Artificial Sequence: Synthetic oligonucleotide
  Sense strand starting at position 1262 of SEQ ID NO: 1153
aaugauuccucaguugggu

SEQ ID NO: 91829 - RNA, 19 nt, Artificial Sequence
  Description of Artificial Sequence: Synthetic oligonucleotide
  Antisense strand to SEQ ID NO: 91748
acccaacugaggaaucauu

SEQ ID NO: 91830 - RNA, 19 nt, Artificial Sequence
  Description of Artificial Sequence: Synthetic oligonucleotide
  Sense strand starting at position 1259 of SEQ ID NO: 1153
ccaaaugauuccucaguug

SEQ ID NO: 91831 - RNA, 19 nt, Artificial Sequence
  Description of Artificial Sequence: Synthetic oligonucleotide
  Antisense strand to SEQ ID NO: 91750
caacugaggaaucauuugg

SEQ ID NO: 91832 - RNA, 19 nt, Artificial Sequence
  Description of Artificial Sequence: Synthetic oligonucleotide
  Sense strand starting at position 987 of SEQ ID NO: 1153
aacgaaccacagugucaua

SEQ ID NO: 91833 - RNA, 19 nt, Artificial Sequence
  Description of Artificial Sequence: Synthetic oligonucleotide
  Antisense strand to SEQ ID NO: 91752
uaugacacugugguucguu

SEQ ID NO: 91834 - RNA, 19 nt, Artificial Sequence
  Description of Artificial Sequence: Synthetic oligonucleotide
  Sense strand starting at position 835 of SEQ ID NO: 1153
cuagcaauguuuguaacaa

SEQ ID NO: 91835 - RNA, 19 nt, Artificial Sequence
  Description of Artificial Sequence: Synthetic oligonucleotide
  Antisense strand to SEQ ID NO: 91754
uuguuacaaacauugcuag

SEQ ID NO: 91836 - RNA, 19 nt, Artificial Sequence
  Description of Artificial Sequence: Synthetic oligonucleotide
  Sense strand starting at position 834 of SEQ ID NO: 1153
acuagcaauguuuguaaca

SEQ ID NO: 91837 - RNA, 19 nt, Artificial Sequence
  Description of Artificial Sequence: Synthetic oligonucleotide
  Antisense strand to SEQ ID NO: 91756
uguuacaaacauugcuagu

SEQ ID NO: 91838 - RNA, 19 nt, Artificial Sequence
  Description of Artificial Sequence: Synthetic oligonucleotide
  Sense strand starting at position 669 of SEQ ID NO: 1153
guaugagagguguaaauau

SEQ ID NO: 91839 - RNA, 19 nt, Artificial Sequence
  Description of Artificial Sequence: Synthetic oligonucleotide
  Antisense strand to SEQ ID NO: 91758
auauuuacaccucucauac

SEQ ID NO: 91840 - RNA, 19 nt, Artificial Sequence
  Description of Artificial Sequence: Synthetic oligonucleotide
  Sense strand starting at position 667 of SEQ ID NO: 1153
uaguaugagagguguaaau

SEQ ID NO: 91841 - RNA, 19 nt, Artificial Sequence
  Description of Artificial Sequence: Synthetic oligonucleotide
  Antisense strand to SEQ ID NO: 91760
auuuacaccucucauacua

SEQ ID NO: 91842 - RNA, 19 nt, Artificial Sequence
  Description of Artificial Sequence: Synthetic oligonucleotide
  Sense strand starting at position 665 of SEQ ID NO: 1153
gguaguaugagagguguaa

SEQ ID NO: 91843 - RNA, 19 nt, Artificial Sequence
  Description of Artificial Sequence: Synthetic oligonucleotide
  Antisense strand to SEQ ID NO: 91762
uuacaccucucauacuacc

SEQ ID NO: 91844 - RNA, 19 nt, Artificial Sequence
  Description of Artificial Sequence: Synthetic oligonucleotide
  Sense strand starting at position 658 of SEQ ID NO: 1153
uauuuaagguaguaugaga

SEQ ID NO: 91845 - RNA, 19 nt, Artificial Sequence
  Description of Artificial Sequence: Synthetic oligonucleotide
  Antisense strand to SEQ ID NO: 91764
ucucauacuaccuuaaaua

SEQ ID NO: 91846 - RNA, 19 nt, Artificial Sequence
  Description of Artificial Sequence: Synthetic oligonucleotide
  Sense strand starting at position 637 of SEQ ID NO: 1153
ugcaaauacuggcuuaaag

SEQ ID NO: 91847 - RNA, 19 nt, Artificial Sequence
  Description of Artificial Sequence: Synthetic oligonucleotide
  Antisense strand to SEQ ID NO: 91766
cuuuaagccaguauuugca

SEQ ID NO: 91848 - RNA, 19 nt, Artificial Sequence
  Description of Artificial Sequence: Synthetic oligonucleotide
  Sense strand starting at position 624 of SEQ ID NO: 1153
uuuguugcaguguugcaaa

SEQ ID NO: 91849 - RNA, 19 nt, Artificial Sequence
  Description of Artificial Sequence: Synthetic oligonucleotide
  Antisense strand to SEQ ID NO: 91768
uuugcaacacugcaacaaa

SEQ ID NO: 91850 - RNA, 19 nt, Artificial Sequence
  Description of Artificial Sequence: Synthetic oligonucleotide
  Sense strand starting at position 606 of SEQ ID NO: 1153
augcuaaagccauguauuu

SEQ ID NO: 91851 - RNA, 19 nt, Artificial Sequence
  Description of Artificial Sequence: Synthetic oligonucleotide
  Antisense strand to SEQ ID NO: 91770
aaauacauggcuuuagcau

SEQ ID NO: 91852 - RNA, 19 nt, Artificial Sequence
  Description of Artificial Sequence: Synthetic oligonucleotide
  Sense strand starting at position 589 of SEQ ID NO: 1153
uaaagagaauacgugcuau

SEQ ID NO: 91853 - RNA, 19 nt, Artificial Sequence
  Description of Artificial Sequence: Synthetic oligonucleotide
  Antisense strand to SEQ ID NO: 91772
auagcacguauucucuuua

SEQ ID NO: 91854 - RNA, 19 nt, Artificial Sequence
  Description of Artificial Sequence: Synthetic oligonucleotide
  Sense strand starting at position 524 of SEQ ID NO: 1153
auaggaaaggugcaauguu

SEQ ID NO: 91855 - RNA, 19 nt, Artificial Sequence
  Description of Artificial Sequence: Synthetic oligonucleotide
  Antisense strand to SEQ ID NO: 91774
aacauugcaccuuuccuau

SEQ ID NO: 91856 - RNA, 19 nt, Artificial Sequence
  Description of Artificial Sequence: Synthetic oligonucleotide
  Sense strand starting at position 409 of SEQ ID NO: 1153
cugcuauugugcuuaauuu

SEQ ID NO: 91857 - RNA, 19 nt, Artificial Sequence
  Description of Artificial Sequence: Synthetic oligonucleotide
  Antisense strand to SEQ ID NO: 91776
aaauuaagcacaauagcag

SEQ ID NO: 91858 - RNA, 19 nt, Artificial Sequence
  Description of Artificial Sequence: Synthetic oligonucleotide
  Sense strand starting at position 329 of SEQ ID NO: 1153
gguuuaucuguuuaguuaa

SEQ ID NO: 91859 - RNA, 19 nt, Artificial Sequence
  Description of Artificial Sequence: Synthetic oligonucleotide
  Antisense strand to SEQ ID NO: 91778
uuaacuaaacagauaaacc

SEQ ID NO: 91860 - RNA, 19 nt, Artificial Sequence
  Description of Artificial Sequence: Synthetic oligonucleotide
  Sense strand starting at position 308 of SEQ ID NO: 1153
guguguccauuccuaauuu

SEQ ID NO: 91861 - RNA, 19 nt, Artificial Sequence
  Description of Artificial Sequence: Synthetic oligonucleotide
  Antisense strand to SEQ ID NO: 91780
aaauuaggaauggacacac

SEQ ID NO: 91862 - RNA, 19 nt, Artificial Sequence
  Description of Artificial Sequence: Synthetic oligonucleotide
  Sense strand starting at position 306 of SEQ ID NO: 1153
gcguguguccauuccuaau

SEQ ID NO: 91863 - RNA, 19 nt, Artificial Sequence
  Description of Artificial Sequence: Synthetic oligonucleotide
  Antisense strand to SEQ ID NO: 91782
auuaggaauggacacacgc

SEQ ID NO: 91864 - RNA, 19 nt, Artificial Sequence
  Description of Artificial Sequence: Synthetic oligonucleotide
  Sense strand starting at position 274 of SEQ ID NO: 1153
aguacauacucacuguaga

SEQ ID NO: 91865 - RNA, 19 nt, Artificial Sequence
  Description of Artificial Sequence: Synthetic oligonucleotide
  Antisense strand to SEQ ID NO: 91784
ucuacagugaguauguacu

SEQ ID NO: 91866 - RNA, 19 nt, Artificial Sequence
  Description of Artificial Sequence: Synthetic oligonucleotide
  Sense strand starting at position 35 of SEQ ID NO: 1153
aguacaugugggugagaaa

SEQ ID NO: 91867 - RNA, 19 nt, Artificial Sequence
  Description of Artificial Sequence: Synthetic oligonucleotide
  Antisense strand to SEQ ID NO: 91786
uuucucacccacauguacu

SEQ ID NO: 91868 - RNA, 19 nt, Artificial Sequence
  Description of Artificial Sequence: Synthetic oligonucleotide
  Sense strand starting at position 298 of SEQ ID NO: 1154
ugcaguagcccuuacuaca

SEQ ID NO: 91869 - RNA, 19 nt, Artificial Sequence
  Description of Artificial Sequence: Synthetic oligonucleotide
  Antisense strand to SEQ ID NO: 91788
uguaguaagggcuacugca

SEQ ID NO: 91870 - RNA, 19 nt, Artificial Sequence
  Description of Artificial Sequence: Synthetic oligonucleotide
  Sense strand starting at position 351 of SEQ ID NO: 1154
acguuagucgagcauuuaa

SEQ ID NO: 91871 - RNA, 19 nt, Artificial Sequence
  Description of Artificial Sequence: Synthetic oligonucleotide
  Antisense strand to SEQ ID NO: 91790
uuaaaugcucgacuaacgu

SEQ ID NO: 91872 - RNA, 19 nt, Artificial Sequence
  Description of Artificial Sequence: Synthetic oligonucleotide
  Sense strand starting at position 384 of SEQ ID NO: 1154
acuggaaugcaguagguau

SEQ ID NO: 91873 - RNA, 19 nt, Artificial Sequence
  Description of Artificial Sequence: Synthetic oligonucleotide
  Antisense strand to SEQ ID NO: 91792
auaccuacugcauuccagu

SEQ ID NO: 91874 - RNA, 19 nt, Artificial Sequence
  Description of Artificial Sequence: Synthetic oligonucleotide
  Sense strand starting at position 392 of SEQ ID NO: 1154
gcaguagguaugcaauaca

SEQ ID NO: 91875 - RNA, 19 nt, Artificial Sequence
  Description of Artificial Sequence: Synthetic oligonucleotide
  Antisense strand to SEQ ID NO: 91794
uguauugcauaccuacugc

SEQ ID NO: 91876 - RNA, 19 nt, Artificial Sequence
  Description of Artificial Sequence: Synthetic oligonucleotide
  Sense strand starting at position 395 of SEQ ID NO: 1154
guagguaugcaauacaugu

SEQ ID NO: 91877 - RNA, 19 nt, Artificial Sequence
  Description of Artificial Sequence: Synthetic oligonucleotide
  Antisense strand to SEQ ID NO: 91796
acauguauugcauaccuac

SEQ ID NO: 91878 - RNA, 19 nt, Artificial Sequence
  Description of Artificial Sequence: Synthetic oligonucleotide
  Sense strand starting at position 403 of SEQ ID NO: 1154
gcaauacauguuugucaaa

SEQ ID NO: 91879 - RNA, 19 nt, Artificial Sequence
  Description of Artificial Sequence: Synthetic oligonucleotide
  Antisense strand to SEQ ID NO: 91798
uuugacaaacauguauugc

SEQ ID NO: 91880 - RNA, 19 nt, Artificial Sequence
  Description of Artificial Sequence: Synthetic oligonucleotide
  Sense strand starting at position 493 of SEQ ID NO: 1154
gcgcucuuccgaguaacua

SEQ ID NO: 91881 - RNA, 19 nt, Artificial Sequence
  Description of Artificial Sequence: Synthetic oligonucleotide
  Antisense strand to SEQ ID NO: 91800
uaguuacucggaagagcgc

SEQ ID NO: 91882 - RNA, 19 nt, Artificial Sequence
  Description of Artificial Sequence: Synthetic oligonucleotide
  Sense strand starting at position 524 of SEQ ID NO: 1154
ggaacuguguaggcagaau

SEQ ID NO: 91883 - RNA, 19 nt, Artificial Sequence
  Description of Artificial Sequence: Synthetic oligonucleotide
  Antisense strand to SEQ ID NO: 91802
auucugccuacacaguucc

SEQ ID NO: 91884 - RNA, 19 nt, Artificial Sequence
  Description of Artificial Sequence: Synthetic oligonucleotide
  Sense strand starting at position 579 of SEQ ID NO: 1154
cucuaagugucucuuuaga

SEQ ID NO: 91885 - RNA, 19 nt, Artificial Sequence
  Description of Artificial Sequence: Synthetic oligonucleotide
  Antisense strand to SEQ ID NO: 91804
ucuaaagagacacuuagag

SEQ ID NO: 91886 - RNA, 19 nt, Artificial Sequence
  Description of Artificial Sequence: Synthetic oligonucleotide
  Sense strand starting at position 581 of SEQ ID NO: 1154
cuaagugucucuuuagauc

SEQ ID NO: 91887 - RNA, 19 nt, Artificial Sequence
  Description of Artificial Sequence: Synthetic oligonucleotide
  Antisense strand to SEQ ID NO: 91806
gaucuaaagagacacuuag

SEQ ID NO: 91888 - RNA, 19 nt, Artificial Sequence
  Description of Artificial Sequence: Synthetic oligonucleotide
  Sense strand starting at position 588 of SEQ ID NO: 1154
ucucuuuagaucgaaucga

SEQ ID NO: 91889 - RNA, 19 nt, Artificial Sequence
  Description of Artificial Sequence: Synthetic oligonucleotide
  Antisense strand to SEQ ID NO: 91808
ucgauucgaucuaaagaga

SEQ ID NO: 91890 - RNA, 19 nt, Artificial Sequence
  Description of Artificial Sequence: Synthetic oligonucleotide
  Sense strand starting at position 596 of SEQ ID NO: 1154
gaucgaaucgaaggucuuu

SEQ ID NO: 91891 - RNA, 19 nt, Artificial Sequence
  Description of Artificial Sequence: Synthetic oligonucleotide
  Antisense strand to SEQ ID NO: 91810
aaagaccuucgauucgauc

SEQ ID NO: 91892 - RNA, 19 nt, Artificial Sequence
  Description of Artificial Sequence: Synthetic oligonucleotide
  Sense strand starting at position 696 of SEQ ID NO: 1154
cugacaagauauuaugaag

SEQ ID NO: 91893 - RNA, 19 nt, Artificial Sequence
  Description of Artificial Sequence: Synthetic oligonucleotide
  Antisense strand to SEQ ID NO: 91812
cuucauaauaucuugucag

SEQ ID NO: 91894 - RNA, 19 nt, Artificial Sequence
  Description of Artificial Sequence: Synthetic oligonucleotide
  Sense strand starting at position 719 of SEQ ID NO: 1154
gggcaaaugcguuaauaaa

SEQ ID NO: 91895 - RNA, 19 nt, Artificial Sequence
  Description of Artificial Sequence: Synthetic oligonucleotide
  Antisense strand to SEQ ID NO: 91814
uuuauuaacgcauuugccc

SEQ ID NO: 91896 - RNA, 19 nt, Artificial Sequence
  Description of Artificial Sequence: Synthetic oligonucleotide
  Sense strand starting at position 1413 of SEQ ID NO: 1154
aggucugcaccuugaagua

SEQ ID NO: 91897 - RNA, 19 nt, Artificial Sequence
  Description of Artificial Sequence: Synthetic oligonucleotide
  Antisense strand to SEQ ID NO: 91816
uacuucaaggugcagaccu

SEQ ID NO: 91898 - RNA, 19 nt, Artificial Sequence
  Description of Artificial Sequence: Synthetic oligonucleotide
  Sense strand starting at position 2698 of SEQ ID NO: 1154
gccugauucgaaugaccuu

SEQ ID NO: 91899 - RNA, 19 nt, Artificial Sequence
  Description of Artificial Sequence: Synthetic oligonucleotide
  Antisense strand to SEQ ID NO: 91818
aaggucauucgaaucaggc

SEQ ID NO: 91900 - RNA, 19 nt, Artificial Sequence
  Description of Artificial Sequence: Synthetic oligonucleotide
  Sense strand starting at position 2756 of SEQ ID NO: 1154
auaaucuuccuucguggga

SEQ ID NO: 91901 - RNA, 19 nt, Artificial Sequence
  Description of Artificial Sequence: Synthetic oligonucleotide
  Antisense strand to SEQ ID NO: 91820
ucccacgaaggaagauuau

SEQ ID NO: 91902 - RNA, 19 nt, Artificial Sequence
  Description of Artificial Sequence: Synthetic oligonucleotide
  Sense strand starting at position 2757 of SEQ ID NO: 1154
uaaucuuccuucgugggaa

SEQ ID NO: 91903 - RNA, 19 nt, Artificial Sequence
  Description of Artificial Sequence: Synthetic oligonucleotide
  Antisense strand to SEQ ID NO: 91822
uucccacgaaggaagauua

SEQ ID NO: 91904 - RNA, 19 nt, Artificial Sequence
  Description of Artificial Sequence: Synthetic oligonucleotide
  Sense strand starting at position 2835 of SEQ ID NO: 1154
guaggcaguacagaguuau

SEQ ID NO: 91905 - RNA, 19 nt, Artificial Sequence
  Description of Artificial Sequence: Synthetic oligonucleotide
  Antisense strand to SEQ ID NO: 91824
auaacucuguacugccuac

SEQ ID NO: 91906 - RNA, 19 nt, Artificial Sequence
  Description of Artificial Sequence: Synthetic oligonucleotide
  Sense strand starting at position 2875 of SEQ ID NO: 1154
aaaguucuucgggaaguuu

SEQ ID NO: 91907 - RNA, 19 nt, Artificial Sequence
  Description of Artificial Sequence: Synthetic oligonucleotide
  Antisense strand to SEQ ID NO: 91826
aaacuucccgaagaacuuu

SEQ ID NO: 91908 - RNA, 19 nt, Artificial Sequence
  Description of Artificial Sequence: Synthetic oligonucleotide
  Sense strand starting at position 2912 of SEQ ID NO: 1154
agcugcuucccauaagauc

SEQ ID NO: 91909 - RNA, 19 nt, Artificial Sequence
  Description of Artificial Sequence: Synthetic oligonucleotide
  Antisense strand to SEQ ID NO: 91828
gaucuuaugggaagcagcu

SEQ ID NO: 91910 - RNA, 19 nt, Artificial Sequence
  Description of Artificial Sequence: Synthetic oligonucleotide
  Sense strand starting at position 2923 of SEQ ID NO: 1154
auaagaucuuuguuaccug

SEQ ID NO: 91911 - RNA, 19 nt, Artificial Sequence
  Description of Artificial Sequence: Synthetic oligonucleotide
  Antisense strand to SEQ ID NO: 91830
cagguaacaaagaucuuau

SEQ ID NO: 91912 - RNA, 19 nt, Artificial Sequence
  Description of Artificial Sequence: Synthetic oligonucleotide
  Sense strand starting at position 2926 of SEQ ID NO: 1154
agaucuuuguuaccugaga

SEQ ID NO: 91913 - RNA, 19 nt, Artificial Sequence
  Description of Artificial Sequence: Synthetic oligonucleotide
  Antisense strand to SEQ ID NO: 91832
ucucagguaacaaagaucu

SEQ ID NO: 91914 - RNA, 19 nt, Artificial Sequence
  Description of Artificial Sequence: Synthetic oligonucleotide
  Sense strand starting at position 2927 of SEQ ID NO: 1154
gaucuuuguuaccugagag

SEQ ID NO: 91915 - RNA, 19 nt, Artificial Sequence
  Description of Artificial Sequence: Synthetic oligonucleotide
  Antisense strand to SEQ ID NO: 91834
cucucagguaacaaagauc

SEQ ID NO: 91916 - RNA, 19 nt, Artificial Sequence
  Description of Artificial Sequence: Synthetic oligonucleotide
  Sense strand starting at position 2964 of SEQ ID NO: 1154
gggcaaggacuccaaguuu

SEQ ID NO: 91917 - RNA, 19 nt, Artificial Sequence
  Description of Artificial Sequence: Synthetic oligonucleotide
  Antisense strand to SEQ ID NO: 91836
aaacuuggaguccuugccc

SEQ ID NO: 91918 - RNA, 19 nt, Artificial Sequence
  Description of Artificial Sequence: Synthetic oligonucleotide
  Sense strand starting at position 3018 of SEQ ID NO: 1154
uuuauauauggauggccaa

SEQ ID NO: 91919 - RNA, 19 nt, Artificial Sequence
  Description of Artificial Sequence: Synthetic oligonucleotide
  Antisense strand to SEQ ID NO: 91838
uuggccauccauauauaaa

SEQ ID NO: 91920 - RNA, 19 nt, Artificial Sequence
  Description of Artificial Sequence: Synthetic oligonucleotide
  Sense strand starting at position 3088 of SEQ ID NO: 1154
uuggacacaugaguauuaa

SEQ ID NO: 91921 - RNA, 19 nt, Artificial Sequence
  Description of Artificial Sequence: Synthetic oligonucleotide
  Antisense strand to SEQ ID NO: 91840
uuaauacucauguguccaa

SEQ ID NO: 91922 - RNA, 19 nt, Artificial Sequence
  Description of Artificial Sequence: Synthetic oligonucleotide
  Sense strand starting at position 3132 of SEQ ID NO: 1154
ugcgacuuaaggcagauua

SEQ ID NO: 91923 - RNA, 19 nt, Artificial Sequence
  Description of Artificial Sequence: Synthetic oligonucleotide
  Antisense strand to SEQ ID NO: 91842
uaaucugccuuaagucgca

SEQ ID NO: 91924 - RNA, 19 nt, Artificial Sequence
  Description of Artificial Sequence: Synthetic oligonucleotide
  Sense strand starting at position 3134 of SEQ ID NO: 1154
cgacuuaaggcagauuacu

SEQ ID NO: 91925 - RNA, 19 nt, Artificial Sequence
  Description of Artificial Sequence: Synthetic oligonucleotide
  Antisense strand to SEQ ID NO: 91844
aguaaucugccuuaagucg

SEQ ID NO: 91926 - RNA, 19 nt, Artificial Sequence
  Description of Artificial Sequence: Synthetic oligonucleotide
  Sense strand starting at position 3183 of SEQ ID NO: 1154
aagugaaagguuugaagua

SEQ ID NO: 91927 - RNA, 19 nt, Artificial Sequence
  Description of Artificial Sequence: Synthetic oligonucleotide
  Antisense strand to SEQ ID NO: 91846
uacuucaaaccuuucacuu

SEQ ID NO: 91928 - RNA, 19 nt, Artificial Sequence
  Description of Artificial Sequence: Synthetic oligonucleotide
  Sense strand starting at position 3199 of SEQ ID NO: 1154
guaguagagcuccaagauc

SEQ ID NO: 91929 - RNA, 19 nt, Artificial Sequence
  Description of Artificial Sequence: Synthetic oligonucleotide
  Antisense strand to SEQ ID NO: 91848
gaucuuggagcucuacuac

SEQ ID NO: 91930 - RNA, 19 nt, Artificial Sequence
  Description of Artificial Sequence: Synthetic oligonucleotide
  Sense strand starting at position 3352 of SEQ ID NO: 1154
uguauacacuaucagauuu

SEQ ID NO: 91931 - RNA, 19 nt, Artificial Sequence
  Description of Artificial Sequence: Synthetic oligonucleotide
  Antisense strand to SEQ ID NO: 91850
aaaucugauaguguauaca

SEQ ID NO: 91932 - RNA, 19 nt, Artificial Sequence
  Description of Artificial Sequence: Synthetic oligonucleotide
  Sense strand starting at position 3377 of SEQ ID NO: 1154
gauuauguuccagggucuu

SEQ ID NO: 91933 - RNA, 19 nt, Artificial Sequence
  Description of Artificial Sequence: Synthetic oligonucleotide
  Antisense strand to SEQ ID NO: 91852
aagacccuggaacauaauc

SEQ ID NO: 91934 - RNA, 19 nt, Artificial Sequence
  Description of Artificial Sequence: Synthetic oligonucleotide
  Sense strand starting at position 3459 of SEQ ID NO: 1154
cuagaaauccuucgaaucc

SEQ ID NO: 91935 - RNA, 19 nt, Artificial Sequence
  Description of Artificial Sequence: Synthetic oligonucleotide
  Antisense strand to SEQ ID NO: 91854
ggauucgaaggauuucuag

SEQ ID NO: 91936 - RNA, 19 nt, Artificial Sequence
  Description of Artificial Sequence: Synthetic oligonucleotide
  Sense strand starting at position 3511 of SEQ ID NO: 1154
gcagaaagcuccuuuaauu

SEQ ID NO: 91937 - RNA, 19 nt, Artificial Sequence
  Description of Artificial Sequence: Synthetic oligonucleotide
  Antisense strand to SEQ ID NO: 91856
aauuaaaggagcuuucugc

SEQ ID NO: 91938 - RNA, 19 nt, Artificial Sequence
  Description of Artificial Sequence: Synthetic oligonucleotide
  Sense strand starting at position 3587 of SEQ ID NO: 1154
uuaagagaauaugcaucua

SEQ ID NO: 91939 - RNA, 19 nt, Artificial Sequence
  Description of Artificial Sequence: Synthetic oligonucleotide
  Antisense strand to SEQ ID NO: 91858
uagaugcauauucucuuaa

SEQ ID NO: 91940 - RNA, 19 nt, Artificial Sequence
  Description of Artificial Sequence: Synthetic oligonucleotide
  Sense strand starting at position 3599 of SEQ ID NO: 1154
gcaucuaguuaaucagauu

SEQ ID NO: 91941 - RNA, 19 nt, Artificial Sequence
  Description of Artificial Sequence: Synthetic oligonucleotide
  Antisense strand to SEQ ID NO: 91860
aaucugauuaacuagaugc

SEQ ID NO: 91942 - RNA, 19 nt, Artificial Sequence
  Description of Artificial Sequence: Synthetic oligonucleotide
  Sense strand starting at position 3646 of SEQ ID NO: 1154
acagaaucuugugcacaca

SEQ ID NO: 91943 - RNA, 19 nt, Artificial Sequence
  Description of Artificial Sequence: Synthetic oligonucleotide
  Antisense strand to SEQ ID NO: 91862
ugugugcacaagauucugu

SEQ ID NO: 91944 - RNA, 19 nt, Artificial Sequence
  Description of Artificial Sequence: Synthetic oligonucleotide
  Sense strand starting at position 3674 of SEQ ID NO: 1154
ugugcuauugaaugacuau

SEQ ID NO: 91945 - RNA, 19 nt, Artificial Sequence
  Description of Artificial Sequence: Synthetic oligonucleotide
  Antisense strand to SEQ ID NO: 91864
auagucauucaauagcaca

SEQ ID NO: 91946 - RNA, 19 nt, Artificial Sequence
  Description of Artificial Sequence: Synthetic oligonucleotide
  Sense strand starting at position 3701 of SEQ ID NO: 1154
uuacgauggccugaacaga

SEQ ID NO: 91947 - RNA, 19 nt, Artificial Sequence
  Description of Artificial Sequence: Synthetic oligonucleotide
  Antisense strand to SEQ ID NO: 91866
ucuguucaggccaucguaa

SEQ ID NO: 91948 - RNA, 19 nt, Artificial Sequence
  Description of Artificial Sequence: Synthetic oligonucleotide
  Sense strand starting at position 3966 of SEQ ID NO: 1155
ccugcucuaccaggaaaga

SEQ ID NO: 91949 - RNA, 19 nt, Artificial Sequence
  Description of Artificial Sequence: Synthetic oligonucleotide
  Antisense strand to SEQ ID NO: 91868
ucuuuccugguagagcagg

SEQ ID NO: 91950 - RNA, 19 nt, Artificial Sequence
  Description of Artificial Sequence: Synthetic oligonucleotide
  Sense strand starting at position 3829 of SEQ ID NO: 1155
gccacuuugguuuaaggau

SEQ ID NO: 91951 - RNA, 19 nt, Artificial Sequence
  Description of Artificial Sequence: Synthetic oligonucleotide
  Antisense strand to SEQ ID NO: 91870
auccuuaaaccaaaguggc

SEQ ID NO: 91952 - RNA, 19 nt, Artificial Sequence
  Description of Artificial Sequence: Synthetic oligonucleotide
  Sense strand starting at position 3743 of SEQ ID NO: 1155
acugcugaugcuuggagau

SEQ ID NO: 91953 - RNA, 19 nt, Artificial Sequence
  Description of Artificial Sequence: Synthetic oligonucleotide
  Antisense strand to SEQ ID NO: 91872
aucuccaagcaucagcagu

SEQ ID NO: 91954 - RNA, 19 nt, Artificial Sequence
  Description of Artificial Sequence: Synthetic oligonucleotide
  Sense strand starting at position 3631 of SEQ ID NO: 1155
guugauucaguggaguauu

SEQ ID NO: 91955 - RNA, 19 nt, Artificial Sequence
  Description of Artificial Sequence: Synthetic oligonucleotide
  Antisense strand to SEQ ID NO: 91874
aauacuccacugaaucaac

SEQ ID NO: 91956 - RNA, 19 nt, Artificial Sequence
  Description of Artificial Sequence: Synthetic oligonucleotide
  Sense strand starting at position 3628 of SEQ ID NO: 1155
uuuguugauucaguggagu

SEQ ID NO: 91957 - RNA, 19 nt, Artificial Sequence
  Description of Artificial Sequence: Synthetic oligonucleotide
  Antisense strand to SEQ ID NO: 91876
acuccacugaaucaacaaa

SEQ ID NO: 91958 - RNA, 19 nt, Artificial Sequence
  Description of Artificial Sequence: Synthetic oligonucleotide
  Sense strand starting at position 3560 of SEQ ID NO: 1155
augauccuugcucaguuua

SEQ ID NO: 91959 - RNA, 19 nt, Artificial Sequence
  Description of Artificial Sequence: Synthetic oligonucleotide
  Antisense strand to SEQ ID NO: 91878
uaaacugagcaaggaucau

SEQ ID NO: 91960 - RNA, 19 nt, Artificial Sequence
  Description of Artificial Sequence: Synthetic oligonucleotide
  Sense strand starting at position 3403 of SEQ ID NO: 1155
cccucauucuagcugagau

SEQ ID NO: 91961 - RNA, 19 nt, Artificial Sequence
  Description of Artificial Sequence: Synthetic oligonucleotide
  Antisense strand to SEQ ID NO: 91880
aucucagcuagaaugaggg

SEQ ID NO: 91962 - RNA, 19 nt, Artificial Sequence
  Description of Artificial Sequence: Synthetic oligonucleotide
  Sense strand starting at position 3383 of SEQ ID NO: 1155
guuggauucugggccacuu

SEQ ID NO: 91963 - RNA, 19 nt, Artificial Sequence
  Description of Artificial Sequence: Synthetic oligonucleotide
  Antisense strand to SEQ ID NO: 91882
aaguggcccagaauccaac

SEQ ID NO: 91964 - RNA, 19 nt, Artificial Sequence
  Description of Artificial Sequence: Synthetic oligonucleotide
  Sense strand starting at position 3348 of SEQ ID NO: 1155
auaggacuugccugucaca

SEQ ID NO: 91965 - RNA, 19 nt, Artificial Sequence
  Description of Artificial Sequence: Synthetic oligonucleotide
  Antisense strand to SEQ ID NO: 91884
ugugacaggcaaguccuau

SEQ ID NO: 91966 - RNA, 19 nt, Artificial Sequence
  Description of Artificial Sequence: Synthetic oligonucleotide
  Sense strand starting at position 3317 of SEQ ID NO: 1155
acuuacauuuaaggaaaga

SEQ ID NO: 91967 - RNA, 19 nt, Artificial Sequence
  Description of Artificial Sequence: Synthetic oligonucleotide
  Antisense strand to SEQ ID NO: 91886
ucuuuccuuaaauguaagu

SEQ ID NO: 91968 - RNA, 19 nt, Artificial Sequence
  Description of Artificial Sequence: Synthetic oligonucleotide
  Sense strand starting at position 3292 of SEQ ID NO: 1155
gaaacagucugguccaaau

SEQ ID NO: 91969 - RNA, 19 nt, Artificial Sequence
  Description of Artificial Sequence: Synthetic oligonucleotide
  Antisense strand to SEQ ID NO: 91888
auuuggaccagacuguuuc

SEQ ID NO: 91970 - RNA, 19 nt, Artificial Sequence
  Description of Artificial Sequence: Synthetic oligonucleotide
  Sense strand starting at position 3222 of SEQ ID NO: 1155
agagccauuguguacuuau

SEQ ID NO: 91971 - RNA, 19 nt, Artificial Sequence
  Description of Artificial Sequence: Synthetic oligonucleotide
  Antisense strand to SEQ ID NO: 91890
auaaguacacaauggcucu

SEQ ID NO: 91972 - RNA, 19 nt, Artificial Sequence
  Description of Artificial Sequence: Synthetic oligonucleotide
  Sense strand starting at position 3221 of SEQ ID NO: 1155
gagagccauuguguacuua

SEQ ID NO: 91973 - RNA, 19 nt, Artificial Sequence
  Description of Artificial Sequence: Synthetic oligonucleotide
  Antisense strand to SEQ ID NO: 91892
uaaguacacaauggcucuc

SEQ ID NO: 91974 - RNA, 19 nt, Artificial Sequence
  Description of Artificial Sequence: Synthetic oligonucleotide
  Sense strand starting at position 3071 of SEQ ID NO: 1155
cugguuuauuuauagagac

SEQ ID NO: 91975 - RNA, 19 nt, Artificial Sequence
  Description of Artificial Sequence: Synthetic oligonucleotide
  Antisense strand to SEQ ID NO: 91894
gucucuauaaauaaaccag

SEQ ID NO: 91976 - RNA, 19 nt, Artificial Sequence
  Description of Artificial Sequence: Synthetic oligonucleotide
  Sense strand starting at position 3061 of SEQ ID NO: 1155
ucuuuacucccugguuuau

SEQ ID NO: 91977 - RNA, 19 nt, Artificial Sequence
  Description of Artificial Sequence: Synthetic oligonucleotide
  Antisense strand to SEQ ID NO: 91896
auaaaccagggaguaaaga

SEQ ID NO: 91978 - RNA, 19 nt, Artificial Sequence
  Description of Artificial Sequence: Synthetic oligonucleotide
  Sense strand starting at position 3028 of SEQ ID NO: 1155
auagcaacgcuuuacugaa

SEQ ID NO: 91979 - RNA, 19 nt, Artificial Sequence
  Description of Artificial Sequence: Synthetic oligonucleotide
  Antisense strand to SEQ ID NO: 91898
uucaguaaagcguugcuau

SEQ ID NO: 91980 - RNA, 19 nt, Artificial Sequence
  Description of Artificial Sequence: Synthetic oligonucleotide
  Sense strand starting at position 2855 of SEQ ID NO: 1155
cucacuaaccaguguuaug

SEQ ID NO: 91981 - RNA, 19 nt, Artificial Sequence
  Description of Artificial Sequence: Synthetic oligonucleotide
  Antisense strand to SEQ ID NO: 91900
cauaacacugguuagugag

SEQ ID NO: 91982 - RNA, 19 nt, Artificial Sequence
  Description of Artificial Sequence: Synthetic oligonucleotide
  Sense strand starting at position 2826 of SEQ ID NO: 1155
aguugcaaucgaugggaga

SEQ ID NO: 91983 - RNA, 19 nt, Artificial Sequence
  Description of Artificial Sequence: Synthetic oligonucleotide
  Antisense strand to SEQ ID NO: 91902
ucucccaucgauugcaacu

SEQ ID NO: 91984 - RNA, 19 nt, Artificial Sequence
  Description of Artificial Sequence: Synthetic oligonucleotide
  Sense strand starting at position 2760 of SEQ ID NO: 1155
cccugagccuuccugagaa

SEQ ID NO: 91985 - RNA, 19 nt, Artificial Sequence
  Description of Artificial Sequence: Synthetic oligonucleotide
  Antisense strand to SEQ ID NO: 91904
uucucaggaaggcucaggg

SEQ ID NO: 91986 - RNA, 19 nt, Artificial Sequence
  Description of Artificial Sequence: Synthetic oligonucleotide
  Sense strand starting at position 2635 of SEQ ID NO: 1155
uccugagcccuccaaguaa

SEQ ID NO: 91987 - RNA, 19 nt, Artificial Sequence
  Description of Artificial Sequence: Synthetic oligonucleotide
  Antisense strand to SEQ ID NO: 91906
uuacuuggagggcucagga

SEQ ID NO: 91988 - RNA, 19 nt, Artificial Sequence
  Description of Artificial Sequence: Synthetic oligonucleotide
  Sense strand starting at position 2584 of SEQ ID NO: 1155
agagcuuucccagaguaac

SEQ ID NO: 91989 - RNA, 19 nt, Artificial Sequence
  Description of Artificial Sequence: Synthetic oligonucleotide
  Antisense strand to SEQ ID NO: 91908
guuacucugggaaagcucu

SEQ ID NO: 91990 - RNA, 19 nt, Artificial Sequence
  Description of Artificial Sequence: Synthetic oligonucleotide
  Sense strand starting at position 2581 of SEQ ID NO: 1155
cacagagcuuucccagagu

SEQ ID NO: 91991 - RNA, 19 nt, Artificial Sequence
  Description of Artificial Sequence: Synthetic oligonucleotide
  Antisense strand to SEQ ID NO: 91910
acucugggaaagcucugug

SEQ ID NO: 91992 - RNA, 19 nt, Artificial Sequence
  Description of Artificial Sequence: Synthetic oligonucleotide
  Sense strand starting at position 1545 of SEQ ID NO: 1155
aggauuaaguuucccaaug

SEQ ID NO: 91993 - RNA, 19 nt, Artificial Sequence
  Description of Artificial Sequence: Synthetic oligonucleotide
  Antisense strand to SEQ ID NO: 91912
cauugggaaacuuaauccu

SEQ ID NO: 91994 - RNA, 19 nt, Artificial Sequence
  Description of Artificial Sequence: Synthetic oligonucleotide
  Sense strand starting at position 1159 of SEQ ID NO: 1155
gauaucuuugggugcaaau

SEQ ID NO: 91995 - RNA, 19 nt, Artificial Sequence
  Description of Artificial Sequence: Synthetic oligonucleotide
  Antisense strand to SEQ ID NO: 91914
auuugcacccaaagauauc

SEQ ID NO: 91996 - RNA, 19 nt, Artificial Sequence
  Description of Artificial Sequence: Synthetic oligonucleotide
  Sense strand starting at position 1158 of SEQ ID NO: 1155
ggauaucuuugggugcaaa

SEQ ID NO: 91997 - RNA, 19 nt, Artificial Sequence
  Description of Artificial Sequence: Synthetic oligonucleotide
  Antisense strand to SEQ ID NO: 91916
uuugcacccaaagauaucc

SEQ ID NO: 91998 - RNA, 19 nt, Artificial Sequence
  Description of Artificial Sequence: Synthetic oligonucleotide
  Sense strand starting at position 1134 of SEQ ID NO: 1155
auguuuauagcagauguua

SEQ ID NO: 91999 - RNA, 19 nt, Artificial Sequence
  Description of Artificial Sequence: Synthetic oligonucleotide
  Antisense strand to SEQ ID NO: 91918
uaacaucugcuauaaacau

SEQ ID NO: 92000 - RNA, 19 nt, Artificial Sequence
  Description of Artificial Sequence: Synthetic oligonucleotide
  Sense strand starting at position 1074 of SEQ ID NO: 1155
gcucacauacucggauaaa

SEQ ID NO: 92001 - RNA, 19 nt, Artificial Sequence
  Description of Artificial Sequence: Synthetic oligonucleotide
  Antisense strand to SEQ ID NO: 91920
uuuauccgaguaugugagc

SEQ ID NO: 92002 - RNA, 19 nt, Artificial Sequence
  Description of Artificial Sequence: Synthetic oligonucleotide
  Sense strand starting at position 998 of SEQ ID NO: 1155
aguaaaccauguuuacuaa

SEQ ID NO: 92003 - RNA, 19 nt, Artificial Sequence
  Description of Artificial Sequence: Synthetic oligonucleotide
  Antisense strand to SEQ ID NO: 91922
uuaguaaacaugguuuacu

SEQ ID NO: 92004 - RNA, 19 nt, Artificial Sequence
  Description of Artificial Sequence: Synthetic oligonucleotide
  Sense strand starting at position 995 of SEQ ID NO: 1155
ccaaguaaaccauguuuac

SEQ ID NO: 92005 - RNA, 19 nt, Artificial Sequence
  Description of Artificial Sequence: Synthetic oligonucleotide
  Antisense strand to SEQ ID NO: 91924
guaaacaugguuuacuugg

SEQ ID NO: 92006 - RNA, 19 nt, Artificial Sequence
  Description of Artificial Sequence: Synthetic oligonucleotide
  Sense strand starting at position 984 of SEQ ID NO: 1155
gucgacacucuccaaguaa

SEQ ID NO: 92007 - RNA, 19 nt, Artificial Sequence
  Description of Artificial Sequence: Synthetic oligonucleotide
  Antisense strand to SEQ ID NO: 91926
uuacuuggagagugucgac

SEQ ID NO: 92008 - RNA, 19 nt, Artificial Sequence
  Description of Artificial Sequence: Synthetic oligonucleotide
  Sense strand starting at position 910 of SEQ ID NO: 1155
ucugaucauguguaguacu

SEQ ID NO: 92009 - RNA, 19 nt, Artificial Sequence
  Description of Artificial Sequence: Synthetic oligonucleotide
  Antisense strand to SEQ ID NO: 91928
aguacuacacaugaucaga

SEQ ID NO: 92010 - RNA, 19 nt, Artificial Sequence
  Description of Artificial Sequence: Synthetic oligonucleotide
  Sense strand starting at position 903 of SEQ ID NO: 1155
gguaguuucugaucaugug

SEQ ID NO: 92011 - RNA, 19 nt, Artificial Sequence
  Description of Artificial Sequence: Synthetic oligonucleotide
  Antisense strand to SEQ ID NO: 91930
cacaugaucagaaacuacc

SEQ ID NO: 92012 - RNA, 19 nt, Artificial Sequence
  Description of Artificial Sequence: Synthetic oligonucleotide
  Sense strand starting at position 883 of SEQ ID NO: 1155
cauaaacgugaucaugauu

SEQ ID NO: 92013 - RNA, 19 nt, Artificial Sequence
  Description of Artificial Sequence: Synthetic oligonucleotide
  Antisense strand to SEQ ID NO: 91932
aaucaugaucacguuuaug

SEQ ID NO: 92014 - RNA, 19 nt, Artificial Sequence
  Description of Artificial Sequence: Synthetic oligonucleotide
  Sense strand starting at position 882 of SEQ ID NO: 1155
acauaaacgugaucaugau

SEQ ID NO: 92015 - RNA, 19 nt, Artificial Sequence
  Description of Artificial Sequence: Synthetic oligonucleotide
  Antisense strand to SEQ ID NO: 91934
aucaugaucacguuuaugu

SEQ ID NO: 92016 - RNA, 19 nt, Artificial Sequence
  Description of Artificial Sequence: Synthetic oligonucleotide
  Sense strand starting at position 755 of SEQ ID NO: 1155
aagucucuggcauacagua

SEQ ID NO: 92017 - RNA, 19 nt, Artificial Sequence
  Description of Artificial Sequence: Synthetic oligonucleotide
  Antisense strand to SEQ ID NO: 91936
uacuguaugccagagacuu

SEQ ID NO: 92018 - RNA, 19 nt, Artificial Sequence
  Description of Artificial Sequence: Synthetic oligonucleotide
  Sense strand starting at position 750 of SEQ ID NO: 1155
auccuaagucucuggcaua

SEQ ID NO: 92019 - RNA, 19 nt, Artificial Sequence
  Description of Artificial Sequence: Synthetic oligonucleotide
  Antisense strand to SEQ ID NO: 91938
uaugccagagacuuaggau

SEQ ID NO: 92020 - RNA, 19 nt, Artificial Sequence
  Description of Artificial Sequence: Synthetic oligonucleotide
  Sense strand starting at position 663 of SEQ ID NO: 1155
cgcaucugagcccaacaua

SEQ ID NO: 92021 - RNA, 19 nt, Artificial Sequence
  Description of Artificial Sequence: Synthetic oligonucleotide
  Antisense strand to SEQ ID NO: 91940
uauguugggcucagaugcg

SEQ ID NO: 92022 - RNA, 19 nt, Artificial Sequence
  Description of Artificial Sequence: Synthetic oligonucleotide
  Sense strand starting at position 600 of SEQ ID NO: 1155
ggaauuagagcuugaacac

SEQ ID NO: 92023 - RNA, 19 nt, Artificial Sequence
  Description of Artificial Sequence: Synthetic oligonucleotide
  Antisense strand to SEQ ID NO: 91942
guguucaagcucuaauucc

SEQ ID NO: 92024 - RNA, 19 nt, Artificial Sequence
  Description of Artificial Sequence: Synthetic oligonucleotide
  Sense strand starting at position 459 of SEQ ID NO: 1155
augucucuaugucuaaauu

SEQ ID NO: 92025 - RNA, 19 nt, Artificial Sequence
  Description of Artificial Sequence: Synthetic oligonucleotide
  Antisense strand to SEQ ID NO: 91944
aauuuagacauagagacau

SEQ ID NO: 92026 - RNA, 19 nt, Artificial Sequence
  Description of Artificial Sequence: Synthetic oligonucleotide
  Sense strand starting at position 457 of SEQ ID NO: 1155
guaugucucuaugucuaaa

SEQ ID NO: 92027 - RNA, 19 nt, Artificial Sequence
  Description of Artificial Sequence: Synthetic oligonucleotide
  Antisense strand to SEQ ID NO: 91946
uuuagacauagagacauac

SEQ ID NO: 92028 - RNA, 19 nt, Artificial Sequence
  Description of Artificial Sequence: Synthetic oligonucleotide
  Sense strand starting at position 3967 of SEQ ID NO: 1156
ugaguauucccauguuacc

SEQ ID NO: 92029 - RNA, 19 nt, Artificial Sequence
  Description of Artificial Sequence: Synthetic oligonucleotide
  Antisense strand to SEQ ID NO: 91948
gguaacaugggaauacuca

SEQ ID NO: 92030 - RNA, 19 nt, Artificial Sequence
  Description of Artificial Sequence: Synthetic oligonucleotide
  Sense strand starting at position 3949 of SEQ ID NO: 1156
cuuugaguugcuuaucucu

SEQ ID NO: 92031 - RNA, 19 nt, Artificial Sequence
  Description of Artificial Sequence: Synthetic oligonucleotide
  Antisense strand to SEQ ID NO: 91950
agagauaagcaacucaaag

SEQ ID NO: 92032 - RNA, 19 nt, Artificial Sequence
  Description of Artificial Sequence: Synthetic oligonucleotide
  Sense strand starting at position 3913 of SEQ ID NO: 1156
gcuaauaugcuguauaaac

SEQ ID NO: 92033 - RNA, 19 nt, Artificial Sequence
  Description of Artificial Sequence: Synthetic oligonucleotide
  Antisense strand to SEQ ID NO: 91952
guuuauacagcauauuagc

SEQ ID NO: 92034 - RNA, 19 nt, Artificial Sequence
  Description of Artificial Sequence: Synthetic oligonucleotide
  Sense strand starting at position 3898 of SEQ ID NO: 1156
auuuauuguuccuuggcua

SEQ ID NO: 92035 - RNA, 19 nt, Artificial Sequence
  Description of Artificial Sequence: Synthetic oligonucleotide
  Antisense strand to SEQ ID NO: 91954
uagccaaggaacaauaaau

SEQ ID NO: 92036 - RNA, 19 nt, Artificial Sequence
  Description of Artificial Sequence: Synthetic oligonucleotide
  Sense strand starting at position 3698 of SEQ ID NO: 1156
ccugcucuaccaggaaaga

SEQ ID NO: 92037 - RNA, 19 nt, Artificial Sequence
  Description of Artificial Sequence: Synthetic oligonucleotide
  Antisense strand to SEQ ID NO: 91956
ucuuuccugguagagcagg

SEQ ID NO: 92038 - RNA, 19 nt, Artificial Sequence
  Description of Artificial Sequence: Synthetic oligonucleotide
  Sense strand starting at position 3561 of SEQ ID NO: 1156
gccacuuugguuuaaggau

SEQ ID NO: 92039 - RNA, 19 nt, Artificial Sequence
  Description of Artificial Sequence: Synthetic oligonucleotide
  Antisense strand to SEQ ID NO: 91958
auccuuaaaccaaaguggc

SEQ ID NO: 92040 - RNA, 19 nt, Artificial Sequence
  Description of Artificial Sequence: Synthetic oligonucleotide
  Sense strand starting at position 3475 of SEQ ID NO: 1156
acugcugaugcuuggagau

SEQ ID NO: 92041 - RNA, 19 nt, Artificial Sequence
  Description of Artificial Sequence: Synthetic oligonucleotide
  Antisense strand to SEQ ID NO: 91960
aucuccaagcaucagcagu

SEQ ID NO: 92042 - RNA, 19 nt, Artificial Sequence
  Description of Artificial Sequence: Synthetic oligonucleotide
  Sense strand starting at position 3363 of SEQ ID NO: 1156
guugauucaguggaguauu

SEQ ID NO: 92043 - RNA, 19 nt, Artificial Sequence
  Description of Artificial Sequence: Synthetic oligonucleotide
  Antisense strand to SEQ ID NO: 91962
aauacuccacugaaucaac

SEQ ID NO: 92044 - RNA, 19 nt, Artificial Sequence
  Description of Artificial Sequence: Synthetic oligonucleotide
  Sense strand starting at position 3292 of SEQ ID NO: 1156
augauccuugcucaguuua

SEQ ID NO: 92045 - RNA, 19 nt, Artificial Sequence
  Description of Artificial Sequence: Synthetic oligonucleotide
  Antisense strand to SEQ ID NO: 91964
uaaacugagcaaggaucau

SEQ ID NO: 92046 - RNA, 19 nt, Artificial Sequence
  Description of Artificial Sequence: Synthetic oligonucleotide
  Sense strand starting at position 3135 of SEQ ID NO: 1156
cccucauucuagcugagau

SEQ ID NO: 92047 - RNA, 19 nt, Artificial Sequence
  Description of Artificial Sequence: Synthetic oligonucleotide
  Antisense strand to SEQ ID NO: 91966
aucucagcuagaaugaggg

SEQ ID NO: 92048 - RNA, 19 nt, Artificial Sequence
  Description of Artificial Sequence: Synthetic oligonucleotide
  Sense strand starting at position 3115 of SEQ ID NO: 1156
guuggauucugggccacuu

SEQ ID NO: 92049 - RNA, 19 nt, Artificial Sequence
  Description of Artificial Sequence: Synthetic oligonucleotide
  Antisense strand to SEQ ID NO: 91968
aaguggcccagaauccaac

SEQ ID NO: 92050 - RNA, 19 nt, Artificial Sequence
  Description of Artificial Sequence: Synthetic oligonucleotide
  Sense strand starting at position 3080 of SEQ ID NO: 1156
auaggacuugccugucaca

SEQ ID NO: 92051 - RNA, 19 nt, Artificial Sequence
  Description of Artificial Sequence: Synthetic oligonucleotide
  Antisense strand to SEQ ID NO: 91970
ugugacaggcaaguccuau

SEQ ID NO: 92052 - RNA, 19 nt, Artificial Sequence
  Description of Artificial Sequence: Synthetic oligonucleotide
  Sense strand starting at position 3049 of SEQ ID NO: 1156
acuuacauuuaaggaaaga

SEQ ID NO: 92053 - RNA, 19 nt, Artificial Sequence
  Description of Artificial Sequence: Synthetic oligonucleotide
  Antisense strand to SEQ ID NO: 91972
ucuuuccuuaaauguaagu

SEQ ID NO: 92054 - RNA, 19 nt, Artificial Sequence
  Description of Artificial Sequence: Synthetic oligonucleotide
  Sense strand starting at position 3024 of SEQ ID NO: 1156
gaaacagucugguccaaau

SEQ ID NO: 92055 - RNA, 19 nt, Artificial Sequence
  Description of Artificial Sequence: Synthetic oligonucleotide
  Antisense strand to SEQ ID NO: 91974
auuuggaccagacuguuuc

SEQ ID NO: 92056 - RNA, 19 nt, Artificial Sequence
  Description of Artificial Sequence: Synthetic oligonucleotide
  Sense strand starting at position 2954 of SEQ ID NO: 1156
agagccauuguguacuuau

SEQ ID NO: 92057 - RNA, 19 nt, Artificial Sequence
  Description of Artificial Sequence: Synthetic oligonucleotide
  Antisense strand to SEQ ID NO: 91976
auaaguacacaauggcucu

SEQ ID NO: 92058 - RNA, 19 nt, Artificial Sequence
  Description of Artificial Sequence: Synthetic oligonucleotide
  Sense strand starting at position 2953 of SEQ ID NO: 1156
gagagccauuguguacuua

SEQ ID NO: 92059 - RNA, 19 nt, Artificial Sequence
  Description of Artificial Sequence: Synthetic oligonucleotide
  Antisense strand to SEQ ID NO: 91978
uaaguacacaauggcucuc

SEQ ID NO: 92060 - RNA, 19 nt, Artificial Sequence
  Description of Artificial Sequence: Synthetic oligonucleotide
  Sense strand starting at position 2803 of SEQ ID NO: 1156
cugguuuauuuauagagac

SEQ ID NO: 92061 - RNA, 19 nt, Artificial Sequence
  Description of Artificial Sequence: Synthetic oligonucleotide
  Antisense strand to SEQ ID NO: 91980
gucucuauaaauaaaccag

SEQ ID NO: 92062 - RNA, 19 nt, Artificial Sequence
  Description of Artificial Sequence: Synthetic oligonucleotide
  Sense strand starting at position 2760 of SEQ ID NO: 1156
auagcaacgcuuuacugaa

SEQ ID NO: 92063 - RNA, 19 nt, Artificial Sequence
  Description of Artificial Sequence: Synthetic oligonucleotide
  Antisense strand to SEQ ID NO: 91982
uucaguaaagcguugcuau

SEQ ID NO: 92064 - RNA, 19 nt, Artificial Sequence
  Description of Artificial Sequence: Synthetic oligonucleotide
  Sense strand starting at position 2587 of SEQ ID NO: 1156
cucacuaaccaguguuaug

SEQ ID NO: 92065 - RNA, 19 nt, Artificial Sequence
  Description of Artificial Sequence: Synthetic oligonucleotide
  Antisense strand to SEQ ID NO: 91984
cauaacacugguuagugag

SEQ ID NO: 92066 - RNA, 19 nt, Artificial Sequence
  Description of Artificial Sequence: Synthetic oligonucleotide
  Sense strand starting at position 2558 of SEQ ID NO: 1156
aguugcaaucgaugggaga

SEQ ID NO: 92067 - RNA, 19 nt, Artificial Sequence
  Description of Artificial Sequence: Synthetic oligonucleotide
  Antisense strand to SEQ ID NO: 91986
ucucccaucgauugcaacu

SEQ ID NO: 92068 - RNA, 19 nt, Artificial Sequence
  Description of Artificial Sequence: Synthetic oligonucleotide
  Sense strand starting at position 2492 of SEQ ID NO: 1156
cccugagccuuccugagaa

SEQ ID NO: 92069 - RNA, 19 nt, Artificial Sequence
  Description of Artificial Sequence: Synthetic oligonucleotide
  Antisense strand to SEQ ID NO: 91988
uucucaggaaggcucaggg

SEQ ID NO: 92070 - RNA, 19 nt, Artificial Sequence
  Description of Artificial Sequence: Synthetic oligonucleotide
  Sense strand starting at position 2367 of SEQ ID NO: 1156
uccugagcccuccaaguaa

SEQ ID NO: 92071 - RNA, 19 nt, Artificial Sequence
  Description of Artificial Sequence: Synthetic oligonucleotide
  Antisense strand to SEQ ID NO: 91990
uuacuuggagggcucagga

SEQ ID NO: 92072 - RNA, 19 nt, Artificial Sequence
  Description of Artificial Sequence: Synthetic oligonucleotide
  Sense strand starting at position 2316 of SEQ ID NO: 1156
agagcuuucccagaguaac

SEQ ID NO: 92073 - RNA, 19 nt, Artificial Sequence
  Description of Artificial Sequence: Synthetic oligonucleotide
  Antisense strand to SEQ ID NO: 91992
guuacucugggaaagcucu

SEQ ID NO: 92074 - RNA, 19 nt, Artificial Sequence
  Description of Artificial Sequence: Synthetic oligonucleotide
  Sense strand starting at position 2313 of SEQ ID NO: 1156
cacagagcuuucccagagu

SEQ ID NO: 92075 - RNA, 19 nt, Artificial Sequence
  Description of Artificial Sequence: Synthetic oligonucleotide
  Antisense strand to SEQ ID NO: 91994
acucugggaaagcucugug

SEQ ID NO: 92076 - RNA, 19 nt, Artificial Sequence
  Description of Artificial Sequence: Synthetic oligonucleotide
  Sense strand starting at position 1277 of SEQ ID NO: 1156
aggauuaaguuucccaaug

SEQ ID NO: 92077 - RNA, 19 nt, Artificial Sequence
  Description of Artificial Sequence: Synthetic oligonucleotide
  Antisense strand to SEQ ID NO: 91996
cauugggaaacuuaauccu

SEQ ID NO: 92078 - RNA, 19 nt, Artificial Sequence
  Description of Artificial Sequence: Synthetic oligonucleotide
  Sense strand starting at position 891 of SEQ ID NO: 1156
gauaucuuugggugcaaau

SEQ ID NO: 92079 - RNA, 19 nt, Artificial Sequence
  Description of Artificial Sequence: Synthetic oligonucleotide
  Antisense strand to SEQ ID NO: 91998
auuugcacccaaagauauc

SEQ ID NO: 92080 - RNA, 19 nt, Artificial Sequence
  Description of Artificial Sequence: Synthetic oligonucleotide
  Sense strand starting at position 890 of SEQ ID NO: 1156
ggauaucuuugggugcaaa

SEQ ID NO: 92081 - RNA, 19 nt, Artificial Sequence
  Description of Artificial Sequence: Synthetic oligonucleotide
  Antisense strand to SEQ ID NO: 92000
uuugcacccaaagauaucc

SEQ ID NO: 92082 - RNA, 19 nt, Artificial Sequence
  Description of Artificial Sequence: Synthetic oligonucleotide
  Sense strand starting at position 866 of SEQ ID NO: 1156
auguuuauagcagauguua

SEQ ID NO: 92083 - RNA, 19 nt, Artificial Sequence
  Description of Artificial Sequence: Synthetic oligonucleotide
  Antisense strand to SEQ ID NO: 92002
uaacaucugcuauaaacau

SEQ ID NO: 92084 - RNA, 19 nt, Artificial Sequence
  Description of Artificial Sequence: Synthetic oligonucleotide
  Sense strand starting at position 806 of SEQ ID NO: 1156
gcucacauacucggauaaa

SEQ ID NO: 92085 - RNA, 19 nt, Artificial Sequence
  Description of Artificial Sequence: Synthetic oligonucleotide
  Antisense strand to SEQ ID NO: 92004
uuuauccgaguaugugagc

SEQ ID NO: 92086 - RNA, 19 nt, Artificial Sequence
  Description of Artificial Sequence: Synthetic oligonucleotide
  Sense strand starting at position 730 of SEQ ID NO: 1156
aguaaaccauguuuacuaa

SEQ ID NO: 92087 - RNA, 19 nt, Artificial Sequence
  Description of Artificial Sequence: Synthetic oligonucleotide
  Antisense strand to SEQ ID NO: 92006
uuaguaaacaugguuuacu

SEQ ID NO: 92088 - RNA, 19 nt, Artificial Sequence
  Description of Artificial Sequence: Synthetic oligonucleotide
  Sense strand starting at position 727 of SEQ ID NO: 1156
ccaaguaaaccauguuuac

SEQ ID NO: 92089 - RNA, 19 nt, Artificial Sequence
  Description of Artificial Sequence: Synthetic oligonucleotide
  Antisense strand to SEQ ID NO: 92008
guaaacaugguuuacuugg

SEQ ID NO: 92090 - RNA, 19 nt, Artificial Sequence
  Description of Artificial Sequence: Synthetic oligonucleotide
  Sense strand starting at position 716 of SEQ ID NO: 1156
gucgacacucuccaaguaa

SEQ ID NO: 92091 - RNA, 19 nt, Artificial Sequence
  Description of Artificial Sequence: Synthetic oligonucleotide
  Antisense strand to SEQ ID NO: 92010
uuacuuggagagugucgac

SEQ ID NO: 92092 - RNA, 19 nt, Artificial Sequence
  Description of Artificial Sequence: Synthetic oligonucleotide
  Sense strand starting at position 642 of SEQ ID NO: 1156
ucugaucauguguaguacu

SEQ ID NO: 92093 - RNA, 19 nt, Artificial Sequence
  Description of Artificial Sequence: Synthetic oligonucleotide
  Antisense strand to SEQ ID NO: 92012
aguacuacacaugaucaga

SEQ ID NO: 92094 - RNA, 19 nt, Artificial Sequence
  Description of Artificial Sequence: Synthetic oligonucleotide
  Sense strand starting at position 615 of SEQ ID NO: 1156
cauaaacgugaucaugauu

SEQ ID NO: 92095 - RNA, 19 nt, Artificial Sequence
  Description of Artificial Sequence: Synthetic oligonucleotide
  Antisense strand to SEQ ID NO: 92014
aaucaugaucacguuuaug

SEQ ID NO: 92096 - RNA, 19 nt, Artificial Sequence
  Description of Artificial Sequence: Synthetic oligonucleotide
  Sense strand starting at position 614 of SEQ ID NO: 1156
acauaaacgugaucaugau

SEQ ID NO: 92097 - RNA, 19 nt, Artificial Sequence
  Description of Artificial Sequence: Synthetic oligonucleotide
  Antisense strand to SEQ ID NO: 92016
aucaugaucacguuuaugu

SEQ ID NO: 92098 - RNA, 19 nt, Artificial Sequence
  Description of Artificial Sequence: Synthetic oligonucleotide
  Sense strand starting at position 487 of SEQ ID NO: 1156
aagucucuggcauacagua

SEQ ID NO: 92099 - RNA, 19 nt, Artificial Sequence
  Description of Artificial Sequence: Synthetic oligonucleotide
  Antisense strand to SEQ ID NO: 92018
uacuguaugccagagacuu

SEQ ID NO: 92100 - RNA, 19 nt, Artificial Sequence
  Description of Artificial Sequence: Synthetic oligonucleotide
  Sense strand starting at position 482 of SEQ ID NO: 1156
auccuaagucucuggcaua

SEQ ID NO: 92101 - RNA, 19 nt, Artificial Sequence
  Description of Artificial Sequence: Synthetic oligonucleotide
  Antisense strand to SEQ ID NO: 92020
uaugccagagacuuaggau

SEQ ID NO: 92102 - RNA, 19 nt, Artificial Sequence
  Description of Artificial Sequence: Synthetic oligonucleotide
  Sense strand starting at position 395 of SEQ ID NO: 1156
cgcaucugagcccaacaua

SEQ ID NO: 92103 - RNA, 19 nt, Artificial Sequence
  Description of Artificial Sequence: Synthetic oligonucleotide
  Antisense strand to SEQ ID NO: 92022
uauguugggcucagaugcg

SEQ ID NO: 92104 - RNA, 19 nt, Artificial Sequence
  Description of Artificial Sequence: Synthetic oligonucleotide
  Sense strand starting at position 332 of SEQ ID NO: 1156
ggaauuagagcuugaacac

SEQ ID NO: 92105 - RNA, 19 nt, Artificial Sequence
  Description of Artificial Sequence: Synthetic oligonucleotide
  Antisense strand to SEQ ID NO: 92024
guguucaagcucuaauucc

SEQ ID NO: 92106 - RNA, 19 nt, Artificial Sequence
  Description of Artificial Sequence: Synthetic oligonucleotide
  Sense strand starting at position 191 of SEQ ID NO: 1156
augucucuaugucuaaauu

SEQ ID NO: 92107 - RNA, 19 nt, Artificial Sequence
  Description of Artificial Sequence: Synthetic oligonucleotide
  Antisense strand to SEQ ID NO: 92026
aauuuagacauagagacau

SEQ ID NO: 92108 - RNA, 19 nt, Artificial Sequence
  Description of Artificial Sequence: Synthetic oligonucleotide
  Sense strand starting at position 3913 of SEQ ID NO: 1157
cucauucuuugaguaaaga

SEQ ID NO: 92109 - RNA, 19 nt, Artificial Sequence
  Description of Artificial Sequence: Synthetic oligonucleotide
  Antisense strand to SEQ ID NO: 92028
ucuuuacucaaagaaugag

SEQ ID NO: 92110 - RNA, 19 nt, Artificial Sequence
  Description of Artificial Sequence: Synthetic oligonucleotide
  Sense strand starting at position 3910 of SEQ ID NO: 1157
uugcucauucuuugaguaa

SEQ ID NO: 92111 - RNA, 19 nt, Artificial Sequence
  Description of Artificial Sequence: Synthetic oligonucleotide
  Antisense strand to SEQ ID NO: 92030
uuacucaaagaaugagcaa

SEQ ID NO: 92112 - RNA, 19 nt, Artificial Sequence
  Description of Artificial Sequence: Synthetic oligonucleotide
  Sense strand starting at position 3909 of SEQ ID NO: 1157
uuugcucauucuuugagua

SEQ ID NO: 92113 - RNA, 19 nt, Artificial Sequence
  Description of Artificial Sequence: Synthetic oligonucleotide
  Antisense strand to SEQ ID NO: 92032
uacucaaagaaugagcaaa

SEQ ID NO: 92114 - RNA, 19 nt, Artificial Sequence
  Description of Artificial Sequence: Synthetic oligonucleotide
  Sense strand starting at position 3889 of SEQ ID NO: 1157
cggccaaccgucuacuaau

SEQ ID NO: 92115 - RNA, 19 nt, Artificial Sequence
  Description of Artificial Sequence: Synthetic oligonucleotide
  Antisense strand to SEQ ID NO: 92034
auuaguagacgguuggccg

SEQ ID NO: 92116 - RNA, 19 nt, Artificial Sequence
  Description of Artificial Sequence: Synthetic oligonucleotide
  Sense strand starting at position 3653 of SEQ ID NO: 1157
guuacauucucagcucacu

SEQ ID NO: 92117 - RNA, 19 nt, Artificial Sequence
  Description of Artificial Sequence: Synthetic oligonucleotide
  Antisense strand to SEQ ID NO: 92036
agugagcugagaauguaac

SEQ ID NO: 92118 - RNA, 19 nt, Artificial Sequence
  Description of Artificial Sequence: Synthetic oligonucleotide
  Sense strand starting at position 3640 of SEQ ID NO: 1157
aguggaguacaguguuaca

SEQ ID NO: 92119 - RNA, 19 nt, Artificial Sequence
  Description of Artificial Sequence: Synthetic oligonucleotide
  Antisense strand to SEQ ID NO: 92038
uguaacacuguacuccacu

SEQ ID NO: 92120 - RNA, 19 nt, Artificial Sequence
  Description of Artificial Sequence: Synthetic oligonucleotide
  Sense strand starting at position 3479 of SEQ ID NO: 1157
ccuaaucggucucccuaua

SEQ ID NO: 92121 - RNA, 19 nt, Artificial Sequence
  Description of Artificial Sequence: Synthetic oligonucleotide
  Antisense strand to SEQ ID NO: 92040
uauagggagaccgauuagg

SEQ ID NO: 92122 - RNA, 19 nt, Artificial Sequence
  Description of Artificial Sequence: Synthetic oligonucleotide
  Sense strand starting at position 3461 of SEQ ID NO: 1157
acauuauuacugcaguauc

SEQ ID NO: 92123 - RNA, 19 nt, Artificial Sequence
  Description of Artificial Sequence: Synthetic oligonucleotide
  Antisense strand to SEQ ID NO: 92042
gauacugcaguaauaaugu

SEQ ID NO: 92124 - RNA, 19 nt, Artificial Sequence
  Description of Artificial Sequence: Synthetic oligonucleotide
  Sense strand starting at position 3403 of SEQ ID NO: 1157
agaauacuagcaugcaaag

SEQ ID NO: 92125 - RNA, 19 nt, Artificial Sequence
  Description of Artificial Sequence: Synthetic oligonucleotide
  Antisense strand to SEQ ID NO: 92044
cuuugcaugcuaguauucu

SEQ ID NO: 92126 - RNA, 19 nt, Artificial Sequence
  Description of Artificial Sequence: Synthetic oligonucleotide
  Sense strand starting at position 3119 of SEQ ID NO: 1157
cugagucaaccuuguacuu

SEQ ID NO: 92127 - RNA, 19 nt, Artificial Sequence
  Description of Artificial Sequence: Synthetic oligonucleotide
  Antisense strand to SEQ ID NO: 92046
aaguacaagguugacucag

SEQ ID NO: 92128 - RNA, 19 nt, Artificial Sequence
  Description of Artificial Sequence: Synthetic oligonucleotide
  Sense strand starting at position 2903 of SEQ ID NO: 1157
caggguuucccucaaguga

SEQ ID NO: 92129 - RNA, 19 nt, Artificial Sequence
  Description of Artificial Sequence: Synthetic oligonucleotide
  Antisense strand to SEQ ID NO: 92048
ucacuugagggaaacccug

SEQ ID NO: 92130 - RNA, 19 nt, Artificial Sequence
  Description of Artificial Sequence: Synthetic oligonucleotide
  Sense strand starting at position 2859 of SEQ ID NO: 1157
ucacaauucugccugaguc

SEQ ID NO: 92131 - RNA, 19 nt, Artificial Sequence
  Description of Artificial Sequence: Synthetic oligonucleotide
  Antisense strand to SEQ ID NO: 92050
gacucaggcagaauuguga

SEQ ID NO: 92132 - RNA, 19 nt, Artificial Sequence
  Description of Artificial Sequence: Synthetic oligonucleotide
  Sense strand starting at position 2804 of SEQ ID NO: 1157
caauguuagguugaaaugu

SEQ ID NO: 92133 - RNA, 19 nt, Artificial Sequence
  Description of Artificial Sequence: Synthetic oligonucleotide
  Antisense strand to SEQ ID NO: 92052
acauuucaaccuaacauug

SEQ ID NO: 92134 - RNA, 19 nt, Artificial Sequence
  Description of Artificial Sequence: Synthetic oligonucleotide
  Sense strand starting at position 2801 of SEQ ID NO: 1157
uaucaauguuagguugaaa

SEQ ID NO: 92135 - RNA, 19 nt, Artificial Sequence
  Description of Artificial Sequence: Synthetic oligonucleotide
  Antisense strand to SEQ ID NO: 92054
uuucaaccuaacauugaua

SEQ ID NO: 92136 - RNA, 19 nt, Artificial Sequence
  Description of Artificial Sequence: Synthetic oligonucleotide
  Sense strand starting at position 2726 of SEQ ID NO: 1157
ucgacuguaguuugagaaa

SEQ ID NO: 92137 - RNA, 19 nt, Artificial Sequence
  Description of Artificial Sequence: Synthetic oligonucleotide
  Antisense strand to SEQ ID NO: 92056
uuucucaaacuacagucga

SEQ ID NO: 92138 - RNA, 19 nt, Artificial Sequence
  Description of Artificial Sequence: Synthetic oligonucleotide
  Sense strand starting at position 2724 of SEQ ID NO: 1157
acucgacuguaguuugaga

SEQ ID NO: 92139 - RNA, 19 nt, Artificial Sequence
  Description of Artificial Sequence: Synthetic oligonucleotide
  Antisense strand to SEQ ID NO: 92058
ucucaaacuacagucgagu

SEQ ID NO: 92140 - RNA, 19 nt, Artificial Sequence
  Description of Artificial Sequence: Synthetic oligonucleotide
  Sense strand starting at position 2675 of SEQ ID NO: 1157
uuggauuuauagcugucuu

SEQ ID NO: 92141 - RNA, 19 nt, Artificial Sequence
  Description of Artificial Sequence: Synthetic oligonucleotide
  Antisense strand to SEQ ID NO: 92060
aagacagcuauaaauccaa

SEQ ID NO: 92142 - RNA, 19 nt, Artificial Sequence
  Description of Artificial Sequence: Synthetic oligonucleotide
  Sense strand starting at position 2558 of SEQ ID NO: 1157
gggaacucauguucugauu

SEQ ID NO: 92143 - RNA, 19 nt, Artificial Sequence
  Description of Artificial Sequence: Synthetic oligonucleotide
  Antisense strand to SEQ ID NO: 92062
aaucagaacaugaguuccc

SEQ ID NO: 92144 - RNA, 19 nt, Artificial Sequence
  Description of Artificial Sequence: Synthetic oligonucleotide
  Sense strand starting at position 2443 of SEQ ID NO: 1157
cacauuuguuuggaaagau

SEQ ID NO: 92145 - RNA, 19 nt, Artificial Sequence
  Description of Artificial Sequence: Synthetic oligonucleotide
  Antisense strand to SEQ ID NO: 92064
aucuuuccaaacaaaugug

SEQ ID NO: 92146 - RNA, 19 nt, Artificial Sequence
  Description of Artificial Sequence: Synthetic oligonucleotide
  Sense strand starting at position 2442 of SEQ ID NO: 1157
ccacauuuguuuggaaaga

SEQ ID NO: 92147 - RNA, 19 nt, Artificial Sequence
  Description of Artificial Sequence: Synthetic oligonucleotide
  Antisense strand to SEQ ID NO: 92066
ucuuuccaaacaaaugugg

SEQ ID NO: 92148 - RNA, 19 nt, Artificial Sequence
  Description of Artificial Sequence: Synthetic oligonucleotide
  Sense strand starting at position 2299 of SEQ ID NO: 1157
ugaccuauuggcuguaaac

SEQ ID NO: 92149 - RNA, 19 nt, Artificial Sequence
  Description of Artificial Sequence: Synthetic oligonucleotide
  Antisense strand to SEQ ID NO: 92068
guuuacagccaauagguca

SEQ ID NO: 92150 - RNA, 19 nt, Artificial Sequence
  Description of Artificial Sequence: Synthetic oligonucleotide
  Sense strand starting at position 2298 of SEQ ID NO: 1157
uugaccuauuggcuguaaa

SEQ ID NO: 92151 - RNA, 19 nt, Artificial Sequence
  Description of Artificial Sequence: Synthetic oligonucleotide
  Antisense strand to SEQ ID NO: 92070
uuuacagccaauaggucaa

SEQ ID NO: 92152 - RNA, 19 nt, Artificial Sequence
  Description of Artificial Sequence: Synthetic oligonucleotide
  Sense strand starting at position 2290 of SEQ ID NO: 1157
cugauaguuugaccuauug

SEQ ID NO: 92153 - RNA, 19 nt, Artificial Sequence
  Description of Artificial Sequence: Synthetic oligonucleotide
  Antisense strand to SEQ ID NO: 92072
caauaggucaaacuaucag

SEQ ID NO: 92154 - RNA, 19 nt, Artificial Sequence
  Description of Artificial Sequence: Synthetic oligonucleotide
  Sense strand starting at position 2228 of SEQ ID NO: 1157
gagcacaauucugugccua

SEQ ID NO: 92155 - RNA, 19 nt, Artificial Sequence
  Description of Artificial Sequence: Synthetic oligonucleotide
  Antisense strand to SEQ ID NO: 92074
uaggcacagaauugugcuc

SEQ ID NO: 92156 - RNA, 19 nt, Artificial Sequence
  Description of Artificial Sequence: Synthetic oligonucleotide
  Sense strand starting at position 2219 of SEQ ID NO: 1157
agcaguauggagcacaauu

SEQ ID NO: 92157 - RNA, 19 nt, Artificial Sequence
  Description of Artificial Sequence: Synthetic oligonucleotide
  Antisense strand to SEQ ID NO: 92076
aauugugcuccauacugcu

SEQ ID NO: 92158 - RNA, 19 nt, Artificial Sequence
  Description of Artificial Sequence: Synthetic oligonucleotide
  Sense strand starting at position 2208 of SEQ ID NO: 1157
ggaacaguuuaagcaguau

SEQ ID NO: 92159 - RNA, 19 nt, Artificial Sequence
  Description of Artificial Sequence: Synthetic oligonucleotide
  Antisense strand to SEQ ID NO: 92078
auacugcuuaaacuguucc

SEQ ID NO: 92160 - RNA, 19 nt, Artificial Sequence
  Description of Artificial Sequence: Synthetic oligonucleotide
  Sense strand starting at position 1706 of SEQ ID NO: 1157
caaagaauguguccugggu

SEQ ID NO: 92161 - RNA, 19 nt, Artificial Sequence
  Description of Artificial Sequence: Synthetic oligonucleotide
  Antisense strand to SEQ ID NO: 92080
acccaggacacauucuuug

SEQ ID NO: 92162 - RNA, 19 nt, Artificial Sequence
  Description of Artificial Sequence: Synthetic oligonucleotide
  Sense strand starting at position 1256 of SEQ ID NO: 1157
cccaucaaauggugauuua

SEQ ID NO: 92163 - RNA, 19 nt, Artificial Sequence
  Description of Artificial Sequence: Synthetic oligonucleotide
  Antisense strand to SEQ ID NO: 92082
uaaaucaccauuugauggg

SEQ ID NO: 92164 - RNA, 19 nt, Artificial Sequence
  Description of Artificial Sequence: Synthetic oligonucleotide
  Sense strand starting at position 919 of SEQ ID NO: 1157
gcguguuagaggcagggaa

SEQ ID NO: 92165 - RNA, 19 nt, Artificial Sequence
  Description of Artificial Sequence: Synthetic oligonucleotide
  Antisense strand to SEQ ID NO: 92084
uucccugccucuaacacgc

SEQ ID NO: 92166 - RNA, 19 nt, Artificial Sequence
  Description of Artificial Sequence: Synthetic oligonucleotide
  Sense strand starting at position 910 of SEQ ID NO: 1157
uccuaaagagcguguuaga

SEQ ID NO: 92167 - RNA, 19 nt, Artificial Sequence
  Description of Artificial Sequence: Synthetic oligonucleotide
  Antisense strand to SEQ ID NO: 92086
ucuaacacgcucuuuagga

SEQ ID NO: 92168 - RNA, 19 nt, Artificial Sequence
  Description of Artificial Sequence: Synthetic oligonucleotide
  Sense strand starting at position 893 of SEQ ID NO: 1157
agucaaaugacucggcauc

SEQ ID NO: 92169 - RNA, 19 nt, Artificial Sequence
  Description of Artificial Sequence: Synthetic oligonucleotide
  Antisense strand to SEQ ID NO: 92088
gaugccgagucauuugacu

SEQ ID NO: 92170 - RNA, 19 nt, Artificial Sequence
  Description of Artificial Sequence: Synthetic oligonucleotide
  Sense strand starting at position 880 of SEQ ID NO: 1157
uguuuaacacugcagucaa

SEQ ID NO: 92171 - RNA, 19 nt, Artificial Sequence
  Description of Artificial Sequence: Synthetic oligonucleotide
  Antisense strand to SEQ ID NO: 92090
uugacugcaguguuaaaca

SEQ ID NO: 92172 - RNA, 19 nt, Artificial Sequence
  Description of Artificial Sequence: Synthetic oligonucleotide
  Sense strand starting at position 869 of SEQ ID NO: 1157
gcgcuuugcaauguuuaac

SEQ ID NO: 92173 - RNA, 19 nt, Artificial Sequence
  Description of Artificial Sequence: Synthetic oligonucleotide
  Antisense strand to SEQ ID NO: 92092
guuaaacauugcaaagcgc

SEQ ID NO: 92174 - RNA, 19 nt, Artificial Sequence
  Description of Artificial Sequence: Synthetic oligonucleotide
  Sense strand starting at position 798 of SEQ ID NO: 1157
gaacacuucguaugcauca

SEQ ID NO: 92175 - RNA, 19 nt, Artificial Sequence
  Description of Artificial Sequence: Synthetic oligonucleotide
  Antisense strand to SEQ ID NO: 92094
ugaugcauacgaaguguuc

SEQ ID NO: 92176 - RNA, 19 nt, Artificial Sequence
  Description of Artificial Sequence: Synthetic oligonucleotide
  Sense strand starting at position 422 of SEQ ID NO: 1157
cgacuuuaagcagaacuaa

SEQ ID NO: 92177 - RNA, 19 nt, Artificial Sequence
  Description of Artificial Sequence: Synthetic oligonucleotide
  Antisense strand to SEQ ID NO: 92096
uuaguucugcuuaaagucg

SEQ ID NO: 92178 - RNA, 19 nt, Artificial Sequence
  Description of Artificial Sequence: Synthetic oligonucleotide
  Sense strand starting at position 182 of SEQ ID NO: 1157
guaagcgcuauguuagcua

SEQ ID NO: 92179 - RNA, 19 nt, Artificial Sequence
  Description of Artificial Sequence: Synthetic oligonucleotide
  Antisense strand to SEQ ID NO: 92098
uagcuaacauagcgcuuac

SEQ ID NO: 92180 - RNA, 19 nt, Artificial Sequence
  Description of Artificial Sequence: Synthetic oligonucleotide
  Sense strand starting at position 178 of SEQ ID NO: 1157
aagaguaagcgcuauguua

SEQ ID NO: 92181 - RNA, 19 nt, Artificial Sequence
  Description of Artificial Sequence: Synthetic oligonucleotide
  Antisense strand to SEQ ID NO: 92100
uaacauagcgcuuacucuu

SEQ ID NO: 92182 - RNA, 19 nt, Artificial Sequence
  Description of Artificial Sequence: Synthetic oligonucleotide
  Sense strand starting at position 147 of SEQ ID NO: 1157
uguucugaggauugaguua

SEQ ID NO: 92183 - RNA, 19 nt, Artificial Sequence
  Description of Artificial Sequence: Synthetic oligonucleotide
  Antisense strand to SEQ ID NO: 92102
uaacucaauccucagaaca

SEQ ID NO: 92184 - RNA, 19 nt, Artificial Sequence
  Description of Artificial Sequence: Synthetic oligonucleotide
  Sense strand starting at position 144 of SEQ ID NO: 1157
guuuguucugaggauugag

SEQ ID NO: 92185 - RNA, 19 nt, Artificial Sequence
  Description of Artificial Sequence: Synthetic oligonucleotide
  Antisense strand to SEQ ID NO: 92104
cucaauccucagaacaaac

SEQ ID NO: 92186 - RNA, 19 nt, Artificial Sequence
  Description of Artificial Sequence: Synthetic oligonucleotide
  Sense strand starting at position 136 of SEQ ID NO: 1157
caucauugguuuguucuga

SEQ ID NO: 92187 - RNA, 19 nt, Artificial Sequence
  Description of Artificial Sequence: Synthetic oligonucleotide
  Antisense strand to SEQ ID NO: 92106
ucagaacaaaccaaugaug

SEQ ID NO: 92188 - RNA, 19 nt, Artificial Sequence
  Description of Artificial Sequence: Synthetic oligonucleotide
  Sense strand starting at position 3941 of SEQ ID NO: 1159
guuacauucucagcucacu

SEQ ID NO: 92189 - RNA, 19 nt, Artificial Sequence
  Description of Artificial Sequence: Synthetic oligonucleotide
  Antisense strand to SEQ ID NO: 92108
agugagcugagaauguaac

SEQ ID NO: 92190 - RNA, 19 nt, Artificial Sequence
  Description of Artificial Sequence: Synthetic oligonucleotide
  Sense strand starting at position 3928 of SEQ ID NO: 1159
aguggaguacaguguuaca

SEQ ID NO: 92191 - RNA, 19 nt, Artificial Sequence
  Description of Artificial Sequence: Synthetic oligonucleotide
  Antisense strand to SEQ ID NO: 92110
uguaacacuguacuccacu

SEQ ID NO: 92192 - RNA, 19 nt, Artificial Sequence
  Description of Artificial Sequence: Synthetic oligonucleotide
  Sense strand starting at position 3767 of SEQ ID NO: 1159
ccuaaucggucucccuaua

SEQ ID NO: 92193 - RNA, 19 nt, Artificial Sequence
  Description of Artificial Sequence: Synthetic oligonucleotide
  Antisense strand to SEQ ID NO: 92112
uauagggagaccgauuagg

SEQ ID NO: 92194 - RNA, 19 nt, Artificial Sequence
  Description of Artificial Sequence: Synthetic oligonucleotide
  Sense strand starting at position 3749 of SEQ ID NO: 1159
acauuauuacugcaguauc

SEQ ID NO: 92195 - RNA, 19 nt, Artificial Sequence
  Description of Artificial Sequence: Synthetic oligonucleotide
  Antisense strand to SEQ ID NO: 92114
gauacugcaguaauaaugu

SEQ ID NO: 92196 - RNA, 19 nt, Artificial Sequence
  Description of Artificial Sequence: Synthetic oligonucleotide
  Sense strand starting at position 3691 of SEQ ID NO: 1159
agaauacuagcaugcaaag

SEQ ID NO: 92197 - RNA, 19 nt, Artificial Sequence
  Description of Artificial Sequence: Synthetic oligonucleotide
  Antisense strand to SEQ ID NO: 92116
cuuugcaugcuaguauucu

SEQ ID NO: 92198 - RNA, 19 nt, Artificial Sequence
  Description of Artificial Sequence: Synthetic oligonucleotide
  Sense strand starting at position 3459 of SEQ ID NO: 1159
acauaaaugcuguguuucu

SEQ ID NO: 92199 - RNA, 19 nt, Artificial Sequence
  Description of Artificial Sequence: Synthetic oligonucleotide
  Antisense strand to SEQ ID NO: 92118
agaaacacagcauuuaugu

SEQ ID NO: 92200 - RNA, 19 nt, Artificial Sequence
  Description of Artificial Sequence: Synthetic oligonucleotide
  Sense strand starting at position 3407 of SEQ ID NO: 1159
cugagucaaccuuguacuu

SEQ ID NO: 92201 - RNA, 19 nt, Artificial Sequence
  Description of Artificial Sequence: Synthetic oligonucleotide
  Antisense strand to SEQ ID NO: 92120
aaguacaagguugacucag

SEQ ID NO: 92202 - RNA, 19 nt, Artificial Sequence
  Description of Artificial Sequence: Synthetic oligonucleotide
  Sense strand starting at position 3191 of SEQ ID NO: 1159
caggguuucccucaaguga

SEQ ID NO: 92203 - RNA, 19 nt, Artificial Sequence
  Description of Artificial Sequence: Synthetic oligonucleotide
  Antisense strand to SEQ ID NO: 92122
ucacuugagggaaacccug

SEQ ID NO: 92204 - RNA, 19 nt, Artificial Sequence
  Description of Artificial Sequence: Synthetic oligonucleotide
  Sense strand starting at position 3147 of SEQ ID NO: 1159
ucacaauucugccugaguc

SEQ ID NO: 92205 - RNA, 19 nt, Artificial Sequence
  Description of Artificial Sequence: Synthetic oligonucleotide
  Antisense strand to SEQ ID NO: 92124
gacucaggcagaauuguga

SEQ ID NO: 92206 - RNA, 19 nt, Artificial Sequence
  Description of Artificial Sequence: Synthetic oligonucleotide
  Sense strand starting at position 3092 of SEQ ID NO: 1159
caauguuagguugaaaugu

SEQ ID NO: 92207 - RNA, 19 nt, Artificial Sequence
  Description of Artificial Sequence: Synthetic oligonucleotide
  Antisense strand to SEQ ID NO: 92126
acauuucaaccuaacauug

SEQ ID NO: 92208 - RNA, 19 nt, Artificial Sequence
  Description of Artificial Sequence: Synthetic oligonucleotide
  Sense strand starting at position 3089 of SEQ ID NO: 1159
uaucaauguuagguugaaa

SEQ ID NO: 92209 - RNA, 19 nt, Artificial Sequence
  Description of Artificial Sequence: Synthetic oligonucleotide
  Antisense strand to SEQ ID NO: 92128
uuucaaccuaacauugaua

SEQ ID NO: 92210 - RNA, 19 nt, Artificial Sequence
  Description of Artificial Sequence: Synthetic oligonucleotide
  Sense strand starting at position 3065 of SEQ ID NO: 1159
guguaaugcuuugcauaaa

SEQ ID NO: 92211 - RNA, 19 nt, Artificial Sequence
  Description of Artificial Sequence: Synthetic oligonucleotide
  Antisense strand to SEQ ID NO: 92130
uuuaugcaaagcauuacac

SEQ ID NO: 92212 - RNA, 19 nt, Artificial Sequence
  Description of Artificial Sequence: Synthetic oligonucleotide
  Sense strand starting at position 3014 of SEQ ID NO: 1159
ucgacuguaguuugagaaa

SEQ ID NO: 92213 - RNA, 19 nt, Artificial Sequence
  Description of Artificial Sequence: Synthetic oligonucleotide
  Antisense strand to SEQ ID NO: 92132
uuucucaaacuacagucga

SEQ ID NO: 92214 - RNA, 19 nt, Artificial Sequence
  Description of Artificial Sequence: Synthetic oligonucleotide
  Sense strand starting at position 3012 of SEQ ID NO: 1159
acucgacuguaguuugaga

SEQ ID NO: 92215 - RNA, 19 nt, Artificial Sequence
  Description of Artificial Sequence: Synthetic oligonucleotide
  Antisense strand to SEQ ID NO: 92134
ucucaaacuacagucgagu

SEQ ID NO: 92216 - RNA, 19 nt, Artificial Sequence
  Description of Artificial Sequence: Synthetic oligonucleotide
  Sense strand starting at position 2963 of SEQ ID NO: 1159
uuggauuuauagcugucuu

SEQ ID NO: 92217 - RNA, 19 nt, Artificial Sequence
  Description of Artificial Sequence: Synthetic oligonucleotide
  Antisense strand to SEQ ID NO: 92136
aagacagcuauaaauccaa

SEQ ID NO: 92218 - RNA, 19 nt, Artificial Sequence
  Description of Artificial Sequence: Synthetic oligonucleotide
  Sense strand starting at position 2846 of SEQ ID NO: 1159
gggaacucauguucugauu

SEQ ID NO: 92219 - RNA, 19 nt, Artificial Sequence
  Description of Artificial Sequence: Synthetic oligonucleotide
  Antisense strand to SEQ ID NO: 92138
aaucagaacaugaguuccc

SEQ ID NO: 92220 - RNA, 19 nt, Artificial Sequence
  Description of Artificial Sequence: Synthetic oligonucleotide
  Sense strand starting at position 2731 of SEQ ID NO: 1159
cacauuuguuuggaaagau

SEQ ID NO: 92221 - RNA, 19 nt, Artificial Sequence
  Description of Artificial Sequence: Synthetic oligonucleotide
  Antisense strand to SEQ ID NO: 92140
aucuuuccaaacaaaugug

SEQ ID NO: 92222 - RNA, 19 nt, Artificial Sequence
  Description of Artificial Sequence: Synthetic oligonucleotide
  Sense strand starting at position 2730 of SEQ ID NO: 1159
ccacauuuguuuggaaaga

SEQ ID NO: 92223 - RNA, 19 nt, Artificial Sequence
  Description of Artificial Sequence: Synthetic oligonucleotide
  Antisense strand to SEQ ID NO: 92142
ucuuuccaaacaaaugugg

SEQ ID NO: 92224 - RNA, 19 nt, Artificial Sequence
  Description of Artificial Sequence: Synthetic oligonucleotide
  Sense strand starting at position 2587 of SEQ ID NO: 1159
ugaccuauuggcuguaaac

SEQ ID NO: 92225 - RNA, 19 nt, Artificial Sequence
  Description of Artificial Sequence: Synthetic oligonucleotide
  Antisense strand to SEQ ID NO: 92144
guuuacagccaauagguca

SEQ ID NO: 92226 - RNA, 19 nt, Artificial Sequence
  Description of Artificial Sequence: Synthetic oligonucleotide
  Sense strand starting at position 2586 of SEQ ID NO: 1159
uugaccuauuggcuguaaa

SEQ ID NO: 92227 - RNA, 19 nt, Artificial Sequence
  Description of Artificial Sequence: Synthetic oligonucleotide
  Antisense strand to SEQ ID NO: 92146
uuuacagccaauaggucaa

SEQ ID NO: 92228 - RNA, 19 nt, Artificial Sequence
  Description of Artificial Sequence: Synthetic oligonucleotide
  Sense strand starting at position 2584 of SEQ ID NO: 1159
guuugaccuauuggcugua

SEQ ID NO: 92229 - RNA, 19 nt, Artificial Sequence
  Description of Artificial Sequence: Synthetic oligonucleotide
  Antisense strand to SEQ ID NO: 92148
uacagccaauaggucaaac

SEQ ID NO: 92230 - RNA, 19 nt, Artificial Sequence
  Description of Artificial Sequence: Synthetic oligonucleotide
  Sense strand starting at position 2578 of SEQ ID NO: 1159
cugauaguuugaccuauug

SEQ ID NO: 92231 - RNA, 19 nt, Artificial Sequence
  Description of Artificial Sequence: Synthetic oligonucleotide
  Antisense strand to SEQ ID NO: 92150
caauaggucaaacuaucag

SEQ ID NO: 92232 - RNA, 19 nt, Artificial Sequence
  Description of Artificial Sequence: Synthetic oligonucleotide
  Sense strand starting at position 2516 of SEQ ID NO: 1159
gagcacaauucugugccua

SEQ ID NO: 92233 - RNA, 19 nt, Artificial Sequence
  Description of Artificial Sequence: Synthetic oligonucleotide
  Antisense strand to SEQ ID NO: 92152
uaggcacagaauugugcuc

SEQ ID NO: 92234 - RNA, 19 nt, Artificial Sequence
  Description of Artificial Sequence: Synthetic oligonucleotide
  Sense strand starting at position 2507 of SEQ ID NO: 1159
agcaguauggagcacaauu

SEQ ID NO: 92235 - RNA, 19 nt, Artificial Sequence
  Description of Artificial Sequence: Synthetic oligonucleotide
  Antisense strand to SEQ ID NO: 92154
aauugugcuccauacugcu

SEQ ID NO: 92236 - RNA, 19 nt, Artificial Sequence
  Description of Artificial Sequence: Synthetic oligonucleotide
  Sense strand starting at position 2496 of SEQ ID NO: 1159
ggaacaguuuaagcaguau

SEQ ID NO: 92237 - RNA, 19 nt, Artificial Sequence
  Description of Artificial Sequence: Synthetic oligonucleotide
  Antisense strand to SEQ ID NO: 92156
auacugcuuaaacuguucc

SEQ ID NO: 92238 - RNA, 19 nt, Artificial Sequence
  Description of Artificial Sequence: Synthetic oligonucleotide
  Sense strand starting at position 1994 of SEQ ID NO: 1159
caaagaauguguccugggu

SEQ ID NO: 92239 - RNA, 19 nt, Artificial Sequence
  Description of Artificial Sequence: Synthetic oligonucleotide
  Antisense strand to SEQ ID NO: 92158
acccaggacacauucuuug

SEQ ID NO: 92240 - RNA, 19 nt, Artificial Sequence
  Description of Artificial Sequence: Synthetic oligonucleotide
  Sense strand starting at position 1544 of SEQ ID NO: 1159
cccaucaaauggugauuua

SEQ ID NO: 92241 - RNA, 19 nt, Artificial Sequence
  Description of Artificial Sequence: Synthetic oligonucleotide
  Antisense strand to SEQ ID NO: 92160
uaaaucaccauuugauggg

SEQ ID NO: 92242 - RNA, 19 nt, Artificial Sequence
  Description of Artificial Sequence: Synthetic oligonucleotide
  Sense strand starting at position 1207 of SEQ ID NO: 1159
gcguguuagaggcagggaa

SEQ ID NO: 92243 - RNA, 19 nt, Artificial Sequence
  Description of Artificial Sequence: Synthetic oligonucleotide
  Antisense strand to SEQ ID NO: 92162
uucccugccucuaacacgc

SEQ ID NO: 92244 - RNA, 19 nt, Artificial Sequence
  Description of Artificial Sequence: Synthetic oligonucleotide
  Sense strand starting at position 1198 of SEQ ID NO: 1159
uccuaaagagcguguuaga

SEQ ID NO: 92245 - RNA, 19 nt, Artificial Sequence
  Description of Artificial Sequence: Synthetic oligonucleotide
  Antisense strand to SEQ ID NO: 92164
ucuaacacgcucuuuagga

SEQ ID NO: 92246 - RNA, 19 nt, Artificial Sequence
  Description of Artificial Sequence: Synthetic oligonucleotide
  Sense strand starting at position 1196 of SEQ ID NO: 1159
cauccuaaagagcguguua

SEQ ID NO: 92247 - RNA, 19 nt, Artificial Sequence
  Description of Artificial Sequence: Synthetic oligonucleotide
  Antisense strand to SEQ ID NO: 92166
uaacacgcucuuuaggaug

SEQ ID NO: 92248 - RNA, 19 nt, Artificial Sequence
  Description of Artificial Sequence: Synthetic oligonucleotide
  Sense strand starting at position 1181 of SEQ ID NO: 1159
agucaaaugacucggcauc

SEQ ID NO: 92249 - RNA, 19 nt, Artificial Sequence
  Description of Artificial Sequence: Synthetic oligonucleotide
  Antisense strand to SEQ ID NO: 92168
gaugccgagucauuugacu

SEQ ID NO: 92250 - RNA, 19 nt, Artificial Sequence
  Description of Artificial Sequence: Synthetic oligonucleotide
  Sense strand starting at position 1168 of SEQ ID NO: 1159
uguuuaacacugcagucaa

SEQ ID NO: 92251 - RNA, 19 nt, Artificial Sequence
  Description of Artificial Sequence: Synthetic oligonucleotide
  Antisense strand to SEQ ID NO: 92170
uugacugcaguguuaaaca

SEQ ID NO: 92252 - RNA, 19 nt, Artificial Sequence
  Description of Artificial Sequence: Synthetic oligonucleotide
  Sense strand starting at position 1157 of SEQ ID NO: 1159
gcgcuuugcaauguuuaac

SEQ ID NO: 92253 - RNA, 19 nt, Artificial Sequence
  Description of Artificial Sequence: Synthetic oligonucleotide
  Antisense strand to SEQ ID NO: 92172
guuaaacauugcaaagcgc

SEQ ID NO: 92254 - RNA, 19 nt, Artificial Sequence
  Description of Artificial Sequence: Synthetic oligonucleotide
  Sense strand starting at position 1086 of SEQ ID NO: 1159
gaacacuucguaugcauca

SEQ ID NO: 92255 - RNA, 19 nt, Artificial Sequence
  Description of Artificial Sequence: Synthetic oligonucleotide
  Antisense strand to SEQ ID NO: 92174
ugaugcauacgaaguguuc

SEQ ID NO: 92256 - RNA, 19 nt, Artificial Sequence
  Description of Artificial Sequence: Synthetic oligonucleotide
  Sense strand starting at position 710 of SEQ ID NO: 1159
cgacuuuaagcagaacuaa

SEQ ID NO: 92257 - RNA, 19 nt, Artificial Sequence
  Description of Artificial Sequence: Synthetic oligonucleotide
  Antisense strand to SEQ ID NO: 92176
uuaguucugcuuaaagucg

SEQ ID NO: 92258 - RNA, 19 nt, Artificial Sequence
  Description of Artificial Sequence: Synthetic oligonucleotide
  Sense strand starting at position 470 of SEQ ID NO: 1159
guaagcgcuauguuagcua

SEQ ID NO: 92259 - RNA, 19 nt, Artificial Sequence
  Description of Artificial Sequence: Synthetic oligonucleotide
  Antisense strand to SEQ ID NO: 92178
uagcuaacauagcgcuuac

SEQ ID NO: 92260 - RNA, 19 nt, Artificial Sequence
  Description of Artificial Sequence: Synthetic oligonucleotide
  Sense strand starting at position 466 of SEQ ID NO: 1159
aagaguaagcgcuauguua

SEQ ID NO: 92261 - RNA, 19 nt, Artificial Sequence
  Description of Artificial Sequence: Synthetic oligonucleotide
  Antisense strand to SEQ ID NO: 92180
uaacauagcgcuuacucuu

SEQ ID NO: 92262 - RNA, 19 nt, Artificial Sequence
  Description of Artificial Sequence: Synthetic oligonucleotide
  Sense strand starting at position 435 of SEQ ID NO: 1159
uguucugaggauugaguua

SEQ ID NO: 92263 - RNA, 19 nt, Artificial Sequence
  Description of Artificial Sequence: Synthetic oligonucleotide
  Antisense strand to SEQ ID NO: 92182
uaacucaauccucagaaca

SEQ ID NO: 92264 - RNA, 19 nt, Artificial Sequence
  Description of Artificial Sequence: Synthetic oligonucleotide
  Sense strand starting at position 432 of SEQ ID NO: 1159
guuuguucugaggauugag

SEQ ID NO: 92265 - RNA, 19 nt, Artificial Sequence
  Description of Artificial Sequence: Synthetic oligonucleotide
  Antisense strand to SEQ ID NO: 92184
cucaauccucagaacaaac

SEQ ID NO: 92266 - RNA, 19 nt, Artificial Sequence
  Description of Artificial Sequence: Synthetic oligonucleotide
  Sense strand starting at position 424 of SEQ ID NO: 1159
caucauugguuuguucuga

SEQ ID NO: 92267 - RNA, 19 nt, Artificial Sequence
  Description of Artificial Sequence: Synthetic oligonucleotide
  Antisense strand to SEQ ID NO: 92186
ucagaacaaaccaaugaug

SEQ ID NO: 92268 - RNA, 19 nt, Artificial Sequence
  Description of Artificial Sequence: Synthetic oligonucleotide
  Sense strand starting at position 3501 of SEQ ID NO: 1158
uugccuagauacguuauuu

SEQ ID NO: 92269 - RNA, 19 nt, Artificial Sequence
  Description of Artificial Sequence: Synthetic oligonucleotide
  Antisense strand to SEQ ID NO: 92188
aaauaacguaucuaggcaa

SEQ ID NO: 92270 - RNA, 19 nt, Artificial Sequence
  Description of Artificial Sequence: Synthetic oligonucleotide
  Sense strand starting at position 3493 of SEQ ID NO: 1158
gauggucauugccuagaua

SEQ ID NO: 92271 - RNA, 19 nt, Artificial Sequence
  Description of Artificial Sequence: Synthetic oligonucleotide
  Antisense strand to SEQ ID NO: 92190
uaucuaggcaaugaccauc

SEQ ID NO: 92272 - RNA, 19 nt, Artificial Sequence
  Description of Artificial Sequence: Synthetic oligonucleotide
  Sense strand starting at position 3489 of SEQ ID NO: 1158
uauugauggucauugccua

SEQ ID NO: 92273 - RNA, 19 nt, Artificial Sequence
  Description of Artificial Sequence: Synthetic oligonucleotide
  Antisense strand to SEQ ID NO: 92192
uaggcaaugaccaucaaua

SEQ ID NO: 92274 - RNA, 19 nt, Artificial Sequence
  Description of Artificial Sequence: Synthetic oligonucleotide
  Sense strand starting at position 3484 of SEQ ID NO: 1158
cuagcuauugauggucauu

SEQ ID NO: 92275 - RNA, 19 nt, Artificial Sequence
  Description of Artificial Sequence: Synthetic oligonucleotide
  Antisense strand to SEQ ID NO: 92194
aaugaccaucaauagcuag

SEQ ID NO: 92276 - RNA, 19 nt, Artificial Sequence
  Description of Artificial Sequence: Synthetic oligonucleotide
  Sense strand starting at position 3476 of SEQ ID NO: 1158
uuuagcaucuagcuauuga

SEQ ID NO: 92277 - RNA, 19 nt, Artificial Sequence
  Description of Artificial Sequence: Synthetic oligonucleotide
  Antisense strand to SEQ ID NO: 92196
ucaauagcuagaugcuaaa

SEQ ID NO: 92278 - RNA, 19 nt, Artificial Sequence
  Description of Artificial Sequence: Synthetic oligonucleotide
  Sense strand starting at position 3455 of SEQ ID NO: 1158
aucaguguuugaucagaug

SEQ ID NO: 92279 - RNA, 19 nt, Artificial Sequence
  Description of Artificial Sequence: Synthetic oligonucleotide
  Antisense strand to SEQ ID NO: 92198
caucugaucaaacacugau

SEQ ID NO: 92280 - RNA, 19 nt, Artificial Sequence
  Description of Artificial Sequence: Synthetic oligonucleotide
  Sense strand starting at position 3451 of SEQ ID NO: 1158
ucccaucaguguuugauca

SEQ ID NO: 92281 - RNA, 19 nt, Artificial Sequence
  Description of Artificial Sequence: Synthetic oligonucleotide
  Antisense strand to SEQ ID NO: 92200
ugaucaaacacugauggga

SEQ ID NO: 92282 - RNA, 19 nt, Artificial Sequence
  Description of Artificial Sequence: Synthetic oligonucleotide
  Sense strand starting at position 3445 of SEQ ID NO: 1158
cgaaguucccaucaguguu

SEQ ID NO: 92283 - RNA, 19 nt, Artificial Sequence
  Description of Artificial Sequence: Synthetic oligonucleotide
  Antisense strand to SEQ ID NO: 92202
aacacugaugggaacuucg

SEQ ID NO: 92284 - RNA, 19 nt, Artificial Sequence
  Description of Artificial Sequence: Synthetic oligonucleotide
  Sense strand starting at position 3420 of SEQ ID NO: 1158
uguuguuagccugauccau

SEQ ID NO: 92285 - RNA, 19 nt, Artificial Sequence
  Description of Artificial Sequence: Synthetic oligonucleotide
  Antisense strand to SEQ ID NO: 92204
auggaucaggcuaacaaca

SEQ ID NO: 92286 - RNA, 19 nt, Artificial Sequence
  Description of Artificial Sequence: Synthetic oligonucleotide
  Sense strand starting at position 3326 of SEQ ID NO: 1158
ggugauauguagcuccaau

SEQ ID NO: 92287 - RNA, 19 nt, Artificial Sequence
  Description of Artificial Sequence: Synthetic oligonucleotide
  Antisense strand to SEQ ID NO: 92206
auuggagcuacauaucacc

SEQ ID NO: 92288 - RNA, 19 nt, Artificial Sequence
  Description of Artificial Sequence: Synthetic oligonucleotide
  Sense strand starting at position 3317 of SEQ ID NO: 1158
gacuuuacaggugauaugu

SEQ ID NO: 92289 - RNA, 19 nt, Artificial Sequence
  Description of Artificial Sequence: Synthetic oligonucleotide
  Antisense strand to SEQ ID NO: 92208
acauaucaccuguaaaguc

SEQ ID NO: 92290 - RNA, 19 nt, Artificial Sequence
  Description of Artificial Sequence: Synthetic oligonucleotide
  Sense strand starting at position 3316 of SEQ ID NO: 1158
agacuuuacaggugauaug

SEQ ID NO: 92291 - RNA, 19 nt, Artificial Sequence
  Description of Artificial Sequence: Synthetic oligonucleotide
  Antisense strand to SEQ ID NO: 92210
cauaucaccuguaaagucu

SEQ ID NO: 92292 - RNA, 19 nt, Artificial Sequence
  Description of Artificial Sequence: Synthetic oligonucleotide
  Sense strand starting at position 3310 of SEQ ID NO: 1158
gccagaagacuuuacaggu

SEQ ID NO: 92293 - RNA, 19 nt, Artificial Sequence
  Description of Artificial Sequence: Synthetic oligonucleotide
  Antisense strand to SEQ ID NO: 92212
accuguaaagucuucuggc

SEQ ID NO: 92294 - RNA, 19 nt, Artificial Sequence
  Description of Artificial Sequence: Synthetic oligonucleotide
  Sense strand starting at position 2821 of SEQ ID NO: 1158
auuucuauggcacguuaga

SEQ ID NO: 92295 - RNA, 19 nt, Artificial Sequence
  Description of Artificial Sequence: Synthetic oligonucleotide
  Antisense strand to SEQ ID NO: 92214
ucuaacgugccauagaaau

SEQ ID NO: 92296 - RNA, 19 nt, Artificial Sequence
  Description of Artificial Sequence: Synthetic oligonucleotide
  Sense strand starting at position 2644 of SEQ ID NO: 1158
ugauguuuaauguaguguu

SEQ ID NO: 92297 - RNA, 19 nt, Artificial Sequence
  Description of Artificial Sequence: Synthetic oligonucleotide
  Antisense strand to SEQ ID NO: 92216
aacacuacauuaaacauca

SEQ ID NO: 92298 - RNA, 19 nt, Artificial Sequence
  Description of Artificial Sequence: Synthetic oligonucleotide
  Sense strand starting at position 2581 of SEQ ID NO: 1158
guauauauccaguaacagu

SEQ ID NO: 92299 - RNA, 19 nt, Artificial Sequence
  Description of Artificial Sequence: Synthetic oligonucleotide
  Antisense strand to SEQ ID NO: 92218
acuguuacuggauauauac

SEQ ID NO: 92300 - RNA, 19 nt, Artificial Sequence
  Description of Artificial Sequence: Synthetic oligonucleotide
  Sense strand starting at position 2577 of SEQ ID NO: 1158
ugcuguauauauccaguaa

SEQ ID NO: 92301 - RNA, 19 nt, Artificial Sequence
  Description of Artificial Sequence: Synthetic oligonucleotide
  Antisense strand to SEQ ID NO: 92220
uuacuggauauauacagca

SEQ ID NO: 92302 - RNA, 19 nt, Artificial Sequence
  Description of Artificial Sequence: Synthetic oligonucleotide
  Sense strand starting at position 2158 of SEQ ID NO: 1158
ugaauuauuugauaugagg

SEQ ID NO: 92303 - RNA, 19 nt, Artificial Sequence
  Description of Artificial Sequence: Synthetic oligonucleotide
  Antisense strand to SEQ ID NO: 92222
ccucauaucaaauaauuca

SEQ ID NO: 92304 - RNA, 19 nt, Artificial Sequence
  Description of Artificial Sequence: Synthetic oligonucleotide
  Sense strand starting at position 2156 of SEQ ID NO: 1158
gcugaauuauuugauauga

SEQ ID NO: 92305 - RNA, 19 nt, Artificial Sequence
  Description of Artificial Sequence: Synthetic oligonucleotide
  Antisense strand to SEQ ID NO: 92224
ucauaucaaauaauucagc

SEQ ID NO: 92306 - RNA, 19 nt, Artificial Sequence
  Description of Artificial Sequence: Synthetic oligonucleotide
  Sense strand starting at position 2124 of SEQ ID NO: 1158
gcuuacagacuaugauguu

SEQ ID NO: 92307 - RNA, 19 nt, Artificial Sequence
  Description of Artificial Sequence: Synthetic oligonucleotide
  Antisense strand to SEQ ID NO: 92226
aacaucauagucuguaagc

SEQ ID NO: 92308 - RNA, 19 nt, Artificial Sequence
  Description of Artificial Sequence: Synthetic oligonucleotide
  Sense strand starting at position 1681 of SEQ ID NO: 1158
aggaaugcauucuuuacaa

SEQ ID NO: 92309 - RNA, 19 nt, Artificial Sequence
  Description of Artificial Sequence: Synthetic oligonucleotide
  Antisense strand to SEQ ID NO: 92228
uuguaaagaaugcauuccu

SEQ ID NO: 92310 - RNA, 19 nt, Artificial Sequence
  Description of Artificial Sequence: Synthetic oligonucleotide
  Sense strand starting at position 1514 of SEQ ID NO: 1158
ccagaacuccgucacagaa

SEQ ID NO: 92311 - RNA, 19 nt, Artificial Sequence
  Description of Artificial Sequence: Synthetic oligonucleotide
  Antisense strand to SEQ ID NO: 92230
uucugugacggaguucugg

SEQ ID NO: 92312 - RNA, 19 nt, Artificial Sequence
  Description of Artificial Sequence: Synthetic oligonucleotide
  Sense strand starting at position 1490 of SEQ ID NO: 1158
cuugguaugcugugaauuu

SEQ ID NO: 92313 - RNA, 19 nt, Artificial Sequence
  Description of Artificial Sequence: Synthetic oligonucleotide
  Antisense strand to SEQ ID NO: 92232
aaauucacagcauaccaag

SEQ ID NO: 92314 - RNA, 19 nt, Artificial Sequence
  Description of Artificial Sequence: Synthetic oligonucleotide
  Sense strand starting at position 1480 of SEQ ID NO: 1158
aaagaacugccuugguaug

SEQ ID NO: 92315 - RNA, 19 nt, Artificial Sequence
  Description of Artificial Sequence: Synthetic oligonucleotide
  Antisense strand to SEQ ID NO: 92234
cauaccaaggcaguucuuu

SEQ ID NO: 92316 - RNA, 19 nt, Artificial Sequence
  Description of Artificial Sequence: Synthetic oligonucleotide
  Sense strand starting at position 1387 of SEQ ID NO: 1158
augaaauagcggugcuaag

SEQ ID NO: 92317 - RNA, 19 nt, Artificial Sequence
  Description of Artificial Sequence: Synthetic oligonucleotide
  Antisense strand to SEQ ID NO: 92236
cuuagcaccgcuauuucau

SEQ ID NO: 92318 - RNA, 19 nt, Artificial Sequence
  Description of Artificial Sequence: Synthetic oligonucleotide
  Sense strand starting at position 1289 of SEQ ID NO: 1158
uaaggaauacucuggcagu

SEQ ID NO: 92319 - RNA, 19 nt, Artificial Sequence
  Description of Artificial Sequence: Synthetic oligonucleotide
  Antisense strand to SEQ ID NO: 92238
acugccagaguauuccuua

SEQ ID NO: 92320 - RNA, 19 nt, Artificial Sequence
  Description of Artificial Sequence: Synthetic oligonucleotide
  Sense strand starting at position 1255 of SEQ ID NO: 1158
auauucuaucgaugugaac

SEQ ID NO: 92321 - RNA, 19 nt, Artificial Sequence
  Description of Artificial Sequence: Synthetic oligonucleotide
  Antisense strand to SEQ ID NO: 92240
guucacaucgauagaauau

SEQ ID NO: 92322 - RNA, 19 nt, Artificial Sequence
  Description of Artificial Sequence: Synthetic oligonucleotide
  Sense strand starting at position 857 of SEQ ID NO: 1158
aguguugugguacaauaau

SEQ ID NO: 92323 - RNA, 19 nt, Artificial Sequence
  Description of Artificial Sequence: Synthetic oligonucleotide
  Antisense strand to SEQ ID NO: 92242
auuauuguaccacaacacu

SEQ ID NO: 92324 - RNA, 19 nt, Artificial Sequence
  Description of Artificial Sequence: Synthetic oligonucleotide
  Sense strand starting at position 780 of SEQ ID NO: 1158
gguauaauauagccacaca

SEQ ID NO: 92325 - RNA, 19 nt, Artificial Sequence
  Description of Artificial Sequence: Synthetic oligonucleotide
  Antisense strand to SEQ ID NO: 92244
uguguggcuauauuauacc

SEQ ID NO: 92326 - RNA, 19 nt, Artificial Sequence
  Description of Artificial Sequence: Synthetic oligonucleotide
  Sense strand starting at position 707 of SEQ ID NO: 1158
ucacuucugguaggaucaa

SEQ ID NO: 92327 - RNA, 19 nt, Artificial Sequence
  Description of Artificial Sequence: Synthetic oligonucleotide
  Antisense strand to SEQ ID NO: 92246
uugauccuaccagaaguga

SEQ ID NO: 92328 - RNA, 19 nt, Artificial Sequence
  Description of Artificial Sequence: Synthetic oligonucleotide
  Sense strand starting at position 565 of SEQ ID NO: 1158
gugaaugauccguggagag

SEQ ID NO: 92329 - RNA, 19 nt, Artificial Sequence
  Description of Artificial Sequence: Synthetic oligonucleotide
  Antisense strand to SEQ ID NO: 92248
cucuccacggaucauucac

SEQ ID NO: 92330 - RNA, 19 nt, Artificial Sequence
  Description of Artificial Sequence: Synthetic oligonucleotide
  Sense strand starting at position 564 of SEQ ID NO: 1158
ugugaaugauccguggaga

SEQ ID NO: 92331 - RNA, 19 nt, Artificial Sequence
  Description of Artificial Sequence: Synthetic oligonucleotide
  Antisense strand to SEQ ID NO: 92250
ucuccacggaucauucaca

SEQ ID NO: 92332 - RNA, 19 nt, Artificial Sequence
  Description of Artificial Sequence: Synthetic oligonucleotide
  Sense strand starting at position 563 of SEQ ID NO: 1158
augugaaugauccguggag

SEQ ID NO: 92333 - RNA, 19 nt, Artificial Sequence
  Description of Artificial Sequence: Synthetic oligonucleotide
  Antisense strand to SEQ ID NO: 92252
cuccacggaucauucacau

SEQ ID NO: 92334 - RNA, 19 nt, Artificial Sequence
  Description of Artificial Sequence: Synthetic oligonucleotide
  Sense strand starting at position 482 of SEQ ID NO: 1158
gggcaacugcuagaacuua

SEQ ID NO: 92335 - RNA, 19 nt, Artificial Sequence
  Description of Artificial Sequence: Synthetic oligonucleotide
  Antisense strand to SEQ ID NO: 92254
uaaguucuagcaguugccc

SEQ ID NO: 92336 - RNA, 19 nt, Artificial Sequence
  Description of Artificial Sequence: Synthetic oligonucleotide
  Sense strand starting at position 471 of SEQ ID NO: 1158
gaaguuauccagggcaacu

SEQ ID NO: 92337 - RNA, 19 nt, Artificial Sequence
  Description of Artificial Sequence: Synthetic oligonucleotide
  Antisense strand to SEQ ID NO: 92256
aguugcccuggauaacuuc

SEQ ID NO: 92338 - RNA, 19 nt, Artificial Sequence
  Description of Artificial Sequence: Synthetic oligonucleotide
  Sense strand starting at position 459 of SEQ ID NO: 1158
uguugauaccuugaaguua

SEQ ID NO: 92339 - RNA, 19 nt, Artificial Sequence
  Description of Artificial Sequence: Synthetic oligonucleotide
  Antisense strand to SEQ ID NO: 92258
uaacuucaagguaucaaca

SEQ ID NO: 92340 - RNA, 19 nt, Artificial Sequence
  Description of Artificial Sequence: Synthetic oligonucleotide
  Sense strand starting at position 417 of SEQ ID NO: 1158
cucauacuggcuugugaca

SEQ ID NO: 92341 - RNA, 19 nt, Artificial Sequence
  Description of Artificial Sequence: Synthetic oligonucleotide
  Antisense strand to SEQ ID NO: 92260
ugucacaagccaguaugag

SEQ ID NO: 92342 - RNA, 19 nt, Artificial Sequence
  Description of Artificial Sequence: Synthetic oligonucleotide
  Sense strand starting at position 387 of SEQ ID NO: 1158
gaagaacacuggguaguau

SEQ ID NO: 92343 - RNA, 19 nt, Artificial Sequence
  Description of Artificial Sequence: Synthetic oligonucleotide
  Antisense strand to SEQ ID NO: 92262
auacuacccaguguucuuc

SEQ ID NO: 92344 - RNA, 19 nt, Artificial Sequence
  Description of Artificial Sequence: Synthetic oligonucleotide
  Sense strand starting at position 386 of SEQ ID NO: 1158
ugaagaacacuggguagua

SEQ ID NO: 92345 - RNA, 19 nt, Artificial Sequence
  Description of Artificial Sequence: Synthetic oligonucleotide
  Antisense strand to SEQ ID NO: 92264
uacuacccaguguucuuca

SEQ ID NO: 92346 - RNA, 19 nt, Artificial Sequence
  Description of Artificial Sequence: Synthetic oligonucleotide
  Sense strand starting at position 374 of SEQ ID NO: 1158
ugagcugaaguuugaagaa

SEQ ID NO: 92347 - RNA, 19 nt, Artificial Sequence
  Description of Artificial Sequence: Synthetic oligonucleotide
  Antisense strand to SEQ ID NO: 92266
uucuucaaacuucagcuca

SEQ ID NO: 92348 - RNA, 19 nt, Artificial Sequence
  Description of Artificial Sequence: Synthetic oligonucleotide
  Sense strand starting at position 2756 of SEQ ID NO: 1160
ggagcagucuccucacuga

SEQ ID NO: 92349 - RNA, 19 nt, Artificial Sequence
  Description of Artificial Sequence: Synthetic oligonucleotide
  Antisense strand to SEQ ID NO: 92268
ucagugaggagacugcucc

SEQ ID NO: 92350 - RNA, 19 nt, Artificial Sequence
  Description of Artificial Sequence: Synthetic oligonucleotide
  Sense strand starting at position 2648 of SEQ ID NO: 1160
uggccugucugcuaggaca

SEQ ID NO: 92351 - RNA, 19 nt, Artificial Sequence
  Description of Artificial Sequence: Synthetic oligonucleotide
  Antisense strand to SEQ ID NO: 92270
uguccuagcagacaggcca

SEQ ID NO: 92352 - RNA, 19 nt, Artificial Sequence
  Description of Artificial Sequence: Synthetic oligonucleotide
  Sense strand starting at position 2386 of SEQ ID NO: 1160
ccgucagagaccugcauuu

SEQ ID NO: 92353 - RNA, 19 nt, Artificial Sequence
  Description of Artificial Sequence: Synthetic oligonucleotide
  Antisense strand to SEQ ID NO: 92272
aaaugcaggucucugacgg

SEQ ID NO: 92354 - RNA, 19 nt, Artificial Sequence
  Description of Artificial Sequence: Synthetic oligonucleotide
  Sense strand starting at position 1607 of SEQ ID NO: 1160
gguauuuagucucagacuc

SEQ ID NO: 92355 - RNA, 19 nt, Artificial Sequence
  Description of Artificial Sequence: Synthetic oligonucleotide
  Antisense strand to SEQ ID NO: 92274
gagucugagacuaaauacc

SEQ ID NO: 92356 - RNA, 19 nt, Artificial Sequence
  Description of Artificial Sequence: Synthetic oligonucleotide
  Sense strand starting at position 1436 of SEQ ID NO: 1160
acugcucugcuagaagaga

SEQ ID NO: 92357 - RNA, 19 nt, Artificial Sequence
  Description of Artificial Sequence: Synthetic oligonucleotide
  Antisense strand to SEQ ID NO: 92276
ucucuucuagcagagcagu

SEQ ID NO: 92358 - RNA, 19 nt, Artificial Sequence
  Description of Artificial Sequence: Synthetic oligonucleotide
  Sense strand starting at position 1432 of SEQ ID NO: 1160
gggcacugcucugcuagaa

SEQ ID NO: 92359 - RNA, 19 nt, Artificial Sequence
  Description of Artificial Sequence: Synthetic oligonucleotide
  Antisense strand to SEQ ID NO: 92278
uucuagcagagcagugccc

SEQ ID NO: 92360 - RNA, 19 nt, Artificial Sequence
  Description of Artificial Sequence: Synthetic oligonucleotide
  Sense strand starting at position 1431 of SEQ ID NO: 1160
cgggcacugcucugcuaga

SEQ ID NO: 92361 - RNA, 19 nt, Artificial Sequence
  Description of Artificial Sequence: Synthetic oligonucleotide
  Antisense strand to SEQ ID NO: 92280
ucuagcagagcagugcccg

SEQ ID NO: 92362 - RNA, 19 nt, Artificial Sequence
  Description of Artificial Sequence: Synthetic oligonucleotide
  Sense strand starting at position 1255 of SEQ ID NO: 1160
ccucccagcuucuaggaaa

SEQ ID NO: 92363 - RNA, 19 nt, Artificial Sequence
  Description of Artificial Sequence: Synthetic oligonucleotide
  Antisense strand to SEQ ID NO: 92282
uuuccuagaagcugggagg

SEQ ID NO: 92364 - RNA, 19 nt, Artificial Sequence
  Description of Artificial Sequence: Synthetic oligonucleotide
  Sense strand starting at position 1110 of SEQ ID NO: 1160
ggcgccugcccacaaauua

SEQ ID NO: 92365 - RNA, 19 nt, Artificial Sequence
  Description of Artificial Sequence: Synthetic oligonucleotide
  Antisense strand to SEQ ID NO: 92284
uaauuugugggcaggcgcc

SEQ ID NO: 92366 - RNA, 19 nt, Artificial Sequence
  Description of Artificial Sequence: Synthetic oligonucleotide
  Sense strand starting at position 773 of SEQ ID NO: 1160
aaggaacucugggauccua

SEQ ID NO: 92367 - RNA, 19 nt, Artificial Sequence
  Description of Artificial Sequence: Synthetic oligonucleotide
  Antisense strand to SEQ ID NO: 92286
uaggaucccagaguuccuu

SEQ ID NO: 92368 - RNA, 19 nt, Artificial Sequence
  Description of Artificial Sequence: Synthetic oligonucleotide
  Sense strand starting at position 480 of SEQ ID NO: 1160
guccuucuagauggacauu

SEQ ID NO: 92369 - RNA, 19 nt, Artificial Sequence
  Description of Artificial Sequence: Synthetic oligonucleotide
  Antisense strand to SEQ ID NO: 92288
aauguccaucuagaaggac

SEQ ID NO: 92370 - RNA, 19 nt, Artificial Sequence
  Description of Artificial Sequence: Synthetic oligonucleotide
  Sense strand starting at position 420 of SEQ ID NO: 1160
guaccuuuauucccaugau

SEQ ID NO: 92371 - RNA, 19 nt, Artificial Sequence
  Description of Artificial Sequence: Synthetic oligonucleotide
  Antisense strand to SEQ ID NO: 92290
aucaugggaauaaagguac

SEQ ID NO: 92372 - RNA, 19 nt, Artificial Sequence
  Description of Artificial Sequence: Synthetic oligonucleotide
  Sense strand starting at position 412 of SEQ ID NO: 1160
ugcaguugguaccuuuauu

SEQ ID NO: 92373 - RNA, 19 nt, Artificial Sequence
  Description of Artificial Sequence: Synthetic oligonucleotide
  Antisense strand to SEQ ID NO: 92292
aauaaagguaccaacugca

SEQ ID NO: 92374 - RNA, 19 nt, Artificial Sequence
  Description of Artificial Sequence: Synthetic oligonucleotide
  Sense strand starting at position 152 of SEQ ID NO: 1160
acuuaaugcugggaaagga

SEQ ID NO: 92375 - RNA, 19 nt, Artificial Sequence
  Description of Artificial Sequence: Synthetic oligonucleotide
  Antisense strand to SEQ ID NO: 92294
uccuuucccagcauuaagu

SEQ ID NO: 92376 - RNA, 19 nt, Artificial Sequence
  Description of Artificial Sequence: Synthetic oligonucleotide
  Sense strand starting at position 149 of SEQ ID NO: 1160
aagacuuaaugcugggaaa

SEQ ID NO: 92377 - RNA, 19 nt, Artificial Sequence
  Description of Artificial Sequence: Synthetic oligonucleotide
  Antisense strand to SEQ ID NO: 92296
uuucccagcauuaagucuu

SEQ ID NO: 92378 - RNA, 19 nt, Artificial Sequence
  Description of Artificial Sequence: Synthetic oligonucleotide
  Sense strand starting at position 136 of SEQ ID NO: 1160
uaaccagucuaggaagacu

SEQ ID NO: 92379 - RNA, 19 nt, Artificial Sequence
  Description of Artificial Sequence: Synthetic oligonucleotide
  Antisense strand to SEQ ID NO: 92298
agucuuccuagacugguua

SEQ ID NO: 92380 - RNA, 19 nt, Artificial Sequence
  Description of Artificial Sequence: Synthetic oligonucleotide
  Sense strand starting at position 21 of SEQ ID NO: 1160
agggaauuguggcaagcua

SEQ ID NO: 92381 - RNA, 19 nt, Artificial Sequence
  Description of Artificial Sequence: Synthetic oligonucleotide
  Antisense strand to SEQ ID NO: 92300
uagcuugccacaauucccu

SEQ ID NO: 92382 - RNA, 19 nt, Artificial Sequence
  Description of Artificial Sequence: Synthetic oligonucleotide
  Sense strand starting at position 3932 of SEQ ID NO: 1161
ugagacucccuuggaucua

SEQ ID NO: 92383 - RNA, 19 nt, Artificial Sequence
  Description of Artificial Sequence: Synthetic oligonucleotide
  Antisense strand to SEQ ID NO: 92302
uagauccaagggagucuca

SEQ ID NO: 92384 - RNA, 19 nt, Artificial Sequence
  Description of Artificial Sequence: Synthetic oligonucleotide
  Sense strand starting at position 3931 of SEQ ID NO: 1161
uugagacucccuuggaucu

SEQ ID NO: 92385 - RNA, 19 nt, Artificial Sequence
  Description of Artificial Sequence: Synthetic oligonucleotide
  Antisense strand to SEQ ID NO: 92304
agauccaagggagucucaa

SEQ ID NO: 92386 - RNA, 19 nt, Artificial Sequence
  Description of Artificial Sequence: Synthetic oligonucleotide
  Sense strand starting at position 3929 of SEQ ID NO: 1161
ccuugagacucccuuggau

SEQ ID NO: 92387 - RNA, 19 nt, Artificial Sequence
  Description of Artificial Sequence: Synthetic oligonucleotide
  Antisense strand to SEQ ID NO: 92306
auccaagggagucucaagg

SEQ ID NO: 92388 - RNA, 19 nt, Artificial Sequence
  Description of Artificial Sequence: Synthetic oligonucleotide
  Sense strand starting at position 3908 of SEQ ID NO: 1161
cuaggaaagucauucucac

SEQ ID NO: 92389 - RNA, 19 nt, Artificial Sequence
  Description of Artificial Sequence: Synthetic oligonucleotide
  Antisense strand to SEQ ID NO: 92308
gugagaaugacuuuccuag

SEQ ID NO: 92390 - RNA, 19 nt, Artificial Sequence
  Description of Artificial Sequence: Synthetic oligonucleotide
  Sense strand starting at position 3574 of SEQ ID NO: 1161
ugaugugguaaccacgaga

SEQ ID NO: 92391 - RNA, 19 nt, Artificial Sequence
  Description of Artificial Sequence: Synthetic oligonucleotide
  Antisense strand to SEQ ID NO: 92310
ucucgugguuaccacauca

SEQ ID NO: 92392 - RNA, 19 nt, Artificial Sequence
  Description of Artificial Sequence: Synthetic oligonucleotide
  Sense strand starting at position 3567 of SEQ ID NO: 1161
auuggagugaugugguaac

SEQ ID NO: 92393 - RNA, 19 nt, Artificial Sequence
  Description of Artificial Sequence: Synthetic oligonucleotide
  Antisense strand to SEQ ID NO: 92312
guuaccacaucacuccaau

SEQ ID NO: 92394 - RNA, 19 nt, Artificial Sequence
  Description of Artificial Sequence: Synthetic oligonucleotide
  Sense strand starting at position 3421 of SEQ ID NO: 1161
ugcagauguagcuaaguaa

SEQ ID NO: 92395 - RNA, 19 nt, Artificial Sequence
  Description of Artificial Sequence: Synthetic oligonucleotide
  Antisense strand to SEQ ID NO: 92314
uuacuuagcuacaucugca

SEQ ID NO: 92396 - RNA, 19 nt, Artificial Sequence
  Description of Artificial Sequence: Synthetic oligonucleotide
  Sense strand starting at position 3387 of SEQ ID NO: 1161
cugugaauaugaucuuacu

SEQ ID NO: 92397 - RNA, 19 nt, Artificial Sequence
  Description of Artificial Sequence: Synthetic oligonucleotide
  Antisense strand to SEQ ID NO: 92316
aguaagaucauauucacag

SEQ ID NO: 92398 - RNA, 19 nt, Artificial Sequence
  Description of Artificial Sequence: Synthetic oligonucleotide
  Sense strand starting at position 3360 of SEQ ID NO: 1161
gugugucuaccucauaauc

SEQ ID NO: 92399 - RNA, 19 nt, Artificial Sequence
  Description of Artificial Sequence: Synthetic oligonucleotide
  Antisense strand to SEQ ID NO: 92318
gauuaugagguagacacac

SEQ ID NO: 92400 - RNA, 19 nt, Artificial Sequence
  Description of Artificial Sequence: Synthetic oligonucleotide
  Sense strand starting at position 3358 of SEQ ID NO: 1161
aggugugucuaccucauaa

SEQ ID NO: 92401 - RNA, 19 nt, Artificial Sequence
  Description of Artificial Sequence: Synthetic oligonucleotide
  Antisense strand to SEQ ID NO: 92320
uuaugagguagacacaccu

SEQ ID NO: 92402 - RNA, 19 nt, Artificial Sequence
  Description of Artificial Sequence: Synthetic oligonucleotide
  Sense strand starting at position 3324 of SEQ ID NO: 1161
ggaaagugugguggaugaa

SEQ ID NO: 92403 - RNA, 19 nt, Artificial Sequence
  Description of Artificial Sequence: Synthetic oligonucleotide
  Antisense strand to SEQ ID NO: 92322
uucauccaccacacuuucc

SEQ ID NO: 92404 - RNA, 19 nt, Artificial Sequence
  Description of Artificial Sequence: Synthetic oligonucleotide
  Sense strand starting at position 3157 of SEQ ID NO: 1161
uacauuagugcuggaggaa

SEQ ID NO: 92405 - RNA, 19 nt, Artificial Sequence
  Description of Artificial Sequence: Synthetic oligonucleotide
  Antisense strand to SEQ ID NO: 92324
uuccuccagcacuaaugua

SEQ ID NO: 92406 - RNA, 19 nt, Artificial Sequence
  Description of Artificial Sequence: Synthetic oligonucleotide
  Sense strand starting at position 3132 of SEQ ID NO: 1161
acagauacugcuggacaga

SEQ ID NO: 92407 - RNA, 19 nt, Artificial Sequence
  Description of Artificial Sequence: Synthetic oligonucleotide
  Antisense strand to SEQ ID NO: 92326
ucuguccagcaguaucugu

SEQ ID NO: 92408 - RNA, 19 nt, Artificial Sequence
  Description of Artificial Sequence: Synthetic oligonucleotide
  Sense strand starting at position 3101 of SEQ ID NO: 1161
gaaacuucggucugaggag

SEQ ID NO: 92409 - RNA, 19 nt, Artificial Sequence
  Description of Artificial Sequence: Synthetic oligonucleotide
  Antisense strand to SEQ ID NO: 92328
cuccucagaccgaaguuuc

SEQ ID NO: 92410 - RNA, 19 nt, Artificial Sequence
  Description of Artificial Sequence: Synthetic oligonucleotide
  Sense strand starting at position 3086 of SEQ ID NO: 1161
guucccugcccucaggaaa

SEQ ID NO: 92411 - RNA, 19 nt, Artificial Sequence
  Description of Artificial Sequence: Synthetic oligonucleotide
  Antisense strand to SEQ ID NO: 92330
uuuccugagggcagggaac

SEQ ID NO: 92412 - RNA, 19 nt, Artificial Sequence
  Description of Artificial Sequence: Synthetic oligonucleotide
  Sense strand starting at position 3039 of SEQ ID NO: 1161
cuggaugagcacuggagaa

SEQ ID NO: 92413 - RNA, 19 nt, Artificial Sequence
  Description of Artificial Sequence: Synthetic oligonucleotide
  Antisense strand to SEQ ID NO: 92332
uucuccagugcucauccag

SEQ ID NO: 92414 - RNA, 19 nt, Artificial Sequence
  Description of Artificial Sequence: Synthetic oligonucleotide
  Sense strand starting at position 2941 of SEQ ID NO: 1161
ggcuguuacugggcaugau

SEQ ID NO: 92415 - RNA, 19 nt, Artificial Sequence
  Description of Artificial Sequence: Synthetic oligonucleotide
  Antisense strand to SEQ ID NO: 92334
aucaugcccaguaacagcc

SEQ ID NO: 92416 - RNA, 19 nt, Artificial Sequence
  Description of Artificial Sequence: Synthetic oligonucleotide
  Sense strand starting at position 2545 of SEQ ID NO: 1161
gaagcagggcuauaaaguu

SEQ ID NO: 92417 - RNA, 19 nt, Artificial Sequence
  Description of Artificial Sequence: Synthetic oligonucleotide
  Antisense strand to SEQ ID NO: 92336
aacuuuauagcccugcuuc

SEQ ID NO: 92418 - RNA, 19 nt, Artificial Sequence
  Description of Artificial Sequence: Synthetic oligonucleotide
  Sense strand starting at position 2482 of SEQ ID NO: 1161
augaaugucaguggacauc

SEQ ID NO: 92419 - RNA, 19 nt, Artificial Sequence
  Description of Artificial Sequence: Synthetic oligonucleotide
  Antisense strand to SEQ ID NO: 92338
gauguccacugacauucau

SEQ ID NO: 92420 - RNA, 19 nt, Artificial Sequence
  Description of Artificial Sequence: Synthetic oligonucleotide
  Sense strand starting at position 2481 of SEQ ID NO: 1161
caugaaugucaguggacau

SEQ ID NO: 92421 - RNA, 19 nt, Artificial Sequence
  Description of Artificial Sequence: Synthetic oligonucleotide
  Antisense strand to SEQ ID NO: 92340
auguccacugacauucaug

SEQ ID NO: 92422 - RNA, 19 nt, Artificial Sequence
  Description of Artificial Sequence: Synthetic oligonucleotide
  Sense strand starting at position 2480 of SEQ ID NO: 1161
gcaugaaugucaguggaca

SEQ ID NO: 92423 - RNA, 19 nt, Artificial Sequence
  Description of Artificial Sequence: Synthetic oligonucleotide
  Antisense strand to SEQ ID NO: 92342
uguccacugacauucaugc

SEQ ID NO: 92424 - RNA, 19 nt, Artificial Sequence
  Description of Artificial Sequence: Synthetic oligonucleotide
  Sense strand starting at position 2461 of SEQ ID NO: 1161
gggagaacccaugggugua

SEQ ID NO: 92425 - RNA, 19 nt, Artificial Sequence
  Description of Artificial Sequence: Synthetic oligonucleotide
  Antisense strand to SEQ ID NO: 92344
uacacccauggguucuccc

SEQ ID NO: 92426 - RNA, 19 nt, Artificial Sequence
  Description of Artificial Sequence: Synthetic oligonucleotide
  Sense strand starting at position 2351 of SEQ ID NO: 1161
uuagcaguuguuugauauu

SEQ ID NO: 92427 - RNA, 19 nt, Artificial Sequence
  Description of Artificial Sequence: Synthetic oligonucleotide
  Antisense strand to SEQ ID NO: 92346
aauaucaaacaacugcuaa

SEQ ID NO: 92428 - RNA, 19 nt, Artificial Sequence
  Description of Artificial Sequence: Synthetic oligonucleotide
  Sense strand starting at position 2350 of SEQ ID NO: 1161
cuuagcaguuguuugauau

SEQ ID NO: 92429 - RNA, 19 nt, Artificial Sequence
  Description of Artificial Sequence: Synthetic oligonucleotide
  Antisense strand to SEQ ID NO: 92348
auaucaaacaacugcuaag

SEQ ID NO: 92430 - RNA, 19 nt, Artificial Sequence
  Description of Artificial Sequence: Synthetic oligonucleotide
  Sense strand starting at position 2333 of SEQ ID NO: 1161
guaucuuggcccuaacacu

SEQ ID NO: 92431 - RNA, 19 nt, Artificial Sequence
  Description of Artificial Sequence: Synthetic oligonucleotide
  Antisense strand to SEQ ID NO: 92350
aguguuagggccaagauac

SEQ ID NO: 92432 - RNA, 19 nt, Artificial Sequence
  Description of Artificial Sequence: Synthetic oligonucleotide
  Sense strand starting at position 2264 of SEQ ID NO: 1161
ugaauagaguucucugccu

SEQ ID NO: 92433 - RNA, 19 nt, Artificial Sequence
  Description of Artificial Sequence: Synthetic oligonucleotide
  Antisense strand to SEQ ID NO: 92352
aggcagagaacucuauuca

SEQ ID NO: 92434 - RNA, 19 nt, Artificial Sequence
  Description of Artificial Sequence: Synthetic oligonucleotide
  Sense strand starting at position 2024 of SEQ ID NO: 1161
gccaguucugcgguccagu

SEQ ID NO: 92435 - RNA, 19 nt, Artificial Sequence
  Description of Artificial Sequence: Synthetic oligonucleotide
  Antisense strand to SEQ ID NO: 92354
acuggaccgcagaacuggc

SEQ ID NO: 92436 - RNA, 19 nt, Artificial Sequence
  Description of Artificial Sequence: Synthetic oligonucleotide
  Sense strand starting at position 1433 of SEQ ID NO: 1161
ucuugaacauccuugguuu

SEQ ID NO: 92437 - RNA, 19 nt, Artificial Sequence
  Description of Artificial Sequence: Synthetic oligonucleotide
  Antisense strand to SEQ ID NO: 92356
aaaccaaggauguucaaga

SEQ ID NO: 92438 - RNA, 19 nt, Artificial Sequence
  Description of Artificial Sequence: Synthetic oligonucleotide
  Sense strand starting at position 1297 of SEQ ID NO: 1161
cuacguuugcuggaucaca

SEQ ID NO: 92439 - RNA, 19 nt, Artificial Sequence
  Description of Artificial Sequence: Synthetic oligonucleotide
  Antisense strand to SEQ ID NO: 92358
ugugauccagcaaacguag

SEQ ID NO: 92440 - RNA, 19 nt, Artificial Sequence
  Description of Artificial Sequence: Synthetic oligonucleotide
  Sense strand starting at position 780 of SEQ ID NO: 1161
ucccuccucgcauggaaau

SEQ ID NO: 92441 - RNA, 19 nt, Artificial Sequence
  Description of Artificial Sequence: Synthetic oligonucleotide
  Antisense strand to SEQ ID NO: 92360
auuuccaugcgaggaggga

SEQ ID NO: 92442 - RNA, 19 nt, Artificial Sequence
  Description of Artificial Sequence: Synthetic oligonucleotide
  Sense strand starting at position 752 of SEQ ID NO: 1161
agaccucuccauggguaaa

SEQ ID NO: 92443 - RNA, 19 nt, Artificial Sequence
  Description of Artificial Sequence: Synthetic oligonucleotide
  Antisense strand to SEQ ID NO: 92362
uuuacccauggagaggucu

SEQ ID NO: 92444 - RNA, 19 nt, Artificial Sequence
  Description of Artificial Sequence: Synthetic oligonucleotide
  Sense strand starting at position 751 of SEQ ID NO: 1161
cagaccucuccauggguaa

SEQ ID NO: 92445 - RNA, 19 nt, Artificial Sequence
  Description of Artificial Sequence: Synthetic oligonucleotide
  Antisense strand to SEQ ID NO: 92364
uuacccauggagaggucug

SEQ ID NO: 92446 - RNA, 19 nt, Artificial Sequence
  Description of Artificial Sequence: Synthetic oligonucleotide
  Sense strand starting at position 674 of SEQ ID NO: 1161
guaugugggcgugaauucu

SEQ ID NO: 92447 - RNA, 19 nt, Artificial Sequence
  Description of Artificial Sequence: Synthetic oligonucleotide
  Antisense strand to SEQ ID NO: 92366
agaauucacgcccacauac

SEQ ID NO: 92448 - RNA, 19 nt, Artificial Sequence
  Description of Artificial Sequence: Synthetic oligonucleotide
  Sense strand starting at position 671 of SEQ ID NO: 1161
gagguaugugggcgugaau

SEQ ID NO: 92449 - RNA, 19 nt, Artificial Sequence
  Description of Artificial Sequence: Synthetic oligonucleotide
  Antisense strand to SEQ ID NO: 92368
auucacgcccacauaccuc

SEQ ID NO: 92450 - RNA, 19 nt, Artificial Sequence
  Description of Artificial Sequence: Synthetic oligonucleotide
  Sense strand starting at position 670 of SEQ ID NO: 1161
ggagguaugugggcgugaa

SEQ ID NO: 92451 - RNA, 19 nt, Artificial Sequence
  Description of Artificial Sequence: Synthetic oligonucleotide
  Antisense strand to SEQ ID NO: 92370
uucacgcccacauaccucc

SEQ ID NO: 92452 - RNA, 19 nt, Artificial Sequence
  Description of Artificial Sequence: Synthetic oligonucleotide
  Sense strand starting at position 543 of SEQ ID NO: 1161
guggcugugcauuagagga

SEQ ID NO: 92453 - RNA, 19 nt, Artificial Sequence
  Description of Artificial Sequence: Synthetic oligonucleotide
  Antisense strand to SEQ ID NO: 92372
uccucuaaugcacagccac

SEQ ID NO: 92454 - RNA, 19 nt, Artificial Sequence
  Description of Artificial Sequence: Synthetic oligonucleotide
  Sense strand starting at position 278 of SEQ ID NO: 1161
gauccugugcucgauuaaa

SEQ ID NO: 92455 - RNA, 19 nt, Artificial Sequence
  Description of Artificial Sequence: Synthetic oligonucleotide
  Antisense strand to SEQ ID NO: 92374
uuuaaucgagcacaggauc

SEQ ID NO: 92456 - RNA, 19 nt, Artificial Sequence
  Description of Artificial Sequence: Synthetic oligonucleotide
  Sense strand starting at position 185 of SEQ ID NO: 1161
cugggacuuaagugucaca

SEQ ID NO: 92457 - RNA, 19 nt, Artificial Sequence
  Description of Artificial Sequence: Synthetic oligonucleotide
  Antisense strand to SEQ ID NO: 92376
ugugacacuuaagucccag

SEQ ID NO: 92458 - RNA, 19 nt, Artificial Sequence
  Description of Artificial Sequence: Synthetic oligonucleotide
  Sense strand starting at position 157 of SEQ ID NO: 1161
uuacaagccugagugacaa

SEQ ID NO: 92459 - RNA, 19 nt, Artificial Sequence
  Description of Artificial Sequence: Synthetic oligonucleotide
  Antisense strand to SEQ ID NO: 92378
uugucacucaggcuuguaa

SEQ ID NO: 92460 - RNA, 19 nt, Artificial Sequence
  Description of Artificial Sequence: Synthetic oligonucleotide
  Sense strand starting at position 154 of SEQ ID NO: 1161
caauuacaagccugaguga

SEQ ID NO: 92461 - RNA, 19 nt, Artificial Sequence
  Description of Artificial Sequence: Synthetic oligonucleotide
  Antisense strand to SEQ ID NO: 92380
ucacucaggcuuguaauug

SEQ ID NO: 92462 - RNA, 19 nt, Artificial Sequence
  Description of Artificial Sequence: Synthetic oligonucleotide
  Sense strand starting at position 3869 of SEQ ID NO: 1162
gacaguagguccucaacau

SEQ ID NO: 92463 - RNA, 19 nt, Artificial Sequence
  Description of Artificial Sequence: Synthetic oligonucleotide
  Antisense strand to SEQ ID NO: 92382
auguugaggaccuacuguc

SEQ ID NO: 92464 - RNA, 19 nt, Artificial Sequence
  Description of Artificial Sequence: Synthetic oligonucleotide
  Sense strand starting at position 3817 of SEQ ID NO: 1162
cuggucucucacugacagu

SEQ ID NO: 92465 - RNA, 19 nt, Artificial Sequence
  Description of Artificial Sequence: Synthetic oligonucleotide
  Antisense strand to SEQ ID NO: 92384
acugucagugagagaccag

SEQ ID NO: 92466 - RNA, 19 nt, Artificial Sequence
  Description of Artificial Sequence: Synthetic oligonucleotide
  Sense strand starting at position 3769 of SEQ ID NO: 1162
cucccaggauuaucugaua

SEQ ID NO: 92467 - RNA, 19 nt, Artificial Sequence
  Description of Artificial Sequence: Synthetic oligonucleotide
  Antisense strand to SEQ ID NO: 92386
uaucagauaauccugggag

SEQ ID NO: 92468 - RNA, 19 nt, Artificial Sequence
  Description of Artificial Sequence: Synthetic oligonucleotide
  Sense strand starting at position 3764 of SEQ ID NO: 1162
ggaugcucccaggauuauc

SEQ ID NO: 92469 - RNA, 19 nt, Artificial Sequence
  Description of Artificial Sequence: Synthetic oligonucleotide
  Antisense strand to SEQ ID NO: 92388
gauaauccugggagcaucc

SEQ ID NO: 92470 - RNA, 19 nt, Artificial Sequence
  Description of Artificial Sequence: Synthetic oligonucleotide
  Sense strand starting at position 3633 of SEQ ID NO: 1162
ucuccuggcccugaguuaa

SEQ ID NO: 92471 - RNA, 19 nt, Artificial Sequence
  Description of Artificial Sequence: Synthetic oligonucleotide
  Antisense strand to SEQ ID NO: 92390
uuaacucagggccaggaga

SEQ ID NO: 92472 - RNA, 19 nt, Artificial Sequence
  Description of Artificial Sequence: Synthetic oligonucleotide
  Sense strand starting at position 3594 of SEQ ID NO: 1162
ugugguuccucauucuaac

SEQ ID NO: 92473 - RNA, 19 nt, Artificial Sequence
  Description of Artificial Sequence: Synthetic oligonucleotide
  Antisense strand to SEQ ID NO: 92392
guuagaaugaggaaccaca

SEQ ID NO: 92474 - RNA, 19 nt, Artificial Sequence
  Description of Artificial Sequence: Synthetic oligonucleotide
  Sense strand starting at position 3489 of SEQ ID NO: 1162
aaaugugugcccugaggga

SEQ ID NO: 92475 - RNA, 19 nt, Artificial Sequence
  Description of Artificial Sequence: Synthetic oligonucleotide
  Antisense strand to SEQ ID NO: 92394
ucccucagggcacacauuu

SEQ ID NO: 92476 - RNA, 19 nt, Artificial Sequence
  Description of Artificial Sequence: Synthetic oligonucleotide
  Sense strand starting at position 3417 of SEQ ID NO: 1162
ugguuuaacccaggacacu

SEQ ID NO: 92477 - RNA, 19 nt, Artificial Sequence
  Description of Artificial Sequence: Synthetic oligonucleotide
  Antisense strand to SEQ ID NO: 92396
aguguccuggguuaaacca

SEQ ID NO: 92478 - RNA, 19 nt, Artificial Sequence
  Description of Artificial Sequence: Synthetic oligonucleotide
  Sense strand starting at position 3415 of SEQ ID NO: 1162
guugguuuaacccaggaca

SEQ ID NO: 92479 - RNA, 19 nt, Artificial Sequence
  Description of Artificial Sequence: Synthetic oligonucleotide
  Antisense strand to SEQ ID NO: 92398
uguccuggguuaaaccaac

SEQ ID NO: 92480 - RNA, 19 nt, Artificial Sequence
  Description of Artificial Sequence: Synthetic oligonucleotide
  Sense strand starting at position 3280 of SEQ ID NO: 1162
ucugcuuggcugcaaacau

SEQ ID NO: 92481 - RNA, 19 nt, Artificial Sequence
  Description of Artificial Sequence: Synthetic oligonucleotide
  Antisense strand to SEQ ID NO: 92400
auguuugcagccaagcaga

SEQ ID NO: 92482 - RNA, 19 nt, Artificial Sequence
  Description of Artificial Sequence: Synthetic oligonucleotide
  Sense strand starting at position 3247 of SEQ ID NO: 1162
ugguuagagcuggaacuua

SEQ ID NO: 92483 - RNA, 19 nt, Artificial Sequence
  Description of Artificial Sequence: Synthetic oligonucleotide
  Antisense strand to SEQ ID NO: 92402
uaaguuccagcucuaacca

SEQ ID NO: 92484 - RNA, 19 nt, Artificial Sequence
  Description of Artificial Sequence: Synthetic oligonucleotide
  Sense strand starting at position 3246 of SEQ ID NO: 1162
cugguuagagcuggaacuu

SEQ ID NO: 92485 - RNA, 19 nt, Artificial Sequence
  Description of Artificial Sequence: Synthetic oligonucleotide
  Antisense strand to SEQ ID NO: 92404
aaguuccagcucuaaccag

SEQ ID NO: 92486 - RNA, 19 nt, Artificial Sequence
  Description of Artificial Sequence: Synthetic oligonucleotide
  Sense strand starting at position 3245 of SEQ ID NO: 1162
gcugguuagagcuggaacu

SEQ ID NO: 92487 - RNA, 19 nt, Artificial Sequence
  Description of Artificial Sequence: Synthetic oligonucleotide
  Antisense strand to SEQ ID NO: 92406
aguuccagcucuaaccagc

SEQ ID NO: 92488 - RNA, 19 nt, Artificial Sequence
  Description of Artificial Sequence: Synthetic oligonucleotide
  Sense strand starting at position 3135 of SEQ ID NO: 1162
ggcauuugcuaugugccaa

SEQ ID NO: 92489 - RNA, 19 nt, Artificial Sequence
  Description of Artificial Sequence: Synthetic oligonucleotide
  Antisense strand to SEQ ID NO: 92408
uuggcacauagcaaaugcc

SEQ ID NO: 92490 - RNA, 19 nt, Artificial Sequence
  Description of Artificial Sequence: Synthetic oligonucleotide
  Sense strand starting at position 3019 of SEQ ID NO: 1162
ggcagagucaaauagguga

SEQ ID NO: 92491 - RNA, 19 nt, Artificial Sequence
  Description of Artificial Sequence: Synthetic oligonucleotide
  Antisense strand to SEQ ID NO: 92410
ucaccuauuugacucugcc

SEQ ID NO: 92492 - RNA, 19 nt, Artificial Sequence
  Description of Artificial Sequence: Synthetic oligonucleotide
  Sense strand starting at position 2966 of SEQ ID NO: 1162
aauuguguccuaggaccga

SEQ ID NO: 92493 - RNA, 19 nt, Artificial Sequence
  Description of Artificial Sequence: Synthetic oligonucleotide
  Antisense strand to SEQ ID NO: 92412
ucgguccuaggacacaauu

SEQ ID NO: 92494 - RNA, 19 nt, Artificial Sequence
  Description of Artificial Sequence: Synthetic oligonucleotide
  Sense strand starting at position 2962 of SEQ ID NO: 1162
gaggaauuguguccuagga

SEQ ID NO: 92495 - RNA, 19 nt, Artificial Sequence
  Description of Artificial Sequence: Synthetic oligonucleotide
  Antisense strand to SEQ ID NO: 92414
uccuaggacacaauuccuc

SEQ ID NO: 92496 - RNA, 19 nt, Artificial Sequence
  Description of Artificial Sequence: Synthetic oligonucleotide
  Sense strand starting at position 2579 of SEQ ID NO: 1162
gggcaauucuaacuugcca

SEQ ID NO: 92497 - RNA, 19 nt, Artificial Sequence
  Description of Artificial Sequence: Synthetic oligonucleotide
  Antisense strand to SEQ ID NO: 92416
uggcaaguuagaauugccc

SEQ ID NO: 92498 - RNA, 19 nt, Artificial Sequence
  Description of Artificial Sequence: Synthetic oligonucleotide
  Sense strand starting at position 2543 of SEQ ID NO: 1162
ccuguuucucaggagccaa

SEQ ID NO: 92499 - RNA, 19 nt, Artificial Sequence
  Description of Artificial Sequence: Synthetic oligonucleotide
  Antisense strand to SEQ ID NO: 92418
uuggcuccugagaaacagg

SEQ ID NO: 92500 - RNA, 19 nt, Artificial Sequence
  Description of Artificial Sequence: Synthetic oligonucleotide
  Sense strand starting at position 2498 of SEQ ID NO: 1162
uccuauaggaggugcuaaa

SEQ ID NO: 92501 - RNA, 19 nt, Artificial Sequence
  Description of Artificial Sequence: Synthetic oligonucleotide
  Antisense strand to SEQ ID NO: 92420
uuuagcaccuccuauagga

SEQ ID NO: 92502 - RNA, 19 nt, Artificial Sequence
  Description of Artificial Sequence: Synthetic oligonucleotide
  Sense strand starting at position 2484 of SEQ ID NO: 1162
ugggaaggcuuccuuccua

SEQ ID NO: 92503 - RNA, 19 nt, Artificial Sequence
  Description of Artificial Sequence: Synthetic oligonucleotide
  Antisense strand to SEQ ID NO: 92422
uaggaaggaagccuuccca

SEQ ID NO: 92504 - RNA, 19 nt, Artificial Sequence
  Description of Artificial Sequence: Synthetic oligonucleotide
  Sense strand starting at position 2403 of SEQ ID NO: 1162
uucuucuucgugcaaagga

SEQ ID NO: 92505 - RNA, 19 nt, Artificial Sequence
  Description of Artificial Sequence: Synthetic oligonucleotide
  Antisense strand to SEQ ID NO: 92424
uccuuugcacgaagaagaa

SEQ ID NO: 92506 - RNA, 19 nt, Artificial Sequence
  Description of Artificial Sequence: Synthetic oligonucleotide
  Sense strand starting at position 2331 of SEQ ID NO: 1162
cagguauugccagaaucca

SEQ ID NO: 92507 - RNA, 19 nt, Artificial Sequence
  Description of Artificial Sequence: Synthetic oligonucleotide
  Antisense strand to SEQ ID NO: 92426
uggauucuggcaauaccug

SEQ ID NO: 92508 - RNA, 19 nt, Artificial Sequence
  Description of Artificial Sequence: Synthetic oligonucleotide
  Sense strand starting at position 2272 of SEQ ID NO: 1162
gcacuaucauugguuauua

SEQ ID NO: 92509 - RNA, 19 nt, Artificial Sequence
  Description of Artificial Sequence: Synthetic oligonucleotide
  Antisense strand to SEQ ID NO: 92428
uaauaaccaaugauagugc

SEQ ID NO: 92510 - RNA, 19 nt, Artificial Sequence
  Description of Artificial Sequence: Synthetic oligonucleotide
  Sense strand starting at position 2270 of SEQ ID NO: 1162
uggcacuaucauugguuau

SEQ ID NO: 92511 - RNA, 19 nt, Artificial Sequence
  Description of Artificial Sequence: Synthetic oligonucleotide
  Antisense strand to SEQ ID NO: 92430
auaaccaaugauagugcca

SEQ ID NO: 92512 - RNA, 19 nt, Artificial Sequence
  Description of Artificial Sequence: Synthetic oligonucleotide
  Sense strand starting at position 2088 of SEQ ID NO: 1162
guguauuucucacuuccua

SEQ ID NO: 92513 - RNA, 19 nt, Artificial Sequence
  Description of Artificial Sequence: Synthetic oligonucleotide
  Antisense strand to SEQ ID NO: 92432
uaggaagugagaaauacac

SEQ ID NO: 92514 - RNA, 19 nt, Artificial Sequence
  Description of Artificial Sequence: Synthetic oligonucleotide
  Sense strand starting at position 1229 of SEQ ID NO: 1162
guguguuugaaggaggugu

SEQ ID NO: 92515 - RNA, 19 nt, Artificial Sequence
  Description of Artificial Sequence: Synthetic oligonucleotide
  Antisense strand to SEQ ID NO: 92434
acaccuccuucaaacacac

SEQ ID NO: 92516 - RNA, 19 nt, Artificial Sequence
  Description of Artificial Sequence: Synthetic oligonucleotide
  Sense strand starting at position 1198 of SEQ ID NO: 1162
guguuagguguguuugugu

SEQ ID NO: 92517 - RNA, 19 nt, Artificial Sequence
  Description of Artificial Sequence: Synthetic oligonucleotide
  Antisense strand to SEQ ID NO: 92436
acacaaacacaccuaacac

SEQ ID NO: 92518 - RNA, 19 nt, Artificial Sequence
  Description of Artificial Sequence: Synthetic oligonucleotide
  Sense strand starting at position 953 of SEQ ID NO: 1162
guguguuugaaggaagugu

SEQ ID NO: 92519 - RNA, 19 nt, Artificial Sequence
  Description of Artificial Sequence: Synthetic oligonucleotide
  Antisense strand to SEQ ID NO: 92438
acacuuccuucaaacacac

SEQ ID NO: 92520 - RNA, 19 nt, Artificial Sequence
  Description of Artificial Sequence: Synthetic oligonucleotide
  Sense strand starting at position 927 of SEQ ID NO: 1162
guuugaaggacauguguuu

SEQ ID NO: 92521 - RNA, 19 nt, Artificial Sequence
  Description of Artificial Sequence: Synthetic oligonucleotide
  Antisense strand to SEQ ID NO: 92440
aaacacauguccuucaaac

SEQ ID NO: 92522 - RNA, 19 nt, Artificial Sequence
  Description of Artificial Sequence: Synthetic oligonucleotide
  Sense strand starting at position 923 of SEQ ID NO: 1162
guguguuugaaggacaugu

SEQ ID NO: 92523 - RNA, 19 nt, Artificial Sequence
  Description of Artificial Sequence: Synthetic oligonucleotide
  Antisense strand to SEQ ID NO: 92442
acauguccuucaaacacac

SEQ ID NO: 92524 - RNA, 19 nt, Artificial Sequence
  Description of Artificial Sequence: Synthetic oligonucleotide
  Sense strand starting at position 785 of SEQ ID NO: 1162
guuugaaggagguguguua

SEQ ID NO: 92525 - RNA, 19 nt, Artificial Sequence
  Description of Artificial Sequence: Synthetic oligonucleotide
  Antisense strand to SEQ ID NO: 92444
uaacacaccuccuucaaac

SEQ ID NO: 92526 - RNA, 19 nt, Artificial Sequence
  Description of Artificial Sequence: Synthetic oligonucleotide
  Sense strand starting at position 739 of SEQ ID NO: 1162
guuugaaggagguguguga

SEQ ID NO: 92527 - RNA, 19 nt, Artificial Sequence
  Description of Artificial Sequence: Synthetic oligonucleotide
  Antisense strand to SEQ ID NO: 92446
ucacacaccuccuucaaac

SEQ ID NO: 92528 - RNA, 19 nt, Artificial Sequence
  Description of Artificial Sequence: Synthetic oligonucleotide
  Sense strand starting at position 211 of SEQ ID NO: 1162
gaaggaggugugcauaugu

SEQ ID NO: 92529 - RNA, 19 nt, Artificial Sequence
  Description of Artificial Sequence: Synthetic oligonucleotide
  Antisense strand to SEQ ID NO: 92448
acauaugcacaccuccuuc

SEQ ID NO: 92530 - RNA, 19 nt, Artificial Sequence
  Description of Artificial Sequence: Synthetic oligonucleotide
  Sense strand starting at position 203 of SEQ ID NO: 1162
guauguuugaaggaggugu

SEQ ID NO: 92531 - RNA, 19 nt, Artificial Sequence
  Description of Artificial Sequence: Synthetic oligonucleotide
  Antisense strand to SEQ ID NO: 92450
acaccuccuucaaacauac

SEQ ID NO: 92532 - RNA, 19 nt, Artificial Sequence
  Description of Artificial Sequence: Synthetic oligonucleotide
  Sense strand starting at position 139 of SEQ ID NO: 1162
gaaggagguguauguguau

SEQ ID NO: 92533 - RNA, 19 nt, Artificial Sequence
  Description of Artificial Sequence: Synthetic oligonucleotide
  Antisense strand to SEQ ID NO: 92452
auacacauacaccuccuuc

SEQ ID NO: 92534 - RNA, 19 nt, Artificial Sequence
  Description of Artificial Sequence: Synthetic oligonucleotide
  Sense strand starting at position 135 of SEQ ID NO: 1162
guuugaaggagguguaugu

SEQ ID NO: 92535 - RNA, 19 nt, Artificial Sequence
  Description of Artificial Sequence: Synthetic oligonucleotide
  Antisense strand to SEQ ID NO: 92454
acauacaccuccuucaaac

SEQ ID NO: 92536 - RNA, 19 nt, Artificial Sequence
  Description of Artificial Sequence: Synthetic oligonucleotide
  Sense strand starting at position 133 of SEQ ID NO: 1162
guguuugaaggagguguau

SEQ ID NO: 92537 - RNA, 19 nt, Artificial Sequence
  Description of Artificial Sequence: Synthetic oligonucleotide
  Antisense strand to SEQ ID NO: 92456
auacaccuccuucaaacac

SEQ ID NO: 92538 - RNA, 19 nt, Artificial Sequence
  Description of Artificial Sequence: Synthetic oligonucleotide
  Sense strand starting at position 102 of SEQ ID NO: 1162
guauguuugagggaggugu

SEQ ID NO: 92539 - RNA, 19 nt, Artificial Sequence
  Description of Artificial Sequence: Synthetic oligonucleotide
  Antisense strand to SEQ ID NO: 92458
acaccucccucaaacauac

SEQ ID NO: 92540 - RNA, 19 nt, Artificial Sequence
  Description of Artificial Sequence: Synthetic oligonucleotide
  Sense strand starting at position 16 of SEQ ID NO: 1162
guguguauuugaaggaggu

SEQ ID NO: 92541 - RNA, 19 nt, Artificial Sequence
  Description of Artificial Sequence: Synthetic oligonucleotide
  Antisense strand to SEQ ID NO: 92460
accuccuucaaauacacac

SEQ ID NO: 92542 - RNA, 19 nt, Artificial Sequence
  Description of Artificial Sequence: Synthetic oligonucleotide
  Sense strand starting at position 3955 of SEQ ID NO: 1163
ggcaauauguaucaaacuc

SEQ ID NO: 92543 - RNA, 19 nt, Artificial Sequence
  Description of Artificial Sequence: Synthetic oligonucleotide
  Antisense strand to SEQ ID NO: 92462
gaguuugauacauauugcc

SEQ ID NO: 92544 - RNA, 19 nt, Artificial Sequence
  Description of Artificial Sequence: Synthetic oligonucleotide
  Sense strand starting at position 3931 of SEQ ID NO: 1163
uaacauccguuuggaaaga

SEQ ID NO: 92545 - RNA, 19 nt, Artificial Sequence
  Description of Artificial Sequence: Synthetic oligonucleotide
  Antisense strand to SEQ ID NO: 92464
ucuuuccaaacggauguua

SEQ ID NO: 92546 - RNA, 19 nt, Artificial Sequence
  Description of Artificial Sequence: Synthetic oligonucleotide
  Sense strand starting at position 3930 of SEQ ID NO: 1163
uuaacauccguuuggaaag

SEQ ID NO: 92547 - RNA, 19 nt, Artificial Sequence
  Description of Artificial Sequence: Synthetic oligonucleotide
  Antisense strand to SEQ ID NO: 92466
cuuuccaaacggauguuaa

SEQ ID NO: 92548 - RNA, 19 nt, Artificial Sequence
  Description of Artificial Sequence: Synthetic oligonucleotide
  Sense strand starting at position 3908 of SEQ ID NO: 1163
acugcugggugcuuauaaa

SEQ ID NO: 92549 - RNA, 19 nt, Artificial Sequence
  Description of Artificial Sequence: Synthetic oligonucleotide
  Antisense strand to SEQ ID NO: 92468
uuuauaagcacccagcagu

SEQ ID NO: 92550 - RNA, 19 nt, Artificial Sequence
  Description of Artificial Sequence: Synthetic oligonucleotide
  Sense strand starting at position 3635 of SEQ ID NO: 1163
uuguuuaccugcgagguga

SEQ ID NO: 92551 - RNA, 19 nt, Artificial Sequence
  Description of Artificial Sequence: Synthetic oligonucleotide
  Antisense strand to SEQ ID NO: 92470
ucaccucgcagguaaacaa

SEQ ID NO: 92552 - RNA, 19 nt, Artificial Sequence
  Description of Artificial Sequence: Synthetic oligonucleotide
  Sense strand starting at position 3552 of SEQ ID NO: 1163
gucugcgcugcuuagaauu

SEQ ID NO: 92553 - RNA, 19 nt, Artificial Sequence
  Description of Artificial Sequence: Synthetic oligonucleotide
  Antisense strand to SEQ ID NO: 92472
aauucuaagcagcgcagac

SEQ ID NO: 92554 - RNA, 19 nt, Artificial Sequence
  Description of Artificial Sequence: Synthetic oligonucleotide
  Sense strand starting at position 3550 of SEQ ID NO: 1163
ucgucugcgcugcuuagaa

SEQ ID NO: 92555 - RNA, 19 nt, Artificial Sequence
  Description of Artificial Sequence: Synthetic oligonucleotide
  Antisense strand to SEQ ID NO: 92474
uucuaagcagcgcagacga

SEQ ID NO: 92556 - RNA, 19 nt, Artificial Sequence
  Description of Artificial Sequence: Synthetic oligonucleotide
  Sense strand starting at position 3535 of SEQ ID NO: 1163
gggagaauggccuggucgu

SEQ ID NO: 92557 - RNA, 19 nt, Artificial Sequence
  Description of Artificial Sequence: Synthetic oligonucleotide
  Antisense strand to SEQ ID NO: 92476
acgaccaggccauucuccc

SEQ ID NO: 92558 - RNA, 19 nt, Artificial Sequence
  Description of Artificial Sequence: Synthetic oligonucleotide
  Sense strand starting at position 3477 of SEQ ID NO: 1163
uggugucaucuccaaacaa

SEQ ID NO: 92559 - RNA, 19 nt, Artificial Sequence
  Description of Artificial Sequence: Synthetic oligonucleotide
  Antisense strand to SEQ ID NO: 92478
uuguuuggagaugacacca

SEQ ID NO: 92560 - RNA, 19 nt, Artificial Sequence
  Description of Artificial Sequence: Synthetic oligonucleotide
  Sense strand starting at position 3375 of SEQ ID NO: 1163
ugcagacauacguguccuu

SEQ ID NO: 92561 - RNA, 19 nt, Artificial Sequence
  Description of Artificial Sequence: Synthetic oligonucleotide
  Antisense strand to SEQ ID NO: 92480
aaggacacguaugucugca

SEQ ID NO: 92562 - RNA, 19 nt, Artificial Sequence
  Description of Artificial Sequence: Synthetic oligonucleotide
  Sense strand starting at position 3357 of SEQ ID NO: 1163
ggcauuuccuuccagaaau

SEQ ID NO: 92563 - RNA, 19 nt, Artificial Sequence
  Description of Artificial Sequence: Synthetic oligonucleotide
  Antisense strand to SEQ ID NO: 92482
auuucuggaaggaaaugcc

SEQ ID NO: 92564 - RNA, 19 nt, Artificial Sequence
  Description of Artificial Sequence: Synthetic oligonucleotide
  Sense strand starting at position 3354 of SEQ ID NO: 1163
cacggcauuuccuuccaga

SEQ ID NO: 92565 - RNA, 19 nt, Artificial Sequence
  Description of Artificial Sequence: Synthetic oligonucleotide
  Antisense strand to SEQ ID NO: 92484
ucuggaaggaaaugccgug

SEQ ID NO: 92566 - RNA, 19 nt, Artificial Sequence
  Description of Artificial Sequence: Synthetic oligonucleotide
  Sense strand starting at position 3205 of SEQ ID NO: 1163
gaguuucuggcagaaauac

SEQ ID NO: 92567 - RNA, 19 nt, Artificial Sequence
  Description of Artificial Sequence: Synthetic oligonucleotide
  Antisense strand to SEQ ID NO: 92486
guauuucugccagaaacuc

SEQ ID NO: 92568 - RNA, 19 nt, Artificial Sequence
  Description of Artificial Sequence: Synthetic oligonucleotide
  Sense strand starting at position 3203 of SEQ ID NO: 1163
gcgaguuucuggcagaaau

SEQ ID NO: 92569 - RNA, 19 nt, Artificial Sequence
  Description of Artificial Sequence: Synthetic oligonucleotide
  Antisense strand to SEQ ID NO: 92488
auuucugccagaaacucgc

SEQ ID NO: 92570 - RNA, 19 nt, Artificial Sequence
  Description of Artificial Sequence: Synthetic oligonucleotide
  Sense strand starting at position 3201 of SEQ ID NO: 1163
acgcgaguuucuggcagaa

SEQ ID NO: 92571 - RNA, 19 nt, Artificial Sequence
  Description of Artificial Sequence: Synthetic oligonucleotide
  Antisense strand to SEQ ID NO: 92490
uucugccagaaacucgcgu

SEQ ID NO: 92572 - RNA, 19 nt, Artificial Sequence
  Description of Artificial Sequence: Synthetic oligonucleotide
  Sense strand starting at position 3133 of SEQ ID NO: 1163
uugccaugcuuacuguauu

SEQ ID NO: 92573 - RNA, 19 nt, Artificial Sequence
  Description of Artificial Sequence: Synthetic oligonucleotide
  Antisense strand to SEQ ID NO: 92492
aauacaguaagcauggcaa

SEQ ID NO: 92574 - RNA, 19 nt, Artificial Sequence
  Description of Artificial Sequence: Synthetic oligonucleotide
  Sense strand starting at position 2452 of SEQ ID NO: 1163
gggucuucguggguuccaa

SEQ ID NO: 92575 - RNA, 19 nt, Artificial Sequence
  Description of Artificial Sequence: Synthetic oligonucleotide
  Antisense strand to SEQ ID NO: 92494
uuggaacccacgaagaccc

SEQ ID NO: 92576 - RNA, 19 nt, Artificial Sequence
  Description of Artificial Sequence: Synthetic oligonucleotide
  Sense strand starting at position 2384 of SEQ ID NO: 1163
ggguauaaauucugcugau

SEQ ID NO: 92577 - RNA, 19 nt, Artificial Sequence
  Description of Artificial Sequence: Synthetic oligonucleotide
  Antisense strand to SEQ ID NO: 92496
aucagcagaauuuauaccc

SEQ ID NO: 92578 - RNA, 19 nt, Artificial Sequence
  Description of Artificial Sequence: Synthetic oligonucleotide
  Sense strand starting at position 2375 of SEQ ID NO: 1163
ucgcgcccuggguauaaau

SEQ ID NO: 92579 - RNA, 19 nt, Artificial Sequence
  Description of Artificial Sequence: Synthetic oligonucleotide
  Antisense strand to SEQ ID NO: 92498
auuuauacccagggcgcga

SEQ ID NO: 92580 - RNA, 19 nt, Artificial Sequence
  Description of Artificial Sequence: Synthetic oligonucleotide
  Sense strand starting at position 1661 of SEQ ID NO: 1163
gaauuaaaucagcgagaaa

SEQ ID NO: 92581 - RNA, 19 nt, Artificial Sequence
  Description of Artificial Sequence: Synthetic oligonucleotide
  Antisense strand to SEQ ID NO: 92500
uuucucgcugauuuaauuc

SEQ ID NO: 92582 - RNA, 19 nt, Artificial Sequence
  Description of Artificial Sequence: Synthetic oligonucleotide
  Sense strand starting at position 1649 of SEQ ID NO: 1163
gcugucuuguuagaauuaa

SEQ ID NO: 92583 - RNA, 19 nt, Artificial Sequence
  Description of Artificial Sequence: Synthetic oligonucleotide
  Antisense strand to SEQ ID NO: 92502
uuaauucuaacaagacagc

SEQ ID NO: 92584 - RNA, 19 nt, Artificial Sequence
  Description of Artificial Sequence: Synthetic oligonucleotide
  Sense strand starting at position 1646 of SEQ ID NO: 1163
cuagcugucuuguuagaau

SEQ ID NO: 92585 - RNA, 19 nt, Artificial Sequence
  Description of Artificial Sequence: Synthetic oligonucleotide
  Antisense strand to SEQ ID NO: 92504
auucuaacaagacagcuag

SEQ ID NO: 92586 - RNA, 19 nt, Artificial Sequence
  Description of Artificial Sequence: Synthetic oligonucleotide
  Sense strand starting at position 1642 of SEQ ID NO: 1163
gcugcuagcugucuuguua

SEQ ID NO: 92587 - RNA, 19 nt, Artificial Sequence
  Description of Artificial Sequence: Synthetic oligonucleotide
  Antisense strand to SEQ ID NO: 92506
uaacaagacagcuagcagc

SEQ ID NO: 92588 - RNA, 19 nt, Artificial Sequence
  Description of Artificial Sequence: Synthetic oligonucleotide
  Sense strand starting at position 1096 of SEQ ID NO: 1163
cgagcagauucccucacaa

SEQ ID NO: 92589 - RNA, 19 nt, Artificial Sequence
  Description of Artificial Sequence: Synthetic oligonucleotide
  Antisense strand to SEQ ID NO: 92508
uugugagggaaucugcucg

SEQ ID NO: 92590 - RNA, 19 nt, Artificial Sequence
  Description of Artificial Sequence: Synthetic oligonucleotide
  Sense strand starting at position 1086 of SEQ ID NO: 1163
cuggaaugcgcgagcagau

SEQ ID NO: 92591 - RNA, 19 nt, Artificial Sequence
  Description of Artificial Sequence: Synthetic oligonucleotide
  Antisense strand to SEQ ID NO: 92510
aucugcucgcgcauuccag

SEQ ID NO: 92592 - RNA, 19 nt, Artificial Sequence
  Description of Artificial Sequence: Synthetic oligonucleotide
  Sense strand starting at position 899 of SEQ ID NO: 1163
ccggcugucucgcuaauuu

SEQ ID NO: 92593 - RNA, 19 nt, Artificial Sequence
  Description of Artificial Sequence: Synthetic oligonucleotide
  Antisense strand to SEQ ID NO: 92512
aaauuagcgagacagccgg

SEQ ID NO: 92594 - RNA, 19 nt, Artificial Sequence
  Description of Artificial Sequence: Synthetic oligonucleotide
  Sense strand starting at position 898 of SEQ ID NO: 1163
uccggcugucucgcuaauu

SEQ ID NO: 92595 - RNA, 19 nt, Artificial Sequence
  Description of Artificial Sequence: Synthetic oligonucleotide
  Antisense strand to SEQ ID NO: 92514
aauuagcgagacagccgga

SEQ ID NO: 92596 - RNA, 19 nt, Artificial Sequence
  Description of Artificial Sequence: Synthetic oligonucleotide
  Sense strand starting at position 818 of SEQ ID NO: 1163
acggauucccuucgggaaa

SEQ ID NO: 92597 - RNA, 19 nt, Artificial Sequence
  Description of Artificial Sequence: Synthetic oligonucleotide
  Antisense strand to SEQ ID NO: 92516
uuucccgaagggaauccgu

SEQ ID NO: 92598 - RNA, 19 nt, Artificial Sequence
  Description of Artificial Sequence: Synthetic oligonucleotide
  Sense strand starting at position 512 of SEQ ID NO: 1163
ccuaguuuguagguaguca

SEQ ID NO: 92599 - RNA, 19 nt, Artificial Sequence
  Description of Artificial Sequence: Synthetic oligonucleotide
  Antisense strand to SEQ ID NO: 92518
ugacuaccuacaaacuagg

SEQ ID NO: 92600 - RNA, 19 nt, Artificial Sequence
  Description of Artificial Sequence: Synthetic oligonucleotide
  Sense strand starting at position 448 of SEQ ID NO: 1163
gaaggaucgccggacagaa

SEQ ID NO: 92601 - RNA, 19 nt, Artificial Sequence
  Description of Artificial Sequence: Synthetic oligonucleotide
  Antisense strand to SEQ ID NO: 92520
uucuguccggcgauccuuc

SEQ ID NO: 92602 - RNA, 19 nt, Artificial Sequence
  Description of Artificial Sequence: Synthetic oligonucleotide
  Sense strand starting at position 447 of SEQ ID NO: 1163
cgaaggaucgccggacaga

SEQ ID NO: 92603 - RNA, 19 nt, Artificial Sequence
  Description of Artificial Sequence: Synthetic oligonucleotide
  Antisense strand to SEQ ID NO: 92522
ucuguccggcgauccuucg

SEQ ID NO: 92604 - RNA, 19 nt, Artificial Sequence
  Description of Artificial Sequence: Synthetic oligonucleotide
  Sense strand starting at position 365 of SEQ ID NO: 1163
ucuaaauaggcuuggauga

SEQ ID NO: 92605 - RNA, 19 nt, Artificial Sequence
  Description of Artificial Sequence: Synthetic oligonucleotide
  Antisense strand to SEQ ID NO: 92524
ucauccaagccuauuuaga

SEQ ID NO: 92606 - RNA, 19 nt, Artificial Sequence
  Description of Artificial Sequence: Synthetic oligonucleotide
  Sense strand starting at position 257 of SEQ ID NO: 1163
acaucuuagcgguaaacuc

SEQ ID NO: 92607 - RNA, 19 nt, Artificial Sequence
  Description of Artificial Sequence: Synthetic oligonucleotide
  Antisense strand to SEQ ID NO: 92526
gaguuuaccgcuaagaugu

SEQ ID NO: 92608 - RNA, 19 nt, Artificial Sequence
  Description of Artificial Sequence: Synthetic oligonucleotide
  Sense strand starting at position 3868 of SEQ ID NO: 1165
guaauaacacccugaugug

SEQ ID NO: 92609 - RNA, 19 nt, Artificial Sequence
  Description of Artificial Sequence: Synthetic oligonucleotide
  Antisense strand to SEQ ID NO: 92528
cacaucaggguguuauuac

SEQ ID NO: 92610 - RNA, 19 nt, Artificial Sequence
  Description of Artificial Sequence: Synthetic oligonucleotide
  Sense strand starting at position 3803 of SEQ ID NO: 1165
ccgacagguguuuauuauu

SEQ ID NO: 92611 - RNA, 19 nt, Artificial Sequence
  Description of Artificial Sequence: Synthetic oligonucleotide
  Antisense strand to SEQ ID NO: 92530
aauaauaaacaccugucgg

SEQ ID NO: 92612 - RNA, 19 nt, Artificial Sequence
  Description of Artificial Sequence: Synthetic oligonucleotide
  Sense strand starting at position 3744 of SEQ ID NO: 1165
agaagugauuaaucccauu

SEQ ID NO: 92613 - RNA, 19 nt, Artificial Sequence
  Description of Artificial Sequence: Synthetic oligonucleotide
  Antisense strand to SEQ ID NO: 92532
aaugggauuaaucacuucu

SEQ ID NO: 92614 - RNA, 19 nt, Artificial Sequence
  Description of Artificial Sequence: Synthetic oligonucleotide
  Sense strand starting at position 3636 of SEQ ID NO: 1165
ccacuagguuucuuaagac

SEQ ID NO: 92615 - RNA, 19 nt, Artificial Sequence
  Description of Artificial Sequence: Synthetic oligonucleotide
  Antisense strand to SEQ ID NO: 92534
gucuuaagaaaccuagugg

SEQ ID NO: 92616 - RNA, 19 nt, Artificial Sequence
  Description of Artificial Sequence: Synthetic oligonucleotide
  Sense strand starting at position 3635 of SEQ ID NO: 1165
accacuagguuucuuaaga

SEQ ID NO: 92617 - RNA, 19 nt, Artificial Sequence
  Description of Artificial Sequence: Synthetic oligonucleotide
  Antisense strand to SEQ ID NO: 92536
ucuuaagaaaccuaguggu

SEQ ID NO: 92618 - RNA, 19 nt, Artificial Sequence
  Description of Artificial Sequence: Synthetic oligonucleotide
  Sense strand starting at position 3598 of SEQ ID NO: 1165
gcuugcgauauugaaauua

SEQ ID NO: 92619 - RNA, 19 nt, Artificial Sequence
  Description of Artificial Sequence: Synthetic oligonucleotide
  Antisense strand to SEQ ID NO: 92538
uaauuucaauaucgcaagc

SEQ ID NO: 92620 - RNA, 19 nt, Artificial Sequence
  Description of Artificial Sequence: Synthetic oligonucleotide
  Sense strand starting at position 3596 of SEQ ID NO: 1165
gcgcuugcgauauugaaau

SEQ ID NO: 92621 - RNA, 19 nt, Artificial Sequence
  Description of Artificial Sequence: Synthetic oligonucleotide
  Antisense strand to SEQ ID NO: 92540
auuucaauaucgcaagcgc

SEQ ID NO: 92622 - RNA, 19 nt, Artificial Sequence
  Description of Artificial Sequence: Synthetic oligonucleotide
  Sense strand starting at position 3522 of SEQ ID NO: 1165
cuaggaauuggcugggauu

SEQ ID NO: 92623 - RNA, 19 nt, Artificial Sequence
  Description of Artificial Sequence: Synthetic oligonucleotide
  Antisense strand to SEQ ID NO: 92542
aaucccagccaauuccuag

SEQ ID NO: 92624 - RNA, 19 nt, Artificial Sequence
  Description of Artificial Sequence: Synthetic oligonucleotide
  Sense strand starting at position 3326 of SEQ ID NO: 1165
agauacaccuucguuuaca

SEQ ID NO: 92625 - RNA, 19 nt, Artificial Sequence
  Description of Artificial Sequence: Synthetic oligonucleotide
  Antisense strand to SEQ ID NO: 92544
uguaaacgaagguguaucu

SEQ ID NO: 92626 - RNA, 19 nt, Artificial Sequence
  Description of Artificial Sequence: Synthetic oligonucleotide
  Sense strand starting at position 3325 of SEQ ID NO: 1165
gagauacaccuucguuuac

SEQ ID NO: 92627 - RNA, 19 nt, Artificial Sequence
  Description of Artificial Sequence: Synthetic oligonucleotide
  Antisense strand to SEQ ID NO: 92546
guaaacgaagguguaucuc

SEQ ID NO: 92628 - RNA, 19 nt, Artificial Sequence
  Description of Artificial Sequence: Synthetic oligonucleotide
  Sense strand starting at position 3194 of SEQ ID NO: 1165
auggccagacauugaugua

SEQ ID NO: 92629 - RNA, 19 nt, Artificial Sequence
  Description of Artificial Sequence: Synthetic oligonucleotide
  Antisense strand to SEQ ID NO: 92548
uacaucaaugucuggccau

SEQ ID NO: 92630 - RNA, 19 nt, Artificial Sequence
  Description of Artificial Sequence: Synthetic oligonucleotide
  Sense strand starting at position 3189 of SEQ ID NO: 1165
gugugauggccagacauug

SEQ ID NO: 92631 - RNA, 19 nt, Artificial Sequence
  Description of Artificial Sequence: Synthetic oligonucleotide
  Antisense strand to SEQ ID NO: 92550
caaugucuggccaucacac

SEQ ID NO: 92632 - RNA, 19 nt, Artificial Sequence
  Description of Artificial Sequence: Synthetic oligonucleotide
  Sense strand starting at position 3019 of SEQ ID NO: 1165
ugggaaaccuacucugagu

SEQ ID NO: 92633 - RNA, 19 nt, Artificial Sequence
  Description of Artificial Sequence: Synthetic oligonucleotide
  Antisense strand to SEQ ID NO: 92552
acucagaguagguuuccca

SEQ ID NO: 92634 - RNA, 19 nt, Artificial Sequence
  Description of Artificial Sequence: Synthetic oligonucleotide
  Sense strand starting at position 2915 of SEQ ID NO: 1165
agaggcuuauaagcuuaua

SEQ ID NO: 92635 - RNA, 19 nt, Artificial Sequence
  Description of Artificial Sequence: Synthetic oligonucleotide
  Antisense strand to SEQ ID NO: 92554
uauaagcuuauaagccucu

SEQ ID NO: 92636 - RNA, 19 nt, Artificial Sequence
  Description of Artificial Sequence: Synthetic oligonucleotide
  Sense strand starting at position 2781 of SEQ ID NO: 1165
gauguuguggcauauacaa

SEQ ID NO: 92637 - RNA, 19 nt, Artificial Sequence
  Description of Artificial Sequence: Synthetic oligonucleotide
  Antisense strand to SEQ ID NO: 92556
uuguauaugccacaacauc

SEQ ID NO: 92638 - RNA, 19 nt, Artificial Sequence
  Description of Artificial Sequence: Synthetic oligonucleotide
  Sense strand starting at position 2755 of SEQ ID NO: 1165
gcuuguuauuugucaaacg

SEQ ID NO: 92639 - RNA, 19 nt, Artificial Sequence
  Description of Artificial Sequence: Synthetic oligonucleotide
  Antisense strand to SEQ ID NO: 92558
cguuugacaaauaacaagc

SEQ ID NO: 92640 - RNA, 19 nt, Artificial Sequence
  Description of Artificial Sequence: Synthetic oligonucleotide
  Sense strand starting at position 2752 of SEQ ID NO: 1165
guggcuuguuauuugucaa

SEQ ID NO: 92641 - RNA, 19 nt, Artificial Sequence
  Description of Artificial Sequence: Synthetic oligonucleotide
  Antisense strand to SEQ ID NO: 92560
uugacaaauaacaagccac

SEQ ID NO: 92642 - RNA, 19 nt, Artificial Sequence
  Description of Artificial Sequence: Synthetic oligonucleotide
  Sense strand starting at position 2751 of SEQ ID NO: 1165
aguggcuuguuauuuguca

SEQ ID NO: 92643 - RNA, 19 nt, Artificial Sequence
  Description of Artificial Sequence: Synthetic oligonucleotide
  Antisense strand to SEQ ID NO: 92562
ugacaaauaacaagccacu

SEQ ID NO: 92644 - RNA, 19 nt, Artificial Sequence
  Description of Artificial Sequence: Synthetic oligonucleotide
  Sense strand starting at position 2748 of SEQ ID NO: 1165
gcaaguggcuuguuauuug

SEQ ID NO: 92645 - RNA, 19 nt, Artificial Sequence
  Description of Artificial Sequence: Synthetic oligonucleotide
  Antisense strand to SEQ ID NO: 92564
caaauaacaagccacuugc

SEQ ID NO: 92646 - RNA, 19 nt, Artificial Sequence
  Description of Artificial Sequence: Synthetic oligonucleotide
  Sense strand starting at position 2699 of SEQ ID NO: 1165
cuugaagagcuagguaaga

SEQ ID NO: 92647 - RNA, 19 nt, Artificial Sequence
  Description of Artificial Sequence: Synthetic oligonucleotide
  Antisense strand to SEQ ID NO: 92566
ucuuaccuagcucuucaag

SEQ ID NO: 92648 - RNA, 19 nt, Artificial Sequence
  Description of Artificial Sequence: Synthetic oligonucleotide
  Sense strand starting at position 2408 of SEQ ID NO: 1165
gggagaagccuuuagcaau

SEQ ID NO: 92649 - RNA, 19 nt, Artificial Sequence
  Description of Artificial Sequence: Synthetic oligonucleotide
  Antisense strand to SEQ ID NO: 92568
auugcuaaaggcuucuccc

SEQ ID NO: 92650 - RNA, 19 nt, Artificial Sequence
  Description of Artificial Sequence: Synthetic oligonucleotide
  Sense strand starting at position 2376 of SEQ ID NO: 1165
gcuauuuauuguuucucau

SEQ ID NO: 92651 - RNA, 19 nt, Artificial Sequence
  Description of Artificial Sequence: Synthetic oligonucleotide
  Antisense strand to SEQ ID NO: 92570
augagaaacaauaaauagc

SEQ ID NO: 92652 - RNA, 19 nt, Artificial Sequence
  Description of Artificial Sequence: Synthetic oligonucleotide
  Sense strand starting at position 2375 of SEQ ID NO: 1165
ggcuauuuauuguuucuca

SEQ ID NO: 92653 - RNA, 19 nt, Artificial Sequence
  Description of Artificial Sequence: Synthetic oligonucleotide
  Antisense strand to SEQ ID NO: 92572
ugagaaacaauaaauagcc

SEQ ID NO: 92654 - RNA, 19 nt, Artificial Sequence
  Description of Artificial Sequence: Synthetic oligonucleotide
  Sense strand starting at position 2191 of SEQ ID NO: 1165
uuugaugucuaaucaucag

SEQ ID NO: 92655 - RNA, 19 nt, Artificial Sequence
  Description of Artificial Sequence: Synthetic oligonucleotide
  Antisense strand to SEQ ID NO: 92574
cugaugauuagacaucaaa

SEQ ID NO: 92656 - RNA, 19 nt, Artificial Sequence
  Description of Artificial Sequence: Synthetic oligonucleotide
  Sense strand starting at position 2068 of SEQ ID NO: 1165
ccuacucuugcugagguua

SEQ ID NO: 92657 - RNA, 19 nt, Artificial Sequence
  Description of Artificial Sequence: Synthetic oligonucleotide
  Antisense strand to SEQ ID NO: 92576
uaaccucagcaagaguagg

SEQ ID NO: 92658 - RNA, 19 nt, Artificial Sequence
  Description of Artificial Sequence: Synthetic oligonucleotide
  Sense strand starting at position 1738 of SEQ ID NO: 1165
aucauagcuguugauuauu

SEQ ID NO: 92659 - RNA, 19 nt, Artificial Sequence
  Description of Artificial Sequence: Synthetic oligonucleotide
  Antisense strand to SEQ ID NO: 92578
aauaaucaacagcuaugau

SEQ ID NO: 92660 - RNA, 19 nt, Artificial Sequence
  Description of Artificial Sequence: Synthetic oligonucleotide
  Sense strand starting at position 1639 of SEQ ID NO: 1165
gucgcugguuuauuugaga

SEQ ID NO: 92661 - RNA, 19 nt, Artificial Sequence
  Description of Artificial Sequence: Synthetic oligonucleotide
  Antisense strand to SEQ ID NO: 92580
ucucaaauaaaccagcgac

SEQ ID NO: 92662 - RNA, 19 nt, Artificial Sequence
  Description of Artificial Sequence: Synthetic oligonucleotide
  Sense strand starting at position 1456 of SEQ ID NO: 1165
cagugaaggguaggucaau

SEQ ID NO: 92663 - RNA, 19 nt, Artificial Sequence
  Description of Artificial Sequence: Synthetic oligonucleotide
  Antisense strand to SEQ ID NO: 92582
auugaccuacccuucacug

SEQ ID NO: 92664 - RNA, 19 nt, Artificial Sequence
  Description of Artificial Sequence: Synthetic oligonucleotide
  Sense strand starting at position 1409 of SEQ ID NO: 1165
ucuagagaggucuggaugu

SEQ ID NO: 92665 - RNA, 19 nt, Artificial Sequence
  Description of Artificial Sequence: Synthetic oligonucleotide
  Antisense strand to SEQ ID NO: 92584
acauccagaccucucuaga

SEQ ID NO: 92666 - RNA, 19 nt, Artificial Sequence
  Description of Artificial Sequence: Synthetic oligonucleotide
  Sense strand starting at position 1362 of SEQ ID NO: 1165
guucuuagugaacauaaug

SEQ ID NO: 92667 - RNA, 19 nt, Artificial Sequence
  Description of Artificial Sequence: Synthetic oligonucleotide
  Antisense strand to SEQ ID NO: 92586
cauuauguucacuaagaac

SEQ ID NO: 92668 - RNA, 19 nt, Artificial Sequence
  Description of Artificial Sequence: Synthetic oligonucleotide
  Sense strand starting at position 1335 of SEQ ID NO: 1165
ugaauuaagugcucaucca

SEQ ID NO: 92669 - RNA, 19 nt, Artificial Sequence
  Description of Artificial Sequence: Synthetic oligonucleotide
  Antisense strand to SEQ ID NO: 92588
uggaugagcacuuaauuca

SEQ ID NO: 92670 - RNA, 19 nt, Artificial Sequence
  Description of Artificial Sequence: Synthetic oligonucleotide
  Sense strand starting at position 1296 of SEQ ID NO: 1165
auggcaucacuuggaaauu

SEQ ID NO: 92671 - RNA, 19 nt, Artificial Sequence
  Description of Artificial Sequence: Synthetic oligonucleotide
  Antisense strand to SEQ ID NO: 92590
aauuuccaagugaugccau

SEQ ID NO: 92672 - RNA, 19 nt, Artificial Sequence
  Description of Artificial Sequence: Synthetic oligonucleotide
  Sense strand starting at position 1171 of SEQ ID NO: 1165
ggguuuaagagguaggcaa

SEQ ID NO: 92673 - RNA, 19 nt, Artificial Sequence
  Description of Artificial Sequence: Synthetic oligonucleotide
  Antisense strand to SEQ ID NO: 92592
uugccuaccucuuaaaccc

SEQ ID NO: 92674 - RNA, 19 nt, Artificial Sequence
  Description of Artificial Sequence: Synthetic oligonucleotide
  Sense strand starting at position 1160 of SEQ ID NO: 1165
augggaguucaggguuuaa

SEQ ID NO: 92675 - RNA, 19 nt, Artificial Sequence
  Description of Artificial Sequence: Synthetic oligonucleotide
  Antisense strand to SEQ ID NO: 92594
uuaaacccugaacucccau

SEQ ID NO: 92676 - RNA, 19 nt, Artificial Sequence
  Description of Artificial Sequence: Synthetic oligonucleotide
  Sense strand starting at position 1065 of SEQ ID NO: 1165
ggagacugguucuuguaac

SEQ ID NO: 92677 - RNA, 19 nt, Artificial Sequence
  Description of Artificial Sequence: Synthetic oligonucleotide
  Antisense strand to SEQ ID NO: 92596
guuacaagaaccagucucc

SEQ ID NO: 92678 - RNA, 19 nt, Artificial Sequence
  Description of Artificial Sequence: Synthetic oligonucleotide
  Sense strand starting at position 916 of SEQ ID NO: 1165
aacuuuggugucuaagguu

SEQ ID NO: 92679 - RNA, 19 nt, Artificial Sequence
  Description of Artificial Sequence: Synthetic oligonucleotide
  Antisense strand to SEQ ID NO: 92598
aaccuuagacaccaaaguu

SEQ ID NO: 92680 - RNA, 19 nt, Artificial Sequence
  Description of Artificial Sequence: Synthetic oligonucleotide
  Sense strand starting at position 605 of SEQ ID NO: 1165
gaguucgcugaucaagaaa

SEQ ID NO: 92681 - RNA, 19 nt, Artificial Sequence
  Description of Artificial Sequence: Synthetic oligonucleotide
  Antisense strand to SEQ ID NO: 92600
uuucuugaucagcgaacuc

SEQ ID NO: 92682 - RNA, 19 nt, Artificial Sequence
  Description of Artificial Sequence: Synthetic oligonucleotide
  Sense strand starting at position 604 of SEQ ID NO: 1165
ggaguucgcugaucaagaa

SEQ ID NO: 92683 - RNA, 19 nt, Artificial Sequence
  Description of Artificial Sequence: Synthetic oligonucleotide
  Antisense strand to SEQ ID NO: 92602
uucuugaucagcgaacucc

SEQ ID NO: 92684 - RNA, 19 nt, Artificial Sequence
  Description of Artificial Sequence: Synthetic oligonucleotide
  Sense strand starting at position 592 of SEQ ID NO: 1165
cagauauagccuggaguuc

SEQ ID NO: 92685 - RNA, 19 nt, Artificial Sequence
  Description of Artificial Sequence: Synthetic oligonucleotide
  Antisense strand to SEQ ID NO: 92604
gaacuccaggcuauaucug

SEQ ID NO: 92686 - RNA, 19 nt, Artificial Sequence
  Description of Artificial Sequence: Synthetic oligonucleotide
  Sense strand starting at position 580 of SEQ ID NO: 1165
aggcaaaccgggcagauau

SEQ ID NO: 92687 - RNA, 19 nt, Artificial Sequence
  Description of Artificial Sequence: Synthetic oligonucleotide
  Antisense strand to SEQ ID NO: 92606
auaucugcccgguuugccu

SEQ ID NO: 92688 - RNA, 19 nt, Artificial Sequence
  Description of Artificial Sequence: Synthetic oligonucleotide
  Sense strand starting at position 3975 of SEQ ID NO: 1164
gcucuuccgaauggaaagu

SEQ ID NO: 92689 - RNA, 19 nt, Artificial Sequence
  Description of Artificial Sequence: Synthetic oligonucleotide
  Antisense strand to SEQ ID NO: 92608
acuuuccauucggaagagc

SEQ ID NO: 92690 - RNA, 19 nt, Artificial Sequence
  Description of Artificial Sequence: Synthetic oligonucleotide
  Sense strand starting at position 3952 of SEQ ID NO: 1164
gaaauagcaucguugugga

SEQ ID NO: 92691 - RNA, 19 nt, Artificial Sequence
  Description of Artificial Sequence: Synthetic oligonucleotide
  Antisense strand to SEQ ID NO: 92610
uccacaacgaugcuauuuc

SEQ ID NO: 92692 - RNA, 19 nt, Artificial Sequence
  Description of Artificial Sequence: Synthetic oligonucleotide
  Sense strand starting at position 3598 of SEQ ID NO: 1164
ccgaguuaccacuacaaau

SEQ ID NO: 92693 - RNA, 19 nt, Artificial Sequence
  Description of Artificial Sequence: Synthetic oligonucleotide
  Antisense strand to SEQ ID NO: 92612
auuuguagugguaacucgg

SEQ ID NO: 92694 - RNA, 19 nt, Artificial Sequence
  Description of Artificial Sequence: Synthetic oligonucleotide
  Sense strand starting at position 3555 of SEQ ID NO: 1164
uagccuuuccugugaugaa

SEQ ID NO: 92695 - RNA, 19 nt, Artificial Sequence
  Description of Artificial Sequence: Synthetic oligonucleotide
  Antisense strand to SEQ ID NO: 92614
uucaucacaggaaaggcua

SEQ ID NO: 92696 - RNA, 19 nt, Artificial Sequence
  Description of Artificial Sequence: Synthetic oligonucleotide
  Sense strand starting at position 3551 of SEQ ID NO: 1164
uagauagccuuuccuguga

SEQ ID NO: 92697 - RNA, 19 nt, Artificial Sequence
  Description of Artificial Sequence: Synthetic oligonucleotide
  Antisense strand to SEQ ID NO: 92616
ucacaggaaaggcuaucua

SEQ ID NO: 92698 - RNA, 19 nt, Artificial Sequence
  Description of Artificial Sequence: Synthetic oligonucleotide
  Sense strand starting at position 3468 of SEQ ID NO: 1164
cuugccuuauuuguauaga

SEQ ID NO: 92699 - RNA, 19 nt, Artificial Sequence
  Description of Artificial Sequence: Synthetic oligonucleotide
  Antisense strand to SEQ ID NO: 92618
ucuauacaaauaaggcaag

SEQ ID NO: 92700 - RNA, 19 nt, Artificial Sequence
  Description of Artificial Sequence: Synthetic oligonucleotide
  Sense strand starting at position 3240 of SEQ ID NO: 1164
cucuuugugguauaaacuu

SEQ ID NO: 92701 - RNA, 19 nt, Artificial Sequence
  Description of Artificial Sequence: Synthetic oligonucleotide
  Antisense strand to SEQ ID NO: 92620
aaguuuauaccacaaagag

SEQ ID NO: 92702 - RNA, 19 nt, Artificial Sequence
  Description of Artificial Sequence: Synthetic oligonucleotide
  Sense strand starting at position 3234 of SEQ ID NO: 1164
aacagacucuuugugguau

SEQ ID NO: 92703 - RNA, 19 nt, Artificial Sequence
  Description of Artificial Sequence: Synthetic oligonucleotide
  Antisense strand to SEQ ID NO: 92622
auaccacaaagagucuguu

SEQ ID NO: 92704 - RNA, 19 nt, Artificial Sequence
  Description of Artificial Sequence: Synthetic oligonucleotide
  Sense strand starting at position 3210 of SEQ ID NO: 1164
aagauuggaagguguguuu

SEQ ID NO: 92705 - RNA, 19 nt, Artificial Sequence
  Description of Artificial Sequence: Synthetic oligonucleotide
  Antisense strand to SEQ ID NO: 92624
aaacacaccuuccaaucuu

SEQ ID NO: 92706 - RNA, 19 nt, Artificial Sequence
  Description of Artificial Sequence: Synthetic oligonucleotide
  Sense strand starting at position 3180 of SEQ ID NO: 1164
ggagguauucaggguaccu

SEQ ID NO: 92707 - RNA, 19 nt, Artificial Sequence
  Description of Artificial Sequence: Synthetic oligonucleotide
  Antisense strand to SEQ ID NO: 92626
agguacccugaauaccucc

SEQ ID NO: 92708 - RNA, 19 nt, Artificial Sequence
  Description of Artificial Sequence: Synthetic oligonucleotide
  Sense strand starting at position 3034 of SEQ ID NO: 1164
gcgacuagauuugaaauca

SEQ ID NO: 92709 - RNA, 19 nt, Artificial Sequence
  Description of Artificial Sequence: Synthetic oligonucleotide
  Antisense strand to SEQ ID NO: 92628
ugauuucaaaucuagucgc

SEQ ID NO: 92710 - RNA, 19 nt, Artificial Sequence
  Description of Artificial Sequence: Synthetic oligonucleotide
  Sense strand starting at position 3022 of SEQ ID NO: 1164
agcuuaugauuugcgacua

SEQ ID NO: 92711 - RNA, 19 nt, Artificial Sequence
  Description of Artificial Sequence: Synthetic oligonucleotide
  Antisense strand to SEQ ID NO: 92630
uagucgcaaaucauaagcu

SEQ ID NO: 92712 - RNA, 19 nt, Artificial Sequence
  Description of Artificial Sequence: Synthetic oligonucleotide
  Sense strand starting at position 2959 of SEQ ID NO: 1164
ucgcgcucccuuuccgaaa

SEQ ID NO: 92713 - RNA, 19 nt, Artificial Sequence
  Description of Artificial Sequence: Synthetic oligonucleotide
  Antisense strand to SEQ ID NO: 92632
uuucggaaagggagcgcga

SEQ ID NO: 92714 - RNA, 19 nt, Artificial Sequence
  Description of Artificial Sequence: Synthetic oligonucleotide
  Sense strand starting at position 2938 of SEQ ID NO: 1164
ggagcugacuuaucuagca

SEQ ID NO: 92715 - RNA, 19 nt, Artificial Sequence
  Description of Artificial Sequence: Synthetic oligonucleotide
  Antisense strand to SEQ ID NO: 92634
ugcuagauaagucagcucc

SEQ ID NO: 92716 - RNA, 19 nt, Artificial Sequence
  Description of Artificial Sequence: Synthetic oligonucleotide
  Sense strand starting at position 2848 of SEQ ID NO: 1164
aggucugggugacuugaaa

SEQ ID NO: 92717 - RNA, 19 nt, Artificial Sequence
  Description of Artificial Sequence: Synthetic oligonucleotide
  Antisense strand to SEQ ID NO: 92636
uuucaagucacccagaccu

SEQ ID NO: 92718 - RNA, 19 nt, Artificial Sequence
  Description of Artificial Sequence: Synthetic oligonucleotide
  Sense strand starting at position 2590 of SEQ ID NO: 1164
aaagucuuuccuggagaaa

SEQ ID NO: 92719 - RNA, 19 nt, Artificial Sequence
  Description of Artificial Sequence: Synthetic oligonucleotide
  Antisense strand to SEQ ID NO: 92638
uuucuccaggaaagacuuu

SEQ ID NO: 92720 - RNA, 19 nt, Artificial Sequence
  Description of Artificial Sequence: Synthetic oligonucleotide
  Sense strand starting at position 2587 of SEQ ID NO: 1164
gggaaagucuuuccuggag

SEQ ID NO: 92721 - RNA, 19 nt, Artificial Sequence
  Description of Artificial Sequence: Synthetic oligonucleotide
  Antisense strand to SEQ ID NO: 92640
cuccaggaaagacuuuccc

SEQ ID NO: 92722 - RNA, 19 nt, Artificial Sequence
  Description of Artificial Sequence: Synthetic oligonucleotide
  Sense strand starting at position 2393 of SEQ ID NO: 1164
ugugucuucguccaaagag

SEQ ID NO: 92723 - RNA, 19 nt, Artificial Sequence
  Description of Artificial Sequence: Synthetic oligonucleotide
  Antisense strand to SEQ ID NO: 92642
cucuuuggacgaagacaca

SEQ ID NO: 92724 - RNA, 19 nt, Artificial Sequence
  Description of Artificial Sequence: Synthetic oligonucleotide
  Sense strand starting at position 2377 of SEQ ID NO: 1164
aggauaaugcuacaagugu

SEQ ID NO: 92725 - RNA, 19 nt, Artificial Sequence
  Description of Artificial Sequence: Synthetic oligonucleotide
  Antisense strand to SEQ ID NO: 92644
acacuuguagcauuauccu

SEQ ID NO: 92726 - RNA, 19 nt, Artificial Sequence
  Description of Artificial Sequence: Synthetic oligonucleotide
  Sense strand starting at position 2363 of SEQ ID NO: 1164
agcugaugccgagaaggau

SEQ ID NO: 92727 - RNA, 19 nt, Artificial Sequence
  Description of Artificial Sequence: Synthetic oligonucleotide
  Antisense strand to SEQ ID NO: 92646
auccuucucggcaucagcu

SEQ ID NO: 92728 - RNA, 19 nt, Artificial Sequence
  Description of Artificial Sequence: Synthetic oligonucleotide
  Sense strand starting at position 2272 of SEQ ID NO: 1164
uagggcugcuuaucacaua

SEQ ID NO: 92729 - RNA, 19 nt, Artificial Sequence
  Description of Artificial Sequence: Synthetic oligonucleotide
  Antisense strand to SEQ ID NO: 92648
uaugugauaagcagcccua

SEQ ID NO: 92730 - RNA, 19 nt, Artificial Sequence
  Description of Artificial Sequence: Synthetic oligonucleotide
  Sense strand starting at position 2097 of SEQ ID NO: 1164
uucugaaccuuguuuagga

SEQ ID NO: 92731 - RNA, 19 nt, Artificial Sequence
  Description of Artificial Sequence: Synthetic oligonucleotide
  Antisense strand to SEQ ID NO: 92650
uccuaaacaagguucagaa

SEQ ID NO: 92732 - RNA, 19 nt, Artificial Sequence
  Description of Artificial Sequence: Synthetic oligonucleotide
  Sense strand starting at position 2060 of SEQ ID NO: 1164
aauugccaggucugaagau

SEQ ID NO: 92733 - RNA, 19 nt, Artificial Sequence
  Description of Artificial Sequence: Synthetic oligonucleotide
  Antisense strand to SEQ ID NO: 92652
aucuucagaccuggcaauu

SEQ ID NO: 92734 - RNA, 19 nt, Artificial Sequence
  Description of Artificial Sequence: Synthetic oligonucleotide
  Sense strand starting at position 2016 of SEQ ID NO: 1164
gugcaaugauuacugacua

SEQ ID NO: 92735 - RNA, 19 nt, Artificial Sequence
  Description of Artificial Sequence: Synthetic oligonucleotide
  Antisense strand to SEQ ID NO: 92654
uagucaguaaucauugcac

SEQ ID NO: 92736 - RNA, 19 nt, Artificial Sequence
  Description of Artificial Sequence: Synthetic oligonucleotide
  Sense strand starting at position 2010 of SEQ ID NO: 1164
gagggagugcaaugauuac

SEQ ID NO: 92737 - RNA, 19 nt, Artificial Sequence
  Description of Artificial Sequence: Synthetic oligonucleotide
  Antisense strand to SEQ ID NO: 92656
guaaucauugcacucccuc

SEQ ID NO: 92738 - RNA, 19 nt, Artificial Sequence
  Description of Artificial Sequence: Synthetic oligonucleotide
  Sense strand starting at position 1222 of SEQ ID NO: 1164
ggcuuagaccgcuuucguu

SEQ ID NO: 92739 - RNA, 19 nt, Artificial Sequence
  Description of Artificial Sequence: Synthetic oligonucleotide
  Antisense strand to SEQ ID NO: 92658
aacgaaagcggucuaagcc

SEQ ID NO: 92740 - RNA, 19 nt, Artificial Sequence
  Description of Artificial Sequence: Synthetic oligonucleotide
  Sense strand starting at position 1174 of SEQ ID NO: 1164
caaguauuugcuggaguuu

SEQ ID NO: 92741 - RNA, 19 nt, Artificial Sequence
  Description of Artificial Sequence: Synthetic oligonucleotide
  Antisense strand to SEQ ID NO: 92660
aaacuccagcaaauacuug

SEQ ID NO: 92742 - RNA, 19 nt, Artificial Sequence
  Description of Artificial Sequence: Synthetic oligonucleotide
  Sense strand starting at position 1161 of SEQ ID NO: 1164
acucaaguguuuccaagua

SEQ ID NO: 92743 - RNA, 19 nt, Artificial Sequence
  Description of Artificial Sequence: Synthetic oligonucleotide
  Antisense strand to SEQ ID NO: 92662
uacuuggaaacacuugagu

SEQ ID NO: 92744 - RNA, 19 nt, Artificial Sequence
  Description of Artificial Sequence: Synthetic oligonucleotide
  Sense strand starting at position 1000 of SEQ ID NO: 1164
cuuauugcucaguaaguca

SEQ ID NO: 92745 - RNA, 19 nt, Artificial Sequence
  Description of Artificial Sequence: Synthetic oligonucleotide
  Antisense strand to SEQ ID NO: 92664
ugacuuacugagcaauaag

SEQ ID NO: 92746 - RNA, 19 nt, Artificial Sequence
  Description of Artificial Sequence: Synthetic oligonucleotide
  Sense strand starting at position 997 of SEQ ID NO: 1164
ccacuuauugcucaguaag

SEQ ID NO: 92747 - RNA, 19 nt, Artificial Sequence
  Description of Artificial Sequence: Synthetic oligonucleotide
  Antisense strand to SEQ ID NO: 92666
cuuacugagcaauaagugg

SEQ ID NO: 92748 - RNA, 19 nt, Artificial Sequence
  Description of Artificial Sequence: Synthetic oligonucleotide
  Sense strand starting at position 985 of SEQ ID NO: 1164
agguguaaauugccacuua

SEQ ID NO: 92749 - RNA, 19 nt, Artificial Sequence
  Description of Artificial Sequence: Synthetic oligonucleotide
  Antisense strand to SEQ ID NO: 92668
uaaguggcaauuuacaccu

SEQ ID NO: 92750 - RNA, 19 nt, Artificial Sequence
  Description of Artificial Sequence: Synthetic oligonucleotide
  Sense strand starting at position 978 of SEQ ID NO: 1164
uucuuuaagguguaaauug

SEQ ID NO: 92751 - RNA, 19 nt, Artificial Sequence
  Description of Artificial Sequence: Synthetic oligonucleotide
  Antisense strand to SEQ ID NO: 92670
caauuuacaccuuaaagaa

SEQ ID NO: 92752 - RNA, 19 nt, Artificial Sequence
  Description of Artificial Sequence: Synthetic oligonucleotide
  Sense strand starting at position 952 of SEQ ID NO: 1164
uagaguggcgagugauuua

SEQ ID NO: 92753 - RNA, 19 nt, Artificial Sequence
  Description of Artificial Sequence: Synthetic oligonucleotide
  Antisense strand to SEQ ID NO: 92672
uaaaucacucgccacucua

SEQ ID NO: 92754 - RNA, 19 nt, Artificial Sequence
  Description of Artificial Sequence: Synthetic oligonucleotide
  Sense strand starting at position 882 of SEQ ID NO: 1164
cgaugacaauuugaaugaa

SEQ ID NO: 92755 - RNA, 19 nt, Artificial Sequence
  Description of Artificial Sequence: Synthetic oligonucleotide
  Antisense strand to SEQ ID NO: 92674
uucauucaaauugucaucg

SEQ ID NO: 92756 - RNA, 19 nt, Artificial Sequence
  Description of Artificial Sequence: Synthetic oligonucleotide
  Sense strand starting at position 874 of SEQ ID NO: 1164
guuuguuccgaugacaauu

SEQ ID NO: 92757 - RNA, 19 nt, Artificial Sequence
  Description of Artificial Sequence: Synthetic oligonucleotide
  Antisense strand to SEQ ID NO: 92676
aauugucaucggaacaaac

SEQ ID NO: 92758 - RNA, 19 nt, Artificial Sequence
  Description of Artificial Sequence: Synthetic oligonucleotide
  Sense strand starting at position 843 of SEQ ID NO: 1164
gcuaauuacagcgggauuu

SEQ ID NO: 92759 - RNA, 19 nt, Artificial Sequence
  Description of Artificial Sequence: Synthetic oligonucleotide
  Antisense strand to SEQ ID NO: 92678
aaaucccgcuguaauuagc

SEQ ID NO: 92760 - RNA, 19 nt, Artificial Sequence
  Description of Artificial Sequence: Synthetic oligonucleotide
  Sense strand starting at position 842 of SEQ ID NO: 1164
agcuaauuacagcgggauu

SEQ ID NO: 92761 - RNA, 19 nt, Artificial Sequence
  Description of Artificial Sequence: Synthetic oligonucleotide
  Antisense strand to SEQ ID NO: 92680
aaucccgcuguaauuagcu

SEQ ID NO: 92762 - RNA, 19 nt, Artificial Sequence
  Description of Artificial Sequence: Synthetic oligonucleotide
  Sense strand starting at position 798 of SEQ ID NO: 1164
auaggauagcccgaaaggu

SEQ ID NO: 92763 - RNA, 19 nt, Artificial Sequence
  Description of Artificial Sequence: Synthetic oligonucleotide
  Antisense strand to SEQ ID NO: 92682
accuuucgggcuauccuau

SEQ ID NO: 92764 - RNA, 19 nt, Artificial Sequence
  Description of Artificial Sequence: Synthetic oligonucleotide
  Sense strand starting at position 613 of SEQ ID NO: 1164
cuuuccagacgucaaucau

SEQ ID NO: 92765 - RNA, 19 nt, Artificial Sequence
  Description of Artificial Sequence: Synthetic oligonucleotide
  Antisense strand to SEQ ID NO: 92684
augauugacgucuggaaag

SEQ ID NO: 92766 - RNA, 19 nt, Artificial Sequence
  Description of Artificial Sequence: Synthetic oligonucleotide
  Sense strand starting at position 608 of SEQ ID NO: 1164
ucuuucuuuccagacguca

SEQ ID NO: 92767 - RNA, 19 nt, Artificial Sequence
  Description of Artificial Sequence: Synthetic oligonucleotide
  Antisense strand to SEQ ID NO: 92686
ugacgucuggaaagaaaga

SEQ ID NO: 92768 - RNA, 19 nt, Artificial Sequence
  Description of Artificial Sequence: Synthetic oligonucleotide
  Sense strand starting at position 3975 of SEQ ID NO: 1167
gguuuaaccucuuugcggu

SEQ ID NO: 92769 - RNA, 19 nt, Artificial Sequence
  Description of Artificial Sequence: Synthetic oligonucleotide
  Antisense strand to SEQ ID NO: 92688
accgcaaagagguuaaacc

SEQ ID NO: 92770 - RNA, 19 nt, Artificial Sequence
  Description of Artificial Sequence: Synthetic oligonucleotide
  Sense strand starting at position 3952 of SEQ ID NO: 1167
cucauuccugucgaaagca

SEQ ID NO: 92771 - RNA, 19 nt, Artificial Sequence
  Description of Artificial Sequence: Synthetic oligonucleotide
  Antisense strand to SEQ ID NO: 92690
ugcuuucgacaggaaugag

SEQ ID NO: 92772 - RNA, 19 nt, Artificial Sequence
  Description of Artificial Sequence: Synthetic oligonucleotide
  Sense strand starting at position 3878 of SEQ ID NO: 1167
cuucuaugcucaucagcga

SEQ ID NO: 92773 - RNA, 19 nt, Artificial Sequence
  Description of Artificial Sequence: Synthetic oligonucleotide
  Antisense strand to SEQ ID NO: 92692
ucgcugaugagcauagaag

SEQ ID NO: 92774 - RNA, 19 nt, Artificial Sequence
  Description of Artificial Sequence: Synthetic oligonucleotide
  Sense strand starting at position 3825 of SEQ ID NO: 1167
cccuauaucggucagguuu

SEQ ID NO: 92775 - RNA, 19 nt, Artificial Sequence
  Description of Artificial Sequence: Synthetic oligonucleotide
  Antisense strand to SEQ ID NO: 92694
aaaccugaccgauauaggg

SEQ ID NO: 92776 - RNA, 19 nt, Artificial Sequence
  Description of Artificial Sequence: Synthetic oligonucleotide
  Sense strand starting at position 3642 of SEQ ID NO: 1167
aucccaaaucccgaaaugu

SEQ ID NO: 92777 - RNA, 19 nt, Artificial Sequence
  Description of Artificial Sequence: Synthetic oligonucleotide
  Antisense strand to SEQ ID NO: 92696
acauuucgggauuugggau

SEQ ID NO: 92778 - RNA, 19 nt, Artificial Sequence
  Description of Artificial Sequence: Synthetic oligonucleotide
  Sense strand starting at position 3585 of SEQ ID NO: 1167
guuuagggucgguaaggaa

SEQ ID NO: 92779 - RNA, 19 nt, Artificial Sequence
  Description of Artificial Sequence: Synthetic oligonucleotide
  Antisense strand to SEQ ID NO: 92698
uuccuuaccgacccuaaac

SEQ ID NO: 92780 - RNA, 19 nt, Artificial Sequence
  Description of Artificial Sequence: Synthetic oligonucleotide
  Sense strand starting at position 3322 of SEQ ID NO: 1167
gaguaugagcagugagauu

SEQ ID NO: 92781 - RNA, 19 nt, Artificial Sequence
  Description of Artificial Sequence: Synthetic oligonucleotide
  Antisense strand to SEQ ID NO: 92700
aaucucacugcucauacuc

SEQ ID NO: 92782 - RNA, 19 nt, Artificial Sequence
  Description of Artificial Sequence: Synthetic oligonucleotide
  Sense strand starting at position 3042 of SEQ ID NO: 1167
auuaaccuuccgggagaaa

SEQ ID NO: 92783 - RNA, 19 nt, Artificial Sequence
  Description of Artificial Sequence: Synthetic oligonucleotide
  Antisense strand to SEQ ID NO: 92702
uuucucccggaagguuaau

SEQ ID NO: 92784 - RNA, 19 nt, Artificial Sequence
  Description of Artificial Sequence: Synthetic oligonucleotide
  Sense strand starting at position 2946 of SEQ ID NO: 1167
aguauucugcgcucgaggu

SEQ ID NO: 92785 - RNA, 19 nt, Artificial Sequence
  Description of Artificial Sequence: Synthetic oligonucleotide
  Antisense strand to SEQ ID NO: 92704
accucgagcgcagaauacu

SEQ ID NO: 92786 - RNA, 19 nt, Artificial Sequence
  Description of Artificial Sequence: Synthetic oligonucleotide
  Sense strand starting at position 2944 of SEQ ID NO: 1167
ggaguauucugcgcucgag

SEQ ID NO: 92787 - RNA, 19 nt, Artificial Sequence
  Description of Artificial Sequence: Synthetic oligonucleotide
  Antisense strand to SEQ ID NO: 92706
cucgagcgcagaauacucc

SEQ ID NO: 92788 - RNA, 19 nt, Artificial Sequence
  Description of Artificial Sequence: Synthetic oligonucleotide
  Sense strand starting at position 2933 of SEQ ID NO: 1167
cccagcacucgggaguauu

SEQ ID NO: 92789 - RNA, 19 nt, Artificial Sequence
  Description of Artificial Sequence: Synthetic oligonucleotide
  Antisense strand to SEQ ID NO: 92708
aauacucccgagugcuggg

SEQ ID NO: 92790 - RNA, 19 nt, Artificial Sequence
  Description of Artificial Sequence: Synthetic oligonucleotide
  Sense strand starting at position 2841 of SEQ ID NO: 1167
ggcuaagccauugauuguu

SEQ ID NO: 92791 - RNA, 19 nt, Artificial Sequence
  Description of Artificial Sequence: Synthetic oligonucleotide
  Antisense strand to SEQ ID NO: 92710
aacaaucaauggcuuagcc

SEQ ID NO: 92792 - RNA, 19 nt, Artificial Sequence
  Description of Artificial Sequence: Synthetic oligonucleotide
  Sense strand starting at position 2840 of SEQ ID NO: 1167
aggcuaagccauugauugu

SEQ ID NO: 92793 - RNA, 19 nt, Artificial Sequence
  Description of Artificial Sequence: Synthetic oligonucleotide
  Antisense strand to SEQ ID NO: 92712
acaaucaauggcuuagccu

SEQ ID NO: 92794 - RNA, 19 nt, Artificial Sequence
  Description of Artificial Sequence: Synthetic oligonucleotide
  Sense strand starting at position 2635 of SEQ ID NO: 1167
ggaggacucggcgguaacu

SEQ ID NO: 92795 - RNA, 19 nt, Artificial Sequence
  Description of Artificial Sequence: Synthetic oligonucleotide
  Antisense strand to SEQ ID NO: 92714
aguuaccgccgaguccucc

SEQ ID NO: 92796 - RNA, 19 nt, Artificial Sequence
  Description of Artificial Sequence: Synthetic oligonucleotide
  Sense strand starting at position 2622 of SEQ ID NO: 1167
aggagguguuaauggagga

SEQ ID NO: 92797 - RNA, 19 nt, Artificial Sequence
  Description of Artificial Sequence: Synthetic oligonucleotide
  Antisense strand to SEQ ID NO: 92716
uccuccauuaacaccuccu

SEQ ID NO: 92798 - RNA, 19 nt, Artificial Sequence
  Description of Artificial Sequence: Synthetic oligonucleotide
  Sense strand starting at position 2614 of SEQ ID NO: 1167
auaaucagaggagguguua

SEQ ID NO: 92799 - RNA, 19 nt, Artificial Sequence
  Description of Artificial Sequence: Synthetic oligonucleotide
  Antisense strand to SEQ ID NO: 92718
uaacaccuccucugauuau

SEQ ID NO: 92800 - RNA, 19 nt, Artificial Sequence
  Description of Artificial Sequence: Synthetic oligonucleotide
  Sense strand starting at position 2571 of SEQ ID NO: 1167
agagaaacgcucugagguu

SEQ ID NO: 92801 - RNA, 19 nt, Artificial Sequence
  Description of Artificial Sequence: Synthetic oligonucleotide
  Antisense strand to SEQ ID NO: 92720
aaccucagagcguuucucu

SEQ ID NO: 92802 - RNA, 19 nt, Artificial Sequence
  Description of Artificial Sequence: Synthetic oligonucleotide
  Sense strand starting at position 2261 of SEQ ID NO: 1167
ccuugauguccagauguca

SEQ ID NO: 92803 - RNA, 19 nt, Artificial Sequence
  Description of Artificial Sequence: Synthetic oligonucleotide
  Antisense strand to SEQ ID NO: 92722
ugacaucuggacaucaagg

SEQ ID NO: 92804 - RNA, 19 nt, Artificial Sequence
  Description of Artificial Sequence: Synthetic oligonucleotide
  Sense strand starting at position 2174 of SEQ ID NO: 1167
ccaagaagucccugaaacu

SEQ ID NO: 92805 - RNA, 19 nt, Artificial Sequence
  Description of Artificial Sequence: Synthetic oligonucleotide
  Antisense strand to SEQ ID NO: 92724
aguuucagggacuucuugg

SEQ ID NO: 92806 - RNA, 19 nt, Artificial Sequence
  Description of Artificial Sequence: Synthetic oligonucleotide
  Sense strand starting at position 2001 of SEQ ID NO: 1167
ccguaauggugguugcacu

SEQ ID NO: 92807 - RNA, 19 nt, Artificial Sequence
  Description of Artificial Sequence: Synthetic oligonucleotide
  Antisense strand to SEQ ID NO: 92726
agugcaaccaccauuacgg

SEQ ID NO: 92808 - RNA, 19 nt, Artificial Sequence
  Description of Artificial Sequence: Synthetic oligonucleotide
  Sense strand starting at position 1911 of SEQ ID NO: 1167
cagagaacaucagaaggaa

SEQ ID NO: 92809 - RNA, 19 nt, Artificial Sequence
  Description of Artificial Sequence: Synthetic oligonucleotide
  Antisense strand to SEQ ID NO: 92728
uuccuucugauguucucug

SEQ ID NO: 92810 - RNA, 19 nt, Artificial Sequence
  Description of Artificial Sequence: Synthetic oligonucleotide
  Sense strand starting at position 1799 of SEQ ID NO: 1167
uacgaagcgcgguuuaauu

SEQ ID NO: 92811 - RNA, 19 nt, Artificial Sequence
  Description of Artificial Sequence: Synthetic oligonucleotide
  Antisense strand to SEQ ID NO: 92730
aauuaaaccgcgcuucgua

SEQ ID NO: 92812 - RNA, 19 nt, Artificial Sequence
  Description of Artificial Sequence: Synthetic oligonucleotide
  Sense strand starting at position 1798 of SEQ ID NO: 1167
cuacgaagcgcgguuuaau

SEQ ID NO: 92813 - RNA, 19 nt, Artificial Sequence
  Description of Artificial Sequence: Synthetic oligonucleotide
  Antisense strand to SEQ ID NO: 92732
auuaaaccgcgcuucguag

SEQ ID NO: 92814 - RNA, 19 nt, Artificial Sequence
  Description of Artificial Sequence: Synthetic oligonucleotide
  Sense strand starting at position 1771 of SEQ ID NO: 1167
ucugaaagagaauguguau

SEQ ID NO: 92815 - RNA, 19 nt, Artificial Sequence
  Description of Artificial Sequence: Synthetic oligonucleotide
  Antisense strand to SEQ ID NO: 92734
auacacauucucuuucaga

SEQ ID NO: 92816 - RNA, 19 nt, Artificial Sequence
  Description of Artificial Sequence: Synthetic oligonucleotide
  Sense strand starting at position 1693 of SEQ ID NO: 1167
ggacacugauccugaggaa

SEQ ID NO: 92817 - RNA, 19 nt, Artificial Sequence
  Description of Artificial Sequence: Synthetic oligonucleotide
  Antisense strand to SEQ ID NO: 92736
uuccucaggaucagugucc

SEQ ID NO: 92818 - RNA, 19 nt, Artificial Sequence
  Description of Artificial Sequence: Synthetic oligonucleotide
  Sense strand starting at position 1410 of SEQ ID NO: 1167
cucagcucugcagaaauaa

SEQ ID NO: 92819 - RNA, 19 nt, Artificial Sequence
  Description of Artificial Sequence: Synthetic oligonucleotide
  Antisense strand to SEQ ID NO: 92738
uuauuucugcagagcugag

SEQ ID NO: 92820 - RNA, 19 nt, Artificial Sequence
  Description of Artificial Sequence: Synthetic oligonucleotide
  Sense strand starting at position 1408 of SEQ ID NO: 1167
cccucagcucugcagaaau

SEQ ID NO: 92821 - RNA, 19 nt, Artificial Sequence
  Description of Artificial Sequence: Synthetic oligonucleotide
  Antisense strand to SEQ ID NO: 92740
auuucugcagagcugaggg

SEQ ID NO: 92822 - RNA, 19 nt, Artificial Sequence
  Description of Artificial Sequence: Synthetic oligonucleotide
  Sense strand starting at position 1407 of SEQ ID NO: 1167
gcccucagcucugcagaaa

SEQ ID NO: 92823 - RNA, 19 nt, Artificial Sequence
  Description of Artificial Sequence: Synthetic oligonucleotide
  Antisense strand to SEQ ID NO: 92742
uuucugcagagcugagggc

SEQ ID NO: 92824 - RNA, 19 nt, Artificial Sequence
  Description of Artificial Sequence: Synthetic oligonucleotide
  Sense strand starting at position 1339 of SEQ ID NO: 1167
gcgccaagucuagaauaca

SEQ ID NO: 92825 - RNA, 19 nt, Artificial Sequence
  Description of Artificial Sequence: Synthetic oligonucleotide
  Antisense strand to SEQ ID NO: 92744
uguauucuagacuuggcgc

SEQ ID NO: 92826 - RNA, 19 nt, Artificial Sequence
  Description of Artificial Sequence: Synthetic oligonucleotide
  Sense strand starting at position 1337 of SEQ ID NO: 1167
cugcgccaagucuagaaua

SEQ ID NO: 92827 - RNA, 19 nt, Artificial Sequence
  Description of Artificial Sequence: Synthetic oligonucleotide
  Antisense strand to SEQ ID NO: 92746
uauucuagacuuggcgcag

SEQ ID NO: 92828 - RNA, 19 nt, Artificial Sequence
  Description of Artificial Sequence: Synthetic oligonucleotide
  Sense strand starting at position 1120 of SEQ ID NO: 1167
gaguucggcugccuggaaa

SEQ ID NO: 92829 - RNA, 19 nt, Artificial Sequence
  Description of Artificial Sequence: Synthetic oligonucleotide
  Antisense strand to SEQ ID NO: 92748
uuuccaggcagccgaacuc

SEQ ID NO: 92830 - RNA, 19 nt, Artificial Sequence
  Description of Artificial Sequence: Synthetic oligonucleotide
  Sense strand starting at position 971 of SEQ ID NO: 1167
ugagauacuccauguggaa

SEQ ID NO: 92831 - RNA, 19 nt, Artificial Sequence
  Description of Artificial Sequence: Synthetic oligonucleotide
  Antisense strand to SEQ ID NO: 92750
uuccacauggaguaucuca

SEQ ID NO: 92832 - RNA, 19 nt, Artificial Sequence
  Description of Artificial Sequence: Synthetic oligonucleotide
  Sense strand starting at position 737 of SEQ ID NO: 1167
cuguuaagcugguuaagga

SEQ ID NO: 92833 - RNA, 19 nt, Artificial Sequence
  Description of Artificial Sequence: Synthetic oligonucleotide
  Antisense strand to SEQ ID NO: 92752
uccuuaaccagcuuaacag

SEQ ID NO: 92834 - RNA, 19 nt, Artificial Sequence
  Description of Artificial Sequence: Synthetic oligonucleotide
  Sense strand starting at position 716 of SEQ ID NO: 1167
gcguuaccuuuccuccaga

SEQ ID NO: 92835 - RNA, 19 nt, Artificial Sequence
  Description of Artificial Sequence: Synthetic oligonucleotide
  Antisense strand to SEQ ID NO: 92754
ucuggaggaaagguaacgc

SEQ ID NO: 92836 - RNA, 19 nt, Artificial Sequence
  Description of Artificial Sequence: Synthetic oligonucleotide
  Sense strand starting at position 679 of SEQ ID NO: 1167
ugauucugcgccucuaagu

SEQ ID NO: 92837 - RNA, 19 nt, Artificial Sequence
  Description of Artificial Sequence: Synthetic oligonucleotide
  Antisense strand to SEQ ID NO: 92756
acuuagaggcgcagaauca

SEQ ID NO: 92838 - RNA, 19 nt, Artificial Sequence
  Description of Artificial Sequence: Synthetic oligonucleotide
  Sense strand starting at position 676 of SEQ ID NO: 1167
ccaugauucugcgccucua

SEQ ID NO: 92839 - RNA, 19 nt, Artificial Sequence
  Description of Artificial Sequence: Synthetic oligonucleotide
  Antisense strand to SEQ ID NO: 92758
uagaggcgcagaaucaugg

SEQ ID NO: 92840 - RNA, 19 nt, Artificial Sequence
  Description of Artificial Sequence: Synthetic oligonucleotide
  Sense strand starting at position 526 of SEQ ID NO: 1167
acccgagcccaguagaauu

SEQ ID NO: 92841 - RNA, 19 nt, Artificial Sequence
  Description of Artificial Sequence: Synthetic oligonucleotide
  Antisense strand to SEQ ID NO: 92760
aauucuacugggcucgggu

SEQ ID NO: 92842 - RNA, 19 nt, Artificial Sequence
  Description of Artificial Sequence: Synthetic oligonucleotide
  Sense strand starting at position 436 of SEQ ID NO: 1167
cugagaguucgggaucuua

SEQ ID NO: 92843 - RNA, 19 nt, Artificial Sequence
  Description of Artificial Sequence: Synthetic oligonucleotide
  Antisense strand to SEQ ID NO: 92762
uaagaucccgaacucucag

SEQ ID NO: 92844 - RNA, 19 nt, Artificial Sequence
  Description of Artificial Sequence: Synthetic oligonucleotide
  Sense strand starting at position 421 of SEQ ID NO: 1167
gcauaauaguuggaacuga

SEQ ID NO: 92845 - RNA, 19 nt, Artificial Sequence
  Description of Artificial Sequence: Synthetic oligonucleotide
  Antisense strand to SEQ ID NO: 92764
ucaguuccaacuauuaugc

SEQ ID NO: 92846 - RNA, 19 nt, Artificial Sequence
  Description of Artificial Sequence: Synthetic oligonucleotide
  Sense strand starting at position 228 of SEQ ID NO: 1167
gggauaagaucuuaagucu

SEQ ID NO: 92847 - RNA, 19 nt, Artificial Sequence
  Description of Artificial Sequence: Synthetic oligonucleotide
  Antisense strand to SEQ ID NO: 92766
agacuuaagaucuuauccc

SEQ ID NO: 92848 - RNA, 19 nt, Artificial Sequence
  Description of Artificial Sequence: Synthetic oligonucleotide
  Sense strand starting at position 3854 of SEQ ID NO: 1166
gcagcuauaccugacagca

SEQ ID NO: 92849 - RNA, 19 nt, Artificial Sequence
  Description of Artificial Sequence: Synthetic oligonucleotide
  Antisense strand to SEQ ID NO: 92768
ugcugucagguauagcugc

SEQ ID NO: 92850 - RNA, 19 nt, Artificial Sequence
  Description of Artificial Sequence: Synthetic oligonucleotide
  Sense strand starting at position 3573 of SEQ ID NO: 1166
gcagaaauaaagcgagaga

SEQ ID NO: 92851 - RNA, 19 nt, Artificial Sequence
  Description of Artificial Sequence: Synthetic oligonucleotide
  Antisense strand to SEQ ID NO: 92770
ucucucgcuuuauuucugc

SEQ ID NO: 92852 - RNA, 19 nt, Artificial Sequence
  Description of Artificial Sequence: Synthetic oligonucleotide
  Sense strand starting at position 3267 of SEQ ID NO: 1166
cggcuuuacccagagagga

SEQ ID NO: 92853 - RNA, 19 nt, Artificial Sequence
  Description of Artificial Sequence: Synthetic oligonucleotide
  Antisense strand to SEQ ID NO: 92772
uccucucuggguaaagccg

SEQ ID NO: 92854 - RNA, 19 nt, Artificial Sequence
  Description of Artificial Sequence: Synthetic oligonucleotide
  Sense strand starting at position 3118 of SEQ ID NO: 1166
gauuguucugucgcccuca

SEQ ID NO: 92855 - RNA, 19 nt, Artificial Sequence
  Description of Artificial Sequence: Synthetic oligonucleotide
  Antisense strand to SEQ ID NO: 92774
ugagggcgacagaacaauc

SEQ ID NO: 92856 - RNA, 19 nt, Artificial Sequence
  Description of Artificial Sequence: Synthetic oligonucleotide
  Sense strand starting at position 3094 of SEQ ID NO: 1166
agaccugcuccucacaaga

SEQ ID NO: 92857 - RNA, 19 nt, Artificial Sequence
  Description of Artificial Sequence: Synthetic oligonucleotide
  Antisense strand to SEQ ID NO: 92776
ucuugugaggagcaggucu

SEQ ID NO: 92858 - RNA, 19 nt, Artificial Sequence
  Description of Artificial Sequence: Synthetic oligonucleotide
  Sense strand starting at position 3023 of SEQ ID NO: 1166
cacucagaagggugugaaa

SEQ ID NO: 92859 - RNA, 19 nt, Artificial Sequence
  Description of Artificial Sequence: Synthetic oligonucleotide
  Antisense strand to SEQ ID NO: 92778
uuucacacccuucugagug

SEQ ID NO: 92860 - RNA, 19 nt, Artificial Sequence
  Description of Artificial Sequence: Synthetic oligonucleotide
  Sense strand starting at position 2882 of SEQ ID NO: 1166
gaagcuugccaauauagga

SEQ ID NO: 92861 - RNA, 19 nt, Artificial Sequence
  Description of Artificial Sequence: Synthetic oligonucleotide
  Antisense strand to SEQ ID NO: 92780
uccuauauuggcaagcuuc

SEQ ID NO: 92862 - RNA, 19 nt, Artificial Sequence
  Description of Artificial Sequence: Synthetic oligonucleotide
  Sense strand starting at position 2876 of SEQ ID NO: 1166
ucauuugaagcuugccaau

SEQ ID NO: 92863 - RNA, 19 nt, Artificial Sequence
  Description of Artificial Sequence: Synthetic oligonucleotide
  Antisense strand to SEQ ID NO: 92782
auuggcaagcuucaaauga

SEQ ID NO: 92864 - RNA, 19 nt, Artificial Sequence
  Description of Artificial Sequence: Synthetic oligonucleotide
  Sense strand starting at position 2852 of SEQ ID NO: 1166
aagguugccggagauucua

SEQ ID NO: 92865 - RNA, 19 nt, Artificial Sequence
  Description of Artificial Sequence: Synthetic oligonucleotide
  Antisense strand to SEQ ID NO: 92784
uagaaucuccggcaaccuu

SEQ ID NO: 92866 - RNA, 19 nt, Artificial Sequence
  Description of Artificial Sequence: Synthetic oligonucleotide
  Sense strand starting at position 2705 of SEQ ID NO: 1166
ugcauuucucaggguuacu

SEQ ID NO: 92867 - RNA, 19 nt, Artificial Sequence
  Description of Artificial Sequence: Synthetic oligonucleotide
  Antisense strand to SEQ ID NO: 92786
aguaacccugagaaaugca

SEQ ID NO: 92868 - RNA, 19 nt, Artificial Sequence
  Description of Artificial Sequence: Synthetic oligonucleotide
  Sense strand starting at position 2547 of SEQ ID NO: 1166
ggagauaaugcugguuccu

SEQ ID NO: 92869 - RNA, 19 nt, Artificial Sequence
  Description of Artificial Sequence: Synthetic oligonucleotide
  Antisense strand to SEQ ID NO: 92788
aggaaccagcauuaucucc

SEQ ID NO: 92870 - RNA, 19 nt, Artificial Sequence
  Description of Artificial Sequence: Synthetic oligonucleotide
  Sense strand starting at position 2489 of SEQ ID NO: 1166
aggacugucacccgaaaug

SEQ ID NO: 92871 - RNA, 19 nt, Artificial Sequence
  Description of Artificial Sequence: Synthetic oligonucleotide
  Antisense strand to SEQ ID NO: 92790
cauuucgggugacaguccu

SEQ ID NO: 92872 - RNA, 19 nt, Artificial Sequence
  Description of Artificial Sequence: Synthetic oligonucleotide
  Sense strand starting at position 2487 of SEQ ID NO: 1166
gcaggacugucacccgaaa

SEQ ID NO: 92873 - RNA, 19 nt, Artificial Sequence
  Description of Artificial Sequence: Synthetic oligonucleotide
  Antisense strand to SEQ ID NO: 92792
uuucgggugacaguccugc

SEQ ID NO: 92874 - RNA, 19 nt, Artificial Sequence
  Description of Artificial Sequence: Synthetic oligonucleotide
  Sense strand starting at position 2384 of SEQ ID NO: 1166
gccuauuugauccgaguuc

SEQ ID NO: 92875 - RNA, 19 nt, Artificial Sequence
  Description of Artificial Sequence: Synthetic oligonucleotide
  Antisense strand to SEQ ID NO: 92794
gaacucggaucaaauaggc

SEQ ID NO: 92876 - RNA, 19 nt, Artificial Sequence
  Description of Artificial Sequence: Synthetic oligonucleotide
  Sense strand starting at position 2382 of SEQ ID NO: 1166
ccgccuauuugauccgagu

SEQ ID NO: 92877 - RNA, 19 nt, Artificial Sequence
  Description of Artificial Sequence: Synthetic oligonucleotide
  Antisense strand to SEQ ID NO: 92796
acucggaucaaauaggcgg

SEQ ID NO: 92878 - RNA, 19 nt, Artificial Sequence
  Description of Artificial Sequence: Synthetic oligonucleotide
  Sense strand starting at position 2305 of SEQ ID NO: 1166
aagaguucccagcagucau

SEQ ID NO: 92879 - RNA, 19 nt, Artificial Sequence
  Description of Artificial Sequence: Synthetic oligonucleotide
  Antisense strand to SEQ ID NO: 92798
augacugcugggaacucuu

SEQ ID NO: 92880 - RNA, 19 nt, Artificial Sequence
  Description of Artificial Sequence: Synthetic oligonucleotide
  Sense strand starting at position 2072 of SEQ ID NO: 1166
auaauuuaguaggaggagu

SEQ ID NO: 92881 - RNA, 19 nt, Artificial Sequence
  Description of Artificial Sequence: Synthetic oligonucleotide
  Antisense strand to SEQ ID NO: 92800
acuccuccuacuaaauuau

SEQ ID NO: 92882 - RNA, 19 nt, Artificial Sequence
  Description of Artificial Sequence: Synthetic oligonucleotide
  Sense strand starting at position 2036 of SEQ ID NO: 1166
ccaauuuguuaagagacua

SEQ ID NO: 92883 - RNA, 19 nt, Artificial Sequence
  Description of Artificial Sequence: Synthetic oligonucleotide
  Antisense strand to SEQ ID NO: 92802
uagucucuuaacaaauugg

SEQ ID NO: 92884 - RNA, 19 nt, Artificial Sequence
  Description of Artificial Sequence: Synthetic oligonucleotide
  Sense strand starting at position 1093 of SEQ ID NO: 1166
ccuugaggucuguagaaga

SEQ ID NO: 92885 - RNA, 19 nt, Artificial Sequence
  Description of Artificial Sequence: Synthetic oligonucleotide
  Antisense strand to SEQ ID NO: 92804
ucuucuacagaccucaagg

SEQ ID NO: 92886 - RNA, 19 nt, Artificial Sequence
  Description of Artificial Sequence: Synthetic oligonucleotide
  Sense strand starting at position 1091 of SEQ ID NO: 1166
aaccuugaggucuguagaa

SEQ ID NO: 92887 - RNA, 19 nt, Artificial Sequence
  Description of Artificial Sequence: Synthetic oligonucleotide
  Antisense strand to SEQ ID NO: 92806
uucuacagaccucaagguu

SEQ ID NO: 92888 - RNA, 19 nt, Artificial Sequence
  Description of Artificial Sequence: Synthetic oligonucleotide
  Sense strand starting at position 1009 of SEQ ID NO: 1166
gccguccuccuauugcuua

SEQ ID NO: 92889 - RNA, 19 nt, Artificial Sequence
  Description of Artificial Sequence: Synthetic oligonucleotide
  Antisense strand to SEQ ID NO: 92808
uaagcaauaggaggacggc

SEQ ID NO: 92890 - RNA, 19 nt, Artificial Sequence
  Description of Artificial Sequence: Synthetic oligonucleotide
  Sense strand starting at position 911 of SEQ ID NO: 1166
gacccagucgcgucggaau

SEQ ID NO: 92891 - RNA, 19 nt, Artificial Sequence
  Description of Artificial Sequence: Synthetic oligonucleotide
  Antisense strand to SEQ ID NO: 92810
auuccgacgcgacuggguc

SEQ ID NO: 92892 - RNA, 19 nt, Artificial Sequence
  Description of Artificial Sequence: Synthetic oligonucleotide
  Sense strand starting at position 892 of SEQ ID NO: 1166
cgucuagagaacuggaaau

SEQ ID NO: 92893 - RNA, 19 nt, Artificial Sequence
  Description of Artificial Sequence: Synthetic oligonucleotide
  Antisense strand to SEQ ID NO: 92812
auuuccaguucucuagacg

SEQ ID NO: 92894 - RNA, 19 nt, Artificial Sequence
  Description of Artificial Sequence: Synthetic oligonucleotide
  Sense strand starting at position 795 of SEQ ID NO: 1166
gguccuggcgcuaaacgua

SEQ ID NO: 92895 - RNA, 19 nt, Artificial Sequence
  Description of Artificial Sequence: Synthetic oligonucleotide
  Antisense strand to SEQ ID NO: 92814
uacguuuagcgccaggacc

SEQ ID NO: 92896 - RNA, 19 nt, Artificial Sequence
  Description of Artificial Sequence: Synthetic oligonucleotide
  Sense strand starting at position 700 of SEQ ID NO: 1166
guuuaaggguugguuauaa

SEQ ID NO: 92897 - RNA, 19 nt, Artificial Sequence
  Description of Artificial Sequence: Synthetic oligonucleotide
  Antisense strand to SEQ ID NO: 92816
uuauaaccaacccuuaaac

SEQ ID NO: 92898 - RNA, 19 nt, Artificial Sequence
  Description of Artificial Sequence: Synthetic oligonucleotide
  Sense strand starting at position 614 of SEQ ID NO: 1166
cgcuuagauaaguaauuag

SEQ ID NO: 92899 - RNA, 19 nt, Artificial Sequence
  Description of Artificial Sequence: Synthetic oligonucleotide
  Antisense strand to SEQ ID NO: 92818
cuaauuacuuaucuaagcg

SEQ ID NO: 92900 - RNA, 19 nt, Artificial Sequence
  Description of Artificial Sequence: Synthetic oligonucleotide
  Sense strand starting at position 606 of SEQ ID NO: 1166
aagggaagcgcuuagauaa

SEQ ID NO: 92901 - RNA, 19 nt, Artificial Sequence
  Description of Artificial Sequence: Synthetic oligonucleotide
  Antisense strand to SEQ ID NO: 92820
uuaucuaagcgcuucccuu

SEQ ID NO: 92902 - RNA, 19 nt, Artificial Sequence
  Description of Artificial Sequence: Synthetic oligonucleotide
  Sense strand starting at position 590 of SEQ ID NO: 1166
ccguuaguaaucuggaaag

SEQ ID NO: 92903 - RNA, 19 nt, Artificial Sequence
  Description of Artificial Sequence: Synthetic oligonucleotide
  Antisense strand to SEQ ID NO: 92822
cuuuccagauuacuaacgg

SEQ ID NO: 92904 - RNA, 19 nt, Artificial Sequence
  Description of Artificial Sequence: Synthetic oligonucleotide
  Sense strand starting at position 539 of SEQ ID NO: 1166
cuauguuuggccgaaauaa

SEQ ID NO: 92905 - RNA, 19 nt, Artificial Sequence
  Description of Artificial Sequence: Synthetic oligonucleotide
  Antisense strand to SEQ ID NO: 92824
uuauuucggccaaacauag

SEQ ID NO: 92906 - RNA, 19 nt, Artificial Sequence
  Description of Artificial Sequence: Synthetic oligonucleotide
  Sense strand starting at position 515 of SEQ ID NO: 1166
ugugguaccaaaggaucua

SEQ ID NO: 92907 - RNA, 19 nt, Artificial Sequence
  Description of Artificial Sequence: Synthetic oligonucleotide
  Antisense strand to SEQ ID NO: 92826
uagauccuuugguaccaca

SEQ ID NO: 92908 - RNA, 19 nt, Artificial Sequence
  Description of Artificial Sequence: Synthetic oligonucleotide
  Sense strand starting at position 491 of SEQ ID NO: 1166
auuaguuugggcuacaagu

SEQ ID NO: 92909 - RNA, 19 nt, Artificial Sequence
  Description of Artificial Sequence: Synthetic oligonucleotide
  Antisense strand to SEQ ID NO: 92828
acuuguagcccaaacuaau

SEQ ID NO: 92910 - RNA, 19 nt, Artificial Sequence
  Description of Artificial Sequence: Synthetic oligonucleotide
  Sense strand starting at position 489 of SEQ ID NO: 1166
ugauuaguuugggcuacaa

SEQ ID NO: 92911 - RNA, 19 nt, Artificial Sequence
  Description of Artificial Sequence: Synthetic oligonucleotide
  Antisense strand to SEQ ID NO: 92830
uuguagcccaaacuaauca

SEQ ID NO: 92912 - RNA, 19 nt, Artificial Sequence
  Description of Artificial Sequence: Synthetic oligonucleotide
  Sense strand starting at position 312 of SEQ ID NO: 1166
gcagaaauggguugaucuu

SEQ ID NO: 92913 - RNA, 19 nt, Artificial Sequence
  Description of Artificial Sequence: Synthetic oligonucleotide
  Antisense strand to SEQ ID NO: 92832
aagaucaacccauuucugc

SEQ ID NO: 92914 - RNA, 19 nt, Artificial Sequence
  Description of Artificial Sequence: Synthetic oligonucleotide
  Sense strand starting at position 309 of SEQ ID NO: 1166
cuagcagaaauggguugau

SEQ ID NO: 92915 - RNA, 19 nt, Artificial Sequence
  Description of Artificial Sequence: Synthetic oligonucleotide
  Antisense strand to SEQ ID NO: 92834
aucaacccauuucugcuag

SEQ ID NO: 92916 - RNA, 19 nt, Artificial Sequence
  Description of Artificial Sequence: Synthetic oligonucleotide
  Sense strand starting at position 279 of SEQ ID NO: 1166
ggaguuaaccuccggacau

SEQ ID NO: 92917 - RNA, 19 nt, Artificial Sequence
  Description of Artificial Sequence: Synthetic oligonucleotide
  Antisense strand to SEQ ID NO: 92836
auguccggagguuaacucc

SEQ ID NO: 92918 - RNA, 19 nt, Artificial Sequence
  Description of Artificial Sequence: Synthetic oligonucleotide
  Sense strand starting at position 103 of SEQ ID NO: 1166
ugagaccuuugucuugaaa

SEQ ID NO: 92919 - RNA, 19 nt, Artificial Sequence
  Description of Artificial Sequence: Synthetic oligonucleotide
  Antisense strand to SEQ ID NO: 92838
uuucaagacaaaggucuca

SEQ ID NO: 92920 - RNA, 19 nt, Artificial Sequence
  Description of Artificial Sequence: Synthetic oligonucleotide
  Sense strand starting at position 102 of SEQ ID NO: 1166
cugagaccuuugucuugaa

SEQ ID NO: 92921 - RNA, 19 nt, Artificial Sequence
  Description of Artificial Sequence: Synthetic oligonucleotide
  Antisense strand to SEQ ID NO: 92840
uucaagacaaaggucucag

SEQ ID NO: 92922 - RNA, 19 nt, Artificial Sequence
  Description of Artificial Sequence: Synthetic oligonucleotide
  Sense strand starting at position 100 of SEQ ID NO: 1166
uacugagaccuuugucuug

SEQ ID NO: 92923 - RNA, 19 nt, Artificial Sequence
  Description of Artificial Sequence: Synthetic oligonucleotide
  Antisense strand to SEQ ID NO: 92842
caagacaaaggucucagua

SEQ ID NO: 92924 - RNA, 19 nt, Artificial Sequence
  Description of Artificial Sequence: Synthetic oligonucleotide
  Sense strand starting at position 10 of SEQ ID NO: 1166
ccaauaaauguguaaagug

SEQ ID NO: 92925 - RNA, 19 nt, Artificial Sequence
  Description of Artificial Sequence: Synthetic oligonucleotide
  Antisense strand to SEQ ID NO: 92844
cacuuuacacauuuauugg

SEQ ID NO: 92926 - RNA, 19 nt, Artificial Sequence
  Description of Artificial Sequence: Synthetic oligonucleotide
  Sense strand starting at position 9 of SEQ ID NO: 1166
cccaauaaauguguaaagu

SEQ ID NO: 92927 - RNA, 19 nt, Artificial Sequence
  Description of Artificial Sequence: Synthetic oligonucleotide
  Antisense strand to SEQ ID NO: 92846
acuuuacacauuuauuggg

SEQ ID NO: 92928 - RNA, 19 nt, Artificial Sequence
  Description of Artificial Sequence: Synthetic oligonucleotide
  Sense strand starting at position 3900 of SEQ ID NO: 1168
uccuaagacucaggagcaa

SEQ ID NO: 92929 - RNA, 19 nt, Artificial Sequence
  Description of Artificial Sequence: Synthetic oligonucleotide
  Antisense strand to SEQ ID NO: 92848
uugcuccugagucuuagga

SEQ ID NO: 92930 - RNA, 19 nt, Artificial Sequence
  Description of Artificial Sequence: Synthetic oligonucleotide
  Sense strand starting at position 3886 of SEQ ID NO: 1168
ccguguaccucuguuccua

SEQ ID NO: 92931 - RNA, 19 nt, Artificial Sequence
  Description of Artificial Sequence: Synthetic oligonucleotide
  Antisense strand to SEQ ID NO: 92850
uaggaacagagguacacgg

SEQ ID NO: 92932 - RNA, 19 nt, Artificial Sequence
  Description of Artificial Sequence: Synthetic oligonucleotide
  Sense strand starting at position 3842 of SEQ ID NO: 1168
gucuuaucucccgcuguua

SEQ ID NO: 92933 - RNA, 19 nt, Artificial Sequence
  Description of Artificial Sequence: Synthetic oligonucleotide
  Antisense strand to SEQ ID NO: 92852
uaacagcgggagauaagac

SEQ ID NO: 92934 - RNA, 19 nt, Artificial Sequence
  Description of Artificial Sequence: Synthetic oligonucleotide
  Sense strand starting at position 3841 of SEQ ID NO: 1168
agucuuaucucccgcuguu

SEQ ID NO: 92935 - RNA, 19 nt, Artificial Sequence
  Description of Artificial Sequence: Synthetic oligonucleotide
  Antisense strand to SEQ ID NO: 92854
aacagcgggagauaagacu

SEQ ID NO: 92936 - RNA, 19 nt, Artificial Sequence
  Description of Artificial Sequence: Synthetic oligonucleotide
  Sense strand starting at position 3611 of SEQ ID NO: 1168
ggugcucuccaagaaauga

SEQ ID NO: 92937 - RNA, 19 nt, Artificial Sequence
  Description of Artificial Sequence: Synthetic oligonucleotide
  Antisense strand to SEQ ID NO: 92856
ucauuucuuggagagcacc

SEQ ID NO: 92938 - RNA, 19 nt, Artificial Sequence
  Description of Artificial Sequence: Synthetic oligonucleotide
  Sense strand starting at position 3580 of SEQ ID NO: 1168
ugcagaaguuauuucccuu

SEQ ID NO: 92939 - RNA, 19 nt, Artificial Sequence
  Description of Artificial Sequence: Synthetic oligonucleotide
  Antisense strand to SEQ ID NO: 92858
aagggaaauaacuucugca

SEQ ID NO: 92940 - RNA, 19 nt, Artificial Sequence
  Description of Artificial Sequence: Synthetic oligonucleotide
  Sense strand starting at position 3390 of SEQ ID NO: 1168
gcauccgcuugcucugaau

SEQ ID NO: 92941 - RNA, 19 nt, Artificial Sequence
  Description of Artificial Sequence: Synthetic oligonucleotide
  Antisense strand to SEQ ID NO: 92860
auucagagcaagcggaugc

SEQ ID NO: 92942 - RNA, 19 nt, Artificial Sequence
  Description of Artificial Sequence: Synthetic oligonucleotide
  Sense strand starting at position 2937 of SEQ ID NO: 1168
cccaaagagucuugaagcu

SEQ ID NO: 92943 - RNA, 19 nt, Artificial Sequence
  Description of Artificial Sequence: Synthetic oligonucleotide
  Antisense strand to SEQ ID NO: 92862
agcuucaagacucuuuggg

SEQ ID NO: 92944 - RNA, 19 nt, Artificial Sequence
  Description of Artificial Sequence: Synthetic oligonucleotide
  Sense strand starting at position 2883 of SEQ ID NO: 1168
aaaccugugugucuaaagu

SEQ ID NO: 92945 - RNA, 19 nt, Artificial Sequence
  Description of Artificial Sequence: Synthetic oligonucleotide
  Antisense strand to SEQ ID NO: 92864
acuuuagacacacagguuu

SEQ ID NO: 92946 - RNA, 19 nt, Artificial Sequence
  Description of Artificial Sequence: Synthetic oligonucleotide
  Sense strand starting at position 2881 of SEQ ID NO: 1168
ccaaaccugugugucuaaa

SEQ ID NO: 92947 - RNA, 19 nt, Artificial Sequence
  Description of Artificial Sequence: Synthetic oligonucleotide
  Antisense strand to SEQ ID NO: 92866
uuuagacacacagguuugg

SEQ ID NO: 92948 - RNA, 19 nt, Artificial Sequence
  Description of Artificial Sequence: Synthetic oligonucleotide
  Sense strand starting at position 2880 of SEQ ID NO: 1168
uccaaaccugugugucuaa

SEQ ID NO: 92949 - RNA, 19 nt, Artificial Sequence
  Description of Artificial Sequence: Synthetic oligonucleotide
  Antisense strand to SEQ ID NO: 92868
uuagacacacagguuugga

SEQ ID NO: 92950 - RNA, 19 nt, Artificial Sequence
  Description of Artificial Sequence: Synthetic oligonucleotide
  Sense strand starting at position 2879 of SEQ ID NO: 1168
cuccaaaccugugugucua

SEQ ID NO: 92951 - RNA, 19 nt, Artificial Sequence
  Description of Artificial Sequence: Synthetic oligonucleotide
  Antisense strand to SEQ ID NO: 92870
uagacacacagguuuggag

SEQ ID NO: 92952 - RNA, 19 nt, Artificial Sequence
  Description of Artificial Sequence: Synthetic oligonucleotide
  Sense strand starting at position 2842 of SEQ ID NO: 1168
auugauucguuguaaagaa

SEQ ID NO: 92953 - RNA, 19 nt, Artificial Sequence
  Description of Artificial Sequence: Synthetic oligonucleotide
  Antisense strand to SEQ ID NO: 92872
uucuuuacaacgaaucaau

SEQ ID NO: 92954 - RNA, 19 nt, Artificial Sequence
  Description of Artificial Sequence: Synthetic oligonucleotide
  Sense strand starting at position 2838 of SEQ ID NO: 1168
cuuaauugauucguuguaa

SEQ ID NO: 92955 - RNA, 19 nt, Artificial Sequence
  Description of Artificial Sequence: Synthetic oligonucleotide
  Antisense strand to SEQ ID NO: 92874
uuacaacgaaucaauuaag

SEQ ID NO: 92956 - RNA, 19 nt, Artificial Sequence
  Description of Artificial Sequence: Synthetic oligonucleotide
  Sense strand starting at position 2780 of SEQ ID NO: 1168
cagaguuucugacucagag

SEQ ID NO: 92957 - RNA, 19 nt, Artificial Sequence
  Description of Artificial Sequence: Synthetic oligonucleotide
  Antisense strand to SEQ ID NO: 92876
cucugagucagaaacucug

SEQ ID NO: 92958 - RNA, 19 nt, Artificial Sequence
  Description of Artificial Sequence: Synthetic oligonucleotide
  Sense strand starting at position 2768 of SEQ ID NO: 1168
augucugccucccagaguu

SEQ ID NO: 92959 - RNA, 19 nt, Artificial Sequence
  Description of Artificial Sequence: Synthetic oligonucleotide
  Antisense strand to SEQ ID NO: 92878
aacucugggaggcagacau

SEQ ID NO: 92960 - RNA, 19 nt, Artificial Sequence
  Description of Artificial Sequence: Synthetic oligonucleotide
  Sense strand starting at position 2708 of SEQ ID NO: 1168
cugaucuguccugaccaaa

SEQ ID NO: 92961 - RNA, 19 nt, Artificial Sequence
  Description of Artificial Sequence: Synthetic oligonucleotide
  Antisense strand to SEQ ID NO: 92880
uuuggucaggacagaucag

SEQ ID NO: 92962 - RNA, 19 nt, Artificial Sequence
  Description of Artificial Sequence: Synthetic oligonucleotide
  Sense strand starting at position 2707 of SEQ ID NO: 1168
gcugaucuguccugaccaa

SEQ ID NO: 92963 - RNA, 19 nt, Artificial Sequence
  Description of Artificial Sequence: Synthetic oligonucleotide
  Antisense strand to SEQ ID NO: 92882
uuggucaggacagaucagc

SEQ ID NO: 92964 - RNA, 19 nt, Artificial Sequence
  Description of Artificial Sequence: Synthetic oligonucleotide
  Sense strand starting at position 2632 of SEQ ID NO: 1168
cuuagauagaccuggaguu

SEQ ID NO: 92965 - RNA, 19 nt, Artificial Sequence
  Description of Artificial Sequence: Synthetic oligonucleotide
  Antisense strand to SEQ ID NO: 92884
aacuccaggucuaucuaag

SEQ ID NO: 92966 - RNA, 19 nt, Artificial Sequence
  Description of Artificial Sequence: Synthetic oligonucleotide
  Sense strand starting at position 2417 of SEQ ID NO: 1168
ggcagauaauuauacauuc

SEQ ID NO: 92967 - RNA, 19 nt, Artificial Sequence
  Description of Artificial Sequence: Synthetic oligonucleotide
  Antisense strand to SEQ ID NO: 92886
gaauguauaauuaucugcc

SEQ ID NO: 92968 - RNA, 19 nt, Artificial Sequence
  Description of Artificial Sequence: Synthetic oligonucleotide
  Sense strand starting at position 2415 of SEQ ID NO: 1168
cgggcagauaauuauacau

SEQ ID NO: 92969 - RNA, 19 nt, Artificial Sequence
  Description of Artificial Sequence: Synthetic oligonucleotide
  Antisense strand to SEQ ID NO: 92888
auguauaauuaucugcccg

SEQ ID NO: 92970 - RNA, 19 nt, Artificial Sequence
  Description of Artificial Sequence: Synthetic oligonucleotide
  Sense strand starting at position 2236 of SEQ ID NO: 1168
cugucugcccuagaagacu

SEQ ID NO: 92971 - RNA, 19 nt, Artificial Sequence
  Description of Artificial Sequence: Synthetic oligonucleotide
  Antisense strand to SEQ ID NO: 92890
agucuucuagggcagacag

SEQ ID NO: 92972 - RNA, 19 nt, Artificial Sequence
  Description of Artificial Sequence: Synthetic oligonucleotide
  Sense strand starting at position 2234 of SEQ ID NO: 1168
gucugucugcccuagaaga

SEQ ID NO: 92973 - RNA, 19 nt, Artificial Sequence
  Description of Artificial Sequence: Synthetic oligonucleotide
  Antisense strand to SEQ ID NO: 92892
ucuucuagggcagacagac

SEQ ID NO: 92974 - RNA, 19 nt, Artificial Sequence
  Description of Artificial Sequence: Synthetic oligonucleotide
  Sense strand starting at position 2232 of SEQ ID NO: 1168
gggucugucugcccuagaa

SEQ ID NO: 92975 - RNA, 19 nt, Artificial Sequence
  Description of Artificial Sequence: Synthetic oligonucleotide
  Antisense strand to SEQ ID NO: 92894
uucuagggcagacagaccc

SEQ ID NO: 92976 - RNA, 19 nt, Artificial Sequence
  Description of Artificial Sequence: Synthetic oligonucleotide
  Sense strand starting at position 2180 of SEQ ID NO: 1168
uucucagaaccuugagguu

SEQ ID NO: 92977 - RNA, 19 nt, Artificial Sequence
  Description of Artificial Sequence: Synthetic oligonucleotide
  Antisense strand to SEQ ID NO: 92896
aaccucaagguucugagaa

SEQ ID NO: 92978 - RNA, 19 nt, Artificial Sequence
  Description of Artificial Sequence: Synthetic oligonucleotide
  Sense strand starting at position 2171 of SEQ ID NO: 1168
gggugucccuucucagaac

SEQ ID NO: 92979 - RNA, 19 nt, Artificial Sequence
  Description of Artificial Sequence: Synthetic oligonucleotide
  Antisense strand to SEQ ID NO: 92898
guucugagaagggacaccc

SEQ ID NO: 92980 - RNA, 19 nt, Artificial Sequence
  Description of Artificial Sequence: Synthetic oligonucleotide
  Sense strand starting at position 1171 of SEQ ID NO: 1168
ggcaaaguuaccggaauca

SEQ ID NO: 92981 - RNA, 19 nt, Artificial Sequence
  Description of Artificial Sequence: Synthetic oligonucleotide
  Antisense strand to SEQ ID NO: 92900
ugauuccgguaacuuugcc

SEQ ID NO: 92982 - RNA, 19 nt, Artificial Sequence
  Description of Artificial Sequence: Synthetic oligonucleotide
  Sense strand starting at position 949 of SEQ ID NO: 1168
guaauagacacgugguaag

SEQ ID NO: 92983 - RNA, 19 nt, Artificial Sequence
  Description of Artificial Sequence: Synthetic oligonucleotide
  Antisense strand to SEQ ID NO: 92902
cuuaccacgugucuauuac

SEQ ID NO: 92984 - RNA, 19 nt, Artificial Sequence
  Description of Artificial Sequence: Synthetic oligonucleotide
  Sense strand starting at position 947 of SEQ ID NO: 1168
agguaauagacacguggua

SEQ ID NO: 92985 - RNA, 19 nt, Artificial Sequence
  Description of Artificial Sequence: Synthetic oligonucleotide
  Antisense strand to SEQ ID NO: 92904
uaccacgugucuauuaccu

SEQ ID NO: 92986 - RNA, 19 nt, Artificial Sequence
  Description of Artificial Sequence: Synthetic oligonucleotide
  Sense strand starting at position 888 of SEQ ID NO: 1168
accuuaguuucugccacau

SEQ ID NO: 92987 - RNA, 19 nt, Artificial Sequence
  Description of Artificial Sequence: Synthetic oligonucleotide
  Antisense strand to SEQ ID NO: 92906
auguggcagaaacuaaggu

SEQ ID NO: 92988 - RNA, 19 nt, Artificial Sequence
  Description of Artificial Sequence: Synthetic oligonucleotide
  Sense strand starting at position 718 of SEQ ID NO: 1168
ggcugacuucucggcuuua

SEQ ID NO: 92989 - RNA, 19 nt, Artificial Sequence
  Description of Artificial Sequence: Synthetic oligonucleotide
  Antisense strand to SEQ ID NO: 92908
uaaagccgagaagucagcc

SEQ ID NO: 92990 - RNA, 19 nt, Artificial Sequence
  Description of Artificial Sequence: Synthetic oligonucleotide
  Sense strand starting at position 689 of SEQ ID NO: 1168
aggugaggucugcauuaaa

SEQ ID NO: 92991 - RNA, 19 nt, Artificial Sequence
  Description of Artificial Sequence: Synthetic oligonucleotide
  Antisense strand to SEQ ID NO: 92910
uuuaaugcagaccucaccu

SEQ ID NO: 92992 - RNA, 19 nt, Artificial Sequence
  Description of Artificial Sequence: Synthetic oligonucleotide
  Sense strand starting at position 687 of SEQ ID NO: 1168
ccaggugaggucugcauua

SEQ ID NO: 92993 - RNA, 19 nt, Artificial Sequence
  Description of Artificial Sequence: Synthetic oligonucleotide
  Antisense strand to SEQ ID NO: 92912
uaaugcagaccucaccugg

SEQ ID NO: 92994 - RNA, 19 nt, Artificial Sequence
  Description of Artificial Sequence: Synthetic oligonucleotide
  Sense strand starting at position 495 of SEQ ID NO: 1168
ugcuuuaacugagaacuug

SEQ ID NO: 92995 - RNA, 19 nt, Artificial Sequence
  Description of Artificial Sequence: Synthetic oligonucleotide
  Antisense strand to SEQ ID NO: 92914
caaguucucaguuaaagca

SEQ ID NO: 92996 - RNA, 19 nt, Artificial Sequence
  Description of Artificial Sequence: Synthetic oligonucleotide
  Sense strand starting at position 357 of SEQ ID NO: 1168
guuugaggccaggaauguu

SEQ ID NO: 92997 - RNA, 19 nt, Artificial Sequence
  Description of Artificial Sequence: Synthetic oligonucleotide
  Antisense strand to SEQ ID NO: 92916
aacauuccuggccucaaac

SEQ ID NO: 92998 - RNA, 19 nt, Artificial Sequence
  Description of Artificial Sequence: Synthetic oligonucleotide
  Sense strand starting at position 287 of SEQ ID NO: 1168
ccggaaugccucuaggaua

SEQ ID NO: 92999 - RNA, 19 nt, Artificial Sequence
  Description of Artificial Sequence: Synthetic oligonucleotide
  Antisense strand to SEQ ID NO: 92918
uauccuagaggcauuccgg

SEQ ID NO: 93000 - RNA, 19 nt, Artificial Sequence
  Description of Artificial Sequence: Synthetic oligonucleotide
  Sense strand starting at position 163 of SEQ ID NO: 1168
acgaucugggauuagcaau

SEQ ID NO: 93001 - RNA, 19 nt, Artificial Sequence
  Description of Artificial Sequence: Synthetic oligonucleotide
  Antisense strand to SEQ ID NO: 92920
auugcuaaucccagaucgu

SEQ ID NO: 93002 - RNA, 19 nt, Artificial Sequence
  Description of Artificial Sequence: Synthetic oligonucleotide
  Sense strand starting at position 158 of SEQ ID NO: 1168
ccuacacgaucugggauua

SEQ ID NO: 93003 - RNA, 19 nt, Artificial Sequence
  Description of Artificial Sequence: Synthetic oligonucleotide
  Antisense strand to SEQ ID NO: 92922
uaaucccagaucguguagg

SEQ ID NO: 93004 - RNA, 19 nt, Artificial Sequence
  Description of Artificial Sequence: Synthetic oligonucleotide
  Sense strand starting at position 192 of SEQ ID NO: 1169
gcucaugacuggucaauag

SEQ ID NO: 93005 - RNA, 19 nt, Artificial Sequence
  Description of Artificial Sequence: Synthetic oligonucleotide
  Antisense strand to SEQ ID NO: 92924
cuauugaccagucaugagc

SEQ ID NO: 93006 - RNA, 19 nt, Artificial Sequence
  Description of Artificial Sequence: Synthetic oligonucleotide
  Sense strand starting at position 240 of SEQ ID NO: 1169
gcuacaugugacuaugcaa

SEQ ID NO: 93007 - RNA, 19 nt, Artificial Sequence
  Description of Artificial Sequence: Synthetic oligonucleotide
  Antisense strand to SEQ ID NO: 92926
uugcauagucacauguagc

SEQ ID NO: 93008 - RNA, 19 nt, Artificial Sequence
  Description of Artificial Sequence: Synthetic oligonucleotide
  Sense strand starting at position 312 of SEQ ID NO: 1169
ugaaauguuccauggcuac

SEQ ID NO: 93009 - RNA, 19 nt, Artificial Sequence
  Description of Artificial Sequence: Synthetic oligonucleotide
  Antisense strand to SEQ ID NO: 92928
guagccauggaacauuuca

SEQ ID NO: 93010 - RNA, 19 nt, Artificial Sequence
  Description of Artificial Sequence: Synthetic oligonucleotide
  Sense strand starting at position 569 of SEQ ID NO: 1169
uugccuugugcauagauaa

SEQ ID NO: 93011 - RNA, 19 nt, Artificial Sequence
  Description of Artificial Sequence: Synthetic oligonucleotide
  Antisense strand to SEQ ID NO: 92930
uuaucuaugcacaaggcaa

SEQ ID NO: 93012 - RNA, 19 nt, Artificial Sequence
  Description of Artificial Sequence: Synthetic oligonucleotide
  Sense strand starting at position 732 of SEQ ID NO: 1169
gcccuuaaacuauggaauu

SEQ ID NO: 93013 - RNA, 19 nt, Artificial Sequence
  Description of Artificial Sequence: Synthetic oligonucleotide
  Antisense strand to SEQ ID NO: 92932
aauuccauaguuuaagggc

SEQ ID NO: 93014 - RNA, 19 nt, Artificial Sequence
  Description of Artificial Sequence: Synthetic oligonucleotide
  Sense strand starting at position 777 of SEQ ID NO: 1169
gagcauacaugucuuagau

SEQ ID NO: 93015 - RNA, 19 nt, Artificial Sequence
  Description of Artificial Sequence: Synthetic oligonucleotide
  Antisense strand to SEQ ID NO: 92934
aucuaagacauguaugcuc

SEQ ID NO: 93016 - RNA, 19 nt, Artificial Sequence
  Description of Artificial Sequence: Synthetic oligonucleotide
  Sense strand starting at position 789 of SEQ ID NO: 1169
cuuagaugucagggugagu

SEQ ID NO: 93017 - RNA, 19 nt, Artificial Sequence
  Description of Artificial Sequence: Synthetic oligonucleotide
  Antisense strand to SEQ ID NO: 92936
acucacccugacaucuaag

SEQ ID NO: 93018 - RNA, 19 nt, Artificial Sequence
  Description of Artificial Sequence: Synthetic oligonucleotide
  Sense strand starting at position 871 of SEQ ID NO: 1169
uggucacauccaugcauaa

SEQ ID NO: 93019 - RNA, 19 nt, Artificial Sequence
  Description of Artificial Sequence: Synthetic oligonucleotide
  Antisense strand to SEQ ID NO: 92938
uuaugcauggaugugacca

SEQ ID NO: 93020 - RNA, 19 nt, Artificial Sequence
  Description of Artificial Sequence: Synthetic oligonucleotide
  Sense strand starting at position 944 of SEQ ID NO: 1169
cuaccugaacacugaguau

SEQ ID NO: 93021 - RNA, 19 nt, Artificial Sequence
  Description of Artificial Sequence: Synthetic oligonucleotide
  Antisense strand to SEQ ID NO: 92940
auacucaguguucagguag

SEQ ID NO: 93022 - RNA, 19 nt, Artificial Sequence
  Description of Artificial Sequence: Synthetic oligonucleotide
  Sense strand starting at position 2015 of SEQ ID NO: 1169
cuguuuguuccgaguggag

SEQ ID NO: 93023 - RNA, 19 nt, Artificial Sequence
  Description of Artificial Sequence: Synthetic oligonucleotide
  Antisense strand to SEQ ID NO: 92942
cuccacucggaacaaacag

SEQ ID NO: 93024 - RNA, 19 nt, Artificial Sequence
  Description of Artificial Sequence: Synthetic oligonucleotide
  Sense strand starting at position 2425 of SEQ ID NO: 1169
gaggcuucgagaggauaca

SEQ ID NO: 93025 - RNA, 19 nt, Artificial Sequence
  Description of Artificial Sequence: Synthetic oligonucleotide
  Antisense strand to SEQ ID NO: 92944
uguauccucucgaagccuc

SEQ ID NO: 93026 - RNA, 19 nt, Artificial Sequence
  Description of Artificial Sequence: Synthetic oligonucleotide
  Sense strand starting at position 2454 of SEQ ID NO: 1169
gugacacuacaaggugaua

SEQ ID NO: 93027 - RNA, 19 nt, Artificial Sequence
  Description of Artificial Sequence: Synthetic oligonucleotide
  Antisense strand to SEQ ID NO: 92946
uaucaccuuguagugucac

SEQ ID NO: 93028 - RNA, 19 nt, Artificial Sequence
  Description of Artificial Sequence: Synthetic oligonucleotide
  Sense strand starting at position 2506 of SEQ ID NO: 1169
acgagaauugaacgaaauu

SEQ ID NO: 93029 - RNA, 19 nt, Artificial Sequence
  Description of Artificial Sequence: Synthetic oligonucleotide
  Antisense strand to SEQ ID NO: 92948
aauuucguucaauucucgu

SEQ ID NO: 93030 - RNA, 19 nt, Artificial Sequence
  Description of Artificial Sequence: Synthetic oligonucleotide
  Sense strand starting at position 2549 of SEQ ID NO: 1169
acaauaucugucuguaaca

SEQ ID NO: 93031 - RNA, 19 nt, Artificial Sequence
  Description of Artificial Sequence: Synthetic oligonucleotide
  Antisense strand to SEQ ID NO: 92950
uguuacagacagauauugu

SEQ ID NO: 93032 - RNA, 19 nt, Artificial Sequence
  Description of Artificial Sequence: Synthetic oligonucleotide
  Sense strand starting at position 2560 of SEQ ID NO: 1169
cuguaacacuuuccaguaa

SEQ ID NO: 93033 - RNA, 19 nt, Artificial Sequence
  Description of Artificial Sequence: Synthetic oligonucleotide
  Antisense strand to SEQ ID NO: 92952
uuacuggaaaguguuacag

SEQ ID NO: 93034 - RNA, 19 nt, Artificial Sequence
  Description of Artificial Sequence: Synthetic oligonucleotide
  Sense strand starting at position 2613 of SEQ ID NO: 1169
gaaugucauugagcuccaa

SEQ ID NO: 93035 - RNA, 19 nt, Artificial Sequence
  Description of Artificial Sequence: Synthetic oligonucleotide
  Antisense strand to SEQ ID NO: 92954
uuggagcucaaugacauuc

SEQ ID NO: 93036 - RNA, 19 nt, Artificial Sequence
  Description of Artificial Sequence: Synthetic oligonucleotide
  Sense strand starting at position 2661 of SEQ ID NO: 1169
gaggaaugagaccguuaag

SEQ ID NO: 93037 - RNA, 19 nt, Artificial Sequence
  Description of Artificial Sequence: Synthetic oligonucleotide
  Antisense strand to SEQ ID NO: 92956
cuuaacggucucauuccuc

SEQ ID NO: 93038 - RNA, 19 nt, Artificial Sequence
  Description of Artificial Sequence: Synthetic oligonucleotide
  Sense strand starting at position 2664 of SEQ ID NO: 1169
gaaugagaccguuaagcag

SEQ ID NO: 93039 - RNA, 19 nt, Artificial Sequence
  Description of Artificial Sequence: Synthetic oligonucleotide
  Antisense strand to SEQ ID NO: 92958
cugcuuaacggucucauuc

SEQ ID NO: 93040 - RNA, 19 nt, Artificial Sequence
  Description of Artificial Sequence: Synthetic oligonucleotide
  Sense strand starting at position 2687 of SEQ ID NO: 1169
aagacaacgugggugaauu

SEQ ID NO: 93041 - RNA, 19 nt, Artificial Sequence
  Description of Artificial Sequence: Synthetic oligonucleotide
  Antisense strand to SEQ ID NO: 92960
aauucacccacguugucuu

SEQ ID NO: 93042 - RNA, 19 nt, Artificial Sequence
  Description of Artificial Sequence: Synthetic oligonucleotide
  Sense strand starting at position 2770 of SEQ ID NO: 1169
aggcuaaggaguugaacuu

SEQ ID NO: 93043 - RNA, 19 nt, Artificial Sequence
  Description of Artificial Sequence: Synthetic oligonucleotide
  Antisense strand to SEQ ID NO: 92962
aaguucaacuccuuagccu

SEQ ID NO: 93044 - RNA, 19 nt, Artificial Sequence
  Description of Artificial Sequence: Synthetic oligonucleotide
  Sense strand starting at position 2947 of SEQ ID NO: 1169
gagagaugccugcacuggu

SEQ ID NO: 93045 - RNA, 19 nt, Artificial Sequence
  Description of Artificial Sequence: Synthetic oligonucleotide
  Antisense strand to SEQ ID NO: 92964
accagugcaggcaucucuc

SEQ ID NO: 93046 - RNA, 19 nt, Artificial Sequence
  Description of Artificial Sequence: Synthetic oligonucleotide
  Sense strand starting at position 3105 of SEQ ID NO: 1169
ugcaaauaacaggguuauu

SEQ ID NO: 93047 - RNA, 19 nt, Artificial Sequence
  Description of Artificial Sequence: Synthetic oligonucleotide
  Antisense strand to SEQ ID NO: 92966
aauaacccuguuauuugca

SEQ ID NO: 93048 - RNA, 19 nt, Artificial Sequence
  Description of Artificial Sequence: Synthetic oligonucleotide
  Sense strand starting at position 3130 of SEQ ID NO: 1169
gcuaaacgauuugauagau

SEQ ID NO: 93049 - RNA, 19 nt, Artificial Sequence
  Description of Artificial Sequence: Synthetic oligonucleotide
  Antisense strand to SEQ ID NO: 92968
aucuaucaaaucguuuagc

SEQ ID NO: 93050 - RNA, 19 nt, Artificial Sequence
  Description of Artificial Sequence: Synthetic oligonucleotide
  Sense strand starting at position 3209 of SEQ ID NO: 1169
cagcauaggcaguauuaga

SEQ ID NO: 93051 - RNA, 19 nt, Artificial Sequence
  Description of Artificial Sequence: Synthetic oligonucleotide
  Antisense strand to SEQ ID NO: 92970
ucuaauacugccuaugcug

SEQ ID NO: 93052 - RNA, 19 nt, Artificial Sequence
  Description of Artificial Sequence: Synthetic oligonucleotide
  Sense strand starting at position 3303 of SEQ ID NO: 1169
aaggaagucucauugcuga

SEQ ID NO: 93053 - RNA, 19 nt, Artificial Sequence
  Description of Artificial Sequence: Synthetic oligonucleotide
  Antisense strand to SEQ ID NO: 92972
ucagcaaugagacuuccuu

SEQ ID NO: 93054 - RNA, 19 nt, Artificial Sequence
  Description of Artificial Sequence: Synthetic oligonucleotide
  Sense strand starting at position 3471 of SEQ ID NO: 1169
cugaucugcucccuaagaa

SEQ ID NO: 93055 - RNA, 19 nt, Artificial Sequence
  Description of Artificial Sequence: Synthetic oligonucleotide
  Antisense strand to SEQ ID NO: 92974
uucuuagggagcagaucag

SEQ ID NO: 93056 - RNA, 19 nt, Artificial Sequence
  Description of Artificial Sequence: Synthetic oligonucleotide
  Sense strand starting at position 3472 of SEQ ID NO: 1169
ugaucugcucccuaagaag

SEQ ID NO: 93057 - RNA, 19 nt, Artificial Sequence
  Description of Artificial Sequence: Synthetic oligonucleotide
  Antisense strand to SEQ ID NO: 92976
cuucuuagggagcagauca

SEQ ID NO: 93058 - RNA, 19 nt, Artificial Sequence
  Description of Artificial Sequence: Synthetic oligonucleotide
  Sense strand starting at position 3549 of SEQ ID NO: 1169
aguaucaauuuggagauga

SEQ ID NO: 93059 - RNA, 19 nt, Artificial Sequence
  Description of Artificial Sequence: Synthetic oligonucleotide
  Antisense strand to SEQ ID NO: 92978
ucaucuccaaauugauacu

SEQ ID NO: 93060 - RNA, 19 nt, Artificial Sequence
  Description of Artificial Sequence: Synthetic oligonucleotide
  Sense strand starting at position 3578 of SEQ ID NO: 1169
aggucagcccuuuaagaau

SEQ ID NO: 93061 - RNA, 19 nt, Artificial Sequence
  Description of Artificial Sequence: Synthetic oligonucleotide
  Antisense strand to SEQ ID NO: 92980
auucuuaaagggcugaccu

SEQ ID NO: 93062 - RNA, 19 nt, Artificial Sequence
  Description of Artificial Sequence: Synthetic oligonucleotide
  Sense strand starting at position 3584 of SEQ ID NO: 1169
gcccuuuaagaauggaaga

SEQ ID NO: 93063 - RNA, 19 nt, Artificial Sequence
  Description of Artificial Sequence: Synthetic oligonucleotide
  Antisense strand to SEQ ID NO: 92982
ucuuccauucuuaaagggc

SEQ ID NO: 93064 - RNA, 19 nt, Artificial Sequence
  Description of Artificial Sequence: Synthetic oligonucleotide
  Sense strand starting at position 3655 of SEQ ID NO: 1169
ugugaaugucaugauaguc

SEQ ID NO: 93065 - RNA, 19 nt, Artificial Sequence
  Description of Artificial Sequence: Synthetic oligonucleotide
  Antisense strand to SEQ ID NO: 92984
gacuaucaugacauucaca

SEQ ID NO: 93066 - RNA, 19 nt, Artificial Sequence
  Description of Artificial Sequence: Synthetic oligonucleotide
  Sense strand starting at position 3660 of SEQ ID NO: 1169
augucaugauagucaaggu

SEQ ID NO: 93067 - RNA, 19 nt, Artificial Sequence
  Description of Artificial Sequence: Synthetic oligonucleotide
  Antisense strand to SEQ ID NO: 92986
accuugacuaucaugacau

SEQ ID NO: 93068 - RNA, 19 nt, Artificial Sequence
  Description of Artificial Sequence: Synthetic oligonucleotide
  Sense strand starting at position 3664 of SEQ ID NO: 1169
caugauagucaagguguca

SEQ ID NO: 93069 - RNA, 19 nt, Artificial Sequence
  Description of Artificial Sequence: Synthetic oligonucleotide
  Antisense strand to SEQ ID NO: 92988
ugacaccuugacuaucaug

SEQ ID NO: 93070 - RNA, 19 nt, Artificial Sequence
  Description of Artificial Sequence: Synthetic oligonucleotide
  Sense strand starting at position 3677 of SEQ ID NO: 1169
gugucauuagaccaaggca

SEQ ID NO: 93071 - RNA, 19 nt, Artificial Sequence
  Description of Artificial Sequence: Synthetic oligonucleotide
  Antisense strand to SEQ ID NO: 92990
ugccuuggucuaaugacac

SEQ ID NO: 93072 - RNA, 19 nt, Artificial Sequence
  Description of Artificial Sequence: Synthetic oligonucleotide
  Sense strand starting at position 3767 of SEQ ID NO: 1169
aggcccuugccugauaauc

SEQ ID NO: 93073 - RNA, 19 nt, Artificial Sequence
  Description of Artificial Sequence: Synthetic oligonucleotide
  Antisense strand to SEQ ID NO: 92992
gauuaucaggcaagggccu

SEQ ID NO: 93074 - RNA, 19 nt, Artificial Sequence
  Description of Artificial Sequence: Synthetic oligonucleotide
  Sense strand starting at position 3900 of SEQ ID NO: 1169
caauaaguuucguuauuga

SEQ ID NO: 93075 - RNA, 19 nt, Artificial Sequence
  Description of Artificial Sequence: Synthetic oligonucleotide
  Antisense strand to SEQ ID NO: 92994
ucaauaacgaaacuuauug

SEQ ID NO: 93076 - RNA, 19 nt, Artificial Sequence
  Description of Artificial Sequence: Synthetic oligonucleotide
  Sense strand starting at position 3915 of SEQ ID NO: 1169
uugaauauuuaugacaggu

SEQ ID NO: 93077 - RNA, 19 nt, Artificial Sequence
  Description of Artificial Sequence: Synthetic oligonucleotide
  Antisense strand to SEQ ID NO: 92996
accugucauaaauauucaa

SEQ ID NO: 93078 - RNA, 19 nt, Artificial Sequence
  Description of Artificial Sequence: Synthetic oligonucleotide
  Sense strand starting at position 3917 of SEQ ID NO: 1169
gaauauuuaugacagguuu

SEQ ID NO: 93079 - RNA, 19 nt, Artificial Sequence
  Description of Artificial Sequence: Synthetic oligonucleotide
  Antisense strand to SEQ ID NO: 92998
aaaccugucauaaauauuc

SEQ ID NO: 93080 - RNA, 19 nt, Artificial Sequence
  Description of Artificial Sequence: Synthetic oligonucleotide
  Sense strand starting at position 3935 of SEQ ID NO: 1169
uuacaaugauuggcuuacu

SEQ ID NO: 93081 - RNA, 19 nt, Artificial Sequence
  Description of Artificial Sequence: Synthetic oligonucleotide
  Antisense strand to SEQ ID NO: 93000
aguaagccaaucauuguaa

SEQ ID NO: 93082 - RNA, 19 nt, Artificial Sequence
  Description of Artificial Sequence: Synthetic oligonucleotide
  Sense strand starting at position 3940 of SEQ ID NO: 1169
augauuggcuuacuugauu

SEQ ID NO: 93083 - RNA, 19 nt, Artificial Sequence
  Description of Artificial Sequence: Synthetic oligonucleotide
  Antisense strand to SEQ ID NO: 93002
aaucaaguaagccaaucau

SEQ ID NO: 93084 - RNA, 19 nt, Artificial Sequence
  Description of Artificial Sequence: Synthetic oligonucleotide
  Sense strand starting at position 67 of SEQ ID NO: 1170
ugaaauguuccauggcuac

SEQ ID NO: 93085 - RNA, 19 nt, Artificial Sequence
  Description of Artificial Sequence: Synthetic oligonucleotide
  Antisense strand to SEQ ID NO: 93004
guagccauggaacauuuca

SEQ ID NO: 93086 - RNA, 19 nt, Artificial Sequence
  Description of Artificial Sequence: Synthetic oligonucleotide
  Sense strand starting at position 324 of SEQ ID NO: 1170
uugccuugugcauagauaa

SEQ ID NO: 93087 - RNA, 19 nt, Artificial Sequence
  Description of Artificial Sequence: Synthetic oligonucleotide
  Antisense strand to SEQ ID NO: 93006
uuaucuaugcacaaggcaa

SEQ ID NO: 93088 - RNA, 19 nt, Artificial Sequence
  Description of Artificial Sequence: Synthetic oligonucleotide
  Sense strand starting at position 487 of SEQ ID NO: 1170
gcccuuaaacuauggaauu

SEQ ID NO: 93089 - RNA, 19 nt, Artificial Sequence
  Description of Artificial Sequence: Synthetic oligonucleotide
  Antisense strand to SEQ ID NO: 93008
aauuccauaguuuaagggc
